United States Patent Application Publication US 2012/0295819 A1 - sequence listing, part 3

SEQ ID NO: 65727 - DNA, 21 bp, Artificial Sequence
  Synthetic
caacucccagatuagccccat

SEQ ID NO: 65728 - DNA, 24 bp, Artificial Sequence
  Synthetic
aaactctgtuccacaaagctcuga

SEQ ID NO: 65729 - DNA, 28 bp, Artificial Sequence
  Synthetic
acctgttgttaaaauggaaatgaaggua

SEQ ID NO: 65730 - DNA, 21 bp, Artificial Sequence
  Synthetic
gccactcuacaggttgctguc

SEQ ID NO: 65731 - DNA, 28 bp, Artificial Sequence
  Synthetic
gttgggtatagucaaaatcacctctuca

SEQ ID NO: 65732 - DNA, 27 bp, Artificial Sequence
  Synthetic
ggaggaggaguttaatcatauggaagg

SEQ ID NO: 65733 - DNA, 22 bp, Artificial Sequence
  Synthetic
aatccaccccagguttccatut

SEQ ID NO: 65734 - DNA, 23 bp, Artificial Sequence
  Synthetic
ccccagaagcugaaaatgtugga

SEQ ID NO: 65735 - DNA, 18 bp, Artificial Sequence
  Synthetic
cctgauggaggacugcga

SEQ ID NO: 65736 - DNA, 17 bp, Artificial Sequence
  Synthetic
ggcccgcucctaccauc

SEQ ID NO: 65737 - DNA, 18 bp, Artificial Sequence
  Synthetic
aacgcucggguggagaac

SEQ ID NO: 65738 - DNA, 19 bp, Artificial Sequence
  Synthetic
cgauacccaaccggugaca

SEQ ID NO: 65739 - DNA, 22 bp, Artificial Sequence
  Synthetic
gtctacacucaccaccaaccuc

SEQ ID NO: 65740 - DNA, 24 bp, Artificial Sequence
  Synthetic
catccttgtuccctatcgatgugt

SEQ ID NO: 65741 - DNA, 17 bp, Artificial Sequence
  Synthetic
cggcacucggagcagut

SEQ ID NO: 65742 - DNA, 27 bp, Artificial Sequence
  Synthetic
gttatttgatgugaactttgtgccugt

SEQ ID NO: 65743 - DNA, 28 bp, Artificial Sequence
  Synthetic
cgtaactatacacaauggatccagugaa

SEQ ID NO: 65744 - DNA, 22 bp, Artificial Sequence
  Synthetic
cctcutaaacccaaugcccaga

SEQ ID NO: 65745 - DNA, 21 bp, Artificial Sequence
  Synthetic
gtcccuaggaggaaccucagt

SEQ ID NO: 65746 - DNA, 21 bp, Artificial Sequence
  Synthetic
gttgatgctcugcacatcguc

SEQ ID NO: 65747 - DNA, 19 bp, Artificial Sequence
  Synthetic
gtguggccagcgtaatucc

SEQ ID NO: 65748 - DNA, 21 bp, Artificial Sequence
  Synthetic
ggccactgucttgggttttug

SEQ ID NO: 65749 - DNA, 26 bp, Artificial Sequence
  Synthetic
catccataaaucccacagatctggua

SEQ ID NO: 65750 - DNA, 29 bp, Artificial Sequence
  Synthetic
atcttaatgagucatcctgttttgtugga

SEQ ID NO: 65751 - DNA, 23 bp, Artificial Sequence
  Synthetic
tcttgcctcauctgttgccttut

SEQ ID NO: 65752 - DNA, 25 bp, Artificial Sequence
  Synthetic
tccctgatacugtggttgtgaguaa

SEQ ID NO: 65753 - DNA, 26 bp, Artificial Sequence
  Synthetic
gtagaatccatcucgggtttcatcuc

SEQ ID NO: 65754 - DNA, 20 bp, Artificial Sequence
  Synthetic
gagtggaucagcggcatgua

SEQ ID NO: 65755 - DNA, 21 bp, Artificial Sequence
  Synthetic
ctgcttgcucatttgccugac

SEQ ID NO: 65756 - DNA, 19 bp, Artificial Sequence
  Synthetic
tggctccucgatgcccuaa

SEQ ID NO: 65757 - DNA, 27 bp, Artificial Sequence
  Synthetic
ggaaacttgggugattcttgtgttuat

SEQ ID NO: 65758 - DNA, 28 bp, Artificial Sequence
  Synthetic
atgtaagtattgacugtacaccctcuct

SEQ ID NO: 65759 - DNA, 28 bp, Artificial Sequence
  Synthetic
gacactgtagccuttacgaatgtacuaa

SEQ ID NO: 65760 - DNA, 23 bp, Artificial Sequence
  Synthetic
gcagtatcuaacagcagcuggaa

SEQ ID NO: 65761 - DNA, 26 bp, Artificial Sequence
  Synthetic
ggtaacactuttcctgtttcuagcct

SEQ ID NO: 65762 - DNA, 25 bp, Artificial Sequence
  Synthetic
cttcaaucacagaatcacaguccca

SEQ ID NO: 65763 - DNA, 28 bp, Artificial Sequence
  Synthetic
ggagggttgautgatggactauagaaaa

SEQ ID NO: 65764 - DNA, 28 bp, Artificial Sequence
  Synthetic
actgtcactgucaatggtaatuacaact

SEQ ID NO: 65765 - DNA, 24 bp, Artificial Sequence
  Synthetic
gugatacctttucagacagccgat

SEQ ID NO: 65766 - DNA, 21 bp, Artificial Sequence
  Synthetic
tcatcccauggtgcctgacua

SEQ ID NO: 65767 - DNA, 26 bp, Artificial Sequence
  Synthetic
atttatcagtttugcccgatctccut

SEQ ID NO: 65768 - DNA, 22 bp, Artificial Sequence
  Synthetic
acactgtgtccuggaacccaua

SEQ ID NO: 65769 - DNA, 24 bp, Artificial Sequence
  Synthetic
ggctgagtucaggtcatagaugaa

SEQ ID NO: 65770 - DNA, 22 bp, Artificial Sequence
  Synthetic
gctagagagcuctgaggacuga

SEQ ID NO: 65771 - DNA, 22 bp, Artificial Sequence
  Synthetic
ctacaggctuacctctccgtug

SEQ ID NO: 65772 - DNA, 22 bp, Artificial Sequence
  Synthetic
gcutgttggtgucccaggaagt

SEQ ID NO: 65773 - DNA, 23 bp, Artificial Sequence
  Synthetic
tgcagcagaagcugtaaaacuga

SEQ ID NO: 65774 - DNA, 28 bp, Artificial Sequence
  Synthetic
ggaaagtgtugagataaaacaugaagca

SEQ ID NO: 65775 - DNA, 24 bp, Artificial Sequence
  Synthetic
gatctccacccaguttgacagtua

SEQ ID NO: 65776 - DNA, 18 bp, Artificial Sequence
  Synthetic
tcgccgugcgaacaguag

SEQ ID NO: 65777 - DNA, 22 bp, Artificial Sequence
  Synthetic
tctacaaaggucacctgtucgg

SEQ ID NO: 65778 - DNA, 20 bp, Artificial Sequence
  Synthetic
gtgcttgccgutcctctgua

SEQ ID NO: 65779 - DNA, 27 bp, Artificial Sequence
  Synthetic
tggaaattctaguttgggcatgtguag

SEQ ID NO: 65780 - DNA, 25 bp, Artificial Sequence
  Synthetic
tccgugaggcagagatttaucaaac

SEQ ID NO: 65781 - DNA, 29 bp, Artificial Sequence
  Synthetic
tcgacttaatggguctaatctacaugaga

SEQ ID NO: 65782 - DNA, 23 bp, Artificial Sequence
  Synthetic
cagaccaauggaaaatggugcat

SEQ ID NO: 65783 - DNA, 21 bp, Artificial Sequence
  Synthetic
aggagagtucaggcaaagcug

SEQ ID NO: 65784 - DNA, 32 bp, Artificial Sequence
  Synthetic
ttuatgcttgatttcctuaacaagaagagaga

SEQ ID NO: 65785 - DNA, 26 bp, Artificial Sequence
  Synthetic
ggtaggtgtutcttggaaatguggaa

SEQ ID NO: 65786 - DNA, 18 bp, Artificial Sequence
  Synthetic
ggatgugcgcctcctugt

SEQ ID NO: 65787 - DNA, 21 bp, Artificial Sequence
  Synthetic
ccactatcuttggctgugggt

SEQ ID NO: 65788 - DNA, 21 bp, Artificial Sequence
  Synthetic
gccaggugagattccagtucc

SEQ ID NO: 65789 - DNA, 26 bp, Artificial Sequence
  Synthetic
gccttctcaguccttcttacattguc

SEQ ID NO: 65790 - DNA, 20 bp, Artificial Sequence
  Synthetic
actacacgcccucaccguat

SEQ ID NO: 65791 - DNA, 21 bp, Artificial Sequence
  Synthetic
agaagggagcucagcattgug

SEQ ID NO: 65792 - DNA, 21 bp, Artificial Sequence
  Synthetic
gagctgguaaacctggcguat

SEQ ID NO: 65793 - DNA, 22 bp, Artificial Sequence
  Synthetic
acaaagcctutctccacacuga

SEQ ID NO: 65794 - DNA, 21 bp, Artificial Sequence
  Synthetic
gccuacguagagccaaaggaa

SEQ ID NO: 65795 - DNA, 24 bp, Artificial Sequence
  Synthetic
tccttttcacaguagcgatcctug

SEQ ID NO: 65796 - DNA, 20 bp, Artificial Sequence
  Synthetic
gagggtttgugacaggccua

SEQ ID NO: 65797 - DNA, 22 bp, Artificial Sequence
  Synthetic
tgagagagggcuccaaaaguca

SEQ ID NO: 65798 - DNA, 22 bp, Artificial Sequence
  Synthetic
caacaagagguttgcccgacua

SEQ ID NO: 65799 - DNA, 27 bp, Artificial Sequence
  Synthetic
cgcacaaaugtttcagaactucaaact

SEQ ID NO: 65800 - DNA, 25 bp, Artificial Sequence
  Synthetic
actcttggcutgtattttgggugaa

SEQ ID NO: 65801 - DNA, 25 bp, Artificial Sequence
  Synthetic
catguagacggatcactuaagagca

SEQ ID NO: 65802 - DNA, 25 bp, Artificial Sequence
  Synthetic
gctcatttctaucgatggctctgut

SEQ ID NO: 65803 - DNA, 29 bp, Artificial Sequence
  Synthetic
ggactgtcatgtutgtactttgtttgaut

SEQ ID NO: 65804 - DNA, 26 bp, Artificial Sequence
  Synthetic
cctctaccagaaaagugatactugct

SEQ ID NO: 65805 - DNA, 28 bp, Artificial Sequence
  Synthetic
cctgcatttctutattttggtaacguca

SEQ ID NO: 65806 - DNA, 28 bp, Artificial Sequence
  Synthetic
aggtatttacauaccggatcatcuggat

SEQ ID NO: 65807 - DNA, 24 bp, Artificial Sequence
  Synthetic
ctgtaacatttcuggtgtgcagut

SEQ ID NO: 65808 - DNA, 23 bp, Artificial Sequence
  Synthetic
gccagatcauggtagcttgcuaa

SEQ ID NO: 65809 - DNA, 27 bp, Artificial Sequence
  Synthetic
gatgaggatgtautcagacttggtcuc

SEQ ID NO: 65810 - DNA, 20 bp, Artificial Sequence
  Synthetic
ggaaggacgcacccuacuac

SEQ ID NO: 65811 - DNA, 22 bp, Artificial Sequence
  Synthetic
ctatugcaagagccagcucaga

SEQ ID NO: 65812 - DNA, 17 bp, Artificial Sequence
  Synthetic
gagcgcaucgcggagua

SEQ ID NO: 65813 - DNA, 22 bp, Artificial Sequence
  Synthetic
cctcatuaacaagggagccugt

SEQ ID NO: 65814 - DNA, 23 bp, Artificial Sequence
  Synthetic
tcaggaccuaggagctgagatuc

SEQ ID NO: 65815 - DNA, 18 bp, Artificial Sequence
  Synthetic
gccgcugattgggucgat

SEQ ID NO: 65816 - DNA, 21 bp, Artificial Sequence
  Synthetic
ccaaaccaccuctgccugaag

SEQ ID NO: 65817 - DNA, 25 bp, Artificial Sequence
  Synthetic
catccttuccgagaagacatcctut

SEQ ID NO: 65818 - DNA, 21 bp, Artificial Sequence
  Synthetic
caagttcugggagctgcctua

SEQ ID NO: 65819 - DNA, 25 bp, Artificial Sequence
  Synthetic
cacagtaaacgutgttctgctctuc

SEQ ID NO: 65820 - DNA, 23 bp, Artificial Sequence
  Synthetic
ttttcgaagcacugtctgtucct

SEQ ID NO: 65821 - DNA, 21 bp, Artificial Sequence
  Synthetic
catactgcucgatgguggaca

SEQ ID NO: 65822 - DNA, 22 bp, Artificial Sequence
  Synthetic
ggagagaagaugctcacagucc

SEQ ID NO: 65823 - DNA, 21 bp, Artificial Sequence
  Synthetic
ggagaaacucactggctugct

SEQ ID NO: 65824 - DNA, 21 bp, Artificial Sequence
  Synthetic
cctgagccacucctcactuct

SEQ ID NO: 65825 - DNA, 27 bp, Artificial Sequence
  Synthetic
gactctcactcugactactgtcattuc

SEQ ID NO: 65826 - DNA, 21 bp, Artificial Sequence
  Synthetic
atgacatuccccaagcaugga

SEQ ID NO: 65827 - DNA, 25 bp, Artificial Sequence
  Synthetic
cgcagacggcaugtatgataaacua

SEQ ID NO: 65828 - DNA, 20 bp, Artificial Sequence
  Synthetic
gacaccaccgagcugatuca

SEQ ID NO: 65829 - DNA, 22 bp, Artificial Sequence
  Synthetic
gggatgaggaugcattgtggut

SEQ ID NO: 65830 - DNA, 17 bp, Artificial Sequence
  Synthetic
caaguccgccggcucat

SEQ ID NO: 65831 - DNA, 22 bp, Artificial Sequence
  Synthetic
ctcagctgtcutcggttctcuc

SEQ ID NO: 65832 - DNA, 21 bp, Artificial Sequence
  Synthetic
ctcggcucctgtttgaugaag

SEQ ID NO: 65833 - DNA, 17 bp, Artificial Sequence
  Synthetic
gacgugcgggaccugaa

SEQ ID NO: 65834 - DNA, 21 bp, Artificial Sequence
  Synthetic
cttcctcagcugcagtcagua

SEQ ID NO: 65835 - DNA, 22 bp, Artificial Sequence
  Synthetic
agacagcccaucaataaugcca

SEQ ID NO: 65836 - DNA, 25 bp, Artificial Sequence
  Synthetic
gcagtccgtutttcattcacaauca

SEQ ID NO: 65837 - DNA, 21 bp, Artificial Sequence
  Synthetic
gcctcccagcucaagcatuaa

SEQ ID NO: 65838 - DNA, 20 bp, Artificial Sequence
  Synthetic
aggtucccacatccucaggt

SEQ ID NO: 65839 - DNA, 24 bp, Artificial Sequence
  Synthetic
acccagguacatctttgaguccat

SEQ ID NO: 65840 - DNA, 20 bp, Artificial Sequence
  Synthetic
cccactacugggtccttcug

SEQ ID NO: 65841 - DNA, 23 bp, Artificial Sequence
  Synthetic
tctccaccutcttcattgcugag

SEQ ID NO: 65842 - DNA, 21 bp, Artificial Sequence
  Synthetic
cctggaagcutaggtcugact

SEQ ID NO: 65843 - DNA, 25 bp, Artificial Sequence
  Synthetic
catgtctucaagacgatgttucagg

SEQ ID NO: 65844 - DNA, 18 bp, Artificial Sequence
  Synthetic
cucatccgcuacgccaac

SEQ ID NO: 65845 - DNA, 20 bp, Artificial Sequence
  Synthetic
gactttggcuccacccauct

SEQ ID NO: 65846 - DNA, 21 bp, Artificial Sequence
  Synthetic
aggatcguctcaaccttugcc

SEQ ID NO: 65847 - DNA, 24 bp, Artificial Sequence
  Synthetic
gttcttcagtguggacagctguat

SEQ ID NO: 65848 - DNA, 29 bp, Artificial Sequence
  Synthetic
cacagtuacagcaaatagaaacaugacaa

SEQ ID NO: 65849 - DNA, 23 bp, Artificial Sequence
  Synthetic
cctgttgcuatggagacuaccaa

SEQ ID NO: 65850 - DNA, 25 bp, Artificial Sequence
  Synthetic
gcagcagcugattttuagagcaaac

SEQ ID NO: 65851 - DNA, 24 bp, Artificial Sequence
  Synthetic
gggtaccugagaatttgtaggcut

SEQ ID NO: 65852 - DNA, 28 bp, Artificial Sequence
  Synthetic
gcctgattcgagaucctgaaacaatuaa

SEQ ID NO: 65853 - DNA, 30 bp, Artificial Sequence
  Synthetic
gcaaggcauaatgatatauaggaagcaaag

SEQ ID NO: 65854 - DNA, 22 bp, Artificial Sequence
  Synthetic
ccacacacagccuacttuccaa

SEQ ID NO: 65855 - DNA, 23 bp, Artificial Sequence
  Synthetic
aatagacgacugaggauggcaac

SEQ ID NO: 65856 - DNA, 28 bp, Artificial Sequence
  Synthetic
aataatgagcaccugattgattgacuct

SEQ ID NO: 65857 - DNA, 23 bp, Artificial Sequence
  Synthetic
aaagagccugagtgaatccctuc

SEQ ID NO: 65858 - DNA, 21 bp, Artificial Sequence
  Synthetic
cggagguacauccccaagaac

SEQ ID NO: 65859 - DNA, 22 bp, Artificial Sequence
  Synthetic
gctccgtuacactttccauccc

SEQ ID NO: 65860 - DNA, 21 bp, Artificial Sequence
  Synthetic
ccatctguggcttcctaccut

SEQ ID NO: 65861 - DNA, 24 bp, Artificial Sequence
  Synthetic
ccgcttccagaucttcttgaugat

SEQ ID NO: 65862 - DNA, 24 bp, Artificial Sequence
  Synthetic
ggccagccaauagtctatagcuac

SEQ ID NO: 65863 - DNA, 26 bp, Artificial Sequence
  Synthetic
gcccatcugaagcttaaacaaaagut

SEQ ID NO: 65864 - DNA, 28 bp, Artificial Sequence
  Synthetic
ccacggaaauagagaaggauagaaacaa

SEQ ID NO: 65865 - DNA, 28 bp, Artificial Sequence
  Synthetic
gttacctttcacguttctgtttgctuat

SEQ ID NO: 65866 - DNA, 23 bp, Artificial Sequence
  Synthetic
ggcttgcttutgtttctggguaa

SEQ ID NO: 65867 - DNA, 28 bp, Artificial Sequence
  Synthetic
gcattgtaccuggacagacttctatuaa

SEQ ID NO: 65868 - DNA, 23 bp, Artificial Sequence
  Synthetic
gugagaaagagagcagucccaaa

SEQ ID NO: 65869 - DNA, 28 bp, Artificial Sequence
  Synthetic
tcctatacaaaaucctccaaggcaaaug

SEQ ID NO: 65870 - DNA, 32 bp, Artificial Sequence
  Synthetic
accattaaccctautaaaatttcatggtucct

SEQ ID NO: 65871 - DNA, 28 bp, Artificial Sequence
  Synthetic
acactgcattcugcccaaaatatctaut

SEQ ID NO: 65872 - DNA, 22 bp, Artificial Sequence
  Synthetic
gtggttcaacutcaggctcuca

SEQ ID NO: 65873 - DNA, 23 bp, Artificial Sequence
  Synthetic
cgggacctgguaggtactgaaua

SEQ ID NO: 65874 - DNA, 24 bp, Artificial Sequence
  Synthetic
ctgatggaatcugtgagccttuct

SEQ ID NO: 65875 - DNA, 27 bp, Artificial Sequence
  Synthetic
tccaaaggaagaucccatattttgcut

SEQ ID NO: 65876 - DNA, 28 bp, Artificial Sequence
  Synthetic
gttttgttctguggatactcaattugct

SEQ ID NO: 65877 - DNA, 25 bp, Artificial Sequence
  Synthetic
gagaaaatctttgugccacatccuc

SEQ ID NO: 65878 - DNA, 23 bp, Artificial Sequence
  Synthetic
gtttcttctccutgctcttgcug

SEQ ID NO: 65879 - DNA, 22 bp, Artificial Sequence
  Synthetic
cctgggtcuctcaagctttugt

SEQ ID NO: 65880 - DNA, 21 bp, Artificial Sequence
  Synthetic
ggaggtccuttgggtccuaca

SEQ ID NO: 65881 - DNA, 26 bp, Artificial Sequence
  Synthetic
tcggcttaaucctgtgaatgttucat

SEQ ID NO: 65882 - DNA, 28 bp, Artificial Sequence
  Synthetic
tctggcctgatauttgactacagtagua

SEQ ID NO: 65883 - DNA, 23 bp, Artificial Sequence
  Synthetic
tcatgttugggaaggatgtcugg

SEQ ID NO: 65884 - DNA, 20 bp, Artificial Sequence
  Synthetic
ggatgctgagucccgtgaug

SEQ ID NO: 65885 - DNA, 28 bp, Artificial Sequence
  Synthetic
agggacattacautacaggcaaattcut

SEQ ID NO: 65886 - DNA, 21 bp, Artificial Sequence
  Synthetic
ccaggccucagaagacgauag

SEQ ID NO: 65887 - DNA, 21 bp, Artificial Sequence
  Synthetic
cacaacugacaccaacaccug

SEQ ID NO: 65888 - DNA, 27 bp, Artificial Sequence
  Synthetic
cctctccattggauttaggaaagctua

SEQ ID NO: 65889 - DNA, 21 bp, Artificial Sequence
  Synthetic
catccatgaugctctccugct

SEQ ID NO: 65890 - DNA, 21 bp, Artificial Sequence
  Synthetic
gctataauggcagcggtgcua

SEQ ID NO: 65891 - DNA, 23 bp, Artificial Sequence
  Synthetic
agcaattcccaaccucctcttug

SEQ ID NO: 65892 - DNA, 24 bp, Artificial Sequence
  Synthetic
ctttctctccutttgcaccttugt

SEQ ID NO: 65893 - DNA, 28 bp, Artificial Sequence
  Synthetic
gctaagcccaaaucaagtttcaattgut

SEQ ID NO: 65894 - DNA, 21 bp, Artificial Sequence
  Synthetic
gcatgtccaguccagggaauc

SEQ ID NO: 65895 - DNA, 21 bp, Artificial Sequence
  Synthetic
ccugaugaccccaaacaccaa

SEQ ID NO: 65896 - DNA, 26 bp, Artificial Sequence
  Synthetic
cacaaaggatucagagacctactgua

SEQ ID NO: 65897 - DNA, 20 bp, Artificial Sequence
  Synthetic
acaaggucaacagcctgucc

SEQ ID NO: 65898 - DNA, 19 bp, Artificial Sequence
  Synthetic
gtgagcuccgcgttcauct

SEQ ID NO: 65899 - DNA, 23 bp, Artificial Sequence
  Synthetic
gtctaggagugccagctctttut

SEQ ID NO: 65900 - DNA, 21 bp, Artificial Sequence
  Synthetic
agggaggacutctgguacagg

SEQ ID NO: 65901 - DNA, 22 bp, Artificial Sequence
  Synthetic
acctgggcaaguccaacaatut

SEQ ID NO: 65902 - DNA, 22 bp, Artificial Sequence
  Synthetic
gtaggagcaagcgagugatugt

SEQ ID NO: 65903 - DNA, 21 bp, Artificial Sequence
  Synthetic
gcagcaggugtactacuccat

SEQ ID NO: 65904 - DNA, 23 bp, Artificial Sequence
  Synthetic
ggugacuagcaaagcccaaaaga

SEQ ID NO: 65905 - DNA, 21 bp, Artificial Sequence
  Synthetic
caagccaggagucugagaacc

SEQ ID NO: 65906 - DNA, 18 bp, Artificial Sequence
  Synthetic
gcgtguctctgcguccag

SEQ ID NO: 65907 - DNA, 19 bp, Artificial Sequence
  Synthetic
cctgacugtctgccugcat

SEQ ID NO: 65908 - DNA, 21 bp, Artificial Sequence
  Synthetic
tttgttcucccgctugaaggt

SEQ ID NO: 65909 - DNA, 20 bp, Artificial Sequence
  Synthetic
ccugagacagacccuggaca

SEQ ID NO: 65910 - DNA, 23 bp, Artificial Sequence
  Synthetic
cagagtccucctgtgttgucaaa

SEQ ID NO: 65911 - DNA, 20 bp, Artificial Sequence
  Synthetic
gtccttuccaaggccaacuc

SEQ ID NO: 65912 - DNA, 21 bp, Artificial Sequence
  Synthetic
gcctgggucaaggtcagtaug

SEQ ID NO: 65913 - DNA, 24 bp, Artificial Sequence
  Synthetic
tggaggaugaggaggagatgaaug

SEQ ID NO: 65914 - DNA, 24 bp, Artificial Sequence
  Synthetic
cacaaacaugtggtggtugaagaa

SEQ ID NO: 65915 - DNA, 18 bp, Artificial Sequence
  Synthetic
ggcucaggcacaguggac

SEQ ID NO: 65916 - DNA, 23 bp, Artificial Sequence
  Synthetic
guggagcaagaugaggaagaaga

SEQ ID NO: 65917 - DNA, 29 bp, Artificial Sequence
  Synthetic
ccacactggcuttgagaataauaaaacaa

SEQ ID NO: 65918 - DNA, 25 bp, Artificial Sequence
  Synthetic
gtcttguctttttggauagggcagt

SEQ ID NO: 65919 - DNA, 28 bp, Artificial Sequence
  Synthetic
gctgttgctugggattatttctgaatut

SEQ ID NO: 65920 - DNA, 26 bp, Artificial Sequence
  Synthetic
atcagtgcctugtttatctcatgaut

SEQ ID NO: 65921 - DNA, 27 bp, Artificial Sequence
  Synthetic
agtacagagagtucacatttgcacaut

SEQ ID NO: 65922 - DNA, 25 bp, Artificial Sequence
  Synthetic
cctttaccttuagaagggcaugact

SEQ ID NO: 65923 - DNA, 26 bp, Artificial Sequence
  Synthetic
caccaaaauagattggagcaugcaat

SEQ ID NO: 65924 - DNA, 26 bp, Artificial Sequence
  Synthetic
ccugaaaaattccaugaaggagaacc

SEQ ID NO: 65925 - DNA, 25 bp, Artificial Sequence
  Synthetic
acagaagctuaccaccaagaugaac

SEQ ID NO: 65926 - DNA, 23 bp, Artificial Sequence
  Synthetic
gcctgaatcgugttttctgtuga

SEQ ID NO: 65927 - DNA, 20 bp, Artificial Sequence
  Synthetic
aagctgcaaaucaccuccga

SEQ ID NO: 65928 - DNA, 20 bp, Artificial Sequence
  Synthetic
gacacccgacacucctcaut

SEQ ID NO: 65929 - DNA, 28 bp, Artificial Sequence
  Synthetic
ggaacctcttccutatttttccctttuc

SEQ ID NO: 65930 - DNA, 21 bp, Artificial Sequence
  Synthetic
atgaccagcaccaacugugaa

SEQ ID NO: 65931 - DNA, 21 bp, Artificial Sequence
  Synthetic
cctgtgaacagugtcccaucc

SEQ ID NO: 65932 - DNA, 22 bp, Artificial Sequence
  Synthetic
cactggaaacucccaaaggugt

SEQ ID NO: 65933 - DNA, 26 bp, Artificial Sequence
  Synthetic
ccgaccaaaucctatcaccgttauat

SEQ ID NO: 65934 - DNA, 23 bp, Artificial Sequence
  Synthetic
ggaggatguccacttacatgugt

SEQ ID NO: 65935 - DNA, 28 bp, Artificial Sequence
  Synthetic
cctgatgctttugtgtttgtatatggua

SEQ ID NO: 65936 - DNA, 23 bp, Artificial Sequence
  Synthetic
caaaaagtccaugctgggaugat

SEQ ID NO: 65937 - DNA, 21 bp, Artificial Sequence
  Synthetic
gguactgaggaaugcgaggag

SEQ ID NO: 65938 - DNA, 25 bp, Artificial Sequence
  Synthetic
tgtuaacacacaggccattttuaca

SEQ ID NO: 65939 - DNA, 28 bp, Artificial Sequence
  Synthetic
gcaccctagaaautctacacaaacuact

SEQ ID NO: 65940 - DNA, 20 bp, Artificial Sequence
  Synthetic
gtctctuccggcatgggtua

SEQ ID NO: 65941 - DNA, 22 bp, Artificial Sequence
  Synthetic
atgugagaaaaacccctgugct

SEQ ID NO: 65942 - DNA, 24 bp, Artificial Sequence
  Synthetic
catctguaaaggtcacuggacact

SEQ ID NO: 65943 - DNA, 25 bp, Artificial Sequence
  Synthetic
ccagaaaggauacatagggacucac

SEQ ID NO: 65944 - DNA, 21 bp, Artificial Sequence
  Synthetic
gactggcuctggtttcctuca

SEQ ID NO: 65945 - DNA, 17 bp, Artificial Sequence
  Synthetic
cggcaucatgcgucgag

SEQ ID NO: 65946 - DNA, 17 bp, Artificial Sequence
  Synthetic
gggaguagctcgcugga

SEQ ID NO: 65947 - DNA, 21 bp, Artificial Sequence
  Synthetic
gggtgatgggugtatccctua

SEQ ID NO: 65948 - DNA, 20 bp, Artificial Sequence
  Synthetic
ggcacccugtccagtcuaac

SEQ ID NO: 65949 - DNA, 19 bp, Artificial Sequence
  Synthetic
acucggagagggaccucaa

SEQ ID NO: 65950 - DNA, 24 bp, Artificial Sequence
  Synthetic
gcttcacuctgagcauaacaagca

SEQ ID NO: 65951 - DNA, 22 bp, Artificial Sequence
  Synthetic
aagtgtgaaccugaagggtguc

SEQ ID NO: 65952 - DNA, 17 bp, Artificial Sequence
  Synthetic
gugctcagugggccagt

SEQ ID NO: 65953 - DNA, 17 bp, Artificial Sequence
  Synthetic
ggcugcccagccatcuc

SEQ ID NO: 65954 - DNA, 26 bp, Artificial Sequence
  Synthetic
atgaagtacaucttcttgccaauggt

SEQ ID NO: 65955 - DNA, 20 bp, Artificial Sequence
  Synthetic
ctccttcccgugtcccaauc

SEQ ID NO: 65956 - DNA, 23 bp, Artificial Sequence
  Synthetic
aggaccaagucgaugaggaagaa

SEQ ID NO: 65957 - DNA, 26 bp, Artificial Sequence
  Synthetic
tgtaacttgtccuctctctcttccug

SEQ ID NO: 65958 - DNA, 23 bp, Artificial Sequence
  Synthetic
gcatcatuggccagatccaucaa

SEQ ID NO: 65959 - DNA, 23 bp, Artificial Sequence
  Synthetic
gtcttgccucctgtggtcattua

SEQ ID NO: 65960 - DNA, 22 bp, Artificial Sequence
  Synthetic
gtctgacuggaaggtgcugaag

SEQ ID NO: 65961 - DNA, 20 bp, Artificial Sequence
  Synthetic
agaggcucgcagtctttugg

SEQ ID NO: 65962 - DNA, 19 bp, Artificial Sequence
  Synthetic
ccutgtccatcugcagcgt

SEQ ID NO: 65963 - DNA, 20 bp, Artificial Sequence
  Synthetic
ttccccaaggaguccugaga

SEQ ID NO: 65964 - DNA, 19 bp, Artificial Sequence
  Synthetic
caggcuccacgaaguccat

SEQ ID NO: 65965 - DNA, 17 bp, Artificial Sequence
  Synthetic
gctgcaggccguggtua

SEQ ID NO: 65966 - DNA, 23 bp, Artificial Sequence
  Synthetic
cgaagucccacgtguaaagaaca

SEQ ID NO: 65967 - DNA, 19 bp, Artificial Sequence
  Synthetic
tccccacaggugaguacct

SEQ ID NO: 65968 - DNA, 27 bp, Artificial Sequence
  Synthetic
gattttgcaagaauctcgtggaaaugt

SEQ ID NO: 65969 - DNA, 25 bp, Artificial Sequence
  Synthetic
gctccttcttguttgctgatgguaa

SEQ ID NO: 65970 - DNA, 23 bp, Artificial Sequence
  Synthetic
tggtacctucccagcataaugga

SEQ ID NO: 65971 - DNA, 25 bp, Artificial Sequence
  Synthetic
tctctgatucaagccctacttguct

SEQ ID NO: 65972 - DNA, 26 bp, Artificial Sequence
  Synthetic
ccttaactagacagccucctacccua

SEQ ID NO: 65973 - DNA, 26 bp, Artificial Sequence
  Synthetic
ggatcctggauatagctggattugag

SEQ ID NO: 65974 - DNA, 22 bp, Artificial Sequence
  Synthetic
gtucccagacaggugagcaaat

SEQ ID NO: 65975 - DNA, 24 bp, Artificial Sequence
  Synthetic
aatagaggcaggagguagacucag

SEQ ID NO: 65976 - DNA, 28 bp, Artificial Sequence
  Synthetic
aagaaagtcaguaaagtcaaggtcucac

SEQ ID NO: 65977 - DNA, 20 bp, Artificial Sequence
  Synthetic
ggcagtugacgggcatguat

SEQ ID NO: 65978 - DNA, 23 bp, Artificial Sequence
  Synthetic
ggagatgggugggaaatugaagt

SEQ ID NO: 65979 - DNA, 22 bp, Artificial Sequence
  Synthetic
agctgcctcuttactgactgug

SEQ ID NO: 65980 - DNA, 19 bp, Artificial Sequence
  Synthetic
tcccauacccgtccgguaa

SEQ ID NO: 65981 - DNA, 22 bp, Artificial Sequence
  Synthetic
acatcuccaaacaccucaccag

SEQ ID NO: 65982 - DNA, 19 bp, Artificial Sequence
  Synthetic
gacttguccacccggagut

SEQ ID NO: 65983 - DNA, 20 bp, Artificial Sequence
  Synthetic
gcggaatggugtagagcuca

SEQ ID NO: 65984 - DNA, 25 bp, Artificial Sequence
  Synthetic
catgaaggcaggaugagaauggaat

SEQ ID NO: 65985 - DNA, 23 bp, Artificial Sequence
  Synthetic
cttacttcuccccctcctctgut

SEQ ID NO: 65986 - DNA, 23 bp, Artificial Sequence
  Synthetic
gggactguagatgggugaaaaga

SEQ ID NO: 65987 - DNA, 22 bp, Artificial Sequence
  Synthetic
gggactgacuttctgctctugt

SEQ ID NO: 65988 - DNA, 18 bp, Artificial Sequence
  Synthetic
ggaccuacgtggccauga

SEQ ID NO: 65989 - DNA, 18 bp, Artificial Sequence
  Synthetic
ccgacucaggucccacct

SEQ ID NO: 65990 - DNA, 23 bp, Artificial Sequence
  Synthetic
cttatgagguggctgttgtcuct

SEQ ID NO: 65991 - DNA, 26 bp, Artificial Sequence
  Synthetic
tucaaagaaactctucaggaacccaa

SEQ ID NO: 65992 - DNA, 27 bp, Artificial Sequence
  Synthetic
ctgtctttcauagcaactagcccttua

SEQ ID NO: 65993 - DNA, 29 bp, Artificial Sequence
  Synthetic
tttgtcttaaatatuggagtcacccaugt

SEQ ID NO: 65994 - DNA, 21 bp, Artificial Sequence
  Synthetic
gcacctucagccagtatucgt

SEQ ID NO: 65995 - DNA, 26 bp, Artificial Sequence
  Synthetic
cacacctcttcauagagcgtttcaua

SEQ ID NO: 65996 - DNA, 26 bp, Artificial Sequence
  Synthetic
autctccataaucccaaccaaaccaa

SEQ ID NO: 65997 - DNA, 23 bp, Artificial Sequence
  Synthetic
ggctgatcucaaagaggagctuc

SEQ ID NO: 65998 - DNA, 22 bp, Artificial Sequence
  Synthetic
cgggacauagagggatctgcua

SEQ ID NO: 65999 - DNA, 20 bp, Artificial Sequence
  Synthetic
gttgtccugaggttgcccut

SEQ ID NO: 66000 - DNA, 23 bp, Artificial Sequence
  Synthetic
cagtgtctatucctgtcctgugt

SEQ ID NO: 66001 - DNA, 20 bp, Artificial Sequence
  Synthetic
gtgtctguggtgaccctuca

SEQ ID NO: 66002 - DNA, 21 bp, Artificial Sequence
  Synthetic
gactucaagcaggaggaggug

SEQ ID NO: 66003 - DNA, 20 bp, Artificial Sequence
  Synthetic
ctgcccaggagcucacauag

SEQ ID NO: 66004 - DNA, 18 bp, Artificial Sequence
  Synthetic
gccutcaagucgggcaag

SEQ ID NO: 66005 - DNA, 22 bp, Artificial Sequence
  Synthetic
tggaagatcucctgggtttugg

SEQ ID NO: 66006 - DNA, 20 bp, Artificial Sequence
  Synthetic
gaaaagagccccugcaguct

SEQ ID NO: 66007 - DNA, 21 bp, Artificial Sequence
  Synthetic
gcccuacaaaacactgtgguc

SEQ ID NO: 66008 - DNA, 25 bp, Artificial Sequence
  Synthetic
aggcatttuggaactggguagaaaa

SEQ ID NO: 66009 - DNA, 28 bp, Artificial Sequence
  Synthetic
tgacaccagtugacaatagaagatguaa

SEQ ID NO: 66010 - DNA, 23 bp, Artificial Sequence
  Synthetic
ctgaagaaggagauggtguggaa

SEQ ID NO: 66011 - DNA, 27 bp, Artificial Sequence
  Synthetic
tcctgtcaugggtattatttcttugct

SEQ ID NO: 66012 - DNA, 24 bp, Artificial Sequence
  Synthetic
ttctcaggaugaactagcucgagt

SEQ ID NO: 66013 - DNA, 25 bp, Artificial Sequence
  Synthetic
cucagcacacacauacacacaaaat

SEQ ID NO: 66014 - DNA, 28 bp, Artificial Sequence
  Synthetic
gacctttgaacuctttgttttcatguct

SEQ ID NO: 66015 - DNA, 22 bp, Artificial Sequence
  Synthetic
caagccccuttcgattcuaggt

SEQ ID NO: 66016 - DNA, 28 bp, Artificial Sequence
  Synthetic
ttttccatuacagcaaacacaaatucca

SEQ ID NO: 66017 - DNA, 23 bp, Artificial Sequence
  Synthetic
ggagucaggagggattctucact

SEQ ID NO: 66018 - DNA, 20 bp, Artificial Sequence
  Synthetic
actcgagucctggctucact

SEQ ID NO: 66019 - DNA, 18 bp, Artificial Sequence
  Synthetic
cggcuctuggcggaagac

SEQ ID NO: 66020 - DNA, 21 bp, Artificial Sequence
  Synthetic
gcatcaucagcccggtaguag

SEQ ID NO: 66021 - DNA, 20 bp, Artificial Sequence
  Synthetic
aaagcactuggatgccggua

SEQ ID NO: 66022 - DNA, 25 bp, Artificial Sequence
  Synthetic
accaaaccaagagaagucagaugag

SEQ ID NO: 66023 - DNA, 25 bp, Artificial Sequence
  Synthetic
ccagagucccaccatgaatgaatut

SEQ ID NO: 66024 - DNA, 18 bp, Artificial Sequence
  Synthetic
tccaggcuguccagggat

SEQ ID NO: 66025 - DNA, 22 bp, Artificial Sequence
  Synthetic
acctggccucttgtttcttcuc

SEQ ID NO: 66026 - DNA, 18 bp, Artificial Sequence
  Synthetic
gacctgcugagccccauc

SEQ ID NO: 66027 - DNA, 19 bp, Artificial Sequence
  Synthetic
gggccccggacuttaucac

SEQ ID NO: 66028 - DNA, 21 bp, Artificial Sequence
  Synthetic
tctucggaaaagccactuggt

SEQ ID NO: 66029 - DNA, 28 bp, Artificial Sequence
  Synthetic
gttgtcaatgucctgtttactcaaauca

SEQ ID NO: 66030 - DNA, 17 bp, Artificial Sequence
  Synthetic
gcugaccacgcugagca

SEQ ID NO: 66031 - DNA, 20 bp, Artificial Sequence
  Synthetic
gagttctgguggtcggtgua

SEQ ID NO: 66032 - DNA, 22 bp, Artificial Sequence
  Synthetic
ctggtgacccugtttctctcut

SEQ ID NO: 66033 - DNA, 20 bp, Artificial Sequence
  Synthetic
gcgcaggucttggtguagag

SEQ ID NO: 66034 - DNA, 21 bp, Artificial Sequence
  Synthetic
ctctggtgtucttgggcttug

SEQ ID NO: 66035 - DNA, 18 bp, Artificial Sequence
  Synthetic
acatccucgctgcctgug

SEQ ID NO: 66036 - DNA, 27 bp, Artificial Sequence
  Synthetic
ccagccctaautttgctttttgaugaa

SEQ ID NO: 66037 - DNA, 20 bp, Artificial Sequence
  Synthetic
gagctccutcttggaugcgt

SEQ ID NO: 66038 - DNA, 22 bp, Artificial Sequence
  Synthetic
caacgaccugaagaagcucaac

SEQ ID NO: 66039 - DNA, 24 bp, Artificial Sequence
  Synthetic
ggaaattacaucctggugcagaac

SEQ ID NO: 66040 - DNA, 29 bp, Artificial Sequence
  Synthetic
caatgcagtaggutattcatgaacaaugt

SEQ ID NO: 66041 - DNA, 26 bp, Artificial Sequence
  Synthetic
cctgagucagaaggcagaaataaucc

SEQ ID NO: 66042 - DNA, 26 bp, Artificial Sequence
  Synthetic
actgtggtacgugataaactggacua

SEQ ID NO: 66043 - DNA, 27 bp, Artificial Sequence
  Synthetic
tgaacttgagcutgttttacaggttug

SEQ ID NO: 66044 - DNA, 26 bp, Artificial Sequence
  Synthetic
gactcactccaguactgttcttgtut

SEQ ID NO: 66045 - DNA, 29 bp, Artificial Sequence
  Synthetic
aacaacacattttauggaggtacaaguct

SEQ ID NO: 66046 - DNA, 22 bp, Artificial Sequence
  Synthetic
ccttttcucccgactgttgcua

SEQ ID NO: 66047 - DNA, 20 bp, Artificial Sequence
  Synthetic
actgtucacacggcctctuc

SEQ ID NO: 66048 - DNA, 22 bp, Artificial Sequence
  Synthetic
gccctacguagcaaacuacaga

SEQ ID NO: 66049 - DNA, 20 bp, Artificial Sequence
  Synthetic
gtggacgagugatgaguggt

SEQ ID NO: 66050 - DNA, 26 bp, Artificial Sequence
  Synthetic
gatgtaggaagagutaatcacgugct

SEQ ID NO: 66051 - DNA, 27 bp, Artificial Sequence
  Synthetic
cctgagcutcatgtattuccaaaggaa

SEQ ID NO: 66052 - DNA, 27 bp, Artificial Sequence
  Synthetic
acgatacctucagatgtgtagagaugt

SEQ ID NO: 66053 - DNA, 23 bp, Artificial Sequence
  Synthetic
cagaaucgaaggatugggaacag

SEQ ID NO: 66054 - DNA, 21 bp, Artificial Sequence
  Synthetic
aggtctcugatggtggcucat

SEQ ID NO: 66055 - DNA, 18 bp, Artificial Sequence
  Synthetic
cctcggagaugcggaugg

SEQ ID NO: 66056 - DNA, 21 bp, Artificial Sequence
  Synthetic
cttccuggaccgtgtgtaugg

SEQ ID NO: 66057 - DNA, 28 bp, Artificial Sequence
  Synthetic
tgauatgtccacaaucccaagaaaaaca

SEQ ID NO: 66058 - DNA, 25 bp, Artificial Sequence
  Synthetic
tgagcatacaatugggactgacaut

SEQ ID NO: 66059 - DNA, 20 bp, Artificial Sequence
  Synthetic
ggtacagcuccgggtcguat

SEQ ID NO: 66060 - DNA, 23 bp, Artificial Sequence
  Synthetic
ggcctaugctgatatcauggcaa

SEQ ID NO: 66061 - DNA, 22 bp, Artificial Sequence
  Synthetic
accucaaaggagaccucaacct

SEQ ID NO: 66062 - DNA, 21 bp, Artificial Sequence
  Synthetic
gcttcctccucccatcctgut

SEQ ID NO: 66063 - DNA, 20 bp, Artificial Sequence
  Synthetic
cagatccucagccccuaggt

SEQ ID NO: 66064 - DNA, 20 bp, Artificial Sequence
  Synthetic
ctgguggcctttctcugcat

SEQ ID NO: 66065 - DNA, 21 bp, Artificial Sequence
  Synthetic
cctgtcauccttgcuggagac

SEQ ID NO: 66066 - DNA, 21 bp, Artificial Sequence
  Synthetic
cagtcuggcagcgtcttctua

SEQ ID NO: 66067 - DNA, 23 bp, Artificial Sequence
  Synthetic
ccctccucaccatagttggucat

SEQ ID NO: 66068 - DNA, 29 bp, Artificial Sequence
  Synthetic
aaaagaggcauagtcacaataaagucagt

SEQ ID NO: 66069 - DNA, 21 bp, Artificial Sequence
  Synthetic
tgacacgcccutctctgttut

SEQ ID NO: 66070 - DNA, 17 bp, Artificial Sequence
  Synthetic
ggagcaguagcgccuct

SEQ ID NO: 66071 - DNA, 17 bp, Artificial Sequence
  Synthetic
cgggtgcugctgaguct

SEQ ID NO: 66072 - DNA, 23 bp, Artificial Sequence
  Synthetic
catatcuaaaagacgcggcaugg

SEQ ID NO: 66073 - DNA, 21 bp, Artificial Sequence
  Synthetic
cacacaccugctctuccagat

SEQ ID NO: 66074 - DNA, 24 bp, Artificial Sequence
  Synthetic
ccattctcccugtgacagtcctua

SEQ ID NO: 66075 - DNA, 21 bp, Artificial Sequence
  Synthetic
tgcggagtucttcagcatcuc

SEQ ID NO: 66076 - DNA, 24 bp, Artificial Sequence
  Synthetic
gaacagctgaagutcatgggacua

SEQ ID NO: 66077 - DNA, 23 bp, Artificial Sequence
  Synthetic
ggucatgagagaaugggaagagg

SEQ ID NO: 66078 - DNA, 17 bp, Artificial Sequence
  Synthetic
gcuacgccggcttcuga

SEQ ID NO: 66079 - DNA, 20 bp, Artificial Sequence
  Synthetic
gggactauccctggcucaca

SEQ ID NO: 66080 - DNA, 21 bp, Artificial Sequence
  Synthetic
ccacccuaccccuggagaaaa

SEQ ID NO: 66081 - DNA, 20 bp, Artificial Sequence
  Synthetic
ctgaggccutcctcttggug

SEQ ID NO: 66082 - DNA, 23 bp, Artificial Sequence
  Synthetic
tgtttcaacautgagagcugggt

SEQ ID NO: 66083 - DNA, 27 bp, Artificial Sequence
  Synthetic
tgtataaguagagctgggttuggaact

SEQ ID NO: 66084 - DNA, 20 bp, Artificial Sequence
  Synthetic
ccgagguggtcagtgatucc

SEQ ID NO: 66085 - DNA, 23 bp, Artificial Sequence
  Synthetic
gccatgtgtcuttctgtcctcuc

SEQ ID NO: 66086 - DNA, 22 bp, Artificial Sequence
  Synthetic
ggttgtttccaguctggtccut

SEQ ID NO: 66087 - DNA, 22 bp, Artificial Sequence
  Synthetic
ctcggtgacucggtatgttcuc

SEQ ID NO: 66088 - DNA, 28 bp, Artificial Sequence
  Synthetic
ttcagcttctgutagccactgatuaaat

SEQ ID NO: 66089 - DNA, 28 bp, Artificial Sequence
  Synthetic
ctaaactctgcaaaugcaggaaactauc

SEQ ID NO: 66090 - DNA, 21 bp, Artificial Sequence
  Synthetic
cttuccccaggcaactucaga

SEQ ID NO: 66091 - DNA, 28 bp, Artificial Sequence
  Synthetic
cutttcagguaacagaaagaaagcaaca

SEQ ID NO: 66092 - DNA, 25 bp, Artificial Sequence
  Synthetic
agcacgcaacauaagatacaccuac

SEQ ID NO: 66093 - DNA, 28 bp, Artificial Sequence
  Synthetic
gctttcaaagaggucataataggctuct

SEQ ID NO: 66094 - DNA, 28 bp, Artificial Sequence
  Synthetic
tcgccacagauaagcaagtatcattuat

SEQ ID NO: 66095 - DNA, 28 bp, Artificial Sequence
  Synthetic
ccaatgttgatgaguttttctgtggaut

SEQ ID NO: 66096 - DNA, 25 bp, Artificial Sequence
  Synthetic
ccatgaagttauttaaccagcgugt

SEQ ID NO: 66097 - DNA, 28 bp, Artificial Sequence
  Synthetic
gaattaatgaaccutcagagaggcauca

SEQ ID NO: 66098 - DNA, 23 bp, Artificial Sequence
  Synthetic
agccaatgaaggugagtcctcua

SEQ ID NO: 66099 - DNA, 20 bp, Artificial Sequence
  Synthetic
gaagaaucagcacgcaccuc

SEQ ID NO: 66100 - DNA, 18 bp, Artificial Sequence
  Synthetic
gggagcgcutttggauca

SEQ ID NO: 66101 - DNA, 19 bp, Artificial Sequence
  Synthetic
tcctcagucctggccucag

SEQ ID NO: 66102 - DNA, 25 bp, Artificial Sequence
  Synthetic
cctttctctcagutgttctccccua

SEQ ID NO: 66103 - DNA, 26 bp, Artificial Sequence
  Synthetic
gggtucaaaacagatcaucacaaggt

SEQ ID NO: 66104 - DNA, 22 bp, Artificial Sequence
  Synthetic
ccgtttactcugctagctgcug

SEQ ID NO: 66105 - DNA, 24 bp, Artificial Sequence
  Synthetic
cgccagagcuttgtttcagttaut

SEQ ID NO: 66106 - DNA, 22 bp, Artificial Sequence
  Synthetic
gctttccugaaactctggccut

SEQ ID NO: 66107 - DNA, 24 bp, Artificial Sequence
  Synthetic
gggagcttctugggtatgaaacug

SEQ ID NO: 66108 - DNA, 25 bp, Artificial Sequence
  Synthetic
gcactgatcutctggctgaugaaaa

SEQ ID NO: 66109 - DNA, 26 bp, Artificial Sequence
  Synthetic
gattaagggcaguatctgcuagacac

SEQ ID NO: 66110 - DNA, 27 bp, Artificial Sequence
  Synthetic
aaatatcagggccuttggaatucagaa

SEQ ID NO: 66111 - DNA, 26 bp, Artificial Sequence
  Synthetic
cataagtggtguctaagaggaaggug

SEQ ID NO: 66112 - DNA, 22 bp, Artificial Sequence
  Synthetic
agcauccggaaacaaucacaga

SEQ ID NO: 66113 - DNA, 28 bp, Artificial Sequence
  Synthetic
aaggaagtgguaaatcaaactcacauga

SEQ ID NO: 66114 - DNA, 22 bp, Artificial Sequence
  Synthetic
gctgttgacccuaggcagtuat

SEQ ID NO: 66115 - DNA, 23 bp, Artificial Sequence
  Synthetic
gtcttatuccaccagaucccaca

SEQ ID NO: 66116 - DNA, 24 bp, Artificial Sequence
  Synthetic
caccagutaaatccucagaagggt

SEQ ID NO: 66117 - DNA, 25 bp, Artificial Sequence
  Synthetic
ggagtgacugagcttgcattauact

SEQ ID NO: 66118 - DNA, 22 bp, Artificial Sequence
  Synthetic
ttggttcuagcttccatuggca

SEQ ID NO: 66119 - DNA, 28 bp, Artificial Sequence
  Synthetic
aatttgcctccuggaactactttaauga

SEQ ID NO: 66120 - DNA, 24 bp, Artificial Sequence
  Synthetic
ccatttcagutcaggtugcagaaa

SEQ ID NO: 66121 - DNA, 27 bp, Artificial Sequence
  Synthetic
tgcacaucttcuaaaacagcaagagaa

SEQ ID NO: 66122 - DNA, 25 bp, Artificial Sequence
  Synthetic
cctattcagaaaugacgcuacagca

SEQ ID NO: 66123 - DNA, 27 bp, Artificial Sequence
  Synthetic
tcaaaacatttgutccccagaaugaga

SEQ ID NO: 66124 - DNA, 25 bp, Artificial Sequence
  Synthetic
actcagagttugcggagcttttuaa

SEQ ID NO: 66125 - DNA, 22 bp, Artificial Sequence
  Synthetic
gcctttctguccaggtaaucct

SEQ ID NO: 66126 - DNA, 20 bp, Artificial Sequence
  Synthetic
gcctggtgugaccgaatuct

SEQ ID NO: 66127 - DNA, 29 bp, Artificial Sequence
  Synthetic
gctgaattactgauctgttctgagtcuaa

SEQ ID NO: 66128 - DNA, 26 bp, Artificial Sequence
  Synthetic
aagcagatctauattggcgttgtuga

SEQ ID NO: 66129 - DNA, 28 bp, Artificial Sequence
  Synthetic
ggaagaaattgaagugcctttcagaaut

SEQ ID NO: 66130 - DNA, 28 bp, Artificial Sequence
  Synthetic
tgttggatagctuctataggagcatuga

SEQ ID NO: 66131 - DNA, 26 bp, Artificial Sequence
  Synthetic
tcatgcatttucaaacgcgtaaagut

SEQ ID NO: 66132 - DNA, 20 bp, Artificial Sequence
  Synthetic
gcagaugccatugagcggat

SEQ ID NO: 66133 - DNA, 21 bp, Artificial Sequence
  Synthetic
cttgaagugacagcgcugaac

SEQ ID NO: 66134 - DNA, 21 bp, Artificial Sequence
  Synthetic
cctgatuacccaggccaacug

SEQ ID NO: 66135 - DNA, 22 bp, Artificial Sequence
  Synthetic
agtccugcagaagaccacaaug

SEQ ID NO: 66136 - DNA, 22 bp, Artificial Sequence
  Synthetic
gaagtcacuctgttgtccucca

SEQ ID NO: 66137 - DNA, 21 bp, Artificial Sequence
  Synthetic
cgcttcutcccctaugccaat

SEQ ID NO: 66138 - DNA, 17 bp, Artificial Sequence
  Synthetic
ggctgugggcactccua

SEQ ID NO: 66139 - DNA, 18 bp, Artificial Sequence
  Synthetic
ggagggugacgggaugga

SEQ ID NO: 66140 - DNA, 26 bp, Artificial Sequence
  Synthetic
ctctcagaaugccttttacaatguct

SEQ ID NO: 66141 - DNA, 23 bp, Artificial Sequence
  Synthetic
ggccatcaguggactctctttut

SEQ ID NO: 66142 - DNA, 28 bp, Artificial Sequence
  Synthetic
cacttcttcccaucaagactatacauga

SEQ ID NO: 66143 - DNA, 28 bp, Artificial Sequence
  Synthetic
cacctgtagcaaugtagattcttccuaa

SEQ ID NO: 66144 - DNA, 27 bp, Artificial Sequence
  Synthetic
ttgatctgacugaagagtaguacgagt

SEQ ID NO: 66145 - DNA, 20 bp, Artificial Sequence
  Synthetic
ttgtcccugaacgcttguga

SEQ ID NO: 66146 - DNA, 17 bp, Artificial Sequence
  Synthetic
gccccgucgcgaagtut

SEQ ID NO: 66147 - DNA, 17 bp, Artificial Sequence
  Synthetic
ggcctucgctcccucac

SEQ ID NO: 66148 - DNA, 21 bp, Artificial Sequence
  Synthetic
gcagacaaggaggauctgguc

SEQ ID NO: 66149 - DNA, 25 bp, Artificial Sequence
  Synthetic
ttatctttucaccaagccugggaat

SEQ ID NO: 66150 - DNA, 20 bp, Artificial Sequence
  Synthetic
cttctctgugaccccacguc

SEQ ID NO: 66151 - DNA, 21 bp, Artificial Sequence
  Synthetic
aatcacccauctcgccatcuc

SEQ ID NO: 66152 - DNA, 23 bp, Artificial Sequence
  Synthetic
tcutgaacacaaugagccaggag

SEQ ID NO: 66153 - DNA, 27 bp, Artificial Sequence
  Synthetic
ccactaacugaaaatccaucaccaaca

SEQ ID NO: 66154 - DNA, 21 bp, Artificial Sequence
  Synthetic
gcuagcacuacccacaaggga

SEQ ID NO: 66155 - DNA, 21 bp, Artificial Sequence
  Synthetic
atggauggcgacggauaaagg

SEQ ID NO: 66156 - DNA, 27 bp, Artificial Sequence
  Synthetic
gaatgaatgaauagcacgcttcagtut

SEQ ID NO: 66157 - DNA, 21 bp, Artificial Sequence
  Synthetic
gcucacaggacgagaacauct

SEQ ID NO: 66158 - DNA, 23 bp, Artificial Sequence
  Synthetic
cutgctagattucagcaggagga

SEQ ID NO: 66159 - DNA, 27 bp, Artificial Sequence
  Synthetic
ccgtcttgtttguttgtttacatggut

SEQ ID NO: 66160 - DNA, 18 bp, Artificial Sequence
  Synthetic
ctgggcacuctggctcug

SEQ ID NO: 66161 - DNA, 28 bp, Artificial Sequence
  Synthetic
cattagagauccagaccttataggcaut

SEQ ID NO: 66162 - DNA, 26 bp, Artificial Sequence
  Synthetic
acttcaaaugctggttcugacaaaga

SEQ ID NO: 66163 - DNA, 21 bp, Artificial Sequence
  Synthetic
gctgtccaugcagatgaugct

SEQ ID NO: 66164 - DNA, 25 bp, Artificial Sequence
  Synthetic
aacutaaccaacaugagaggccaat

SEQ ID NO: 66165 - DNA, 24 bp, Artificial Sequence
  Synthetic
agagaccttuacaaagctgauggg

SEQ ID NO: 66166 - DNA, 24 bp, Artificial Sequence
  Synthetic
tctctccauaggtgagggaaauga

SEQ ID NO: 66167 - DNA, 24 bp, Artificial Sequence
  Synthetic
aatgaggcttugtccttacagcut

SEQ ID NO: 66168 - DNA, 24 bp, Artificial Sequence
  Synthetic
tccccattutcaccttttucacca

SEQ ID NO: 66169 - DNA, 28 bp, Artificial Sequence
  Synthetic
gtgtaagatttuatcacatgtggucaac

SEQ ID NO: 66170 - DNA, 24 bp, Artificial Sequence
  Synthetic
caaaggaacauacctgtgguccaa

SEQ ID NO: 66171 - DNA, 30 bp, Artificial Sequence
  Synthetic
gtcaataggugactttcttttaatgugact

SEQ ID NO: 66172 - DNA, 28 bp, Artificial Sequence
  Synthetic
ttgattgcttttucttcgctaccttuac

SEQ ID NO: 66173 - DNA, 28 bp, Artificial Sequence
  Synthetic
gttttccattccauctttcaccacatut

SEQ ID NO: 66174 - DNA, 27 bp, Artificial Sequence
  Synthetic
cagaatatggguaaagatgauccgaca

SEQ ID NO: 66175 - DNA, 22 bp, Artificial Sequence
  Synthetic
tggttuccaacaggttctugct

SEQ ID NO: 66176 - DNA, 28 bp, Artificial Sequence
  Synthetic
gttaccatggcuatgacacatttttcuc

SEQ ID NO: 66177 - DNA, 22 bp, Artificial Sequence
  Synthetic
tggccatttutctgtcccugat

SEQ ID NO: 66178 - DNA, 21 bp, Artificial Sequence
  Synthetic
ccagccccgugtactttgtut

SEQ ID NO: 66179 - DNA, 23 bp, Artificial Sequence
  Synthetic
acccgtctugactctacgtaucc

SEQ ID NO: 66180 - DNA, 21 bp, Artificial Sequence
  Synthetic
cccaggccaagugtcugaaag

SEQ ID NO: 66181 - DNA, 28 bp, Artificial Sequence
  Synthetic
ctctctctctcuttaaagggatccucat

SEQ ID NO: 66182 - DNA, 23 bp, Artificial Sequence
  Synthetic
cgtgacacaugaacacgctacut

SEQ ID NO: 66183 - DNA, 27 bp, Artificial Sequence
  Synthetic
aagagggaautcaaccattucaggaat

SEQ ID NO: 66184 - DNA, 22 bp, Artificial Sequence
  Synthetic
cactcctugaggcacatctuct

SEQ ID NO: 66185 - DNA, 22 bp, Artificial Sequence
  Synthetic
ttccagaugtgaaccucaagcc

SEQ ID NO: 66186 - DNA, 22 bp, Artificial Sequence
  Synthetic
cgccuccgagagcttttctauc

SEQ ID NO: 66187 - DNA, 27 bp, Artificial Sequence
  Synthetic
aatgctgugagactgaacttatuccaa

SEQ ID NO: 66188 - DNA, 24 bp, Artificial Sequence
  Synthetic
ggattgcattuacctgtgaggtug

SEQ ID NO: 66189 - DNA, 28 bp, Artificial Sequence
  Synthetic
ctgttgtcagaggugtaattgagaagua

SEQ ID NO: 66190 - DNA, 24 bp, Artificial Sequence
  Synthetic
actaaacucaccaggatcctucct

SEQ ID NO: 66191 - DNA, 26 bp, Artificial Sequence
  Synthetic
tggtgaaggugtatttctcatcucct

SEQ ID NO: 66192 - DNA, 26 bp, Artificial Sequence
  Synthetic
caagaattcuccccagtgtcatuact

SEQ ID NO: 66193 - DNA, 24 bp, Artificial Sequence
  Synthetic
cttttctctctuttccggttgcut

SEQ ID NO: 66194 - DNA, 21 bp, Artificial Sequence
  Synthetic
atgatcagcgucatcgtggut

SEQ ID NO: 66195 - DNA, 24 bp, Artificial Sequence
  Synthetic
tttttcuaaaggcggctgttucac

SEQ ID NO: 66196 - DNA, 21 bp, Artificial Sequence
  Synthetic
ccgcctgagaugtgaacctut

SEQ ID NO: 66197 - DNA, 22 bp, Artificial Sequence
  Synthetic
aggctgttagcuccccaagaua

SEQ ID NO: 66198 - DNA, 18 bp, Artificial Sequence
  Synthetic
cctccgugggtccgttug

SEQ ID NO: 66199 - DNA, 22 bp, Artificial Sequence
  Synthetic
ctcatcctcgucgtacacguag

SEQ ID NO: 66200 - DNA, 26 bp, Artificial Sequence
  Synthetic
ggagtttatagutacagcacgaucca

SEQ ID NO: 66201 - DNA, 28 bp, Artificial Sequence
  Synthetic
aaaagcauaatucagacaaacacacagg

SEQ ID NO: 66202 - DNA, 26 bp, Artificial Sequence
  Synthetic
cccacatagcugctgacaaatcatua

SEQ ID NO: 66203 - DNA, 28 bp, Artificial Sequence
  Synthetic
ccccagaacaacuttcttgataaaugaa

SEQ ID NO: 66204 - DNA, 25 bp, Artificial Sequence
  Synthetic
cccctgaaagautccactacguaga

SEQ ID NO: 66205 - DNA, 29 bp, Artificial Sequence
  Synthetic
ctgcatauacacctaagtcauacaacagt

SEQ ID NO: 66206 - DNA, 27 bp, Artificial Sequence
  Synthetic
gaagatgtccaggugtcttgttauaga

SEQ ID NO: 66207 - DNA, 27 bp, Artificial Sequence
  Synthetic
ggaatttcaaaggucaatccggttuag

SEQ ID NO: 66208 - DNA, 22 bp, Artificial Sequence
  Synthetic
ggaggcagaacucctcatccua

SEQ ID NO: 66209 - DNA, 28 bp, Artificial Sequence
  Synthetic
acgttatgaccgaautggagaaatuact

SEQ ID NO: 66210 - DNA, 21 bp, Artificial Sequence
  Synthetic
agatctcggagucggactuga

SEQ ID NO: 66211 - DNA, 25 bp, Artificial Sequence
  Synthetic
ccatgtcctucacggtcatctttut

SEQ ID NO: 66212 - DNA, 28 bp, Artificial Sequence
  Synthetic
ttcattgtaagttuacgtggcaggauat

SEQ ID NO: 66213 - DNA, 30 bp, Artificial Sequence
  Synthetic
tgtgctttaagaaaaaugtagaggatucca

SEQ ID NO: 66214 - DNA, 19 bp, Artificial Sequence
  Synthetic
gtcggtccugctgttcgut

SEQ ID NO: 66215 - DNA, 24 bp, Artificial Sequence
  Synthetic
caagtcaucatcaaccguaaccca

SEQ ID NO: 66216 - DNA, 23 bp, Artificial Sequence
  Synthetic
ggaagctguctgtctttgcugaa

SEQ ID NO: 66217 - DNA, 21 bp, Artificial Sequence
  Synthetic
gtagcttgaucttgcccguga

SEQ ID NO: 66218 - DNA, 20 bp, Artificial Sequence
  Synthetic
gccugcggaacaugaagagt

SEQ ID NO: 66219 - DNA, 23 bp, Artificial Sequence
  Synthetic
augtagaacttcuagccccagga

SEQ ID NO: 66220 - DNA, 21 bp, Artificial Sequence
  Synthetic
ctctaauccccatgtguggca

SEQ ID NO: 66221 - DNA, 22 bp, Artificial Sequence
  Synthetic
gcuccaacaccacagtctuagg

SEQ ID NO: 66222 - DNA, 21 bp, Artificial Sequence
  Synthetic
gggtagttucgagctcttguc

SEQ ID NO: 66223 - DNA, 28 bp, Artificial Sequence
  Synthetic
ggaggtcatagucatagagagtgatcut

SEQ ID NO: 66224 - DNA, 21 bp, Artificial Sequence
  Synthetic
actcctgagccuggaatccut

SEQ ID NO: 66225 - DNA, 22 bp, Artificial Sequence
  Synthetic
cgtttctttuccttccccagug

SEQ ID NO: 66226 - DNA, 25 bp, Artificial Sequence
  Synthetic
caaacccatgacuggtctattggua

SEQ ID NO: 66227 - DNA, 24 bp, Artificial Sequence
  Synthetic
ccagtgggcaaacauttttagcug

SEQ ID NO: 66228 - DNA, 26 bp, Artificial Sequence
  Synthetic
tcatgtgccuatttaaggtugaccag

SEQ ID NO: 66229 - DNA, 25 bp, Artificial Sequence
  Synthetic
tttagggcacgaccaaucaaauaca

SEQ ID NO: 66230 - DNA, 21 bp, Artificial Sequence
  Synthetic
gtatcaaagguccagcuggga

SEQ ID NO: 66231 - DNA, 28 bp, Artificial Sequence
  Synthetic
tgtccagtaaaatuggttaggcaaguaa

SEQ ID NO: 66232 - DNA, 22 bp, Artificial Sequence
  Synthetic
actggtcctautggtcctccug

SEQ ID NO: 66233 - DNA, 22 bp, Artificial Sequence
  Synthetic
accaccutcacccuggaaaaag

SEQ ID NO: 66234 - DNA, 25 bp, Artificial Sequence
  Synthetic
actggatggguttgctgaaauacat

SEQ ID NO: 66235 - DNA, 28 bp, Artificial Sequence
  Synthetic
aaaccctcugttaattctttuggagact

SEQ ID NO: 66236 - DNA, 21 bp, Artificial Sequence
  Synthetic
caggagcacutctccccttug

SEQ ID NO: 66237 - DNA, 22 bp, Artificial Sequence
  Synthetic
tcttcatgcauctgcttugcct

SEQ ID NO: 66238 - DNA, 20 bp, Artificial Sequence
  Synthetic
tccccagagccugttcacua

SEQ ID NO: 66239 - DNA, 28 bp, Artificial Sequence
  Synthetic
tgctggaaaacugtgtactagctattut

SEQ ID NO: 66240 - DNA, 20 bp, Artificial Sequence
  Synthetic
ggcugtacgtuccccacaag

SEQ ID NO: 66241 - DNA, 28 bp, Artificial Sequence
  Synthetic
tcttcaactgaacugaattaagtguggt

SEQ ID NO: 66242 - DNA, 22 bp, Artificial Sequence
  Synthetic
aagctttcttugggctgcuagt

SEQ ID NO: 66243 - DNA, 19 bp, Artificial Sequence
  Synthetic
cctggtacucgcgcagaug

SEQ ID NO: 66244 - DNA, 28 bp, Artificial Sequence
  Synthetic
ctgaaataagtaucaacctcaccccaut

SEQ ID NO: 66245 - DNA, 20 bp, Artificial Sequence
  Synthetic
agaggucgacauccacacct

SEQ ID NO: 66246 - DNA, 27 bp, Artificial Sequence
  Synthetic
gcctgtcttuaagttgaacatgaucct

SEQ ID NO: 66247 - DNA, 24 bp, Artificial Sequence
  Synthetic
cagctgcauctctcctacaauagt

SEQ ID NO: 66248 - DNA, 22 bp, Artificial Sequence
  Synthetic
cagctguaataggacugcccat

SEQ ID NO: 66249 - DNA, 23 bp, Artificial Sequence
  Synthetic
gtacactgccaucgcctcttuaa

SEQ ID NO: 66250 - DNA, 21 bp, Artificial Sequence
  Synthetic
ctgcacaugccattctcagug

SEQ ID NO: 66251 - DNA, 27 bp, Artificial Sequence
  Synthetic
acttggttgaaucttactgaccttugt

SEQ ID NO: 66252 - DNA, 21 bp, Artificial Sequence
  Synthetic
caccacctcuggcatccauac

SEQ ID NO: 66253 - DNA, 22 bp, Artificial Sequence
  Synthetic
gcagaagauccuggcaaaagca

SEQ ID NO: 66254 - DNA, 22 bp, Artificial Sequence
  Synthetic
ctggtttgugactgactgcaut

SEQ ID NO: 66255 - DNA, 22 bp, Artificial Sequence
  Synthetic
acttcctucccaccctcctaug

SEQ ID NO: 66256 - DNA, 25 bp, Artificial Sequence
  Synthetic
catagcacagcauagcaaaugagat

SEQ ID NO: 66257 - DNA, 21 bp, Artificial Sequence
  Synthetic
gctcaggccucccuaagaaac

SEQ ID NO: 66258 - DNA, 25 bp, Artificial Sequence
  Synthetic
gcttcaccuctgggttttucagaat

SEQ ID NO: 66259 - DNA, 21 bp, Artificial Sequence
  Synthetic
ggcuacacaggagaggauggt

SEQ ID NO: 66260 - DNA, 21 bp, Artificial Sequence
  Synthetic
ggcctgcucttgagtctcaua

SEQ ID NO: 66261 - DNA, 22 bp, Artificial Sequence
  Synthetic
caatacttcugagggccaccug

SEQ ID NO: 66262 - DNA, 27 bp, Artificial Sequence
  Synthetic
aaaatacauggaggagagtttgucagg

SEQ ID NO: 66263 - DNA, 24 bp, Artificial Sequence
  Synthetic
ccagucacccatgtttaucaggat

SEQ ID NO: 66264 - DNA, 28 bp, Artificial Sequence
  Synthetic
tatgctatcactautacagggcaattug

SEQ ID NO: 66265 - DNA, 28 bp, Artificial Sequence
  Synthetic
catgcaatguactaccaagaaucaaagg

SEQ ID NO: 66266 - DNA, 23 bp, Artificial Sequence
  Synthetic
ggagcuaggaattuggagggaag

SEQ ID NO: 66267 - DNA, 21 bp, Artificial Sequence
  Synthetic
actggcucagagauggcaaag

SEQ ID NO: 66268 - DNA, 18 bp, Artificial Sequence
  Synthetic
gcucaagccggaggucaa

SEQ ID NO: 66269 - DNA, 19 bp, Artificial Sequence
  Synthetic
cagaccauggctccuccag

SEQ ID NO: 66270 - DNA, 21 bp, Artificial Sequence
  Synthetic
tggcagucaccctauccaaag

SEQ ID NO: 66271 - DNA, 23 bp, Artificial Sequence
  Synthetic
caugtggcctttuggaaacacag

SEQ ID NO: 66272 - DNA, 18 bp, Artificial Sequence
  Synthetic
cccagcuccccuggagaa

SEQ ID NO: 66273 - DNA, 17 bp, Artificial Sequence
  Synthetic
gggacugccactugcct

SEQ ID NO: 66274 - DNA, 21 bp, Artificial Sequence
  Synthetic
ctactcctucgacaccugcaa

SEQ ID NO: 66275 - DNA, 20 bp, Artificial Sequence
  Synthetic
gctgaagccuctccaccuct

SEQ ID NO: 66276 - DNA, 25 bp, Artificial Sequence
  Synthetic
cacatttcuagcattctttgtgugg

SEQ ID NO: 66277 - DNA, 25 bp, Artificial Sequence
  Synthetic
aaggtatgtgaucttgctgctucat

SEQ ID NO: 66278 - DNA, 18 bp, Artificial Sequence
  Synthetic
tgaccgcgauggugaact

SEQ ID NO: 66279 - DNA, 17 bp, Artificial Sequence
  Synthetic
ccggaugcgctgcauct

SEQ ID NO: 66280 - DNA, 25 bp, Artificial Sequence
  Synthetic
attttctgttautcggcagcuacct

SEQ ID NO: 66281 - DNA, 25 bp, Artificial Sequence
  Synthetic
cccaaaacucgattagcttccucaa

SEQ ID NO: 66282 - DNA, 27 bp, Artificial Sequence
  Synthetic
tttacctatcutccctatgucgaaggt

SEQ ID NO: 66283 - DNA, 21 bp, Artificial Sequence
  Synthetic
caaggcuttagggcugacagt

SEQ ID NO: 66284 - DNA, 20 bp, Artificial Sequence
  Synthetic
gccatcaugccctgtcauac

SEQ ID NO: 66285 - DNA, 28 bp, Artificial Sequence
  Synthetic
tgccttctaugaggcttgaaagaaauaa

SEQ ID NO: 66286 - DNA, 21 bp, Artificial Sequence
  Synthetic
cagagcuctcggtcugagaga

SEQ ID NO: 66287 - DNA, 28 bp, Artificial Sequence
  Synthetic
acacaggtatucagatcatcaguaaggt

SEQ ID NO: 66288 - DNA, 28 bp, Artificial Sequence
  Synthetic
gttatgctaauagtttgctguggaaaca

SEQ ID NO: 66289 - DNA, 22 bp, Artificial Sequence
  Synthetic
gttttccaugctggtcctucac

SEQ ID NO: 66290 - DNA, 23 bp, Artificial Sequence
  Synthetic
tggaccacugaaggaaattccuc

SEQ ID NO: 66291 - DNA, 22 bp, Artificial Sequence
  Synthetic
gtattgcaugccaacagtguca

SEQ ID NO: 66292 - DNA, 26 bp, Artificial Sequence
  Synthetic
tgtguacaaacaacctuaaaggacca

SEQ ID NO: 66293 - DNA, 28 bp, Artificial Sequence
  Synthetic
tgattgttcttgutctctgtgguaaagt

SEQ ID NO: 66294 - DNA, 24 bp, Artificial Sequence
  Synthetic
agatggcagauctggtagctguaa

SEQ ID NO: 66295 - DNA, 27 bp, Artificial Sequence
  Synthetic
gagtgaaagauacagaaugcaagcaag

SEQ ID NO: 66296 - DNA, 21 bp, Artificial Sequence
  Synthetic
acctgacccacuatggcauct

SEQ ID NO: 66297 - DNA, 21 bp, Artificial Sequence
  Synthetic
ggactcguccaggtgatugac

SEQ ID NO: 66298 - DNA, 26 bp, Artificial Sequence
  Synthetic
tcuacgaaaaggactcauacaccagt

SEQ ID NO: 66299 - DNA, 25 bp, Artificial Sequence
  Synthetic
cctcctggcaggaauccttaaaaut

SEQ ID NO: 66300 - DNA, 23 bp, Artificial Sequence
  Synthetic
cttctgccucttctaaagcuggt

SEQ ID NO: 66301 - DNA, 25 bp, Artificial Sequence
  Synthetic
ctgtttggtgaaguattgcttgcut

SEQ ID NO: 66302 - DNA, 26 bp, Artificial Sequence
  Synthetic
cccaatagcacutattcacaccacua

SEQ ID NO: 66303 - DNA, 23 bp, Artificial Sequence
  Synthetic
ggttttgtaucgaacagctgguc

SEQ ID NO: 66304 - DNA, 25 bp, Artificial Sequence
  Synthetic
acaaaattgggcutactgagccaua

SEQ ID NO: 66305 - DNA, 26 bp, Artificial Sequence
  Synthetic
caattccctcuattttaggctgugct

SEQ ID NO: 66306 - DNA, 21 bp, Artificial Sequence
  Synthetic
ccacagacaagcucugggaac

SEQ ID NO: 66307 - DNA, 27 bp, Artificial Sequence
  Synthetic
gacatucccagtgaagtuacaaacaac

SEQ ID NO: 66308 - DNA, 24 bp, Artificial Sequence
  Synthetic
tggcaaacacaguatcgugaaact

SEQ ID NO: 66309 - DNA, 28 bp, Artificial Sequence
  Synthetic
gaatcttcttcugcattagagtcctuct

SEQ ID NO: 66310 - DNA, 25 bp, Artificial Sequence
  Synthetic
ctttagcttgauatgcaacgaggug

SEQ ID NO: 66311 - DNA, 28 bp, Artificial Sequence
  Synthetic
caaaacatgatgcutgaaaggcaaaaut

SEQ ID NO: 66312 - DNA, 33 bp, Artificial Sequence
  Synthetic
agtatgttacttauggacacttttaatgtgtut

SEQ ID NO: 66313 - DNA, 28 bp, Artificial Sequence
  Synthetic
caacaagttgaguacaagctttctucac

SEQ ID NO: 66314 - DNA, 25 bp, Artificial Sequence
  Synthetic
accaagaggacccaaauaacactuc

SEQ ID NO: 66315 - DNA, 28 bp, Artificial Sequence
  Synthetic
gatcacagtgccauatagctctatgtut

SEQ ID NO: 66316 - DNA, 28 bp, Artificial Sequence
  Synthetic
tgggtagacacuattaaagagucagaca

SEQ ID NO: 66317 - DNA, 25 bp, Artificial Sequence
  Synthetic
cctgtaaattuggctgcatguacaa

SEQ ID NO: 66318 - DNA, 27 bp, Artificial Sequence
  Synthetic
aggaaaaaccucatctgtaaccauacc

SEQ ID NO: 66319 - DNA, 28 bp, Artificial Sequence
  Synthetic
ggtgaagtuggtttctttttctuaccat

SEQ ID NO: 66320 - DNA, 27 bp, Artificial Sequence
  Synthetic
ctattcaggaaggugcaaattccauag

SEQ ID NO: 66321 - DNA, 28 bp, Artificial Sequence
  Synthetic
ccaatgtactttuctcccctggtttuag

SEQ ID NO: 66322 - DNA, 20 bp, Artificial Sequence
  Synthetic
gcgaggagucagacagugac

SEQ ID NO: 66323 - DNA, 23 bp, Artificial Sequence
  Synthetic
gggaguccagaaggagaatguga

SEQ ID NO: 66324 - DNA, 21 bp, Artificial Sequence
  Synthetic
agtggtgaaggucctgacuga

SEQ ID NO: 66325 - DNA, 19 bp, Artificial Sequence
  Synthetic
tcccctuggaagtcgugga

SEQ ID NO: 66326 - DNA, 20 bp, Artificial Sequence
  Synthetic
tgtgcaccucccaacatuga

SEQ ID NO: 66327 - DNA, 22 bp, Artificial Sequence
  Synthetic
ggtctgttutctggccugagac

SEQ ID NO: 66328 - DNA, 24 bp, Artificial Sequence
  Synthetic
tggaacttggcuaaagccattuca

SEQ ID NO: 66329 - DNA, 26 bp, Artificial Sequence
  Synthetic
ctaggcactgtuaagttctcccttut

SEQ ID NO: 66330 - DNA, 22 bp, Artificial Sequence
  Synthetic
cttttcuccaaggctgcagaug

SEQ ID NO: 66331 - DNA, 27 bp, Artificial Sequence
  Synthetic
ccaggatgtguccaaatccatgttaua

SEQ ID NO: 66332 - DNA, 23 bp, Artificial Sequence
  Synthetic
aggcaaucccattttctcuggaa

SEQ ID NO: 66333 - DNA, 22 bp, Artificial Sequence
  Synthetic
ctcgcttacccucaagaaccug

SEQ ID NO: 66334 - DNA, 18 bp, Artificial Sequence
  Synthetic
gcaacugtgugggaccgt

SEQ ID NO: 66335 - DNA, 18 bp, Artificial Sequence
  Synthetic
caccacgggugagaugga

SEQ ID NO: 66336 - DNA, 22 bp, Artificial Sequence
  Synthetic
tgtcaccccaaugacagagaug

SEQ ID NO: 66337 - DNA, 19 bp, Artificial Sequence
  Synthetic
ccctcagccugtccuggat

SEQ ID NO: 66338 - DNA, 21 bp, Artificial Sequence
  Synthetic
ccgtcccugtctttgtacugg

SEQ ID NO: 66339 - DNA, 24 bp, Artificial Sequence
  Synthetic
actatgcttugcttttgcctcuca

SEQ ID NO: 66340 - DNA, 20 bp, Artificial Sequence
  Synthetic
gtcatcccuaggcgucacac

SEQ ID NO: 66341 - DNA, 24 bp, Artificial Sequence
  Synthetic
ggaccaggagacuaagagcaugat

SEQ ID NO: 66342 - DNA, 21 bp, Artificial Sequence
  Synthetic
gactcttgcugcagaggagut

SEQ ID NO: 66343 - DNA, 28 bp, Artificial Sequence
  Synthetic
gaaggagaggagguttttgactctaauc

SEQ ID NO: 66344 - DNA, 21 bp, Artificial Sequence
  Synthetic
gaggagacggcaugaauggat

SEQ ID NO: 66345 - DNA, 20 bp, Artificial Sequence
  Synthetic
cagcagcuttaccgtgucct

SEQ ID NO: 66346 - DNA, 25 bp, Artificial Sequence
  Synthetic
caaaagaagccccuttccagaacua

SEQ ID NO: 66347 - DNA, 23 bp, Artificial Sequence
  Synthetic
gaagggtgaauttggagagugct

SEQ ID NO: 66348 - DNA, 22 bp, Artificial Sequence
  Synthetic
gtcaatccugcctctgatugct

SEQ ID NO: 66349 - DNA, 24 bp, Artificial Sequence
  Synthetic
ttcacttgaaccucttccaccaut

SEQ ID NO: 66350 - DNA, 21 bp, Artificial Sequence
  Synthetic
aggacagagaugacgggcuat

SEQ ID NO: 66351 - DNA, 22 bp, Artificial Sequence
  Synthetic
cctctcaccugtctccccttut

SEQ ID NO: 66352 - DNA, 25 bp, Artificial Sequence
  Synthetic
gttttgggcuaaccatcatttucct

SEQ ID NO: 66353 - DNA, 20 bp, Artificial Sequence
  Synthetic
tggccuccaggtaauggact

SEQ ID NO: 66354 - DNA, 27 bp, Artificial Sequence
  Synthetic
cattcagatatagcutacctgcgtuga

SEQ ID NO: 66355 - DNA, 28 bp, Artificial Sequence
  Synthetic
ctgcttatcaugaaatgaaagagtugct

SEQ ID NO: 66356 - DNA, 22 bp, Artificial Sequence
  Synthetic
acaaaagacuccctcugaggct

SEQ ID NO: 66357 - DNA, 28 bp, Artificial Sequence
  Synthetic
gaccattgacucctccatatagtcuact

SEQ ID NO: 66358 - DNA, 22 bp, Artificial Sequence
  Synthetic
ccataacacacagcugtcccut

SEQ ID NO: 66359 - DNA, 21 bp, Artificial Sequence
  Synthetic
tccaucaccaggucagaacca

SEQ ID NO: 66360 - DNA, 25 bp, Artificial Sequence
  Synthetic
gcuttaaaattgugacagcacagca

SEQ ID NO: 66361 - DNA, 23 bp, Artificial Sequence
  Synthetic
gataatgtcacuggcaccacuct

SEQ ID NO: 66362 - DNA, 24 bp, Artificial Sequence
  Synthetic
tttcagaggacautgattgcccut

SEQ ID NO: 66363 - DNA, 28 bp, Artificial Sequence
  Synthetic
ccagagcatttacauatgtctcttccut

SEQ ID NO: 66364 - DNA, 25 bp, Artificial Sequence
  Synthetic
gagtcatguaacgtaggtugggaat

SEQ ID NO: 66365 - DNA, 23 bp, Artificial Sequence
  Synthetic
agaaagcaggucctgtttauggg

SEQ ID NO: 66366 - DNA, 23 bp, Artificial Sequence
  Synthetic
aagaggaaugccgagaaaagugt

SEQ ID NO: 66367 - DNA, 21 bp, Artificial Sequence
  Synthetic
gcatggagaaugaaccuggct

SEQ ID NO: 66368 - DNA, 24 bp, Artificial Sequence
  Synthetic
cuaacacacaggcaaaaacucact

SEQ ID NO: 66369 - DNA, 25 bp, Artificial Sequence
  Synthetic
caatccaggcuatgttgggauaaga

SEQ ID NO: 66370 - DNA, 27 bp, Artificial Sequence
  Synthetic
caggaccttuatcttggcaaauaccat

SEQ ID NO: 66371 - DNA, 28 bp, Artificial Sequence
  Synthetic
tttcctttttgcaguatgtatgcatucc

SEQ ID NO: 66372 - DNA, 21 bp, Artificial Sequence
  Synthetic
cggctgcauagcctgagaauc

SEQ ID NO: 66373 - DNA, 24 bp, Artificial Sequence
  Synthetic
gcuggaaagtaaaaugagccacct

SEQ ID NO: 66374 - DNA, 29 bp, Artificial Sequence
  Synthetic
agattatgactagaaaugttggtggctut

SEQ ID NO: 66375 - DNA, 23 bp, Artificial Sequence
  Synthetic
atgttgcaggucctgttcaguag

SEQ ID NO: 66376 - DNA, 23 bp, Artificial Sequence
  Synthetic
tggaaagacuggaatttgguggt

SEQ ID NO: 66377 - DNA, 25 bp, Artificial Sequence
  Synthetic
ggatcccaugcaatgaaaaugcaaa

SEQ ID NO: 66378 - DNA, 26 bp, Artificial Sequence
  Synthetic
ctcatagtgcutaatgttgcctucac

SEQ ID NO: 66379 - DNA, 26 bp, Artificial Sequence
  Synthetic
gtaaatgtguccaaccttauccacca

SEQ ID NO: 66380 - DNA, 28 bp, Artificial Sequence
  Synthetic
caatcctgaucacgctttagtttaucaa

SEQ ID NO: 66381 - DNA, 26 bp, Artificial Sequence
  Synthetic
tgggucaaaatugacacagagaagac

SEQ ID NO: 66382 - DNA, 24 bp, Artificial Sequence
  Synthetic
gcagacttggucatcttcactugg

SEQ ID NO: 66383 - DNA, 27 bp, Artificial Sequence
  Synthetic
ctagaatagcauacagcctgtcttuga

SEQ ID NO: 66384 - DNA, 28 bp, Artificial Sequence
  Synthetic
aaaaactttcagcucttacctcuggaat

SEQ ID NO: 66385 - DNA, 27 bp, Artificial Sequence
  Synthetic
gccagctacucactcaacaaaatcaua

SEQ ID NO: 66386 - DNA, 26 bp, Artificial Sequence
  Synthetic
gtguaaggaaagaagaatugggcaaa

SEQ ID NO: 66387 - DNA, 27 bp, Artificial Sequence
  Synthetic
gacaacaaatgtuctttccatagcugt

SEQ ID NO: 66388 - DNA, 22 bp, Artificial Sequence
  Synthetic
caggcaccagutgtcacattut

SEQ ID NO: 66389 - DNA, 21 bp, Artificial Sequence
  Synthetic
aaagccaucugggacaggaag

SEQ ID NO: 66390 - DNA, 25 bp, Artificial Sequence
  Synthetic
caagtttttctucctccctcccaua

SEQ ID NO: 66391 - DNA, 21 bp, Artificial Sequence
  Synthetic
gcttctggtuaggctgtgguc

SEQ ID NO: 66392 - DNA, 19 bp, Artificial Sequence
  Synthetic
cctgaacugccaccuccat

SEQ ID NO: 66393 - DNA, 21 bp, Artificial Sequence
  Synthetic
ccggatcagcuccaaactguc

SEQ ID NO: 66394 - DNA, 20 bp, Artificial Sequence
  Synthetic
gggccaccccautcactauc

SEQ ID NO: 66395 - DNA, 25 bp, Artificial Sequence
  Synthetic
ctgttcctagtutccttgtcccaut

SEQ ID NO: 66396 - DNA, 24 bp, Artificial Sequence
  Synthetic
agttacaagaggaguatgctugcc

SEQ ID NO: 66397 - DNA, 23 bp, Artificial Sequence
  Synthetic
ttcaacaaccucacccattucca

SEQ ID NO: 66398 - DNA, 28 bp, Artificial Sequence
  Synthetic
gatccccaugatataccagaaucaaagg

SEQ ID NO: 66399 - DNA, 28 bp, Artificial Sequence
  Synthetic
ccaaacatuaagcagcactattgcuaat

SEQ ID NO: 66400 - DNA, 28 bp, Artificial Sequence
  Synthetic
gtcattaaacttuaggagcaagccatug

SEQ ID NO: 66401 - DNA, 26 bp, Artificial Sequence
  Synthetic
tgtaagtugggcaatatcagugaagt

SEQ ID NO: 66402 - DNA, 27 bp, Artificial Sequence
  Synthetic
ggagaaacaaaagaaucaaacuacgct

SEQ ID NO: 66403 - DNA, 21 bp, Artificial Sequence
  Synthetic
gggtcuacccagccuaagaat

SEQ ID NO: 66404 - DNA, 27 bp, Artificial Sequence
  Synthetic
tgacttctguacttctgacatttuggg

SEQ ID NO: 66405 - DNA, 27 bp, Artificial Sequence
  Synthetic
agtgaagatgacuggaagaatttugct

SEQ ID NO: 66406 - DNA, 25 bp, Artificial Sequence
  Synthetic
acatttatctagucgaccaggccua

SEQ ID NO: 66407 - DNA, 24 bp, Artificial Sequence
  Synthetic
gttaaccagtugctgactcagtug

SEQ ID NO: 66408 - DNA, 28 bp, Artificial Sequence
  Synthetic
tcaaaatatgccaucatcttagcuggaa

SEQ ID NO: 66409 - DNA, 22 bp, Artificial Sequence
  Synthetic
caguacttgtggaucgagccat

SEQ ID NO: 66410 - DNA, 29 bp, Artificial Sequence
  Synthetic
tcctcactgttutcttcttttaccauagg

SEQ ID NO: 66411 - DNA, 27 bp, Artificial Sequence
  Synthetic
cctggatggguacattgttattgucaa

SEQ ID NO: 66412 - DNA, 28 bp, Artificial Sequence
  Synthetic
ttgttcacuggaaattacttctuaggca

SEQ ID NO: 66413 - DNA, 28 bp, Artificial Sequence
  Synthetic
ggacgaagcccuttatagttcaaaaaut

SEQ ID NO: 66414 - DNA, 21 bp, Artificial Sequence
  Synthetic
agtgtcaugccactguaagca

SEQ ID NO: 66415 - DNA, 28 bp, Artificial Sequence
  Synthetic
acagttccaatcuttcacatcacaguaa

SEQ ID NO: 66416 - DNA, 19 bp, Artificial Sequence
  Synthetic
cgctggugaagtuggcaaa

SEQ ID NO: 66417 - DNA, 27 bp, Artificial Sequence
  Synthetic
agtaatttggcucattctctccaucag

SEQ ID NO: 66418 - DNA, 26 bp, Artificial Sequence
  Synthetic
ctctctctgctauattctccctccut

SEQ ID NO: 66419 - DNA, 21 bp, Artificial Sequence
  Synthetic
cacuaggaccagauggaccag

SEQ ID NO: 66420 - DNA, 22 bp, Artificial Sequence
  Synthetic
cttccaggcccutggtgatuaa

SEQ ID NO: 66421 - DNA, 22 bp, Artificial Sequence
  Synthetic
ccaacugcacctacttcuccag

SEQ ID NO: 66422 - DNA, 23 bp, Artificial Sequence
  Synthetic
gggaaggtuagcattccaucgaa

SEQ ID NO: 66423 - DNA, 28 bp, Artificial Sequence
  Synthetic
cacacaatgaaaucctgctcagtttuat

SEQ ID NO: 66424 - DNA, 27 bp, Artificial Sequence
  Synthetic
gcagcagattuagcatgatactuacac

SEQ ID NO: 66425 - DNA, 28 bp, Artificial Sequence
  Synthetic
gctggtggtauggaaataatgtgttcut

SEQ ID NO: 66426 - DNA, 20 bp, Artificial Sequence
  Synthetic
ccgaggugccctaguagact

SEQ ID NO: 66427 - DNA, 28 bp, Artificial Sequence
  Synthetic
aggtgaacgattutgtgagggataaaut

SEQ ID NO: 66428 - DNA, 21 bp, Artificial Sequence
  Synthetic
acaccacaauactugcaggct

SEQ ID NO: 66429 - DNA, 25 bp, Artificial Sequence
  Synthetic
aatttatttgaggcugctggaggua

SEQ ID NO: 66430 - DNA, 28 bp, Artificial Sequence
  Synthetic
aatgtttctccugagcaagtaacugaat

SEQ ID NO: 66431 - DNA, 27 bp, Artificial Sequence
  Synthetic
acgggaaagtcutacaggtagataugt

SEQ ID NO: 66432 - DNA, 27 bp, Artificial Sequence
  Synthetic
gatggttgccuaaattttcttcugacc

SEQ ID NO: 66433 - DNA, 28 bp, Artificial Sequence
  Synthetic
gaatatcctgtucaggaatgtgactuct

SEQ ID NO: 66434 - DNA, 28 bp, Artificial Sequence
  Synthetic
gtttatggcauggtacctatatgucaca

SEQ ID NO: 66435 - DNA, 27 bp, Artificial Sequence
  Synthetic
ctccactgtugcaaagttattgaaucc

SEQ ID NO: 66436 - DNA, 24 bp, Artificial Sequence
  Synthetic
gtatatgcccuttgaacacugcac

SEQ ID NO: 66437 - DNA, 26 bp, Artificial Sequence
  Synthetic
aaatgtaacacugctccctctttuca

SEQ ID NO: 66438 - DNA, 22 bp, Artificial Sequence
  Synthetic
gtgtggutttgagcaugggaat

SEQ ID NO: 66439 - DNA, 22 bp, Artificial Sequence
  Synthetic
cagcaaaguaggtggaggugac

SEQ ID NO: 66440 - DNA, 20 bp, Artificial Sequence
  Synthetic
gggtggucacagcactguag

SEQ ID NO: 66441 - DNA, 21 bp, Artificial Sequence
  Synthetic
tgtccccacutctcugagcat

SEQ ID NO: 66442 - DNA, 19 bp, Artificial Sequence
  Synthetic
ccagcaugcaccagtgugt

SEQ ID NO: 66443 - DNA, 18 bp, Artificial Sequence
  Synthetic
ggucccaagggagggugt

SEQ ID NO: 66444 - DNA, 26 bp, Artificial Sequence
  Synthetic
ggtgccactuaccataggtgattuat

SEQ ID NO: 66445 - DNA, 29 bp, Artificial Sequence
  Synthetic
aagctcttctagcauatattctaggcuca

SEQ ID NO: 66446 - DNA, 22 bp, Artificial Sequence
  Synthetic
ctgatttgggugtgctgacuct

SEQ ID NO: 66447 - DNA, 20 bp, Artificial Sequence
  Synthetic
ctgtgcccguagtgagauga

SEQ ID NO: 66448 - DNA, 19 bp, Artificial Sequence
  Synthetic
ccagctgguacccaaggut

SEQ ID NO: 66449 - DNA, 18 bp, Artificial Sequence
  Synthetic
gaacgcccutcacugcac

SEQ ID NO: 66450 - DNA, 29 bp, Artificial Sequence
  Synthetic
cutggaaataaaguggaacgaaaagaaga

SEQ ID NO: 66451 - DNA, 28 bp, Artificial Sequence
  Synthetic
gtgcttcctcuttatttagtaccucagt

SEQ ID NO: 66452 - DNA, 21 bp, Artificial Sequence
  Synthetic
agagcauagcugagagcagga

SEQ ID NO: 66453 - DNA, 27 bp, Artificial Sequence
  Synthetic
gtggattgcutgtttacttcaucaagt

SEQ ID NO: 66454 - DNA, 27 bp, Artificial Sequence
  Synthetic
ccaatgaatcaguccgtaccaagauac

SEQ ID NO: 66455 - DNA, 22 bp, Artificial Sequence
  Synthetic
gagtgccugctggattacucat

SEQ ID NO: 66456 - DNA, 23 bp, Artificial Sequence
  Synthetic
gacugataccuggccaacaacat

SEQ ID NO: 66457 - DNA, 21 bp, Artificial Sequence
  Synthetic
caatgcagagguaggctcugt

SEQ ID NO: 66458 - DNA, 21 bp, Artificial Sequence
  Synthetic
gctcuacagtgcagugaagga

SEQ ID NO: 66459 - DNA, 28 bp, Artificial Sequence
  Synthetic
ccagttgggaautctaactactgtuaca

SEQ ID NO: 66460 - DNA, 22 bp, Artificial Sequence
  Synthetic
gctactgacucatgcccttuct

SEQ ID NO: 66461 - DNA, 21 bp, Artificial Sequence
  Synthetic
ggaaaggutcagggauccaca

SEQ ID NO: 66462 - DNA, 24 bp, Artificial Sequence
  Synthetic
agactcaaauggaactgcuccaag

SEQ ID NO: 66463 - DNA, 20 bp, Artificial Sequence
  Synthetic
cagctgucaacacgugcaat

SEQ ID NO: 66464 - DNA, 24 bp, Artificial Sequence
  Synthetic
tttctattcacutgggtgtuggct

SEQ ID NO: 66465 - DNA, 28 bp, Artificial Sequence
  Synthetic
accatggtgauggaaataaaagaugaaa

SEQ ID NO: 66466 - DNA, 28 bp, Artificial Sequence
  Synthetic
catatactgaugaagaaacaaggugcaa

SEQ ID NO: 66467 - DNA, 27 bp, Artificial Sequence
  Synthetic
tgtcaaatggaaggcutcttgtcttua

SEQ ID NO: 66468 - DNA, 23 bp, Artificial Sequence
  Synthetic
gctccugaaagtactcugaaggt

SEQ ID NO: 66469 - DNA, 29 bp, Artificial Sequence
  Synthetic
ggcaggaagaaguatctcgtatcauaaat

SEQ ID NO: 66470 - DNA, 27 bp, Artificial Sequence
  Synthetic
catctaaatcctguagctctggctuag

SEQ ID NO: 66471 - DNA, 24 bp, Artificial Sequence
  Synthetic
tgctctgctutaagtttgggaugt

SEQ ID NO: 66472 - DNA, 21 bp, Artificial Sequence
  Synthetic
ccatgucagaaaagcgcauct

SEQ ID NO: 66473 - DNA, 24 bp, Artificial Sequence
  Synthetic
gctaatggcuctttttcccttugt

SEQ ID NO: 66474 - DNA, 21 bp, Artificial Sequence
  Synthetic
gcctcucccatctgcuaagga

SEQ ID NO: 66475 - DNA, 28 bp, Artificial Sequence
  Synthetic
ctgatgatgatuttgctctttcttugct

SEQ ID NO: 66476 - DNA, 24 bp, Artificial Sequence
  Synthetic
gggataagcuacttttgcuaccac

SEQ ID NO: 66477 - DNA, 28 bp, Artificial Sequence
  Synthetic
tgtggagttuagagttgatgtttuccat

SEQ ID NO: 66478 - DNA, 27 bp, Artificial Sequence
  Synthetic
tgcccaaatgutttagacagatuacca

SEQ ID NO: 66479 - DNA, 24 bp, Artificial Sequence
  Synthetic
ctcccactaautgtcctccaucac

SEQ ID NO: 66480 - DNA, 21 bp, Artificial Sequence
  Synthetic
gaactcgtuccagcacucgat

SEQ ID NO: 66481 - DNA, 23 bp, Artificial Sequence
  Synthetic
ccatcatguacggcaagttcucc

SEQ ID NO: 66482 - DNA, 24 bp, Artificial Sequence
  Synthetic
aagccaaggauggtgttaugaact

SEQ ID NO: 66483 - DNA, 26 bp, Artificial Sequence
  Synthetic
gcctgtcttugtgtgaatcttttucc

SEQ ID NO: 66484 - DNA, 25 bp, Artificial Sequence
  Synthetic
gagaaacacuagacctauggcaaca

SEQ ID NO: 66485 - DNA, 25 bp, Artificial Sequence
  Synthetic
ccctcaaaagaguaatgacctugct

SEQ ID NO: 66486 - DNA, 18 bp, Artificial Sequence
  Synthetic
cggagagcaggcuccaut

SEQ ID NO: 66487 - DNA, 18 bp, Artificial Sequence
  Synthetic
cuccucggagagcagcag

SEQ ID NO: 66488 - DNA, 21 bp, Artificial Sequence
  Synthetic
gagaggcugtccatgtugagg

SEQ ID NO: 66489 - DNA, 20 bp, Artificial Sequence
  Synthetic
caacuccacagggccaugat

SEQ ID NO: 66490 - DNA, 21 bp, Artificial Sequence
  Synthetic
cgutgggaacuccaggaagag

SEQ ID NO: 66491 - DNA, 27 bp, Artificial Sequence
  Synthetic
ggagtcattgucatcaccttattcuca

SEQ ID NO: 66492 - DNA, 20 bp, Artificial Sequence
  Synthetic
gctccucctcgtcugaaggt

SEQ ID NO: 66493 - DNA, 24 bp, Artificial Sequence
  Synthetic
cacaattctcuagctccacacuga

SEQ ID NO: 66494 - DNA, 22 bp, Artificial Sequence
  Synthetic
ccgtctcugaaatccaggugaa

SEQ ID NO: 66495 - DNA, 27 bp, Artificial Sequence
  Synthetic
ctgcatauacaagaaatgctugaagcc

SEQ ID NO: 66496 - DNA, 24 bp, Artificial Sequence
  Synthetic
caacctcatautgccactcttucc

SEQ ID NO: 66497 - DNA, 24 bp, Artificial Sequence
  Synthetic
atccacaaaacccaguatgcugaa

SEQ ID NO: 66498 - DNA, 22 bp, Artificial Sequence
  Synthetic
gggtcutgttgtgaucccagaa

SEQ ID NO: 66499 - DNA, 21 bp, Artificial Sequence
  Synthetic
aggcauacaaggcagaugcag

SEQ ID NO: 66500 - DNA, 22 bp, Artificial Sequence
  Synthetic
ccgcaaacacugacagcuaaga

SEQ ID NO: 66501 - DNA, 20 bp, Artificial Sequence
  Synthetic
aggaggcuaagtggcctuga

SEQ ID NO: 66502 - DNA, 24 bp, Artificial Sequence
  Synthetic
ggtttgcatucttgcttctgucat

SEQ ID NO: 66503 - DNA, 23 bp, Artificial Sequence
  Synthetic
ccctguggaagaaaguacagacc

SEQ ID NO: 66504 - DNA, 22 bp, Artificial Sequence
  Synthetic
ccagacgtugaaacggaaagug

SEQ ID NO: 66505 - DNA, 22 bp, Artificial Sequence
  Synthetic
ccaaacatcuctccttcugcct

SEQ ID NO: 66506 - DNA, 20 bp, Artificial Sequence
  Synthetic
gggacatgugggagctuacc

SEQ ID NO: 66507 - DNA, 20 bp, Artificial Sequence
  Synthetic
ggactgucagcacagagguc

SEQ ID NO: 66508 - DNA, 22 bp, Artificial Sequence
  Synthetic
aggacgccuttgctgtgaauat

SEQ ID NO: 66509 - DNA, 23 bp, Artificial Sequence
  Synthetic
gaaaagagaaggacggutcuggt

SEQ ID NO: 66510 - DNA, 21 bp, Artificial Sequence
  Synthetic
ggaucccttctgucggaacct

SEQ ID NO: 66511 - DNA, 22 bp, Artificial Sequence
  Synthetic
cacccctuaaagaacccagcut

SEQ ID NO: 66512 - DNA, 18 bp, Artificial Sequence
  Synthetic
ggcacagcagaucuccca

SEQ ID NO: 66513 - DNA, 17 bp, Artificial Sequence
  Synthetic
cucacccggacgaggut

SEQ ID NO: 66514 - DNA, 20 bp, Artificial Sequence
  Synthetic
gtggttcugccggtgtgtua

SEQ ID NO: 66515 - DNA, 28 bp, Artificial Sequence
  Synthetic
tcaagagtaggcuttttgtctcagatug

SEQ ID NO: 66516 - DNA, 20 bp, Artificial Sequence
  Synthetic
ggaaggcgacagugccuaag

SEQ ID NO: 66517 - DNA, 27 bp, Artificial Sequence
  Synthetic
tcaggagcugatcaacaaaugaaaaga

SEQ ID NO: 66518 - DNA, 18 bp, Artificial Sequence
  Synthetic
gacgcgugtggcctcuaa

SEQ ID NO: 66519 - DNA, 19 bp, Artificial Sequence
  Synthetic
cucggcgagugaggagaag

SEQ ID NO: 66520 - DNA, 21 bp, Artificial Sequence
  Synthetic
cccacaautgcatgucaccaa

SEQ ID NO: 66521 - DNA, 26 bp, Artificial Sequence
  Synthetic
ggaaggacctcuatgctaacaatguc

SEQ ID NO: 66522 - DNA, 22 bp, Artificial Sequence
  Synthetic
ggtacatcuccattccggugat

SEQ ID NO: 66523 - DNA, 21 bp, Artificial Sequence
  Synthetic
gtcatcccccuggatcttgug

SEQ ID NO: 66524 - DNA, 20 bp, Artificial Sequence
  Synthetic
agcccgacacugtgtgttut

SEQ ID NO: 66525 - DNA, 20 bp, Artificial Sequence
  Synthetic
ccatgccuggaagttuccga

SEQ ID NO: 66526 - DNA, 21 bp, Artificial Sequence
  Synthetic
ccacatccagauccaccaugt

SEQ ID NO: 66527 - DNA, 21 bp, Artificial Sequence
  Synthetic
cctaaccccugtgcctttcuc

SEQ ID NO: 66528 - DNA, 24 bp, Artificial Sequence
  Synthetic
gtactctguacaagcacctctguc

SEQ ID NO: 66529 - DNA, 28 bp, Artificial Sequence
  Synthetic
gttctggcacaauatggaaaatcaacut

SEQ ID NO: 66530 - DNA, 26 bp, Artificial Sequence
  Synthetic
acactagtctttuccaatccctcuca

SEQ ID NO: 66531 - DNA, 22 bp, Artificial Sequence
  Synthetic
cgaggcuagaccttctctgucc

SEQ ID NO: 66532 - DNA, 22 bp, Artificial Sequence
  Synthetic
cctcggcugtacaccacatuaa

SEQ ID NO: 66533 - DNA, 24 bp, Artificial Sequence
  Synthetic
agcttggaguctgaaaagcaucaa

SEQ ID NO: 66534 - DNA, 20 bp, Artificial Sequence
  Synthetic
caggcccugccatattgugt

SEQ ID NO: 66535 - DNA, 26 bp, Artificial Sequence
  Synthetic
aatccuggagattcctaucagaggag

SEQ ID NO: 66536 - DNA, 21 bp, Artificial Sequence
  Synthetic
gtccaagcccuaaagccucat

SEQ ID NO: 66537 - DNA, 22 bp, Artificial Sequence
  Synthetic
cgggaggagaccutcaaauacc

SEQ ID NO: 66538 - DNA, 21 bp, Artificial Sequence
  Synthetic
gtgatgagggugctgtgcuat

SEQ ID NO: 66539 - DNA, 25 bp, Artificial Sequence
  Synthetic
gcggaaaauagggaggaaguaaagg

SEQ ID NO: 66540 - DNA, 19 bp, Artificial Sequence
  Synthetic
gagccggcuaacctacugg

SEQ ID NO: 66541 - DNA, 19 bp, Artificial Sequence
  Synthetic
aggtacgacuccgccauga

SEQ ID NO: 66542 - DNA, 17 bp, Artificial Sequence
  Synthetic
ccagccugacccucgaa

SEQ ID NO: 66543 - DNA, 21 bp, Artificial Sequence
  Synthetic
acagagaaggcautgcaggug

SEQ ID NO: 66544 - DNA, 21 bp, Artificial Sequence
  Synthetic
gcccuggtaccuggagaagag

SEQ ID NO: 66545 - DNA, 24 bp, Artificial Sequence
  Synthetic
ttctagccucagttucccaaaagg

SEQ ID NO: 66546 - DNA, 22 bp, Artificial Sequence
  Synthetic
ggagaaguaaggccaggtgtug

SEQ ID NO: 66547 - DNA, 25 bp, Artificial Sequence
  Synthetic
cacagtagttuggtccttgagttug

SEQ ID NO: 66548 - DNA, 27 bp, Artificial Sequence
  Synthetic
tttctatcctgugacaagtctuaggga

SEQ ID NO: 66549 - DNA, 20 bp, Artificial Sequence
  Synthetic
tgatcaggcugcttgtgugt

SEQ ID NO: 66550 - DNA, 22 bp, Artificial Sequence
  Synthetic
gatgaggaggaccuctcugagt

SEQ ID NO: 66551 - DNA, 21 bp, Artificial Sequence
  Synthetic
ccagcagugacctagugacag

SEQ ID NO: 66552 - DNA, 20 bp, Artificial Sequence
  Synthetic
ccaatcatgutgcccgugac

SEQ ID NO: 66553 - DNA, 21 bp, Artificial Sequence
  Synthetic
gcggccauaccttgucaaaca

SEQ ID NO: 66554 - DNA, 25 bp, Artificial Sequence
  Synthetic
atggtgatcguaacaatggtgguaa

SEQ ID NO: 66555 - DNA, 17 bp, Artificial Sequence
  Synthetic
ggacggccccuaccauc

SEQ ID NO: 66556 - DNA, 29 bp, Artificial Sequence
  Synthetic
ggtaatatatgccutttgagctgtctuga

SEQ ID NO: 66557 - DNA, 24 bp, Artificial Sequence
  Synthetic
gcactagaattugctggctcaugt

SEQ ID NO: 66558 - DNA, 20 bp, Artificial Sequence
  Synthetic
agatgtguaagcgcagccut

SEQ ID NO: 66559 - DNA, 27 bp, Artificial Sequence
  Synthetic
acagaaaagcugcactttaggauaaca

SEQ ID NO: 66560 - DNA, 28 bp, Artificial Sequence
  Synthetic
ccatatgtcatuttcatttcagcuccct

SEQ ID NO: 66561 - DNA, 24 bp, Artificial Sequence
  Synthetic
tgagaatacucagggcaagacuct

SEQ ID NO: 66562 - DNA, 20 bp, Artificial Sequence
  Synthetic
gttccccuctcucagcgaag

SEQ ID NO: 66563 - DNA, 27 bp, Artificial Sequence
  Synthetic
acagctgtcagcuttaataagccatua

SEQ ID NO: 66564 - DNA, 23 bp, Artificial Sequence
  Synthetic
gcataggcucagcatacuacaca

SEQ ID NO: 66565 - DNA, 29 bp, Artificial Sequence
  Synthetic
tgagatacacaguctacctgguaagaaaa

SEQ ID NO: 66566 - DNA, 22 bp, Artificial Sequence
  Synthetic
ggctgtacugttcttccuccaa

SEQ ID NO: 66567 - DNA, 21 bp, Artificial Sequence
  Synthetic
gctcctuacacaggcctctuc

SEQ ID NO: 66568 - DNA, 28 bp, Artificial Sequence
  Synthetic
agactcttgtttcuccttatctccauct

SEQ ID NO: 66569 - DNA, 23 bp, Artificial Sequence
  Synthetic
tgatccaauccaggtagccttug

SEQ ID NO: 66570 - DNA, 22 bp, Artificial Sequence
  Synthetic
gcctggacgaugattctgaugg

SEQ ID NO: 66571 - DNA, 22 bp, Artificial Sequence
  Synthetic
aggaggaggaaugaggaggtut

SEQ ID NO: 66572 - DNA, 22 bp, Artificial Sequence
  Synthetic
ggtcttcucacagcacctcaut

SEQ ID NO: 66573 - DNA, 23 bp, Artificial Sequence
  Synthetic
agctatacccuctctcagctugg

SEQ ID NO: 66574 - DNA, 22 bp, Artificial Sequence
  Synthetic
ggcaugaagaaggtccucaggt

SEQ ID NO: 66575 - DNA, 20 bp, Artificial Sequence
  Synthetic
ggccgucgctttggtaguag

SEQ ID NO: 66576 - DNA, 22 bp, Artificial Sequence
  Synthetic
gcagcaggcgucttctctatut

SEQ ID NO: 66577 - DNA, 28 bp, Artificial Sequence
  Synthetic
gtgtggttaacaucgtgtttttgtttuc

SEQ ID NO: 66578 - DNA, 26 bp, Artificial Sequence
  Synthetic
tgcaacauggaaaatacacattugct

SEQ ID NO: 66579 - DNA, 26 bp, Artificial Sequence
  Synthetic
cgccaattcaguactttattgcuaca

SEQ ID NO: 66580 - DNA, 28 bp, Artificial Sequence
  Synthetic
acgttgtagaauatgtcaaaaucgagca

SEQ ID NO: 66581 - DNA, 26 bp, Artificial Sequence
  Synthetic
ctgttttcatgguaactctgtgctut

SEQ ID NO: 66582 - DNA, 18 bp, Artificial Sequence
  Synthetic
gcagcggacgutcaugct

SEQ ID NO: 66583 - DNA, 28 bp, Artificial Sequence
  Synthetic
ttctatctgtttuccttcctggacatug

SEQ ID NO: 66584 - DNA, 26 bp, Artificial Sequence
  Synthetic
cagtggtccccaaaauactaacagut

SEQ ID NO: 66585 - DNA, 28 bp, Artificial Sequence
  Synthetic
acatttagucgacagaaactagtcttut

SEQ ID NO: 66586 - DNA, 26 bp, Artificial Sequence
  Synthetic
cagatttugacagtgaaaguggaagg

SEQ ID NO: 66587 - DNA, 28 bp, Artificial Sequence
  Synthetic
cttggaaccagcaaauattcttctccua

SEQ ID NO: 66588 - DNA, 26 bp, Artificial Sequence
  Synthetic
gcttggacagcutaatttaagtgcut

SEQ ID NO: 66589 - DNA, 28 bp, Artificial Sequence
  Synthetic
gtcttaacagccugagtgatgtatgtut

SEQ ID NO: 66590 - DNA, 23 bp, Artificial Sequence
  Synthetic
cctaagtguatgcctcctuggat

SEQ ID NO: 66591 - DNA, 28 bp, Artificial Sequence
  Synthetic
cttcaaacccuctactattctaccucca

SEQ ID NO: 66592 - DNA, 21 bp, Artificial Sequence
  Synthetic
cacaggcagcucttctctcug

SEQ ID NO: 66593 - DNA, 21 bp, Artificial Sequence
  Synthetic
aggcucccagaacatcaccua

SEQ ID NO: 66594 - DNA, 21 bp, Artificial Sequence
  Synthetic
ggactcagugcaggacactug

SEQ ID NO: 66595 - DNA, 21 bp, Artificial Sequence
  Synthetic
ccgcaguctctggacuaagga

SEQ ID NO: 66596 - DNA, 20 bp, Artificial Sequence
  Synthetic
ctgtctccucgagcacctut

SEQ ID NO: 66597 - DNA, 22 bp, Artificial Sequence
  Synthetic
cctggaugaggaagggugagat

SEQ ID NO: 66598 - DNA, 18 bp, Artificial Sequence
  Synthetic
catgagggccugcacuga

SEQ ID NO: 66599 - DNA, 21 bp, Artificial Sequence
  Synthetic
caccttctuaccccagctcut

SEQ ID NO: 66600 - DNA, 21 bp, Artificial Sequence
  Synthetic
cagctttggugagaggctgua

SEQ ID NO: 66601 - DNA, 21 bp, Artificial Sequence
  Synthetic
gttacccaggcuccaugaaca

SEQ ID NO: 66602 - DNA, 20 bp, Artificial Sequence
  Synthetic
ccugagggtcugaagccaag

SEQ ID NO: 66603 - DNA, 22 bp, Artificial Sequence
  Synthetic
catcgctgaggucacatgguat

SEQ ID NO: 66604 - DNA, 21 bp, Artificial Sequence
  Synthetic
gcccacaacugucagagcaaa

SEQ ID NO: 66605 - DNA, 25 bp, Artificial Sequence
  Synthetic
tcttcatttcaucctccctgtcuct

SEQ ID NO: 66606 - DNA, 22 bp, Artificial Sequence
  Synthetic
ctgaggcaguctttcacgtcut

SEQ ID NO: 66607 - DNA, 23 bp, Artificial Sequence
  Synthetic
caggaugggcagaggtataauga

SEQ ID NO: 66608 - DNA, 26 bp, Artificial Sequence
  Synthetic
ccaaggacaaggccautaagaaatuc

SEQ ID NO: 66609 - DNA, 24 bp, Artificial Sequence
  Synthetic
gatactgggaucctcacacagtuc

SEQ ID NO: 66610 - DNA, 26 bp, Artificial Sequence
  Synthetic
aagatuccaaagcaagctatgaauga

SEQ ID NO: 66611 - DNA, 27 bp, Artificial Sequence
  Synthetic
ccaccaacucaggaatcctactaugat

SEQ ID NO: 66612 - DNA, 28 bp, Artificial Sequence
  Synthetic
aaataagagaaggcaaacugcataucct

SEQ ID NO: 66613 - DNA, 28 bp, Artificial Sequence
  Synthetic
catctctgcaaaugttagatacgguaca

SEQ ID NO: 66614 - DNA, 27 bp, Artificial Sequence
  Synthetic
tgttactattgucactcgaggattguc

SEQ ID NO: 66615 - DNA, 28 bp, Artificial Sequence
  Synthetic
gggtattucacatcttcataugccaagt

SEQ ID NO: 66616 - DNA, 22 bp, Artificial Sequence
  Synthetic
cacagaaggcaggacuctucat

SEQ ID NO: 66617 - DNA, 26 bp, Artificial Sequence
  Synthetic
gccttgaaaaaucaggtgtctcttut

SEQ ID NO: 66618 - DNA, 21 bp, Artificial Sequence
  Synthetic
ggctgattugggaactgcuga

SEQ ID NO: 66619 - DNA, 28 bp, Artificial Sequence
  Synthetic
cacatgtattatgcugtggagatacugt

SEQ ID NO: 66620 - DNA, 23 bp, Artificial Sequence
  Synthetic
tggtacagtugctgctgctatut

SEQ ID NO: 66621 - DNA, 28 bp, Artificial Sequence
  Synthetic
cttgtgctcauggcaaaaatgtatuact

SEQ ID NO: 66622 - DNA, 17 bp, Artificial Sequence
  Synthetic
ccgggcutgcggacaut

SEQ ID NO: 66623 - DNA, 17 bp, Artificial Sequence
  Synthetic
tgcgagccggugtaugg

SEQ ID NO: 66624 - DNA, 21 bp, Artificial Sequence
  Synthetic
ggagctgucacccacaucaag

SEQ ID NO: 66625 - DNA, 27 bp, Artificial Sequence
  Synthetic
gcagcagacttugtggtcactaaaaug

SEQ ID NO: 66626 - DNA, 25 bp, Artificial Sequence
  Synthetic
atgtaagctuaaacagcgtggtcua

SEQ ID NO: 66627 - DNA, 29 bp, Artificial Sequence
  Synthetic
accaatagagcacutgcatttaaauacct

SEQ ID NO: 66628 - DNA, 27 bp, Artificial Sequence
  Synthetic
gtcaagggaacuttttgttttagcugt

SEQ ID NO: 66629 - DNA, 26 bp, Artificial Sequence
  Synthetic
aggagcauagccaaatttaccatugt

SEQ ID NO: 66630 - DNA, 33 bp, Artificial Sequence
  Synthetic
aatacagttttaacauagtatccagtgtgugaa

SEQ ID NO: 66631 - DNA, 28 bp, Artificial Sequence
  Synthetic
caactgctgcaauaaagatacagatucc

SEQ ID NO: 66632 - DNA, 28 bp, Artificial Sequence
  Synthetic
agaaggcaactugacaagagaaatgaua

SEQ ID NO: 66633 - DNA, 28 bp, Artificial Sequence
  Synthetic
aggtagatgtuaagaaacacctcucact

SEQ ID NO: 66634 - DNA, 28 bp, Artificial Sequence
  Synthetic
tgctcatctcugcaaaattgtatauggt

SEQ ID NO: 66635 - DNA, 29 bp, Artificial Sequence
  Synthetic
aggtgtttgaauaactgcatttggaaaut

SEQ ID NO: 66636 - DNA, 26 bp, Artificial Sequence
  Synthetic
cttgtaagaguccagacattgaucca

SEQ ID NO: 66637 - DNA, 28 bp, Artificial Sequence
  Synthetic
aggtttguagaatgacttugaacgaagt

SEQ ID NO: 66638 - DNA, 24 bp, Artificial Sequence
  Synthetic
gtggaagugcaacatattggucaa

SEQ ID NO: 66639 - DNA, 28 bp, Artificial Sequence
  Synthetic
cggagatgttccuttcaggactatuaaa

SEQ ID NO: 66640 - DNA, 22 bp, Artificial Sequence
  Synthetic
gcctcagtuacctcagggcuat

SEQ ID NO: 66641 - DNA, 22 bp, Artificial Sequence
  Synthetic
gaaggaaggcuacctgtcacuc

SEQ ID NO: 66642 - DNA, 22 bp, Artificial Sequence
  Synthetic
cttcutctcttgcuccagggat

SEQ ID NO: 66643 - DNA, 26 bp, Artificial Sequence
  Synthetic
cccctatauctaggcaatcucacagt

SEQ ID NO: 66644 - DNA, 22 bp, Artificial Sequence
  Synthetic
gcagaatcccugctcctctgua

SEQ ID NO: 66645 - DNA, 22 bp, Artificial Sequence
  Synthetic
cttctcccugatccactaugcc

SEQ ID NO: 66646 - DNA, 21 bp, Artificial Sequence
  Synthetic
gagaugactgcugagcagaca

SEQ ID NO: 66647 - DNA, 23 bp, Artificial Sequence
  Synthetic
gccatcaugcacttuggaaacat

SEQ ID NO: 66648 - DNA, 29 bp, Artificial Sequence
  Synthetic
ccacactgttugtagtcatctttaucaca

SEQ ID NO: 66649 - DNA, 22 bp, Artificial Sequence
  Synthetic
gcagccaccuggtctatuacag

SEQ ID NO: 66650 - DNA, 21 bp, Artificial Sequence
  Synthetic
ccagcccautccagttaggua

SEQ ID NO: 66651 - DNA, 21 bp, Artificial Sequence
  Synthetic
gcagctacautcctgctccug

SEQ ID NO: 66652 - DNA, 21 bp, Artificial Sequence
  Synthetic
ggcugcaagaggacuaagcat

SEQ ID NO: 66653 - DNA, 20 bp, Artificial Sequence
  Synthetic
caagcaggcuctccctctuc

SEQ ID NO: 66654 - DNA, 18 bp, Artificial Sequence
  Synthetic
gtcagccugggtcagcuc

SEQ ID NO: 66655 - DNA, 21 bp, Artificial Sequence
  Synthetic
tgccttguggttctcctugac

SEQ ID NO: 66656 - DNA, 23 bp, Artificial Sequence
  Synthetic
actaacttcugacccaccucgat

SEQ ID NO: 66657 - DNA, 26 bp, Artificial Sequence
  Synthetic
tgaaaaacatctaugctccccttcug

SEQ ID NO: 66658 - DNA, 21 bp, Artificial Sequence
  Synthetic
gcgcacgaauggctaactcut

SEQ ID NO: 66659 - DNA, 23 bp, Artificial Sequence
  Synthetic
gtgccctugagtttctttugcag

SEQ ID NO: 66660 - DNA, 21 bp, Artificial Sequence
  Synthetic
ctcaggugggaagatggaugt

SEQ ID NO: 66661 - DNA, 24 bp, Artificial Sequence
  Synthetic
gagtctugggagaagugaagcaaa

SEQ ID NO: 66662 - DNA, 22 bp, Artificial Sequence
  Synthetic
gaggutcatggacugaggcaaa

SEQ ID NO: 66663 - DNA, 21 bp, Artificial Sequence
  Synthetic
gagaagccauacctgugggat

SEQ ID NO: 66664 - DNA, 22 bp, Artificial Sequence
  Synthetic
gctgatgucaggagagcatuct

SEQ ID NO: 66665 - DNA, 20 bp, Artificial Sequence
  Synthetic
gaggcagagaccacuggaug

SEQ ID NO: 66666 - DNA, 20 bp, Artificial Sequence
  Synthetic
gccgagcaucagcagttuag

SEQ ID NO: 66667 - DNA, 21 bp, Artificial Sequence
  Synthetic
gcaccaagcutaccctgtcut

SEQ ID NO: 66668 - DNA, 18 bp, Artificial Sequence
  Synthetic
gccatggacuccccugag

SEQ ID NO: 66669 - DNA, 17 bp, Artificial Sequence
  Synthetic
cctgccaccugcaucca

SEQ ID NO: 66670 - DNA, 25 bp, Artificial Sequence
  Synthetic
gactctugaacccaaactcttucca

SEQ ID NO: 66671 - DNA, 21 bp, Artificial Sequence
  Synthetic
gcttcccuctgcactacucag

SEQ ID NO: 66672 - DNA, 20 bp, Artificial Sequence
  Synthetic
cagugccacttcuccaggac

SEQ ID NO: 66673 - DNA, 21 bp, Artificial Sequence
  Synthetic
gugggtgacuggcagaaagat

SEQ ID NO: 66674 - DNA, 17 bp, Artificial Sequence
  Synthetic
gagggugcctgcugaca

SEQ ID NO: 66675 - DNA, 20 bp, Artificial Sequence
  Synthetic
agaggagcuggacttgcuca

SEQ ID NO: 66676 - DNA, 17 bp, Artificial Sequence
  Synthetic
ccuggcgugaccaccaa

SEQ ID NO: 66677 - DNA, 21 bp, Artificial Sequence
  Synthetic
tgagctcacuatcagguggca

SEQ ID NO: 66678 - DNA, 20 bp, Artificial Sequence
  Synthetic
ggctctcuaccagggtguca

SEQ ID NO: 66679 - DNA, 18 bp, Artificial Sequence
  Synthetic
cgtgagugttgcguggct

SEQ ID NO: 66680 - DNA, 18 bp, Artificial Sequence
  Synthetic
cggagtuggcggagtugg

SEQ ID NO: 66681 - DNA, 21 bp, Artificial Sequence
  Synthetic
ctggtggacuccaatccctut

SEQ ID NO: 66682 - DNA, 20 bp, Artificial Sequence
  Synthetic
gctgcacaaacugcctcuct

SEQ ID NO: 66683 - DNA, 23 bp, Artificial Sequence
  Synthetic
actacctctucgactggacctuc

SEQ ID NO: 66684 - DNA, 22 bp, Artificial Sequence
  Synthetic
caggtacacaugctccactgut

SEQ ID NO: 66685 - DNA, 20 bp, Artificial Sequence
  Synthetic
ggactcagcguggacaugag

SEQ ID NO: 66686 - DNA, 27 bp, Artificial Sequence
  Synthetic
gagatttgttcuggaagaaaccuaaga

SEQ ID NO: 66687 - DNA, 23 bp, Artificial Sequence
  Synthetic
gcaaagccugaactgtgtttucc

SEQ ID NO: 66688 - DNA, 22 bp, Artificial Sequence
  Synthetic
cutacacagugggaacacccat

SEQ ID NO: 66689 - DNA, 23 bp, Artificial Sequence
  Synthetic
ggttcagauggtcaccaatguca

SEQ ID NO: 66690 - DNA, 25 bp, Artificial Sequence
  Synthetic
tgtctgttgcucatgtgtttgttuc

SEQ ID NO: 66691 - DNA, 19 bp, Artificial Sequence
  Synthetic
gccagcauctcguggacaa

SEQ ID NO: 66692 - DNA, 20 bp, Artificial Sequence
  Synthetic
acaggaaucgcaccagctut

SEQ ID NO: 66693 - DNA, 22 bp, Artificial Sequence
  Synthetic
gagttttggtucctgaccccut

SEQ ID NO: 66694 - DNA, 20 bp, Artificial Sequence
  Synthetic
ccaaugaccagactgugcgt

SEQ ID NO: 66695 - DNA, 28 bp, Artificial Sequence
  Synthetic
cctgaaacagggaautagcaaagttauc

SEQ ID NO: 66696 - DNA, 27 bp, Artificial Sequence
  Synthetic
tccaggcttacgugtgagttttaaaua

SEQ ID NO: 66697 - DNA, 22 bp, Artificial Sequence
  Synthetic
agugcauccagaggaaaagagg

SEQ ID NO: 66698 - DNA, 21 bp, Artificial Sequence
  Synthetic
gtggcagucctttaugagcca

SEQ ID NO: 66699 - DNA, 28 bp, Artificial Sequence
  Synthetic
ctctttacaaagutgacgtgtcattuct

SEQ ID NO: 66700 - DNA, 23 bp, Artificial Sequence
  Synthetic
cugggcaaugaggaacaagaaga

SEQ ID NO: 66701 - DNA, 20 bp, Artificial Sequence
  Synthetic
aacatcatcgugccctgugt

SEQ ID NO: 66702 - DNA, 23 bp, Artificial Sequence
  Synthetic
gttgagucggtaatccugccaat

SEQ ID NO: 66703 - DNA, 24 bp, Artificial Sequence
  Synthetic
cttcaatcauccccatctcccauc

SEQ ID NO: 66704 - DNA, 21 bp, Artificial Sequence
  Synthetic
ccacgcccugaatatcccaut

SEQ ID NO: 66705 - DNA, 22 bp, Artificial Sequence
  Synthetic
ctaagcucccccaacccaaaut

SEQ ID NO: 66706 - DNA, 24 bp, Artificial Sequence
  Synthetic
ccagcaugagaaaatgctctguga

SEQ ID NO: 66707 - DNA, 22 bp, Artificial Sequence
  Synthetic
aggcctuggagatgctttugaa

SEQ ID NO: 66708 - DNA, 20 bp, Artificial Sequence
  Synthetic
ggcataacugcaccctuggt

SEQ ID NO: 66709 - DNA, 25 bp, Artificial Sequence
  Synthetic
cctcttgctuctcttttcctaucct

SEQ ID NO: 66710 - DNA, 23 bp, Artificial Sequence
  Synthetic
tttccctacaguctagcagccua

SEQ ID NO: 66711 - DNA, 25 bp, Artificial Sequence
  Synthetic
cagacuccagagacggauagaaaac

SEQ ID NO: 66712 - DNA, 22 bp, Artificial Sequence
  Synthetic
caaagcccgaaccugtattguc

SEQ ID NO: 66713 - DNA, 23 bp, Artificial Sequence
  Synthetic
cugtcatugggaagaggaagcaa

SEQ ID NO: 66714 - DNA, 27 bp, Artificial Sequence
  Synthetic
ggaaaggacgtuatgtggagacattut

SEQ ID NO: 66715 - DNA, 22 bp, Artificial Sequence
  Synthetic
ggacaccagaggaugcgaatua

SEQ ID NO: 66716 - DNA, 24 bp, Artificial Sequence
  Synthetic
caccaacuacagcagctatuccaa

SEQ ID NO: 66717 - DNA, 23 bp, Artificial Sequence
  Synthetic
gaggaaaugtactugaggcggat

SEQ ID NO: 66718 - DNA, 28 bp, Artificial Sequence
  Synthetic
tgtcattttccutaggttcaaaacuggt

SEQ ID NO: 66719 - DNA, 20 bp, Artificial Sequence
  Synthetic
tgcggagacgutgtcguaag

SEQ ID NO: 66720 - DNA, 21 bp, Artificial Sequence
  Synthetic
gagttugacaggactcugcct

SEQ ID NO: 66721 - DNA, 19 bp, Artificial Sequence
  Synthetic
gatggcccutcgcttcuca

SEQ ID NO: 66722 - DNA, 23 bp, Artificial Sequence
  Synthetic
gggtagtcuccatccatguccat

SEQ ID NO: 66723 - DNA, 21 bp, Artificial Sequence
  Synthetic
gtagctugcagacccuaggac

SEQ ID NO: 66724 - DNA, 20 bp, Artificial Sequence
  Synthetic
ccgtgatgucgtccttguca

SEQ ID NO: 66725 - DNA, 23 bp, Artificial Sequence
  Synthetic
cctggagagugtgctgaagatuc

SEQ ID NO: 66726 - DNA, 23 bp, Artificial Sequence
  Synthetic
cacacgtucctctgcuaaaacct

SEQ ID NO: 66727 - DNA, 25 bp, Artificial Sequence
  Synthetic
cctggttctttucaaaggtggttuc

SEQ ID NO: 66728 - DNA, 22 bp, Artificial Sequence
  Synthetic
gagtgauggagagagggcacua

SEQ ID NO: 66729 - DNA, 19 bp, Artificial Sequence
  Synthetic
cguggcctacauggaccag

SEQ ID NO: 66730 - DNA, 20 bp, Artificial Sequence
  Synthetic
gtcttcctgcuccccagaug

SEQ ID NO: 66731 - DNA, 20 bp, Artificial Sequence
  Synthetic
tttcccuctgctccuaggct

SEQ ID NO: 66732 - DNA, 23 bp, Artificial Sequence
  Synthetic
aacccaggacaaaggugttagug

SEQ ID NO: 66733 - DNA, 25 bp, Artificial Sequence
  Synthetic
ttctcgctgacauctccatttcaut

SEQ ID NO: 66734 - DNA, 21 bp, Artificial Sequence
  Synthetic
cccagaucgggagaaugaact

SEQ ID NO: 66735 - DNA, 22 bp, Artificial Sequence
  Synthetic
cccttccttugtgggaggaauc

SEQ ID NO: 66736 - DNA, 21 bp, Artificial Sequence
  Synthetic
gaccauccgttuccggaagaa

SEQ ID NO: 66737 - DNA, 20 bp, Artificial Sequence
  Synthetic
catucacacgagccucacag

SEQ ID NO: 66738 - DNA, 20 bp, Artificial Sequence
  Synthetic
gggaaauacagggccucgaa

SEQ ID NO: 66739 - DNA, 20 bp, Artificial Sequence
  Synthetic
ctgccctgucaatgcaaguc

SEQ ID NO: 66740 - DNA, 21 bp, Artificial Sequence
  Synthetic
tgccattgaugccccagaaua

SEQ ID NO: 66741 - DNA, 21 bp, Artificial Sequence
  Synthetic
cgtcttcugcttcctcgucac

SEQ ID NO: 66742 - DNA, 23 bp, Artificial Sequence
  Synthetic
ctgcagagccagutcaataccua

SEQ ID NO: 66743 - DNA, 21 bp, Artificial Sequence
  Synthetic
ctgcaactccuccgtgaguat

SEQ ID NO: 66744 - DNA, 27 bp, Artificial Sequence
  Synthetic
tcctaatttctuacactgcctctccua

SEQ ID NO: 66745 - DNA, 19 bp, Artificial Sequence
  Synthetic
caggucuccagagcccaag

SEQ ID NO: 66746 - DNA, 23 bp, Artificial Sequence
  Synthetic
gggaacatcaauaaacccccauc

SEQ ID NO: 66747 - DNA, 17 bp, Artificial Sequence
  Synthetic
gcccuccccatcaugct

SEQ ID NO: 66748 - DNA, 17 bp, Artificial Sequence
  Synthetic
ctucgccacagccgtut

SEQ ID NO: 66749 - DNA, 18 bp, Artificial Sequence
  Synthetic
gguagcggctgucacagg

SEQ ID NO: 66750 - DNA, 21 bp, Artificial Sequence
  Synthetic
cttctgucccactcctuggaa

SEQ ID NO: 66751 - DNA, 24 bp, Artificial Sequence
  Synthetic
cccattcttctucatgcacacgua

SEQ ID NO: 66752 - DNA, 25 bp, Artificial Sequence
  Synthetic
gcaaattaaagutgcagtggaugct

SEQ ID NO: 66753 - DNA, 22 bp, Artificial Sequence
  Synthetic
tctaacagtccuccctgcaugt

SEQ ID NO: 66754 - DNA, 25 bp, Artificial Sequence
  Synthetic
cttctgaaguacaagacaagguggt

SEQ ID NO: 66755 - DNA, 28 bp, Artificial Sequence
  Synthetic
ggactcctacauggtggattattucaaa

SEQ ID NO: 66756 - DNA, 25 bp, Artificial Sequence
  Synthetic
cacutgatgctaaugacaaaaccga

SEQ ID NO: 66757 - DNA, 28 bp, Artificial Sequence
  Synthetic
cttctaacugggaggtgttttcuaaact

SEQ ID NO: 66758 - DNA, 21 bp, Artificial Sequence
  Synthetic
accccacugaggaaacgaaug

SEQ ID NO: 66759 - DNA, 29 bp, Artificial Sequence
  Synthetic
ctgtgatgaaguccactaatgctattuct

SEQ ID NO: 66760 - DNA, 25 bp, Artificial Sequence
  Synthetic
ccttatgccacugctacttcttgut

SEQ ID NO: 66761 - DNA, 23 bp, Artificial Sequence
  Synthetic
ccatttuccagagaggctagucc

SEQ ID NO: 66762 - DNA, 26 bp, Artificial Sequence
  Synthetic
ccaaggagutttctagcaucgaacaa

SEQ ID NO: 66763 - DNA, 24 bp, Artificial Sequence
  Synthetic
cctccugagaggagaaagatgugt

SEQ ID NO: 66764 - DNA, 23 bp, Artificial Sequence
  Synthetic
caacuccattttcuagccaccca

SEQ ID NO: 66765 - DNA, 17 bp, Artificial Sequence
  Synthetic
ccccgagcccucuccat

SEQ ID NO: 66766 - DNA, 24 bp, Artificial Sequence
  Synthetic
caccctctgugttgtttctgagua

SEQ ID NO: 66767 - DNA, 21 bp, Artificial Sequence
  Synthetic
gccctcaauatccttcuggct

SEQ ID NO: 66768 - DNA, 22 bp, Artificial Sequence
  Synthetic
ggagtacuggtttgtgcugact

SEQ ID NO: 66769 - DNA, 20 bp, Artificial Sequence
  Synthetic
cccggcgagutacagtccua

SEQ ID NO: 66770 - DNA, 26 bp, Artificial Sequence
  Synthetic
ggaaataacaccggutagaggtgaua

SEQ ID NO: 66771 - DNA, 25 bp, Artificial Sequence
  Synthetic
gcuaccgtctattuccaagaggaat

SEQ ID NO: 66772 - DNA, 19 bp, Artificial Sequence
  Synthetic
gacugcacacccgacauct

SEQ ID NO: 66773 - DNA, 18 bp, Artificial Sequence
  Synthetic
ggtcctcccuctcacguc

SEQ ID NO: 66774 - DNA, 23 bp, Artificial Sequence
  Synthetic
cctgtaggtgaugggcatcttug

SEQ ID NO: 66775 - DNA, 23 bp, Artificial Sequence
  Synthetic
ttcttctttcuccccttctgcug

SEQ ID NO: 66776 - DNA, 22 bp, Artificial Sequence
  Synthetic
atgacattucccgccttctuga

SEQ ID NO: 66777 - DNA, 25 bp, Artificial Sequence
  Synthetic
ggtttctctuccttcttctucacca

SEQ ID NO: 66778 - DNA, 24 bp, Artificial Sequence
  Synthetic
cttcctcugctatttcugccgaat

SEQ ID NO: 66779 - DNA, 20 bp, Artificial Sequence
  Synthetic
agtgagcuggtggaaagugg

SEQ ID NO: 66780 - DNA, 22 bp, Artificial Sequence
  Synthetic
ggctgatccutctctccacauc

SEQ ID NO: 66781 - DNA, 21 bp, Artificial Sequence
  Synthetic
ggtgtccuaggtgagtcuggt

SEQ ID NO: 66782 - DNA, 21 bp, Artificial Sequence
  Synthetic
cctggaaaugcccagcuagag

SEQ ID NO: 66783 - DNA, 19 bp, Artificial Sequence
  Synthetic
caugcggaaggucccagat

SEQ ID NO: 66784 - DNA, 26 bp, Artificial Sequence
  Synthetic
ttgattgcagguaaatgatgggauga

SEQ ID NO: 66785 - DNA, 21 bp, Artificial Sequence
  Synthetic
caucccacagcauggaaaagg

SEQ ID NO: 66786 - DNA, 20 bp, Artificial Sequence
  Synthetic
acgtcaccccauggtgagua

SEQ ID NO: 66787 - DNA, 21 bp, Artificial Sequence
  Synthetic
ggugccaagagaaacgacugt

SEQ ID NO: 66788 - DNA, 17 bp, Artificial Sequence
  Synthetic
cctccccaggugggcua

SEQ ID NO: 66789 - DNA, 19 bp, Artificial Sequence
  Synthetic
ggcttcucccctccaugac

SEQ ID NO: 66790 - DNA, 20 bp, Artificial Sequence
  Synthetic
ggcagggautaggcucacaa

SEQ ID NO: 66791 - DNA, 25 bp, Artificial Sequence
  Synthetic
agaaaccgaaggaacugtcagatuc

SEQ ID NO: 66792 - DNA, 21 bp, Artificial Sequence
  Synthetic
cagggacagagcuctccuagt

SEQ ID NO: 66793 - DNA, 28 bp, Artificial Sequence
  Synthetic
gcttttcaatuaagcccaatttcacugt

SEQ ID NO: 66794 - DNA, 21 bp, Artificial Sequence
  Synthetic
gcatctccuggcaagttcugg

SEQ ID NO: 66795 - DNA, 24 bp, Artificial Sequence
  Synthetic
ccatcctcacugctgttttgtuct

SEQ ID NO: 66796 - DNA, 21 bp, Artificial Sequence
  Synthetic
catccttctugggctgtguca

SEQ ID NO: 66797 - DNA, 23 bp, Artificial Sequence
  Synthetic
gaattcatcugcactgtgtuggg

SEQ ID NO: 66798 - DNA, 24 bp, Artificial Sequence
  Synthetic
aggctccttuttgatgacctugag

SEQ ID NO: 66799 - DNA, 23 bp, Artificial Sequence
  Synthetic
augggagaccaggagtaucagag

SEQ ID NO: 66800 - DNA, 21 bp, Artificial Sequence
  Synthetic
gcaggatgccutccttgguat

SEQ ID NO: 66801 - DNA, 27 bp, Artificial Sequence
  Synthetic
tgccttggagcuatggatactauaact

SEQ ID NO: 66802 - DNA, 19 bp, Artificial Sequence
  Synthetic
gutgcagtccucggaacca

SEQ ID NO: 66803 - DNA, 19 bp, Artificial Sequence
  Synthetic
gacccgcuccuagcaaagg

SEQ ID NO: 66804 - DNA, 22 bp, Artificial Sequence
  Synthetic
gttgggcugacctcttctctut

SEQ ID NO: 66805 - DNA, 21 bp, Artificial Sequence
  Synthetic
ctgagttuccacggcucaaga

SEQ ID NO: 66806 - DNA, 25 bp, Artificial Sequence
  Synthetic
catccttttuacgctcccactttut

SEQ ID NO: 66807 - DNA, 24 bp, Artificial Sequence
  Synthetic
tctactgcaugaatctgaggguca

SEQ ID NO: 66808 - DNA, 22 bp, Artificial Sequence
  Synthetic
cagagggcacagguttctaucc

SEQ ID NO: 66809 - DNA, 24 bp, Artificial Sequence
  Synthetic
gatgtctgtgutttgcttgcagua

SEQ ID NO: 66810 - DNA, 24 bp, Artificial Sequence
  Synthetic
cttacccctugtgcgtgaagauat

SEQ ID NO: 66811 - DNA, 27 bp, Artificial Sequence
  Synthetic
cttcgtttugggcacatatagttucaa

SEQ ID NO: 66812 - DNA, 20 bp, Artificial Sequence
  Synthetic
tccaagtttugaccgccuca

SEQ ID NO: 66813 - DNA, 21 bp, Artificial Sequence
  Synthetic
aagctcacucctccactcgua

SEQ ID NO: 66814 - DNA, 25 bp, Artificial Sequence
  Synthetic
caccttggaguagatcttccuacct

SEQ ID NO: 66815 - DNA, 25 bp, Artificial Sequence
  Synthetic
caagtcctauctcttgctcauggaa

SEQ ID NO: 66816 - DNA, 28 bp, Artificial Sequence
  Synthetic
gagccagcauatacgtagaatugagaaa

SEQ ID NO: 66817 - DNA, 28 bp, Artificial Sequence
  Synthetic
ggtggaagauaaactcagtcttcugaat

SEQ ID NO: 66818 - DNA, 28 bp, Artificial Sequence
  Synthetic
cctattgatuatgctccaaauggaagga

SEQ ID NO: 66819 - DNA, 29 bp, Artificial Sequence
  Synthetic
atcatcgcttuctataatcagcuacaaca

SEQ ID NO: 66820 - DNA, 28 bp, Artificial Sequence
  Synthetic
cttgaataguagctgtccttuacacact

SEQ ID NO: 66821 - DNA, 24 bp, Artificial Sequence
  Synthetic
tcactctuccaagttttgccucaa

SEQ ID NO: 66822 - DNA, 28 bp, Artificial Sequence
  Synthetic
ccatatcttctgcugcttactcctuaaa

SEQ ID NO: 66823 - DNA, 27 bp, Artificial Sequence
  Synthetic
aacattcacaaaaugggtaaaugcaca

SEQ ID NO: 66824 - DNA, 26 bp, Artificial Sequence
  Synthetic
ggttctttctgcuccttctgtttuac

SEQ ID NO: 66825 - DNA, 27 bp, Artificial Sequence
  Synthetic
gacagcaataucaaatccctcgtttut

SEQ ID NO: 66826 - DNA, 31 bp, Artificial Sequence
  Synthetic
ttttaatgacttttcautggaattcaggcuc

SEQ ID NO: 66827 - DNA, 28 bp, Artificial Sequence
  Synthetic
gtatggcaatugagagcggattctatua

SEQ ID NO: 66828 - DNA, 22 bp, Artificial Sequence
  Synthetic
cagggaacagaacaguggacuc

SEQ ID NO: 66829 - DNA, 25 bp, Artificial Sequence
  Synthetic
tggagaaccugagaatgggaagtua

SEQ ID NO: 66830 - DNA, 29 bp, Artificial Sequence
  Synthetic
gtgtcttacttgutacaaaagctgaaugg

SEQ ID NO: 66831 - DNA, 26 bp, Artificial Sequence
  Synthetic
cctggctaccutttaaaacctttuct

SEQ ID NO: 66832 - DNA, 26 bp, Artificial Sequence
  Synthetic
guatttgcctttatugcaagggaagt

SEQ ID NO: 66833 - DNA, 25 bp, Artificial Sequence
  Synthetic
caatccctcucttcaacacaagugt

SEQ ID NO: 66834 - DNA, 24 bp, Artificial Sequence
  Synthetic
caaaccctctugggtaatctcuca

SEQ ID NO: 66835 - DNA, 25 bp, Artificial Sequence
  Synthetic
gagaatccttucctgtttgcatugg

SEQ ID NO: 66836 - DNA, 28 bp, Artificial Sequence
  Synthetic
cttaagagaguagtctggagaaugaggt

SEQ ID NO: 66837 - DNA, 24 bp, Artificial Sequence
  Synthetic
atcctgcccuttcagacatgtuag

SEQ ID NO: 66838 - DNA, 23 bp, Artificial Sequence
  Synthetic
agggagcucagtaagtcactuct

SEQ ID NO: 66839 - DNA, 25 bp, Artificial Sequence
  Synthetic
ccautgatgtugccgaaaaggaaac

SEQ ID NO: 66840 - DNA, 22 bp, Artificial Sequence
  Synthetic
ccuctttggccucagagaaagt

SEQ ID NO: 66841 - DNA, 24 bp, Artificial Sequence
  Synthetic
gcaatcugagcattcuccacagaa

SEQ ID NO: 66842 - DNA, 28 bp, Artificial Sequence
  Synthetic
aaggaattcagguttttaggagtcucac

SEQ ID NO: 66843 - DNA, 28 bp, Artificial Sequence
  Synthetic
attccaactctauacaaagcccctagua

SEQ ID NO: 66844 - DNA, 22 bp, Artificial Sequence
  Synthetic
tgtgcctccugcgtacauaaaa

SEQ ID NO: 66845 - DNA, 28 bp, Artificial Sequence
  Synthetic
gggagtgcugattaaatagguaagaaca

SEQ ID NO: 66846 - DNA, 25 bp, Artificial Sequence
  Synthetic
cacaccataaaaucttggccatugt

SEQ ID NO: 66847 - DNA, 24 bp, Artificial Sequence
  Synthetic
gggaattccuacaggagatgacua

SEQ ID NO: 66848 - DNA, 22 bp, Artificial Sequence
  Synthetic
acacctucggaagctgagtcua

SEQ ID NO: 66849 - DNA, 28 bp, Artificial Sequence
  Synthetic
tcctcttgactguctctcttgataaguc

SEQ ID NO: 66850 - DNA, 23 bp, Artificial Sequence
  Synthetic
tccaaggttugtgctttcctuga

SEQ ID NO: 66851 - DNA, 27 bp, Artificial Sequence
  Synthetic
gcacacacautttaaaccgattuccaa

SEQ ID NO: 66852 - DNA, 28 bp, Artificial Sequence
  Synthetic
gcattcgctttuctaccatagtaagtug

SEQ ID NO: 66853 - DNA, 24 bp, Artificial Sequence
  Synthetic
cctggctagaguggaaacgauaat

SEQ ID NO: 66854 - DNA, 23 bp, Artificial Sequence
  Synthetic
cuggtattccttuagccaggaca

SEQ ID NO: 66855 - DNA, 28 bp, Artificial Sequence
  Synthetic
agggttaaagauggtttgttgaugaaga

SEQ ID NO: 66856 - DNA, 28 bp, Artificial Sequence
  Synthetic
tgttgcaaatttcutcaaatctgctgut

SEQ ID NO: 66857 - DNA, 25 bp, Artificial Sequence
  Synthetic
tcatctggttgcutaatccctctua

SEQ ID NO: 66858 - DNA, 21 bp, Artificial Sequence
  Synthetic
gggagccauccaacagtcauc

SEQ ID NO: 66859 - DNA, 26 bp, Artificial Sequence
  Synthetic
aatgggagguacctaagtgttcatut

SEQ ID NO: 66860 - DNA, 27 bp, Artificial Sequence
  Synthetic
atttctgtatgagcuttgtcaggagut

SEQ ID NO: 66861 - DNA, 23 bp, Artificial Sequence
  Synthetic
tgtccttttucccctttctgucc

SEQ ID NO: 66862 - DNA, 22 bp, Artificial Sequence
  Synthetic
gacctccuggacttgatgtucc

SEQ ID NO: 66863 - DNA, 27 bp, Artificial Sequence
  Synthetic
acatgggaattauctaccagagtcgua

SEQ ID NO: 66864 - DNA, 23 bp, Artificial Sequence
  Synthetic
cctgaactuaggtcacttuggct

SEQ ID NO: 66865 - DNA, 25 bp, Artificial Sequence
  Synthetic
gatgatctgcautggtacctgguaa

SEQ ID NO: 66866 - DNA, 27 bp, Artificial Sequence
  Synthetic
accagaaaatguggatctgattgtcut

SEQ ID NO: 66867 - DNA, 27 bp, Artificial Sequence
  Synthetic
caatgagacacugcatcctaggaatut

SEQ ID NO: 66868 - DNA, 26 bp, Artificial Sequence
  Synthetic
aaagactgauctcaaaatgcugggat

SEQ ID NO: 66869 - DNA, 23 bp, Artificial Sequence
  Synthetic
caagcaccaucatgctggataug

SEQ ID NO: 66870 - DNA, 29 bp, Artificial Sequence
  Synthetic
cacgtattgattagugttacagagtcuga

SEQ ID NO: 66871 - DNA, 28 bp, Artificial Sequence
  Synthetic
tctttgactucgagacattcttttguga

SEQ ID NO: 66872 - DNA, 22 bp, Artificial Sequence
  Synthetic
ggcugaaggtaggauacgcaat

SEQ ID NO: 66873 - DNA, 28 bp, Artificial Sequence
  Synthetic
gctggaaccuattcagttaataauggca

SEQ ID NO: 66874 - DNA, 26 bp, Artificial Sequence
  Synthetic
aggaatgtugaaagaatggctttugg

SEQ ID NO: 66875 - DNA, 24 bp, Artificial Sequence
  Synthetic
tgcaaugaccauagcaacaaggaa

SEQ ID NO: 66876 - DNA, 23 bp, Artificial Sequence
  Synthetic
gtgtcugtctgttatuccccagt

SEQ ID NO: 66877 - DNA, 25 bp, Artificial Sequence
  Synthetic
agcagagacaaugguaaagggaaaa

SEQ ID NO: 66878 - DNA, 28 bp, Artificial Sequence
  Synthetic
ttctgtctgucaatgactttctttucct

SEQ ID NO: 66879 - DNA, 27 bp, Artificial Sequence
  Synthetic
accacagutaagtgttaaucaagcaca

SEQ ID NO: 66880 - DNA, 28 bp, Artificial Sequence
  Synthetic
tttccttgaagagutgatgagattgugt

SEQ ID NO: 66881 - DNA, 21 bp, Artificial Sequence
  Synthetic
tgaagaaucagctccgctucc

SEQ ID NO: 66882 - DNA, 23 bp, Artificial Sequence
  Synthetic
catcacattugccatccatggut

SEQ ID NO: 66883 - DNA, 25 bp, Artificial Sequence
  Synthetic
gctattccauacgcaccatagacua

SEQ ID NO: 66884 - DNA, 25 bp, Artificial Sequence
  Synthetic
tccccaaacuatgtccttgauacct

SEQ ID NO: 66885 - DNA, 25 bp, Artificial Sequence
  Synthetic
caactttguggctttgtgttttucc

SEQ ID NO: 66886 - DNA, 21 bp, Artificial Sequence
  Synthetic
ccaggaagccuctctgtguct

SEQ ID NO: 66887 - DNA, 21 bp, Artificial Sequence
  Synthetic
acctgacuctgaguagccagt

SEQ ID NO: 66888 - DNA, 21 bp, Artificial Sequence
  Synthetic
cagacuccccagaaugcagag

SEQ ID NO: 66889 - DNA, 20 bp, Artificial Sequence
  Synthetic
aagggcugaggcttgcauat

SEQ ID NO: 66890 - DNA, 18 bp, Artificial Sequence
  Synthetic
ccccuccacctccctucc

SEQ ID NO: 66891 - DNA, 17 bp, Artificial Sequence
  Synthetic
accugggcgaggaccua

SEQ ID NO: 66892 - DNA, 21 bp, Artificial Sequence
  Synthetic
tccacaggcucctctctgtut

SEQ ID NO: 66893 - DNA, 23 bp, Artificial Sequence
  Synthetic
gcgtcugcaaagaggagaagaug

SEQ ID NO: 66894 - DNA, 24 bp, Artificial Sequence
  Synthetic
ccaggatcaacucgtaggcttuac

SEQ ID NO: 66895 - DNA, 21 bp, Artificial Sequence
  Synthetic
ccagactuccctccccttuct

SEQ ID NO: 66896 - DNA, 22 bp, Artificial Sequence
  Synthetic
gggcaggacuaattgcatcugt

SEQ ID NO: 66897 - DNA, 21 bp, Artificial Sequence
  Synthetic
cccccauaggtcccuccaaaa

SEQ ID NO: 66898 - DNA, 28 bp, Artificial Sequence
  Synthetic
tgtgaactttuggaagcaattcaactut

SEQ ID NO: 66899 - DNA, 23 bp, Artificial Sequence
  Synthetic
ggguccaagaaagcagtcattuc

SEQ ID NO: 66900 - DNA, 28 bp, Artificial Sequence
  Synthetic
gccagactgauggactattctcaatuaa

SEQ ID NO: 66901 - DNA, 25 bp, Artificial Sequence
  Synthetic
tcgtcaacagagaguggtaggtuat

SEQ ID NO: 66902 - DNA, 28 bp, Artificial Sequence
  Synthetic
gccaaattgtcugatggaattgtugaaa

SEQ ID NO: 66903 - DNA, 26 bp, Artificial Sequence
  Synthetic
ggagcaauagacagtaauaacagcct

SEQ ID NO: 66904 - DNA, 25 bp, Artificial Sequence
  Synthetic
gtcctgaagcuagatctctcuccat

SEQ ID NO: 66905 - DNA, 29 bp, Artificial Sequence
  Synthetic
tggcttgttgtacuctaattgagctatut

SEQ ID NO: 66906 - DNA, 23 bp, Artificial Sequence
  Synthetic
gtgtgtcuccaacttccccauaa

SEQ ID NO: 66907 - DNA, 27 bp, Artificial Sequence
  Synthetic
cctaccuagaatttttctucccaacct

SEQ ID NO: 66908 - DNA, 20 bp, Artificial Sequence
  Synthetic
aagaucccctccuggcagat

SEQ ID NO: 66909 - DNA, 18 bp, Artificial Sequence
  Synthetic
gcccutgacguccaccac

SEQ ID NO: 66910 - DNA, 27 bp, Artificial Sequence
  Synthetic
gaatatcacaaggaacuactgcuggaa

SEQ ID NO: 66911 - DNA, 24 bp, Artificial Sequence
  Synthetic
gagctctcacauctgtgactucat

SEQ ID NO: 66912 - DNA, 20 bp, Artificial Sequence
  Synthetic
cggtaacccucccagcttug

SEQ ID NO: 66913 - DNA, 24 bp, Artificial Sequence
  Synthetic
cgtttccaacagucctacttcuct

SEQ ID NO: 66914 - DNA, 19 bp, Artificial Sequence
  Synthetic
gccauctugaacccaccgt

SEQ ID NO: 66915 - DNA, 22 bp, Artificial Sequence
  Synthetic
tcccagtcacaugtctcacuct

SEQ ID NO: 66916 - DNA, 20 bp, Artificial Sequence
  Synthetic
caggaaugcggtgatcuggt

SEQ ID NO: 66917 - DNA, 27 bp, Artificial Sequence
  Synthetic
gggccatgtaautaggcattatgttua

SEQ ID NO: 66918 - DNA, 27 bp, Artificial Sequence
  Synthetic
ggttactctucattgtgtttaguccct

SEQ ID NO: 66919 - DNA, 24 bp, Artificial Sequence
  Synthetic
cacttggcauttgttcccugaaaa

SEQ ID NO: 66920 - DNA, 21 bp, Artificial Sequence
  Synthetic
acaagcacauttgccccauct

SEQ ID NO: 66921 - DNA, 28 bp, Artificial Sequence
  Synthetic
ccttgggattacuacagtttcctaucct

SEQ ID NO: 66922 - DNA, 24 bp, Artificial Sequence
  Synthetic
gtcttgttucagggaatugaggga

SEQ ID NO: 66923 - DNA, 28 bp, Artificial Sequence
  Synthetic
ccactttaugaaacaattgcacucacat

SEQ ID NO: 66924 - DNA, 21 bp, Artificial Sequence
  Synthetic
aggaccaggaucuccaggaaa

SEQ ID NO: 66925 - DNA, 27 bp, Artificial Sequence
  Synthetic
ttgtcatgacttuaacctcttcaccuc

SEQ ID NO: 66926 - DNA, 18 bp, Artificial Sequence
  Synthetic
ccctgggutccctgctuc

SEQ ID NO: 66927 - DNA, 28 bp, Artificial Sequence
  Synthetic
aagcactggagucactgatagaaaaaut

SEQ ID NO: 66928 - DNA, 28 bp, Artificial Sequence
  Synthetic
gcttttucacaggatctacuaacacgaa

SEQ ID NO: 66929 - DNA, 28 bp, Artificial Sequence
  Synthetic
cttgtagcugcacttcaaaactguaaaa

SEQ ID NO: 66930 - DNA, 28 bp, Artificial Sequence
  Synthetic
gatagacaugcacatgtatuagcagaca

SEQ ID NO: 66931 - DNA, 28 bp, Artificial Sequence
  Synthetic
gcagatgcuatgagaaagaatucaaact

SEQ ID NO: 66932 - DNA, 23 bp, Artificial Sequence
  Synthetic
aaacatcagcugcaagaguacca

SEQ ID NO: 66933 - DNA, 23 bp, Artificial Sequence
  Synthetic
gttgttatuctgtgccucaggga

SEQ ID NO: 66934 - DNA, 27 bp, Artificial Sequence
  Synthetic
caucaccactatacucacagaggaaga

SEQ ID NO: 66935 - DNA, 26 bp, Artificial Sequence
  Synthetic
gttgataccaauggaatcacggttut

SEQ ID NO: 66936 - DNA, 25 bp, Artificial Sequence
  Synthetic
acagaaaaacaggugatcucccaac

SEQ ID NO: 66937 - DNA, 28 bp, Artificial Sequence
  Synthetic
tttctaactcttuggccttttcttcuca

SEQ ID NO: 66938 - DNA, 26 bp, Artificial Sequence
  Synthetic
tcattcatuaaattccagugccagga

SEQ ID NO: 66939 - DNA, 25 bp, Artificial Sequence
  Synthetic
gggctaaccuagtgcctatagcuaa

SEQ ID NO: 66940 - DNA, 22 bp, Artificial Sequence
  Synthetic
ctcagugactgtggtugaggac

SEQ ID NO: 66941 - DNA, 22 bp, Artificial Sequence
  Synthetic
gccagcgaguaaagtuccaaaa

SEQ ID NO: 66942 - DNA, 22 bp, Artificial Sequence
  Synthetic
agcatgtcacuaaccaccaugt

SEQ ID NO: 66943 - DNA, 22 bp, Artificial Sequence
  Synthetic
ctacccacuctacccctacucc

SEQ ID NO: 66944 - DNA, 21 bp, Artificial Sequence
  Synthetic
taggcttcucaggaggtguct

SEQ ID NO: 66945 - DNA, 23 bp, Artificial Sequence
  Synthetic
aggaagaacaguagcagaagcug

SEQ ID NO: 66946 - DNA, 28 bp, Artificial Sequence
  Synthetic
tggtcactaatutcatggttgaatuggt

SEQ ID NO: 66947 - DNA, 26 bp, Artificial Sequence
  Synthetic
gctgtcgguaaattgttctugaggaa

SEQ ID NO: 66948 - DNA, 23 bp, Artificial Sequence
  Synthetic
tcaataggagagucaggugcaca

SEQ ID NO: 66949 - DNA, 25 bp, Artificial Sequence
  Synthetic
ttcttcactctguctgcttcactuc

SEQ ID NO: 66950 - DNA, 21 bp, Artificial Sequence
  Synthetic
ggctcccaggauttccacaut

SEQ ID NO: 66951 - DNA, 24 bp, Artificial Sequence
  Synthetic
ctactgacagugtttcctgtugct

SEQ ID NO: 66952 - DNA, 26 bp, Artificial Sequence
  Synthetic
tgtcagggcucatctatttatcugga

SEQ ID NO: 66953 - DNA, 27 bp, Artificial Sequence
  Synthetic
tgcaaaccaugcaggagaaatttuaag

SEQ ID NO: 66954 - DNA, 20 bp, Artificial Sequence
  Synthetic
cacaagctccucccctgaut

SEQ ID NO: 66955 - DNA, 22 bp, Artificial Sequence
  Synthetic
gctguacaaacagttccugggt

SEQ ID NO: 66956 - DNA, 23 bp, Artificial Sequence
  Synthetic
cgatgcaugcttcatcaguccat

SEQ ID NO: 66957 - DNA, 28 bp, Artificial Sequence
  Synthetic
ccttctgcagccuttttatataccuact

SEQ ID NO: 66958 - DNA, 25 bp, Artificial Sequence
  Synthetic
gttattgcuttgcaacugccaaaaa

SEQ ID NO: 66959 - DNA, 22 bp, Artificial Sequence
  Synthetic
ccatgctcaugccatacaacug

SEQ ID NO: 66960 - DNA, 28 bp, Artificial Sequence
  Synthetic
accatttaaacuctgtcctattugcaca

SEQ ID NO: 66961 - DNA, 27 bp, Artificial Sequence
  Synthetic
gtgcatcagacaaaaaucagcttctut

SEQ ID NO: 66962 - DNA, 22 bp, Artificial Sequence
  Synthetic
cttctgggccagaguttctcut

SEQ ID NO: 66963 - DNA, 17 bp, Artificial Sequence
  Synthetic
gcagcuggacgcauccc

SEQ ID NO: 66964 - DNA, 23 bp, Artificial Sequence
  Synthetic
cctgggagguctgttucaaaagt

SEQ ID NO: 66965 - DNA, 26 bp, Artificial Sequence
  Synthetic
gautccactgagaauacaaggaccag

SEQ ID NO: 66966 - DNA, 23 bp, Artificial Sequence
  Synthetic
tcagctccuctatgccatugaga

SEQ ID NO: 66967 - DNA, 20 bp, Artificial Sequence
  Synthetic
gggtgatgcucttcgtcucc

SEQ ID NO: 66968 - DNA, 28 bp, Artificial Sequence
  Synthetic
cttttcagatgatuttgtggctaagcuc

SEQ ID NO: 66969 - DNA, 23 bp, Artificial Sequence
  Synthetic
gcaaggcagagaucctgaaugac

SEQ ID NO: 66970 - DNA, 22 bp, Artificial Sequence
  Synthetic
tcacaaggcagccauggtttua

SEQ ID NO: 66971 - DNA, 20 bp, Artificial Sequence
  Synthetic
agaggaggaaguccaucgct

SEQ ID NO: 66972 - DNA, 28 bp, Artificial Sequence
  Synthetic
tgtgagaataagtaugatgttcctgcug

SEQ ID NO: 66973 - DNA, 28 bp, Artificial Sequence
  Synthetic
ccataagcccaugctgatcctttaaaua

SEQ ID NO: 66974 - DNA, 25 bp, Artificial Sequence
  Synthetic
gtgagaactaaacuagacagccgut

SEQ ID NO: 66975 - DNA, 28 bp, Artificial Sequence
  Synthetic
ccacaggatcugcttctgtatcatcuat

SEQ ID NO: 66976 - DNA, 24 bp, Artificial Sequence
  Synthetic
gtgggaggugaactctgaaatgua

SEQ ID NO: 66977 - DNA, 28 bp, Artificial Sequence
  Synthetic
gtcatccgtgugactttaaaccatttut

SEQ ID NO: 66978 - DNA, 25 bp, Artificial Sequence
  Synthetic
agagagcaaatuctttccctgtuca

SEQ ID NO: 66979 - DNA, 24 bp, Artificial Sequence
  Synthetic
gcaagttcatccuactctcgaguc

SEQ ID NO: 66980 - DNA, 25 bp, Artificial Sequence
  Synthetic
tcactgtcugcggtaatcaagttut

SEQ ID NO: 66981 - DNA, 24 bp, Artificial Sequence
  Synthetic
acctgaaaaaggutaagggctcug

SEQ ID NO: 66982 - DNA, 27 bp, Artificial Sequence
  Synthetic
cagtagaatttgucatagcaccaggua

SEQ ID NO: 66983 - DNA, 21 bp, Artificial Sequence
  Synthetic
actgctactucctgtctgcug

SEQ ID NO: 66984 - DNA, 21 bp, Artificial Sequence
  Synthetic
cttuggcggcaagagttugat

SEQ ID NO: 66985 - DNA, 23 bp, Artificial Sequence
  Synthetic
ccuccagaaccaaaaugcaagga

SEQ ID NO: 66986 - DNA, 18 bp, Artificial Sequence
  Synthetic
tggctggguggagcatug

SEQ ID NO: 66987 - DNA, 19 bp, Artificial Sequence
  Synthetic
atctggcaucctgccctug

SEQ ID NO: 66988 - DNA, 17 bp, Artificial Sequence
  Synthetic
gacccutgccugcccat

SEQ ID NO: 66989 - DNA, 18 bp, Artificial Sequence
  Synthetic
acugctcacugccacaca

SEQ ID NO: 66990 - DNA, 23 bp, Artificial Sequence
  Synthetic
ggagutgtcauggaagacaggaa

SEQ ID NO: 66991 - DNA, 20 bp, Artificial Sequence
  Synthetic
gtcttgcgguactcgaggug

SEQ ID NO: 66992 - DNA, 24 bp, Artificial Sequence
  Synthetic
tcctaatucaggctcaactcucct

SEQ ID NO: 66993 - DNA, 24 bp, Artificial Sequence
  Synthetic
tcatcttgattuctgcctgctcut

SEQ ID NO: 66994 - DNA, 23 bp, Artificial Sequence
  Synthetic
cagcagaaccagcugatttucac

SEQ ID NO: 66995 - DNA, 28 bp, Artificial Sequence
  Synthetic
aggcagatgaaguattggagatttugaa

SEQ ID NO: 66996 - DNA, 19 bp, Artificial Sequence
  Synthetic
acacucacctgguccccaa

SEQ ID NO: 66997 - DNA, 27 bp, Artificial Sequence
  Synthetic
gaaaggttcugccattcaataucacat

SEQ ID NO: 66998 - DNA, 28 bp, Artificial Sequence
  Synthetic
acaaagaagtugaagaagtttccaucct

SEQ ID NO: 66999 - DNA, 21 bp, Artificial Sequence
  Synthetic
ttctctggcaaugggactcug

SEQ ID NO: 67000 - DNA, 28 bp, Artificial Sequence
  Synthetic
attatcaagugaaagaaaacacgcugac

SEQ ID NO: 67001 - DNA, 28 bp, Artificial Sequence
  Synthetic
aaactgctacctucttatcccacattut

SEQ ID NO: 67002 - DNA, 26 bp, Artificial Sequence
  Synthetic
cttttcuggtcacaguaacaaggact

SEQ ID NO: 67003 - DNA, 24 bp, Artificial Sequence
  Synthetic
cacataagcccugagaagtgtuca

SEQ ID NO: 67004 - DNA, 21 bp, Artificial Sequence
  Synthetic
ggacttgaacaucgacccuga

SEQ ID NO: 67005 - DNA, 21 bp, Artificial Sequence
  Synthetic
ctcccccgguaaaacactgut

SEQ ID NO: 67006 - DNA, 28 bp, Artificial Sequence
  Synthetic
cctcattccutcaaatctagauaaggct

SEQ ID NO: 67007 - DNA, 26 bp, Artificial Sequence
  Synthetic
tgttcctgtugagttgcttttaguga

SEQ ID NO: 67008 - DNA, 27 bp, Artificial Sequence
  Synthetic
agctcaaguaaaattttgtcatuggca

SEQ ID NO: 67009 - DNA, 26 bp, Artificial Sequence
  Synthetic
ctgctacaagautgttgaacacagut

SEQ ID NO: 67010 - DNA, 28 bp, Artificial Sequence
  Synthetic
ctcatttcagcaagugtatggtuagaaa

SEQ ID NO: 67011 - DNA, 24 bp, Artificial Sequence
  Synthetic
cagcaatugaagaagaccctgaug

SEQ ID NO: 67012 - DNA, 27 bp, Artificial Sequence
  Synthetic
tcctatatctctucctctgccttugaa

SEQ ID NO: 67013 - DNA, 21 bp, Artificial Sequence
  Synthetic
caguaggtgctucagcaacca

SEQ ID NO: 67014 - DNA, 25 bp, Artificial Sequence
  Synthetic
gaattucaagccacgaagctuacat

SEQ ID NO: 67015 - DNA, 28 bp, Artificial Sequence
  Synthetic
cacaaugaaaagaccauccagagaaaag

SEQ ID NO: 67016 - DNA, 27 bp, Artificial Sequence
  Synthetic
catgtataucaaggaaactgggcugat

SEQ ID NO: 67017 - DNA, 28 bp, Artificial Sequence
  Synthetic
gtatcacacucttcatctgctugaaaaa

SEQ ID NO: 67018 - DNA, 20 bp, Artificial Sequence
  Synthetic
cgtggugaacgcgtaagtut

SEQ ID NO: 67019 - DNA, 23 bp, Artificial Sequence
  Synthetic
gttctccaggugatccatcctug

SEQ ID NO: 67020 - DNA, 23 bp, Artificial Sequence
  Synthetic
gatctcctcuttgtcctgcauct

SEQ ID NO: 67021 - DNA, 33 bp, Artificial Sequence
  Synthetic
aaaataatatcatggutattcttgttaggguga

SEQ ID NO: 67022 - DNA, 22 bp, Artificial Sequence
  Synthetic
acccttgagcautttgagcugt

SEQ ID NO: 67023 - DNA, 28 bp, Artificial Sequence
  Synthetic
gactagctaaaugtcctggttctuacaa

SEQ ID NO: 67024 - DNA, 21 bp, Artificial Sequence
  Synthetic
catccgggcucagtaugagac

SEQ ID NO: 67025 - DNA, 21 bp, Artificial Sequence
  Synthetic
gctctccucccatggatggua

SEQ ID NO: 67026 - DNA, 20 bp, Artificial Sequence
  Synthetic
gacttggucaggctgagugt

SEQ ID NO: 67027 - DNA, 20 bp, Artificial Sequence
  Synthetic
acuagccagggaccuagacc

SEQ ID NO: 67028 - DNA, 20 bp, Artificial Sequence
  Synthetic
cctactccugcaacgtgcut

SEQ ID NO: 67029 - DNA, 22 bp, Artificial Sequence
  Synthetic
gtgcttcagucaccttcttugg

SEQ ID NO: 67030 - DNA, 18 bp, Artificial Sequence
  Synthetic
ggcaggcgucgaagagua

SEQ ID NO: 67031 - DNA, 21 bp, Artificial Sequence
  Synthetic
gcgatugcagaagatgaccug

SEQ ID NO: 67032 - DNA, 17 bp, Artificial Sequence
  Synthetic
gguccaggcggcuacat

SEQ ID NO: 67033 - DNA, 17 bp, Artificial Sequence
  Synthetic
gggagaggcgcutccug

SEQ ID NO: 67034 - DNA, 28 bp, Artificial Sequence
  Synthetic
gagaactgauagaaattggatgugagga

SEQ ID NO: 67035 - DNA, 27 bp, Artificial Sequence
  Synthetic
gtggatttcccaugtggttcttttuaa

SEQ ID NO: 67036 - DNA, 22 bp, Artificial Sequence
  Synthetic
cctacagtcaggugagggctua

SEQ ID NO: 67037 - DNA, 26 bp, Artificial Sequence
  Synthetic
tcttcttcatgcutgtcatcttccug

SEQ ID NO: 67038 - DNA, 22 bp, Artificial Sequence
  Synthetic
ccaaggaguggaccactguaaa

SEQ ID NO: 67039 - DNA, 21 bp, Artificial Sequence
  Synthetic
gacaccgcuctatgactucca

SEQ ID NO: 67040 - DNA, 21 bp, Artificial Sequence
  Synthetic
cataggcagcuctgggugaag

SEQ ID NO: 67041 - DNA, 22 bp, Artificial Sequence
  Synthetic
acaucgaggagctcaugaagga

SEQ ID NO: 67042 - DNA, 21 bp, Artificial Sequence
  Synthetic
gctacuaaccccgcactcuca

SEQ ID NO: 67043 - DNA, 22 bp, Artificial Sequence
  Synthetic
gggcagggcuatttaagucaag

SEQ ID NO: 67044 - DNA, 22 bp, Artificial Sequence
  Synthetic
tgtgcaguatgcaauccagaca

SEQ ID NO: 67045 - DNA, 24 bp, Artificial Sequence
  Synthetic
actgctacuggcattttgacagut

SEQ ID NO: 67046 - DNA, 27 bp, Artificial Sequence
  Synthetic
cccattatgutcaaaagccucagaaaa

SEQ ID NO: 67047 - DNA, 28 bp, Artificial Sequence
  Synthetic
tcctcaactgutgtgaattcctuaagag

SEQ ID NO: 67048 - DNA, 29 bp, Artificial Sequence
  Synthetic
aatttuattcttgcaattuacacgacagt

SEQ ID NO: 67049 - DNA, 21 bp, Artificial Sequence
  Synthetic
gcttgguggagaaggctauct

SEQ ID NO: 67050 - DNA, 26 bp, Artificial Sequence
  Synthetic
aaaccaagacaccaguaatggctaut

SEQ ID NO: 67051 - DNA, 28 bp, Artificial Sequence
  Synthetic
agctgggaaatuttaagattccttcugt

SEQ ID NO: 67052 - DNA, 27 bp, Artificial Sequence
  Synthetic
tgatgtaaaauacgcaactgtcaguga

SEQ ID NO: 67053 - DNA, 27 bp, Artificial Sequence
  Synthetic
agtatgtggttcgugaaggtgataaug

SEQ ID NO: 67054 - DNA, 28 bp, Artificial Sequence
  Synthetic
caccttcatttuctccaatgttctucaa

SEQ ID NO: 67055 - DNA, 21 bp, Artificial Sequence
  Synthetic
tcctaccagguagcctcuact

SEQ ID NO: 67056 - DNA, 25 bp, Artificial Sequence
  Synthetic
cagtattgattgucactgtccggua

SEQ ID NO: 67057 - DNA, 24 bp, Artificial Sequence
  Synthetic
actaatcaccugtgtcctctcugt

SEQ ID NO: 67058 - DNA, 22 bp, Artificial Sequence
  Synthetic
tgagaaaugggacccctgtgua

SEQ ID NO: 67059 - DNA, 24 bp, Artificial Sequence
  Synthetic
acctggttcacuccacaattctuc

SEQ ID NO: 67060 - DNA, 18 bp, Artificial Sequence
  Synthetic
gcattggtugcggccauc

SEQ ID NO: 67061 - DNA, 19 bp, Artificial Sequence
  Synthetic
gaccccagggaggutgtuc

SEQ ID NO: 67062 - DNA, 19 bp, Artificial Sequence
  Synthetic
gccaagccugtcaccguag

SEQ ID NO: 67063 - DNA, 22 bp, Artificial Sequence
  Synthetic
cccagcaggutgatgatgttut

SEQ ID NO: 67064 - DNA, 20 bp, Artificial Sequence
  Synthetic
gcccacucctttaccuccaa

SEQ ID NO: 67065 - DNA, 18 bp, Artificial Sequence
  Synthetic
gtgggcauggtgcucaga

SEQ ID NO: 67066 - DNA, 23 bp, Artificial Sequence
  Synthetic
ttttgcctguacagatctgcugt

SEQ ID NO: 67067 - DNA, 28 bp, Artificial Sequence
  Synthetic
gggatgtagttgcugagctttcataaua

SEQ ID NO: 67068 - DNA, 26 bp, Artificial Sequence
  Synthetic
aggagacacucaccagtatgaaucat

SEQ ID NO: 67069 - DNA, 28 bp, Artificial Sequence
  Synthetic
ccatgtttgcaaaugcataacaaaggua

SEQ ID NO: 67070 - DNA, 22 bp, Artificial Sequence
  Synthetic
gggctaacugttctccaaguca

SEQ ID NO: 67071 - DNA, 22 bp, Artificial Sequence
  Synthetic
cttggtgcauccatcaagugaa

SEQ ID NO: 67072 - DNA, 24 bp, Artificial Sequence
  Synthetic
ggcaataaggcuagggaatcauct

SEQ ID NO: 67073 - DNA, 25 bp, Artificial Sequence
  Synthetic
gggaggttucacagaatgttcttut

SEQ ID NO: 67074 - DNA, 24 bp, Artificial Sequence
  Synthetic
ggatctttcugtgttccagugacc

SEQ ID NO: 67075 - DNA, 27 bp, Artificial Sequence
  Synthetic
gcattgaaatgaugaagccaaaugaac

SEQ ID NO: 67076 - DNA, 25 bp, Artificial Sequence
  Synthetic
gcagcctgugagattatcttttgut

SEQ ID NO: 67077 - DNA, 26 bp, Artificial Sequence
  Synthetic
gggaatatcaagauccacaatgcuga

SEQ ID NO: 67078 - DNA, 26 bp, Artificial Sequence
  Synthetic
aatactttccccaacuttgagcauct

SEQ ID NO: 67079 - DNA, 23 bp, Artificial Sequence
  Synthetic
gctttggcuggtcacttgaatut

SEQ ID NO: 67080 - DNA, 24 bp, Artificial Sequence
  Synthetic
gaagtgaaauctgactuggcacag

SEQ ID NO: 67081 - DNA, 27 bp, Artificial Sequence
  Synthetic
ctgggtgaaacaaugctcattttaugt

SEQ ID NO: 67082 - DNA, 20 bp, Artificial Sequence
  Synthetic
cagggagaccacguggaaug

SEQ ID NO: 67083 - DNA, 22 bp, Artificial Sequence
  Synthetic
agutaatgtggacugggccaag

SEQ ID NO: 67084 - DNA, 20 bp, Artificial Sequence
  Synthetic
ctcctgcucggctcatcaut

SEQ ID NO: 67085 - DNA, 25 bp, Artificial Sequence
  Synthetic
gcaaagacaugaaggcaaaatguca

SEQ ID NO: 67086 - DNA, 25 bp, Artificial Sequence
  Synthetic
aacaagcatttuaccaccatgcaut

SEQ ID NO: 67087 - DNA, 24 bp, Artificial Sequence
  Synthetic
tggaataatgatucggagcccaut

SEQ ID NO: 67088 - DNA, 21 bp, Artificial Sequence
  Synthetic
ccctgaggccutgtggatcua

SEQ ID NO: 67089 - DNA, 26 bp, Artificial Sequence
  Synthetic
caggaacttcatuaaccaggtgacut

SEQ ID NO: 67090 - DNA, 24 bp, Artificial Sequence
  Synthetic
cagggaagagacuctctcugaaga

SEQ ID NO: 67091 - DNA, 21 bp, Artificial Sequence
  Synthetic
gtggaggcugaaatccccaut

SEQ ID NO: 67092 - DNA, 24 bp, Artificial Sequence
  Synthetic
cgtcucagaggaagacatttcugt

SEQ ID NO: 67093 - DNA, 28 bp, Artificial Sequence
  Synthetic
ggtattacattugacaggctttcttugg

SEQ ID NO: 67094 - DNA, 27 bp, Artificial Sequence
  Synthetic
agagggcataucaatgtaagtctucct

SEQ ID NO: 67095 - DNA, 26 bp, Artificial Sequence
  Synthetic
actgactcaccaacaauatcaagcug

SEQ ID NO: 67096 - DNA, 27 bp, Artificial Sequence
  Synthetic
cttggtaaaaacugaaatctgguccaa

SEQ ID NO: 67097 - DNA, 27 bp, Artificial Sequence
  Synthetic
agggaaataataaugcaacggtaguca

SEQ ID NO: 67098 - DNA, 21 bp, Artificial Sequence
  Synthetic
gcatttcccugaggaguacga

SEQ ID NO: 67099 - DNA, 29 bp, Artificial Sequence
  Synthetic
tctgatctugagacacctatatctuccaa

SEQ ID NO: 67100 - DNA, 21 bp, Artificial Sequence
  Synthetic
ggatggaucatggcugccaaa

SEQ ID NO: 67101 - DNA, 23 bp, Artificial Sequence
  Synthetic
ggaaacacucaaggagtuaggct

SEQ ID NO: 67102 - DNA, 26 bp, Artificial Sequence
  Synthetic
acgtggaccutgatattttgucaact

SEQ ID NO: 67103 - DNA, 27 bp, Artificial Sequence
  Synthetic
gctttgcagaguaatgaagacagugat

SEQ ID NO: 67104 - DNA, 25 bp, Artificial Sequence
  Synthetic
gcttagatucaacccatctgcctua

SEQ ID NO: 67105 - DNA, 25 bp, Artificial Sequence
  Synthetic
agaagccaaaccuataatucgcagt

SEQ ID NO: 67106 - DNA, 24 bp, Artificial Sequence
  Synthetic
ctgtttctgctucctccacatcut

SEQ ID NO: 67107 - DNA, 29 bp, Artificial Sequence
  Synthetic
ggatacattagaugcagtcctgttugaat

SEQ ID NO: 67108 - DNA, 27 bp, Artificial Sequence
  Synthetic
cttcaaaaacacccautacuccacaag

SEQ ID NO: 67109 - DNA, 28 bp, Artificial Sequence
  Synthetic
cctgttgtgatauctgttgttgattcug

SEQ ID NO: 67110 - DNA, 29 bp, Artificial Sequence
  Synthetic
tacttgaggtttauatatagaggcgtcut

SEQ ID NO: 67111 - DNA, 25 bp, Artificial Sequence
  Synthetic
tcactgccaagutcattaagcugat

SEQ ID NO: 67112 - DNA, 27 bp, Artificial Sequence
  Synthetic
atggactatacacutaacacctguact

SEQ ID NO: 67113 - DNA, 24 bp, Artificial Sequence
  Synthetic
gcatttucaccaagaactcguagg

SEQ ID NO: 67114 - DNA, 24 bp, Artificial Sequence
  Synthetic
gggaaagaaguacctgctctaaug

SEQ ID NO: 67115 - DNA, 25 bp, Artificial Sequence
  Synthetic
agacttggaugctgaauaaaggcaa

SEQ ID NO: 67116 - DNA, 23 bp, Artificial Sequence
  Synthetic
aggaaaaugagucaagcgacagt

SEQ ID NO: 67117 - DNA, 29 bp, Artificial Sequence
  Synthetic
gagaagtaauaaaatacccugggacacat

SEQ ID NO: 67118 - DNA, 25 bp, Artificial Sequence
  Synthetic
cacagttccaugcctttatcaguct

SEQ ID NO: 67119 - DNA, 23 bp, Artificial Sequence
  Synthetic
agttgccaugttgatttcuccca

SEQ ID NO: 67120 - DNA, 28 bp, Artificial Sequence
  Synthetic
ttgaattgaacatucacttgctgttuct

SEQ ID NO: 67121 - DNA, 22 bp, Artificial Sequence
  Synthetic
ggatccaugaggcagtcuaggt

SEQ ID NO: 67122 - DNA, 22 bp, Artificial Sequence
  Synthetic
cgacaacaccaggcauctuaca

SEQ ID NO: 67123 - DNA, 22 bp, Artificial Sequence
  Synthetic
ccttctauccacgtgccuacag

SEQ ID NO: 67124 - DNA, 20 bp, Artificial Sequence
  Synthetic
tcctcgagcugttcctucca

SEQ ID NO: 67125 - DNA, 23 bp, Artificial Sequence
  Synthetic
gtctgugtttgccugagaaacaa

SEQ ID NO: 67126 - DNA, 22 bp, Artificial Sequence
  Synthetic
gctgctttggugatggatcuca

SEQ ID NO: 67127 - DNA, 22 bp, Artificial Sequence
  Synthetic
ggatcugacacacagccttuct

SEQ ID NO: 67128 - DNA, 22 bp, Artificial Sequence
  Synthetic
tctggttuctctgtgttugcct

SEQ ID NO: 67129 - DNA, 18 bp, Artificial Sequence
  Synthetic
gggtguggccaaggctut

SEQ ID NO: 67130 - DNA, 21 bp, Artificial Sequence
  Synthetic
gctgggaugagtucaccaaac

SEQ ID NO: 67131 - DNA, 26 bp, Artificial Sequence
  Synthetic
ggtcuagaagactctttgucacacaa

SEQ ID NO: 67132 - DNA, 27 bp, Artificial Sequence
  Synthetic
ccgactgactuatgagattgaagauga

SEQ ID NO: 67133 - DNA, 23 bp, Artificial Sequence
  Synthetic
ctgcaguagaaccctcaacctut

SEQ ID NO: 67134 - DNA, 22 bp, Artificial Sequence
  Synthetic
tcucaggaggguggaagaagac

SEQ ID NO: 67135 - DNA, 22 bp, Artificial Sequence
  Synthetic
gatggtttuggcagcatcauca

SEQ ID NO: 67136 - DNA, 20 bp, Artificial Sequence
  Synthetic
ctcagguagccgaugacagg

SEQ ID NO: 67137 - DNA, 20 bp, Artificial Sequence
  Synthetic
tcccctuctacccucaacga

SEQ ID NO: 67138 - DNA, 21 bp, Artificial Sequence
  Synthetic
gctgctcucagctttctuggt

SEQ ID NO: 67139 - DNA, 20 bp, Artificial Sequence
  Synthetic
cccagcagaaccaguacguc

SEQ ID NO: 67140 - DNA, 21 bp, Artificial Sequence
  Synthetic
gtccctguccttgtacugcac

SEQ ID NO: 67141 - DNA, 22 bp, Artificial Sequence
  Synthetic
ggcacctggcaucctctctaua

SEQ ID NO: 67142 - DNA, 21 bp, Artificial Sequence
  Synthetic
cacacctgucctgagccttua

SEQ ID NO: 67143 - DNA, 18 bp, Artificial Sequence
  Synthetic
ctguacggccuccacgag

SEQ ID NO: 67144 - DNA, 21 bp, Artificial Sequence
  Synthetic
ggaacttccuccaggagguga

SEQ ID NO: 67145 - DNA, 24 bp, Artificial Sequence
  Synthetic
agctttcccuaacccattctctug

SEQ ID NO: 67146 - DNA, 21 bp, Artificial Sequence
  Synthetic
ctcucaacccccacaactucc

SEQ ID NO: 67147 - DNA, 25 bp, Artificial Sequence
  Synthetic
gactcctctutgcattctctugact

SEQ ID NO: 67148 - DNA, 22 bp, Artificial Sequence
  Synthetic
aagtgagauggctgagcaugaa

SEQ ID NO: 67149 - DNA, 24 bp, Artificial Sequence
  Synthetic
ctgggcccaugttttgtatactug

SEQ ID NO: 67150 - DNA, 25 bp, Artificial Sequence
  Synthetic
cccataatcuaaacacactgugcct

SEQ ID NO: 67151 - DNA, 18 bp, Artificial Sequence
  Synthetic
ccaaucccagcccacuga

SEQ ID NO: 67152 - DNA, 22 bp, Artificial Sequence
  Synthetic
cgcagcattugaactcgatcug

SEQ ID NO: 67153 - DNA, 24 bp, Artificial Sequence
  Synthetic
cgtacctggcuatctgtgttcuct

SEQ ID NO: 67154 - DNA, 28 bp, Artificial Sequence
  Synthetic
ccagctctcauctttgctatttccauat

SEQ ID NO: 67155 - DNA, 29 bp, Artificial Sequence
  Synthetic
agttacataaatguacgtgcactgatcut

SEQ ID NO: 67156 - DNA, 24 bp, Artificial Sequence
  Synthetic
ctctcutcttagttgucccagcag

SEQ ID NO: 67157 - DNA, 22 bp, Artificial Sequence
  Synthetic
tgagtaagcaaaguggcagcut

SEQ ID NO: 67158 - DNA, 23 bp, Artificial Sequence
  Synthetic
gcutctttuaagccaacagcaca

SEQ ID NO: 67159 - DNA, 19 bp, Artificial Sequence
  Synthetic
cccgccacaggagucaaut

SEQ ID NO: 67160 - DNA, 20 bp, Artificial Sequence
  Synthetic
gacgttgucgccatcttgug

SEQ ID NO: 67161 - DNA, 27 bp, Artificial Sequence
  Synthetic
cttatactaucccgcccaaaaacaaug

SEQ ID NO: 67162 - DNA, 27 bp, Artificial Sequence
  Synthetic
gtcatcgctcugagaaatagagaucaa

SEQ ID NO: 67163 - DNA, 21 bp, Artificial Sequence
  Synthetic
gacagaacaccacgucaguct

SEQ ID NO: 67164 - DNA, 21 bp, Artificial Sequence
  Synthetic
cccatcucagagccaagugac

SEQ ID NO: 67165 - DNA, 28 bp, Artificial Sequence
  Synthetic
gcttgggagcacutcacatatacttuat

SEQ ID NO: 67166 - DNA, 22 bp, Artificial Sequence
  Synthetic
ctcagccacucagtguccaaat

SEQ ID NO: 67167 - DNA, 20 bp, Artificial Sequence
  Synthetic
aacatcctuctccggctugg

SEQ ID NO: 67168 - DNA, 25 bp, Artificial Sequence
  Synthetic
aagcaaataccutaacacctgcuct

SEQ ID NO: 67169 - DNA, 27 bp, Artificial Sequence
  Synthetic
gctgatctcuctgatgagtatugaagt

SEQ ID NO: 67170 - DNA, 31 bp, Artificial Sequence
  Synthetic
aacttatgtaaccucattttgttcatcucca

SEQ ID NO: 67171 - DNA, 27 bp, Artificial Sequence
  Synthetic
tggctctaaacuatgatggcatttgut

SEQ ID NO: 67172 - DNA, 33 bp, Artificial Sequence
  Synthetic
ttacttgtgtatatggutgtatacatatgcaut

SEQ ID NO: 67173 - DNA, 24 bp, Artificial Sequence
  Synthetic
cagtgtcaaccacaugtctgttuc

SEQ ID NO: 67174 - DNA, 28 bp, Artificial Sequence
  Synthetic
acagcttgatugcctgaagtatctatut

SEQ ID NO: 67175 - DNA, 25 bp, Artificial Sequence
  Synthetic
ggaaaaacatguagacggcaatugg

SEQ ID NO: 67176 - DNA, 21 bp, Artificial Sequence
  Synthetic
ctttucaccagcaacacccut

SEQ ID NO: 67177 - DNA, 27 bp, Artificial Sequence
  Synthetic
cagaatttgggaacuaggaagcatcut

SEQ ID NO: 67178 - DNA, 28 bp, Artificial Sequence
  Synthetic
cactgagtagaccgutagtaggagaaua

SEQ ID NO: 67179 - DNA, 32 bp, Artificial Sequence
  Synthetic
actaagtataaaccucaagctataaccattut

SEQ ID NO: 67180 - DNA, 20 bp, Artificial Sequence
  Synthetic
gcccttctuagcagcgagut

SEQ ID NO: 67181 - DNA, 22 bp, Artificial Sequence
  Synthetic
aaatctttaccugctgcccugt

SEQ ID NO: 67182 - DNA, 22 bp, Artificial Sequence
  Synthetic
tcccutttggactuggagcaaa

SEQ ID NO: 67183 - DNA, 25 bp, Artificial Sequence
  Synthetic
ggttatgaatuaagcacctgcacug

SEQ ID NO: 67184 - DNA, 23 bp, Artificial Sequence
  Synthetic
ggtctgaatcutgctcagctugt

SEQ ID NO: 67185 - DNA, 19 bp, Artificial Sequence
  Synthetic
caagaagtcugcgggcugt

SEQ ID NO: 67186 - DNA, 22 bp, Artificial Sequence
  Synthetic
ccatgctgugtcttccgaugaa

SEQ ID NO: 67187 - DNA, 28 bp, Artificial Sequence
  Synthetic
acactctaaagucctcaaatttgcucat

SEQ ID NO: 67188 - DNA, 27 bp, Artificial Sequence
  Synthetic
aattgaagtaauttcgcatttgugcct

SEQ ID NO: 67189 - DNA, 28 bp, Artificial Sequence
  Synthetic
ttttccttataagagugacttccgcaut

SEQ ID NO: 67190 - DNA, 29 bp, Artificial Sequence
  Synthetic
gactgtgatgttugtgttttctattgcut

SEQ ID NO: 67191 - DNA, 26 bp, Artificial Sequence
  Synthetic
actttgtaguccatttgctcugaaca

SEQ ID NO: 67192 - DNA, 22 bp, Artificial Sequence
  Synthetic
cttccgctaaucctgtctgugt

SEQ ID NO: 67193 - DNA, 22 bp, Artificial Sequence
  Synthetic
aggautttcatctugccaggct

SEQ ID NO: 67194 - DNA, 26 bp, Artificial Sequence
  Synthetic
gtaaagcatccaucctatctgggaut

SEQ ID NO: 67195 - DNA, 28 bp, Artificial Sequence
  Synthetic
tcttgggaaccutttcaatgtcatagut

SEQ ID NO: 67196 - DNA, 27 bp, Artificial Sequence
  Synthetic
gaagcgtugccatgtattttacuacag

SEQ ID NO: 67197 - DNA, 28 bp, Artificial Sequence
  Synthetic
tgutcagtgattucaaagacaacaacaa

SEQ ID NO: 67198 - DNA, 21 bp, Artificial Sequence
  Synthetic
ggcattcttugtcacccgtuc

SEQ ID NO: 67199 - DNA, 27 bp, Artificial Sequence
  Synthetic
gggaagcaatuagtttacctctgttuc

SEQ ID NO: 67200 - DNA, 25 bp, Artificial Sequence
  Synthetic
tgccagauccttcattauccagact

SEQ ID NO: 67201 - DNA, 27 bp, Artificial Sequence
  Synthetic
ttgtcttugaactgacgatuaagaggt

SEQ ID NO: 67202 - DNA, 19 bp, Artificial Sequence
  Synthetic
gtcgtcaguccggtctugt

SEQ ID NO: 67203 - DNA, 22 bp, Artificial Sequence
  Synthetic
ctctctccuttggaggcuagga

SEQ ID NO: 67204 - DNA, 18 bp, Artificial Sequence
  Synthetic
ctgctgaugcctgcucac

SEQ ID NO: 67205 - DNA, 27 bp, Artificial Sequence
  Synthetic
gtaaacagaauggtgctaatgcucaaa

SEQ ID NO: 67206 - DNA, 19 bp, Artificial Sequence
  Synthetic
ctgcagggutccagtguca

SEQ ID NO: 67207 - DNA, 20 bp, Artificial Sequence
  Synthetic
ggtccucccctcuagcacag

SEQ ID NO: 67208 - DNA, 21 bp, Artificial Sequence
  Synthetic
ctggtcaccaugaatcccugt

SEQ ID NO: 67209 - DNA, 24 bp, Artificial Sequence
  Synthetic
cccataggcaaugaatgaaggtut

SEQ ID NO: 67210 - DNA, 21 bp, Artificial Sequence
  Synthetic
cttuaaacacggcucggagga

SEQ ID NO: 67211 - DNA, 21 bp, Artificial Sequence
  Synthetic
cttgguccaggccattucagt

SEQ ID NO: 67212 - DNA, 28 bp, Artificial Sequence
  Synthetic
gagaaaaacgucaagcagtaaacaugat

SEQ ID NO: 67213 - DNA, 27 bp, Artificial Sequence
  Synthetic
gggagaauacttactuccacagagaag

SEQ ID NO: 67214 - DNA, 26 bp, Artificial Sequence
  Synthetic
gtaggttgccauaccataatctucca

SEQ ID NO: 67215 - DNA, 27 bp, Artificial Sequence
  Synthetic
ccaactcactutccatcatctcuagat

SEQ ID NO: 67216 - DNA, 29 bp, Artificial Sequence
  Synthetic
gaacagcuacaagaagagatuaagagact

SEQ ID NO: 67217 - DNA, 26 bp, Artificial Sequence
  Synthetic
agtatagagtgugttcctgatgcuaa

SEQ ID NO: 67218 - DNA, 24 bp, Artificial Sequence
  Synthetic
tgctcttgucagtcaaauccaact

SEQ ID NO: 67219 - DNA, 29 bp, Artificial Sequence
  Synthetic
ttcaacaacctggcuttctaattctgaua

SEQ ID NO: 67220 - DNA, 27 bp, Artificial Sequence
  Synthetic
agttacugaaagaggaatgtgguacct

SEQ ID NO: 67221 - DNA, 25 bp, Artificial Sequence
  Synthetic
tgagttgcatuttggtttgtcauct

SEQ ID NO: 67222 - DNA, 25 bp, Artificial Sequence
  Synthetic
gcacattctgaugcttaccagacua

SEQ ID NO: 67223 - DNA, 25 bp, Artificial Sequence
  Synthetic
ctgatgctaugtcaaatcccugact

SEQ ID NO: 67224 - DNA, 23 bp, Artificial Sequence
  Synthetic
aggtgctttcuctcactgaguct

SEQ ID NO: 67225 - DNA, 27 bp, Artificial Sequence
  Synthetic
catagtattcttuggttacctcggcut

SEQ ID NO: 67226 - DNA, 28 bp, Artificial Sequence
  Synthetic
gaatgcttuccatatgtcgtauaaaccc

SEQ ID NO: 67227 - DNA, 24 bp, Artificial Sequence
  Synthetic
gtctcttgtugcaggactuaggaa

SEQ ID NO: 67228 - DNA, 19 bp, Artificial Sequence
  Synthetic
gaccccaggcugaagauca

SEQ ID NO: 67229 - DNA, 17 bp, Artificial Sequence
  Synthetic
cgcuagggugggcgaac

SEQ ID NO: 67230 - DNA, 22 bp, Artificial Sequence
  Synthetic
gcatttaatgugtgctgccuct

SEQ ID NO: 67231 - DNA, 27 bp, Artificial Sequence
  Synthetic
guatttcaggatgaugagaaccacagt

SEQ ID NO: 67232 - DNA, 24 bp, Artificial Sequence
  Synthetic
ccaguggugaagaaggaaagagag

SEQ ID NO: 67233 - DNA, 28 bp, Artificial Sequence
  Synthetic
actgatttaauaaggcagauggaaagca

SEQ ID NO: 67234 - DNA, 22 bp, Artificial Sequence
  Synthetic
gcaagggucagggaaguaagag

SEQ ID NO: 67235 - DNA, 27 bp, Artificial Sequence
  Synthetic
catgtggttttucttcctttgcaaaug

SEQ ID NO: 67236 - DNA, 24 bp, Artificial Sequence
  Synthetic
gaaaatgcucacacaaguccacac

SEQ ID NO: 67237 - DNA, 27 bp, Artificial Sequence
  Synthetic
tccacaagctacugacttttgcttuat

SEQ ID NO: 67238 - DNA, 27 bp, Artificial Sequence
  Synthetic
gtgttgtttgaugctgatatcatggut

SEQ ID NO: 67239 - DNA, 23 bp, Artificial Sequence
  Synthetic
catacagacgacaauggugagca

SEQ ID NO: 67240 - DNA, 25 bp, Artificial Sequence
  Synthetic
cctaggttatcugggtgtttacgug

SEQ ID NO: 67241 - DNA, 28 bp, Artificial Sequence
  Synthetic
ctcagagtgugttgttctgtttauagga

SEQ ID NO: 67242 - DNA, 26 bp, Artificial Sequence
  Synthetic
tctgtgatacaaugatgttggcctut

SEQ ID NO: 67243 - DNA, 29 bp, Artificial Sequence
  Synthetic
tcttctgctccaucatcttgtctaaatuc

SEQ ID NO: 67244 - DNA, 22 bp, Artificial Sequence
  Synthetic
acagctgugatttgctucgaat

SEQ ID NO: 67245 - DNA, 26 bp, Artificial Sequence
  Synthetic
cagatctgaacuaattccgtctagug

SEQ ID NO: 67246 - DNA, 18 bp, Artificial Sequence
  Synthetic
gacaucgccagtgggugt

SEQ ID NO: 67247 - DNA, 20 bp, Artificial Sequence
  Synthetic
accctcugaccctgttcuct

SEQ ID NO: 67248 - DNA, 21 bp, Artificial Sequence
  Synthetic
gccagtcacauggatgctcug

SEQ ID NO: 67249 - DNA, 19 bp, Artificial Sequence
  Synthetic
cccctgaugcctgagcaua

SEQ ID NO: 67250 - DNA, 24 bp, Artificial Sequence
  Synthetic
gttgaattccaugtttgggtgcut

SEQ ID NO: 67251 - DNA, 24 bp, Artificial Sequence
  Synthetic
gcaaaccttugcacagtatcaucc

SEQ ID NO: 67252 - DNA, 28 bp, Artificial Sequence
  Synthetic
aagaaatccuacttagcgacaugaacaa

SEQ ID NO: 67253 - DNA, 29 bp, Artificial Sequence
  Synthetic
agcaaatttctaugagtcagccttaauga

SEQ ID NO: 67254 - DNA, 23 bp, Artificial Sequence
  Synthetic
gcaagcaaggaaugcctucaaaa

SEQ ID NO: 67255 - DNA, 20 bp, Artificial Sequence
  Synthetic
gctctagggugaccccacuc

SEQ ID NO: 67256 - DNA, 22 bp, Artificial Sequence
  Synthetic
atttttctuccaggcucaggct

SEQ ID NO: 67257 - DNA, 28 bp, Artificial Sequence
  Synthetic
ggtagcattttcucttccactcauagac

SEQ ID NO: 67258 - DNA, 23 bp, Artificial Sequence
  Synthetic
accaggaacutttgugacacact

SEQ ID NO: 67259 - DNA, 24 bp, Artificial Sequence
  Synthetic
tttcaccttcuttcccttcctucc

SEQ ID NO: 67260 - DNA, 22 bp, Artificial Sequence
  Synthetic
ggtcagucggacggattaucac

SEQ ID NO: 67261 - DNA, 27 bp, Artificial Sequence
  Synthetic
tgttccagtacccuctcatcttgaaua

SEQ ID NO: 67262 - DNA, 21 bp, Artificial Sequence
  Synthetic
accaggcggaaautgcuaagt

SEQ ID NO: 67263 - DNA, 23 bp, Artificial Sequence
  Synthetic
cctcacatgtaugtgtgcctcug

SEQ ID NO: 67264 - DNA, 23 bp, Artificial Sequence
  Synthetic
aagauatcuagggccaagaccca

SEQ ID NO: 67265 - DNA, 23 bp, Artificial Sequence
  Synthetic
atccuaccccagccatctaauga

SEQ ID NO: 67266 - DNA, 22 bp, Artificial Sequence
  Synthetic
cctcagutgagagtucgggagt

SEQ ID NO: 67267 - DNA, 24 bp, Artificial Sequence
  Synthetic
ggacagattcugtgatgccaugat

SEQ ID NO: 67268 - DNA, 25 bp, Artificial Sequence
  Synthetic
agtagtctattuagggccactccut

SEQ ID NO: 67269 - DNA, 22 bp, Artificial Sequence
  Synthetic
tgacttttgcutttggccctug

SEQ ID NO: 67270 - DNA, 21 bp, Artificial Sequence
  Synthetic
ccaccattcutccaggcauca

SEQ ID NO: 67271 - DNA, 26 bp, Artificial Sequence
  Synthetic
caaccttgttccutttctctcactuc

SEQ ID NO: 67272 - DNA, 22 bp, Artificial Sequence
  Synthetic
ccctgttucagattcaccucca

SEQ ID NO: 67273 - DNA, 26 bp, Artificial Sequence
  Synthetic
tcacgttggaaugtgctttttcttut

SEQ ID NO: 67274 - DNA, 21 bp, Artificial Sequence
  Synthetic
caggagccuccctgaaauact

SEQ ID NO: 67275 - DNA, 23 bp, Artificial Sequence
  Synthetic
catcttgcugagagaccatggua

SEQ ID NO: 67276 - DNA, 22 bp, Artificial Sequence
  Synthetic
ctctgtgucccaaacctccauc

SEQ ID NO: 67277 - DNA, 22 bp, Artificial Sequence
  Synthetic
gaggtggguggtaagaggttuc

SEQ ID NO: 67278 - DNA, 21 bp, Artificial Sequence
  Synthetic
gctgctcuacagccugaagaa

SEQ ID NO: 67279 - DNA, 21 bp, Artificial Sequence
  Synthetic
tctgagtgcutgccagactug

SEQ ID NO: 67280 - DNA, 20 bp, Artificial Sequence
  Synthetic
tgctggcgaaugacgtctut

SEQ ID NO: 67281 - DNA, 27 bp, Artificial Sequence
  Synthetic
tgattttggctuctctcagaaacucat

SEQ ID NO: 67282 - DNA, 27 bp, Artificial Sequence
  Synthetic
ttatggaatgctuaatgtcagtgguca

SEQ ID NO: 67283 - DNA, 24 bp, Artificial Sequence
  Synthetic
gatgcccugttcacaattugacaa

SEQ ID NO: 67284 - DNA, 24 bp, Artificial Sequence
  Synthetic
tgaatcctucaaacgtgcugacat

SEQ ID NO: 67285 - DNA, 27 bp, Artificial Sequence
  Synthetic
tgaacaacttcugctcatgacaaacua

SEQ ID NO: 67286 - DNA, 22 bp, Artificial Sequence
  Synthetic
tcacctacugaactctgccugt

SEQ ID NO: 67287 - DNA, 24 bp, Artificial Sequence
  Synthetic
gaucatccaagaaucgccgaaaag

SEQ ID NO: 67288 - DNA, 26 bp, Artificial Sequence
  Synthetic
gtgtgtcuaacaagaaagctacugct

SEQ ID NO: 67289 - DNA, 22 bp, Artificial Sequence
  Synthetic
cccggtctgucattcaccatut

SEQ ID NO: 67290 - DNA, 22 bp, Artificial Sequence
  Synthetic
cggttttggguatgggtacugt

SEQ ID NO: 67291 - DNA, 21 bp, Artificial Sequence
  Synthetic
ctacccaugcaggtcagagug

SEQ ID NO: 67292 - DNA, 20 bp, Artificial Sequence
  Synthetic
ggcaggacccuggtgaauaa

SEQ ID NO: 67293 - DNA, 24 bp, Artificial Sequence
  Synthetic
gcttctggucctcagtguaaacag

SEQ ID NO: 67294 - DNA, 27 bp, Artificial Sequence
  Synthetic
atttcagagagaaaagcautcagctua

SEQ ID NO: 67295 - DNA, 24 bp, Artificial Sequence
  Synthetic
cactatgguaaccaagcuccacag

SEQ ID NO: 67296 - DNA, 23 bp, Artificial Sequence
  Synthetic
tgctgcctcutaaaacgctcaua

SEQ ID NO: 67297 - DNA, 24 bp, Artificial Sequence
  Synthetic
catctguaaaaggcatttcugcca

SEQ ID NO: 67298 - DNA, 22 bp, Artificial Sequence
  Synthetic
ccttctucctgtgtcucgagga

SEQ ID NO: 67299 - DNA, 22 bp, Artificial Sequence
  Synthetic
gccaaacacgaugatgccatug

SEQ ID NO: 67300 - DNA, 20 bp, Artificial Sequence
  Synthetic
cagatcuggaggtugcggaa

SEQ ID NO: 67301 - DNA, 22 bp, Artificial Sequence
  Synthetic
gggacctcugtggtttcttugg

SEQ ID NO: 67302 - DNA, 20 bp, Artificial Sequence
  Synthetic
tggccagutggaactuggac

SEQ ID NO: 67303 - DNA, 24 bp, Artificial Sequence
  Synthetic
gatcucaggaaacacagucaacct

SEQ ID NO: 67304 - DNA, 20 bp, Artificial Sequence
  Synthetic
ggcuggccgaggagtaaaua

SEQ ID NO: 67305 - DNA, 22 bp, Artificial Sequence
  Synthetic
caugcagggattugacagcaag

SEQ ID NO: 67306 - DNA, 26 bp, Artificial Sequence
  Synthetic
gcacctaaatugtgcatgcttatuct

SEQ ID NO: 67307 - DNA, 25 bp, Artificial Sequence
  Synthetic
gttttccactggucttgttcatcug

SEQ ID NO: 67308 - DNA, 24 bp, Artificial Sequence
  Synthetic
tttacagcggaagutcagagugaa

SEQ ID NO: 67309 - DNA, 27 bp, Artificial Sequence
  Synthetic
gattatagagcaaacaguagcagucct

SEQ ID NO: 67310 - DNA, 28 bp, Artificial Sequence
  Synthetic
tgataacaatgugagtgcaaatctguct

SEQ ID NO: 67311 - DNA, 21 bp, Artificial Sequence
  Synthetic
ccccuggaacaacctccauat

SEQ ID NO: 67312 - DNA, 22 bp, Artificial Sequence
  Synthetic
cacucagcaggagaactgauga

SEQ ID NO: 67313 - DNA, 25 bp, Artificial Sequence
  Synthetic
ggcaaggugaaacactgatgauaga

SEQ ID NO: 67314 - DNA, 25 bp, Artificial Sequence
  Synthetic
cctgtugaagaaaagagcaacacut

SEQ ID NO: 67315 - DNA, 20 bp, Artificial Sequence
  Synthetic
cuggacagggaaagcacuga

SEQ ID NO: 67316 - DNA, 22 bp, Artificial Sequence
  Synthetic
actgccuacagtagcgtcuaca

SEQ ID NO: 67317 - DNA, 24 bp, Artificial Sequence
  Synthetic
gcatccuaggacagcagaactuag

SEQ ID NO: 67318 - DNA, 23 bp, Artificial Sequence
  Synthetic
caaagacagacaagcaaugcuca

SEQ ID NO: 67319 - DNA, 28 bp, Artificial Sequence
  Synthetic
tcttccatttttcugatctgcttccaut

SEQ ID NO: 67320 - DNA, 17 bp, Artificial Sequence
  Synthetic
caccccacccugaccut

SEQ ID NO: 67321 - DNA, 17 bp, Artificial Sequence
  Synthetic
gggauccccggctucct

SEQ ID NO: 67322 - DNA, 19 bp, Artificial Sequence
  Synthetic
ctacgccguggtgaccuac

SEQ ID NO: 67323 - DNA, 22 bp, Artificial Sequence
  Synthetic
gggactcugggctgugaaaaat

SEQ ID NO: 67324 - DNA, 21 bp, Artificial Sequence
  Synthetic
gactgacctuggcctactcuc

SEQ ID NO: 67325 - DNA, 23 bp, Artificial Sequence
  Synthetic
gtccttcccacutccaaatucca

SEQ ID NO: 67326 - DNA, 22 bp, Artificial Sequence
  Synthetic
cactgctuggctgttagctauc

SEQ ID NO: 67327 - DNA, 24 bp, Artificial Sequence
  Synthetic
tcaccaacttutccagcttcauct

SEQ ID NO: 67328 - DNA, 28 bp, Artificial Sequence
  Synthetic
gatatgcttugaggatgtatcuggacat

SEQ ID NO: 67329 - DNA, 26 bp, Artificial Sequence
  Synthetic
ctgacagaaaaauggaagaccucaga

SEQ ID NO: 67330 - DNA, 20 bp, Artificial Sequence
  Synthetic
gccguaggcagcctaaauca

SEQ ID NO: 67331 - DNA, 19 bp, Artificial Sequence
  Synthetic
ccacggauggctcggauac

SEQ ID NO: 67332 - DNA, 21 bp, Artificial Sequence
  Synthetic
tgattcccggcuctgagtuct

SEQ ID NO: 67333 - DNA, 22 bp, Artificial Sequence
  Synthetic
cacacacaugctgtccttugat

SEQ ID NO: 67334 - DNA, 23 bp, Artificial Sequence
  Synthetic
gtgaacacatuccctaaccccut

SEQ ID NO: 67335 - DNA, 19 bp, Artificial Sequence
  Synthetic
ggtgccagutgcgcaatut

SEQ ID NO: 67336 - DNA, 21 bp, Artificial Sequence
  Synthetic
ccaacuataacccugcaccct

SEQ ID NO: 67337 - DNA, 20 bp, Artificial Sequence
  Synthetic
tgatggagguggtgctctug

SEQ ID NO: 67338 - DNA, 22 bp, Artificial Sequence
  Synthetic
ggtgcacccuttccatgtcuat

SEQ ID NO: 67339 - DNA, 21 bp, Artificial Sequence
  Synthetic
ctctcctuacctcagguccgt

SEQ ID NO: 67340 - DNA, 22 bp, Artificial Sequence
  Synthetic
catcctatugtgagaccuggct

SEQ ID NO: 67341 - DNA, 20 bp, Artificial Sequence
  Synthetic
agttggccaaucagccucat

SEQ ID NO: 67342 - DNA, 27 bp, Artificial Sequence
  Synthetic
ggatagtagaacaugtccaaagggaug

SEQ ID NO: 67343 - DNA, 28 bp, Artificial Sequence
  Synthetic
ctctaagcagagugacaatuacagaact

SEQ ID NO: 67344 - DNA, 20 bp, Artificial Sequence
  Synthetic
gccagccggutgatcttuag

SEQ ID NO: 67345 - DNA, 28 bp, Artificial Sequence
  Synthetic
ctgtcgacacuatttctaacctttguca

SEQ ID NO: 67346 - DNA, 20 bp, Artificial Sequence
  Synthetic
gcaggtgugacgtcgucaat

SEQ ID NO: 67347 - DNA, 24 bp, Artificial Sequence
  Synthetic
gcctacctcugaaggcacatuaaa

SEQ ID NO: 67348 - DNA, 23 bp, Artificial Sequence
  Synthetic
actgctccagaaggutgctagua

SEQ ID NO: 67349 - DNA, 20 bp, Artificial Sequence
  Synthetic
caggtccauccacacauggt

SEQ ID NO: 67350 - DNA, 21 bp, Artificial Sequence
  Synthetic
agtggcagccuagtcctctua

SEQ ID NO: 67351 - DNA, 22 bp, Artificial Sequence
  Synthetic
cagagggacagaagucauggag

SEQ ID NO: 67352 - DNA, 20 bp, Artificial Sequence
  Synthetic
aggcagggucagtcuggaat

SEQ ID NO: 67353 - DNA, 19 bp, Artificial Sequence
  Synthetic
gcctugcgcaccagauagg

SEQ ID NO: 67354 - DNA, 30 bp, Artificial Sequence
  Synthetic
atgatctgctagugaatgagataagtcaua

SEQ ID NO: 67355 - DNA, 24 bp, Artificial Sequence
  Synthetic
acctacttacugtacctggugaca

SEQ ID NO: 67356 - DNA, 28 bp, Artificial Sequence
  Synthetic
tgtgagagaaugtggtauagaaaagcac

SEQ ID NO: 67357 - DNA, 28 bp, Artificial Sequence
  Synthetic
tccttcctaacaguttaccaaagtugaa

SEQ ID NO: 67358 - DNA, 28 bp, Artificial Sequence
  Synthetic
ggtgtaatagcugaagaggaagcataua

SEQ ID NO: 67359 - DNA, 31 bp, Artificial Sequence
  Synthetic
ggttaacctgcauaaaatttaatgtctucca

SEQ ID NO: 67360 - DNA, 27 bp, Artificial Sequence
  Synthetic
ttgaagcagcauatatattggcccuaa

SEQ ID NO: 67361 - DNA, 28 bp, Artificial Sequence
  Synthetic
ctgcaatgtcautcattagctttgaugt

SEQ ID NO: 67362 - DNA, 28 bp, Artificial Sequence
  Synthetic
tgttctggaataugctttggaaaguagg

SEQ ID NO: 67363 - DNA, 27 bp, Artificial Sequence
  Synthetic
tcattccttccugagctttcaagtaug

SEQ ID NO: 67364 - DNA, 25 bp, Artificial Sequence
  Synthetic
agaggugttcttgugacaaacagaa

SEQ ID NO: 67365 - DNA, 28 bp, Artificial Sequence
  Synthetic
catggcatcugtacagtgtctauaacaa

SEQ ID NO: 67366 - DNA, 21 bp, Artificial Sequence
  Synthetic
actcctguttaggcctugcag

SEQ ID NO: 67367 - DNA, 27 bp, Artificial Sequence
  Synthetic
tugtttagaaugaggagagaggcaaaa

SEQ ID NO: 67368 - DNA, 28 bp, Artificial Sequence
  Synthetic
agttctgttaaagutcatggcttttgug

SEQ ID NO: 67369 - DNA, 24 bp, Artificial Sequence
  Synthetic
agcgtttacgaucctctttcagug

SEQ ID NO: 67370 - DNA, 21 bp, Artificial Sequence
  Synthetic
acaggagtgugctccagauca

SEQ ID NO: 67371 - DNA, 21 bp, Artificial Sequence
  Synthetic
gccttcccuttcctcccuact

SEQ ID NO: 67372 - DNA, 25 bp, Artificial Sequence
  Synthetic
aaaaagaggccagacucacactuag

SEQ ID NO: 67373 - DNA, 24 bp, Artificial Sequence
  Synthetic
caaagggaaggcauatgucaccat

SEQ ID NO: 67374 - DNA, 21 bp, Artificial Sequence
  Synthetic
gtgcaucccaggtttcuaggt

SEQ ID NO: 67375 - DNA, 28 bp, Artificial Sequence
  Synthetic
gtgggatttggugagaacaagagatuat

SEQ ID NO: 67376 - DNA, 21 bp, Artificial Sequence
  Synthetic
cacggcaucaccaacttugac

SEQ ID NO: 67377 - DNA, 21 bp, Artificial Sequence
  Synthetic
cguatgugaccccaagaccat

SEQ ID NO: 67378 - DNA, 22 bp, Artificial Sequence
  Synthetic
aatttcccugggactgtugacc

SEQ ID NO: 67379 - DNA, 22 bp, Artificial Sequence
  Synthetic
gcccttacacuactggcaacut

SEQ ID NO: 67380 - DNA, 21 bp, Artificial Sequence
  Synthetic
ccugagaccccugaagagacc

SEQ ID NO: 67381 - DNA, 25 bp, Artificial Sequence
  Synthetic
gtgtgtatctgugcacctatgtcut

SEQ ID NO: 67382 - DNA, 21 bp, Artificial Sequence
  Synthetic
ccctgtttucctgccctgaug

SEQ ID NO: 67383 - DNA, 20 bp, Artificial Sequence
  Synthetic
caggatutgtccgucaccct

SEQ ID NO: 67384 - DNA, 21 bp, Artificial Sequence
  Synthetic
attgacccugatgtgcagugt

SEQ ID NO: 67385 - DNA, 24 bp, Artificial Sequence
  Synthetic
agtcatgtcccauttccattccuc

SEQ ID NO: 67386 - DNA, 27 bp, Artificial Sequence
  Synthetic
tcacatctttuccggtgtacataauca

SEQ ID NO: 67387 - DNA, 25 bp, Artificial Sequence
  Synthetic
gtgaacagtutcctgactauggagt

SEQ ID NO: 67388 - DNA, 26 bp, Artificial Sequence
  Synthetic
acccacacatucttgctcataaauca

SEQ ID NO: 67389 - DNA, 28 bp, Artificial Sequence
  Synthetic
cttcctgtcutcaaagaaagtuaaagca

SEQ ID NO: 67390 - DNA, 17 bp, Artificial Sequence
  Synthetic
ccagcutcccucagcgt

SEQ ID NO: 67391 - DNA, 21 bp, Artificial Sequence
  Synthetic
caugggcaacctctuggagaa

SEQ ID NO: 67392 - DNA, 20 bp, Artificial Sequence
  Synthetic
aatcgctgugcgtgtaguga

SEQ ID NO: 67393 - DNA, 25 bp, Artificial Sequence
  Synthetic
actttattuctctcatgugcaggct

SEQ ID NO: 67394 - DNA, 28 bp, Artificial Sequence
  Synthetic
gctgggcacuaaataatctccttatgua

SEQ ID NO: 67395 - DNA, 28 bp, Artificial Sequence
  Synthetic
gcagcaacatcuaaaactaaatgccuat

SEQ ID NO: 67396 - DNA, 28 bp, Artificial Sequence
  Synthetic
aaagaagaatgugttcataggaacugga

SEQ ID NO: 67397 - DNA, 25 bp, Artificial Sequence
  Synthetic
tccaaaagtgaaautcgcacaagut

SEQ ID NO: 67398 - DNA, 28 bp, Artificial Sequence
  Synthetic
ccttgagacugaaggaactgaagattut

SEQ ID NO: 67399 - DNA, 22 bp, Artificial Sequence
  Synthetic
aactuagagggcctgguaagga

SEQ ID NO: 67400 - DNA, 20 bp, Artificial Sequence
  Synthetic
ggattcguccccggatgtug

SEQ ID NO: 67401 - DNA, 27 bp, Artificial Sequence
  Synthetic
cacacttgucatgcactgaauagaaaa

SEQ ID NO: 67402 - DNA, 27 bp, Artificial Sequence
  Synthetic
tgtaggttttcutatgcagcttucagt

SEQ ID NO: 67403 - DNA, 28 bp, Artificial Sequence
  Synthetic
gtgacacatgaagugcaaagataatuct

SEQ ID NO: 67404 - DNA, 20 bp, Artificial Sequence
  Synthetic
gggactugtccttgcugacc

SEQ ID NO: 67405 - DNA, 23 bp, Artificial Sequence
  Synthetic
gcactcatcauccttgtctcugt

SEQ ID NO: 67406 - DNA, 20 bp, Artificial Sequence
  Synthetic
cagguaagugcaagcagcaa

SEQ ID NO: 67407 - DNA, 28 bp, Artificial Sequence
  Synthetic
cttcccattgaugcctttttctcttuat

SEQ ID NO: 67408 - DNA, 23 bp, Artificial Sequence
  Synthetic
ggatgcagaguagtgttcuccct

SEQ ID NO: 67409 - DNA, 26 bp, Artificial Sequence
  Synthetic
gcctgtctucagtctttaagaacuca

SEQ ID NO: 67410 - DNA, 20 bp, Artificial Sequence
  Synthetic
gcaacuggtagcuggaggac

SEQ ID NO: 67411 - DNA, 28 bp, Artificial Sequence
  Synthetic
gtgatgagcttugagttttctttctuct

SEQ ID NO: 67412 - DNA, 21 bp, Artificial Sequence
  Synthetic
gcaccaaugtcatgccucaag

SEQ ID NO: 67413 - DNA, 22 bp, Artificial Sequence
  Synthetic
ctgcgttagutccagtgacugt

SEQ ID NO: 67414 - DNA, 24 bp, Artificial Sequence
  Synthetic
ctgcaagugaactgttagcatucc

SEQ ID NO: 67415 - DNA, 29 bp, Artificial Sequence
  Synthetic
agttttctgtttcaaugttcgcttttcut

SEQ ID NO: 67416 - DNA, 27 bp, Artificial Sequence
  Synthetic
ctutcaataatttgacuggcacaagga

SEQ ID NO: 67417 - DNA, 28 bp, Artificial Sequence
  Synthetic
aaatgcacaccucaaaaggctaattuac

SEQ ID NO: 67418 - DNA, 27 bp, Artificial Sequence
  Synthetic
tcttgaaaggaacugaaatacgacgut

SEQ ID NO: 67419 - DNA, 22 bp, Artificial Sequence
  Synthetic
agcttgagcuttccaatcugct

SEQ ID NO: 67420 - DNA, 17 bp, Artificial Sequence
  Synthetic
cgucaugccgcccaaaa

SEQ ID NO: 67421 - DNA, 17 bp, Artificial Sequence
  Synthetic
cggctcugctcgcucac

SEQ ID NO: 67422 - DNA, 19 bp, Artificial Sequence
  Synthetic
cccggaggacccaugaauc

SEQ ID NO: 67423 - DNA, 21 bp, Artificial Sequence
  Synthetic
gtccacgcuggagattacugt

SEQ ID NO: 67424 - DNA, 22 bp, Artificial Sequence
  Synthetic
ctgccgaaaaucaggccttcua

SEQ ID NO: 67425 - DNA, 26 bp, Artificial Sequence
  Synthetic
cacgtaagcaccuttgtgttttctut

SEQ ID NO: 67426 - DNA, 21 bp, Artificial Sequence
  Synthetic
cacttggtccuggcagagaug

SEQ ID NO: 67427 - DNA, 22 bp, Artificial Sequence
  Synthetic
ctgatgugagcttctgtcuggt

SEQ ID NO: 67428 - DNA, 22 bp, Artificial Sequence
  Synthetic
ggtgagguggcacatgttcaua

SEQ ID NO: 67429 - DNA, 28 bp, Artificial Sequence
  Synthetic
ccaactatcaaagagutttcagcttcut

SEQ ID NO: 67430 - DNA, 17 bp, Artificial Sequence
  Synthetic
ggaacggccuggaguct

SEQ ID NO: 67431 - DNA, 17 bp, Artificial Sequence
  Synthetic
tcccucaccgggtccuc

SEQ ID NO: 67432 - DNA, 26 bp, Artificial Sequence
  Synthetic
aatgacaattcutttcaggttugcgt

SEQ ID NO: 67433 - DNA, 26 bp, Artificial Sequence
  Synthetic
acaactagaacagcaauggacauagg

SEQ ID NO: 67434 - DNA, 20 bp, Artificial Sequence
  Synthetic
ctccacgauggcgatgtuct

SEQ ID NO: 67435 - DNA, 20 bp, Artificial Sequence
  Synthetic
tggagaagcaguggtgtcug

SEQ ID NO: 67436 - DNA, 22 bp, Artificial Sequence
  Synthetic
tgggccatutcacaagtcaugt

SEQ ID NO: 67437 - DNA, 22 bp, Artificial Sequence
  Synthetic
cacactcacccutcctgtctug

SEQ ID NO: 67438 - DNA, 18 bp, Artificial Sequence
  Synthetic
ggugugcagcagggacag

SEQ ID NO: 67439 - DNA, 26 bp, Artificial Sequence
  Synthetic
cacctttttcuggctctactctctut

SEQ ID NO: 67440 - DNA, 20 bp, Artificial Sequence
  Synthetic
cggacttcuctagcgccuct

SEQ ID NO: 67441 - DNA, 22 bp, Artificial Sequence
  Synthetic
aggctcagcacucctttcaaug

SEQ ID NO: 67442 - DNA, 21 bp, Artificial Sequence
  Synthetic
tctgtggcautcatggcaugt

SEQ ID NO: 67443 - DNA, 25 bp, Artificial Sequence
  Synthetic
actgtggctgaauctctcaaagtug

SEQ ID NO: 67444 - DNA, 21 bp, Artificial Sequence
  Synthetic
gtcucagggaaccagcaugaa

SEQ ID NO: 67445 - DNA, 29 bp, Artificial Sequence
  Synthetic
agccataagcccaauagataaaaugacat

SEQ ID NO: 67446 - DNA, 28 bp, Artificial Sequence
  Synthetic
ggaagtgttuaaaacctataacgtugct

SEQ ID NO: 67447 - DNA, 21 bp, Artificial Sequence
  Synthetic
gatatgccugctggagucgaa

SEQ ID NO: 67448 - DNA, 27 bp, Artificial Sequence
  Synthetic
tctagatttaguggctgttttgtgucc

SEQ ID NO: 67449 - DNA, 27 bp, Artificial Sequence
  Synthetic
gtgcttcagtuccgataaattcuacac

SEQ ID NO: 67450 - DNA, 26 bp, Artificial Sequence
  Synthetic
atgcagttgaugactgtcataucgaa

SEQ ID NO: 67451 - DNA, 21 bp, Artificial Sequence
  Synthetic
aggctgcauaatccacacugg

SEQ ID NO: 67452 - DNA, 24 bp, Artificial Sequence
  Synthetic
cctgaaaguagacttaggcugcac

SEQ ID NO: 67453 - DNA, 26 bp, Artificial Sequence
  Synthetic
ggtgaagggaauatctcgttctcauc

SEQ ID NO: 67454 - DNA, 25 bp, Artificial Sequence
  Synthetic
agaaaactgaagaauccacgcugaa

SEQ ID NO: 67455 - DNA, 28 bp, Artificial Sequence
  Synthetic
acagtttttgcuctggtgaattacauct

SEQ ID NO: 67456 - DNA, 22 bp, Artificial Sequence
  Synthetic
gaaattcaggcccuccaggaut

SEQ ID NO: 67457 - DNA, 25 bp, Artificial Sequence
  Synthetic
agatacaucccaccatgaucaggat

SEQ ID NO: 67458 - DNA, 22 bp, Artificial Sequence
  Synthetic
gggaacaggcuctgaaacctuc

SEQ ID NO: 67459 - DNA, 26 bp, Artificial Sequence
  Synthetic
gagtaaatgagcugtggtttctcuct

SEQ ID NO: 67460 - DNA, 26 bp, Artificial Sequence
  Synthetic
catgaaatcugagcctacatgaggut

SEQ ID NO: 67461 - DNA, 23 bp, Artificial Sequence
  Synthetic
ctgccatttcauttccccttgut

SEQ ID NO: 67462 - DNA, 22 bp, Artificial Sequence
  Synthetic
acgaugctcauggaaacccaat

SEQ ID NO: 67463 - DNA, 20 bp, Artificial Sequence
  Synthetic
cggactcgcugaacttgugg

SEQ ID NO: 67464 - DNA, 23 bp, Artificial Sequence
  Synthetic
aaggaaacaguaagccactgcut

SEQ ID NO: 67465 - DNA, 21 bp, Artificial Sequence
  Synthetic
atcctgcauggctttggauga

SEQ ID NO: 67466 - DNA, 22 bp, Artificial Sequence
  Synthetic
gccactggcutcttctttguga

SEQ ID NO: 67467 - DNA, 24 bp, Artificial Sequence
  Synthetic
ctccttccagcucttacaactcug

SEQ ID NO: 67468 - DNA, 26 bp, Artificial Sequence
  Synthetic
gatatcactgcugcatatctgtcugt

SEQ ID NO: 67469 - DNA, 22 bp, Artificial Sequence
  Synthetic
gccttugccacactggtttuaa

SEQ ID NO: 67470 - DNA, 27 bp, Artificial Sequence
  Synthetic
acatttataggucccacgaaggtttuc

SEQ ID NO: 67471 - DNA, 27 bp, Artificial Sequence
  Synthetic
gacagagtgtuctctttccagugaaat

SEQ ID NO: 67472 - DNA, 20 bp, Artificial Sequence
  Synthetic
agttggaaugcagcguccat

SEQ ID NO: 67473 - DNA, 23 bp, Artificial Sequence
  Synthetic
gaccttugcccaaagagtaucct

SEQ ID NO: 67474 - DNA, 21 bp, Artificial Sequence
  Synthetic
gggctgggaugggatattcug

SEQ ID NO: 67475 - DNA, 21 bp, Artificial Sequence
  Synthetic
gatgtucgcccaggatacugt

SEQ ID NO: 67476 - DNA, 28 bp, Artificial Sequence
  Synthetic
ttgtcattaaaccuacctatgcatcugg

SEQ ID NO: 67477 - DNA, 25 bp, Artificial Sequence
  Synthetic
tgagtccttcuactgacgaatggut

SEQ ID NO: 67478 - DNA, 27 bp, Artificial Sequence
  Synthetic
gacatgttagacutactggatcuggag

SEQ ID NO: 67479 - DNA, 27 bp, Artificial Sequence
  Synthetic
catgtgcuaacagacctctggtttaut

SEQ ID NO: 67480 - DNA, 17 bp, Artificial Sequence
  Synthetic
ggccccacacccauguc

SEQ ID NO: 67481 - DNA, 20 bp, Artificial Sequence
  Synthetic
ggagguggcagggagtacut

SEQ ID NO: 67482 - DNA, 25 bp, Artificial Sequence
  Synthetic
cactcacatcucctcttccattuct

SEQ ID NO: 67483 - DNA, 27 bp, Artificial Sequence
  Synthetic
tgagtctttactcugcctctctacauc

SEQ ID NO: 67484 - DNA, 21 bp, Artificial Sequence
  Synthetic
gaccccuccctccatcctuaa

SEQ ID NO: 67485 - DNA, 24 bp, Artificial Sequence
  Synthetic
cgtggaatgauggtgataacacug

SEQ ID NO: 67486 - DNA, 20 bp, Artificial Sequence
  Synthetic
ctcccacauccccgaggaua

SEQ ID NO: 67487 - DNA, 19 bp, Artificial Sequence
  Synthetic
ccauccggtcacucgaaga

SEQ ID NO: 67488 - DNA, 20 bp, Artificial Sequence
  Synthetic
gctggtagacgucctctgug

SEQ ID NO: 67489 - DNA, 20 bp, Artificial Sequence
  Synthetic
ccaaggtauccccggatgug

SEQ ID NO: 67490 - DNA, 19 bp, Artificial Sequence
  Synthetic
gcgagugaaacggcuacga

SEQ ID NO: 67491 - DNA, 17 bp, Artificial Sequence
  Synthetic
gccutcuaggcgacgca

SEQ ID NO: 67492 - DNA, 17 bp, Artificial Sequence
  Synthetic
acgtgcucccccucact

SEQ ID NO: 67493 - DNA, 19 bp, Artificial Sequence
  Synthetic
ggtggacuctggugccaac

SEQ ID NO: 67494 - DNA, 21 bp, Artificial Sequence
  Synthetic
gccggguttcttctugaagca

SEQ ID NO: 67495 - DNA, 24 bp, Artificial Sequence
  Synthetic
ccctuagaatgaagtugagagcgt

SEQ ID NO: 67496 - DNA, 21 bp, Artificial Sequence
  Synthetic
ccacugggctgttgaugaagt

SEQ ID NO: 67497 - DNA, 28 bp, Artificial Sequence
  Synthetic
gtctgattcugaccctgttaccttatuc

SEQ ID NO: 67498 - DNA, 26 bp, Artificial Sequence
  Synthetic
acgaaagaaaagutacataccuggct

SEQ ID NO: 67499 - DNA, 19 bp, Artificial Sequence
  Synthetic
gugaccgaaacggcaguct

SEQ ID NO: 67500 - DNA, 22 bp, Artificial Sequence
  Synthetic
tguggcagaaaccacatcucat

SEQ ID NO: 67501 - DNA, 27 bp, Artificial Sequence
  Synthetic
gtcatttcaccaucatcattcccttuc

SEQ ID NO: 67502 - DNA, 20 bp, Artificial Sequence
  Synthetic
ccuccccgcagtcttucaat

SEQ ID NO: 67503 - DNA, 21 bp, Artificial Sequence
  Synthetic
ccccttccacauctgtgtcut

SEQ ID NO: 67504 - DNA, 21 bp, Artificial Sequence
  Synthetic
ccatccugccccttgttctua

SEQ ID NO: 67505 - DNA, 22 bp, Artificial Sequence
  Synthetic
tgaagggcguagagaaggugat

SEQ ID NO: 67506 - DNA, 24 bp, Artificial Sequence
  Synthetic
ccagggaucccaacagaaauaaga

SEQ ID NO: 67507 - DNA, 17 bp, Artificial Sequence
  Synthetic
gcacuggacccgctcug

SEQ ID NO: 67508 - DNA, 19 bp, Artificial Sequence
  Synthetic
tcacgugacaccgtcugag

SEQ ID NO: 67509 - DNA, 28 bp, Artificial Sequence
  Synthetic
cttaugggaaaagtatucagcaaacaca

SEQ ID NO: 67510 - DNA, 21 bp, Artificial Sequence
  Synthetic
cggccccaagagutgatttut

SEQ ID NO: 67511 - DNA, 25 bp, Artificial Sequence
  Synthetic
cgactggcucaagactatttcauct

SEQ ID NO: 67512 - DNA, 21 bp, Artificial Sequence
  Synthetic
gggccctuagcttatgtccut

SEQ ID NO: 67513 - DNA, 21 bp, Artificial Sequence
  Synthetic
ctcagcagugtacctggtcug

SEQ ID NO: 67514 - DNA, 23 bp, Artificial Sequence
  Synthetic
gacatgaaatuagcctcccgcua

SEQ ID NO: 67515 - DNA, 22 bp, Artificial Sequence
  Synthetic
ccactguggacaagactgttug

SEQ ID NO: 67516 - DNA, 20 bp, Artificial Sequence
  Synthetic
gggaaaacgcaucctctuga

SEQ ID NO: 67517 - DNA, 23 bp, Artificial Sequence
  Synthetic
gtcaatgagautccctgggucat

SEQ ID NO: 67518 - DNA, 22 bp, Artificial Sequence
  Synthetic
ccggcccagagaugttttuagt

SEQ ID NO: 67519 - DNA, 28 bp, Artificial Sequence
  Synthetic
aagaacaaatgtuacctgcagatuagga

SEQ ID NO: 67520 - DNA, 21 bp, Artificial Sequence
  Synthetic
cttcagccucctgcagatgut

SEQ ID NO: 67521 - DNA, 22 bp, Artificial Sequence
  Synthetic
aaaaccacaaagccuccagcua

SEQ ID NO: 67522 - DNA, 24 bp, Artificial Sequence
  Synthetic
gctaaacccagutgtggaagucat

SEQ ID NO: 67523 - DNA, 21 bp, Artificial Sequence
  Synthetic
aatgccgaagagguggagtuc

SEQ ID NO: 67524 - DNA, 21 bp, Artificial Sequence
  Synthetic
ggacagcuctcacatctgugt

SEQ ID NO: 67525 - DNA, 22 bp, Artificial Sequence
  Synthetic
ggccagaagagugatgaggaug

SEQ ID NO: 67526 - DNA, 25 bp, Artificial Sequence
  Synthetic
tttttgtgaautgtccccauagggt

SEQ ID NO: 67527 - DNA, 24 bp, Artificial Sequence
  Synthetic
atcctgagagaagccugtacauct

SEQ ID NO: 67528 - DNA, 24 bp, Artificial Sequence
  Synthetic
tcctctucaacactgtactuggga

SEQ ID NO: 67529 - DNA, 23 bp, Artificial Sequence
  Synthetic
ggttguacagcctcccuagagat

SEQ ID NO: 67530 - DNA, 18 bp, Artificial Sequence
  Synthetic
cccuacccaggccgcuat

SEQ ID NO: 67531 - DNA, 22 bp, Artificial Sequence
  Synthetic
ggcactgcugtctttttcauca

SEQ ID NO: 67532 - DNA, 21 bp, Artificial Sequence
  Synthetic
cutcctacagtuccacaccgt

SEQ ID NO: 67533 - DNA, 21 bp, Artificial Sequence
  Synthetic
caggttcucagggagcttguc

SEQ ID NO: 67534 - DNA, 21 bp, Artificial Sequence
  Synthetic
cctccaugcgcucaaaaggaa

SEQ ID NO: 67535 - DNA, 23 bp, Artificial Sequence
  Synthetic
tggctttctugggagaagacauc

SEQ ID NO: 67536 - DNA, 20 bp, Artificial Sequence
  Synthetic
ctctccuccacgatgcacut

SEQ ID NO: 67537 - DNA, 25 bp, Artificial Sequence
  Synthetic
ccttgagtttuggcttcttttuggg

SEQ ID NO: 67538 - DNA, 28 bp, Artificial Sequence
  Synthetic
ctgtttgtucagaagacaatgttgaugt

SEQ ID NO: 67539 - DNA, 28 bp, Artificial Sequence
  Synthetic
agtttggtgttcuagttcagcacaatua

SEQ ID NO: 67540 - DNA, 26 bp, Artificial Sequence
  Synthetic
gagtcucaaacaggaagacaacucaa

SEQ ID NO: 67541 - DNA, 27 bp, Artificial Sequence
  Synthetic
catgatccauggacatttgactgguat

SEQ ID NO: 67542 - DNA, 28 bp, Artificial Sequence
  Synthetic
tggtccaugcaattcaaauaaaaacgaa

SEQ ID NO: 67543 - DNA, 24 bp, Artificial Sequence
  Synthetic
cctccuttctaccaauaaccgcat

SEQ ID NO: 67544 - DNA, 28 bp, Artificial Sequence
  Synthetic
acttcagagtatugccaatcatgttcuc

SEQ ID NO: 67545 - DNA, 24 bp, Artificial Sequence
  Synthetic
agcaacugagtaaguggcaagaaa

SEQ ID NO: 67546 - DNA, 24 bp, Artificial Sequence
  Synthetic
acttgcauggactgtgttatuggt

SEQ ID NO: 67547 - DNA, 22 bp, Artificial Sequence
  Synthetic
gagctagttcugtccactgguc

SEQ ID NO: 67548 - DNA, 27 bp, Artificial Sequence
  Synthetic
ttctgttttccuaaaaggcactugaga

SEQ ID NO: 67549 - DNA, 26 bp, Artificial Sequence
  Synthetic
acactgauacccaaaatgaaugcact

SEQ ID NO: 67550 - DNA, 21 bp, Artificial Sequence
  Synthetic
caagagggaagggutggtcug

SEQ ID NO: 67551 - DNA, 21 bp, Artificial Sequence
  Synthetic
cccccauctgtgcctuaagag

SEQ ID NO: 67552 - DNA, 17 bp, Artificial Sequence
  Synthetic
ccgcccucaaggccauc

SEQ ID NO: 67553 - DNA, 23 bp, Artificial Sequence
  Synthetic
tgtcatatuccccgtccatcuca

SEQ ID NO: 67554 - DNA, 23 bp, Artificial Sequence
  Synthetic
ggttagaagacaaguccctguca

SEQ ID NO: 67555 - DNA, 22 bp, Artificial Sequence
  Synthetic
ctacagagggaucaccaugacc

SEQ ID NO: 67556 - DNA, 19 bp, Artificial Sequence
  Synthetic
gggcagutcttggtcucgt

SEQ ID NO: 67557 - DNA, 21 bp, Artificial Sequence
  Synthetic
ctacugacaacgcccctctuc

SEQ ID NO: 67558 - DNA, 24 bp, Artificial Sequence
  Synthetic
ccatagctctucctccctactcut

SEQ ID NO: 67559 - DNA, 18 bp, Artificial Sequence
  Synthetic
gauacggugcacgcacag

SEQ ID NO: 67560 - DNA, 23 bp, Artificial Sequence
  Synthetic
gcaaatcagugctgcagauacga

SEQ ID NO: 67561 - DNA, 20 bp, Artificial Sequence
  Synthetic
cctaagacuccgtgggaugg

SEQ ID NO: 67562 - DNA, 20 bp, Artificial Sequence
  Synthetic
accaggaucaccctguggaa

SEQ ID NO: 67563 - DNA, 23 bp, Artificial Sequence
  Synthetic
gcautgctgttuagcaggaacac

SEQ ID NO: 67564 - DNA, 19 bp, Artificial Sequence
  Synthetic
tgacagggutcccgaguga

SEQ ID NO: 67565 - DNA, 17 bp, Artificial Sequence
  Synthetic
gcagccccucctgguag

SEQ ID NO: 67566 - DNA, 18 bp, Artificial Sequence
  Synthetic
gcacucagagggcgcauc

SEQ ID NO: 67567 - DNA, 17 bp, Artificial Sequence
  Synthetic
ggugccgaggcatugac

SEQ ID NO: 67568 - DNA, 28 bp, Artificial Sequence
  Synthetic
ccuatgtaactgaguaagacagggagaa

SEQ ID NO: 67569 - DNA, 27 bp, Artificial Sequence
  Synthetic
gttggtaaaaguggtttcuaacacagt

SEQ ID NO: 67570 - DNA, 19 bp, Artificial Sequence
  Synthetic
gaaauaucgcgcccaggga

SEQ ID NO: 67571 - DNA, 22 bp, Artificial Sequence
  Synthetic
gcagtggugacaggaugaacac

SEQ ID NO: 67572 - DNA, 21 bp, Artificial Sequence
  Synthetic
ccaccgaucctcttcctucat

SEQ ID NO: 67573 - DNA, 25 bp, Artificial Sequence
  Synthetic
ggaatccatuagaggacacactcug

SEQ ID NO: 67574 - DNA, 26 bp, Artificial Sequence
  Synthetic
ctgctgggcuaaatcatcaggaatua

SEQ ID NO: 67575 - DNA, 25 bp, Artificial Sequence
  Synthetic
caatccaggaaagcugtcttcttut

SEQ ID NO: 67576 - DNA, 23 bp, Artificial Sequence
  Synthetic
agagacaaaauggccaagcauca

SEQ ID NO: 67577 - DNA, 20 bp, Artificial Sequence
  Synthetic
tucaatcugacacggcccaa

SEQ ID NO: 67578 - DNA, 25 bp, Artificial Sequence
  Synthetic
atgatttcagcuaacaggtuacgct

SEQ ID NO: 67579 - DNA, 23 bp, Artificial Sequence
  Synthetic
cccaacaaagacaucctgtguga

SEQ ID NO: 67580 - DNA, 29 bp, Artificial Sequence
  Synthetic
aacaacaacgacaucatccaggataauaa

SEQ ID NO: 67581 - DNA, 24 bp, Artificial Sequence
  Synthetic
accaaataaucacaaccgcctuca

SEQ ID NO: 67582 - DNA, 21 bp, Artificial Sequence
  Synthetic
cgguaccgagaggaacuacag

SEQ ID NO: 67583 - DNA, 18 bp, Artificial Sequence
  Synthetic
cacccuccacuccagcag

SEQ ID NO: 67584 - DNA, 21 bp, Artificial Sequence
  Synthetic
acccgacaaacutcccgauag

SEQ ID NO: 67585 - DNA, 22 bp, Artificial Sequence
  Synthetic
aactcuaaggagtgccugcaag

SEQ ID NO: 67586 - DNA, 21 bp, Artificial Sequence
  Synthetic
gctggacagcugttggtucat

SEQ ID NO: 67587 - DNA, 19 bp, Artificial Sequence
  Synthetic
gcttccccgugttggaguc

SEQ ID NO: 67588 - DNA, 21 bp, Artificial Sequence
  Synthetic
gttugccacaagcatcucaca

SEQ ID NO: 67589 - DNA, 19 bp, Artificial Sequence
  Synthetic
ggtcggucaggcttcaguc

SEQ ID NO: 67590 - DNA, 28 bp, Artificial Sequence
  Synthetic
tcaatactacuacaaaccttggauccga

SEQ ID NO: 67591 - DNA, 23 bp, Artificial Sequence
  Synthetic
aggtctttccugcagacatugac

SEQ ID NO: 67592 - DNA, 21 bp, Artificial Sequence
  Synthetic
ggcaagugcagaactcaaguc

SEQ ID NO: 67593 - DNA, 23 bp, Artificial Sequence
  Synthetic
tgctcactugatgaactggtugt

SEQ ID NO: 67594 - DNA, 23 bp, Artificial Sequence
  Synthetic
ccagauccccagtcctatuggat

SEQ ID NO: 67595 - DNA, 21 bp, Artificial Sequence
  Synthetic
gtgcccagaaugagaggugaa

SEQ ID NO: 67596 - DNA, 24 bp, Artificial Sequence
  Synthetic
ctttggatgtcugtctctctcugg

SEQ ID NO: 67597 - DNA, 22 bp, Artificial Sequence
  Synthetic
cgtccaccaucacctcaaagua

SEQ ID NO: 67598 - DNA, 22 bp, Artificial Sequence
  Synthetic
cgaccctgacuacgaaaaccug

SEQ ID NO: 67599 - DNA, 25 bp, Artificial Sequence
  Synthetic
actcaccctcucttcttgttctuct

SEQ ID NO: 67600 - DNA, 21 bp, Artificial Sequence
  Synthetic
gtccttctaugccgcctugat

SEQ ID NO: 67601 - DNA, 18 bp, Artificial Sequence
  Synthetic
ctcacuccgtgucaccga

SEQ ID NO: 67602 - DNA, 20 bp, Artificial Sequence
  Synthetic
tgggattccugcacgtgtuc

SEQ ID NO: 67603 - DNA, 23 bp, Artificial Sequence
  Synthetic
gaaagaggauggattuggccact

SEQ ID NO: 67604 - DNA, 17 bp, Artificial Sequence
  Synthetic
ggtggccgugaccgaug

SEQ ID NO: 67605 - DNA, 23 bp, Artificial Sequence
  Synthetic
tccaaucccccatcttuccaaaa

SEQ ID NO: 67606 - DNA, 22 bp, Artificial Sequence
  Synthetic
tctacacagccugatgctcuct

SEQ ID NO: 67607 - DNA, 21 bp, Artificial Sequence
  Synthetic
agtgtcagacuccagucacct

SEQ ID NO: 67608 - DNA, 19 bp, Artificial Sequence
  Synthetic
gctgucgccggttctugaa

SEQ ID NO: 67609 - DNA, 20 bp, Artificial Sequence
  Synthetic
cgcaguggacaagtaucgac

SEQ ID NO: 67610 - DNA, 20 bp, Artificial Sequence
  Synthetic
gctctcgaguagccgguaga

SEQ ID NO: 67611 - DNA, 17 bp, Artificial Sequence
  Synthetic
gcutcucgcccgagcag

SEQ ID NO: 67612 - DNA, 25 bp, Artificial Sequence
  Synthetic
gctacttaaagggaauggtggctut

SEQ ID NO: 67613 - DNA, 23 bp, Artificial Sequence
  Synthetic
gtaaccaagguggtctttgctut

SEQ ID NO: 67614 - DNA, 22 bp, Artificial Sequence
  Synthetic
ggguagcagaggacaagtctuc

SEQ ID NO: 67615 - DNA, 26 bp, Artificial Sequence
  Synthetic
agtgttggagtauctgcctaagtcut

SEQ ID NO: 67616 - DNA, 23 bp, Artificial Sequence
  Synthetic
cagagcgggccutaatctcatua

SEQ ID NO: 67617 - DNA, 20 bp, Artificial Sequence
  Synthetic
gatctggcugggaggtgtuc

SEQ ID NO: 67618 - DNA, 20 bp, Artificial Sequence
  Synthetic
cccaagaauggaagggcauc

SEQ ID NO: 67619 - DNA, 21 bp, Artificial Sequence
  Synthetic
tgtctgccautctggccttuc

SEQ ID NO: 67620 - DNA, 22 bp, Artificial Sequence
  Synthetic
gcctgcttcuggcatagaguat

SEQ ID NO: 67621 - DNA, 20 bp, Artificial Sequence
  Synthetic
cacagcguctacctgacuca

SEQ ID NO: 67622 - DNA, 21 bp, Artificial Sequence
  Synthetic
cagtcacucagttcgccauca

SEQ ID NO: 67623 - DNA, 21 bp, Artificial Sequence
  Synthetic
cctgagaccaugcgtatgucc

SEQ ID NO: 67624 - DNA, 17 bp, Artificial Sequence
  Synthetic
ggcugcgggagcaucaa

SEQ ID NO: 67625 - DNA, 17 bp, Artificial Sequence
  Synthetic
ccguggccgaagtccug

SEQ ID NO: 67626 - DNA, 25 bp, Artificial Sequence
  Synthetic
ggtacugacatgcaugaacaagaac

SEQ ID NO: 67627 - DNA, 29 bp, Artificial Sequence
  Synthetic
ggcattatgggacucttcaccaatttaua

SEQ ID NO: 67628 - DNA, 28 bp, Artificial Sequence
  Synthetic
aacaaatatcuactccccgcuaaaaaca

SEQ ID NO: 67629 - DNA, 20 bp, Artificial Sequence
  Synthetic
gccaaacutggaaugccaca

SEQ ID NO: 67630 - DNA, 28 bp, Artificial Sequence
  Synthetic
cctccccugagaaaatccaaaauaagat

SEQ ID NO: 67631 - DNA, 30 bp, Artificial Sequence
  Synthetic
ccacatggaaacuaagataaatcagtggut

SEQ ID NO: 67632 - DNA, 24 bp, Artificial Sequence
  Synthetic
gtgtggcctucttcaatacctuca

SEQ ID NO: 67633 - DNA, 33 bp, Artificial Sequence
  Synthetic
gcagggtcttattutaacaaggatatagttuat

SEQ ID NO: 67634 - DNA, 21 bp, Artificial Sequence
  Synthetic
caaagtcccugtgggctucat

SEQ ID NO: 67635 - DNA, 28 bp, Artificial Sequence
  Synthetic
tgaaatgttgctutagtgttctcaguct

SEQ ID NO: 67636 - DNA, 27 bp, Artificial Sequence
  Synthetic
accttggtttcugtgattttctttugg

SEQ ID NO: 67637 - DNA, 23 bp, Artificial Sequence
  Synthetic
acaatggcuggaagcuaaggaag

SEQ ID NO: 67638 - DNA, 22 bp, Artificial Sequence
  Synthetic
acugttggaaucccaagcacat

SEQ ID NO: 67639 - DNA, 21 bp, Artificial Sequence
  Synthetic
gcutctttctgcugaggacac

SEQ ID NO: 67640 - DNA, 23 bp, Artificial Sequence
  Synthetic
actttcttggccutagctgcuac

SEQ ID NO: 67641 - DNA, 25 bp, Artificial Sequence
  Synthetic
gggaatgaccacauatgcacacaua

SEQ ID NO: 67642 - DNA, 22 bp, Artificial Sequence
  Synthetic
tcatctccccucaaccgactua

SEQ ID NO: 67643 - DNA, 25 bp, Artificial Sequence
  Synthetic
cagtgtttugtgttcaatgucgagt

SEQ ID NO: 67644 - DNA, 26 bp, Artificial Sequence
  Synthetic
gggagtcuaagaagaattugaggaag

SEQ ID NO: 67645 - DNA, 26 bp, Artificial Sequence
  Synthetic
tgcttgttgacugagcagatauaaca

SEQ ID NO: 67646 - DNA, 24 bp, Artificial Sequence
  Synthetic
gcacacacauaaacccacauacag

SEQ ID NO: 67647 - DNA, 25 bp, Artificial Sequence
  Synthetic
ctttctactgutggctggtucagat

SEQ ID NO: 67648 - DNA, 22 bp, Artificial Sequence
  Synthetic
tgaaaggtucaggcttcacugt

SEQ ID NO: 67649 - DNA, 23 bp, Artificial Sequence
  Synthetic
cauttaggaggtgugggaggaag

SEQ ID NO: 67650 - DNA, 23 bp, Artificial Sequence
  Synthetic
cctgcuagagccugagaaaaagg

SEQ ID NO: 67651 - DNA, 20 bp, Artificial Sequence
  Synthetic
aaaccggagcgucaugaagt

SEQ ID NO: 67652 - DNA, 26 bp, Artificial Sequence
  Synthetic
ggacaagacagggutactatatucgg

SEQ ID NO: 67653 - DNA, 21 bp, Artificial Sequence
  Synthetic
acaacccaaucccctcccuat

SEQ ID NO: 67654 - DNA, 29 bp, Artificial Sequence
  Synthetic
tccttatactggaugaaatggtcacaaug

SEQ ID NO: 67655 - DNA, 26 bp, Artificial Sequence
  Synthetic
cagccccautacaggaauacagaaaa

SEQ ID NO: 67656 - DNA, 23 bp, Artificial Sequence
  Synthetic
gagctcuggcacatggagaauaa

SEQ ID NO: 67657 - DNA, 27 bp, Artificial Sequence
  Synthetic
ggttgttacugtgacagttuggaaaat

SEQ ID NO: 67658 - DNA, 28 bp, Artificial Sequence
  Synthetic
ctagctctcuccatataaacccucaaga

SEQ ID NO: 67659 - DNA, 19 bp, Artificial Sequence
  Synthetic
gtgaaagagcggugauggg

SEQ ID NO: 67660 - DNA, 22 bp, Artificial Sequence
  Synthetic
cttctcttcutagggcccucct

SEQ ID NO: 67661 - DNA, 25 bp, Artificial Sequence
  Synthetic
ggctgaauaaccagctctctttcut

SEQ ID NO: 67662 - DNA, 28 bp, Artificial Sequence
  Synthetic
gatatcctcacutttccaggaaugaagg

SEQ ID NO: 67663 - DNA, 26 bp, Artificial Sequence
  Synthetic
agcatcagucccatcctttgaatuaa

SEQ ID NO: 67664 - DNA, 28 bp, Artificial Sequence
  Synthetic
acactatactgaaaugtcgtcattugct

SEQ ID NO: 67665 - DNA, 28 bp, Artificial Sequence
  Synthetic
acacccacattcutctctcatcagauat

SEQ ID NO: 67666 - DNA, 26 bp, Artificial Sequence
  Synthetic
tctaatcctucagggtaauccacagt

SEQ ID NO: 67667 - DNA, 28 bp, Artificial Sequence
  Synthetic
cgtatctgttatcugtagacagttguga

SEQ ID NO: 67668 - DNA, 17 bp, Artificial Sequence
  Synthetic
ctagcgcgcucagggua

SEQ ID NO: 67669 - DNA, 21 bp, Artificial Sequence
  Synthetic
ccgcuccttctuccagagact

SEQ ID NO: 67670 - DNA, 21 bp, Artificial Sequence
  Synthetic
ctgtguaacccccaaagccua

SEQ ID NO: 67671 - DNA, 23 bp, Artificial Sequence
  Synthetic
gctacccatgutcccctgataut

SEQ ID NO: 67672 - DNA, 21 bp, Artificial Sequence
  Synthetic
gtagtccaggcugtggaugac

SEQ ID NO: 67673 - DNA, 21 bp, Artificial Sequence
  Synthetic
gcagagugggaaaagcuggaa

SEQ ID NO: 67674 - DNA, 21 bp, Artificial Sequence
  Synthetic
ggcccatauagatggctcugg

SEQ ID NO: 67675 - DNA, 22 bp, Artificial Sequence
  Synthetic
actatgtcaccguggaggguat

SEQ ID NO: 67676 - DNA, 22 bp, Artificial Sequence
  Synthetic
ccctucccaaggctacaaugac

SEQ ID NO: 67677 - DNA, 24 bp, Artificial Sequence
  Synthetic
gatcccctaggutgtacccaagua

SEQ ID NO: 67678 - DNA, 21 bp, Artificial Sequence
  Synthetic
cactccctugttgtcctccut

SEQ ID NO: 67679 - DNA, 21 bp, Artificial Sequence
  Synthetic
catccccucttacccaugcag

SEQ ID NO: 67680 - DNA, 21 bp, Artificial Sequence
  Synthetic
ccaggcatuactcctccctug

SEQ ID NO: 67681 - DNA, 27 bp, Artificial Sequence
  Synthetic
agcatgtccttgugataaccttcttut

SEQ ID NO: 67682 - DNA, 25 bp, Artificial Sequence
  Synthetic
caaaaagtggucagcacaauagaca

SEQ ID NO: 67683 - DNA, 28 bp, Artificial Sequence
  Synthetic
cgtccctattccutctattctagcctua

SEQ ID NO: 67684 - DNA, 25 bp, Artificial Sequence
  Synthetic
ggagccaucagtaaattccuggaaa

SEQ ID NO: 67685 - DNA, 23 bp, Artificial Sequence
  Synthetic
gaggcatttcuacccacttggua

SEQ ID NO: 67686 - DNA, 28 bp, Artificial Sequence
  Synthetic
gctgaaatatctucataactgtccucgt

SEQ ID NO: 67687 - DNA, 24 bp, Artificial Sequence
  Synthetic
tuatctgggaaugggagagaacct

SEQ ID NO: 67688 - DNA, 21 bp, Artificial Sequence
  Synthetic
ctccaggagcutctcacacug

SEQ ID NO: 67689 - DNA, 23 bp, Artificial Sequence
  Synthetic
tcccccggacuaatactgttuct

SEQ ID NO: 67690 - DNA, 27 bp, Artificial Sequence
  Synthetic
aaaaccagugagagatgugagaaagag

SEQ ID NO: 67691 - DNA, 28 bp, Artificial Sequence
  Synthetic
cgcgtggcatuttaattactagaaagug

SEQ ID NO: 67692 - DNA, 22 bp, Artificial Sequence
  Synthetic
tgcagcuatggacacugacaaa

SEQ ID NO: 67693 - DNA, 26 bp, Artificial Sequence
  Synthetic
caatcaaggtuaagcaggagttugag

SEQ ID NO: 67694 - DNA, 21 bp, Artificial Sequence
  Synthetic
ggaacgtcugtgcctgugaat

SEQ ID NO: 67695 - DNA, 21 bp, Artificial Sequence
  Synthetic
acaagagugaagggcacaugg

SEQ ID NO: 67696 - DNA, 21 bp, Artificial Sequence
  Synthetic
ggaagcuaagggtccgtctug

SEQ ID NO: 67697 - DNA, 17 bp, Artificial Sequence
  Synthetic
cugttcccgugcagcct

SEQ ID NO: 67698 - DNA, 20 bp, Artificial Sequence
  Synthetic
gatgugagcagccaccagua

SEQ ID NO: 67699 - DNA, 18 bp, Artificial Sequence
  Synthetic
ggccagucctgagcagug

SEQ ID NO: 67700 - DNA, 19 bp, Artificial Sequence
  Synthetic
ggaacgaggucaccuccat

SEQ ID NO: 67701 - DNA, 20 bp, Artificial Sequence
  Synthetic
cccctgucacggaaggaauc

SEQ ID NO: 67702 - DNA, 21 bp, Artificial Sequence
  Synthetic
gaggcatauctgagcctugga

SEQ ID NO: 67703 - DNA, 27 bp, Artificial Sequence
  Synthetic
tctacctaatcucgctcttctctuacc

SEQ ID NO: 67704 - DNA, 22 bp, Artificial Sequence
  Synthetic
gcaccaaggutaaguacaagcc

SEQ ID NO: 67705 - DNA, 24 bp, Artificial Sequence
  Synthetic
tgctguacacccttuaccaacaat

SEQ ID NO: 67706 - DNA, 21 bp, Artificial Sequence
  Synthetic
ggagccauggatttgccauct

SEQ ID NO: 67707 - DNA, 22 bp, Artificial Sequence
  Synthetic
gcttttctcgutgtcccaucct

SEQ ID NO: 67708 - DNA, 21 bp, Artificial Sequence
  Synthetic
ccaaagtcagugaccccacut

SEQ ID NO: 67709 - DNA, 25 bp, Artificial Sequence
  Synthetic
guacttcttugacaacagcacacag

SEQ ID NO: 67710 - DNA, 21 bp, Artificial Sequence
  Synthetic
ccccacacutccaacctgtut

SEQ ID NO: 67711 - DNA, 22 bp, Artificial Sequence
  Synthetic
caatctggtcutcgtgtgguca

SEQ ID NO: 67712 - DNA, 19 bp, Artificial Sequence
  Synthetic
caccccaucccctttugct

SEQ ID NO: 67713 - DNA, 23 bp, Artificial Sequence
  Synthetic
tctctgccttucaaagggacauc

SEQ ID NO: 67714 - DNA, 19 bp, Artificial Sequence
  Synthetic
gccagggucaccttugaga

SEQ ID NO: 67715 - DNA, 30 bp, Artificial Sequence
  Synthetic
tccgtattttcaaaacuaaactaggtcugt

SEQ ID NO: 67716 - DNA, 24 bp, Artificial Sequence
  Synthetic
gagtgaataggugacccttgagut

SEQ ID NO: 67717 - DNA, 19 bp, Artificial Sequence
  Synthetic
ccaagaggcccucaagguc

SEQ ID NO: 67718 - DNA, 22 bp, Artificial Sequence
  Synthetic
atcatacccgugcacctttcuc

SEQ ID NO: 67719 - DNA, 25 bp, Artificial Sequence
  Synthetic
gctgtgtgaaaaucactctgtucca

SEQ ID NO: 67720 - DNA, 32 bp, Artificial Sequence
  Synthetic
ttaaaaagtgggacugtgatttaatactguct

SEQ ID NO: 67721 - DNA, 28 bp, Artificial Sequence
  Synthetic
gaatttaccatuaggcaaacatcgtuga

SEQ ID NO: 67722 - DNA, 26 bp, Artificial Sequence
  Synthetic
ccgcttaugcaagaataatugcaact

SEQ ID NO: 67723 - DNA, 27 bp, Artificial Sequence
  Synthetic
ccttagcacacucatctttccattugt

SEQ ID NO: 67724 - DNA, 20 bp, Artificial Sequence
  Synthetic
ccatacucagctccauccgt

SEQ ID NO: 67725 - DNA, 25 bp, Artificial Sequence
  Synthetic
agatgtgtccautctccatgtctuc

SEQ ID NO: 67726 - DNA, 23 bp, Artificial Sequence
  Synthetic
tgtgaccccutttcctcatcuct

SEQ ID NO: 67727 - DNA, 21 bp, Artificial Sequence
  Synthetic
ccagcccaaguctgtcaucac

SEQ ID NO: 67728 - DNA, 21 bp, Artificial Sequence
  Synthetic
gccttgacuagacccccacut

SEQ ID NO: 67729 - DNA, 21 bp, Artificial Sequence
  Synthetic
ctccagttugcgcttttuggt

SEQ ID NO: 67730 - DNA, 22 bp, Artificial Sequence
  Synthetic
gaaaagcugcugcagaagaagt

SEQ ID NO: 67731 - DNA, 19 bp, Artificial Sequence
  Synthetic
gcctcacuggcgtcaaguc

SEQ ID NO: 67732 - DNA, 21 bp, Artificial Sequence
  Synthetic
gtagcuccatctcgaugacca

SEQ ID NO: 67733 - DNA, 19 bp, Artificial Sequence
  Synthetic
gtcgcucggtgactgaugt

SEQ ID NO: 67734 - DNA, 21 bp, Artificial Sequence
  Synthetic
cgutgaaacccaugcagacac

SEQ ID NO: 67735 - DNA, 28 bp, Artificial Sequence
  Synthetic
gaatagaaaagcagguggtgtgaaaaut

SEQ ID NO: 67736 - DNA, 20 bp, Artificial Sequence
  Synthetic
ctccattcgugcaggcuaca

SEQ ID NO: 67737 - DNA, 21 bp, Artificial Sequence
  Synthetic
ggctgcuccatcagaagucag

SEQ ID NO: 67738 - DNA, 24 bp, Artificial Sequence
  Synthetic
aatgtccucaccacatuccaagag

SEQ ID NO: 67739 - DNA, 23 bp, Artificial Sequence
  Synthetic
cgctatgaagugattcgcagaug

SEQ ID NO: 67740 - DNA, 22 bp, Artificial Sequence
  Synthetic
ccagcacagcaaauctggttuc

SEQ ID NO: 67741 - DNA, 27 bp, Artificial Sequence
  Synthetic
ttgggatcugcaagatgattgtgauaa

SEQ ID NO: 67742 - DNA, 24 bp, Artificial Sequence
  Synthetic
cccagcugatagaauggacaaagt

SEQ ID NO: 67743 - DNA, 28 bp, Artificial Sequence
  Synthetic
agttttctctgcuctaattcatctgugt

SEQ ID NO: 67744 - DNA, 21 bp, Artificial Sequence
  Synthetic
gaugagcacccaaaggttugt

SEQ ID NO: 67745 - DNA, 28 bp, Artificial Sequence
  Synthetic
catgtaatgccucttagagtgguaaagt

SEQ ID NO: 67746 - DNA, 26 bp, Artificial Sequence
  Synthetic
actcactgtaugggtattgatccuct

SEQ ID NO: 67747 - DNA, 28 bp, Artificial Sequence
  Synthetic
tgcttttctgtutattgattgcttugct

SEQ ID NO: 67748 - DNA, 28 bp, Artificial Sequence
  Synthetic
gcagtgttgaaaautgtcaatggucaaa

SEQ ID NO: 67749 - DNA, 25 bp, Artificial Sequence
  Synthetic
gggagacagugcaataaatgttugg

SEQ ID NO: 67750 - DNA, 22 bp, Artificial Sequence
  Synthetic
ctgggaguccacatactgctug

SEQ ID NO: 67751 - DNA, 26 bp, Artificial Sequence
  Synthetic
aaatgctttaucaggaggagaaugct

SEQ ID NO: 67752 - DNA, 28 bp, Artificial Sequence
  Synthetic
tgtttgagcaaguaaatattcgcaggua

SEQ ID NO: 67753 - DNA, 24 bp, Artificial Sequence
  Synthetic
ggacctaattcugatggcttcucc

SEQ ID NO: 67754 - DNA, 27 bp, Artificial Sequence
  Synthetic
agcagaactucgttgtacagaaugaaa

SEQ ID NO: 67755 - DNA, 28 bp, Artificial Sequence
  Synthetic
accaaatctgucagattccagtuacaaa

SEQ ID NO: 67756 - DNA, 24 bp, Artificial Sequence
  Synthetic
gaatgccccaaauttgtagcaugt

SEQ ID NO: 67757 - DNA, 28 bp, Artificial Sequence
  Synthetic
tggcttacctugccttgtaaatgaauat

SEQ ID NO: 67758 - DNA, 29 bp, Artificial Sequence
  Synthetic
gctcttctatguctaatgttctttugcac

SEQ ID NO: 67759 - DNA, 26 bp, Artificial Sequence
  Synthetic
aaaactctucacttcctctucaccat

SEQ ID NO: 67760 - DNA, 22 bp, Artificial Sequence
  Synthetic
ccataagcacuacacgcaguca

SEQ ID NO: 67761 - DNA, 25 bp, Artificial Sequence
  Synthetic
cgcuctctgctaatuccagaaaagt

SEQ ID NO: 67762 - DNA, 23 bp, Artificial Sequence
  Synthetic
ccgaggatcugaccgactuaaag

SEQ ID NO: 67763 - DNA, 24 bp, Artificial Sequence
  Synthetic
cagagagaatgcugctgtgactua

SEQ ID NO: 67764 - DNA, 25 bp, Artificial Sequence
  Synthetic
gcgttctgtttuctgacatgttcut

SEQ ID NO: 67765 - DNA, 28 bp, Artificial Sequence
  Synthetic
ctgaggacaagauggttcttaatgtcut

SEQ ID NO: 67766 - DNA, 23 bp, Artificial Sequence
  Synthetic
tgtcccuccaagaagtgauacca

SEQ ID NO: 67767 - DNA, 24 bp, Artificial Sequence
  Synthetic
tcatcagctucagtgaggaggaua

SEQ ID NO: 67768 - DNA, 28 bp, Artificial Sequence
  Synthetic
tttccataccgtucatttctgatcagut

SEQ ID NO: 67769 - DNA, 28 bp, Artificial Sequence
  Synthetic
actgtttaaugcacacattttgttcuga

SEQ ID NO: 67770 - DNA, 29 bp, Artificial Sequence
  Synthetic
tggattaauagacctgagtttugccaaat

SEQ ID NO: 67771 - DNA, 21 bp, Artificial Sequence
  Synthetic
gggcgttuctgttagccuagt

SEQ ID NO: 67772 - DNA, 23 bp, Artificial Sequence
  Synthetic
cttaggcttcucctggcaatcuc

SEQ ID NO: 67773 - DNA, 24 bp, Artificial Sequence
  Synthetic
tcagggaatucacacagtccuagt

SEQ ID NO: 67774 - DNA, 24 bp, Artificial Sequence
  Synthetic
ggatgctaccutttcagctgtcua

SEQ ID NO: 67775 - DNA, 22 bp, Artificial Sequence
  Synthetic
gccacagtuccttcactctcug

SEQ ID NO: 67776 - DNA, 21 bp, Artificial Sequence
  Synthetic
tcagatcaggguccaggugat

SEQ ID NO: 67777 - DNA, 24 bp, Artificial Sequence
  Synthetic
acactcutgaatgaatugccaggt

SEQ ID NO: 67778 - DNA, 22 bp, Artificial Sequence
  Synthetic
cgatgtgagccuactcagucct

SEQ ID NO: 67779 - DNA, 27 bp, Artificial Sequence
  Synthetic
ggatgtgtauagaggctgtgtgauaat

SEQ ID NO: 67780 - DNA, 21 bp, Artificial Sequence
  Synthetic
ccctaaccaagugctctcugt

SEQ ID NO: 67781 - DNA, 21 bp, Artificial Sequence
  Synthetic
tcctggacugtggcctauacc

SEQ ID NO: 67782 - DNA, 27 bp, Artificial Sequence
  Synthetic
aaggaaatgugagagaagcuaaaacca

SEQ ID NO: 67783 - DNA, 23 bp, Artificial Sequence
  Synthetic
catgaucgccgcctactatuaca

SEQ ID NO: 67784 - DNA, 24 bp, Artificial Sequence
  Synthetic
atttcaggcaaggauactgauccc

SEQ ID NO: 67785 - DNA, 28 bp, Artificial Sequence
  Synthetic
gcatctgttctccucattaccttgttut

SEQ ID NO: 67786 - DNA, 22 bp, Artificial Sequence
  Synthetic
gtttctctgcugctggtcucat

SEQ ID NO: 67787 - DNA, 20 bp, Artificial Sequence
  Synthetic
agcucccagaacatgcaugg

SEQ ID NO: 67788 - DNA, 25 bp, Artificial Sequence
  Synthetic
ccagatgaatcutcaggaagctgut

SEQ ID NO: 67789 - DNA, 24 bp, Artificial Sequence
  Synthetic
gaggaactuagcagtgatucggat

SEQ ID NO: 67790 - DNA, 28 bp, Artificial Sequence
  Synthetic
gacataaccagaaacutgactcuacaca

SEQ ID NO: 67791 - DNA, 20 bp, Artificial Sequence
  Synthetic
ggcuauggaacaccacccaa

SEQ ID NO: 67792 - DNA, 27 bp, Artificial Sequence
  Synthetic
caaatagttggagutatgagtggccua

SEQ ID NO: 67793 - DNA, 28 bp, Artificial Sequence
  Synthetic
cttgactaaaggcucaggtaagtaucat

SEQ ID NO: 67794 - DNA, 23 bp, Artificial Sequence
  Synthetic
accagaguctttcaaggugcaaa

SEQ ID NO: 67795 - DNA, 26 bp, Artificial Sequence
  Synthetic
gtttcaaugccacacctgctttauat

SEQ ID NO: 67796 - DNA, 25 bp, Artificial Sequence
  Synthetic
catcaaatcccuggagttcacatuc

SEQ ID NO: 67797 - DNA, 28 bp, Artificial Sequence
  Synthetic
gccagaacaagutaaaaagtgtgaucat

SEQ ID NO: 67798 - DNA, 24 bp, Artificial Sequence
  Synthetic
acataccacauctttuggcacaca

SEQ ID NO: 67799 - DNA, 29 bp, Artificial Sequence
  Synthetic
ctactccagacutgacatcatatgaauca

SEQ ID NO: 67800 - DNA, 25 bp, Artificial Sequence
  Synthetic
ccttcuaccaagaaagctgatcuca

SEQ ID NO: 67801 - DNA, 21 bp, Artificial Sequence
  Synthetic
tgcugaagactcacuggaggt

SEQ ID NO: 67802 - DNA, 18 bp, Artificial Sequence
  Synthetic
gccctccuggtcctccug

SEQ ID NO: 67803 - DNA, 28 bp, Artificial Sequence
  Synthetic
ctagggacaacaccucttttagaaucaa

SEQ ID NO: 67804 - DNA, 24 bp, Artificial Sequence
  Synthetic
actggctucttttgcatttugcat

SEQ ID NO: 67805 - DNA, 21 bp, Artificial Sequence
  Synthetic
caaggcaacutacugcaccac

SEQ ID NO: 67806 - DNA, 27 bp, Artificial Sequence
  Synthetic
ggaatgtatatgutggcctatcctuga

SEQ ID NO: 67807 - DNA, 20 bp, Artificial Sequence
  Synthetic
ggtcgaccacuttctcctug

SEQ ID NO: 67808 - DNA, 22 bp, Artificial Sequence
  Synthetic
tctggaccaaaaggugatgcug

SEQ ID NO: 67809 - DNA, 26 bp, Artificial Sequence
  Synthetic
cctggagcuccctaatacagataaug

SEQ ID NO: 67810 - DNA, 19 bp, Artificial Sequence
  Synthetic
aatcccucgcgtgcagtua

SEQ ID NO: 67811 - DNA, 26 bp, Artificial Sequence
  Synthetic
cctgatccatguatgcaatgctatut

SEQ ID NO: 67812 - DNA, 23 bp, Artificial Sequence
  Synthetic
caaggtaaaatugcccccagtuc

SEQ ID NO: 67813 - DNA, 26 bp, Artificial Sequence
  Synthetic
ggacgaucaagctaagaaccucaaaa

SEQ ID NO: 67814 - DNA, 25 bp, Artificial Sequence
  Synthetic
ttttacaugaccaggaagcacuagg

SEQ ID NO: 67815 - DNA, 26 bp, Artificial Sequence
  Synthetic
acattcagccucttttgcttcacuat

SEQ ID NO: 67816 - DNA, 24 bp, Artificial Sequence
  Synthetic
cttaccccacccautgtaatucca

SEQ ID NO: 67817 - DNA, 28 bp, Artificial Sequence
  Synthetic
gtcgtctttggugtttcttgctaaaaut

SEQ ID NO: 67818 - DNA, 20 bp, Artificial Sequence
  Synthetic
aatgaccgcutcgccaacua

SEQ ID NO: 67819 - DNA, 21 bp, Artificial Sequence
  Synthetic
ctggttagugagcaccuccac

SEQ ID NO: 67820 - DNA, 20 bp, Artificial Sequence
  Synthetic
aggacgtauggagccaguct

SEQ ID NO: 67821 - DNA, 20 bp, Artificial Sequence
  Synthetic
cagcucggcggtgttttuat

SEQ ID NO: 67822 - DNA, 21 bp, Artificial Sequence
  Synthetic
ccttcucaccccactctcuct

SEQ ID NO: 67823 - DNA, 22 bp, Artificial Sequence
  Synthetic
cctagaugaagcgcttgtccug

SEQ ID NO: 67824 - DNA, 20 bp, Artificial Sequence
  Synthetic
ccaagctuaccgtgccatut

SEQ ID NO: 67825 - DNA, 26 bp, Artificial Sequence
  Synthetic
ttgatcctttgaugccctcattauca

SEQ ID NO: 67826 - DNA, 26 bp, Artificial Sequence
  Synthetic
tcttcagtatuccagtaccaguaccc

SEQ ID NO: 67827 - DNA, 21 bp, Artificial Sequence
  Synthetic
gacuctcactcugcacaggaa

SEQ ID NO: 67828 - DNA, 25 bp, Artificial Sequence
  Synthetic
cagagactacaaggugaagcatgut

SEQ ID NO: 67829 - DNA, 25 bp, Artificial Sequence
  Synthetic
ggtgactttugggattttccatguc

SEQ ID NO: 67830 - DNA, 24 bp, Artificial Sequence
  Synthetic
accttauccaaagagctgtaugcc

SEQ ID NO: 67831 - DNA, 24 bp, Artificial Sequence
  Synthetic
gtcatcccugaggucagaaacaaa

SEQ ID NO: 67832 - DNA, 21 bp, Artificial Sequence
  Synthetic
caggccautgucacagaggat

SEQ ID NO: 67833 - DNA, 25 bp, Artificial Sequence
  Synthetic
ggtaggcugtactttucccaaaagg

SEQ ID NO: 67834 - DNA, 26 bp, Artificial Sequence
  Synthetic
ggtattgaatttcuttggaccaggug

SEQ ID NO: 67835 - DNA, 27 bp, Artificial Sequence
  Synthetic
aaagattgtaugaggtcctgtccuagt

SEQ ID NO: 67836 - DNA, 21 bp, Artificial Sequence
  Synthetic
gggaggaaggaaguccctuct

SEQ ID NO: 67837 - DNA, 22 bp, Artificial Sequence
  Synthetic
tgccttugaactacaccaucgt

SEQ ID NO: 67838 - DNA, 23 bp, Artificial Sequence
  Synthetic
gggttgagaguttgtgagctgut

SEQ ID NO: 67839 - DNA, 26 bp, Artificial Sequence
  Synthetic
ctggttcgagacautcatcatctuca

SEQ ID NO: 67840 - DNA, 21 bp, Artificial Sequence
  Synthetic
ccaaaacccucacggagugat

SEQ ID NO: 67841 - DNA, 24 bp, Artificial Sequence
  Synthetic
auctctgaaggugggagaaagagt

SEQ ID NO: 67842 - DNA, 25 bp, Artificial Sequence
  Synthetic
tgccttcatgtutttcactcacgua

SEQ ID NO: 67843 - DNA, 29 bp, Artificial Sequence
  Synthetic
gttaggtacagcaaaautgtaacatgtuc

SEQ ID NO: 67844 - DNA, 28 bp, Artificial Sequence
  Synthetic
ggcacatgtugaatattgcataugaagg

SEQ ID NO: 67845 - DNA, 28 bp, Artificial Sequence
  Synthetic
aaccatctagutaagcaacatucacaga

SEQ ID NO: 67846 - DNA, 22 bp, Artificial Sequence
  Synthetic
gccctgtgcutccttctcauac

SEQ ID NO: 67847 - DNA, 20 bp, Artificial Sequence
  Synthetic
cctgaaggacugcgctgtua

SEQ ID NO: 67848 - DNA, 20 bp, Artificial Sequence
  Synthetic
cctucgcagcattctugggt

SEQ ID NO: 67849 - DNA, 23 bp, Artificial Sequence
  Synthetic
gcacgaucagcagaaacatguag

SEQ ID NO: 67850 - DNA, 26 bp, Artificial Sequence
  Synthetic
ttgguggaagagcaagagaauagaag

SEQ ID NO: 67851 - DNA, 29 bp, Artificial Sequence
  Synthetic
tctacatttcaggugatgagtatgagcua

SEQ ID NO: 67852 - DNA, 20 bp, Artificial Sequence
  Synthetic
gtggagccuggtcauggaaa

SEQ ID NO: 67853 - DNA, 18 bp, Artificial Sequence
  Synthetic
gggcagaugacgcucagg

SEQ ID NO: 67854 - DNA, 19 bp, Artificial Sequence
  Synthetic
gacagccugacctcaccut

SEQ ID NO: 67855 - DNA, 18 bp, Artificial Sequence
  Synthetic
ccugaggacccaguggag

SEQ ID NO: 67856 - DNA, 21 bp, Artificial Sequence
  Synthetic
gccacgugcctttgtccttua

SEQ ID NO: 67857 - DNA, 20 bp, Artificial Sequence
  Synthetic
cctcctacugtgcacccuac

SEQ ID NO: 67858 - DNA, 24 bp, Artificial Sequence
  Synthetic
ccctgcgagcuattttgaaaguga

SEQ ID NO: 67859 - DNA, 21 bp, Artificial Sequence
  Synthetic
ccagccaccuactctuccact

SEQ ID NO: 67860 - DNA, 22 bp, Artificial Sequence
  Synthetic
tgcaatgatgucctcgtctugg

SEQ ID NO: 67861 - DNA, 22 bp, Artificial Sequence
  Synthetic
tgaccccacacauccgtactua

SEQ ID NO: 67862 - DNA, 23 bp, Artificial Sequence
  Synthetic
atgctttcugcttctgugcaaag

SEQ ID NO: 67863 - DNA, 22 bp, Artificial Sequence
  Synthetic
ctcccataaagcuggacccaut

SEQ ID NO: 67864 - DNA, 20 bp, Artificial Sequence
  Synthetic
ctcactcagugacccctugt

SEQ ID NO: 67865 - DNA, 28 bp, Artificial Sequence
  Synthetic
caacgcaaattcugccaattcctttaua

SEQ ID NO: 67866 - DNA, 29 bp, Artificial Sequence
  Synthetic
gcttttctgactucagtgtaaacattcut

SEQ ID NO: 67867 - DNA, 20 bp, Artificial Sequence
  Synthetic
cacagagcuagctgccaugt

SEQ ID NO: 67868 - DNA, 26 bp, Artificial Sequence
  Synthetic
tctttgaggagautagtgaugaggct

SEQ ID NO: 67869 - DNA, 28 bp, Artificial Sequence
  Synthetic
caggtggcagautttcaattactgauac

SEQ ID NO: 67870 - DNA, 24 bp, Artificial Sequence
  Synthetic
ctggaacaaaaggutctcatuggg

SEQ ID NO: 67871 - DNA, 23 bp, Artificial Sequence
  Synthetic
caagtttucaagcatgggucaca

SEQ ID NO: 67872 - DNA, 24 bp, Artificial Sequence
  Synthetic
tcttcttggguttagccaccttuc

SEQ ID NO: 67873 - DNA, 23 bp, Artificial Sequence
  Synthetic
acagactauagacgccaauccca

SEQ ID NO: 67874 - DNA, 23 bp, Artificial Sequence
  Synthetic
acacacatacgcaugtcctgtut

SEQ ID NO: 67875 - DNA, 20 bp, Artificial Sequence
  Synthetic
gcaucugaacgcccaacaac

SEQ ID NO: 67876 - DNA, 27 bp, Artificial Sequence
  Synthetic
gttctactggguaaatgcagatagugt

SEQ ID NO: 67877 - DNA, 26 bp, Artificial Sequence
  Synthetic
catgcagaaaacuaatcaggcttucc

SEQ ID NO: 67878 - DNA, 27 bp, Artificial Sequence
  Synthetic
aataaatcccaugagaccttgcaauct

SEQ ID NO: 67879 - DNA, 22 bp, Artificial Sequence
  Synthetic
gatgattucagcgagtgtugcc

SEQ ID NO: 67880 - DNA, 28 bp, Artificial Sequence
  Synthetic
gatgatgtcaaggugtcaaaatttccut

SEQ ID NO: 67881 - DNA, 28 bp, Artificial Sequence
  Synthetic
tcctactttttgaugtcctcacttccua

SEQ ID NO: 67882 - DNA, 26 bp, Artificial Sequence
  Synthetic
gatttgctagaaucagcctcugacat

SEQ ID NO: 67883 - DNA, 26 bp, Artificial Sequence
  Synthetic
acctctgagaagaucacatctctgut

SEQ ID NO: 67884 - DNA, 23 bp, Artificial Sequence
  Synthetic
gtctgttttgugtgttgcagugt

SEQ ID NO: 67885 - DNA, 20 bp, Artificial Sequence
  Synthetic
gcaauccccgcaagaguagt

SEQ ID NO: 67886 - DNA, 28 bp, Artificial Sequence
  Synthetic
tctgtttgtttutccagactcugacaat

SEQ ID NO: 67887 - DNA, 27 bp, Artificial Sequence
  Synthetic
gtatggttgcauagtcattgcatgtut

SEQ ID NO: 67888 - DNA, 29 bp, Artificial Sequence
  Synthetic
tgcaaaacaggaagacutaaaagaaaugg

SEQ ID NO: 67889 - DNA, 26 bp, Artificial Sequence
  Synthetic
tcttttagtaagugctgctgccauaa

SEQ ID NO: 67890 - DNA, 27 bp, Artificial Sequence
  Synthetic
cctttcttuaaaaacaagcagccacua

SEQ ID NO: 67891 - DNA, 24 bp, Artificial Sequence
  Synthetic
cagtgccucaacttgcttuaacaa

SEQ ID NO: 67892 - DNA, 28 bp, Artificial Sequence
  Synthetic
atcacttaattgguttttggctttugga

SEQ ID NO: 67893 - DNA, 25 bp, Artificial Sequence
  Synthetic
guaaaagctggaugaggagaggaag

SEQ ID NO: 67894 - DNA, 20 bp, Artificial Sequence
  Synthetic
tgccagcucctgtugaacat

SEQ ID NO: 67895 - DNA, 28 bp, Artificial Sequence
  Synthetic
gttggtggccutatatcctaattcauca

SEQ ID NO: 67896 - DNA, 28 bp, Artificial Sequence
  Synthetic
gcccatacacautcaaacacttacaaut

SEQ ID NO: 67897 - DNA, 29 bp, Artificial Sequence
  Synthetic
ggtattgaccauaactgcaaaacttacut

SEQ ID NO: 67898 - DNA, 21 bp, Artificial Sequence
  Synthetic
ccttaagacuccagccuccaa

SEQ ID NO: 67899 - DNA, 21 bp, Artificial Sequence
  Synthetic
tcggccaggagacugtauagg

SEQ ID NO: 67900 - DNA, 22 bp, Artificial Sequence
  Synthetic
ctcacacugggactctgtcuac

SEQ ID NO: 67901 - DNA, 20 bp, Artificial Sequence
  Synthetic
ctgctcuccgagttguccat

SEQ ID NO: 67902 - DNA, 21 bp, Artificial Sequence
  Synthetic
gacttcuccagcaggctcauc

SEQ ID NO: 67903 - DNA, 21 bp, Artificial Sequence
  Synthetic
aggaguccaaaggaccacgua

SEQ ID NO: 67904 - DNA, 27 bp, Artificial Sequence
  Synthetic
ttttctcttctcucagcggtttaaugt

SEQ ID NO: 67905 - DNA, 29 bp, Artificial Sequence
  Synthetic
aguattaaaatcaugaggagcaggacaaa

SEQ ID NO: 67906 - DNA, 25 bp, Artificial Sequence
  Synthetic
ggatgauccagattccaguaccagt

SEQ ID NO: 67907 - DNA, 28 bp, Artificial Sequence
  Synthetic
caagtttcccttuaagtggcctgtauat

SEQ ID NO: 67908 - DNA, 21 bp, Artificial Sequence
  Synthetic
ggagatggcacucagaacucc

SEQ ID NO: 67909 - DNA, 25 bp, Artificial Sequence
  Synthetic
tgtgttcttuaccatttgggcugaa

SEQ ID NO: 67910 - DNA, 23 bp, Artificial Sequence
  Synthetic
acagtgggttutcctgaagctut

SEQ ID NO: 67911 - DNA, 25 bp, Artificial Sequence
  Synthetic
ggaccagugaaagtttgctgaaaut

SEQ ID NO: 67912 - DNA, 23 bp, Artificial Sequence
  Synthetic
gacaugtgtgttaguagccagca

SEQ ID NO: 67913 - DNA, 27 bp, Artificial Sequence
  Synthetic
ggcgtgaaaaguagcttctcttuagaa

SEQ ID NO: 67914 - DNA, 24 bp, Artificial Sequence
  Synthetic
ctcttgggagutggtatccttugt

SEQ ID NO: 67915 - DNA, 23 bp, Artificial Sequence
  Synthetic
ccaaagcagaagucuagaagggt

SEQ ID NO: 67916 - DNA, 18 bp, Artificial Sequence
  Synthetic
tggagccauccccgttuc

SEQ ID NO: 67917 - DNA, 26 bp, Artificial Sequence
  Synthetic
gcgcaaagaaaaagcuagtttcgaut

SEQ ID NO: 67918 - DNA, 24 bp, Artificial Sequence
  Synthetic
ggacctattccuttggttgcagut

SEQ ID NO: 67919 - DNA, 22 bp, Artificial Sequence
  Synthetic
ctctccaauccagtgtgucagg

SEQ ID NO: 67920 - DNA, 23 bp, Artificial Sequence
  Synthetic
cgtttcccautctggaguccaaa

SEQ ID NO: 67921 - DNA, 19 bp, Artificial Sequence
  Synthetic
cgtgaccucggactcagug

SEQ ID NO: 67922 - DNA, 19 bp, Artificial Sequence
  Synthetic
gucaccccaauggcagaca

SEQ ID NO: 67923 - DNA, 21 bp, Artificial Sequence
  Synthetic
ccacttccuggtccaguacag

SEQ ID NO: 67924 - DNA, 21 bp, Artificial Sequence
  Synthetic
gaagcccguagaggttcauct

SEQ ID NO: 67925 - DNA, 21 bp, Artificial Sequence
  Synthetic
gcccctucgactcattcaugg

SEQ ID NO: 67926 - DNA, 22 bp, Artificial Sequence
  Synthetic
tggcagccauctctgaattcut

SEQ ID NO: 67927 - DNA, 23 bp, Artificial Sequence
  Synthetic
ccctctctcuccttccagttcuc

SEQ ID NO: 67928 - DNA, 19 bp, Artificial Sequence
  Synthetic
gaggagcauccccacacug

SEQ ID NO: 67929 - DNA, 22 bp, Artificial Sequence
  Synthetic
cctctgccautcaggacacaut

SEQ ID NO: 67930 - DNA, 21 bp, Artificial Sequence
  Synthetic
ggaacacagcacuggaacugt

SEQ ID NO: 67931 - DNA, 23 bp, Artificial Sequence
  Synthetic
ggtgccctcucacctctatctut

SEQ ID NO: 67932 - DNA, 21 bp, Artificial Sequence
  Synthetic
cattgctgtcugggtagggut

SEQ ID NO: 67933 - DNA, 27 bp, Artificial Sequence
  Synthetic
cactggtcacautttctatccctuact

SEQ ID NO: 67934 - DNA, 27 bp, Artificial Sequence
  Synthetic
gaacagaaaaugacaagtcacagaugg

SEQ ID NO: 67935 - DNA, 25 bp, Artificial Sequence
  Synthetic
ccctacgatuacacctatggctaug

SEQ ID NO: 67936 - DNA, 19 bp, Artificial Sequence
  Synthetic
gccuaccccaccatgucac

SEQ ID NO: 67937 - DNA, 25 bp, Artificial Sequence
  Synthetic
gcatgtcccutctcctgataaucat

SEQ ID NO: 67938 - DNA, 21 bp, Artificial Sequence
  Synthetic
cgcccccautagacccaaaug

SEQ ID NO: 67939 - DNA, 22 bp, Artificial Sequence
  Synthetic
aucaccaacaacucagcacact

SEQ ID NO: 67940 - DNA, 17 bp, Artificial Sequence
  Synthetic
gcaacucgacgggcgut

SEQ ID NO: 67941 - DNA, 21 bp, Artificial Sequence
  Synthetic
gccctgcgcgaugtagtaauc

SEQ ID NO: 67942 - DNA, 27 bp, Artificial Sequence
  Synthetic
gggccttatttaucatctgttctguct

SEQ ID NO: 67943 - DNA, 26 bp, Artificial Sequence
  Synthetic
tgatggtgtcuaacacaacctttgut

SEQ ID NO: 67944 - DNA, 26 bp, Artificial Sequence
  Synthetic
catgttcaggaucacagguagaaact

SEQ ID NO: 67945 - DNA, 29 bp, Artificial Sequence
  Synthetic
tgtatccatcuctaaacaagtgcucaaac

SEQ ID NO: 67946 - DNA, 24 bp, Artificial Sequence
  Synthetic
catgacaggcuctttcttctcugt

SEQ ID NO: 67947 - DNA, 25 bp, Artificial Sequence
  Synthetic
cttcttcagaauggtccaaauggga

SEQ ID NO: 67948 - DNA, 23 bp, Artificial Sequence
  Synthetic
ctagagacaacuggagtugcact

SEQ ID NO: 67949 - DNA, 23 bp, Artificial Sequence
  Synthetic
gctaccccaacgacutcaguaat

SEQ ID NO: 67950 - DNA, 33 bp, Artificial Sequence
  Synthetic
gtcatcttaaatgtacutagctcttgttttaug

SEQ ID NO: 67951 - DNA, 24 bp, Artificial Sequence
  Synthetic
actgugaaacaaacgccaatgaut

SEQ ID NO: 67952 - DNA, 29 bp, Artificial Sequence
  Synthetic
gccaaataagaaaugagacaacaauacca

SEQ ID NO: 67953 - DNA, 21 bp, Artificial Sequence
  Synthetic
gcaaatcugcgtccugcaaaa

SEQ ID NO: 67954 - DNA, 22 bp, Artificial Sequence
  Synthetic
gccutcatgugggaaccaacat

SEQ ID NO: 67955 - DNA, 21 bp, Artificial Sequence
  Synthetic
cugaaggcgaaaagugccaag

SEQ ID NO: 67956 - DNA, 28 bp, Artificial Sequence
  Synthetic
acctgcaaggauaatctttctcacatut

SEQ ID NO: 67957 - DNA, 28 bp, Artificial Sequence
  Synthetic
cttctccagguaagaacccattcatuac

SEQ ID NO: 67958 - DNA, 25 bp, Artificial Sequence
  Synthetic
tcaaacaucagacagcattcaugga

SEQ ID NO: 67959 - DNA, 28 bp, Artificial Sequence
  Synthetic
cctgaagttcuaacctgttgtaaucagt

SEQ ID NO: 67960 - DNA, 28 bp, Artificial Sequence
  Synthetic
tgcaagtcaatgaucactgaaaaatgug

SEQ ID NO: 67961 - DNA, 28 bp, Artificial Sequence
  Synthetic
catctgctgatuatgctgatctcttuga

SEQ ID NO: 67962 - DNA, 28 bp, Artificial Sequence
  Synthetic
ggaaagatcttggguctggaaatgaaut

SEQ ID NO: 67963 - DNA, 25 bp, Artificial Sequence
  Synthetic
tgttggcaccugttctactttctuc

SEQ ID NO: 67964 - DNA, 22 bp, Artificial Sequence
  Synthetic
gaaggugggcgaaatagcttug

SEQ ID NO: 67965 - DNA, 28 bp, Artificial Sequence
  Synthetic
ggcctttatttugtatgtctttgugcat

SEQ ID NO: 67966 - DNA, 22 bp, Artificial Sequence
  Synthetic
ttgttgccucctgagattgugt

SEQ ID NO: 67967 - DNA, 28 bp, Artificial Sequence
  Synthetic
actcagccacaauttgtttttgaaucat

SEQ ID NO: 67968 - DNA, 20 bp, Artificial Sequence
  Synthetic
aacagucacaccaacccgut

SEQ ID NO: 67969 - DNA, 25 bp, Artificial Sequence
  Synthetic
acatctccacagagugtcttctcut

SEQ ID NO: 67970 - DNA, 22 bp, Artificial Sequence
  Synthetic
agggaagcuttctggaugacac

SEQ ID NO: 67971 - DNA, 27 bp, Artificial Sequence
  Synthetic
atgtctcatucgaacagagcatuagaa

SEQ ID NO: 67972 - DNA, 24 bp, Artificial Sequence
  Synthetic
tggttctcugagttttcagugcaa

SEQ ID NO: 67973 - DNA, 22 bp, Artificial Sequence
  Synthetic
gtgcagacucagcactcaugaa

SEQ ID NO: 67974 - DNA, 19 bp, Artificial Sequence
  Synthetic
ggcuggagccgaagctauc

SEQ ID NO: 67975 - DNA, 25 bp, Artificial Sequence
  Synthetic
gcttugtaaactcctuggaagaggt

SEQ ID NO: 67976 - DNA, 20 bp, Artificial Sequence
  Synthetic
gaatgccguggttccucagt

SEQ ID NO: 67977 - DNA, 28 bp, Artificial Sequence
  Synthetic
gccatggtagauaccaacattacttcuc

SEQ ID NO: 67978 - DNA, 22 bp, Artificial Sequence
  Synthetic
ctccccacautgtcaaaaugct

SEQ ID NO: 67979 - DNA, 24 bp, Artificial Sequence
  Synthetic
ggacgttcatucatgtgccacuaa

SEQ ID NO: 67980 - DNA, 21 bp, Artificial Sequence
  Synthetic
gtccctcuagagtccccacut

SEQ ID NO: 67981 - DNA, 29 bp, Artificial Sequence
  Synthetic
cagaatttcgtctucgttcagttcattut

SEQ ID NO: 67982 - DNA, 21 bp, Artificial Sequence
  Synthetic
gcagaucagggcauggagaaa

SEQ ID NO: 67983 - DNA, 20 bp, Artificial Sequence
  Synthetic
ggcucacttccuaggaggca

SEQ ID NO: 67984 - DNA, 22 bp, Artificial Sequence
  Synthetic
catgactuggcttctctuggct

SEQ ID NO: 67985 - DNA, 22 bp, Artificial Sequence
  Synthetic
caacgttgaugaggtcgugagt

SEQ ID NO: 67986 - DNA, 28 bp, Artificial Sequence
  Synthetic
agaaaagggtacacutgaacaagaagut

SEQ ID NO: 67987 - DNA, 27 bp, Artificial Sequence
  Synthetic
ctttcttcttggcuaacaggagtaugt

SEQ ID NO: 67988 - DNA, 25 bp, Artificial Sequence
  Synthetic
ctgtcacagagacugtctgatctut

SEQ ID NO: 67989 - DNA, 28 bp, Artificial Sequence
  Synthetic
cttgtcatggucacaactccatctaaua

SEQ ID NO: 67990 - DNA, 22 bp, Artificial Sequence
  Synthetic
tggagaaacaggautgctgcut

SEQ ID NO: 67991 - DNA, 28 bp, Artificial Sequence
  Synthetic
tctagggacaatuctggtttagcttcua

SEQ ID NO: 67992 - DNA, 26 bp, Artificial Sequence
  Synthetic
ggaaagagcautgatttgtuccaact

SEQ ID NO: 67993 - DNA, 28 bp, Artificial Sequence
  Synthetic
gctctaagagccucgagttcatuaaaaa

SEQ ID NO: 67994 - DNA, 26 bp, Artificial Sequence
  Synthetic
cttccaaaguagagccggtacataut

SEQ ID NO: 67995 - DNA, 28 bp, Artificial Sequence
  Synthetic
catctttaaacuggttgtccttttgugt

SEQ ID NO: 67996 - DNA, 21 bp, Artificial Sequence
  Synthetic
ctcgtgcaautaccccagcua

SEQ ID NO: 67997 - DNA, 29 bp, Artificial Sequence
  Synthetic
agctgctactuagtcatttctgttuagac

SEQ ID NO: 67998 - DNA, 27 bp, Artificial Sequence
  Synthetic
aaaugctgacugacaaaagaacaagac

SEQ ID NO: 67999 - DNA, 21 bp, Artificial Sequence
  Synthetic
ccatctgtugtcctgcuggat

SEQ ID NO: 68000 - DNA, 21 bp, Artificial Sequence
  Synthetic
gcattctcgugggcttcacut

SEQ ID NO: 68001 - DNA, 27 bp, Artificial Sequence
  Synthetic
gtgttgcaaagaaaucttcagcatgua

SEQ ID NO: 68002 - DNA, 26 bp, Artificial Sequence
  Synthetic
gctgtatttccautttaacgcaguct

SEQ ID NO: 68003 - DNA, 23 bp, Artificial Sequence
  Synthetic
ccaacgatcaacuggctctttug

SEQ ID NO: 68004 - DNA, 22 bp, Artificial Sequence
  Synthetic
ggctgacacuttgggactttut

SEQ ID NO: 68005 - DNA, 22 bp, Artificial Sequence
  Synthetic
gguggcttuaaccaagagagca

SEQ ID NO: 68006 - DNA, 28 bp, Artificial Sequence
  Synthetic
ctttctgcatacugtaactttggttugt

SEQ ID NO: 68007 - DNA, 27 bp, Artificial Sequence
  Synthetic
ccaactgagauatgtcttgatgtucca

SEQ ID NO: 68008 - DNA, 22 bp, Artificial Sequence
  Synthetic
gctagagtccugattgccagug

SEQ ID NO: 68009 - DNA, 28 bp, Artificial Sequence
  Synthetic
cttgcttactatttuagcacctgaccua

SEQ ID NO: 68010 - DNA, 24 bp, Artificial Sequence
  Synthetic
cutcctgaaatacucagcgaaggt

SEQ ID NO: 68011 - DNA, 28 bp, Artificial Sequence
  Synthetic
ctgagatggataucataaggctgttgut

SEQ ID NO: 68012 - DNA, 25 bp, Artificial Sequence
  Synthetic
gcagagcatugaattctgccaaaua

SEQ ID NO: 68013 - DNA, 23 bp, Artificial Sequence
  Synthetic
tgaagccagcuctctatcccaut

SEQ ID NO: 68014 - DNA, 23 bp, Artificial Sequence
  Synthetic
gcttcctaugacccggauaacaa

SEQ ID NO: 68015 - DNA, 28 bp, Artificial Sequence
  Synthetic
gtacgatacagaauatatgtgccauggg

SEQ ID NO: 68016 - DNA, 28 bp, Artificial Sequence
  Synthetic
acttaacgacuacagaagtagtgaugga

SEQ ID NO: 68017 - DNA, 28 bp, Artificial Sequence
  Synthetic
cctccttccagutctaccagttatauca

SEQ ID NO: 68018 - DNA, 25 bp, Artificial Sequence
  Synthetic
ctgctuaggatgataatuggaggca

SEQ ID NO: 68019 - DNA, 28 bp, Artificial Sequence
  Synthetic
tccaggaaaacugagaacagaaugaaat

SEQ ID NO: 68020 - DNA, 22 bp, Artificial Sequence
  Synthetic
agctatagcagutgtcgcagut

SEQ ID NO: 68021 - DNA, 25 bp, Artificial Sequence
  Synthetic
aagatgagtaucgcacattcacugt

SEQ ID NO: 68022 - DNA, 22 bp, Artificial Sequence
  Synthetic
augtgagaaauggcaggcagat

SEQ ID NO: 68023 - DNA, 29 bp, Artificial Sequence
  Synthetic
ggtctgtgaaggacuattactgattgtut

SEQ ID NO: 68024 - DNA, 22 bp, Artificial Sequence
  Synthetic
ttccttucccactgctctucag

SEQ ID NO: 68025 - DNA, 22 bp, Artificial Sequence
  Synthetic
caatcacaucccctgtuccagt

SEQ ID NO: 68026 - DNA, 23 bp, Artificial Sequence
  Synthetic
acattcutaaccactugcagcca

SEQ ID NO: 68027 - DNA, 28 bp, Artificial Sequence
  Synthetic
ctgttaccaugagctttgaaacttucat

SEQ ID NO: 68028 - DNA, 17 bp, Artificial Sequence
  Synthetic
ggcgcacucacctucgt

SEQ ID NO: 68029 - DNA, 17 bp, Artificial Sequence
  Synthetic
gcgucgcagctcaugct

SEQ ID NO: 68030 - DNA, 21 bp, Artificial Sequence
  Synthetic
gcacctcaagugagctgugag

SEQ ID NO: 68031 - DNA, 22 bp, Artificial Sequence
  Synthetic
tgacacccacguagagtuccat

SEQ ID NO: 68032 - DNA, 21 bp, Artificial Sequence
  Synthetic
gacgggucactatctgugcaa

SEQ ID NO: 68033 - DNA, 20 bp, Artificial Sequence
  Synthetic
gggctcucacccacgtaauc

SEQ ID NO: 68034 - DNA, 17 bp, Artificial Sequence
  Synthetic
tgccugcggccttgaut

SEQ ID NO: 68035 - DNA, 18 bp, Artificial Sequence
  Synthetic
ggcagcugctaccuggat

SEQ ID NO: 68036 - DNA, 20 bp, Artificial Sequence
  Synthetic
cagaggcgaucuggagagag

SEQ ID NO: 68037 - DNA, 21 bp, Artificial Sequence
  Synthetic
cgggacutcaggacauaccat

SEQ ID NO: 68038 - DNA, 29 bp, Artificial Sequence
  Synthetic
tgtttaaaugcagtctaactuggagaagt

SEQ ID NO: 68039 - DNA, 28 bp, Artificial Sequence
  Synthetic
cccaacatcugacagttctttctcttua

SEQ ID NO: 68040 - DNA, 21 bp, Artificial Sequence
  Synthetic
gggagaaaggaugggtgtgua

SEQ ID NO: 68041 - DNA, 28 bp, Artificial Sequence
  Synthetic
ccattaatttctugctggtatcactucc

SEQ ID NO: 68042 - DNA, 23 bp, Artificial Sequence
  Synthetic
gtggtuacccggaaaatccagua

SEQ ID NO: 68043 - DNA, 18 bp, Artificial Sequence
  Synthetic
ggagacgcgaguccgtuc

SEQ ID NO: 68044 - DNA, 20 bp, Artificial Sequence
  Synthetic
ccucagcacaugcagcagat

SEQ ID NO: 68045 - DNA, 20 bp, Artificial Sequence
  Synthetic
cgagugacgcaaggaaggug

SEQ ID NO: 68046 - DNA, 28 bp, Artificial Sequence
  Synthetic
gtgacccaaaauattattgcttggugaa

SEQ ID NO: 68047 - DNA, 25 bp, Artificial Sequence
  Synthetic
gttgcctgaaucaccactttguaat

SEQ ID NO: 68048 - DNA, 28 bp, Artificial Sequence
  Synthetic
ttttaactugcaagcaaatcaugacact

SEQ ID NO: 68049 - DNA, 26 bp, Artificial Sequence
  Synthetic
tcttctcaaggauggctcggtaauat

SEQ ID NO: 68050 - DNA, 26 bp, Artificial Sequence
  Synthetic
ggaagtgttttaucctgccttctuct

SEQ ID NO: 68051 - DNA, 22 bp, Artificial Sequence
  Synthetic
aggattttctuccagccaccug

SEQ ID NO: 68052 - DNA, 26 bp, Artificial Sequence
  Synthetic
ctcggatgugattagacttacucgaa

SEQ ID NO: 68053 - DNA, 28 bp, Artificial Sequence
  Synthetic
tggacgccagutggatttattaaucaat

SEQ ID NO: 68054 - DNA, 19 bp, Artificial Sequence
  Synthetic
ccaugcgauaacgccacca

SEQ ID NO: 68055 - DNA, 26 bp, Artificial Sequence
  Synthetic
gcatgggcttuctattttctgtcaut

SEQ ID NO: 68056 - DNA, 22 bp, Artificial Sequence
  Synthetic
gtgacaagaagucccacguagt

SEQ ID NO: 68057 - DNA, 21 bp, Artificial Sequence
  Synthetic
tggtgtugcaacttgtuccct

SEQ ID NO: 68058 - DNA, 21 bp, Artificial Sequence
  Synthetic
tgaacccaggutcctctggua

SEQ ID NO: 68059 - DNA, 24 bp, Artificial Sequence
  Synthetic
ctagcagacautgaagcccacuat

SEQ ID NO: 68060 - DNA, 23 bp, Artificial Sequence
  Synthetic
gcgcttcacaagcuctttcctua

SEQ ID NO: 68061 - DNA, 24 bp, Artificial Sequence
  Synthetic
gccatctttccuctggatttcgut

SEQ ID NO: 68062 - DNA, 25 bp, Artificial Sequence
  Synthetic
tcctgggcugaattaatgaaugagg

SEQ ID NO: 68063 - DNA, 28 bp, Artificial Sequence
  Synthetic
cctaggaacatcutcttaccgtttctut

SEQ ID NO: 68064 - DNA, 24 bp, Artificial Sequence
  Synthetic
gtcctgcauagaaatctucaagcc

SEQ ID NO: 68065 - DNA, 26 bp, Artificial Sequence
  Synthetic
gagtgaagcagagucaagtgaatcut

SEQ ID NO: 68066 - DNA, 29 bp, Artificial Sequence
  Synthetic
gcctcttccucaaactctacaatataugg

SEQ ID NO: 68067 - DNA, 28 bp, Artificial Sequence
  Synthetic
ctatcttactguaggtgctgttgctaut

SEQ ID NO: 68068 - DNA, 21 bp, Artificial Sequence
  Synthetic
ccagtuaccttgctgucgaga

SEQ ID NO: 68069 - DNA, 26 bp, Artificial Sequence
  Synthetic
ctcgtgctaguggatctgtttttcua

SEQ ID NO: 68070 - DNA, 20 bp, Artificial Sequence
  Synthetic
gagggtggcuagacctctug

SEQ ID NO: 68071 - DNA, 25 bp, Artificial Sequence
  Synthetic
ctgagtcuccaactctggttugaaa

SEQ ID NO: 68072 - DNA, 23 bp, Artificial Sequence
  Synthetic
gtaaaggaccugcctgttctuct

SEQ ID NO: 68073 - DNA, 26 bp, Artificial Sequence
  Synthetic
gataagaaagtuagggactcctuggg

SEQ ID NO: 68074 - DNA, 28 bp, Artificial Sequence
  Synthetic
actcacgtatguataaagcctagucagt

SEQ ID NO: 68075 - DNA, 23 bp, Artificial Sequence
  Synthetic
acacgtcccauttgaccagttua

SEQ ID NO: 68076 - DNA, 23 bp, Artificial Sequence
  Synthetic
cgaatagugctaagcugggaagt

SEQ ID NO: 68077 - DNA, 17 bp, Artificial Sequence
  Synthetic
cugggugacgccaggag

SEQ ID NO: 68078 - DNA, 23 bp, Artificial Sequence
  Synthetic
ctttggcuttcagagtucgaacc

SEQ ID NO: 68079 - DNA, 28 bp, Artificial Sequence
  Synthetic
gatacctatgacguggaaggtgtttuat

SEQ ID NO: 68080 - DNA, 21 bp, Artificial Sequence
  Synthetic
ggtggcugggaaccttcauat

SEQ ID NO: 68081 - DNA, 23 bp, Artificial Sequence
  Synthetic
ggaucatcauccggaagacagaa

SEQ ID NO: 68082 - DNA, 26 bp, Artificial Sequence
  Synthetic
ttctgttgcugataagatgccaugat

SEQ ID NO: 68083 - DNA, 22 bp, Artificial Sequence
  Synthetic
ggcctttgguattggcagtcut

SEQ ID NO: 68084 - DNA, 22 bp, Artificial Sequence
  Synthetic
gggcaaacacuatctcuggact

SEQ ID NO: 68085 - DNA, 26 bp, Artificial Sequence
  Synthetic
ttgtagtcaacugctgcttattguct

SEQ ID NO: 68086 - DNA, 28 bp, Artificial Sequence
  Synthetic
tctgtatcatcugtatccatgtguacca

SEQ ID NO: 68087 - DNA, 24 bp, Artificial Sequence
  Synthetic
tgtatgtgtguttgactccacucc

SEQ ID NO: 68088 - DNA, 22 bp, Artificial Sequence
  Synthetic
ctggaggcaugaagugagacaa

SEQ ID NO: 68089 - DNA, 20 bp, Artificial Sequence
  Synthetic
gtggcacagacugtguccat

SEQ ID NO: 68090 - DNA, 22 bp, Artificial Sequence
  Synthetic
ccaagtcttugcccagttcugt

SEQ ID NO: 68091 - DNA, 19 bp, Artificial Sequence
  Synthetic
cattcagcagucgguggga

SEQ ID NO: 68092 - DNA, 21 bp, Artificial Sequence
  Synthetic
cagagcgagggucaggtttua

SEQ ID NO: 68093 - DNA, 28 bp, Artificial Sequence
  Synthetic
gcagttttacacutacagggatuacact

SEQ ID NO: 68094 - DNA, 19 bp, Artificial Sequence
  Synthetic
cccaccaagcagcuguacc

SEQ ID NO: 68095 - DNA, 22 bp, Artificial Sequence
  Synthetic
actgttgcaacugcctttucac

SEQ ID NO: 68096 - DNA, 22 bp, Artificial Sequence
  Synthetic
acctcctttuccagagtcucct

SEQ ID NO: 68097 - DNA, 23 bp, Artificial Sequence
  Synthetic
ccagctcucagatttgccaauga

SEQ ID NO: 68098 - DNA, 22 bp, Artificial Sequence
  Synthetic
tcagtgcctutgctcttgtcuc

SEQ ID NO: 68099 - DNA, 24 bp, Artificial Sequence
  Synthetic
aggtcctagtcuccctccagauaa

SEQ ID NO: 68100 - DNA, 22 bp, Artificial Sequence
  Synthetic
ggugcacacaggcaatattuga

SEQ ID NO: 68101 - DNA, 20 bp, Artificial Sequence
  Synthetic
gcutacccgtucaccaggag

SEQ ID NO: 68102 - DNA, 22 bp, Artificial Sequence
  Synthetic
acaggauttccuggaccaaagg

SEQ ID NO: 68103 - DNA, 21 bp, Artificial Sequence
  Synthetic
ccucatcugaccagccagaat

SEQ ID NO: 68104 - DNA, 24 bp, Artificial Sequence
  Synthetic
gaccagggcugtccttagattuag

SEQ ID NO: 68105 - DNA, 22 bp, Artificial Sequence
  Synthetic
cugacacagaaggcuccagaaa

SEQ ID NO: 68106 - DNA, 24 bp, Artificial Sequence
  Synthetic
ctaggaggcagaagcuaagtgaut

SEQ ID NO: 68107 - DNA, 25 bp, Artificial Sequence
  Synthetic
ccagctgcaautctacagcaauaga

SEQ ID NO: 68108 - DNA, 22 bp, Artificial Sequence
  Synthetic
gctgtcaggaugggactgttug

SEQ ID NO: 68109 - DNA, 21 bp, Artificial Sequence
  Synthetic
gggtccccaggutatgagcua

SEQ ID NO: 68110 - DNA, 26 bp, Artificial Sequence
  Synthetic
aatactatgggcucttctcctccuac

SEQ ID NO: 68111 - DNA, 20 bp, Artificial Sequence
  Synthetic
gcccccucggagaagguaat

SEQ ID NO: 68112 - DNA, 21 bp, Artificial Sequence
  Synthetic
gcccacttcucatctcctgut

SEQ ID NO: 68113 - DNA, 25 bp, Artificial Sequence
  Synthetic
tgactacactacucttgggcgauag

SEQ ID NO: 68114 - DNA, 26 bp, Artificial Sequence
  Synthetic
aaaatggccccuttgataatgtgtuc

SEQ ID NO: 68115 - DNA, 22 bp, Artificial Sequence
  Synthetic
gtcagagaaaccguctucacca

SEQ ID NO: 68116 - DNA, 27 bp, Artificial Sequence
  Synthetic
ccactacaaatccutcttttccctcut

SEQ ID NO: 68117 - DNA, 28 bp, Artificial Sequence
  Synthetic
gccatttcauaagggttatcttttccug

SEQ ID NO: 68118 - DNA, 28 bp, Artificial Sequence
  Synthetic
catttcgugtatttcaaaaucggacaga

SEQ ID NO: 68119 - DNA, 26 bp, Artificial Sequence
  Synthetic
ttgtgctgtuacgctgttcttactua

SEQ ID NO: 68120 - DNA, 31 bp, Artificial Sequence
  Synthetic
actcacttacagugacttaattctctctuct

SEQ ID NO: 68121 - DNA, 26 bp, Artificial Sequence
  Synthetic
agaauagtagctcuggacaaggacat

SEQ ID NO: 68122 - DNA, 29 bp, Artificial Sequence
  Synthetic
aagaaactgtugttgctatacucaggaaa

SEQ ID NO: 68123 - DNA, 24 bp, Artificial Sequence
  Synthetic
ggtgttgauggatcctgtuaagca

SEQ ID NO: 68124 - DNA, 17 bp, Artificial Sequence
  Synthetic
cagcccucaccctgugt

SEQ ID NO: 68125 - DNA, 17 bp, Artificial Sequence
  Synthetic
gcaccccaggccaucug

SEQ ID NO: 68126 - DNA, 23 bp, Artificial Sequence
  Synthetic
ctcaaccuaaggctgtgtgtuct

SEQ ID NO: 68127 - DNA, 23 bp, Artificial Sequence
  Synthetic
gaagggacutcugagaaggaagg

SEQ ID NO: 68128 - DNA, 22 bp, Artificial Sequence
  Synthetic
gcctgtttuaaaccacggtgut

SEQ ID NO: 68129 - DNA, 20 bp, Artificial Sequence
  Synthetic
gcacgttgucgttgacaucc

SEQ ID NO: 68130 - DNA, 28 bp, Artificial Sequence
  Synthetic
ggaaggaaaggaacuctaaaaacctcut

SEQ ID NO: 68131 - DNA, 21 bp, Artificial Sequence
  Synthetic
agaccttuggcagccuagaga

SEQ ID NO: 68132 - DNA, 21 bp, Artificial Sequence
  Synthetic
gcaagggugctctggtgttua

SEQ ID NO: 68133 - DNA, 28 bp, Artificial Sequence
  Synthetic
gctccaatttcucagaactcattctuca

SEQ ID NO: 68134 - DNA, 21 bp, Artificial Sequence
  Synthetic
tgctgctgaucttccctggua

SEQ ID NO: 68135 - DNA, 24 bp, Artificial Sequence
  Synthetic
ctttctcttgccutcgagttctuc

SEQ ID NO: 68136 - DNA, 20 bp, Artificial Sequence
  Synthetic
ggcagcggaaacgutcatut

SEQ ID NO: 68137 - DNA, 26 bp, Artificial Sequence
  Synthetic
gtttgccacaaugtttgtatctggut

SEQ ID NO: 68138 - DNA, 20 bp, Artificial Sequence
  Synthetic
acuctgtcccugcaggagat

SEQ ID NO: 68139 - DNA, 21 bp, Artificial Sequence
  Synthetic
ggtcctucctggtcuggaaac

SEQ ID NO: 68140 - DNA, 23 bp, Artificial Sequence
  Synthetic
gccaaagggaguttgagatucct

SEQ ID NO: 68141 - DNA, 21 bp, Artificial Sequence
  Synthetic
tgtatccaccugggctgttuc

SEQ ID NO: 68142 - DNA, 22 bp, Artificial Sequence
  Synthetic
gcagttcuccccactcttccua

SEQ ID NO: 68143 - DNA, 20 bp, Artificial Sequence
  Synthetic
caggcaauccaguggaggac

SEQ ID NO: 68144 - DNA, 28 bp, Artificial Sequence
  Synthetic
acttgttttcattgutctcaggtaccuc

SEQ ID NO: 68145 - DNA, 25 bp, Artificial Sequence
  Synthetic
gtttccccucaaaggaatccttcut

SEQ ID NO: 68146 - DNA, 21 bp, Artificial Sequence
  Synthetic
ggagtgtguagagctctugct

SEQ ID NO: 68147 - DNA, 23 bp, Artificial Sequence
  Synthetic
gattacatgcugccctacttgug

SEQ ID NO: 68148 - DNA, 23 bp, Artificial Sequence
  Synthetic
ccatttcccaugttgctuccaaa

SEQ ID NO: 68149 - DNA, 22 bp, Artificial Sequence
  Synthetic
agtctugccaggaggaatcuct

SEQ ID NO: 68150 - DNA, 22 bp, Artificial Sequence
  Synthetic
agtgagggacuggaaagggaut

SEQ ID NO: 68151 - DNA, 24 bp, Artificial Sequence
  Synthetic
gcaggtgaggauactgagtcuaac

SEQ ID NO: 68152 - DNA, 22 bp, Artificial Sequence
  Synthetic
tggccaaggutaagtgttugct

SEQ ID NO: 68153 - DNA, 21 bp, Artificial Sequence
  Synthetic
ggaggagacggagcuctacug

SEQ ID NO: 68154 - DNA, 21 bp, Artificial Sequence
  Synthetic
gagcatggcgucatcattgut

SEQ ID NO: 68155 - DNA, 20 bp, Artificial Sequence
  Synthetic
acgagaagcugtgcgagtut

SEQ ID NO: 68156 - DNA, 23 bp, Artificial Sequence
  Synthetic
gcaggatggccaugtagatgaug

SEQ ID NO: 68157 - DNA, 20 bp, Artificial Sequence
  Synthetic
aagcccaaggucatcgagug

SEQ ID NO: 68158 - DNA, 21 bp, Artificial Sequence
  Synthetic
cccacactuagcagccagtuc

SEQ ID NO: 68159 - DNA, 26 bp, Artificial Sequence
  Synthetic
accctaccttatucttgacctagcuc

SEQ ID NO: 68160 - DNA, 21 bp, Artificial Sequence
  Synthetic
ggcugccctcaaaauccacat

SEQ ID NO: 68161 - DNA, 24 bp, Artificial Sequence
  Synthetic
cccatugacaaaggtccttcucag

SEQ ID NO: 68162 - DNA, 25 bp, Artificial Sequence
  Synthetic
ttcatgggautcaactguggaaact

SEQ ID NO: 68163 - DNA, 24 bp, Artificial Sequence
  Synthetic
tcgttaaacaugggtgttgaucca

SEQ ID NO: 68164 - DNA, 28 bp, Artificial Sequence
  Synthetic
tgccattccaagugtcttatttttgtuc

SEQ ID NO: 68165 - DNA, 28 bp, Artificial Sequence
  Synthetic
tgttgctgagatauttcacaccagtaut

SEQ ID NO: 68166 - DNA, 28 bp, Artificial Sequence
  Synthetic
ccctcctaccaucttagtatctaaugct

SEQ ID NO: 68167 - DNA, 27 bp, Artificial Sequence
  Synthetic
aaagaacacacautgctgtgguaaaaa

SEQ ID NO: 68168 - DNA, 23 bp, Artificial Sequence
  Synthetic
cggattcaccugtcaggacatuc

SEQ ID NO: 68169 - DNA, 20 bp, Artificial Sequence
  Synthetic
gctggagacucccuacccaa

SEQ ID NO: 68170 - DNA, 22 bp, Artificial Sequence
  Synthetic
tcacggacacaaugtguagcat

SEQ ID NO: 68171 - DNA, 24 bp, Artificial Sequence
  Synthetic
gtctttgtacgugatgtagtugcc

SEQ ID NO: 68172 - DNA, 19 bp, Artificial Sequence
  Synthetic
cacaugtcugcgcgaacaa

SEQ ID NO: 68173 - DNA, 27 bp, Artificial Sequence
  Synthetic
gtgccctgaaaugtgtaacaaauacat

SEQ ID NO: 68174 - DNA, 24 bp, Artificial Sequence
  Synthetic
tgggacactutcacagaactucac

SEQ ID NO: 68175 - DNA, 26 bp, Artificial Sequence
  Synthetic
gcctcaacttgugttcttttccatut

SEQ ID NO: 68176 - DNA, 21 bp, Artificial Sequence
  Synthetic
ggaacggccuccaacaaaauc

SEQ ID NO: 68177 - DNA, 28 bp, Artificial Sequence
  Synthetic
cgtttaatacttgutcttggccttcaut

SEQ ID NO: 68178 - DNA, 28 bp, Artificial Sequence
  Synthetic
caccttatugcagcaattaaugaaaacc

SEQ ID NO: 68179 - DNA, 25 bp, Artificial Sequence
  Synthetic
gctcagttttugaatccctgtucca

SEQ ID NO: 68180 - DNA, 23 bp, Artificial Sequence
  Synthetic
tcaagugaatgucacggaaagca

SEQ ID NO: 68181 - DNA, 26 bp, Artificial Sequence
  Synthetic
gcttattcaggagutccttggtgaut

SEQ ID NO: 68182 - DNA, 23 bp, Artificial Sequence
  Synthetic
ggtgatctagutgggttccagut

SEQ ID NO: 68183 - DNA, 28 bp, Artificial Sequence
  Synthetic
caaccatgcatucaacaattacgtttut

SEQ ID NO: 68184 - DNA, 25 bp, Artificial Sequence
  Synthetic
gaggccatatuttactcctggauct

SEQ ID NO: 68185 - DNA, 27 bp, Artificial Sequence
  Synthetic
tgacactggaaagutcagagaaaaugt

SEQ ID NO: 68186 - DNA, 24 bp, Artificial Sequence
  Synthetic
cttgcaactccuatctctcacuca

SEQ ID NO: 68187 - DNA, 23 bp, Artificial Sequence
  Synthetic
tcgtaccaacguttctcatgugg

SEQ ID NO: 68188 - DNA, 24 bp, Artificial Sequence
  Synthetic
aggccaaaauacaatagcagcugt

SEQ ID NO: 68189 - DNA, 27 bp, Artificial Sequence
  Synthetic
aaaaacccttcuaccaatgtctcagut

SEQ ID NO: 68190 - DNA, 25 bp, Artificial Sequence
  Synthetic
cacagcugagattatggauccagaa

SEQ ID NO: 68191 - DNA, 26 bp, Artificial Sequence
  Synthetic
gtattattccaacugaagctgtugcc

SEQ ID NO: 68192 - DNA, 26 bp, Artificial Sequence
  Synthetic
aaaacccaccuctttttgcataacug

SEQ ID NO: 68193 - DNA, 21 bp, Artificial Sequence
  Synthetic
cttgaugccgcacaugagaaa

SEQ ID NO: 68194 - DNA, 22 bp, Artificial Sequence
  Synthetic
tucgaagaugacccggaagaag

SEQ ID NO: 68195 - DNA, 20 bp, Artificial Sequence
  Synthetic
cctgcagcugatcttcgugt

SEQ ID NO: 68196 - DNA, 29 bp, Artificial Sequence
  Synthetic
tctactgaaataaautctgcattggugct

SEQ ID NO: 68197 - DNA, 24 bp, Artificial Sequence
  Synthetic
gcagagaaugagggaggaguacat

SEQ ID NO: 68198 - DNA, 26 bp, Artificial Sequence
  Synthetic
cttcctcagacautcaaacgtgttut

SEQ ID NO: 68199 - DNA, 24 bp, Artificial Sequence
  Synthetic
atgttttgguggacccattacaut

SEQ ID NO: 68200 - DNA, 21 bp, Artificial Sequence
  Synthetic
cgcagtgtutcactcgcuact

SEQ ID NO: 68201 - DNA, 24 bp, Artificial Sequence
  Synthetic
gtgtccttcugggaccaaaatuct

SEQ ID NO: 68202 - DNA, 21 bp, Artificial Sequence
  Synthetic
tcggtcucctgtggugagaaa

SEQ ID NO: 68203 - DNA, 24 bp, Artificial Sequence
  Synthetic
tccttcatcguttgtctttgcuct

SEQ ID NO: 68204 - DNA, 24 bp, Artificial Sequence
  Synthetic
cggatctgccuctacatctcuagt

SEQ ID NO: 68205 - DNA, 21 bp, Artificial Sequence
  Synthetic
gcctgttgcauctacccctug

SEQ ID NO: 68206 - DNA, 22 bp, Artificial Sequence
  Synthetic
cugcatcttcttucccagacct

SEQ ID NO: 68207 - DNA, 22 bp, Artificial Sequence
  Synthetic
cccgaugacaaggaagagttug

SEQ ID NO: 68208 - DNA, 17 bp, Artificial Sequence
  Synthetic
gctgcacccgcucacua

SEQ ID NO: 68209 - DNA, 20 bp, Artificial Sequence
  Synthetic
ctcatgcccacuctccugat

SEQ ID NO: 68210 - DNA, 20 bp, Artificial Sequence
  Synthetic
gagacugtggugggaaccat

SEQ ID NO: 68211 - DNA, 28 bp, Artificial Sequence
  Synthetic
acatccatcatauaactctccttcccut

SEQ ID NO: 68212 - DNA, 21 bp, Artificial Sequence
  Synthetic
ccaggtugccatggagauagt

SEQ ID NO: 68213 - DNA, 29 bp, Artificial Sequence
  Synthetic
ccctaacttttctutctctccttcttcuc

SEQ ID NO: 68214 - DNA, 21 bp, Artificial Sequence
  Synthetic
agaaggaccgagutctgguct

SEQ ID NO: 68215 - DNA, 22 bp, Artificial Sequence
  Synthetic
cctccctccauctcacacttut

SEQ ID NO: 68216 - DNA, 23 bp, Artificial Sequence
  Synthetic
agaaagggagucacaagacacug

SEQ ID NO: 68217 - DNA, 27 bp, Artificial Sequence
  Synthetic
aggaatccaugactttgcaacauagag

SEQ ID NO: 68218 - DNA, 25 bp, Artificial Sequence
  Synthetic
tccctgctgugcctttttacauaat

SEQ ID NO: 68219 - DNA, 25 bp, Artificial Sequence
  Synthetic
ctgattcucaccacacatccttuct

SEQ ID NO: 68220 - DNA, 20 bp, Artificial Sequence
  Synthetic
ccctaggcgcugtgtcttua

SEQ ID NO: 68221 - DNA, 28 bp, Artificial Sequence
  Synthetic
ggattaattggcaaauttgtgcttugat

SEQ ID NO: 68222 - DNA, 22 bp, Artificial Sequence
  Synthetic
gggagcaggugtgaaagtuacc

SEQ ID NO: 68223 - DNA, 25 bp, Artificial Sequence
  Synthetic
gaacagtaaggucgttgtttcgtuc

SEQ ID NO: 68224 - DNA, 21 bp, Artificial Sequence
  Synthetic
tcttcacgcugctggttugaa

SEQ ID NO: 68225 - DNA, 22 bp, Artificial Sequence
  Synthetic
gggagcgaagauacctgcuaag

SEQ ID NO: 68226 - DNA, 23 bp, Artificial Sequence
  Synthetic
gggttgattuggagattcagugt

SEQ ID NO: 68227 - DNA, 21 bp, Artificial Sequence
  Synthetic
gtagcctagucccctcccaut

SEQ ID NO: 68228 - DNA, 25 bp, Artificial Sequence
  Synthetic
catctccccucacagataaagctuc

SEQ ID NO: 68229 - DNA, 28 bp, Artificial Sequence
  Synthetic
gctgtccatgaucccttatttactuact

SEQ ID NO: 68230 - DNA, 27 bp, Artificial Sequence
  Synthetic
aactttggcaaugatgtcatucaaaca

SEQ ID NO: 68231 - DNA, 27 bp, Artificial Sequence
  Synthetic
ccacctttaacauggtcatttccatut

SEQ ID NO: 68232 - DNA, 28 bp, Artificial Sequence
  Synthetic
ggcauaactgtctaaaauacaggagact

SEQ ID NO: 68233 - DNA, 28 bp, Artificial Sequence
  Synthetic
tcctttgtgacaauggacaatguagaaa

SEQ ID NO: 68234 - DNA, 19 bp, Artificial Sequence
  Synthetic
ctgguctggcaucgacact

SEQ ID NO: 68235 - DNA, 23 bp, Artificial Sequence
  Synthetic
gcctaccuggaatattgctcugg

SEQ ID NO: 68236 - DNA, 22 bp, Artificial Sequence
  Synthetic
cgggaagcacuatggcatcuat

SEQ ID NO: 68237 - DNA, 22 bp, Artificial Sequence
  Synthetic
gccatgggcutggacattttug

SEQ ID NO: 68238 - DNA, 19 bp, Artificial Sequence
  Synthetic
cgcctcccuccacttugat

SEQ ID NO: 68239 - DNA, 19 bp, Artificial Sequence
  Synthetic
acggacaccugcatgacuc

SEQ ID NO: 68240 - DNA, 22 bp, Artificial Sequence
  Synthetic
cagcaccauacctggaagtuct

SEQ ID NO: 68241 - DNA, 21 bp, Artificial Sequence
  Synthetic
gctgatcugccatgtccctug

SEQ ID NO: 68242 - DNA, 26 bp, Artificial Sequence
  Synthetic
aaacaagtcacucttcatctguccaa

SEQ ID NO: 68243 - DNA, 18 bp, Artificial Sequence
  Synthetic
ccacgcugaggugaggac

SEQ ID NO: 68244 - DNA, 23 bp, Artificial Sequence
  Synthetic
gcttggagauccctttcgaacug

SEQ ID NO: 68245 - DNA, 26 bp, Artificial Sequence
  Synthetic
ttcatgaagtugagcctcatagaaug

SEQ ID NO: 68246 - DNA, 20 bp, Artificial Sequence
  Synthetic
ccggccccuactcactttug

SEQ ID NO: 68247 - DNA, 24 bp, Artificial Sequence
  Synthetic
ccagaucaccacgagagtaaauct

SEQ ID NO: 68248 - DNA, 21 bp, Artificial Sequence
  Synthetic
agcucaccttctugcacacat

SEQ ID NO: 68249 - DNA, 22 bp, Artificial Sequence
  Synthetic
tcgttagcaaagucgcactcut

SEQ ID NO: 68250 - DNA, 22 bp, Artificial Sequence
  Synthetic
caaggtcttcgucctgtgaguc

SEQ ID NO: 68251 - DNA, 23 bp, Artificial Sequence
  Synthetic
gggcucaagtcacucaaaaaggt

SEQ ID NO: 68252 - DNA, 19 bp, Artificial Sequence
  Synthetic
ccaacucauaccccggcat

SEQ ID NO: 68253 - DNA, 19 bp, Artificial Sequence
  Synthetic
gacuccccacccaccttug

SEQ ID NO: 68254 - DNA, 20 bp, Artificial Sequence
  Synthetic
gtcctcacugtccagctuca

SEQ ID NO: 68255 - DNA, 19 bp, Artificial Sequence
  Synthetic
ccaggugccaucccaaact

SEQ ID NO: 68256 - DNA, 23 bp, Artificial Sequence
  Synthetic
ctggccugaaaatacatggucct

SEQ ID NO: 68257 - DNA, 21 bp, Artificial Sequence
  Synthetic
ggccaagutcctggacuacac

SEQ ID NO: 68258 - DNA, 21 bp, Artificial Sequence
  Synthetic
gcctccaggaauggccataut

SEQ ID NO: 68259 - DNA, 23 bp, Artificial Sequence
  Synthetic
cttgaggugggcctttcatttut

SEQ ID NO: 68260 - DNA, 23 bp, Artificial Sequence
  Synthetic
tcaggaugttcctuaccccaagt

SEQ ID NO: 68261 - DNA, 22 bp, Artificial Sequence
  Synthetic
ggcctttaaacugaggtgccut

SEQ ID NO: 68262 - DNA, 23 bp, Artificial Sequence
  Synthetic
cccaaaggagggacauaccacua

SEQ ID NO: 68263 - DNA, 28 bp, Artificial Sequence
  Synthetic
gaagagaccucccaaagctgtatttuaa

SEQ ID NO: 68264 - DNA, 25 bp, Artificial Sequence
  Synthetic
aatgagcuaaccggagtatttcugg

SEQ ID NO: 68265 - DNA, 27 bp, Artificial Sequence
  Synthetic
acctaccactuttcacacaacauacat

SEQ ID NO: 68266 - DNA, 21 bp, Artificial Sequence
  Synthetic
gccacugacaaccaccctuaa

SEQ ID NO: 68267 - DNA, 23 bp, Artificial Sequence
  Synthetic
cctctgatucctcactgatugct

SEQ ID NO: 68268 - DNA, 23 bp, Artificial Sequence
  Synthetic
gggtgaagaggaaucccaaagut

SEQ ID NO: 68269 - DNA, 22 bp, Artificial Sequence
  Synthetic
ccctucccagaaaaccuaccag

SEQ ID NO: 68270 - DNA, 20 bp, Artificial Sequence
  Synthetic
catccuaccgcacctugaca

SEQ ID NO: 68271 - DNA, 21 bp, Artificial Sequence
  Synthetic
ggatuaggacccaggucccat

SEQ ID NO: 68272 - DNA, 24 bp, Artificial Sequence
  Synthetic
ctgttuagcaagacaagcccuaga

SEQ ID NO: 68273 - DNA, 28 bp, Artificial Sequence
  Synthetic
ccatcttatcccgauaaactcgattuga

SEQ ID NO: 68274 - DNA, 23 bp, Artificial Sequence
  Synthetic
ggtgtggagacugacaaagugag

SEQ ID NO: 68275 - DNA, 21 bp, Artificial Sequence
  Synthetic
cctgagggaugagcaggtaug

SEQ ID NO: 68276 - DNA, 23 bp, Artificial Sequence
  Synthetic
cagtctcatacucccggacucat

SEQ ID NO: 68277 - DNA, 23 bp, Artificial Sequence
  Synthetic
tgattcuaaccagggccaugaac

SEQ ID NO: 68278 - DNA, 20 bp, Artificial Sequence
  Synthetic
gcggguggccaacctaauag

SEQ ID NO: 68279 - DNA, 27 bp, Artificial Sequence
  Synthetic
tgtctgggcacuaaaaataacctgtut

SEQ ID NO: 68280 - DNA, 27 bp, Artificial Sequence
  Synthetic
acacaagaaataauaatgacgccucca

SEQ ID NO: 68281 - DNA, 26 bp, Artificial Sequence
  Synthetic
atgaggcaaguatgggtcaagauaac

SEQ ID NO: 68282 - DNA, 18 bp, Artificial Sequence
  Synthetic
ggatuccaccaccucgga

SEQ ID NO: 68283 - DNA, 20 bp, Artificial Sequence
  Synthetic
gugcaggatucagggagcaa

SEQ ID NO: 68284 - DNA, 30 bp, Artificial Sequence
  Synthetic
agtatgagtttuagaggctgttaattugct

SEQ ID NO: 68285 - DNA, 21 bp, Artificial Sequence
  Synthetic
tcagctgccuacttccuccat

SEQ ID NO: 68286 - DNA, 28 bp, Artificial Sequence
  Synthetic
tttctatttgctgutctttttggctuca

SEQ ID NO: 68287 - DNA, 28 bp, Artificial Sequence
  Synthetic
ccttttggactuacattggtgatgatuc

SEQ ID NO: 68288 - DNA, 24 bp, Artificial Sequence
  Synthetic
caaactagaaguggccctguacat

SEQ ID NO: 68289 - DNA, 25 bp, Artificial Sequence
  Synthetic
tcatattgcugacagaggcaaacuc

SEQ ID NO: 68290 - DNA, 27 bp, Artificial Sequence
  Synthetic
actcatcuccctttaatttuggcacat

SEQ ID NO: 68291 - DNA, 27 bp, Artificial Sequence
  Synthetic
gcacaattccauggattggattuaaca

SEQ ID NO: 68292 - DNA, 22 bp, Artificial Sequence
  Synthetic
gaagcctcuctctcctctcuga

SEQ ID NO: 68293 - DNA, 21 bp, Artificial Sequence
  Synthetic
ggtgctgauggtcctgctgua

SEQ ID NO: 68294 - DNA, 23 bp, Artificial Sequence
  Synthetic
gggaagucacaggaacagtuagg

SEQ ID NO: 68295 - DNA, 19 bp, Artificial Sequence
  Synthetic
gtgtgucgcggagtucact

SEQ ID NO: 68296 - DNA, 20 bp, Artificial Sequence
  Synthetic
actgaccccuctccctctut

SEQ ID NO: 68297 - DNA, 19 bp, Artificial Sequence
  Synthetic
gggagatgugcgtctgcuc

SEQ ID NO: 68298 - DNA, 17 bp, Artificial Sequence
  Synthetic
caucggcgagcugagca

SEQ ID NO: 68299 - DNA, 18 bp, Artificial Sequence
  Synthetic
gcctgcugcttggacauc

SEQ ID NO: 68300 - DNA, 21 bp, Artificial Sequence
  Synthetic
cctctgtcccuccaaccauga

SEQ ID NO: 68301 - DNA, 20 bp, Artificial Sequence
  Synthetic
tgaggaccuggaugcacaag

SEQ ID NO: 68302 - DNA, 21 bp, Artificial Sequence
  Synthetic
cugtccccuaccaacaccaac

SEQ ID NO: 68303 - DNA, 22 bp, Artificial Sequence
  Synthetic
ggcaauaccaagaggugggaaa

SEQ ID NO: 68304 - DNA, 22 bp, Artificial Sequence
  Synthetic
ggttccaacaaguaggtcccut

SEQ ID NO: 68305 - DNA, 21 bp, Artificial Sequence
  Synthetic
gggcaatgucaccgttgatut

SEQ ID NO: 68306 - DNA, 23 bp, Artificial Sequence
  Synthetic
cagcaggtguctttcttctggut

SEQ ID NO: 68307 - DNA, 20 bp, Artificial Sequence
  Synthetic
gatgagagccagucgctugt

SEQ ID NO: 68308 - DNA, 24 bp, Artificial Sequence
  Synthetic
ctactccatgauttcctgctggut

SEQ ID NO: 68309 - DNA, 19 bp, Artificial Sequence
  Synthetic
cctgggtgauggccttguc

SEQ ID NO: 68310 - DNA, 24 bp, Artificial Sequence
  Synthetic
tgggatccuggatgtctacatcut

SEQ ID NO: 68311 - DNA, 20 bp, Artificial Sequence
  Synthetic
cggcaugaacgggtatccug

SEQ ID NO: 68312 - DNA, 20 bp, Artificial Sequence
  Synthetic
ggaaccuccgagctcuccat

SEQ ID NO: 68313 - DNA, 18 bp, Artificial Sequence
  Synthetic
cttggccucctcctgcug

SEQ ID NO: 68314 - DNA, 28 bp, Artificial Sequence
  Synthetic
gcaagtggtcauttacatcatcaatgut

SEQ ID NO: 68315 - DNA, 28 bp, Artificial Sequence
  Synthetic
tggtgcttucccccaataattaaatuct

SEQ ID NO: 68316 - DNA, 19 bp, Artificial Sequence
  Synthetic
cagaccggutgcgattgug

SEQ ID NO: 68317 - DNA, 25 bp, Artificial Sequence
  Synthetic
caaauttagcgtucaggagaagcag

SEQ ID NO: 68318 - DNA, 18 bp, Artificial Sequence
  Synthetic
cgagucuccccggagagg

SEQ ID NO: 68319 - DNA, 20 bp, Artificial Sequence
  Synthetic
cagctcgcugttctgugact

SEQ ID NO: 68320 - DNA, 21 bp, Artificial Sequence
  Synthetic
cgacagcccaguatgtcugag

SEQ ID NO: 68321 - DNA, 24 bp, Artificial Sequence
  Synthetic
caactacacaagugcaggactcua

SEQ ID NO: 68322 - DNA, 18 bp, Artificial Sequence
  Synthetic
gagcucggtgcuggagaa

SEQ ID NO: 68323 - DNA, 17 bp, Artificial Sequence
  Synthetic
cagggagucctcugccc

SEQ ID NO: 68324 - DNA, 20 bp, Artificial Sequence
  Synthetic
cggcatcutgtccacgugaa

SEQ ID NO: 68325 - DNA, 23 bp, Artificial Sequence
  Synthetic
cttagctgtcacutagcgtccuc

SEQ ID NO: 68326 - DNA, 21 bp, Artificial Sequence
  Synthetic
ccccuccccacctgtcttuat

SEQ ID NO: 68327 - DNA, 20 bp, Artificial Sequence
  Synthetic
ccagaccacugaagctccug

SEQ ID NO: 68328 - DNA, 17 bp, Artificial Sequence
  Synthetic
gucttcuccggcggagt

SEQ ID NO: 68329 - DNA, 22 bp, Artificial Sequence
  Synthetic
tgttgtcggucttgtggtcauc

SEQ ID NO: 68330 - DNA, 33 bp, Artificial Sequence
  Synthetic
actgatttgtatttcautagtatattggaguga

SEQ ID NO: 68331 - DNA, 27 bp, Artificial Sequence
  Synthetic
ccttccttcatgauttcctcagtctut

SEQ ID NO: 68332 - DNA, 23 bp, Artificial Sequence
  Synthetic
cgactccaucttgaacccaucaa

SEQ ID NO: 68333 - DNA, 21 bp, Artificial Sequence
  Synthetic
cucgccagaaaaccttugcag

SEQ ID NO: 68334 - DNA, 21 bp, Artificial Sequence
  Synthetic
ggactuggccactggctuaat

SEQ ID NO: 68335 - DNA, 25 bp, Artificial Sequence
  Synthetic
catctataagagcugtcctgggaug

SEQ ID NO: 68336 - DNA, 20 bp, Artificial Sequence
  Synthetic
catcacgcucttccctccug

SEQ ID NO: 68337 - DNA, 20 bp, Artificial Sequence
  Synthetic
cagcatccucagtgcctugt

SEQ ID NO: 68338 - DNA, 18 bp, Artificial Sequence
  Synthetic
cgugggccagaaccucac

SEQ ID NO: 68339 - DNA, 26 bp, Artificial Sequence
  Synthetic
gcttacagcaagaaauccacacatuc

SEQ ID NO: 68340 - DNA, 20 bp, Artificial Sequence
  Synthetic
gggtgauggcttgacatucc

SEQ ID NO: 68341 - DNA, 21 bp, Artificial Sequence
  Synthetic
gcagcgugatctcgaugacat

SEQ ID NO: 68342 - DNA, 18 bp, Artificial Sequence
  Synthetic
ggaguccaagcgccagut

SEQ ID NO: 68343 - DNA, 17 bp, Artificial Sequence
  Synthetic
cccucgggcuccgagat

SEQ ID NO: 68344 - DNA, 21 bp, Artificial Sequence
  Synthetic
ggtggtctccuctgctctcut

SEQ ID NO: 68345 - DNA, 22 bp, Artificial Sequence
  Synthetic
ggattccagagaugacgtuggg

SEQ ID NO: 68346 - DNA, 20 bp, Artificial Sequence
  Synthetic
catgtcaauccgcgtggaug

SEQ ID NO: 68347 - DNA, 27 bp, Artificial Sequence
  Synthetic
acagtgatcgataugaggaagatgcua

SEQ ID NO: 68348 - DNA, 18 bp, Artificial Sequence
  Synthetic
cagggucaccacctguga

SEQ ID NO: 68349 - DNA, 19 bp, Artificial Sequence
  Synthetic
ggctgccaccuttcctcug

SEQ ID NO: 68350 - DNA, 22 bp, Artificial Sequence
  Synthetic
ccacctctcugctttcttcuga

SEQ ID NO: 68351 - DNA, 21 bp, Artificial Sequence
  Synthetic
gtggtagatguagccggtgug

SEQ ID NO: 68352 - DNA, 17 bp, Artificial Sequence
  Synthetic
ggccuggtcgcugaact

SEQ ID NO: 68353 - DNA, 18 bp, Artificial Sequence
  Synthetic
gggtcuggcccataccug

SEQ ID NO: 68354 - DNA, 22 bp, Artificial Sequence
  Synthetic
cggttguacagcacgttgauct

SEQ ID NO: 68355 - DNA, 21 bp, Artificial Sequence
  Synthetic
accagcuggagtcugagaagt

SEQ ID NO: 68356 - DNA, 21 bp, Artificial Sequence
  Synthetic
gaagggtggucttggaggtug

SEQ ID NO: 68357 - DNA, 22 bp, Artificial Sequence
  Synthetic
ctctcacguctcttccctcuct

SEQ ID NO: 68358 - DNA, 22 bp, Artificial Sequence
  Synthetic
cctgccuaagccctgggtaaua

SEQ ID NO: 68359 - DNA, 23 bp, Artificial Sequence
  Synthetic
ctaacctctgacucatcgccauc

SEQ ID NO: 68360 - DNA, 22 bp, Artificial Sequence
  Synthetic
ctttctgcuggtgtttguccat

SEQ ID NO: 68361 - DNA, 23 bp, Artificial Sequence
  Synthetic
cagcugaaccagaucaaaaaccc

SEQ ID NO: 68362 - DNA, 20 bp, Artificial Sequence
  Synthetic
tctccccagcguggtatcut

SEQ ID NO: 68363 - DNA, 21 bp, Artificial Sequence
  Synthetic
catccctcuctgactgccauc

SEQ ID NO: 68364 - DNA, 22 bp, Artificial Sequence
  Synthetic
actccacgaccaugtcctcaua

SEQ ID NO: 68365 - DNA, 21 bp, Artificial Sequence
  Synthetic
gcccacgaaucatgcagucat

SEQ ID NO: 68366 - DNA, 26 bp, Artificial Sequence
  Synthetic
gagaagcagaauagagccaagtaugg

SEQ ID NO: 68367 - DNA, 23 bp, Artificial Sequence
  Synthetic
tcaatcuccacagcatggucaag

SEQ ID NO: 68368 - DNA, 23 bp, Artificial Sequence
  Synthetic
ctctctctctugcacacacgtua

SEQ ID NO: 68369 - DNA, 22 bp, Artificial Sequence
  Synthetic
tgctctcaugccatcttugacc

SEQ ID NO: 68370 - DNA, 22 bp, Artificial Sequence
  Synthetic
tcctauagggtcagugcacaga

SEQ ID NO: 68371 - DNA, 22 bp, Artificial Sequence
  Synthetic
ccatccccacuttgtgatuccc

SEQ ID NO: 68372 - DNA, 26 bp, Artificial Sequence
  Synthetic
cgttttcctaaccutgttcgcctaut

SEQ ID NO: 68373 - DNA, 27 bp, Artificial Sequence
  Synthetic
ccatgagguacaggatgacataguaga

SEQ ID NO: 68374 - DNA, 27 bp, Artificial Sequence
  Synthetic
ctttagaaaggaacaaguggcaactut

SEQ ID NO: 68375 - DNA, 21 bp, Artificial Sequence
  Synthetic
cagutccaaugggaggacgac

SEQ ID NO: 68376 - DNA, 26 bp, Artificial Sequence
  Synthetic
cccagagtcuggaaaagattttcuga

SEQ ID NO: 68377 - DNA, 27 bp, Artificial Sequence
  Synthetic
ccccuccagaaactgtauagaagagaa

SEQ ID NO: 68378 - DNA, 25 bp, Artificial Sequence
  Synthetic
cugtagagagguagaaggagaggac

SEQ ID NO: 68379 - DNA, 28 bp, Artificial Sequence
  Synthetic
ggcttctaaaguaggaagggtcaaaaut

SEQ ID NO: 68380 - DNA, 25 bp, Artificial Sequence
  Synthetic
ctgtgctaucctacctctaaauccc

SEQ ID NO: 68381 - DNA, 28 bp, Artificial Sequence
  Synthetic
ttttcaggaatgutcgattaggtctuga

SEQ ID NO: 68382 - DNA, 26 bp, Artificial Sequence
  Synthetic
catgtagttcccuccaacgagaatua

SEQ ID NO: 68383 - DNA, 26 bp, Artificial Sequence
  Synthetic
ctgagcattugctgataatccaaugt

SEQ ID NO: 68384 - DNA, 29 bp, Artificial Sequence
  Synthetic
catttatgcttctutgcaaactactguga

SEQ ID NO: 68385 - DNA, 28 bp, Artificial Sequence
  Synthetic
cctacuggagcaataaagttugaagaac

SEQ ID NO: 68386 - DNA, 25 bp, Artificial Sequence
  Synthetic
tttgtaaacccuctccatcagtguc

SEQ ID NO: 68387 - DNA, 20 bp, Artificial Sequence
  Synthetic
gggaacugacgcaggauaca

SEQ ID NO: 68388 - DNA, 21 bp, Artificial Sequence
  Synthetic
gctcccucactgcaacugaac

SEQ ID NO: 68389 - DNA, 23 bp, Artificial Sequence
  Synthetic
caaacccaaguctctgaccauca

SEQ ID NO: 68390 - DNA, 21 bp, Artificial Sequence
  Synthetic
gcaggugggttgaaugaagga

SEQ ID NO: 68391 - DNA, 21 bp, Artificial Sequence
  Synthetic
agccagacuacagugaacgac

SEQ ID NO: 68392 - DNA, 24 bp, Artificial Sequence
  Synthetic
ccutatcgauaccaagggcaacaa

SEQ ID NO: 68393 - DNA, 21 bp, Artificial Sequence
  Synthetic
agctgaugcaggcaaagtuct

SEQ ID NO: 68394 - DNA, 26 bp, Artificial Sequence
  Synthetic
gtctguaggaaaggtgaatctucagg

SEQ ID NO: 68395 - DNA, 24 bp, Artificial Sequence
  Synthetic
tcttcuaaacaccaagccccttut

SEQ ID NO: 68396 - DNA, 28 bp, Artificial Sequence
  Synthetic
tctaggagcaauacaatgtagtgacugt

SEQ ID NO: 68397 - DNA, 25 bp, Artificial Sequence
  Synthetic
catttctaatcauccactcccggut

SEQ ID NO: 68398 - DNA, 22 bp, Artificial Sequence
  Synthetic
tttctgcatguagcgagcauct

SEQ ID NO: 68399 - DNA, 28 bp, Artificial Sequence
  Synthetic
ctataatuaacaatccgguccagcaaac

SEQ ID NO: 68400 - DNA, 29 bp, Artificial Sequence
  Synthetic
actgaatttaccugttgatctgaatcugt

SEQ ID NO: 68401 - DNA, 24 bp, Artificial Sequence
  Synthetic
aaacgtgcctuctggtggttauat

SEQ ID NO: 68402 - DNA, 25 bp, Artificial Sequence
  Synthetic
gcaaaaccagcauattaacgugact

SEQ ID NO: 68403 - DNA, 22 bp, Artificial Sequence
  Synthetic
gaagccautgctctuagcagga

SEQ ID NO: 68404 - DNA, 22 bp, Artificial Sequence
  Synthetic
gccagcaacugtacatgauggt

SEQ ID NO: 68405 - DNA, 28 bp, Artificial Sequence
  Synthetic
gctatccaaaaagacugcaaaccaatut

SEQ ID NO: 68406 - DNA, 21 bp, Artificial Sequence
  Synthetic
gugtgaugaagcaggcaggat

SEQ ID NO: 68407 - DNA, 23 bp, Artificial Sequence
  Synthetic
ctaagcaaccacacuttctuggt

SEQ ID NO: 68408 - DNA, 25 bp, Artificial Sequence
  Synthetic
cttcttatagggucctcctggacut

SEQ ID NO: 68409 - DNA, 24 bp, Artificial Sequence
  Synthetic
aatggatggauctcaccttggtuc

SEQ ID NO: 68410 - DNA, 22 bp, Artificial Sequence
  Synthetic
caautgcatugaacagggccaa

SEQ ID NO: 68411 - DNA, 24 bp, Artificial Sequence
  Synthetic
ggaguatgcgatuaaggcacaaaa

SEQ ID NO: 68412 - DNA, 27 bp, Artificial Sequence
  Synthetic
tcatgggagttuttgttgtgttttguc

SEQ ID NO: 68413 - DNA, 21 bp, Artificial Sequence
  Synthetic
gttgagaugcagugacagcct

SEQ ID NO: 68414 - DNA, 25 bp, Artificial Sequence
  Synthetic
gtgccatttuggacaaaagcttgua

SEQ ID NO: 68415 - DNA, 27 bp, Artificial Sequence
  Synthetic
cctaccttctuggaaatagccattgut

SEQ ID NO: 68416 - DNA, 20 bp, Artificial Sequence
  Synthetic
caccaugcggaagctcttug

SEQ ID NO: 68417 - DNA, 27 bp, Artificial Sequence
  Synthetic
atgtcttaaataucaacaggccacugt

SEQ ID NO: 68418 - DNA, 25 bp, Artificial Sequence
  Synthetic
attaaccutttgtaacuccccggaa

SEQ ID NO: 68419 - DNA, 28 bp, Artificial Sequence
  Synthetic
caagcaactgaacuttacatgaacauga

SEQ ID NO: 68420 - DNA, 23 bp, Artificial Sequence
  Synthetic
ctgcctaagucggtaacauggaa

SEQ ID NO: 68421 - DNA, 28 bp, Artificial Sequence
  Synthetic
cagactacuatgctttgtauggcaaaga

SEQ ID NO: 68422 - DNA, 29 bp, Artificial Sequence
  Synthetic
gatgtgattgaaauggattctttgtugct

SEQ ID NO: 68423 - DNA, 25 bp, Artificial Sequence
  Synthetic
gacttgtgtggaauaccatgcttuc

SEQ ID NO: 68424 - DNA, 22 bp, Artificial Sequence
  Synthetic
gaccaagcaguacgttcuccat

SEQ ID NO: 68425 - DNA, 20 bp, Artificial Sequence
  Synthetic
caguaaggactguggccgaa

SEQ ID NO: 68426 - DNA, 24 bp, Artificial Sequence
  Synthetic
caaactcaaaagcutgtggaguca

SEQ ID NO: 68427 - DNA, 22 bp, Artificial Sequence
  Synthetic
gggaccutaaucaccacagcaa

SEQ ID NO: 68428 - DNA, 21 bp, Artificial Sequence
  Synthetic
gcagaugcgagcagttttgua

SEQ ID NO: 68429 - DNA, 28 bp, Artificial Sequence
  Synthetic
tcaaaaggaagcagautcaaguaggaat

SEQ ID NO: 68430 - DNA, 27 bp, Artificial Sequence
  Synthetic
gcatctaagacagagguctcaggacua

SEQ ID NO: 68431 - DNA, 26 bp, Artificial Sequence
  Synthetic
ccatcattgcauttacctcggaucat

SEQ ID NO: 68432 - DNA, 28 bp, Artificial Sequence
  Synthetic
ggcctagtauggaaatagaacctguaaa

SEQ ID NO: 68433 - DNA, 28 bp, Artificial Sequence
  Synthetic
gactcattcuccaaggagtgtgaatuat

SEQ ID NO: 68434 - DNA, 21 bp, Artificial Sequence
  Synthetic
cgtcaucaccctgtggucaaa

SEQ ID NO: 68435 - DNA, 21 bp, Artificial Sequence
  Synthetic
atcugaggcacgauacggaac

SEQ ID NO: 68436 - DNA, 23 bp, Artificial Sequence
  Synthetic
actgtattgcuacaggcugcaaa

SEQ ID NO: 68437 - DNA, 23 bp, Artificial Sequence
  Synthetic
ccagagtuccaagtgacgcauac

SEQ ID NO: 68438 - DNA, 20 bp, Artificial Sequence
  Synthetic
gcccacaaaguctaccccut

SEQ ID NO: 68439 - DNA, 19 bp, Artificial Sequence
  Synthetic
ggagccgcugcaggaauac

SEQ ID NO: 68440 - DNA, 22 bp, Artificial Sequence
  Synthetic
cttacctcuccagggaccugaa

SEQ ID NO: 68441 - DNA, 22 bp, Artificial Sequence
  Synthetic
agaagaagcugtccctctcugt

SEQ ID NO: 68442 - DNA, 21 bp, Artificial Sequence
  Synthetic
agacaucagccccttccttug

SEQ ID NO: 68443 - DNA, 25 bp, Artificial Sequence
  Synthetic
aggctgcagcautgatgtgttaaua

SEQ ID NO: 68444 - DNA, 19 bp, Artificial Sequence
  Synthetic
tcaugaccccguccaggaa

SEQ ID NO: 68445 - DNA, 18 bp, Artificial Sequence
  Synthetic
gtgucagcccgtctgucc

SEQ ID NO: 68446 - DNA, 19 bp, Artificial Sequence
  Synthetic
cccccaguaugagcgggat

SEQ ID NO: 68447 - DNA, 21 bp, Artificial Sequence
  Synthetic
gcuacaaacacgcccatcuac

SEQ ID NO: 68448 - DNA, 26 bp, Artificial Sequence
  Synthetic
attaatctugacaagccctcuaaccc

SEQ ID NO: 68449 - DNA, 23 bp, Artificial Sequence
  Synthetic
gcttttcactcuagccagtccut

SEQ ID NO: 68450 - DNA, 28 bp, Artificial Sequence
  Synthetic
cacatgtccacugaaatgaatagaaugg

SEQ ID NO: 68451 - DNA, 28 bp, Artificial Sequence
  Synthetic
tggtggaguggagagaaagaaacttaua

SEQ ID NO: 68452 - DNA, 26 bp, Artificial Sequence
  Synthetic
agaaataggtutctgctgctuggaaa

SEQ ID NO: 68453 - DNA, 21 bp, Artificial Sequence
  Synthetic
gccagaaucagcaagguggat

SEQ ID NO: 68454 - DNA, 18 bp, Artificial Sequence
  Synthetic
gccugtccuccccaggat

SEQ ID NO: 68455 - DNA, 18 bp, Artificial Sequence
  Synthetic
tgcucccagcccctaugt

SEQ ID NO: 68456 - DNA, 21 bp, Artificial Sequence
  Synthetic
ggaagagcaccgugatcaaug

SEQ ID NO: 68457 - DNA, 21 bp, Artificial Sequence
  Synthetic
cgtgucacaacggaggactug

SEQ ID NO: 68458 - DNA, 21 bp, Artificial Sequence
  Synthetic
ccctcttgcucctctgctuag

SEQ ID NO: 68459 - DNA, 22 bp, Artificial Sequence
  Synthetic
ccagaatgccucctcctcatut

SEQ ID NO: 68460 - DNA, 24 bp, Artificial Sequence
  Synthetic
ggtgggaucaaaggagacatugaa

SEQ ID NO: 68461 - DNA, 24 bp, Artificial Sequence
  Synthetic
atagacguagaggaggccauagag

SEQ ID NO: 68462 - DNA, 22 bp, Artificial Sequence
  Synthetic
gctcacggugcattcttttcuc

SEQ ID NO: 68463 - DNA, 22 bp, Artificial Sequence
  Synthetic
ctctttgucacctccaggtuct

SEQ ID NO: 68464 - DNA, 22 bp, Artificial Sequence
  Synthetic
gttcctugggacagagtucaga

SEQ ID NO: 68465 - DNA, 22 bp, Artificial Sequence
  Synthetic
ccguagaagggatugacaagcc

SEQ ID NO: 68466 - DNA, 20 bp, Artificial Sequence
  Synthetic
gcugggaaagtguccacacc

SEQ ID NO: 68467 - DNA, 24 bp, Artificial Sequence
  Synthetic
ggctttctcgucactctcatacuc

SEQ ID NO: 68468 - DNA, 19 bp, Artificial Sequence
  Synthetic
ccagcaugaccccugaaca

SEQ ID NO: 68469 - DNA, 20 bp, Artificial Sequence
  Synthetic
cctatucccaagcccauccc

SEQ ID NO: 68470 - DNA, 26 bp, Artificial Sequence
  Synthetic
gatgacaaggaaugttattgcugcat

SEQ ID NO: 68471 - DNA, 22 bp, Artificial Sequence
  Synthetic
agattccccuctccucacagac

SEQ ID NO: 68472 - DNA, 28 bp, Artificial Sequence
  Synthetic
gatggttttucctctaattctcucaggt

SEQ ID NO: 68473 - DNA, 22 bp, Artificial Sequence
  Synthetic
tggtgttgcagucaaagtccut

SEQ ID NO: 68474 - DNA, 24 bp, Artificial Sequence
  Synthetic
cuaggaagagagagaaucgccaaa

SEQ ID NO: 68475 - DNA, 18 bp, Artificial Sequence
  Synthetic
cgcggucatgugacacag

SEQ ID NO: 68476 - DNA, 24 bp, Artificial Sequence
  Synthetic
gaugggaggagcugagaaagaaaa

SEQ ID NO: 68477 - DNA, 21 bp, Artificial Sequence
  Synthetic
cttcucagccagguagaccag

SEQ ID NO: 68478 - DNA, 20 bp, Artificial Sequence
  Synthetic
gccttccuggtacucagcac

SEQ ID NO: 68479 - DNA, 22 bp, Artificial Sequence
  Synthetic
gccctagguctagatccugcat

SEQ ID NO: 68480 - DNA, 28 bp, Artificial Sequence
  Synthetic
aacagttacttcuctaatcccttcucca

SEQ ID NO: 68481 - DNA, 28 bp, Artificial Sequence
  Synthetic
cctctgccugagaacattctctaattut

SEQ ID NO: 68482 - DNA, 26 bp, Artificial Sequence
  Synthetic
gagaaaguaaaacaccactccuggat

SEQ ID NO: 68483 - DNA, 22 bp, Artificial Sequence
  Synthetic
cgaggagaguctctccagttug

SEQ ID NO: 68484 - DNA, 20 bp, Artificial Sequence
  Synthetic
accgacugaaacggugacat

SEQ ID NO: 68485 - DNA, 26 bp, Artificial Sequence
  Synthetic
gcaaaatttcaccuaccactgtcauc

SEQ ID NO: 68486 - DNA, 27 bp, Artificial Sequence
  Synthetic
cttacagtagagccuttgttaccctut

SEQ ID NO: 68487 - DNA, 23 bp, Artificial Sequence
  Synthetic
tctctagggaautcctggtccug

SEQ ID NO: 68488 - DNA, 18 bp, Artificial Sequence
  Synthetic
ggaugccccgaagaccut

SEQ ID NO: 68489 - DNA, 28 bp, Artificial Sequence
  Synthetic
gtattttctcaucactaatgtgcuccca

SEQ ID NO: 68490 - DNA, 25 bp, Artificial Sequence
  Synthetic
cctcaaacagutttccctcaugaga

SEQ ID NO: 68491 - DNA, 22 bp, Artificial Sequence
  Synthetic
cagggtauggcaggtgtagaug

SEQ ID NO: 68492 - DNA, 26 bp, Artificial Sequence
  Synthetic
cgcatggcaatuatctggttagctua

SEQ ID NO: 68493 - DNA, 24 bp, Artificial Sequence
  Synthetic
agaaatuggaccaagaggtctucc

SEQ ID NO: 68494 - DNA, 23 bp, Artificial Sequence
  Synthetic
tcautccatcaucaccaggagga

SEQ ID NO: 68495 - DNA, 21 bp, Artificial Sequence
  Synthetic
tccctgccaaaugtcctgtut

SEQ ID NO: 68496 - DNA, 28 bp, Artificial Sequence
  Synthetic
tgagatatcaugtccattcactuaccct

SEQ ID NO: 68497 - DNA, 24 bp, Artificial Sequence
  Synthetic
agggcaacugtttagaactcuagt

SEQ ID NO: 68498 - DNA, 22 bp, Artificial Sequence
  Synthetic
cttctgaaaaggcugggcuact

SEQ ID NO: 68499 - DNA, 28 bp, Artificial Sequence
  Synthetic
cctctgcctgcugtctaatcttatttut

SEQ ID NO: 68500 - DNA, 18 bp, Artificial Sequence
  Synthetic
cgccacagguaggtguga

SEQ ID NO: 68501 - DNA, 19 bp, Artificial Sequence
  Synthetic
ctctgctgutgtggtcgug

SEQ ID NO: 68502 - DNA, 21 bp, Artificial Sequence
  Synthetic
tgagtgaccccutcccatuca

SEQ ID NO: 68503 - DNA, 21 bp, Artificial Sequence
  Synthetic
ggtggaggcuaatggcugaac

SEQ ID NO: 68504 - DNA, 21 bp, Artificial Sequence
  Synthetic
aucaagcgccagaauggagat

SEQ ID NO: 68505 - DNA, 20 bp, Artificial Sequence
  Synthetic
cttccacaccaggucgguag

SEQ ID NO: 68506 - DNA, 28 bp, Artificial Sequence
  Synthetic
gaaaaagcagaaauggaagtucacaaac

SEQ ID NO: 68507 - DNA, 26 bp, Artificial Sequence
  Synthetic
gtatacctgcucacctcttacttguc

SEQ ID NO: 68508 - DNA, 21 bp, Artificial Sequence
  Synthetic
ggaagccagutcactgucgaa

SEQ ID NO: 68509 - DNA, 22 bp, Artificial Sequence
  Synthetic
ctgcctguggcttctaucagag

SEQ ID NO: 68510 - DNA, 21 bp, Artificial Sequence
  Synthetic
gaacgaccccguacctagtug

SEQ ID NO: 68511 - DNA, 20 bp, Artificial Sequence
  Synthetic
cccggccuaaggaccttuat

SEQ ID NO: 68512 - DNA, 23 bp, Artificial Sequence
  Synthetic
gggaaaatuacaggctggtccua

SEQ ID NO: 68513 - DNA, 29 bp, Artificial Sequence
  Synthetic
cagttccaagcautcataaattctcacut

SEQ ID NO: 68514 - DNA, 26 bp, Artificial Sequence
  Synthetic
acttggagucttgagugagaaaaaca

SEQ ID NO: 68515 - DNA, 26 bp, Artificial Sequence
  Synthetic
gtatccaugcgctaaaacucaaaagt

SEQ ID NO: 68516 - DNA, 26 bp, Artificial Sequence
  Synthetic
aaaattttgtaccutgaagtgaugcc

SEQ ID NO: 68517 - DNA, 27 bp, Artificial Sequence
  Synthetic
gaaggtgggautcagactattgtuagt

SEQ ID NO: 68518 - DNA, 26 bp, Artificial Sequence
  Synthetic
aggctatcacucgatacaggtatuct

SEQ ID NO: 68519 - DNA, 22 bp, Artificial Sequence
  Synthetic
gggaaatgacuccatcctggut

SEQ ID NO: 68520 - DNA, 22 bp, Artificial Sequence
  Synthetic
cgtaggaaacacauggcugacc

SEQ ID NO: 68521 - DNA, 24 bp, Artificial Sequence
  Synthetic
gttcaacaaggagugtagctguca

SEQ ID NO: 68522 - DNA, 23 bp, Artificial Sequence
  Synthetic
ctggttccaaaaauccgtgcaut

SEQ ID NO: 68523 - DNA, 22 bp, Artificial Sequence
  Synthetic
caggcacaaacagcaugaucac

SEQ ID NO: 68524 - DNA, 22 bp, Artificial Sequence
  Synthetic
aaagagcagaucttgcugcaga

SEQ ID NO: 68525 - DNA, 23 bp, Artificial Sequence
  Synthetic
tttctcucccctctctguggaat

SEQ ID NO: 68526 - DNA, 28 bp, Artificial Sequence
  Synthetic
ggagaaattgcuagaaaccattgaucag

SEQ ID NO: 68527 - DNA, 27 bp, Artificial Sequence
  Synthetic
ttctaatgcauagggcatacagagtug

SEQ ID NO: 68528 - DNA, 21 bp, Artificial Sequence
  Synthetic
accgtcaccutccaatcctuc

SEQ ID NO: 68529 - DNA, 24 bp, Artificial Sequence
  Synthetic
aggatgtaguggactcctgcuaaa

SEQ ID NO: 68530 - DNA, 28 bp, Artificial Sequence
  Synthetic
cacgtctcactuatttttccctctctut

SEQ ID NO: 68531 - DNA, 27 bp, Artificial Sequence
  Synthetic
cttcaatgccacuagtaaaactugcat

SEQ ID NO: 68532 - DNA, 23 bp, Artificial Sequence
  Synthetic
gtttacucacaggccatttgcut

SEQ ID NO: 68533 - DNA, 25 bp, Artificial Sequence
  Synthetic
gtgcattaggcugtgtttagaagut

SEQ ID NO: 68534 - DNA, 26 bp, Artificial Sequence
  Synthetic
gtgttgccucctcatcuagaaagaat

SEQ ID NO: 68535 - DNA, 20 bp, Artificial Sequence
  Synthetic
gucaccccauagcgggaaaa

SEQ ID NO: 68536 - DNA, 21 bp, Artificial Sequence
  Synthetic
ggctcaagugggtaggaugaa

SEQ ID NO: 68537 - DNA, 25 bp, Artificial Sequence
  Synthetic
tcctgcttttuagaaatggccugat

SEQ ID NO: 68538 - DNA, 29 bp, Artificial Sequence
  Synthetic
gacttggaagatuatgatgctgattcuga

SEQ ID NO: 68539 - DNA, 27 bp, Artificial Sequence
  Synthetic
ggactgtaaccutcctcacataacuac

SEQ ID NO: 68540 - DNA, 28 bp, Artificial Sequence
  Synthetic
tgctagcaatuaggattacatttuggct

SEQ ID NO: 68541 - DNA, 20 bp, Artificial Sequence
  Synthetic
aggccuccgaatgagcaauc

SEQ ID NO: 68542 - DNA, 23 bp, Artificial Sequence
  Synthetic
acacgcactuaaacacctgcaua

SEQ ID NO: 68543 - DNA, 28 bp, Artificial Sequence
  Synthetic
agcttatatggcutcattaatggcugaa

SEQ ID NO: 68544 - DNA, 25 bp, Artificial Sequence
  Synthetic
cacaaggttttuaatgaggcacugt

SEQ ID NO: 68545 - DNA, 28 bp, Artificial Sequence
  Synthetic
gccaaatataugcaggaaagcatuacat

SEQ ID NO: 68546 - DNA, 25 bp, Artificial Sequence
  Synthetic
ttggaagatacgagucctccctuat

SEQ ID NO: 68547 - DNA, 29 bp, Artificial Sequence
  Synthetic
ccactgtggtguaattgataatctgagua

SEQ ID NO: 68548 - DNA, 25 bp, Artificial Sequence
  Synthetic
cagtctcccuatgccatuaaacaga

SEQ ID NO: 68549 - DNA, 25 bp, Artificial Sequence
  Synthetic
gcaattccaaguttcagagtagcug

SEQ ID NO: 68550 - DNA, 24 bp, Artificial Sequence
  Synthetic
gtccaagacuggttagtcaauggt

SEQ ID NO: 68551 - DNA, 25 bp, Artificial Sequence
  Synthetic
ggatagcttuggagaaattccgtug

SEQ ID NO: 68552 - DNA, 21 bp, Artificial Sequence
  Synthetic
gatgcctcauggtacctgguc

SEQ ID NO: 68553 - DNA, 28 bp, Artificial Sequence
  Synthetic
attagctgaatttuaccaggcacataua

SEQ ID NO: 68554 - DNA, 28 bp, Artificial Sequence
  Synthetic
tctgattctacucgtaaacaguaaggct

SEQ ID NO: 68555 - DNA, 21 bp, Artificial Sequence
  Synthetic
ggcaacccugaggtccuaaaa

SEQ ID NO: 68556 - DNA, 28 bp, Artificial Sequence
  Synthetic
ggtctagtctguaaacaggtgatgaaut

SEQ ID NO: 68557 - DNA, 24 bp, Artificial Sequence
  Synthetic
gaagaaagaguagctgtggugagt

SEQ ID NO: 68558 - DNA, 21 bp, Artificial Sequence
  Synthetic
cattgcuagcaccaggaaguc

SEQ ID NO: 68559 - DNA, 27 bp, Artificial Sequence
  Synthetic
agcaatcaagaagaugaacgagatuca

SEQ ID NO: 68560 - DNA, 26 bp, Artificial Sequence
  Synthetic
agaaaagctcaguttcctaccttguc

SEQ ID NO: 68561 - DNA, 27 bp, Artificial Sequence
  Synthetic
ttttaattttgcaggaggucctaggut

SEQ ID NO: 68562 - DNA, 27 bp, Artificial Sequence
  Synthetic
gtaccttttggaucaaatgatgctugt

SEQ ID NO: 68563 - DNA, 26 bp, Artificial Sequence
  Synthetic
cgaagatcaguaagaggagucacaaa

SEQ ID NO: 68564 - DNA, 21 bp, Artificial Sequence
  Synthetic
agagggauccaggcctcatua

SEQ ID NO: 68565 - DNA, 25 bp, Artificial Sequence
  Synthetic
ctgacagcagcuttctagatguagg

SEQ ID NO: 68566 - DNA, 21 bp, Artificial Sequence
  Synthetic
ctgagucagaggtcagcucac

SEQ ID NO: 68567 - DNA, 23 bp, Artificial Sequence
  Synthetic
ttcccacaatucttgccacagua

SEQ ID NO: 68568 - DNA, 22 bp, Artificial Sequence
  Synthetic
cctttcuagggacagacuccac

SEQ ID NO: 68569 - DNA, 21 bp, Artificial Sequence
  Synthetic
agatcucagcccacagtcuct

SEQ ID NO: 68570 - DNA, 21 bp, Artificial Sequence
  Synthetic
gtgggcucagagcacactaut

SEQ ID NO: 68571 - DNA, 25 bp, Artificial Sequence
  Synthetic
gacatcauggagatggaggaugaag

SEQ ID NO: 68572 - DNA, 26 bp, Artificial Sequence
  Synthetic
tctggtatgcugtagagaaaacacug

SEQ ID NO: 68573 - DNA, 22 bp, Artificial Sequence
  Synthetic
tccgtaccuggagaagcuaagt

SEQ ID NO: 68574 - DNA, 29 bp, Artificial Sequence
  Synthetic
tgctgattacatucacaatcctgattuct

SEQ ID NO: 68575 - DNA, 18 bp, Artificial Sequence
  Synthetic
gaccagctugcccaggut

SEQ ID NO: 68576 - DNA, 27 bp, Artificial Sequence
  Synthetic
gtatctagggugaaaatggtctuccag

SEQ ID NO: 68577 - DNA, 21 bp, Artificial Sequence
  Synthetic
ccctctuggacccuacagagt

SEQ ID NO: 68578 - DNA, 21 bp, Artificial Sequence
  Synthetic
ccagcuggaaagagtggugac

SEQ ID NO: 68579 - DNA, 26 bp, Artificial Sequence
  Synthetic
ttttggttggcagauctgacattcua

SEQ ID NO: 68580 - DNA, 23 bp, Artificial Sequence
  Synthetic
ggtttugccccgtattauggaga

SEQ ID NO: 68581 - DNA, 26 bp, Artificial Sequence
  Synthetic
ttgccatgaagaugaaagacuaccaa

SEQ ID NO: 68582 - DNA, 23 bp, Artificial Sequence
  Synthetic
aagcucaacuagcacaaacaagt

SEQ ID NO: 68583 - DNA, 17 bp, Artificial Sequence
  Synthetic
tgggccaacuggagcug

SEQ ID NO: 68584 - DNA, 25 bp, Artificial Sequence
  Synthetic
gtagcttacatcutccccaggttua

SEQ ID NO: 68585 - DNA, 32 bp, Artificial Sequence
  Synthetic
atgttttgaattguattactggcaaguaaagg

SEQ ID NO: 68586 - DNA, 26 bp, Artificial Sequence
  Synthetic
ggcttttaacuggcatacaguagagt

SEQ ID NO: 68587 - DNA, 26 bp, Artificial Sequence
  Synthetic
atgaaaaatcuggacttgggagucaa

SEQ ID NO: 68588 - DNA, 28 bp, Artificial Sequence
  Synthetic
cctgctcccuttataatgaucaggaaag

SEQ ID NO: 68589 - DNA, 28 bp, Artificial Sequence
  Synthetic
tgagattcgttctuctggatatccctua

SEQ ID NO: 68590 - DNA, 22 bp, Artificial Sequence
  Synthetic
attcatgcugcccaatctucct

SEQ ID NO: 68591 - DNA, 21 bp, Artificial Sequence
  Synthetic
tgcatcuccagctctgcaauc

SEQ ID NO: 68592 - DNA, 23 bp, Artificial Sequence
  Synthetic
tcattacacuactgccucaggga

SEQ ID NO: 68593 - DNA, 22 bp, Artificial Sequence
  Synthetic
ccaggcauggattttccagcua

SEQ ID NO: 68594 - DNA, 21 bp, Artificial Sequence
  Synthetic
ctgccgggcaaugtcaatuag

SEQ ID NO: 68595 - DNA, 22 bp, Artificial Sequence
  Synthetic
agtagaccuccctgagcactut

SEQ ID NO: 68596 - DNA, 21 bp, Artificial Sequence
  Synthetic
gctttcugggctgacgugaat

SEQ ID NO: 68597 - DNA, 24 bp, Artificial Sequence
  Synthetic
cttuaccccaacagagtttucacc

SEQ ID NO: 68598 - DNA, 22 bp, Artificial Sequence
  Synthetic
cccatctcugacagcttccuct

SEQ ID NO: 68599 - DNA, 22 bp, Artificial Sequence
  Synthetic
gcagactgaucctgtgccttua

SEQ ID NO: 68600 - DNA, 19 bp, Artificial Sequence
  Synthetic
cccgagagccautgctgut

SEQ ID NO: 68601 - DNA, 22 bp, Artificial Sequence
  Synthetic
catctttggcauggccaactuc

SEQ ID NO: 68602 - DNA, 22 bp, Artificial Sequence
  Synthetic
ggcatgtuacatcccuggacac

SEQ ID NO: 68603 - DNA, 27 bp, Artificial Sequence
  Synthetic
tcautgacaactucaaccaacagaaga

SEQ ID NO: 68604 - DNA, 19 bp, Artificial Sequence
  Synthetic
cctgtacagcucggctuga

SEQ ID NO: 68605 - DNA, 21 bp, Artificial Sequence
  Synthetic
acctacccuggcctctguaac

SEQ ID NO: 68606 - DNA, 23 bp, Artificial Sequence
  Synthetic
gaaccagaugagtgagtgaugct

SEQ ID NO: 68607 - DNA, 29 bp, Artificial Sequence
  Synthetic
ccatcactgtuccttagtttaatctugct

SEQ ID NO: 68608 - DNA, 26 bp, Artificial Sequence
  Synthetic
aatagagtgcagugtacaaacgctua

SEQ ID NO: 68609 - DNA, 20 bp, Artificial Sequence
  Synthetic
ccggcagguttctaccctug

SEQ ID NO: 68610 - DNA, 21 bp, Artificial Sequence
  Synthetic
acttttcaagguagcgccugt

SEQ ID NO: 68611 - DNA, 27 bp, Artificial Sequence
  Synthetic
gctatatggguggactaatatgtgcut

SEQ ID NO: 68612 - DNA, 25 bp, Artificial Sequence
  Synthetic
tgtaaaagtgtcucagttgctgugt

SEQ ID NO: 68613 - DNA, 27 bp, Artificial Sequence
  Synthetic
gcttataugccaccatgtttgaucact

SEQ ID NO: 68614 - DNA, 19 bp, Artificial Sequence
  Synthetic
cacccacugguccaccaag

SEQ ID NO: 68615 - DNA, 22 bp, Artificial Sequence
  Synthetic
ccgtgatgugctggcaattuat

SEQ ID NO: 68616 - DNA, 22 bp, Artificial Sequence
  Synthetic
gctagcggauttcaggttcuca

SEQ ID NO: 68617 - DNA, 24 bp, Artificial Sequence
  Synthetic
agaaatuaccagcagagaauggca

SEQ ID NO: 68618 - DNA, 20 bp, Artificial Sequence
  Synthetic
gcacggaaauccatctgcuc

SEQ ID NO: 68619 - DNA, 20 bp, Artificial Sequence
  Synthetic
agggutggcuagaggaggaa

SEQ ID NO: 68620 - DNA, 25 bp, Artificial Sequence
  Synthetic
tgatgctgacuagtgagatgtcuga

SEQ ID NO: 68621 - DNA, 22 bp, Artificial Sequence
  Synthetic
ccuacagcuagcacaaaaggca

SEQ ID NO: 68622 - DNA, 25 bp, Artificial Sequence
  Synthetic
ggagggaaagutgcaatattgtugt

SEQ ID NO: 68623 - DNA, 22 bp, Artificial Sequence
  Synthetic
cgcgagcggcuaagtaaaatug

SEQ ID NO: 68624 - DNA, 24 bp, Artificial Sequence
  Synthetic
gcaugagaagagguccaaaaccag

SEQ ID NO: 68625 - DNA, 28 bp, Artificial Sequence
  Synthetic
accatgtctguagaagagaaagctacua

SEQ ID NO: 68626 - DNA, 22 bp, Artificial Sequence
  Synthetic
tgucgtgaacauacaagccagt

SEQ ID NO: 68627 - DNA, 28 bp, Artificial Sequence
  Synthetic
tgagattgggaauaacacagagttugag

SEQ ID NO: 68628 - DNA, 17 bp, Artificial Sequence
  Synthetic
cctgagccggguctcut

SEQ ID NO: 68629 - DNA, 20 bp, Artificial Sequence
  Synthetic
ttggagcuggagctcttgug

SEQ ID NO: 68630 - DNA, 20 bp, Artificial Sequence
  Synthetic
agactcacuggcgttacuga

SEQ ID NO: 68631 - DNA, 21 bp, Artificial Sequence
  Synthetic
aggatgccugcatacacacug

SEQ ID NO: 68632 - DNA, 21 bp, Artificial Sequence
  Synthetic
gtgtgagcaucaagggaccuc

SEQ ID NO: 68633 - DNA, 21 bp, Artificial Sequence
  Synthetic
gcaguggaugcggagaaagac

SEQ ID NO: 68634 - DNA, 18 bp, Artificial Sequence
  Synthetic
cacuggcagccactccuc

SEQ ID NO: 68635 - DNA, 20 bp, Artificial Sequence
  Synthetic
gctgcguggtgtgtcauagt

SEQ ID NO: 68636 - DNA, 22 bp, Artificial Sequence
  Synthetic
gctttctttucggcatguccag

SEQ ID NO: 68637 - DNA, 20 bp, Artificial Sequence
  Synthetic
cacagagcaccagucugcaa

SEQ ID NO: 68638 - DNA, 17 bp, Artificial Sequence
  Synthetic
ggcggagaggcuggtuc

SEQ ID NO: 68639 - DNA, 19 bp, Artificial Sequence
  Synthetic
gcgctggguaccggaaaua

SEQ ID NO: 68640 - DNA, 26 bp, Artificial Sequence
  Synthetic
aactgatactcuacccagtccttcuc

SEQ ID NO: 68641 - DNA, 28 bp, Artificial Sequence
  Synthetic
gcttcagaagaaagutgaccatttucac

SEQ ID NO: 68642 - DNA, 23 bp, Artificial Sequence
  Synthetic
actttgcaguggtgtctcgtauc

SEQ ID NO: 68643 - DNA, 29 bp, Artificial Sequence
  Synthetic
aggtaacagtccutgacaaagctaattut

SEQ ID NO: 68644 - DNA, 28 bp, Artificial Sequence
  Synthetic
ctagtgcagagaaagcugaactuaaaaa

SEQ ID NO: 68645 - DNA, 24 bp, Artificial Sequence
  Synthetic
cttgcttcgaccuttctgttcauc

SEQ ID NO: 68646 - DNA, 22 bp, Artificial Sequence
  Synthetic
gccccagugaaagcttttcauc

SEQ ID NO: 68647 - DNA, 26 bp, Artificial Sequence
  Synthetic
acgggaacauccatggaaaatctauc

SEQ ID NO: 68648 - DNA, 28 bp, Artificial Sequence
  Synthetic
gaaggagcgggauatgacataattctua

SEQ ID NO: 68649 - DNA, 30 bp, Artificial Sequence
  Synthetic
ctgctgaaugaacaaaaataagttgucact

SEQ ID NO: 68650 - DNA, 23 bp, Artificial Sequence
  Synthetic
aaaaacccgucauccaaaagcag

SEQ ID NO: 68651 - DNA, 26 bp, Artificial Sequence
  Synthetic
aacatagctgguttacactgcaguat

SEQ ID NO: 68652 - DNA, 21 bp, Artificial Sequence
  Synthetic
gcaaccccagcugacatttug

SEQ ID NO: 68653 - DNA, 23 bp, Artificial Sequence
  Synthetic
cugacatcaccuaccagagcaag

SEQ ID NO: 68654 - DNA, 22 bp, Artificial Sequence
  Synthetic
ccaaatggaautttccgggcut

SEQ ID NO: 68655 - DNA, 28 bp, Artificial Sequence
  Synthetic
caatcacacggaugaacgtaaagtatut

SEQ ID NO: 68656 - DNA, 26 bp, Artificial Sequence
  Synthetic
ccacttcaataguttacctgcagcut

SEQ ID NO: 68657 - DNA, 29 bp, Artificial Sequence
  Synthetic
acctggtttgauaaggctttagtaagtut

SEQ ID NO: 68658 - DNA, 28 bp, Artificial Sequence
  Synthetic
cagtttctaugacactgttguacagagt

SEQ ID NO: 68659 - DNA, 27 bp, Artificial Sequence
  Synthetic
tcattttgatgcgutttcacttgtgut

SEQ ID NO: 68660 - DNA, 28 bp, Artificial Sequence
  Synthetic
acctcaataggucctacttgaaagucaa

SEQ ID NO: 68661 - DNA, 24 bp, Artificial Sequence
  Synthetic
catuggacgccactguaacaaaaa

SEQ ID NO: 68662 - DNA, 23 bp, Artificial Sequence
  Synthetic
ggctcagcautaatttcctgcuc

SEQ ID NO: 68663 - DNA, 28 bp, Artificial Sequence
  Synthetic
tgcctttcagautcttccttctuaacat

SEQ ID NO: 68664 - DNA, 22 bp, Artificial Sequence
  Synthetic
cccctuagggacactgatgaug

SEQ ID NO: 68665 - DNA, 28 bp, Artificial Sequence
  Synthetic
gtgaattcttccutgttttgggtuaact

SEQ ID NO: 68666 - DNA, 24 bp, Artificial Sequence
  Synthetic
cacagagcacugcaaguagagaaa

SEQ ID NO: 68667 - DNA, 22 bp, Artificial Sequence
  Synthetic
gagttccgcautgatgccatuc

SEQ ID NO: 68668 - DNA, 23 bp, Artificial Sequence
  Synthetic
ctgcctctuccatctccttuacc

SEQ ID NO: 68669 - DNA, 29 bp, Artificial Sequence
  Synthetic
ttctcttaguaaggccaaaactttucact

SEQ ID NO: 68670 - DNA, 26 bp, Artificial Sequence
  Synthetic
tgactcaccucggttaaaaucagaac

SEQ ID NO: 68671 - DNA, 29 bp, Artificial Sequence
  Synthetic
gccatgttcattuctactagaggatcuca

SEQ ID NO: 68672 - DNA, 22 bp, Artificial Sequence
  Synthetic
ccctgaacucctggcagaaaut

SEQ ID NO: 68673 - DNA, 28 bp, Artificial Sequence
  Synthetic
aatgagaaaaacacaucaacctgcttut

SEQ ID NO: 68674 - DNA, 26 bp, Artificial Sequence
  Synthetic
acacacaucataacactttuccacca

SEQ ID NO: 68675 - DNA, 28 bp, Artificial Sequence
  Synthetic
ccgctgattttguaactctctccauaat

SEQ ID NO: 68676 - DNA, 26 bp, Artificial Sequence
  Synthetic
cacatcaugcaaaggaaatugagaca

SEQ ID NO: 68677 - DNA, 28 bp, Artificial Sequence
  Synthetic
gagttcatccugcaacaaaaagtcatua

SEQ ID NO: 68678 - DNA, 28 bp, Artificial Sequence
  Synthetic
aaacaatgaagcuagcctcagaatguaa

SEQ ID NO: 68679 - DNA, 26 bp, Artificial Sequence
  Synthetic
cctgttgtaccuggtaagacatctuc

SEQ ID NO: 68680 - DNA, 20 bp, Artificial Sequence
  Synthetic
cagugagggacgggcaauag

SEQ ID NO: 68681 - DNA, 25 bp, Artificial Sequence
  Synthetic
attccataaggcacucaatacgcut

SEQ ID NO: 68682 - DNA, 28 bp, Artificial Sequence
  Synthetic
tttgttgttacugcatacacattgugac

SEQ ID NO: 68683 - DNA, 28 bp, Artificial Sequence
  Synthetic
tctttaggatttcutgctgagagatucc

SEQ ID NO: 68684 - DNA, 26 bp, Artificial Sequence
  Synthetic
tgataaacaccucaagtuccaaccac

SEQ ID NO: 68685 - DNA, 28 bp, Artificial Sequence
  Synthetic
tctcttcttcttcaugctgttcttctuc

SEQ ID NO: 68686 - DNA, 23 bp, Artificial Sequence
  Synthetic
cctgagagcucagatgacaguga

SEQ ID NO: 68687 - DNA, 25 bp, Artificial Sequence
  Synthetic
acaggtgcagaaugagtctgagaua

SEQ ID NO: 68688 - DNA, 21 bp, Artificial Sequence
  Synthetic
ccttgagtccuggtggtccua

SEQ ID NO: 68689 - DNA, 28 bp, Artificial Sequence
  Synthetic
tctgagtttccucaaagatctcctcuat

SEQ ID NO: 68690 - DNA, 26 bp, Artificial Sequence
  Synthetic
gaaattgctcautgagttgctgtuca

SEQ ID NO: 68691 - DNA, 21 bp, Artificial Sequence
  Synthetic
gctgaggutctgggtcugaga

SEQ ID NO: 68692 - DNA, 27 bp, Artificial Sequence
  Synthetic
actaugaagacagaacuacagaaagcc

SEQ ID NO: 68693 - DNA, 28 bp, Artificial Sequence
  Synthetic
tcaagtgacautatcttgugaacaacca

SEQ ID NO: 68694 - DNA, 20 bp, Artificial Sequence
  Synthetic
gaggagcugaatcggcugaa

SEQ ID NO: 68695 - DNA, 23 bp, Artificial Sequence
  Synthetic
gaggtcatccucactcctctuct

SEQ ID NO: 68696 - DNA, 27 bp, Artificial Sequence
  Synthetic
tgagaaacagcaaautcagaaugacct

SEQ ID NO: 68697 - DNA, 21 bp, Artificial Sequence
  Synthetic
tgtgactgtguctccctggua

SEQ ID NO: 68698 - DNA, 22 bp, Artificial Sequence
  Synthetic
gaaccacauactggtctgcuct

SEQ ID NO: 68699 - DNA, 22 bp, Artificial Sequence
  Synthetic
tgaacccuggaggaagtcctua

SEQ ID NO: 68700 - DNA, 22 bp, Artificial Sequence
  Synthetic
cagggugtgatugaccaagaca

SEQ ID NO: 68701 - DNA, 21 bp, Artificial Sequence
  Synthetic
cttcggugcttatccucccat

SEQ ID NO: 68702 - DNA, 21 bp, Artificial Sequence
  Synthetic
gtgctggagucgatctucagg

SEQ ID NO: 68703 - DNA, 23 bp, Artificial Sequence
  Synthetic
ctgccuccctacttcaugaaagg

SEQ ID NO: 68704 - DNA, 21 bp, Artificial Sequence
  Synthetic
tgcacggugaaggagucaaag

SEQ ID NO: 68705 - DNA, 23 bp, Artificial Sequence
  Synthetic
agcaagttgcccutaaaccctua

SEQ ID NO: 68706 - DNA, 22 bp, Artificial Sequence
  Synthetic
gggucaaccacacaaaaaggua

SEQ ID NO: 68707 - DNA, 21 bp, Artificial Sequence
  Synthetic
gatgaaccugtacggctucca

SEQ ID NO: 68708 - DNA, 23 bp, Artificial Sequence
  Synthetic
gcaataccaaaguctcggaguga

SEQ ID NO: 68709 - DNA, 21 bp, Artificial Sequence
  Synthetic
gatgaaccugtacggctucca

SEQ ID NO: 68710 - DNA, 22 bp, Artificial Sequence
  Synthetic
gggaggaucctgtcactgtuag

SEQ ID NO: 68711 - DNA, 20 bp, Artificial Sequence
  Synthetic
tctcccucctttuccccagt

SEQ ID NO: 68712 - DNA, 18 bp, Artificial Sequence
  Synthetic
gcagtccucaccgccaua

SEQ ID NO: 68713 - DNA, 21 bp, Artificial Sequence
  Synthetic
atctgtugggaaggctacgug

SEQ ID NO: 68714 - DNA, 21 bp, Artificial Sequence
  Synthetic
ggcaagagacaaggutggugt

SEQ ID NO: 68715 - DNA, 25 bp, Artificial Sequence
  Synthetic
ccctccatgaccugatttattccut

SEQ ID NO: 68716 - DNA, 23 bp, Artificial Sequence
  Synthetic
ggugggaaugaagcagagagaac

SEQ ID NO: 68717 - DNA, 27 bp, Artificial Sequence
  Synthetic
tcctgaacccuacctttcataactuct

SEQ ID NO: 68718 - DNA, 26 bp, Artificial Sequence
  Synthetic
acccatacuatatgacauccccacaa

SEQ ID NO: 68719 - DNA, 26 bp, Artificial Sequence
  Synthetic
cagtgagttgucttcccttgttcuat

SEQ ID NO: 68720 - DNA, 27 bp, Artificial Sequence
  Synthetic
tcaaaaccaagaucagcaaatcctgua

SEQ ID NO: 68721 - DNA, 27 bp, Artificial Sequence
  Synthetic
agggttcataaautcatggaacgugaa

SEQ ID NO: 68722 - DNA, 24 bp, Artificial Sequence
  Synthetic
ctgtgtgcauccatgtatgugaaa

SEQ ID NO: 68723 - DNA, 20 bp, Artificial Sequence
  Synthetic
tgaagaaugtgcugcccgaa

SEQ ID NO: 68724 - DNA, 21 bp, Artificial Sequence
  Synthetic
ggccccuccaagagagttgua

SEQ ID NO: 68725 - DNA, 21 bp, Artificial Sequence
  Synthetic
cgaggaaagutcccaaugcct

SEQ ID NO: 68726 - DNA, 25 bp, Artificial Sequence
  Synthetic
gacctcacuggcaaattaauccaga

SEQ ID NO: 68727 - DNA, 28 bp, Artificial Sequence
  Synthetic
tggcttactcttucttatctctctcugt

SEQ ID NO: 68728 - DNA, 21 bp, Artificial Sequence
  Synthetic
gaatccucccagctgacugaa

SEQ ID NO: 68729 - DNA, 27 bp, Artificial Sequence
  Synthetic
gcttcttgcacuaatagaacugaagga

SEQ ID NO: 68730 - DNA, 26 bp, Artificial Sequence
  Synthetic
tcaauaacacaagcacaccctuagac

SEQ ID NO: 68731 - DNA, 28 bp, Artificial Sequence
  Synthetic
gctttgggaatucatggtttttgatuca

SEQ ID NO: 68732 - DNA, 29 bp, Artificial Sequence
  Synthetic
ctattcaccatacutacagatcccttugg

SEQ ID NO: 68733 - DNA, 25 bp, Artificial Sequence
  Synthetic
ccggagttaauctgttcatggttut

SEQ ID NO: 68734 - DNA, 27 bp, Artificial Sequence
  Synthetic
tcatcaccatctuactttttcccctut

SEQ ID NO: 68735 - DNA, 28 bp, Artificial Sequence
  Synthetic
cattgtctagaucagcttttgtgaugag

SEQ ID NO: 68736 - DNA, 23 bp, Artificial Sequence
  Synthetic
ccaaattccauctgggacaugct

SEQ ID NO: 68737 - DNA, 28 bp, Artificial Sequence
  Synthetic
actgcaacaggautgaatctttaccuat

SEQ ID NO: 68738 - DNA, 27 bp, Artificial Sequence
  Synthetic
gaaagcatgcautttcaataggguaca

SEQ ID NO: 68739 - DNA, 28 bp, Artificial Sequence
  Synthetic
agagtggatgaaguagaatgacatgcua

SEQ ID NO: 68740 - DNA, 26 bp, Artificial Sequence
  Synthetic
cacagggcaaacucagaaaatgaauc

SEQ ID NO: 68741 - DNA, 27 bp, Artificial Sequence
  Synthetic
ttctggaatuaacacagcuaccacaat

SEQ ID NO: 68742 - DNA, 27 bp, Artificial Sequence
  Synthetic
ccagatguccaacagcagtatttauca

SEQ ID NO: 68743 - DNA, 29 bp, Artificial Sequence
  Synthetic
gtgatcaattcugtcaggcctatuaaaga

SEQ ID NO: 68744 - DNA, 26 bp, Artificial Sequence
  Synthetic
acagttttgtugccaattttguacga

SEQ ID NO: 68745 - DNA, 28 bp, Artificial Sequence
  Synthetic
agttcttctagacautttgccccuaaaa

SEQ ID NO: 68746 - DNA, 24 bp, Artificial Sequence
  Synthetic
tttaacttagcutcaggcaccugt

SEQ ID NO: 68747 - DNA, 23 bp, Artificial Sequence
  Synthetic
gatattgaugccaggcugaggaa

SEQ ID NO: 68748 - DNA, 25 bp, Artificial Sequence
  Synthetic
cgaactcacuaaacgtgtcctugaa

SEQ ID NO: 68749 - DNA, 22 bp, Artificial Sequence
  Synthetic
ctguctatccaacuggccacat

SEQ ID NO: 68750 - DNA, 26 bp, Artificial Sequence
  Synthetic
tcaggtcttugcaattttctgguaca

SEQ ID NO: 68751 - DNA, 24 bp, Artificial Sequence
  Synthetic
aatgcttgcugttggaaauggaag

SEQ ID NO: 68752 - DNA, 24 bp, Artificial Sequence
  Synthetic
gcaggagaaaucccagatctgtuc

SEQ ID NO: 68753 - DNA, 28 bp, Artificial Sequence
  Synthetic
gcaatagcaggutttaactaacaugcaa

SEQ ID NO: 68754 - DNA, 26 bp, Artificial Sequence
  Synthetic
tcttgaattggauttcctgctucgat

SEQ ID NO: 68755 - DNA, 28 bp, Artificial Sequence
  Synthetic
gtttacatttcaacacuggagagagcua

SEQ ID NO: 68756 - DNA, 23 bp, Artificial Sequence
  Synthetic
cttcttgucagggtcttcucgaa

SEQ ID NO: 68757 - DNA, 25 bp, Artificial Sequence
  Synthetic
aggaagcatcucctctatgtacugg

SEQ ID NO: 68758 - DNA, 28 bp, Artificial Sequence
  Synthetic
tgttttattctttugaaggtggtcugga

SEQ ID NO: 68759 - DNA, 22 bp, Artificial Sequence
  Synthetic
cctaaucgaccaacacccugaa

SEQ ID NO: 68760 - DNA, 21 bp, Artificial Sequence
  Synthetic
ggauaaaacgaggugcggaga

SEQ ID NO: 68761 - DNA, 21 bp, Artificial Sequence
  Synthetic
guctagtcaccuggcccaaag

SEQ ID NO: 68762 - DNA, 21 bp, Artificial Sequence
  Synthetic
agggagacccaucgtucagaa

SEQ ID NO: 68763 - DNA, 24 bp, Artificial Sequence
  Synthetic
ggcactctguactggttagatucc

SEQ ID NO: 68764 - DNA, 28 bp, Artificial Sequence
  Synthetic
acaagaattugaagctgccatuaaacaa

SEQ ID NO: 68765 - DNA, 31 bp, Artificial Sequence
  Synthetic
ctctgttctgucaactctaaaaattctcuca

SEQ ID NO: 68766 - DNA, 33 bp, Artificial Sequence
  Synthetic
ttctcatgaattttuaaactcttgtagtcagua

SEQ ID NO: 68767 - DNA, 20 bp, Artificial Sequence
  Synthetic
caaatgcgutgggctuccat

SEQ ID NO: 68768 - DNA, 25 bp, Artificial Sequence
  Synthetic
gtgtggtguagattttgcaugaaca

SEQ ID NO: 68769 - DNA, 32 bp, Artificial Sequence
  Synthetic
gtaccatcaatatuctttttcacacaactucc

SEQ ID NO: 68770 - DNA, 25 bp, Artificial Sequence
  Synthetic
gccatgtcctugggattctagauag

SEQ ID NO: 68771 - DNA, 28 bp, Artificial Sequence
  Synthetic
tugaaatgattgttuccacaacacagaa

SEQ ID NO: 68772 - DNA, 27 bp, Artificial Sequence
  Synthetic
caatgtcaagcugaaaaagtacgugat

SEQ ID NO: 68773 - DNA, 28 bp, Artificial Sequence
  Synthetic
gcttggttttgcugtcttaaatccatua

SEQ ID NO: 68774 - DNA, 30 bp, Artificial Sequence
  Synthetic
ttgtacgttataggcuctgatttctttugt

SEQ ID NO: 68775 - DNA, 25 bp, Artificial Sequence
  Synthetic
gcatcagattccuttatggcaaguc

SEQ ID NO: 68776 - DNA, 22 bp, Artificial Sequence
  Synthetic
aattctgtugttctcggugcct

SEQ ID NO: 68777 - DNA, 27 bp, Artificial Sequence
  Synthetic
tcagcattttguctcagtagtcttuca

SEQ ID NO: 68778 - DNA, 24 bp, Artificial Sequence
  Synthetic
gttttcatugaatggtggugccaa

SEQ ID NO: 68779 - DNA, 26 bp, Artificial Sequence
  Synthetic
ctgtgatgttuagatgggagatguct

SEQ ID NO: 68780 - DNA, 26 bp, Artificial Sequence
  Synthetic
ccatgactgagutaatgtgttcuggt

SEQ ID NO: 68781 - DNA, 27 bp, Artificial Sequence
  Synthetic
tugccaagaactuacacaagaacaaag

SEQ ID NO: 68782 - DNA, 21 bp, Artificial Sequence
  Synthetic
gggagggaaggaacugtcuaa

SEQ ID NO: 68783 - DNA, 26 bp, Artificial Sequence
  Synthetic
ctttgatagcauccatagtgcaucct

SEQ ID NO: 68784 - DNA, 28 bp, Artificial Sequence
  Synthetic
ttggugcaaaacagaaaaatggtuaagt

SEQ ID NO: 68785 - DNA, 21 bp, Artificial Sequence
  Synthetic
ttgaacggautgctcctcugg

SEQ ID NO: 68786 - DNA, 21 bp, Artificial Sequence
  Synthetic
gctaacaggugatcccgtuct

SEQ ID NO: 68787 - DNA, 19 bp, Artificial Sequence
  Synthetic
tgcugttgcuggaaagcga

SEQ ID NO: 68788 - DNA, 18 bp, Artificial Sequence
  Synthetic
ctcccgggugatgacgua

SEQ ID NO: 68789 - DNA, 22 bp, Artificial Sequence
  Synthetic
ctcaacacgaccucacctacuc

SEQ ID NO: 68790 - DNA, 26 bp, Artificial Sequence
  Synthetic
ggtcaatttuaaacctcggagctuct

SEQ ID NO: 68791 - DNA, 28 bp, Artificial Sequence
  Synthetic
caactccaccuacatgacctaaaaatuc

SEQ ID NO: 68792 - DNA, 24 bp, Artificial Sequence
  Synthetic
ccagtcttcuggtctttccttucc

SEQ ID NO: 68793 - DNA, 22 bp, Artificial Sequence
  Synthetic
gccatctgugtcagcatttguc

SEQ ID NO: 68794 - DNA, 25 bp, Artificial Sequence
  Synthetic
gaacuccaaaatcuacagccagact

SEQ ID NO: 68795 - DNA, 26 bp, Artificial Sequence
  Synthetic
acaggagcauctccttctaaugagaa

SEQ ID NO: 68796 - DNA, 26 bp, Artificial Sequence
  Synthetic
ttatttgggttcugaatgcgtcuact

SEQ ID NO: 68797 - DNA, 28 bp, Artificial Sequence
  Synthetic
cctggatgaagucaaatatgguaagagg

SEQ ID NO: 68798 - DNA, 25 bp, Artificial Sequence
  Synthetic
aaacttggauccctatgaacagugg

SEQ ID NO: 68799 - DNA, 23 bp, Artificial Sequence
  Synthetic
tccagtcaaaaguacctgtugct

SEQ ID NO: 68800 - DNA, 23 bp, Artificial Sequence
  Synthetic
aagctgattguggctaacgcuat

SEQ ID NO: 68801 - DNA, 25 bp, Artificial Sequence
  Synthetic
acagagaatuactgtgcaaucagca

SEQ ID NO: 68802 - DNA, 23 bp, Artificial Sequence
  Synthetic
accatacttccugtgagggtgua

SEQ ID NO: 68803 - DNA, 25 bp, Artificial Sequence
  Synthetic
gtgtgaccuggactgtctttctauc

SEQ ID NO: 68804 - DNA, 22 bp, Artificial Sequence
  Synthetic
gggacagguggugagaagaaaa

SEQ ID NO: 68805 - DNA, 21 bp, Artificial Sequence
  Synthetic
gtgggcaaagguccaggtuaa

SEQ ID NO: 68806 - DNA, 22 bp, Artificial Sequence
  Synthetic
caggacuccctttgcttuggat

SEQ ID NO: 68807 - DNA, 23 bp, Artificial Sequence
  Synthetic
gttcccacatuctccttccctuc

SEQ ID NO: 68808 - DNA, 21 bp, Artificial Sequence
  Synthetic
cagccucagtttccuccaact

SEQ ID NO: 68809 - DNA, 23 bp, Artificial Sequence
  Synthetic
cccctccaucaaggacaagtaug

SEQ ID NO: 68810 - DNA, 17 bp, Artificial Sequence
  Synthetic
gcuggcgcagctttcuc

SEQ ID NO: 68811 - DNA, 18 bp, Artificial Sequence
  Synthetic
ggcccuggacgaagugac

SEQ ID NO: 68812 - DNA, 28 bp, Artificial Sequence
  Synthetic
tcagagagtaguaagttgagaaacugaa

SEQ ID NO: 68813 - DNA, 25 bp, Artificial Sequence
  Synthetic
acccacaaaagaaucctcaagtucc

SEQ ID NO: 68814 - DNA, 18 bp, Artificial Sequence
  Synthetic
ctgccuccagtgctccug

SEQ ID NO: 68815 - DNA, 21 bp, Artificial Sequence
  Synthetic
accaacatccuggacagcaut

SEQ ID NO: 68816 - DNA, 25 bp, Artificial Sequence
  Synthetic
cttggcaaagutgcactaatucagt

SEQ ID NO: 68817 - DNA, 27 bp, Artificial Sequence
  Synthetic
agaacggccagcuaataaaagaactua

SEQ ID NO: 68818 - DNA, 27 bp, Artificial Sequence
  Synthetic
ttcaaggatauggaaagagtttgugct

SEQ ID NO: 68819 - DNA, 28 bp, Artificial Sequence
  Synthetic
aaagagggtgauattgtggcaatgauaa

SEQ ID NO: 68820 - DNA, 22 bp, Artificial Sequence
  Synthetic
tcaggttccaaucgttgcacut

SEQ ID NO: 68821 - DNA, 24 bp, Artificial Sequence
  Synthetic
gttttgacaagaaauggcugcaga

SEQ ID NO: 68822 - DNA, 28 bp, Artificial Sequence
  Synthetic
tctgtagacagaccucttttcaaguaca

SEQ ID NO: 68823 - DNA, 28 bp, Artificial Sequence
  Synthetic
ccaaaggcatcutcttttcttggaauaa

SEQ ID NO: 68824 - DNA, 25 bp, Artificial Sequence
  Synthetic
tttggtaaagaugacttccctggug

SEQ ID NO: 68825 - DNA, 23 bp, Artificial Sequence
  Synthetic
cgtggcaguttttgctttcttut

SEQ ID NO: 68826 - DNA, 25 bp, Artificial Sequence
  Synthetic
acagguacaacagcttuccaagaaa

SEQ ID NO: 68827 - DNA, 26 bp, Artificial Sequence
  Synthetic
ctatggaaaaccuggcctcttuagat

SEQ ID NO: 68828 - DNA, 20 bp, Artificial Sequence
  Synthetic
gctgaagcugcaccctacut

SEQ ID NO: 68829 - DNA, 23 bp, Artificial Sequence
  Synthetic
agaccugggaaatgttugagacc

SEQ ID NO: 68830 - DNA, 23 bp, Artificial Sequence
  Synthetic
cagggtttugttcctgagucgat

SEQ ID NO: 68831 - DNA, 25 bp, Artificial Sequence
  Synthetic
cgactggagautctggagattcuga

SEQ ID NO: 68832 - DNA, 17 bp, Artificial Sequence
  Synthetic
ccacgccggguggtuag

SEQ ID NO: 68833 - DNA, 18 bp, Artificial Sequence
  Synthetic
ctccttccugctgcggut

SEQ ID NO: 68834 - DNA, 28 bp, Artificial Sequence
  Synthetic
agctcacctatuttagttgcactguaaa

SEQ ID NO: 68835 - DNA, 20 bp, Artificial Sequence
  Synthetic
gcaatgcucgtgcttgtuca

SEQ ID NO: 68836 - DNA, 28 bp, Artificial Sequence
  Synthetic
actactaaaagccutaggaaagctcuca

SEQ ID NO: 68837 - DNA, 28 bp, Artificial Sequence
  Synthetic
ggtagcagtuttacaacatcaucaggaa

SEQ ID NO: 68838 - DNA, 21 bp, Artificial Sequence
  Synthetic
ccaacutcacaccuggaccaa

SEQ ID NO: 68839 - DNA, 24 bp, Artificial Sequence
  Synthetic
accaggaaugccttatatcacguc

SEQ ID NO: 68840 - DNA, 25 bp, Artificial Sequence
  Synthetic
aatcauaaagcacagaagcctguct

SEQ ID NO: 68841 - DNA, 28 bp, Artificial Sequence
  Synthetic
cctgttgagucctaacatctcttuaagg

SEQ ID NO: 68842 - DNA, 28 bp, Artificial Sequence
  Synthetic
gagggaagugaaatcagtctgtuaaact

SEQ ID NO: 68843 - DNA, 23 bp, Artificial Sequence
  Synthetic
gtaagcugcttcgaaguacaggt

SEQ ID NO: 68844 - DNA, 28 bp, Artificial Sequence
  Synthetic
ccaagcatauaggacacttagaaucagg

SEQ ID NO: 68845 - DNA, 24 bp, Artificial Sequence
  Synthetic
agataatggcaucagctgcuaagg

SEQ ID NO: 68846 - DNA, 21 bp, Artificial Sequence
  Synthetic
tgcaataugtgcccucagcaa

SEQ ID NO: 68847 - DNA, 26 bp, Artificial Sequence
  Synthetic
accttgaacuccttaagcataugcac

SEQ ID NO: 68848 - DNA, 22 bp, Artificial Sequence
  Synthetic
ctgacuattgcaacucggaggt

SEQ ID NO: 68849 - DNA, 28 bp, Artificial Sequence
  Synthetic
ctgttccaaggautttgaagtttcucaa

SEQ ID NO: 68850 - DNA, 24 bp, Artificial Sequence
  Synthetic
catgatatcaggcutcaggcgaut

SEQ ID NO: 68851 - DNA, 26 bp, Artificial Sequence
  Synthetic
tgttacggcuctgtgttuaagaacat

SEQ ID NO: 68852 - DNA, 20 bp, Artificial Sequence
  Synthetic
gggcgttcugtgtgtcauca

SEQ ID NO: 68853 - DNA, 21 bp, Artificial Sequence
  Synthetic
ctaccugcccaacttcuaccc

SEQ ID NO: 68854 - DNA, 20 bp, Artificial Sequence
  Synthetic
gaaggaugggauggcgaact

SEQ ID NO: 68855 - DNA, 22 bp, Artificial Sequence
  Synthetic
gggacuggatgaatgucaaggg

SEQ ID NO: 68856 - DNA, 18 bp, Artificial Sequence
  Synthetic
gcuaccgtcugcgcacaa

SEQ ID NO: 68857 - DNA, 20 bp, Artificial Sequence
  Synthetic
agcggacgcaucguagaaag

SEQ ID NO: 68858 - DNA, 23 bp, Artificial Sequence
  Synthetic
caatctagacaaugtgtggcgut

SEQ ID NO: 68859 - DNA, 28 bp, Artificial Sequence
  Synthetic
cctcatgctcaaacuattttccattcug

SEQ ID NO: 68860 - DNA, 28 bp, Artificial Sequence
  Synthetic
ggcataaaaguaagaactccacauacct

SEQ ID NO: 68861 - DNA, 27 bp, Artificial Sequence
  Synthetic
ccccaaatgatugtgttctgttttgut

SEQ ID NO: 68862 - DNA, 29 bp, Artificial Sequence
  Synthetic
tgtcttcacacauaaatcacaagcuaact

SEQ ID NO: 68863 - DNA, 28 bp, Artificial Sequence
  Synthetic
gttaggtaaaatggugtatcctggcuat

SEQ ID NO: 68864 - DNA, 20 bp, Artificial Sequence
  Synthetic
gtaccagagugcagcaguga

SEQ ID NO: 68865 - DNA, 21 bp, Artificial Sequence
  Synthetic
ttcagagaagucgagggucca

SEQ ID NO: 68866 - DNA, 27 bp, Artificial Sequence
  Synthetic
tccttacaaacaucctacctugagaca

SEQ ID NO: 68867 - DNA, 25 bp, Artificial Sequence
  Synthetic
aggactgcccutgttcttttacaut

SEQ ID NO: 68868 - DNA, 20 bp, Artificial Sequence
  Synthetic
cggcgaaccaggauaccauc

SEQ ID NO: 68869 - DNA, 26 bp, Artificial Sequence
  Synthetic
aggcaccgagguctctttaaaaauaa

SEQ ID NO: 68870 - DNA, 20 bp, Artificial Sequence
  Synthetic
ggaccctucccatccuccat

SEQ ID NO: 68871 - DNA, 23 bp, Artificial Sequence
  Synthetic
ccagctucagagagtugagagag

SEQ ID NO: 68872 - DNA, 21 bp, Artificial Sequence
  Synthetic
tuctctgctuccgaaaagcca

SEQ ID NO: 68873 - DNA, 22 bp, Artificial Sequence
  Synthetic
ggagagucggcatcguagaaag

SEQ ID NO: 68874 - DNA, 26 bp, Artificial Sequence
  Synthetic
ccagacatcuctttcagttccauaca

SEQ ID NO: 68875 - DNA, 23 bp, Artificial Sequence
  Synthetic
caaaagacccagagcutcaccut

SEQ ID NO: 68876 - DNA, 24 bp, Artificial Sequence
  Synthetic
tcaagtctgcutacagagggauct

SEQ ID NO: 68877 - DNA, 23 bp, Artificial Sequence
  Synthetic
actcaccaucccttacacuagca

SEQ ID NO: 68878 - DNA, 18 bp, Artificial Sequence
  Synthetic
gccgggagcuctgttucc

SEQ ID NO: 68879 - DNA, 21 bp, Artificial Sequence
  Synthetic
ctctgcccagaucactgtgut

SEQ ID NO: 68880 - DNA, 21 bp, Artificial Sequence
  Synthetic
gctttagcccugactccagut

SEQ ID NO: 68881 - DNA, 22 bp, Artificial Sequence
  Synthetic
cccccgtaugtccagctataug

SEQ ID NO: 68882 - DNA, 23 bp, Artificial Sequence
  Synthetic
gaaagcagggaaaaggucuccat

SEQ ID NO: 68883 - DNA, 20 bp, Artificial Sequence
  Synthetic
tctctctccaugcgcctcua

SEQ ID NO: 68884 - DNA, 22 bp, Artificial Sequence
  Synthetic
tgacaauacgccccagtucaag

SEQ ID NO: 68885 - DNA, 21 bp, Artificial Sequence
  Synthetic
ccagcccucctctgacagaut

SEQ ID NO: 68886 - DNA, 19 bp, Artificial Sequence
  Synthetic
caagcacagcgguggatug

SEQ ID NO: 68887 - DNA, 25 bp, Artificial Sequence
  Synthetic
ttacaggaccccuatcaacaactug

SEQ ID NO: 68888 - DNA, 24 bp, Artificial Sequence
  Synthetic
tcttctctgtgcutctccttccut

SEQ ID NO: 68889 - DNA, 21 bp, Artificial Sequence
  Synthetic
gtcacctcauctgaggcctug

SEQ ID NO: 68890 - DNA, 24 bp, Artificial Sequence
  Synthetic
ttagcgauaagcagcttttuacca

SEQ ID NO: 68891 - DNA, 25 bp, Artificial Sequence
  Synthetic
gtgcttacaatcucagtacctgcua

SEQ ID NO: 68892 - DNA, 17 bp, Artificial Sequence
  Synthetic
cgucacccccgccttua

SEQ ID NO: 68893 - DNA, 17 bp, Artificial Sequence
  Synthetic
caaagggucgcggucac

SEQ ID NO: 68894 - DNA, 22 bp, Artificial Sequence
  Synthetic
gggagctguagcttccauaagg

SEQ ID NO: 68895 - DNA, 22 bp, Artificial Sequence
  Synthetic
ccacagacutcttgggttuggg

SEQ ID NO: 68896 - DNA, 21 bp, Artificial Sequence
  Synthetic
ggcccagaaugcaccactauc

SEQ ID NO: 68897 - DNA, 21 bp, Artificial Sequence
  Synthetic
cctctgcugtgttgcccuaaa

SEQ ID NO: 68898 - DNA, 21 bp, Artificial Sequence
  Synthetic
gctcaacugttgtguccccat

SEQ ID NO: 68899 - DNA, 28 bp, Artificial Sequence
  Synthetic
tccatgtctgttuctcaaagggaatauc

SEQ ID NO: 68900 - DNA, 21 bp, Artificial Sequence
  Synthetic
agacccccucggacagtaauc

SEQ ID NO: 68901 - DNA, 23 bp, Artificial Sequence
  Synthetic
tggttttctguccacttccccua

SEQ ID NO: 68902 - DNA, 19 bp, Artificial Sequence
  Synthetic
gggtaagagcugcggucaa

SEQ ID NO: 68903 - DNA, 19 bp, Artificial Sequence
  Synthetic
gcccgcuattcgcaaucag

SEQ ID NO: 68904 - DNA, 22 bp, Artificial Sequence
  Synthetic
ccaaggtttuccggatcgaugt

SEQ ID NO: 68905 - DNA, 23 bp, Artificial Sequence
  Synthetic
gctgaagacucttcctctugagt

SEQ ID NO: 68906 - DNA, 22 bp, Artificial Sequence
  Synthetic
ttggcatcuccacccctacuat

SEQ ID NO: 68907 - DNA, 20 bp, Artificial Sequence
  Synthetic
gguacacagugcagaaagcc

SEQ ID NO: 68908 - DNA, 20 bp, Artificial Sequence
  Synthetic
gggttcutcactgugaccgt

SEQ ID NO: 68909 - DNA, 22 bp, Artificial Sequence
  Synthetic
acttggatcucaccccaacuct

SEQ ID NO: 68910 - DNA, 18 bp, Artificial Sequence
  Synthetic
cctucccaccccaaugct

SEQ ID NO: 68911 - DNA, 20 bp, Artificial Sequence
  Synthetic
aaagccuttgcucacagggt

SEQ ID NO: 68912 - DNA, 27 bp, Artificial Sequence
  Synthetic
cctgctttgaguattttagaggacugt

SEQ ID NO: 68913 - DNA, 19 bp, Artificial Sequence
  Synthetic
ggttgucggcaagcuggaa

SEQ ID NO: 68914 - DNA, 18 bp, Artificial Sequence
  Synthetic
cgctgcguccacacaaut

SEQ ID NO: 68915 - DNA, 19 bp, Artificial Sequence
  Synthetic
gcagctccucgtgatccuc

SEQ ID NO: 68916 - DNA, 23 bp, Artificial Sequence
  Synthetic
ttcacagtgucacaggcauagac

SEQ ID NO: 68917 - DNA, 26 bp, Artificial Sequence
  Synthetic
tgttccaaaggutctttgaggtgaut

SEQ ID NO: 68918 - DNA, 21 bp, Artificial Sequence
  Synthetic
gcugtactggucacaagccat

SEQ ID NO: 68919 - DNA, 21 bp, Artificial Sequence
  Synthetic
gagcaacagutcucccacaca

SEQ ID NO: 68920 - DNA, 21 bp, Artificial Sequence
  Synthetic
acatttucaggccctggauga

SEQ ID NO: 68921 - DNA, 23 bp, Artificial Sequence
  Synthetic
gtagccagcuccctacaatccua

SEQ ID NO: 68922 - DNA, 20 bp, Artificial Sequence
  Synthetic
caggaugccctggacaugat

SEQ ID NO: 68923 - DNA, 23 bp, Artificial Sequence
  Synthetic
cctatacttgaautggccccuga

SEQ ID NO: 68924 - DNA, 22 bp, Artificial Sequence
  Synthetic
gtgucttctgtgucaccccaat

SEQ ID NO: 68925 - DNA, 24 bp, Artificial Sequence
  Synthetic
ccaaacatctugtccaccatguct

SEQ ID NO: 68926 - DNA, 20 bp, Artificial Sequence
  Synthetic
gggacacccugtaagctuca

SEQ ID NO: 68927 - DNA, 23 bp, Artificial Sequence
  Synthetic
cctctgtgagcutggacttctut

SEQ ID NO: 68928 - DNA, 22 bp, Artificial Sequence
  Synthetic
catgactgacucaactggccut

SEQ ID NO: 68929 - DNA, 21 bp, Artificial Sequence
  Synthetic
gtattcgucccccttgauggt

SEQ ID NO: 68930 - DNA, 20 bp, Artificial Sequence
  Synthetic
gcuccctctatucggcacaa

SEQ ID NO: 68931 - DNA, 21 bp, Artificial Sequence
  Synthetic
cctgatguggttgtcggucag

SEQ ID NO: 68932 - DNA, 19 bp, Artificial Sequence
  Synthetic
cctgtgaccugctctguct

SEQ ID NO: 68933 - DNA, 19 bp, Artificial Sequence
  Synthetic
cacccgcutccagtcauca

SEQ ID NO: 68934 - DNA, 19 bp, Artificial Sequence
  Synthetic
ccaccgtgugctcgctuat

SEQ ID NO: 68935 - DNA, 20 bp, Artificial Sequence
  Synthetic
ggtagcugatgggccugaac

SEQ ID NO: 68936 - DNA, 28 bp, Artificial Sequence
  Synthetic
acaagatgttcauagagttttaguggct

SEQ ID NO: 68937 - DNA, 27 bp, Artificial Sequence
  Synthetic
gagattagatuacctcgcacacugaat

SEQ ID NO: 68938 - DNA, 28 bp, Artificial Sequence
  Synthetic
tcttagcagcucttactatcttccucaa

SEQ ID NO: 68939 - DNA, 23 bp, Artificial Sequence
  Synthetic
ctttttctugggttttggcucct

SEQ ID NO: 68940 - DNA, 26 bp, Artificial Sequence
  Synthetic
gaagutgcattgtgucaagacaagag

SEQ ID NO: 68941 - DNA, 27 bp, Artificial Sequence
  Synthetic
ctaccctgaatuatggctccaaguaag

SEQ ID NO: 68942 - DNA, 29 bp, Artificial Sequence
  Synthetic
agttuagcacagaaagacatatuggaagt

SEQ ID NO: 68943 - DNA, 27 bp, Artificial Sequence
  Synthetic
acctcaagcaaagutttaaggcaatut

SEQ ID NO: 68944 - DNA, 28 bp, Artificial Sequence
  Synthetic
catcttaaaagguaaacattgccuccag

SEQ ID NO: 68945 - DNA, 27 bp, Artificial Sequence
  Synthetic
cacagatttataucatccaggcctuca

SEQ ID NO: 68946 - DNA, 29 bp, Artificial Sequence
  Synthetic
gtcagactgtacutccatacttgatucat

SEQ ID NO: 68947 - DNA, 20 bp, Artificial Sequence
  Synthetic
ggttgtggaucggctcgtut

SEQ ID NO: 68948 - DNA, 21 bp, Artificial Sequence
  Synthetic
aagatgaugggaggccuagga

SEQ ID NO: 68949 - DNA, 30 bp, Artificial Sequence
  Synthetic
tgaggaatuagagagagaaaatgaguaact

SEQ ID NO: 68950 - DNA, 27 bp, Artificial Sequence
  Synthetic
gaagatgttgtugtccctactauggaa

SEQ ID NO: 68951 - DNA, 29 bp, Artificial Sequence
  Synthetic
gcttgggcaaaggaaauataatacugaga

SEQ ID NO: 68952 - DNA, 22 bp, Artificial Sequence
  Synthetic
gaggtgcacagaugctcagaut

SEQ ID NO: 68953 - DNA, 22 bp, Artificial Sequence
  Synthetic
gacagcatcutgtctcagguca

SEQ ID NO: 68954 - DNA, 23 bp, Artificial Sequence
  Synthetic
actgguggcagaaaacucaagaa

SEQ ID NO: 68955 - DNA, 20 bp, Artificial Sequence
  Synthetic
atcccaccaagcugcctauc

SEQ ID NO: 68956 - DNA, 24 bp, Artificial Sequence
  Synthetic
tcttttgccacaggutccaacuat

SEQ ID NO: 68957 - DNA, 19 bp, Artificial Sequence
  Synthetic
ccatattgcugccgctucc

SEQ ID NO: 68958 - DNA, 21 bp, Artificial Sequence
  Synthetic
tccccacccugttccttttug

SEQ ID NO: 68959 - DNA, 21 bp, Artificial Sequence
  Synthetic
aaggagcaugtgtgtuagcga

SEQ ID NO: 68960 - DNA, 19 bp, Artificial Sequence
  Synthetic
gctguaccgctccaucgac

SEQ ID NO: 68961 - DNA, 22 bp, Artificial Sequence
  Synthetic
tcctaggaagcuacctggtuct

SEQ ID NO: 68962 - DNA, 23 bp, Artificial Sequence
  Synthetic
cactgccacugaggtctgtatut

SEQ ID NO: 68963 - DNA, 22 bp, Artificial Sequence
  Synthetic
gacutgatgaagguccacagca

SEQ ID NO: 68964 - DNA, 21 bp, Artificial Sequence
  Synthetic
gttcuacgccacgttccugat

SEQ ID NO: 68965 - DNA, 21 bp, Artificial Sequence
  Synthetic
gucagaggcaaugaccaggac

SEQ ID NO: 68966 - DNA, 22 bp, Artificial Sequence
  Synthetic
accugagaugcagaaggagaca

SEQ ID NO: 68967 - DNA, 28 bp, Artificial Sequence
  Synthetic
accagtcaguctcattataatccugagt

SEQ ID NO: 68968 - DNA, 25 bp, Artificial Sequence
  Synthetic
tcaacattaucccaaatcucagcca

SEQ ID NO: 68969 - DNA, 27 bp, Artificial Sequence
  Synthetic
atgagccttucattttgtgguaacaac

SEQ ID NO: 68970 - DNA, 26 bp, Artificial Sequence
  Synthetic
gatgaatggaagaucttaggcucagt

SEQ ID NO: 68971 - DNA, 24 bp, Artificial Sequence
  Synthetic
tcagaggaaccautgcagatuacc

SEQ ID NO: 68972 - DNA, 20 bp, Artificial Sequence
  Synthetic
cagccgagguaccccattua

SEQ ID NO: 68973 - DNA, 22 bp, Artificial Sequence
  Synthetic
cattgaaugccttgaugccaca

SEQ ID NO: 68974 - DNA, 29 bp, Artificial Sequence
  Synthetic
attatgtgtgcucttgtatatgcttucct

SEQ ID NO: 68975 - DNA, 26 bp, Artificial Sequence
  Synthetic
gccacttcaggagaaugtatatgcut

SEQ ID NO: 68976 - DNA, 28 bp, Artificial Sequence
  Synthetic
gctagacttaagutcctcagatggtuca

SEQ ID NO: 68977 - DNA, 28 bp, Artificial Sequence
  Synthetic
tggacatttcacugtaggatcuaaaacc

SEQ ID NO: 68978 - DNA, 27 bp, Artificial Sequence
  Synthetic
tgtctgccaautaactcatttatugct

SEQ ID NO: 68979 - DNA, 22 bp, Artificial Sequence
  Synthetic
caggaagaugcaccaaggcuaa

SEQ ID NO: 68980 - DNA, 21 bp, Artificial Sequence
  Synthetic
cttgccucctaggcaucagaa

SEQ ID NO: 68981 - DNA, 22 bp, Artificial Sequence
  Synthetic
actcctttgcuaacgcttguca

SEQ ID NO: 68982 - DNA, 23 bp, Artificial Sequence
  Synthetic
agtctccuccaggcataatcuga

SEQ ID NO: 68983 - DNA, 21 bp, Artificial Sequence
  Synthetic
tgtgaggaccugcctctctut

SEQ ID NO: 68984 - DNA, 22 bp, Artificial Sequence
  Synthetic
caaatggtggugtttggcttug

SEQ ID NO: 68985 - DNA, 23 bp, Artificial Sequence
  Synthetic
cgtaaagccaacucatgctuagg

SEQ ID NO: 68986 - DNA, 22 bp, Artificial Sequence
  Synthetic
cgtcucacacagaccttgagut

SEQ ID NO: 68987 - DNA, 28 bp, Artificial Sequence
  Synthetic
ggaagaaaaauacacagcagtucagaga

SEQ ID NO: 68988 - DNA, 28 bp, Artificial Sequence
  Synthetic
cgaaccttctgcuttttaatgtcctcua

SEQ ID NO: 68989 - DNA, 21 bp, Artificial Sequence
  Synthetic
gcaaccgggaugcaaaaaugt

SEQ ID NO: 68990 - DNA, 29 bp, Artificial Sequence
  Synthetic
ccagtaccaaagutgataatgctatguca

SEQ ID NO: 68991 - DNA, 28 bp, Artificial Sequence
  Synthetic
gctaacatuaaaagggacaagtcuaaga

SEQ ID NO: 68992 - DNA, 20 bp, Artificial Sequence
  Synthetic
ggtcatcugcccatgucgaa

SEQ ID NO: 68993 - DNA, 25 bp, Artificial Sequence
  Synthetic
gcaattacuacgcaaacgctuacag

SEQ ID NO: 68994 - DNA, 19 bp, Artificial Sequence
  Synthetic
gcutggccaugagaagcct

SEQ ID NO: 68995 - DNA, 22 bp, Artificial Sequence
  Synthetic
gctcaccagugccttctcttuc

SEQ ID NO: 68996 - DNA, 25 bp, Artificial Sequence
  Synthetic
catttctcaaugctttgcagaucca

SEQ ID NO: 68997 - DNA, 23 bp, Artificial Sequence
  Synthetic
gttttatttcgacutgcggcuca

SEQ ID NO: 68998 - DNA, 25 bp, Artificial Sequence
  Synthetic
aagacaagcaacuttccaattgugg

SEQ ID NO: 68999 - DNA, 26 bp, Artificial Sequence
  Synthetic
tgcctgggtuacattttcactttcut

SEQ ID NO: 69000 - DNA, 21 bp, Artificial Sequence
  Synthetic
cagaacugcagagttggctug

SEQ ID NO: 69001 - DNA, 22 bp, Artificial Sequence
  Synthetic
ccagccucaucaaccagaagaa

SEQ ID NO: 69002 - DNA, 17 bp, Artificial Sequence
  Synthetic
ggtcugcagcgagucca

SEQ ID NO: 69003 - DNA, 26 bp, Artificial Sequence
  Synthetic
tgtatcttctcaucctccctcucaac

SEQ ID NO: 69004 - DNA, 19 bp, Artificial Sequence
  Synthetic
gcucccgagacaggtcuga

SEQ ID NO: 69005 - DNA, 21 bp, Artificial Sequence
  Synthetic
acctctccacuggaagagcua

SEQ ID NO: 69006 - DNA, 27 bp, Artificial Sequence
  Synthetic
aaagccaagaautaaaacttugcaggt

SEQ ID NO: 69007 - DNA, 28 bp, Artificial Sequence
  Synthetic
ctggttacagucttcaggaaaatcuagt

SEQ ID NO: 69008 - DNA, 20 bp, Artificial Sequence
  Synthetic
gcggcaguggaaatttucgg

SEQ ID NO: 69009 - DNA, 23 bp, Artificial Sequence
  Synthetic
acaagaacgagagcguacucaag

SEQ ID NO: 69010 - DNA, 23 bp, Artificial Sequence
  Synthetic
augagacaaccacugagaaccag

SEQ ID NO: 69011 - DNA, 22 bp, Artificial Sequence
  Synthetic
ccactgagcugggacatuacat

SEQ ID NO: 69012 - DNA, 24 bp, Artificial Sequence
  Synthetic
ttaacacatcacccucccaatcug

SEQ ID NO: 69013 - DNA, 27 bp, Artificial Sequence
  Synthetic
ttgagttacuggccatttgaggtatut

SEQ ID NO: 69014 - DNA, 21 bp, Artificial Sequence
  Synthetic
tcccctgugttgttcccuaca

SEQ ID NO: 69015 - DNA, 24 bp, Artificial Sequence
  Synthetic
tggtcagutctgataaucggaggt

SEQ ID NO: 69016 - DNA, 22 bp, Artificial Sequence
  Synthetic
ccctttttggcuccatgtgaut

SEQ ID NO: 69017 - DNA, 22 bp, Artificial Sequence
  Synthetic
ctucatgctctcuacccacaca

SEQ ID NO: 69018 - DNA, 22 bp, Artificial Sequence
  Synthetic
ttuacaaacacagccaggugga

SEQ ID NO: 69019 - DNA, 22 bp, Artificial Sequence
  Synthetic
tgaggagcugcttugagacaac

SEQ ID NO: 69020 - DNA, 22 bp, Artificial Sequence
  Synthetic
gctucagaaagcaagcagtgut

SEQ ID NO: 69021 - DNA, 22 bp, Artificial Sequence
  Synthetic
atcatggtggcuctgcttctut

SEQ ID NO: 69022 - DNA, 29 bp, Artificial Sequence
  Synthetic
aatcccttaaaagaaucgctacaauccat

SEQ ID NO: 69023 - DNA, 23 bp, Artificial Sequence
  Synthetic
gcttgactcaaaugcctctctug

SEQ ID NO: 69024 - DNA, 25 bp, Artificial Sequence
  Synthetic
catgtagtcuggaggacagauacag

SEQ ID NO: 69025 - DNA, 24 bp, Artificial Sequence
  Synthetic
tcaggccautccaaaatgugaagt

SEQ ID NO: 69026 - DNA, 21 bp, Artificial Sequence
  Synthetic
acaggucccactuaggcagat

SEQ ID NO: 69027 - DNA, 28 bp, Artificial Sequence
  Synthetic
gaagagcaaatguaaattggcctcuaaa

SEQ ID NO: 69028 - DNA, 27 bp, Artificial Sequence
  Synthetic
ggaacctacugagagattcaacaugag

SEQ ID NO: 69029 - DNA, 28 bp, Artificial Sequence
  Synthetic
acattgatgaaugcagcataatgaaugg

SEQ ID NO: 69030 - DNA, 24 bp, Artificial Sequence
  Synthetic
aaaaagagaacugaccctgtuggt

SEQ ID NO: 69031 - DNA, 23 bp, Artificial Sequence
  Synthetic
caacactgauggctccuacagat

SEQ ID NO: 69032 - DNA, 26 bp, Artificial Sequence
  Synthetic
cagaggtuccattacctccuaagaga

SEQ ID NO: 69033 - DNA, 23 bp, Artificial Sequence
  Synthetic
ttggcttcauccacaactcucat

SEQ ID NO: 69034 - DNA, 22 bp, Artificial Sequence
  Synthetic
ccacttcauggccagccttaua

SEQ ID NO: 69035 - DNA, 22 bp, Artificial Sequence
  Synthetic
agaggucagggacagatgagug

SEQ ID NO: 69036 - DNA, 21 bp, Artificial Sequence
  Synthetic
ctctugggagggaccaatgug

SEQ ID NO: 69037 - DNA, 18 bp, Artificial Sequence
  Synthetic
catguccgacgtcuggct

SEQ ID NO: 69038 - DNA, 21 bp, Artificial Sequence
  Synthetic
agaaggcuggagcaatcctut

SEQ ID NO: 69039 - DNA, 26 bp, Artificial Sequence
  Synthetic
ggaccugcaagaattuaagcagaaga

SEQ ID NO: 69040 - DNA, 22 bp, Artificial Sequence
  Synthetic
gagtaccucccctaaccacuga

SEQ ID NO: 69041 - DNA, 21 bp, Artificial Sequence
  Synthetic
agagacuggcaggagcagtua

SEQ ID NO: 69042 - DNA, 19 bp, Artificial Sequence
  Synthetic
cagaccuccacgucgaaca

SEQ ID NO: 69043 - DNA, 20 bp, Artificial Sequence
  Synthetic
acaaccuggaccagcactuc

SEQ ID NO: 69044 - DNA, 21 bp, Artificial Sequence
  Synthetic
cctggacaagutcctggctuc

SEQ ID NO: 69045 - DNA, 22 bp, Artificial Sequence
  Synthetic
acacctccautgttggcacaut

SEQ ID NO: 69046 - DNA, 22 bp, Artificial Sequence
  Synthetic
gatgtccccautcctgttucgt

SEQ ID NO: 69047 - DNA, 23 bp, Artificial Sequence
  Synthetic
ctagcaaagacacagguagcuca

SEQ ID NO: 69048 - DNA, 21 bp, Artificial Sequence
  Synthetic
tctgctgaucctgtggcttut

SEQ ID NO: 69049 - DNA, 22 bp, Artificial Sequence
  Synthetic
tgaucgucaaggccagagaaac

SEQ ID NO: 69050 - DNA, 19 bp, Artificial Sequence
  Synthetic
agcaaaccagccucucgac

SEQ ID NO: 69051 - DNA, 18 bp, Artificial Sequence
  Synthetic
gugccaggcaaggcuaca

SEQ ID NO: 69052 - DNA, 21 bp, Artificial Sequence
  Synthetic
tctctgcucgacctgtgtgua

SEQ ID NO: 69053 - DNA, 21 bp, Artificial Sequence
  Synthetic
cagcacctaugaggcagagug

SEQ ID NO: 69054 - DNA, 17 bp, Artificial Sequence
  Synthetic
gctguggaagccgccua

SEQ ID NO: 69055 - DNA, 20 bp, Artificial Sequence
  Synthetic
ctcctgugccgtgtaugaca

SEQ ID NO: 69056 - DNA, 18 bp, Artificial Sequence
  Synthetic
gcccctccuctggcaauc

SEQ ID NO: 69057 - DNA, 20 bp, Artificial Sequence
  Synthetic
cccaccctaugcctcctgua

SEQ ID NO: 69058 - DNA, 20 bp, Artificial Sequence
  Synthetic
cacagggucacucacaggaa

SEQ ID NO: 69059 - DNA, 21 bp, Artificial Sequence
  Synthetic
aguactucagcgaggaggaca

SEQ ID NO: 69060 - DNA, 18 bp, Artificial Sequence
  Synthetic
gtcagcacccuggaguga

SEQ ID NO: 69061 - DNA, 17 bp, Artificial Sequence
  Synthetic
tcugccccaggccacua

SEQ ID NO: 69062 - DNA, 18 bp, Artificial Sequence
  Synthetic
tgcugaggagccgguaca

SEQ ID NO: 69063 - DNA, 21 bp, Artificial Sequence
  Synthetic
tcttccugggaagttcgggua

SEQ ID NO: 69064 - DNA, 26 bp, Artificial Sequence
  Synthetic
ttgttgcutatatcccuggaagagac

SEQ ID NO: 69065 - DNA, 20 bp, Artificial Sequence
  Synthetic
ggccacucactccucagaga

SEQ ID NO: 69066 - DNA, 21 bp, Artificial Sequence
  Synthetic
accctctugtccctcaaucca

SEQ ID NO: 69067 - DNA, 19 bp, Artificial Sequence
  Synthetic
gcaacauggaggccaugag

SEQ ID NO: 69068 - DNA, 19 bp, Artificial Sequence
  Synthetic
gagccacgcgucatacuct

SEQ ID NO: 69069 - DNA, 26 bp, Artificial Sequence
  Synthetic
ccgcutatgataaacuggaaaagacc

SEQ ID NO: 69070 - DNA, 18 bp, Artificial Sequence
  Synthetic
tgcgccuccagcttctuc

SEQ ID NO: 69071 - DNA, 21 bp, Artificial Sequence
  Synthetic
gttatcccucccctctgctuc

SEQ ID NO: 69072 - DNA, 18 bp, Artificial Sequence
  Synthetic
augcagcgcacgaagtug

SEQ ID NO: 69073 - DNA, 17 bp, Artificial Sequence
  Synthetic
gugggccagaggcugat

SEQ ID NO: 69074 - DNA, 26 bp, Artificial Sequence
  Synthetic
ggagaatagagtucactagcagctut

SEQ ID NO: 69075 - DNA, 28 bp, Artificial Sequence
  Synthetic
gctgtatgacaggaauctacttttucgt

SEQ ID NO: 69076 - DNA, 22 bp, Artificial Sequence
  Synthetic
cgatggccucaccttatcccua

SEQ ID NO: 69077 - DNA, 19 bp, Artificial Sequence
  Synthetic
cccccaguggctacgaaug

SEQ ID NO: 69078 - DNA, 24 bp, Artificial Sequence
  Synthetic
cccaagaauaagaggcaacauggt

SEQ ID NO: 69079 - DNA, 23 bp, Artificial Sequence
  Synthetic
ttgtguaggccatgcuaacgaat

SEQ ID NO: 69080 - DNA, 23 bp, Artificial Sequence
  Synthetic
acatggagaguaagagucagcct

SEQ ID NO: 69081 - DNA, 23 bp, Artificial Sequence
  Synthetic
ccaaactctggugggcttattut

SEQ ID NO: 69082 - DNA, 30 bp, Artificial Sequence; identical to SEQ ID NO: 30822
  Synthetic

SEQ ID NO: 69083 - DNA, 26 bp, Artificial Sequence
  Synthetic
ggtccaccugacgtaaattcttctut

SEQ ID NO: 69084 - DNA, 18 bp, Artificial Sequence
  Synthetic
ccctgcccugtcttgucc

SEQ ID NO: 69085 - DNA, 20 bp, Artificial Sequence
  Synthetic
gccatgugggcagagatgua

SEQ ID NO: 69086 - DNA, 21 bp, Artificial Sequence
  Synthetic
tccuagggagacugcagaacc

SEQ ID NO: 69087 - DNA, 21 bp, Artificial Sequence
  Synthetic
tcugacccgacugggaagaaa

SEQ ID NO: 69088 - DNA, 22 bp, Artificial Sequence
  Synthetic
caaggctuggttgagatcaugg

SEQ ID NO: 69089 - DNA, 27 bp, Artificial Sequence
  Synthetic
ccactttaccccautctgaaatccuaa

SEQ ID NO: 69090 - DNA, 22 bp, Artificial Sequence
  Synthetic
gcagtagcugagctgcagaauc

SEQ ID NO: 69091 - DNA, 26 bp, Artificial Sequence
  Synthetic
agctccttuaaggttttctccauacc

SEQ ID NO: 69092 - DNA, 23 bp, Artificial Sequence
  Synthetic
ggagtgguggttaattgctucca

SEQ ID NO: 69093 - DNA, 28 bp, Artificial Sequence
  Synthetic
gggaaaaggaaaugatgccttcttatua

SEQ ID NO: 69094 - DNA, 21 bp, Artificial Sequence
  Synthetic
ctggtcccuctggctgaatut

SEQ ID NO: 69095 - DNA, 24 bp, Artificial Sequence
  Synthetic
ctcatcattugtgactgcttuggg

SEQ ID NO: 69096 - DNA, 22 bp, Artificial Sequence
  Synthetic
cacctgacugtctcttgctuga

SEQ ID NO: 69097 - DNA, 20 bp, Artificial Sequence
  Synthetic
ccutcccagacuagccagag

SEQ ID NO: 69098 - DNA, 20 bp, Artificial Sequence
  Synthetic
gactccutgcagcuggacaa

SEQ ID NO: 69099 - DNA, 20 bp, Artificial Sequence
  Synthetic
ggutgtguccgggaaacagt

SEQ ID NO: 69100 - DNA, 17 bp, Artificial Sequence
  Synthetic
cacaggccgguggaaug

SEQ ID NO: 69101 - DNA, 20 bp, Artificial Sequence
  Synthetic
ctcctaccucccctcaccua

SEQ ID NO: 69102 - DNA, 28 bp, Artificial Sequence
  Synthetic
agtctttcacttutcagatgtgtgtuga

SEQ ID NO: 69103 - DNA, 29 bp, Artificial Sequence
  Synthetic
acaaagcctgccuacttaagatcaattua

SEQ ID NO: 69104 - DNA, 27 bp, Artificial Sequence
  Synthetic
aaaacctagagaacuggcatguaagag

SEQ ID NO: 69105 - DNA, 25 bp, Artificial Sequence
  Synthetic
tcaaaccgaucagccaatactgtut

SEQ ID NO: 69106 - DNA, 27 bp, Artificial Sequence
  Synthetic
gaggcctcagguaaaatagaatttuca

SEQ ID NO: 69107 - DNA, 24 bp, Artificial Sequence
  Synthetic
gtatctgccaucacctcagcttut

SEQ ID NO: 69108 - DNA, 22 bp, Artificial Sequence
  Synthetic
ggaaatccaugagccuggacat

SEQ ID NO: 69109 - DNA, 27 bp, Artificial Sequence
  Synthetic
caaaaactttgcuacactgacauggaa

SEQ ID NO: 69110 - DNA, 20 bp, Artificial Sequence
  Synthetic
gggcaguagcttcctgugac

SEQ ID NO: 69111 - DNA, 21 bp, Artificial Sequence
  Synthetic
gggaagugagtcctccuccat

SEQ ID NO: 69112 - DNA, 22 bp, Artificial Sequence
  Synthetic
ggcctcacuctgttccaaaguc

SEQ ID NO: 69113 - DNA, 21 bp, Artificial Sequence
  Synthetic
agtcaugcagcaaccaaguca

SEQ ID NO: 69114 - DNA, 24 bp, Artificial Sequence
  Synthetic
ctcttcttuccccaggtgaactut

SEQ ID NO: 69115 - DNA, 20 bp, Artificial Sequence
  Synthetic
cttggctugcagtgatcugg

SEQ ID NO: 69116 - DNA, 27 bp, Artificial Sequence
  Synthetic
ccttggtattctugggatgtgacttuc

SEQ ID NO: 69117 - DNA, 21 bp, Artificial Sequence
  Synthetic
catggcaggcaautccagtuc

SEQ ID NO: 69118 - DNA, 22 bp, Artificial Sequence
  Synthetic
aaaagaggcugacctuccagag

SEQ ID NO: 69119 - DNA, 22 bp, Artificial Sequence
  Synthetic
cgatttaguggcgtccuaggaa

SEQ ID NO: 69120 - DNA, 20 bp, Artificial Sequence
  Synthetic
cccucctaucccacagcaca

SEQ ID NO: 69121 - DNA, 24 bp, Artificial Sequence
  Synthetic
ctgacagtttguccctttctcuct

SEQ ID NO: 69122 - DNA, 21 bp, Artificial Sequence
  Synthetic
ctggctctucatggatccuca

SEQ ID NO: 69123 - DNA, 24 bp, Artificial Sequence
  Synthetic
ctgtaagtaucactcccccugaac

SEQ ID NO: 69124 - DNA, 22 bp, Artificial Sequence
  Synthetic
tctgatccucctgtgtgtguga

SEQ ID NO: 69125 - DNA, 19 bp, Artificial Sequence
  Synthetic
tctccatutcggctugcgt

SEQ ID NO: 69126 - DNA, 22 bp, Artificial Sequence
  Synthetic
gacaatgucccatctgggugaa

SEQ ID NO: 69127 - DNA, 23 bp, Artificial Sequence
  Synthetic
cutatatggcaagucggaccagt

SEQ ID NO: 69128 - DNA, 21 bp, Artificial Sequence
  Synthetic
cugccccaaccagatugagaa

SEQ ID NO: 69129 - DNA, 20 bp, Artificial Sequence
  Synthetic
tcagggtugggcatgatguc

SEQ ID NO: 69130 - DNA, 23 bp, Artificial Sequence
  Synthetic
ctttgatcuggaggagagucacc

SEQ ID NO: 69131 - DNA, 22 bp, Artificial Sequence
  Synthetic
agcccagaacagacaugugaac

SEQ ID NO: 69132 - DNA, 27 bp, Artificial Sequence
  Synthetic
acatgccaagtcuatctctcactgtua

SEQ ID NO: 69133 - DNA, 28 bp, Artificial Sequence
  Synthetic
tcccatcaggaauatctgtttcuaggaa

SEQ ID NO: 69134 - DNA, 26 bp, Artificial Sequence
  Synthetic
actgttggctuaaacactgaagaugt

SEQ ID NO: 69135 - DNA, 27 bp, Artificial Sequence
  Synthetic
tcaatcaaagtuttcagaagccuggat

SEQ ID NO: 69136 - DNA, 26 bp, Artificial Sequence
  Synthetic
acagagagtucaacctgaaacatucc

SEQ ID NO: 69137 - DNA, 26 bp, Artificial Sequence
  Synthetic
tcttctcgaucaagaatgctgguaac

SEQ ID NO: 69138 - DNA, 26 bp, Artificial Sequence
  Synthetic
ggttagtacctuctccactccaaaut

SEQ ID NO: 69139 - DNA, 26 bp, Artificial Sequence
  Synthetic
cagttgtcgtugatgtcttcaacaut

SEQ ID NO: 69140 - DNA, 26 bp, Artificial Sequence
  Synthetic
ccaaaacaaccguactttaactgugt

SEQ ID NO: 69141 - DNA, 23 bp, Artificial Sequence
  Synthetic
tggtttagcugctggacttgaut

SEQ ID NO: 69142 - DNA, 19 bp, Artificial Sequence
  Synthetic
gggcuaccccctuaaccct

SEQ ID NO: 69143 - DNA, 21 bp, Artificial Sequence
  Synthetic
ggcagcgaucttcttguagca

SEQ ID NO: 69144 - DNA, 21 bp, Artificial Sequence
  Synthetic
gagcattcugggaagccauca

SEQ ID NO: 69145 - DNA, 20 bp, Artificial Sequence
  Synthetic
cgcaatggcucaccagguag

SEQ ID NO: 69146 - DNA, 24 bp, Artificial Sequence
  Synthetic
gcctccaatauctgtccctttuct

SEQ ID NO: 69147 - DNA, 21 bp, Artificial Sequence
  Synthetic
ggacucaaagacacccugcac

SEQ ID NO: 69148 - DNA, 17 bp, Artificial Sequence
  Synthetic
gtgaccugtcgccucca

SEQ ID NO: 69149 - DNA, 19 bp, Artificial Sequence
  Synthetic
cucagccuccccacaagac

SEQ ID NO: 69150 - DNA, 20 bp, Artificial Sequence
  Synthetic
aggaaggcutcgagccatut

SEQ ID NO: 69151 - DNA, 22 bp, Artificial Sequence
  Synthetic
cactguggaaggaaggagctut

SEQ ID NO: 69152 - DNA, 21 bp, Artificial Sequence
  Synthetic
gtacaccatcucaccgtccuc

SEQ ID NO: 69153 - DNA, 28 bp, Artificial Sequence
  Synthetic
agggaatgttatugtatcctgaggguat

SEQ ID NO: 69154 - DNA, 23 bp, Artificial Sequence
  Synthetic
caccccagaaaaaccuctucagt

SEQ ID NO: 69155 - DNA, 23 bp, Artificial Sequence
  Synthetic
tcutttgctugcagaggaaggag

SEQ ID NO: 69156 - DNA, 24 bp, Artificial Sequence
  Synthetic
gcacactctuaaatccccttcuct

SEQ ID NO: 69157 - DNA, 23 bp, Artificial Sequence
  Synthetic
tgccttcttcugaagtcccttug

SEQ ID NO: 69158 - DNA, 19 bp, Artificial Sequence
  Synthetic
gccaggccgutgatgauga

SEQ ID NO: 69159 - DNA, 19 bp, Artificial Sequence
  Synthetic
acgacugaggacgagucca

SEQ ID NO: 69160 - DNA, 23 bp, Artificial Sequence
  Synthetic
gaggagacacagcuggatcttuc

SEQ ID NO: 69161 - DNA, 23 bp, Artificial Sequence
  Synthetic
gagaagacagucagaauccagca

SEQ ID NO: 69162 - DNA, 22 bp, Artificial Sequence
  Synthetic
gccttcucctcaccuaacccat

SEQ ID NO: 69163 - DNA, 21 bp, Artificial Sequence
  Synthetic
ggacctcugtgtccctucagt

SEQ ID NO: 69164 - DNA, 22 bp, Artificial Sequence
  Synthetic
acccuccctgagtauccagaaa

SEQ ID NO: 69165 - DNA, 21 bp, Artificial Sequence
  Synthetic
ggtggcaccugctatgaugag

SEQ ID NO: 69166 - DNA, 20 bp, Artificial Sequence
  Synthetic
tcacgutctgcauggacagg

SEQ ID NO: 69167 - DNA, 24 bp, Artificial Sequence
  Synthetic
agtcctugaacgtagttucgcaaa

SEQ ID NO: 69168 - DNA, 21 bp, Artificial Sequence
  Synthetic
gtctutccattggucccacca

SEQ ID NO: 69169 - DNA, 21 bp, Artificial Sequence
  Synthetic
cgaggccaaacacaugtccut

SEQ ID NO: 69170 - DNA, 23 bp, Artificial Sequence
  Synthetic
gcttugaaagcccctccatucat

SEQ ID NO: 69171 - DNA, 19 bp, Artificial Sequence
  Synthetic
ccaucacaccccacgagua

SEQ ID NO: 69172 - DNA, 23 bp, Artificial Sequence
  Synthetic
gccaggauttcctugggaaagat

SEQ ID NO: 69173 - DNA, 26 bp, Artificial Sequence
  Synthetic
ttgccagtgagcutcaaatctctaut

SEQ ID NO: 69174 - DNA, 21 bp, Artificial Sequence
  Synthetic
ggtcttctucctggctaugct

SEQ ID NO: 69175 - DNA, 22 bp, Artificial Sequence
  Synthetic
gaagaaaaugcccagcaggaug

SEQ ID NO: 69176 - DNA, 18 bp, Artificial Sequence
  Synthetic
cuggcugccaaccagaca

SEQ ID NO: 69177 - DNA, 17 bp, Artificial Sequence
  Synthetic
acgttgcucccgcucac

SEQ ID NO: 69178 - DNA, 20 bp, Artificial Sequence
  Synthetic
atgaagcacucgtugaggct

SEQ ID NO: 69179 - DNA, 18 bp, Artificial Sequence
  Synthetic
tcgtacguggcgctcauc

SEQ ID NO: 69180 - DNA, 18 bp, Artificial Sequence
  Synthetic
gctcugcacgcgtgtgua

SEQ ID NO: 69181 - DNA, 19 bp, Artificial Sequence
  Synthetic
ccccaaguacctgcaguct

SEQ ID NO: 69182 - DNA, 24 bp, Artificial Sequence
  Synthetic
ctggaagauggttatgaggtugga

SEQ ID NO: 69183 - DNA, 28 bp, Artificial Sequence
  Synthetic
gcctctgattacugactctgtcctauat

SEQ ID NO: 69184 - DNA, 24 bp, Artificial Sequence
  Synthetic
ggcagtcaggauctaactcacuca

SEQ ID NO: 69185 - DNA, 21 bp, Artificial Sequence
  Synthetic
ccagggcugactctcatgtut

SEQ ID NO: 69186 - DNA, 21 bp, Artificial Sequence
  Synthetic
gcctctgtucacctctcgaug

SEQ ID NO: 69187 - DNA, 21 bp, Artificial Sequence
  Synthetic
ctgtgucaggcatcctucact

SEQ ID NO: 69188 - DNA, 19 bp, Artificial Sequence
  Synthetic
cucctucagcggcaagaga

SEQ ID NO: 69189 - DNA, 17 bp, Artificial Sequence
  Synthetic
cgcggccucttcgauga

SEQ ID NO: 69190 - DNA, 18 bp, Artificial Sequence
  Synthetic
ttccagcucctgccgtut

SEQ ID NO: 69191 - DNA, 17 bp, Artificial Sequence
  Synthetic
gcgggagcuggcugaac

SEQ ID NO: 69192 - DNA, 18 bp, Artificial Sequence
  Synthetic
cagcgcucaagcaacugg

SEQ ID NO: 69193 - DNA, 19 bp, Artificial Sequence
  Synthetic
ccucctguccccaacagaa

SEQ ID NO: 69194 - DNA, 21 bp, Artificial Sequence
  Synthetic
ccttcagccguaggttguact

SEQ ID NO: 69195 - DNA, 19 bp, Artificial Sequence
  Synthetic
agcagatguaccgcaggug

SEQ ID NO: 69196 - DNA, 20 bp, Artificial Sequence
  Synthetic
gctggtagcuccatctccut

SEQ ID NO: 69197 - DNA, 18 bp, Artificial Sequence
  Synthetic
gaguaccgggagctggug

SEQ ID NO: 69198 - DNA, 21 bp, Artificial Sequence
  Synthetic
gaggtaguccagggcaatcug

SEQ ID NO: 69199 - DNA, 20 bp, Artificial Sequence
  Synthetic
ggagggugaacctgggauga

SEQ ID NO: 69200 - DNA, 17 bp, Artificial Sequence
  Synthetic
gauctcuggcggcaggt

SEQ ID NO: 69201 - DNA, 17 bp, Artificial Sequence
  Synthetic
gctugcacccccatgug

SEQ ID NO: 69202 - DNA, 22 bp, Artificial Sequence
  Synthetic
catagccgacgucatgcaagua

SEQ ID NO: 69203 - DNA, 23 bp, Artificial Sequence
  Synthetic
acttcttgactutgggagtgguc

SEQ ID NO: 69204 - DNA, 27 bp, Artificial Sequence
  Synthetic
aagtgctcttguccaaaatactcucaa

SEQ ID NO: 69205 - DNA, 24 bp, Artificial Sequence
  Synthetic
acgtgttcugatctgacttugcat

SEQ ID NO: 69206 - DNA, 23 bp, Artificial Sequence
  Synthetic
gaaagugggaggagagagtcuga

SEQ ID NO: 69207 - DNA, 17 bp, Artificial Sequence
  Synthetic
gcagcggcugtaucggt

SEQ ID NO: 69208 - DNA, 22 bp, Artificial Sequence
  Synthetic
ccttcctccugccatcccuaat

SEQ ID NO: 69209 - DNA, 26 bp, Artificial Sequence
  Synthetic
acgaggagatcuacaaggagttctut

SEQ ID NO: 69210 - DNA, 18 bp, Artificial Sequence
  Synthetic
cugcagaagcuccagcga

SEQ ID NO: 69211 - DNA, 23 bp, Artificial Sequence
  Synthetic
ggtgggccaucatgagacauaat

SEQ ID NO: 69212 - DNA, 27 bp, Artificial Sequence
  Synthetic
tccagtaatuttcaagccaugagagaa

SEQ ID NO: 69213 - DNA, 29 bp, Artificial Sequence
  Synthetic
tcctgtctatacucttccctatgttucaa

SEQ ID NO: 69214 - DNA, 22 bp, Artificial Sequence
  Synthetic
agattcccctuaccagctccut

SEQ ID NO: 69215 - DNA, 21 bp, Artificial Sequence
  Synthetic
agctccacacautccccatug

SEQ ID NO: 69216 - DNA, 20 bp, Artificial Sequence
  Synthetic
cagcgauggagagtggcaut

SEQ ID NO: 69217 - DNA, 29 bp, Artificial Sequence
  Synthetic
aggagttcugaaaagcacatattgatuga

SEQ ID NO: 69218 - DNA, 24 bp, Artificial Sequence
  Synthetic
ggcctggatcucattcatcttcug

SEQ ID NO: 69219 - DNA, 24 bp, Artificial Sequence
  Synthetic
cctacagtcaaaugcgtgttguct

SEQ ID NO: 69220 - DNA, 19 bp, Artificial Sequence
  Synthetic
cacucgacccagacccuac

SEQ ID NO: 69221 - DNA, 26 bp, Artificial Sequence
  Synthetic
gcccttcttugttgattactccugat

SEQ ID NO: 69222 - DNA, 23 bp, Artificial Sequence
  Synthetic
tgctttcugcaaactgcaatcuc

SEQ ID NO: 69223 - DNA, 27 bp, Artificial Sequence
  Synthetic
gccccaggtuatttttgttttccaaut

SEQ ID NO: 69224 - DNA, 27 bp, Artificial Sequence
  Synthetic
acttttcatttcuggcttatcacugct

SEQ ID NO: 69225 - DNA, 27 bp, Artificial Sequence
  Synthetic
ccttttcttttcaauggctgtagcuat

SEQ ID NO: 69226 - DNA, 31 bp, Artificial Sequence
  Synthetic
acaaatcttcuctaaaagcaatcuaccacat

SEQ ID NO: 69227 - DNA, 27 bp, Artificial Sequence
  Synthetic
agctccaacaacuacaatgagaaauct

SEQ ID NO: 69228 - DNA, 25 bp, Artificial Sequence
  Synthetic
cttacccaagccguttgtttgaaut

SEQ ID NO: 69229 - DNA, 27 bp, Artificial Sequence
  Synthetic
cgautttctguaaaacaggagcaaaga

SEQ ID NO: 69230 - DNA, 28 bp, Artificial Sequence
  Synthetic
ttggcaaauttcattacguaaaaaccga

SEQ ID NO: 69231 - DNA, 25 bp, Artificial Sequence
  Synthetic
gcttgttgutgactcattugaacct

SEQ ID NO: 69232 - DNA, 20 bp, Artificial Sequence
  Synthetic
cctggaaguccgtgcaguat

SEQ ID NO: 69233 - DNA, 23 bp, Artificial Sequence
  Synthetic
cctttctctcagutcccgcttuc

SEQ ID NO: 69234 - DNA, 24 bp, Artificial Sequence
  Synthetic
aaacacaaccaccauauagcccaa

SEQ ID NO: 69235 - DNA, 25 bp, Artificial Sequence
  Synthetic
ggttgtaattucccatggtctuggt

SEQ ID NO: 69236 - DNA, 27 bp, Artificial Sequence
  Synthetic
tgctacaactuatgtacacgttucaga

SEQ ID NO: 69237 - DNA, 21 bp, Artificial Sequence
  Synthetic
tgtccatccucaggcguagaa

SEQ ID NO: 69238 - DNA, 22 bp, Artificial Sequence
  Synthetic
ccagacaguggattggagaugt

SEQ ID NO: 69239 - DNA, 27 bp, Artificial Sequence
  Synthetic
ctcgtatgcaaugattactccagtgua

SEQ ID NO: 69240 - DNA, 28 bp, Artificial Sequence
  Synthetic
tttttaacgtatcutagtgtgagcucgt

SEQ ID NO: 69241 - DNA, 22 bp, Artificial Sequence
  Synthetic
gcatggcccuttggagacuaaa

SEQ ID NO: 69242 - DNA, 22 bp, Artificial Sequence
  Synthetic
gggactccutgctaaccauagg

SEQ ID NO: 69243 - DNA, 28 bp, Artificial Sequence
  Synthetic
ctaaagaaaagauagtgggtgtaccuca

SEQ ID NO: 69244 - DNA, 20 bp, Artificial Sequence
  Synthetic
gagaagacgcgacuguggaa

SEQ ID NO: 69245 - DNA, 19 bp, Artificial Sequence
  Synthetic
gatgtgggucctccugcac

SEQ ID NO: 69246 - DNA, 22 bp, Artificial Sequence
  Synthetic
guggtguagcacaacagacact

SEQ ID NO: 69247 - DNA, 24 bp, Artificial Sequence
  Synthetic
attgtuttcctgtgauccagagca

SEQ ID NO: 69248 - DNA, 22 bp, Artificial Sequence
  Synthetic
gcgaagcaccagaaaucaugga

SEQ ID NO: 69249 - DNA, 19 bp, Artificial Sequence
  Synthetic
cuccttugggagcacacga

SEQ ID NO: 69250 - DNA, 21 bp, Artificial Sequence
  Synthetic
cuggtctcttcugacggaact

SEQ ID NO: 69251 - DNA, 23 bp, Artificial Sequence
  Synthetic
ggaaagaagacaacuggctccug

SEQ ID NO: 69252 - DNA, 22 bp, Artificial Sequence
  Synthetic
tgggcagaaaaugcaagucaac

SEQ ID NO: 69253 - DNA, 21 bp, Artificial Sequence
  Synthetic
gagggaggacutgaacaucca

SEQ ID NO: 69254 - DNA, 20 bp, Artificial Sequence
  Synthetic
gagcucaccaacctguaccc

SEQ ID NO: 69255 - DNA, 23 bp, Artificial Sequence
  Synthetic
ggaatacaggaagagugctguca

SEQ ID NO: 69256 - DNA, 20 bp, Artificial Sequence
  Synthetic
ccucacacgggacuacaact

SEQ ID NO: 69257 - DNA, 23 bp, Artificial Sequence
  Synthetic
gaagagaggaagggutaguggga

SEQ ID NO: 69258 - DNA, 20 bp, Artificial Sequence
  Synthetic
cactgtgacucccacugaga

SEQ ID NO: 69259 - DNA, 17 bp, Artificial Sequence
  Synthetic
gccucaccgccgtucag

SEQ ID NO: 69260 - DNA, 26 bp, Artificial Sequence
  Synthetic
agatctcucaggattaacacugcaga

SEQ ID NO: 69261 - DNA, 17 bp, Artificial Sequence
  Synthetic
gccugccgcucacacaa

SEQ ID NO: 69262 - DNA, 23 bp, Artificial Sequence
  Synthetic
aaaaactgtgutgtggagugcaa

SEQ ID NO: 69263 - DNA, 25 bp, Artificial Sequence
  Synthetic
gtccacgtauccatcaacaguaaca

SEQ ID NO: 69264 - DNA, 21 bp, Artificial Sequence
  Synthetic
ggccaguaggcagtgaaguaa

SEQ ID NO: 69265 - DNA, 28 bp, Artificial Sequence
  Synthetic
acagtgacaucatcagtuaaaacaaggt

SEQ ID NO: 69266 - DNA, 23 bp, Artificial Sequence
  Synthetic
gctccctcugtctccatctttuc

SEQ ID NO: 69267 - DNA, 21 bp, Artificial Sequence
  Synthetic
ccctgacauccgacttgtuct

SEQ ID NO: 69268 - DNA, 20 bp, Artificial Sequence
  Synthetic
cccacctgutctccacgtuc

SEQ ID NO: 69269 - DNA, 21 bp, Artificial Sequence
  Synthetic
gagccuggaaagcctggtaut

SEQ ID NO: 69270 - DNA, 21 bp, Artificial Sequence
  Synthetic
cuaaaacctgtgugccaggga

SEQ ID NO: 69271 - DNA, 26 bp, Artificial Sequence
  Synthetic
atgaccatgaugaactgacttugagt

SEQ ID NO: 69272 - DNA, 20 bp, Artificial Sequence
  Synthetic
gguccccgaaaccctucaat

SEQ ID NO: 69273 - DNA, 25 bp, Artificial Sequence
  Synthetic
ctgttccucagcaagcttatctcug

SEQ ID NO: 69274 - DNA, 21 bp, Artificial Sequence
  Synthetic
agaacagcaggucagggaaug

SEQ ID NO: 69275 - DNA, 23 bp, Artificial Sequence
  Synthetic
ctggtatcttugggagtgaggug

SEQ ID NO: 69276 - DNA, 20 bp, Artificial Sequence
  Synthetic
caccaagcucccagtggaua

SEQ ID NO: 69277 - DNA, 22 bp, Artificial Sequence
  Synthetic
cctcaggcuctgtgtttcctuc

SEQ ID NO: 69278 - DNA, 22 bp, Artificial Sequence
  Synthetic
gccttgcagacucaggactcua

SEQ ID NO: 69279 - DNA, 20 bp, Artificial Sequence
  Synthetic
catgaauccctggugggact

SEQ ID NO: 69280 - DNA, 22 bp, Artificial Sequence
  Synthetic
acttcccguctgtgaucaggat

SEQ ID NO: 69281 - DNA, 21 bp, Artificial Sequence
  Synthetic
ccgugagcttagcuacaaggg

SEQ ID NO: 69282 - DNA, 21 bp, Artificial Sequence
  Synthetic
ggcgctuacttgtaggugagg

SEQ ID NO: 69283 - DNA, 17 bp, Artificial Sequence
  Synthetic
ccgcgcgggugtttaug

SEQ ID NO: 69284 - DNA, 19 bp, Artificial Sequence
  Synthetic
gagagcaugucggcgaact

SEQ ID NO: 69285 - DNA, 22 bp, Artificial Sequence
  Synthetic
tcaaguccatgatcaucgaccg

SEQ ID NO: 69286 - DNA, 17 bp, Artificial Sequence
  Synthetic
gacagcugggcguccaa

SEQ ID NO: 69287 - DNA, 25 bp, Artificial Sequence
  Synthetic
cgagtttcaugagaagctgctauca

SEQ ID NO: 69288 - DNA, 21 bp, Artificial Sequence
  Synthetic
ggtcaaagaagcccutggugt

SEQ ID NO: 69289 - DNA, 22 bp, Artificial Sequence
  Synthetic
ccagcagauctctctctuccaa

SEQ ID NO: 69290 - DNA, 17 bp, Artificial Sequence
  Synthetic
gccctccucggccucat

SEQ ID NO: 69291 - DNA, 20 bp, Artificial Sequence
  Synthetic
ctgcagcaaagcutcctcuc

SEQ ID NO: 69292 - DNA, 19 bp, Artificial Sequence
  Synthetic
gctcggcaucatggucact

SEQ ID NO: 69293 - DNA, 18 bp, Artificial Sequence
  Synthetic
gctggagaugagcgcuga

SEQ ID NO: 69294 - DNA, 17 bp, Artificial Sequence
  Synthetic
gcaacggucccggacut

SEQ ID NO: 69295 - DNA, 18 bp, Artificial Sequence
  Synthetic
ccacggcucugaccacac

SEQ ID NO: 69296 - DNA, 19 bp, Artificial Sequence
  Synthetic
agacaggagggcuccugat

SEQ ID NO: 69297 - DNA, 17 bp, Artificial Sequence
  Synthetic
gtcccgcagucctucca

SEQ ID NO: 69298 - DNA, 20 bp, Artificial Sequence
  Synthetic
atctgcagcutggucacgat

SEQ ID NO: 69299 - DNA, 19 bp, Artificial Sequence
  Synthetic
caagctcccacucgcctua

SEQ ID NO: 69300 - DNA, 24 bp, Artificial Sequence
  Synthetic
gacgtaggtgaugatggacttcuc

SEQ ID NO: 69301 - DNA, 19 bp, Artificial Sequence
  Synthetic
gguguaccggcagaccaac

SEQ ID NO: 69302 - DNA, 24 bp, Artificial Sequence
  Synthetic
cataatgcutgtggttuccccaat

SEQ ID NO: 69303 - DNA, 23 bp, Artificial Sequence
  Synthetic
tctatagcccuctccaagcucac

SEQ ID NO: 69304 - DNA, 24 bp, Artificial Sequence
  Synthetic
gaaagagutctcucacagcaccat

SEQ ID NO: 69305 - DNA, 25 bp, Artificial Sequence
  Synthetic
gcatgttggugacctctgaatttut

SEQ ID NO: 69306 - DNA, 24 bp, Artificial Sequence
  Synthetic
ggaaaaacucuaggagaaggcgaa

SEQ ID NO: 69307 - DNA, 20 bp, Artificial Sequence
  Synthetic
ccgctcuagaacagcatugg

SEQ ID NO: 69308 - DNA, 27 bp, Artificial Sequence
  Synthetic
tgaaaattgucacgaaacaatgagcut

SEQ ID NO: 69309 - DNA, 25 bp, Artificial Sequence
  Synthetic
tttctggtcggaguctgatttcauc

SEQ ID NO: 69310 - DNA, 21 bp, Artificial Sequence
  Synthetic
gcuggacgaaagccugaacaa

SEQ ID NO: 69311 - DNA, 24 bp, Artificial Sequence
  Synthetic
cagaaacuactcaaacucccacct

SEQ ID NO: 69312 - DNA, 24 bp, Artificial Sequence
  Synthetic
gagggtttugaagaagtgggucat

SEQ ID NO: 69313 - DNA, 22 bp, Artificial Sequence
  Synthetic
gtcccuctatccucgagaaggg

SEQ ID NO: 69314 - DNA, 28 bp, Artificial Sequence
  Synthetic
cttgactagcauatactcaaagcacugt

SEQ ID NO: 69315 - DNA, 28 bp, Artificial Sequence
  Synthetic
agagttttccuaagcatgtgctctatut

SEQ ID NO: 69316 - DNA, 29 bp, Artificial Sequence
  Synthetic
gtataattttcgtcutccatcccttcugt

SEQ ID NO: 69317 - DNA, 24 bp, Artificial Sequence
  Synthetic
ggtgtctccauagctctcaucaag

SEQ ID NO: 69318 - DNA, 20 bp, Artificial Sequence
  Synthetic
cccaataguccatgccccua

SEQ ID NO: 69319 - DNA, 28 bp, Artificial Sequence
  Synthetic
tgacaatgacacugagactattcuacct

SEQ ID NO: 69320 - DNA, 22 bp, Artificial Sequence
  Synthetic
caatctcctcauactgggccut

SEQ ID NO: 69321 - DNA, 22 bp, Artificial Sequence
  Synthetic
ccagaugaccgactccaaauct

SEQ ID NO: 69322 - DNA, 26 bp, Artificial Sequence
  Synthetic
acaaaagacccaaagcutaucaggaa

SEQ ID NO: 69323 - DNA, 23 bp, Artificial Sequence
  Synthetic
agcuaacaaggaccaaaguggag

SEQ ID NO: 69324 - DNA, 28 bp, Artificial Sequence
  Synthetic
tggctttttcuagaagacgttgatacut

SEQ ID NO: 69325 - DNA, 25 bp, Artificial Sequence
  Synthetic
cauagctgagcuaggcagaaaagag

SEQ ID NO: 69326 - DNA, 23 bp, Artificial Sequence
  Synthetic
gaacttutcctgttgugccaagg

SEQ ID NO: 69327 - DNA, 22 bp, Artificial Sequence
  Synthetic
agtgaggcuactgctcttggua

SEQ ID NO: 69328 - DNA, 27 bp, Artificial Sequence
  Synthetic
agaaaagtactauctgcatgcttuggt

SEQ ID NO: 69329 - DNA, 26 bp, Artificial Sequence
  Synthetic
gaattgactuacctgatgggauagca

SEQ ID NO: 69330 - DNA, 27 bp, Artificial Sequence
  Synthetic
cttttaacctctucagagcctcaacua

SEQ ID NO: 69331 - DNA, 28 bp, Artificial Sequence
  Synthetic
ttgggatcacugatttgaaggaauaagt

SEQ ID NO: 69332 - DNA, 22 bp, Artificial Sequence
  Synthetic
ggccagtgcuagccacttttua

SEQ ID NO: 69333 - DNA, 28 bp, Artificial Sequence
  Synthetic
aggttctacaaaggcugtaattgttuct

SEQ ID NO: 69334 - DNA, 28 bp, Artificial Sequence
  Synthetic
ttttatgagcuttacacagttugcaaca

SEQ ID NO: 69335 - DNA, 22 bp, Artificial Sequence
  Synthetic
aacttgtguagctgctgaugct

SEQ ID NO: 69336 - DNA, 21 bp, Artificial Sequence
  Synthetic
catgtgaccugacagctgcua

SEQ ID NO: 69337 - DNA, 24 bp, Artificial Sequence
  Synthetic
ccatgtgagugataagtggcgtut

SEQ ID NO: 69338 - DNA, 24 bp, Artificial Sequence
  Synthetic
aatacagtgtgugctgctaaccut

SEQ ID NO: 69339 - DNA, 26 bp, Artificial Sequence
  Synthetic
tctcagaattgauagcagtgttugct

SEQ ID NO: 69340 - DNA, 18 bp, Artificial Sequence
  Synthetic
cgggcacgcacguaguag

SEQ ID NO: 69341 - DNA, 22 bp, Artificial Sequence
  Synthetic
ggagaggaggagguactgcuat

SEQ ID NO: 69342 - DNA, 19 bp, Artificial Sequence
  Synthetic
gtcttccugccctucgaca

SEQ ID NO: 69343 - DNA, 17 bp, Artificial Sequence
  Synthetic
cucccgggaccgtcuac

SEQ ID NO: 69344 - DNA, 19 bp, Artificial Sequence
  Synthetic
ccccacucttuggcaccat

SEQ ID NO: 69345 - DNA, 18 bp, Artificial Sequence
  Synthetic
ggcaaaaagccggucucc

SEQ ID NO: 69346 - DNA, 17 bp, Artificial Sequence
  Synthetic
accaugccgcggtacug

SEQ ID NO: 69347 - DNA, 21 bp, Artificial Sequence
  Synthetic
agaauccccacagtgcucaag

SEQ ID NO: 69348 - DNA, 20 bp, Artificial Sequence
  Synthetic
ccccacagagcacugaucaa

SEQ ID NO: 69349 - DNA, 17 bp, Artificial Sequence
  Synthetic
ggcgcugtgcctauccc

SEQ ID NO: 69350 - DNA, 24 bp, Artificial Sequence
  Synthetic
cattgactuaccttcacaccugga

SEQ ID NO: 69351 - DNA, 22 bp, Artificial Sequence
  Synthetic
accctcucaaatgctgttugct

SEQ ID NO: 69352 - DNA, 23 bp, Artificial Sequence
  Synthetic
ccagaacauctgctgucagaagt

SEQ ID NO: 69353 - DNA, 24 bp, Artificial Sequence
  Synthetic
gaggaggaaacucactagcatucc

SEQ ID NO: 69354 - DNA, 21 bp, Artificial Sequence
  Synthetic
gctcccctutggatccaguct

SEQ ID NO: 69355 - DNA, 21 bp, Artificial Sequence
  Synthetic
cccctttgugttctgccguat

SEQ ID NO: 69356 - DNA, 21 bp, Artificial Sequence
  Synthetic
caggactuagtcaggguccca

SEQ ID NO: 69357 - DNA, 27 bp, Artificial Sequence
  Synthetic
tgtcttccugacttcttatcctuccat

SEQ ID NO: 69358 - DNA, 21 bp, Artificial Sequence
  Synthetic
gggtcugaaagagcaauggag

SEQ ID NO: 69359 - DNA, 21 bp, Artificial Sequence
  Synthetic
catgccagcauttccctcuga

SEQ ID NO: 69360 - DNA, 20 bp, Artificial Sequence
  Synthetic
cctactcaccgugggtcauc

SEQ ID NO: 69361 - DNA, 21 bp, Artificial Sequence
  Synthetic
gaagaggcccugatctcucct

SEQ ID NO: 69362 - DNA, 18 bp, Artificial Sequence
  Synthetic
tcacctcucgggctcgua

SEQ ID NO: 69363 - DNA, 18 bp, Artificial Sequence
  Synthetic
ggccacucacuccaccac

SEQ ID NO: 69364 - DNA, 19 bp, Artificial Sequence
  Synthetic
cguagcccgaggaggagua

SEQ ID NO: 69365 - DNA, 21 bp, Artificial Sequence
  Synthetic
gtccaccaagggcuacuacag

SEQ ID NO: 69366 - DNA, 20 bp, Artificial Sequence
  Synthetic
aggtacugcaccuccaggaa

SEQ ID NO: 69367 - DNA, 21 bp, Artificial Sequence
  Synthetic
ggtggacaagaucatggugga

SEQ ID NO: 69368 - DNA, 18 bp, Artificial Sequence
  Synthetic
gctcugacagctggucgt

SEQ ID NO: 69369 - DNA, 19 bp, Artificial Sequence
  Synthetic
ggctaccgugaccccuaca

SEQ ID NO: 69370 - DNA, 18 bp, Artificial Sequence
  Synthetic
ggcuacgtcucgcacaga

SEQ ID NO: 69371 - DNA, 22 bp, Artificial Sequence
  Synthetic
cggatcacaguggagaagauca

SEQ ID NO: 69372 - DNA, 17 bp, Artificial Sequence
  Synthetic
ctcgcugtccgaugcct

SEQ ID NO: 69373 - DNA, 17 bp, Artificial Sequence
  Synthetic
cgggugctugcggagaa

SEQ ID NO: 69374 - DNA, 18 bp, Artificial Sequence
  Synthetic
ccctccugcaaggucaca

SEQ ID NO: 69375 - DNA, 18 bp, Artificial Sequence
  Synthetic
ggcaagcuggagcagguc

SEQ ID NO: 69376 - DNA, 22 bp, Artificial Sequence
  Synthetic
ctttttcaaggcugggaaggug

SEQ ID NO: 69377 - DNA, 25 bp, Artificial Sequence
  Synthetic
aattattagccacugctgugaccat

SEQ ID NO: 69378 - DNA, 28 bp, Artificial Sequence
  Synthetic
actcagcaagauaatgtaacagugaagg

SEQ ID NO: 69379 - DNA, 27 bp, Artificial Sequence
  Synthetic
tggacaaucaaaacttaactccuggat

SEQ ID NO: 69380 - DNA, 28 bp, Artificial Sequence
  Synthetic
tgatttctaaaacaugtctcctugcaca

SEQ ID NO: 69381 - DNA, 24 bp, Artificial Sequence
  Synthetic
gcaacctgaucttgtgaacaucct

SEQ ID NO: 69382 - DNA, 24 bp, Artificial Sequence
  Synthetic
tttgactuccacaaagcccctuat

SEQ ID NO: 69383 - DNA, 22 bp, Artificial Sequence
  Synthetic
aguaaggaccatcugcagcaac

SEQ ID NO: 69384 - DNA, 24 bp, Artificial Sequence
  Synthetic
cgctacttactuctcagccttgut

SEQ ID NO: 69385 - DNA, 21 bp, Artificial Sequence
  Synthetic
ggcctctgutcttcccgttut

SEQ ID NO: 69386 - DNA, 20 bp, Artificial Sequence
  Synthetic
gtgggcugtccttcugagac

SEQ ID NO: 69387 - DNA, 22 bp, Artificial Sequence
  Synthetic
gccacttucagcttgugggaat

SEQ ID NO: 69388 - DNA, 20 bp, Artificial Sequence
  Synthetic
gacaccagagcccugctuaa

SEQ ID NO: 69389 - DNA, 20 bp, Artificial Sequence
  Synthetic
ggcaaagaaccacucaccug

SEQ ID NO: 69390 - DNA, 24 bp, Artificial Sequence
  Synthetic
ttgaacaguccatgaaaggugaca

SEQ ID NO: 69391 - DNA, 28 bp, Artificial Sequence
  Synthetic
tgacattcaatctauagcttgggcttut

SEQ ID NO: 69392 - DNA, 22 bp, Artificial Sequence
  Synthetic
gtcagtgaaugatggcacaugg

SEQ ID NO: 69393 - DNA, 21 bp, Artificial Sequence
  Synthetic
caccctugcaggccctttaua

SEQ ID NO: 69394 - DNA, 21 bp, Artificial Sequence
  Synthetic
gagagacaaggacacugugct

SEQ ID NO: 69395 - DNA, 28 bp, Artificial Sequence
  Synthetic
gacagtctctggaugacagtttctatut

SEQ ID NO: 69396 - DNA, 19 bp, Artificial Sequence
  Synthetic
tgcutgcacugaagccaga

SEQ ID NO: 69397 - DNA, 21 bp, Artificial Sequence
  Synthetic
ctcactgagucctccctccut

SEQ ID NO: 69398 - DNA, 28 bp, Artificial Sequence
  Synthetic
ccagutctagtucagacaaagaaacact

SEQ ID NO: 69399 - DNA, 23 bp, Artificial Sequence
  Synthetic
tggcuagtgctugaccagaaaaa

SEQ ID NO: 69400 - DNA, 25 bp, Artificial Sequence
  Synthetic
acccacattcgagutggaagtacua

SEQ ID NO: 69401 - DNA, 23 bp, Artificial Sequence
  Synthetic
gcagggtguggacaaagaaacut

SEQ ID NO: 69402 - DNA, 21 bp, Artificial Sequence
  Synthetic
cccagguagaggaagggacut

SEQ ID NO: 69403 - DNA, 24 bp, Artificial Sequence
  Synthetic
ccaagtaccutcctccttttuccc

SEQ ID NO: 69404 - DNA, 23 bp, Artificial Sequence
  Synthetic
tttcutccaggcauacgaaacct

SEQ ID NO: 69405 - DNA, 28 bp, Artificial Sequence
  Synthetic
tctggtgttaugttacttggagaugaac

SEQ ID NO: 69406 - DNA, 23 bp, Artificial Sequence
  Synthetic
tggautattttuccccagcccaa

SEQ ID NO: 69407 - DNA, 28 bp, Artificial Sequence
  Synthetic
tgcagaguggactagtttgttuaaagag

SEQ ID NO: 69408 - DNA, 21 bp, Artificial Sequence
  Synthetic
tgtgucccccatagtcugcat

SEQ ID NO: 69409 - DNA, 23 bp, Artificial Sequence
  Synthetic
tggacatgtacutgaagctgguc

SEQ ID NO: 69410 - DNA, 23 bp, Artificial Sequence
  Synthetic
catcagagcagaguctgcacaua

SEQ ID NO: 69411 - DNA, 26 bp, Artificial Sequence
  Synthetic
ttctttttccttucctccctgtaugg

SEQ ID NO: 69412 - DNA, 21 bp, Artificial Sequence
  Synthetic
gcggaacaggauactgcagug

SEQ ID NO: 69413 - DNA, 24 bp, Artificial Sequence
  Synthetic
agggaggtguctgccaaatuaaag

SEQ ID NO: 69414 - DNA, 27 bp, Artificial Sequence
  Synthetic
acaaacatcccauagaatttgcgacua

SEQ ID NO: 69415 - DNA, 25 bp, Artificial Sequence
  Synthetic
gcaaagtgatugactgtgacagtuc

SEQ ID NO: 69416 - DNA, 21 bp, Artificial Sequence
  Synthetic
gggcacaccuggaatgtugaa

SEQ ID NO: 69417 - DNA, 22 bp, Artificial Sequence
  Synthetic
ggtgagattauctccgcctgug

SEQ ID NO: 69418 - DNA, 17 bp, Artificial Sequence
  Synthetic
ctgctucgcgcatucgg

SEQ ID NO: 69419 - DNA, 18 bp, Artificial Sequence
  Synthetic
cagguccaagggcuccat

SEQ ID NO: 69420 - DNA, 22 bp, Artificial Sequence
  Synthetic
cggatgcuggagcagtactcua

SEQ ID NO: 69421 - DNA, 20 bp, Artificial Sequence
  Synthetic
cucagccacagaccuaggga

SEQ ID NO: 69422 - DNA, 21 bp, Artificial Sequence
  Synthetic
gcaacctggutctgcacuaac

SEQ ID NO: 69423 - DNA, 19 bp, Artificial Sequence
  Synthetic
ccacggcacugaggatguc

SEQ ID NO: 69424 - DNA, 25 bp, Artificial Sequence
  Synthetic
cctccctgcauttcttttaagcuga

SEQ ID NO: 69425 - DNA, 20 bp, Artificial Sequence
  Synthetic
gtggaagccgacaucaaugg

SEQ ID NO: 69426 - DNA, 21 bp, Artificial Sequence
  Synthetic
gtggaggccucatgtgucaat

SEQ ID NO: 69427 - DNA, 23 bp, Artificial Sequence
  Synthetic
tgtttaggugagacaccgugaga

SEQ ID NO: 69428 - DNA, 21 bp, Artificial Sequence
  Synthetic
caagaagaagggugagcuggt

SEQ ID NO: 69429 - DNA, 17 bp, Artificial Sequence
  Synthetic
ccctgggugctcaccut

SEQ ID NO: 69430 - DNA, 23 bp, Artificial Sequence
  Synthetic
tgaagctuacagagaagcaggug

SEQ ID NO: 69431 - DNA, 20 bp, Artificial Sequence
  Synthetic
ccctccuggaacuccaccat

SEQ ID NO: 69432 - DNA, 22 bp, Artificial Sequence
  Synthetic
gcuctcucaagaggaagcaacc

SEQ ID NO: 69433 - DNA, 21 bp, Artificial Sequence
  Synthetic
ttctgcccguctctagcuaca

SEQ ID NO: 69434 - DNA, 21 bp, Artificial Sequence
  Synthetic
cgtgaggccauctgttgugat

SEQ ID NO: 69435 - DNA, 26 bp, Artificial Sequence
  Synthetic
ccaaatuaacgcccaggaaaaauaca

SEQ ID NO: 69436 - DNA, 27 bp, Artificial Sequence
  Synthetic
actgggtcactauaaggtcaaaagcua

SEQ ID NO: 69437 - DNA, 20 bp, Artificial Sequence
  Synthetic
gcauctgaguggccacacat

SEQ ID NO: 69438 - DNA, 21 bp, Artificial Sequence
  Synthetic
ggctgagggutagagcctgua

SEQ ID NO: 69439 - DNA, 24 bp, Artificial Sequence
  Synthetic
ctcagctcugacctcttctttucc

SEQ ID NO: 69440 - DNA, 21 bp, Artificial Sequence
  Synthetic
agagccuggtagatgcucagt

SEQ ID NO: 69441 - DNA, 21 bp, Artificial Sequence
  Synthetic
ctgttcgaggcucggatcauc

SEQ ID NO: 69442 - DNA, 24 bp, Artificial Sequence
  Synthetic
tgtgtctctucaaatgcccttcut

SEQ ID NO: 69443 - DNA, 19 bp, Artificial Sequence
  Synthetic
ggagaugaaccgcgtccug

SEQ ID NO: 69444 - DNA, 17 bp, Artificial Sequence
  Synthetic
cttcacggccucgugga

SEQ ID NO: 69445 - DNA, 17 bp, Artificial Sequence
  Synthetic
cucgccggcatcuacct

SEQ ID NO: 69446 - DNA, 17 bp, Artificial Sequence
  Synthetic
ctccgccugtgccttug

SEQ ID NO: 69447 - DNA, 17 bp, Artificial Sequence
  Synthetic
ctccgcgcugtcugagt

SEQ ID NO: 69448 - DNA, 19 bp, Artificial Sequence
  Synthetic
ccgacccccaucuccaaga

SEQ ID NO: 69449 - DNA, 20 bp, Artificial Sequence
  Synthetic
aggacaaccugtaccuggct

SEQ ID NO: 69450 - DNA, 21 bp, Artificial Sequence
  Synthetic
gtatgtgctuggtctggcuct

SEQ ID NO: 69451 - DNA, 28 bp, Artificial Sequence
  Synthetic
gtataaggaagtauggctcccaaagaut

SEQ ID NO: 69452 - DNA, 21 bp, Artificial Sequence
  Synthetic
ggacctggcuctgcatttugt

SEQ ID NO: 69453 - DNA, 22 bp, Artificial Sequence
  Synthetic
gctccutaaagagcugcgaact

SEQ ID NO: 69454 - DNA, 19 bp, Artificial Sequence
  Synthetic
ccacgucctgcagcucaat

SEQ ID NO: 69455 - DNA, 18 bp, Artificial Sequence
  Synthetic
ggctacugccagcccauc

SEQ ID NO: 69456 - DNA, 20 bp, Artificial Sequence
  Synthetic
gcagacguggtacctgcauc

SEQ ID NO: 69457 - DNA, 22 bp, Artificial Sequence
  Synthetic
tgaagagcgagcaccucattuc

SEQ ID NO: 69458 - DNA, 20 bp, Artificial Sequence
  Synthetic
gcaggauctgccuaggaggt

SEQ ID NO: 69459 - DNA, 23 bp, Artificial Sequence
  Synthetic
cctgttcccaugccctgatuaaa

SEQ ID NO: 69460 - DNA, 19 bp, Artificial Sequence
  Synthetic
gctcctcuggcttggacuc

SEQ ID NO: 69461 - DNA, 20 bp, Artificial Sequence
  Synthetic
ggcaacctugctctcaccut

SEQ ID NO: 69462 - DNA, 18 bp, Artificial Sequence
  Synthetic
caccacgucgtcgaugga

SEQ ID NO: 69463 - DNA, 18 bp, Artificial Sequence
  Synthetic
gggcggguggaacctuag

SEQ ID NO: 69464 - DNA, 25 bp, Artificial Sequence
  Synthetic
ctgtgaaacuaccattggttccugt

SEQ ID NO: 69465 - DNA, 24 bp, Artificial Sequence
  Synthetic
ccutgatatccugggacacagaag

SEQ ID NO: 69466 - DNA, 25 bp, Artificial Sequence
  Synthetic
cgtggaaaaucgaaaagggagaugt

SEQ ID NO: 69467 - DNA, 23 bp, Artificial Sequence
  Synthetic
cattacctugcagctgttgtcuc

SEQ ID NO: 69468 - DNA, 25 bp, Artificial Sequence
  Synthetic
gatttctttuctgctcaguccaacc

SEQ ID NO: 69469 - DNA, 26 bp, Artificial Sequence
  Synthetic
tggtgagatgguaggtttgaactcua

SEQ ID NO: 69470 - DNA, 21 bp, Artificial Sequence
  Synthetic
gcctaccacugcacatgugag

SEQ ID NO: 69471 - DNA, 27 bp, Artificial Sequence
  Synthetic
caagaacagtgaugcagagtatagcut

SEQ ID NO: 69472 - DNA, 23 bp, Artificial Sequence
  Synthetic
aggtgtccccaguagacaaguat

SEQ ID NO: 69473 - DNA, 23 bp, Artificial Sequence
  Synthetic
tttgctgtgucctaggaaagguc

SEQ ID NO: 69474 - DNA, 22 bp, Artificial Sequence
  Synthetic
aggagactcuggttgacaguga

SEQ ID NO: 69475 - DNA, 20 bp, Artificial Sequence
  Synthetic
catcagcacuagtgguggca

SEQ ID NO: 69476 - DNA, 28 bp, Artificial Sequence
  Synthetic
cttgttctgtugcacaatttcttctuca

SEQ ID NO: 69477 - DNA, 29 bp, Artificial Sequence
  Synthetic
actggcataugaaaatagaagaactucgt

SEQ ID NO: 69478 - DNA, 27 bp, Artificial Sequence
  Synthetic
ctgaaatttggcuatcactgtccuact

SEQ ID NO: 69479 - DNA, 26 bp, Artificial Sequence
  Synthetic
gctgctatgtcutcatagctcgttut

SEQ ID NO: 69480 - DNA, 30 bp, Artificial Sequence
  Synthetic
gaataactgagtauacctgaagttgcacut

SEQ ID NO: 69481 - DNA, 27 bp, Artificial Sequence
  Synthetic
agtacagagcugaaaaccagattctut

SEQ ID NO: 69482 - DNA, 31 bp, Artificial Sequence
  Synthetic
ggtgatgtagauattaccaggtatttucaca

SEQ ID NO: 69483 - DNA, 28 bp, Artificial Sequence
  Synthetic
agttgcttttcugtttacttagguggaa

SEQ ID NO: 69484 - DNA, 17 bp, Artificial Sequence
  Synthetic
gaggtgcugggccacut

SEQ ID NO: 69485 - DNA, 18 bp, Artificial Sequence
  Synthetic
cggucagccatctuccct

SEQ ID NO: 69486 - DNA, 27 bp, Artificial Sequence
  Synthetic
tcatcttgugaccagttctctactuct

SEQ ID NO: 69487 - DNA, 24 bp, Artificial Sequence
  Synthetic
ccagacugcaatgcaaauaaggga

SEQ ID NO: 69488 - DNA, 21 bp, Artificial Sequence
  Synthetic
acatagcugacctggucccat

SEQ ID NO: 69489 - DNA, 24 bp, Artificial Sequence
  Synthetic
gccttgttuctagaatggcucaga

SEQ ID NO: 69490 - DNA, 26 bp, Artificial Sequence
  Synthetic
ccagtcttgucaaacatcacagtcut

SEQ ID NO: 69491 - DNA, 21 bp, Artificial Sequence
  Synthetic
gtttcctgtcugaggcaggut

SEQ ID NO: 69492 - DNA, 22 bp, Artificial Sequence
  Synthetic
ccctttaacggauaggcagcut

SEQ ID NO: 69493 - DNA, 21 bp, Artificial Sequence
  Synthetic
gggtatcuccagcctgagcua

SEQ ID NO: 69494 - DNA, 25 bp, Artificial Sequence
  Synthetic
gaaggaaguagataaggtgcugaca

SEQ ID NO: 69495 - DNA, 24 bp, Artificial Sequence
  Synthetic
gttgcactugaatagatccgtugg

SEQ ID NO: 69496 - DNA, 21 bp, Artificial Sequence
  Synthetic
ggagggcucgttctuaaccat

SEQ ID NO: 69497 - DNA, 21 bp, Artificial Sequence
  Synthetic
gccattcucagggttggtcuc

SEQ ID NO: 69498 - DNA, 29 bp, Artificial Sequence
  Synthetic
agacacgtaaauacatttcaacactugga

SEQ ID NO: 69499 - DNA, 22 bp, Artificial Sequence
  Synthetic
agttgctuggagaccatgaugt

SEQ ID NO: 69500 - DNA, 19 bp, Artificial Sequence
  Synthetic
cctccggagugaccctcua

SEQ ID NO: 69501 - DNA, 21 bp, Artificial Sequence
  Synthetic
cggacauggagtuggagaagt

SEQ ID NO: 69502 - DNA, 21 bp, Artificial Sequence
  Synthetic
ccctgaggauctctggguaca

SEQ ID NO: 69503 - DNA, 20 bp, Artificial Sequence
  Synthetic
gacucaccggaacttgguct

SEQ ID NO: 69504 - DNA, 19 bp, Artificial Sequence
  Synthetic
cctaccgcuacacggugaa

SEQ ID NO: 69505 - DNA, 19 bp, Artificial Sequence
  Synthetic
ggcguccacgatagggaug

SEQ ID NO: 69506 - DNA, 20 bp, Artificial Sequence
  Synthetic
accacgcgguctttguacag

SEQ ID NO: 69507 - DNA, 28 bp, Artificial Sequence
  Synthetic
cacccagauttcaattctttugacaaca

SEQ ID NO: 69508 - DNA, 27 bp, Artificial Sequence
  Synthetic
gcagagaagutatatgcugaggagaat

SEQ ID NO: 69509 - DNA, 24 bp, Artificial Sequence
  Synthetic
agccttucacaaaactcatccuga

SEQ ID NO: 69510 - DNA, 18 bp, Artificial Sequence
  Synthetic
caggugctucagccacca

SEQ ID NO: 69511 - DNA, 22 bp, Artificial Sequence
  Synthetic
gtctgggtccugactctgtcua

SEQ ID NO: 69512 - DNA, 24 bp, Artificial Sequence
  Synthetic
ggatgagaugtcaagtcaguccct

SEQ ID NO: 69513 - DNA, 21 bp, Artificial Sequence
  Synthetic
atctctccccugtgacctugt

SEQ ID NO: 69514 - DNA, 21 bp, Artificial Sequence
  Synthetic
caggcuggaacttcagtgugt

SEQ ID NO: 69515 - DNA, 21 bp, Artificial Sequence
  Synthetic
ctgcctctaugctgtgctcuc

SEQ ID NO: 69516 - DNA, 20 bp, Artificial Sequence
  Synthetic
tgcuatgagguagggcacga

SEQ ID NO: 69517 - DNA, 24 bp, Artificial Sequence
  Synthetic
gtatcccguttttgccctuaagag

SEQ ID NO: 69518 - DNA, 19 bp, Artificial Sequence
  Synthetic
cactcgcucacctccugac

SEQ ID NO: 69519 - DNA, 22 bp, Artificial Sequence
  Synthetic
ggcatcccaucctcacattgut

SEQ ID NO: 69520 - DNA, 21 bp, Artificial Sequence
  Synthetic
gccaccugcttcatcttcuca

SEQ ID NO: 69521 - DNA, 19 bp, Artificial Sequence
  Synthetic
aggaggagcucttcucggt

SEQ ID NO: 69522 - DNA, 18 bp, Artificial Sequence
  Synthetic
ccacagccacgugtucct

SEQ ID NO: 69523 - DNA, 18 bp, Artificial Sequence
  Synthetic
ggtacagguggcccugga

SEQ ID NO: 69524 - DNA, 18 bp, Artificial Sequence
  Synthetic
cccugcacaacgcctcuc

SEQ ID NO: 69525 - DNA, 19 bp, Artificial Sequence
  Synthetic
gctggugacgctgactgua

SEQ ID NO: 69526 - DNA, 19 bp, Artificial Sequence
  Synthetic
gctcaccuccacctgctua

SEQ ID NO: 69527 - DNA, 19 bp, Artificial Sequence
  Synthetic
catggcccucgtctggaug

SEQ ID NO: 69528 - DNA, 20 bp, Artificial Sequence
  Synthetic
acagcagcagcutctcctug

SEQ ID NO: 69529 - DNA, 18 bp, Artificial Sequence
  Synthetic
cccctgggugctgagcua

SEQ ID NO: 69530 - DNA, 22 bp, Artificial Sequence
  Synthetic
cttttcuggcatctucccacag

SEQ ID NO: 69531 - DNA, 23 bp, Artificial Sequence
  Synthetic
tcatgccttucaagacactgcut

SEQ ID NO: 69532 - DNA, 22 bp, Artificial Sequence
  Synthetic
ccatagtctgugctctctgcug

SEQ ID NO: 69533 - DNA, 26 bp, Artificial Sequence
  Synthetic
agaatttaggtugtcaactgccaugt

SEQ ID NO: 69534 - DNA, 27 bp, Artificial Sequence
  Synthetic
acaaccataacugaacatccattucct

SEQ ID NO: 69535 - DNA, 28 bp, Artificial Sequence
  Synthetic
gtgagttaaccugcaactgattttgtut

SEQ ID NO: 69536 - DNA, 22 bp, Artificial Sequence
  Synthetic
cggagacuaggaaaccagcuct

SEQ ID NO: 69537 - DNA, 27 bp, Artificial Sequence
  Synthetic
tcctaaggaagaugtatgaagcctuga

SEQ ID NO: 69538 - DNA, 21 bp, Artificial Sequence
  Synthetic
ccccacagaccugacttcuct

SEQ ID NO: 69539 - DNA, 23 bp, Artificial Sequence
  Synthetic
gcuggaaaggaggtgtugaagaa

SEQ ID NO: 69540 - DNA, 22 bp, Artificial Sequence
  Synthetic
ggccccuttcactcacugaaat

SEQ ID NO: 69541 - DNA, 28 bp, Artificial Sequence
  Synthetic
ggttacataaatuggtccgacaacatuc

SEQ ID NO: 69542 - DNA, 27 bp, Artificial Sequence
  Synthetic
gttcggagaacugcttatttccaagua

SEQ ID NO: 69543 - DNA, 25 bp, Artificial Sequence
  Synthetic
gggagttgaatuaactagccctgut

SEQ ID NO: 69544 - DNA, 33 bp, Artificial Sequence
  Synthetic
ataaagctatataauttccaggtcacuaaagga

SEQ ID NO: 69545 - DNA, 28 bp, Artificial Sequence
  Synthetic
gccaaaauagaaggaatucgaaacaagt

SEQ ID NO: 69546 - DNA, 33 bp, Artificial Sequence
  Synthetic
tttgcctatttttacaauacatttcgaagacut

SEQ ID NO: 69547 - DNA, 27 bp, Artificial Sequence
  Synthetic
tctctttcctcacucttggtcaaacua

SEQ ID NO: 69548 - DNA, 25 bp, Artificial Sequence
  Synthetic
ttcatcattctaugcattgcccuca

SEQ ID NO: 69549 - DNA, 23 bp, Artificial Sequence
  Synthetic
agtttgccccutccaaaucaact

SEQ ID NO: 69550 - DNA, 21 bp, Artificial Sequence
  Synthetic
ctccatcugcctgtccatguc

SEQ ID NO: 69551 - DNA, 23 bp, Artificial Sequence
  Synthetic
atctggaagaugagcugacacac

SEQ ID NO: 69552 - DNA, 21 bp, Artificial Sequence
  Synthetic
ggcaccucagggacaguaaat

SEQ ID NO: 69553 - DNA, 26 bp, Artificial Sequence
  Synthetic
cacccttacatutctgcaaaatggut

SEQ ID NO: 69554 - DNA, 19 bp, Artificial Sequence
  Synthetic
cctguaaccccguaacgca

SEQ ID NO: 69555 - DNA, 22 bp, Artificial Sequence
  Synthetic
gttacagccaugacctgauggt

SEQ ID NO: 69556 - DNA, 22 bp, Artificial Sequence
  Synthetic
gccacttccugcacagatguag

SEQ ID NO: 69557 - DNA, 27 bp, Artificial Sequence
  Synthetic
cctgaaaccucttgttcugaaaaacat

SEQ ID NO: 69558 - DNA, 26 bp, Artificial Sequence
  Synthetic
ggctccaucaggaagagaaacttuaa

SEQ ID NO: 69559 - DNA, 25 bp, Artificial Sequence
  Synthetic
gtcacccuccaactgagaatagaug

SEQ ID NO: 69560 - DNA, 24 bp, Artificial Sequence
  Synthetic
ctctcactacuccttgcagttucc

SEQ ID NO: 69561 - DNA, 24 bp, Artificial Sequence
  Synthetic
tgaaatatgugccatcggttgugt

SEQ ID NO: 69562 - DNA, 23 bp, Artificial Sequence
  Synthetic
catctgtatuccccctgcttuca

SEQ ID NO: 69563 - DNA, 19 bp, Artificial Sequence
  Synthetic
cugagatgccucggcacat

SEQ ID NO: 69564 - DNA, 17 bp, Artificial Sequence
  Synthetic
cucuggcgggaagggat

SEQ ID NO: 69565 - DNA, 18 bp, Artificial Sequence
  Synthetic
acucgtgggucccgaact

SEQ ID NO: 69566 - DNA, 22 bp, Artificial Sequence
  Synthetic
gctgaagucacggaactgcaua

SEQ ID NO: 69567 - DNA, 23 bp, Artificial Sequence
  Synthetic
gggagaagcccutgaaataaugg

SEQ ID NO: 69568 - DNA, 22 bp, Artificial Sequence
  Synthetic
cctcccacaucttggtctucaa

SEQ ID NO: 69569 - DNA, 20 bp, Artificial Sequence
  Synthetic
cccagcacugcttcaucagg

SEQ ID NO: 69570 - DNA, 22 bp, Artificial Sequence
  Synthetic
cagaggaggaggguctuaccat

SEQ ID NO: 69571 - DNA, 19 bp, Artificial Sequence
  Synthetic
gcaggagaucgccaccuac

SEQ ID NO: 69572 - DNA, 19 bp, Artificial Sequence
  Synthetic
accaccctucctggcacua

SEQ ID NO: 69573 - DNA, 25 bp, Artificial Sequence
  Synthetic
ctggtgtgaauggcattctctttut

SEQ ID NO: 69574 - DNA, 22 bp, Artificial Sequence
  Synthetic
ctgatcagucttagggcaucca

SEQ ID NO: 69575 - DNA, 25 bp, Artificial Sequence
  Synthetic
actacaguccctactucaagaccat

SEQ ID NO: 69576 - DNA, 20 bp, Artificial Sequence
  Synthetic
gagagcgugagggtgtcauc

SEQ ID NO: 69577 - DNA, 20 bp, Artificial Sequence
  Synthetic
gcacugggagtgcucaaagt

SEQ ID NO: 69578 - DNA, 23 bp, Artificial Sequence
  Synthetic
ggtgagutacacttttugcccat

SEQ ID NO: 69579 - DNA, 20 bp, Artificial Sequence
  Synthetic
ctgaggcccugatgctauct

SEQ ID NO: 69580 - DNA, 20 bp, Artificial Sequence
  Synthetic
cgacguggctcuagaggaat

SEQ ID NO: 69581 - DNA, 23 bp, Artificial Sequence
  Synthetic
caaggagcucagagaggttucaa

SEQ ID NO: 69582 - DNA, 21 bp, Artificial Sequence
  Synthetic
ccaccttugaggtgaguccaa

SEQ ID NO: 69583 - DNA, 24 bp, Artificial Sequence
  Synthetic
tggctctcutgatatctgguccat

SEQ ID NO: 69584 - DNA, 19 bp, Artificial Sequence
  Synthetic
aaggacuccucccccagaa

SEQ ID NO: 69585 - DNA, 23 bp, Artificial Sequence
  Synthetic
cttttgtctauggtggctgugga

SEQ ID NO: 69586 - DNA, 21 bp, Artificial Sequence
  Synthetic
cugtggaaucacagcccagat

SEQ ID NO: 69587 - DNA, 22 bp, Artificial Sequence
  Synthetic
gcagatgggacacugggattut

SEQ ID NO: 69588 - DNA, 22 bp, Artificial Sequence
  Synthetic
ggatggagcaguggttgaugat

SEQ ID NO: 69589 - DNA, 20 bp, Artificial Sequence
  Synthetic
tcttcccacccgugtgttuc

SEQ ID NO: 69590 - DNA, 19 bp, Artificial Sequence
  Synthetic
cctcacgcgguactgtguc

SEQ ID NO: 69591 - DNA, 24 bp, Artificial Sequence
  Synthetic
ggtcagtgaggaugaggaagauca

SEQ ID NO: 69592 - DNA, 22 bp, Artificial Sequence
  Synthetic
tggagaacccguagtgcaaauc

SEQ ID NO: 69593 - DNA, 21 bp, Artificial Sequence
  Synthetic
gtccacacacccacucttgut

SEQ ID NO: 69594 - DNA, 20 bp, Artificial Sequence
  Synthetic
tcctccaccutggcttucag

SEQ ID NO: 69595 - DNA, 17 bp, Artificial Sequence
  Synthetic
cuggagcugggacgcat

SEQ ID NO: 69596 - DNA, 18 bp, Artificial Sequence
  Synthetic
tgccggcuctttguccag

SEQ ID NO: 69597 - DNA, 18 bp, Artificial Sequence
  Synthetic
cgguggagugacccacat

SEQ ID NO: 69598 - DNA, 19 bp, Artificial Sequence
  Synthetic
ctccccutcccuaggcact

SEQ ID NO: 69599 - DNA, 20 bp, Artificial Sequence
  Synthetic
ccgacgagcaggacutcauc

SEQ ID NO: 69600 - DNA, 21 bp, Artificial Sequence
  Synthetic
cccgcttucagggatctugag

SEQ ID NO: 69601 - DNA, 21 bp, Artificial Sequence
  Synthetic
ccttcctaaguccgcttcugg

SEQ ID NO: 69602 - DNA, 28 bp, Artificial Sequence
  Synthetic
tctaacgcuctcataatcaugacaaagg

SEQ ID NO: 69603 - DNA, 28 bp, Artificial Sequence
  Synthetic
acgtgaaguatgtcatgtuggaagaaaa

SEQ ID NO: 69604 - DNA, 25 bp, Artificial Sequence
  Synthetic
gaaaggaagaagacuacagggcaua

SEQ ID NO: 69605 - DNA, 27 bp, Artificial Sequence
  Synthetic
gtgacctgccuactaattcccataaut

SEQ ID NO: 69606 - DNA, 23 bp, Artificial Sequence
  Synthetic
tctacagcacucctctggtuact

SEQ ID NO: 69607 - DNA, 21 bp, Artificial Sequence
  Synthetic
tguaaccuccaccccaagaga

SEQ ID NO: 69608 - DNA, 23 bp, Artificial Sequence
  Synthetic
tttttgauggcagcattcgaugg

SEQ ID NO: 69609 - DNA, 27 bp, Artificial Sequence
  Synthetic
acagcggtugacatctaatattugaca

SEQ ID NO: 69610 - DNA, 24 bp, Artificial Sequence
  Synthetic
tgggtacaccaugctttttgauga

SEQ ID NO: 69611 - DNA, 24 bp, Artificial Sequence
  Synthetic
ttctccataucggccttuaccaac

SEQ ID NO: 69612 - DNA, 22 bp, Artificial Sequence
  Synthetic
tgttggucccagccttgttuaa

SEQ ID NO: 69613 - DNA, 23 bp, Artificial Sequence
  Synthetic
ggagttcuaagccaaucacccaa

SEQ ID NO: 69614 - DNA, 20 bp, Artificial Sequence
  Synthetic
ccacugcgaagaagacguca

SEQ ID NO: 69615 - DNA, 28 bp, Artificial Sequence
  Synthetic
agtgagggaugcatgttccattattuag

SEQ ID NO: 69616 - DNA, 23 bp, Artificial Sequence
  Synthetic
cccaaaggaaggcauggtaguag

SEQ ID NO: 69617 - DNA, 20 bp, Artificial Sequence
  Synthetic
gagccgttgutcgagcagua

SEQ ID NO: 69618 - DNA, 28 bp, Artificial Sequence
  Synthetic
caaggaacatctugcgatattatgcaut

SEQ ID NO: 69619 - DNA, 27 bp, Artificial Sequence
  Synthetic
caaagcattacugaccttaaacagcut

SEQ ID NO: 69620 - DNA, 28 bp, Artificial Sequence
  Synthetic
cttttggccagautaagaaagaagtuga

SEQ ID NO: 69621 - DNA, 20 bp, Artificial Sequence
  Synthetic
gutgttcauagggcccacca

SEQ ID NO: 69622 - DNA, 28 bp, Artificial Sequence
  Synthetic
ttcataggtttuaggtctacttccucca

SEQ ID NO: 69623 - DNA, 27 bp, Artificial Sequence
  Synthetic
gtcagtgatagcutcagaaagttgcua

SEQ ID NO: 69624 - DNA, 28 bp, Artificial Sequence
  Synthetic
ggttaaguacaggattattcatcugcct

SEQ ID NO: 69625 - DNA, 28 bp, Artificial Sequence
  Synthetic
ccaaggaaaaacutcacactatugaaca

SEQ ID NO: 69626 - DNA, 24 bp, Artificial Sequence
  Synthetic
catccgaauccatcugaagagcat

SEQ ID NO: 69627 - DNA, 29 bp, Artificial Sequence
  Synthetic
ggagaccuggaaaacagaatcuaaaacaa

SEQ ID NO: 69628 - DNA, 27 bp, Artificial Sequence
  Synthetic
tctaagtgccucattttcaucaaggaa

SEQ ID NO: 69629 - DNA, 33 bp, Artificial Sequence
  Synthetic
attaaattggatattuttcagggagtatauggt

SEQ ID NO: 69630 - DNA, 28 bp, Artificial Sequence
  Synthetic
ggacagttcuagagcttttcuaaccaat

SEQ ID NO: 69631 - DNA, 29 bp, Artificial Sequence
  Synthetic
gaagaagatgauccaattatggtagcugt

SEQ ID NO: 69632 - DNA, 26 bp, Artificial Sequence
  Synthetic
aggaaagaaatgcugaaaatgccauc

SEQ ID NO: 69633 - DNA, 28 bp, Artificial Sequence
  Synthetic
gcctugagaaaaggactacatucagaaa

SEQ ID NO: 69634 - DNA, 24 bp, Artificial Sequence
  Synthetic
aagaggttgttugcctttgtccua

SEQ ID NO: 69635 - DNA, 26 bp, Artificial Sequence
  Synthetic
agatcctttaaaugaggaggagggut

SEQ ID NO: 69636 - DNA, 23 bp, Artificial Sequence
  Synthetic
acaggcaaagggugtgtaugaaa

SEQ ID NO: 69637 - DNA, 29 bp, Artificial Sequence
  Synthetic
acaataaaccaggutcaaatactcacuga

SEQ ID NO: 69638 - DNA, 19 bp, Artificial Sequence
  Synthetic
cagaugcaccgacugcaag

SEQ ID NO: 69639 - DNA, 22 bp, Artificial Sequence
  Synthetic
ttcccagtgucttagccctgua

SEQ ID NO: 69640 - DNA, 22 bp, Artificial Sequence
  Synthetic
tctcagacacuggagatgguga

SEQ ID NO: 69641 - DNA, 21 bp, Artificial Sequence
  Synthetic
ctctgggacccaaaugtggua

SEQ ID NO: 69642 - DNA, 21 bp, Artificial Sequence
  Synthetic
gggctcacacugcaacaguat

SEQ ID NO: 69643 - DNA, 26 bp, Artificial Sequence
  Synthetic
caucagcacaaaaccaaacucaaact

SEQ ID NO: 69644 - DNA, 27 bp, Artificial Sequence
  Synthetic
ccaagtatcaaagugttcaactgagug

SEQ ID NO: 69645 - DNA, 28 bp, Artificial Sequence
  Synthetic
ctttttactatggtuccctcagagacut

SEQ ID NO: 69646 - DNA, 23 bp, Artificial Sequence
  Synthetic
cagggtgttuaggagatgaccut

SEQ ID NO: 69647 - DNA, 20 bp, Artificial Sequence
  Synthetic
catctgtgugctggtgcuct

SEQ ID NO: 69648 - DNA, 19 bp, Artificial Sequence
  Synthetic
cggtcaguacacgcaugga

SEQ ID NO: 69649 - DNA, 21 bp, Artificial Sequence
  Synthetic
ccaccaauacagccccttcut

SEQ ID NO: 69650 - DNA, 19 bp, Artificial Sequence
  Synthetic
cggagacgagcucaugagt

SEQ ID NO: 69651 - DNA, 21 bp, Artificial Sequence
  Synthetic
caccacgcucatgagaacugt

SEQ ID NO: 69652 - DNA, 19 bp, Artificial Sequence
  Synthetic
gctcguccaggtcctcgua

SEQ ID NO: 69653 - DNA, 22 bp, Artificial Sequence
  Synthetic
gctctgaguggaggcctttuat

SEQ ID NO: 69654 - DNA, 19 bp, Artificial Sequence
  Synthetic
ccccatuccccttcccuga

SEQ ID NO: 69655 - DNA, 17 bp, Artificial Sequence
  Synthetic
ggcttgggugggacgut

SEQ ID NO: 69656 - DNA, 21 bp, Artificial Sequence
  Synthetic
ggaaugaagcaggactccugt

SEQ ID NO: 69657 - DNA, 21 bp, Artificial Sequence
  Synthetic
cacacgaaguctccgtugaag

SEQ ID NO: 69658 - DNA, 19 bp, Artificial Sequence
  Synthetic
gcccagcacacucugacaa

SEQ ID NO: 69659 - DNA, 17 bp, Artificial Sequence
  Synthetic
gcacccucgaccctgug

SEQ ID NO: 69660 - DNA, 18 bp, Artificial Sequence
  Synthetic
tctagguggctggucgga

SEQ ID NO: 69661 - DNA, 26 bp, Artificial Sequence
  Synthetic
agtgatatggatucacacagacacua

SEQ ID NO: 69662 - DNA, 24 bp, Artificial Sequence
  Synthetic
tctcaccaucactaucccaaggag

SEQ ID NO: 69663 - DNA, 22 bp, Artificial Sequence
  Synthetic
tgtgcacacaguggaaaucagt

SEQ ID NO: 69664 - DNA, 23 bp, Artificial Sequence
  Synthetic
cagcacatgugtccttctgtgua

SEQ ID NO: 69665 - DNA, 24 bp, Artificial Sequence
  Synthetic
ctttatggtcccugtggtcttcug

SEQ ID NO: 69666 - DNA, 19 bp, Artificial Sequence
  Synthetic
cccugtacctugggaccga

SEQ ID NO: 69667 - DNA, 19 bp, Artificial Sequence
  Synthetic
ctcaccccacugcctgaug

SEQ ID NO: 69668 - DNA, 23 bp, Artificial Sequence
  Synthetic
ctgggagttugagctctcagaug

SEQ ID NO: 69669 - DNA, 21 bp, Artificial Sequence
  Synthetic
tcccgacucctctgattccug

SEQ ID NO: 69670 - DNA, 21 bp, Artificial Sequence
  Synthetic
cuagggaggauggcagagagt

SEQ ID NO: 69671 - DNA, 26 bp, Artificial Sequence
  Synthetic
ctgagtcaaugaacctaatgucacca

SEQ ID NO: 69672 - DNA, 21 bp, Artificial Sequence
  Synthetic
agagctctcaucccaggtcuc

SEQ ID NO: 69673 - DNA, 20 bp, Artificial Sequence
  Synthetic
gccctucacccagacttugt

SEQ ID NO: 69674 - DNA, 22 bp, Artificial Sequence
  Synthetic
cctgcaagauaacagggucaga

SEQ ID NO: 69675 - DNA, 20 bp, Artificial Sequence
  Synthetic
ggccacugacatcccatgug

SEQ ID NO: 69676 - DNA, 21 bp, Artificial Sequence
  Synthetic
cagctgctuctgggaatccut

SEQ ID NO: 69677 - DNA, 22 bp, Artificial Sequence
  Synthetic
cagtggaatcuctggagtgguc

SEQ ID NO: 69678 - DNA, 19 bp, Artificial Sequence
  Synthetic
ctccaccgucagctucagt

SEQ ID NO: 69679 - DNA, 23 bp, Artificial Sequence
  Synthetic
ggucaccaagaactugcagaagt

SEQ ID NO: 69680 - DNA, 22 bp, Artificial Sequence
  Synthetic
acctccuccacgatggtaauga

SEQ ID NO: 69681 - DNA, 22 bp, Artificial Sequence
  Synthetic
cttugaaaagaccccggtugag

SEQ ID NO: 69682 - DNA, 23 bp, Artificial Sequence
  Synthetic
ggcgtaaacacucagcttcucat

SEQ ID NO: 69683 - DNA, 20 bp, Artificial Sequence
  Synthetic
ggaaggugtcagcucagagg

SEQ ID NO: 69684 - DNA, 21 bp, Artificial Sequence
  Synthetic
ccccactgguctctgaccaua

SEQ ID NO: 69685 - DNA, 21 bp, Artificial Sequence
  Synthetic
ccgccacuaaggagctaaugt

SEQ ID NO: 69686 - DNA, 20 bp, Artificial Sequence
  Synthetic
cacagctgcuggtagaggua

SEQ ID NO: 69687 - DNA, 17 bp, Artificial Sequence
  Synthetic
cgugggcuggaagcaga

SEQ ID NO: 69688 - DNA, 21 bp, Artificial Sequence
  Synthetic
ggccaggauttcacaaggcut

SEQ ID NO: 69689 - DNA, 19 bp, Artificial Sequence
  Synthetic
ccacaagcugctgcugaca

SEQ ID NO: 69690 - DNA, 23 bp, Artificial Sequence
  Synthetic
gtctctaguaacaaggccagguc

SEQ ID NO: 69691 - DNA, 27 bp, Artificial Sequence
  Synthetic
tgtgtgtctatgugtgtgtgtatacuc

SEQ ID NO: 69692 - DNA, 22 bp, Artificial Sequence
  Synthetic
gcaggaagtugaggagaaggug

SEQ ID NO: 69693 - DNA, 22 bp, Artificial Sequence
  Synthetic
ttcctaaccuctcccctgugaa

SEQ ID NO: 69694 - DNA, 20 bp, Artificial Sequence
  Synthetic
cacuaccacggugggaagac

SEQ ID NO: 69695 - DNA, 20 bp, Artificial Sequence
  Synthetic
gggtctgatucctccgacuc

SEQ ID NO: 69696 - DNA, 28 bp, Artificial Sequence
  Synthetic
aaagtagaagcaauctgatgaacuccaa

SEQ ID NO: 69697 - DNA, 19 bp, Artificial Sequence
  Synthetic
tccacaagggaccugcuct

SEQ ID NO: 69698 - DNA, 22 bp, Artificial Sequence
  Synthetic
cauttgucaacggacagcagat

SEQ ID NO: 69699 - DNA, 20 bp, Artificial Sequence
  Synthetic
ttctgugcccccattgtuct

SEQ ID NO: 69700 - DNA, 29 bp, Artificial Sequence
  Synthetic
tgaaauggaacaaacaatgauaagcaaca

SEQ ID NO: 69701 - DNA, 22 bp, Artificial Sequence
  Synthetic
ttaacctaacgcauggcctcut

SEQ ID NO: 69702 - DNA, 20 bp, Artificial Sequence
  Synthetic
caggtgttguaggagcgcut

SEQ ID NO: 69703 - DNA, 28 bp, Artificial Sequence
  Synthetic
catgagtttgcagugattttgctatuct

SEQ ID NO: 69704 - DNA, 17 bp, Artificial Sequence
  Synthetic
gccccugtctgctuggt

SEQ ID NO: 69705 - DNA, 18 bp, Artificial Sequence
  Synthetic
gggcaccaucaccaccuc

SEQ ID NO: 69706 - DNA, 17 bp, Artificial Sequence
  Synthetic
gctaccugggcagugga

SEQ ID NO: 69707 - DNA, 18 bp, Artificial Sequence
  Synthetic
gctgggugcagagccaua

SEQ ID NO: 69708 - DNA, 21 bp, Artificial Sequence
  Synthetic
gggagtttugccaaggcctua

SEQ ID NO: 69709 - DNA, 21 bp, Artificial Sequence
  Synthetic
gttagtgccaucagctcucgt

SEQ ID NO: 69710 - DNA, 22 bp, Artificial Sequence
  Synthetic
gtagccagccagguacatguag

SEQ ID NO: 69711 - DNA, 21 bp, Artificial Sequence
  Synthetic
gagaggacuccctgggatcut

SEQ ID NO: 69712 - DNA, 22 bp, Artificial Sequence
  Synthetic
gattgagugcagcagctctgua

SEQ ID NO: 69713 - DNA, 26 bp, Artificial Sequence
  Synthetic
ggtttggcutcatattgcugacaaaa

SEQ ID NO: 69714 - DNA, 27 bp, Artificial Sequence
  Synthetic
gtgatcaggatuggtatcaaagguagg

SEQ ID NO: 69715 - DNA, 27 bp, Artificial Sequence
  Synthetic
ctcttccaaagccutttaaaaccacut

SEQ ID NO: 69716 - DNA, 23 bp, Artificial Sequence
  Synthetic
tctcugagacagacagggaucag

SEQ ID NO: 69717 - DNA, 23 bp, Artificial Sequence
  Synthetic
aaccaggaaaaaugcccaaagug

SEQ ID NO: 69718 - DNA, 28 bp, Artificial Sequence
  Synthetic
cttggtcttttuacagtactgagtggua

SEQ ID NO: 69719 - DNA, 22 bp, Artificial Sequence
  Synthetic
gaggaucaguaacaaggcgaca

SEQ ID NO: 69720 - DNA, 17 bp, Artificial Sequence
  Synthetic
ccaccccacgucaugct

SEQ ID NO: 69721 - DNA, 18 bp, Artificial Sequence
  Synthetic
cggtggcugctgttguct

SEQ ID NO: 69722 - DNA, 24 bp, Artificial Sequence
  Synthetic
ccaaccacgutgacaaaaacauga

SEQ ID NO: 69723 - DNA, 23 bp, Artificial Sequence
  Synthetic
tcttctucagcgcttctcttucc

SEQ ID NO: 69724 - DNA, 26 bp, Artificial Sequence
  Synthetic
ttgttgaaaaaugcatgtgtgtguct

SEQ ID NO: 69725 - DNA, 28 bp, Artificial Sequence
  Synthetic
aatcgttgatcgacauactagagagcua

SEQ ID NO: 69726 - DNA, 22 bp, Artificial Sequence
  Synthetic
ctagcagutgcattcugaggga

SEQ ID NO: 69727 - DNA, 28 bp, Artificial Sequence
  Synthetic
agaagagatagaugctgaaaacgaaugg

SEQ ID NO: 69728 - DNA, 29 bp, Artificial Sequence
  Synthetic
gctcacactaucagctaattcatctctua

SEQ ID NO: 69729 - DNA, 27 bp, Artificial Sequence
  Synthetic
tgaactaaggccaaguaaagaggatug

SEQ ID NO: 69730 - DNA, 28 bp, Artificial Sequence
  Synthetic
tgtctgatgcacaauagctttcattcua

SEQ ID NO: 69731 - DNA, 23 bp, Artificial Sequence
  Synthetic
aggacacttauggctgcgttuaa

SEQ ID NO: 69732 - DNA, 20 bp, Artificial Sequence
  Synthetic
gcatctucgggcaggaugag

SEQ ID NO: 69733 - DNA, 22 bp, Artificial Sequence
  Synthetic
tgtgtagccugagtcacctgua

SEQ ID NO: 69734 - DNA, 20 bp, Artificial Sequence
  Synthetic
ctgcaaugggtaucccaacc

SEQ ID NO: 69735 - DNA, 19 bp, Artificial Sequence
  Synthetic
gccgacgucgtccttauca

SEQ ID NO: 69736 - DNA, 23 bp, Artificial Sequence
  Synthetic
accaccaggaugaccagagaaua

SEQ ID NO: 69737 - DNA, 22 bp, Artificial Sequence
  Synthetic
tgaactctccuccctactugct

SEQ ID NO: 69738 - DNA, 21 bp, Artificial Sequence
  Synthetic
gaaaatccucctggugggagt

SEQ ID NO: 69739 - DNA, 20 bp, Artificial Sequence
  Synthetic
cgaccaggugacctttugct

SEQ ID NO: 69740 - DNA, 21 bp, Artificial Sequence
  Synthetic
gaagcuggccagtatcgauct

SEQ ID NO: 69741 - DNA, 27 bp, Artificial Sequence
  Synthetic
cccacaatttagugcttcagagtttut

SEQ ID NO: 69742 - DNA, 24 bp, Artificial Sequence
  Synthetic
ccctgatctaautgtgccctctut

SEQ ID NO: 69743 - DNA, 22 bp, Artificial Sequence
  Synthetic
acctgaaguacttgccacucag

SEQ ID NO: 69744 - DNA, 22 bp, Artificial Sequence
  Synthetic
tcctcttucaacacctcucgga

SEQ ID NO: 69745 - DNA, 24 bp, Artificial Sequence
  Synthetic
gtgaaacutgcgcaaugaagaaac

SEQ ID NO: 69746 - DNA, 21 bp, Artificial Sequence
  Synthetic
cccuacacacactctugacca

SEQ ID NO: 69747 - DNA, 23 bp, Artificial Sequence
  Synthetic
ttgaagggagcggaugctttuat

SEQ ID NO: 69748 - DNA, 21 bp, Artificial Sequence
  Synthetic
tgccttguacgtgaagaugcc

SEQ ID NO: 69749 - DNA, 28 bp, Artificial Sequence
  Synthetic
ggctctaagtttutgcttgaggttaaut

SEQ ID NO: 69750 - DNA, 20 bp, Artificial Sequence
  Synthetic
gggagaaggucagccaugac

SEQ ID NO: 69751 - DNA, 22 bp, Artificial Sequence
  Synthetic
gagagggaaaucggctctucaa

SEQ ID NO: 69752 - DNA, 20 bp, Artificial Sequence
  Synthetic
cutctcacugcccaccagaa

SEQ ID NO: 69753 - DNA, 17 bp, Artificial Sequence
  Synthetic
gcggccugtctgtcuca

SEQ ID NO: 69754 - DNA, 19 bp, Artificial Sequence
  Synthetic
tgcuggtcttcuccaccga

SEQ ID NO: 69755 - DNA, 26 bp, Artificial Sequence
  Synthetic
ctataggaguagttggugacagcaaa

SEQ ID NO: 69756 - DNA, 19 bp, Artificial Sequence
  Synthetic
cccaacacagugcctguct

SEQ ID NO: 69757 - DNA, 19 bp, Artificial Sequence
  Synthetic
gcucucagcaaccccaacc

SEQ ID NO: 69758 - DNA, 21 bp, Artificial Sequence
  Synthetic
gcuggaaggucaccaacaaca

SEQ ID NO: 69759 - DNA, 22 bp, Artificial Sequence
  Synthetic
gttcauagcaccaucagcacag

SEQ ID NO: 69760 - DNA, 20 bp, Artificial Sequence
  Synthetic
gcagacgcugaaggcatcut

SEQ ID NO: 69761 - DNA, 21 bp, Artificial Sequence
  Synthetic
gggugaaggaaaggacaggug

SEQ ID NO: 69762 - DNA, 21 bp, Artificial Sequence
  Synthetic
ctuagcacccacauggaccaa

SEQ ID NO: 69763 - DNA, 21 bp, Artificial Sequence
  Synthetic
ggtgcaaggauggagtagcug

SEQ ID NO: 69764 - DNA, 21 bp, Artificial Sequence
  Synthetic
ggactggaaguaggacugcac

SEQ ID NO: 69765 - DNA, 25 bp, Artificial Sequence
  Synthetic
gccctuacaacaaaaacaagagcut

SEQ ID NO: 69766 - DNA, 20 bp, Artificial Sequence
  Synthetic
gccucaaaccctagaucgca

SEQ ID NO: 69767 - DNA, 24 bp, Artificial Sequence
  Synthetic
ttcagttucaaggcctcgattuct

SEQ ID NO: 69768 - DNA, 21 bp, Artificial Sequence
  Synthetic
ccccaucctaagtccucacga

SEQ ID NO: 69769 - DNA, 21 bp, Artificial Sequence
  Synthetic
agggtucccaagtcactcuct

SEQ ID NO: 69770 - DNA, 21 bp, Artificial Sequence
  Synthetic
gctccuggagctcatccucat

SEQ ID NO: 69771 - DNA, 22 bp, Artificial Sequence
  Synthetic
tgttaatcccugagccctgtuc

SEQ ID NO: 69772 - DNA, 22 bp, Artificial Sequence
  Synthetic
gtcagaggutgcagaaaacucc

SEQ ID NO: 69773 - DNA, 23 bp, Artificial Sequence
  Synthetic
tgaatgttugggctgatgugagt

SEQ ID NO: 69774 - DNA, 21 bp, Artificial Sequence
  Synthetic
ctccagaccccutgtgugaag

SEQ ID NO: 69775 - DNA, 21 bp, Artificial Sequence
  Synthetic
caaactgcugcctacctugag

SEQ ID NO: 69776 - DNA, 21 bp, Artificial Sequence
  Synthetic
cuggaagaagccccuagacat

SEQ ID NO: 69777 - DNA, 20 bp, Artificial Sequence
  Synthetic
cacgttgacautcgccugag

SEQ ID NO: 69778 - DNA, 21 bp, Artificial Sequence
  Synthetic
gaggagugccucagagaaacc

SEQ ID NO: 69779 - DNA, 20 bp, Artificial Sequence
  Synthetic
agggccugagaggacaagut

SEQ ID NO: 69780 - DNA, 23 bp, Artificial Sequence
  Synthetic
cttcugcaggagacagaactuga

SEQ ID NO: 69781 - DNA, 21 bp, Artificial Sequence
  Synthetic
acctcgtgutccaagcatuga

SEQ ID NO: 69782 - DNA, 22 bp, Artificial Sequence
  Synthetic
ggtgggcauacagcaatggtua

SEQ ID NO: 69783 - DNA, 20 bp, Artificial Sequence
  Synthetic
ccccttaccutgcctctguc

SEQ ID NO: 69784 - DNA, 21 bp, Artificial Sequence
  Synthetic
ggtcaggagcacauaggaugg

SEQ ID NO: 69785 - DNA, 27 bp, Artificial Sequence
  Synthetic
tgacttcttcttcutcgtcaatgacut

SEQ ID NO: 69786 - DNA, 24 bp, Artificial Sequence
  Synthetic
tctcagcaagaaagucgatgtcuc

SEQ ID NO: 69787 - DNA, 22 bp, Artificial Sequence
  Synthetic
ggctttctuccagcctttucct

SEQ ID NO: 69788 - DNA, 19 bp, Artificial Sequence
  Synthetic
agcccaccauggtcagtuc

SEQ ID NO: 69789 - DNA, 25 bp, Artificial Sequence
  Synthetic
gtgataaactcuttacgtgggcugt

SEQ ID NO: 69790 - DNA, 23 bp, Artificial Sequence
  Synthetic
cgtctgcucggcgaatttctuat

SEQ ID NO: 69791 - DNA, 19 bp, Artificial Sequence
  Synthetic
gcugaagcagucggcagag

SEQ ID NO: 69792 - DNA, 21 bp, Artificial Sequence
  Synthetic
gcaacagaugagacggugagg

SEQ ID NO: 69793 - DNA, 20 bp, Artificial Sequence
  Synthetic
ctgcaccaguccaucgaaga

SEQ ID NO: 69794 - DNA, 27 bp, Artificial Sequence
  Synthetic
acaaaaggaacggaaaguguaaaaacc

SEQ ID NO: 69795 - DNA, 26 bp, Artificial Sequence
  Synthetic
tcgagtttacuttgctttcctugagt

SEQ ID NO: 69796 - DNA, 20 bp, Artificial Sequence
  Synthetic
gctgccuggctaaggtgtuc

SEQ ID NO: 69797 - DNA, 22 bp, Artificial Sequence
  Synthetic
augtagtgaagtucggcacact

SEQ ID NO: 69798 - DNA, 21 bp, Artificial Sequence
  Synthetic
gccttctgcauccactgcuac

SEQ ID NO: 69799 - DNA, 21 bp, Artificial Sequence
  Synthetic
gacccucaccaggatctugaa

SEQ ID NO: 69800 - DNA, 18 bp, Artificial Sequence
  Synthetic
cacaagcgguccgaaguc

SEQ ID NO: 69801 - DNA, 20 bp, Artificial Sequence
  Synthetic
agatcaacucgagcgccauc

SEQ ID NO: 69802 - DNA, 22 bp, Artificial Sequence
  Synthetic
tuccccaccaaaatucaagggt

SEQ ID NO: 69803 - DNA, 26 bp, Artificial Sequence
  Synthetic
gaacttccttcutcattctgcagtug

SEQ ID NO: 69804 - DNA, 23 bp, Artificial Sequence
  Synthetic
gaccagaaaauccaaggcccaua

SEQ ID NO: 69805 - DNA, 21 bp, Artificial Sequence
  Synthetic
ccutcggcttauccaggacag

SEQ ID NO: 69806 - DNA, 22 bp, Artificial Sequence
  Synthetic
ggatctatccugtctgccucct

SEQ ID NO: 69807 - DNA, 20 bp, Artificial Sequence
  Synthetic
atgccctggugagctatguc

SEQ ID NO: 69808 - DNA, 20 bp, Artificial Sequence
  Synthetic
cccugagctgguccaaaagg

SEQ ID NO: 69809 - DNA, 21 bp, Artificial Sequence
  Synthetic
tgctgauccttcaggugagga

SEQ ID NO: 69810 - DNA, 20 bp, Artificial Sequence
  Synthetic
actggaaccccuggagcaua

SEQ ID NO: 69811 - DNA, 25 bp, Artificial Sequence
  Synthetic
ccggatccuagatgcaaagaguaag

SEQ ID NO: 69812 - DNA, 18 bp, Artificial Sequence
  Synthetic
cgucccccaggcttugag

SEQ ID NO: 69813 - DNA, 23 bp, Artificial Sequence
  Synthetic
aatctaggacacagucccugaca

SEQ ID NO: 69814 - DNA, 19 bp, Artificial Sequence
  Synthetic
aagtggcgauctccacguc

SEQ ID NO: 69815 - DNA, 22 bp, Artificial Sequence
  Synthetic
aaccccactcucctcctttcua

SEQ ID NO: 69816 - DNA, 25 bp, Artificial Sequence
  Synthetic
catttcttccgguaagctgaucaac

SEQ ID NO: 69817 - DNA, 28 bp, Artificial Sequence
  Synthetic
gcttggcaaugaaaataggaaaatgcut

SEQ ID NO: 69818 - DNA, 27 bp, Artificial Sequence
  Synthetic
tcautctgaagguaaccaaacacaaca

SEQ ID NO: 69819 - DNA, 29 bp, Artificial Sequence
  Synthetic
tcatttctaattaccgutttcctgtccut

SEQ ID NO: 69820 - DNA, 24 bp, Artificial Sequence
  Synthetic
agaagtcattugggctctcttugt

SEQ ID NO: 69821 - DNA, 22 bp, Artificial Sequence
  Synthetic
gctgatcaauggttccttuggg

SEQ ID NO: 69822 - DNA, 21 bp, Artificial Sequence
  Synthetic
ccagggctuctccgagaaaut

SEQ ID NO: 69823 - DNA, 22 bp, Artificial Sequence
  Synthetic
cgggttgucctctttacacugt

SEQ ID NO: 69824 - DNA, 25 bp, Artificial Sequence
  Synthetic
tttcagcagugtcataagtauggct

SEQ ID NO: 69825 - DNA, 21 bp, Artificial Sequence
  Synthetic
cgttttgguttgaggcaugga

SEQ ID NO: 69826 - DNA, 23 bp, Artificial Sequence
  Synthetic
cuccttctagtugaaacgagcca

SEQ ID NO: 69827 - DNA, 26 bp, Artificial Sequence
  Synthetic
ttattccggaacucatccacatctuc

SEQ ID NO: 69828 - DNA, 19 bp, Artificial Sequence
  Synthetic
cgcuacgagggtcagtuct

SEQ ID NO: 69829 - DNA, 20 bp, Artificial Sequence
  Synthetic
ggtccugacgggaaagucat

SEQ ID NO: 69830 - DNA, 21 bp, Artificial Sequence
  Synthetic
gggtgttgaagugggtctcug

SEQ ID NO: 69831 - DNA, 24 bp, Artificial Sequence
  Synthetic
cagccagtugaaatggatctucct

SEQ ID NO: 69832 - DNA, 20 bp, Artificial Sequence
  Synthetic
caggaaaugcagcgcaucaa

SEQ ID NO: 69833 - DNA, 22 bp, Artificial Sequence
  Synthetic
cagctugaggacaactgctgua

SEQ ID NO: 69834 - DNA, 22 bp, Artificial Sequence
  Synthetic
cagttccaacccaaaugcctut

SEQ ID NO: 69835 - DNA, 21 bp, Artificial Sequence
  Synthetic
gtgctaguccactggcttcug

SEQ ID NO: 69836 - DNA, 22 bp, Artificial Sequence
  Synthetic
gacgtagguagtgctugagacc

SEQ ID NO: 69837 - DNA, 25 bp, Artificial Sequence
  Synthetic
agagucaaggaacacggauaaagac

SEQ ID NO: 69838 - DNA, 24 bp, Artificial Sequence
  Synthetic
catcagagagucctcctggagaut

SEQ ID NO: 69839 - DNA, 20 bp, Artificial Sequence
  Synthetic
gggaugcagctcgtuaccac

SEQ ID NO: 69840 - DNA, 24 bp, Artificial Sequence
  Synthetic
cuaatgatggugaagcagaaagcc

SEQ ID NO: 69841 - DNA, 23 bp, Artificial Sequence
  Synthetic
tcaccctuaggcatcatcctuct

SEQ ID NO: 69842 - DNA, 23 bp, Artificial Sequence
  Synthetic
ccccagacuggacagacagaaua

SEQ ID NO: 69843 - DNA, 23 bp, Artificial Sequence
  Synthetic
ggtgaggcutatgggctttuact

SEQ ID NO: 69844 - DNA, 23 bp, Artificial Sequence
  Synthetic
gcatgagtcuggaggaccactua

SEQ ID NO: 69845 - DNA, 24 bp, Artificial Sequence
  Synthetic
ggagcttctggutgtccttcttuc

SEQ ID NO: 69846 - DNA, 21 bp, Artificial Sequence
  Synthetic
gcagatauggcagcugagcaa

SEQ ID NO: 69847 - DNA, 21 bp, Artificial Sequence
  Synthetic
cttggctuccatgacaccuga

SEQ ID NO: 69848 - DNA, 27 bp, Artificial Sequence
  Synthetic
ccaggagtuaagttttgattguccaga

SEQ ID NO: 69849 - DNA, 27 bp, Artificial Sequence
  Synthetic
cagggatactugttctgtgaactuagt

SEQ ID NO: 69850 - DNA, 20 bp, Artificial Sequence
  Synthetic
ctgtgcccgcguatactuct

SEQ ID NO: 69851 - DNA, 19 bp, Artificial Sequence
  Synthetic
ccacaaggucggcacucac

SEQ ID NO: 69852 - DNA, 20 bp, Artificial Sequence
  Synthetic
agaaccagguctccguggat

SEQ ID NO: 69853 - DNA, 19 bp, Artificial Sequence
  Synthetic
gcagaacacaggccucguc

SEQ ID NO: 69854 - DNA, 23 bp, Artificial Sequence
  Synthetic
atctgtgagcauctgtgctugaa

SEQ ID NO: 69855 - DNA, 20 bp, Artificial Sequence
  Synthetic
cctagggucacgatcuccca

SEQ ID NO: 69856 - DNA, 19 bp, Artificial Sequence
  Synthetic
ccagcuacgccggacaaua

SEQ ID NO: 69857 - DNA, 25 bp, Artificial Sequence
  Synthetic
aagatattugagaagcatgcuccga

SEQ ID NO: 69858 - DNA, 23 bp, Artificial Sequence
  Synthetic
gggatgacaucattggctactuc

SEQ ID NO: 69859 - DNA, 19 bp, Artificial Sequence
  Synthetic
gcagugaggaccccaccua

SEQ ID NO: 69860 - DNA, 23 bp, Artificial Sequence
  Synthetic
ccccaacacacaaagutctctuc

SEQ ID NO: 69861 - DNA, 23 bp, Artificial Sequence
  Synthetic
gtggcagccugaattatgaucct

SEQ ID NO: 69862 - DNA, 22 bp, Artificial Sequence
  Synthetic
cccttcctugccctcttucaat

SEQ ID NO: 69863 - DNA, 24 bp, Artificial Sequence
  Synthetic
cagaatcttucctctttccuggct

SEQ ID NO: 69864 - DNA, 20 bp, Artificial Sequence
  Synthetic
gcaccaaaccggutccugaa

SEQ ID NO: 69865 - DNA, 19 bp, Artificial Sequence
  Synthetic
ccagctucacctccgtguc

SEQ ID NO: 69866 - DNA, 25 bp, Artificial Sequence
  Synthetic
acagctgtttucacaaaacgauact

SEQ ID NO: 69867 - DNA, 28 bp, Artificial Sequence
  Synthetic
tcaacagaugctgatcaacuaaaggaaa

SEQ ID NO: 69868 - DNA, 26 bp, Artificial Sequence
  Synthetic
ctaattggctcuttagccgttcuact

SEQ ID NO: 69869 - DNA, 25 bp, Artificial Sequence
  Synthetic
acatcaggctucaagaaaaccauga

SEQ ID NO: 69870 - DNA, 28 bp, Artificial Sequence
  Synthetic
tgcagtttagaugtaattgacuccaact

SEQ ID NO: 69871 - DNA, 28 bp, Artificial Sequence
  Synthetic
gccactgtgtuaaaactttgcttaguaa

SEQ ID NO: 69872 - DNA, 26 bp, Artificial Sequence
  Synthetic
acatcaggatcuttctgcatttccut

SEQ ID NO: 69873 - DNA, 28 bp, Artificial Sequence
  Synthetic
atctgatcatccaaugagaaaactgugt

SEQ ID NO: 69874 - DNA, 29 bp, Artificial Sequence
  Synthetic
tccttgagaaatgutttcagttaggtuca

SEQ ID NO: 69875 - DNA, 28 bp, Artificial Sequence
  Synthetic
gctatgtagaatuttggagggatttugg

SEQ ID NO: 69876 - DNA, 20 bp, Artificial Sequence
  Synthetic
gggcgggaggaaucaauagt

SEQ ID NO: 69877 - DNA, 25 bp, Artificial Sequence
  Synthetic
cttgaacuaggaacagccattccut

SEQ ID NO: 69878 - DNA, 21 bp, Artificial Sequence
  Synthetic
gctgacccaaccautgcttuc

SEQ ID NO: 69879 - DNA, 23 bp, Artificial Sequence
  Synthetic
tgaggtagcggaugaactgttuc

SEQ ID NO: 69880 - DNA, 25 bp, Artificial Sequence
  Synthetic
aagacgcaagacutacaatgcatuc

SEQ ID NO: 69881 - DNA, 21 bp, Artificial Sequence
  Synthetic
agcugccaucaagagcaaagt

SEQ ID NO: 69882 - DNA, 28 bp, Artificial Sequence
  Synthetic
ctagagagtaccguaatgggttaatugg

SEQ ID NO: 69883 - DNA, 22 bp, Artificial Sequence
  Synthetic
catcacttcugcctctggguag

SEQ ID NO: 69884 - DNA, 18 bp, Artificial Sequence
  Synthetic
cgguccgaaagctgcgua

SEQ ID NO: 69885 - DNA, 27 bp, Artificial Sequence
  Synthetic
gttttcttcccagucacgagatactut

SEQ ID NO: 69886 - DNA, 21 bp, Artificial Sequence
  Synthetic
agacaugagacugggaaggct

SEQ ID NO: 69887 - DNA, 28 bp, Artificial Sequence
  Synthetic
actgctttgtttucttgttctcattcug

SEQ ID NO: 69888 - DNA, 20 bp, Artificial Sequence
  Synthetic
ttcttgcugcagccatggua

SEQ ID NO: 69889 - DNA, 19 bp, Artificial Sequence
  Synthetic
ctgccuaggtgggctucac

SEQ ID NO: 69890 - DNA, 17 bp, Artificial Sequence
  Synthetic
gtccccgcutcgaggua

SEQ ID NO: 69891 - DNA, 17 bp, Artificial Sequence
  Synthetic
gcutctucggcgagcag

SEQ ID NO: 69892 - DNA, 22 bp, Artificial Sequence
  Synthetic
ccaaaacucagcctgaccucaa

SEQ ID NO: 69893 - DNA, 21 bp, Artificial Sequence
  Synthetic
tcttcccccacugtctctcug

SEQ ID NO: 69894 - DNA, 21 bp, Artificial Sequence
  Synthetic
ccctgctccuctcactctugt

SEQ ID NO: 69895 - DNA, 24 bp, Artificial Sequence
  Synthetic
cagccaggatuatagagtctcgug

SEQ ID NO: 69896 - DNA, 21 bp, Artificial Sequence
  Synthetic
ggttcctucaagctgcccuat

SEQ ID NO: 69897 - DNA, 29 bp, Artificial Sequence
  Synthetic
acatgggaaaacauaaccttgaauaaaag

SEQ ID NO: 69898 - DNA, 23 bp, Artificial Sequence
  Synthetic
aggtctttgauttgcgtcagugt

SEQ ID NO: 69899 - DNA, 24 bp, Artificial Sequence
  Synthetic
ggagctatuccacctactgaucct

SEQ ID NO: 69900 - DNA, 22 bp, Artificial Sequence
  Synthetic
gagcugggagggaatgagatug

SEQ ID NO: 69901 - DNA, 26 bp, Artificial Sequence
  Synthetic
ctgcuatgtcttccugaaaagggaat

SEQ ID NO: 69902 - DNA, 21 bp, Artificial Sequence
  Synthetic
gggtggtgucttttcctgcua

SEQ ID NO: 69903 - DNA, 22 bp, Artificial Sequence
  Synthetic
gaacaucaccaggacuaaggca

SEQ ID NO: 69904 - DNA, 21 bp, Artificial Sequence
  Synthetic
ggctguacccatcagcaaugt

SEQ ID NO: 69905 - DNA, 22 bp, Artificial Sequence
  Synthetic
acagtctgaaaccugagggcua

SEQ ID NO: 69906 - DNA, 24 bp, Artificial Sequence
  Synthetic
agctcctacuccacttgaaaguga

SEQ ID NO: 69907 - DNA, 27 bp, Artificial Sequence
  Synthetic
acatttaatgaugagccagacgagaug

SEQ ID NO: 69908 - DNA, 22 bp, Artificial Sequence
  Synthetic
ggtgguccaggctgtacttuag

SEQ ID NO: 69909 - DNA, 21 bp, Artificial Sequence
  Synthetic
gaccugacaggacuggagaag

SEQ ID NO: 69910 - DNA, 21 bp, Artificial Sequence
  Synthetic
ggacccccaggauatgtgugt

SEQ ID NO: 69911 - DNA, 21 bp, Artificial Sequence
  Synthetic
tgactgaauccctctccuggt

SEQ ID NO: 69912 - DNA, 21 bp, Artificial Sequence
  Synthetic
gacccugacggagaacaaguc

SEQ ID NO: 69913 - DNA, 22 bp, Artificial Sequence
  Synthetic
gcactgcccugaactttctcut

SEQ ID NO: 69914 - DNA, 21 bp, Artificial Sequence
  Synthetic
ggagggutgcccatugaaaca

SEQ ID NO: 69915 - DNA, 24 bp, Artificial Sequence
  Synthetic
tgactccacucttttctgagguct

SEQ ID NO: 69916 - DNA, 20 bp, Artificial Sequence
  Synthetic
ggcctcutccaaaccugagt

SEQ ID NO: 69917 - DNA, 22 bp, Artificial Sequence
  Synthetic
tgaaaaggcuatcaugcagcca

SEQ ID NO: 69918 - DNA, 21 bp, Artificial Sequence
  Synthetic
cccaatgguccctaactucct

SEQ ID NO: 69919 - DNA, 22 bp, Artificial Sequence
  Synthetic
ctccctgatucctgagcttuct

SEQ ID NO: 69920 - DNA, 21 bp, Artificial Sequence
  Synthetic
caggtctgutacagggcucac

SEQ ID NO: 69921 - DNA, 19 bp, Artificial Sequence
  Synthetic
gacccgcuaccagtuggat

SEQ ID NO: 69922 - DNA, 21 bp, Artificial Sequence
  Synthetic
gcaggguctgcucaacagaag

SEQ ID NO: 69923 - DNA, 20 bp, Artificial Sequence
  Synthetic
tggcacggacuatgagguga

SEQ ID NO: 69924 - DNA, 20 bp, Artificial Sequence
  Synthetic
ggtcagaggcuggcagaaut

SEQ ID NO: 69925 - DNA, 24 bp, Artificial Sequence
  Synthetic
ctgggcaagauaaagtgacctcut

SEQ ID NO: 69926 - DNA, 21 bp, Artificial Sequence
  Synthetic
ctcagtctggutgctgggaua

SEQ ID NO: 69927 - DNA, 21 bp, Artificial Sequence
  Synthetic
ccaaccugcaggcaaatgtuc

SEQ ID NO: 69928 - DNA, 21 bp, Artificial Sequence
  Synthetic
cuccacugagaggaaggacac

SEQ ID NO: 69929 - DNA, 24 bp, Artificial Sequence
  Synthetic
tgaccacactucccttctacauca

SEQ ID NO: 69930 - DNA, 17 bp, Artificial Sequence
  Synthetic
gcctcctugcgcagcut

SEQ ID NO: 69931 - DNA, 17 bp, Artificial Sequence
  Synthetic
agcagagcgugcuggac

SEQ ID NO: 69932 - DNA, 21 bp, Artificial Sequence
  Synthetic
cctgcgugccttctagactug

SEQ ID NO: 69933 - DNA, 28 bp, Artificial Sequence
  Synthetic
tttaatttgcctuctcttctgtccugat

SEQ ID NO: 69934 - DNA, 19 bp, Artificial Sequence
  Synthetic
cagaagccgucacaguggt

SEQ ID NO: 69935 - DNA, 22 bp, Artificial Sequence
  Synthetic
gcgcagagacgcutttgaaaut

SEQ ID NO: 69936 - DNA, 21 bp, Artificial Sequence
  Synthetic
gccutaggtcuccagagagca

SEQ ID NO: 69937 - DNA, 28 bp, Artificial Sequence
  Synthetic
atgccaaacaautacaagaatggaucag

SEQ ID NO: 69938 - DNA, 23 bp, Artificial Sequence
  Synthetic
gccacatttugggaagctgttug

SEQ ID NO: 69939 - DNA, 21 bp, Artificial Sequence
  Synthetic
cggacautgtaccucgggaaa

SEQ ID NO: 69940 - DNA, 20 bp, Artificial Sequence
  Synthetic
agaagaggccaugcgtuagg

SEQ ID NO: 69941 - DNA, 28 bp, Artificial Sequence
  Synthetic
ctgcttttcatuttattaggcaguggaa

SEQ ID NO: 69942 - DNA, 23 bp, Artificial Sequence
  Synthetic
gcatggcacugtatgtgugaaag

SEQ ID NO: 69943 - DNA, 18 bp, Artificial Sequence
  Synthetic
catggugcggttcuccga

SEQ ID NO: 69944 - DNA, 21 bp, Artificial Sequence
  Synthetic
cagautcagatgguccggcaa

SEQ ID NO: 69945 - DNA, 28 bp, Artificial Sequence
  Synthetic
acctcacuagccttgtcaaaaaugaaat

SEQ ID NO: 69946 - DNA, 23 bp, Artificial Sequence
  Synthetic
ctgggccutgctgttaaatucaa

SEQ ID NO: 69947 - DNA, 31 bp, Artificial Sequence
  Synthetic
aacaagcataugcacatttttagaatuccat

SEQ ID NO: 69948 - DNA, 22 bp, Artificial Sequence
  Synthetic
cagcaaccauttttgugcccat

SEQ ID NO: 69949 - DNA, 25 bp, Artificial Sequence
  Synthetic
ggtggcattuacgaatcacttctuc

SEQ ID NO: 69950 - DNA, 18 bp, Artificial Sequence
  Synthetic
tgccgtgagutgcagcut

SEQ ID NO: 69951 - DNA, 18 bp, Artificial Sequence
  Synthetic
gccagggugcagtgucag

SEQ ID NO: 69952 - DNA, 22 bp, Artificial Sequence
  Synthetic
cugggccagaaaagtcugacaa

SEQ ID NO: 69953 - DNA, 20 bp, Artificial Sequence
  Synthetic
cccaccugctgcgattcuac

SEQ ID NO: 69954 - DNA, 27 bp, Artificial Sequence
  Synthetic
ctttacagacacuctcatcaaggauct

SEQ ID NO: 69955 - DNA, 27 bp, Artificial Sequence
  Synthetic
gaaaaactuaaagctcatctugggcat

SEQ ID NO: 69956 - DNA, 24 bp, Artificial Sequence
  Synthetic
gcatcttgtuggacttgatccuca

SEQ ID NO: 69957 - DNA, 29 bp, Artificial Sequence
  Synthetic
gctatgauacctcttgtgtugagaaaact

SEQ ID NO: 69958 - DNA, 22 bp, Artificial Sequence
  Synthetic
actgacuaccacacttgccuct

SEQ ID NO: 69959 - DNA, 28 bp, Artificial Sequence
  Synthetic
accagttgcttgauggtatatgacatut

SEQ ID NO: 69960 - DNA, 27 bp, Artificial Sequence
  Synthetic
gaagaaauaaaacaccacaagcaugga

SEQ ID NO: 69961 - DNA, 24 bp, Artificial Sequence
  Synthetic
ctcagattgugaaactgguggaag

SEQ ID NO: 69962 - DNA, 28 bp, Artificial Sequence
  Synthetic
ggtattcttacuagggcatagucaagga

SEQ ID NO: 69963 - DNA, 23 bp, Artificial Sequence
  Synthetic
ccaagaaagcacagcugatgaug

SEQ ID NO: 69964 - DNA, 22 bp, Artificial Sequence
  Synthetic
ctcttcuccccctttgucaaga

SEQ ID NO: 69965 - DNA, 20 bp, Artificial Sequence
  Synthetic
gcccaacccaaaccuggaut

SEQ ID NO: 69966 - DNA, 19 bp, Artificial Sequence
  Synthetic
cctgcccagguggtaguag

SEQ ID NO: 69967 - DNA, 21 bp, Artificial Sequence
  Synthetic
tgtgccagcauactgctctut

SEQ ID NO: 69968 - DNA, 22 bp, Artificial Sequence
  Synthetic
acagaacautgccuggaacact

SEQ ID NO: 69969 - DNA, 29 bp, Artificial Sequence
  Synthetic
ggttgggaaaauaggacatagctttagua

SEQ ID NO: 69970 - DNA, 21 bp, Artificial Sequence
  Synthetic
ggcctccuggtactuggaaga

SEQ ID NO: 69971 - DNA, 22 bp, Artificial Sequence
  Synthetic
tgtttttcggguctctgauggg

SEQ ID NO: 69972 - DNA, 21 bp, Artificial Sequence
  Synthetic
ctgccctcugacctcaatcug

SEQ ID NO: 69973 - DNA, 23 bp, Artificial Sequence
  Synthetic
ccucgtacacuaagagaccccaa

SEQ ID NO: 69974 - DNA, 24 bp, Artificial Sequence
  Synthetic
gctcagagagaaauaaagcuggac

SEQ ID NO: 69975 - DNA, 22 bp, Artificial Sequence
  Synthetic
tcccttggaaugggtaggguaa

SEQ ID NO: 69976 - DNA, 22 bp, Artificial Sequence
  Synthetic
gtggacctguacatcctcaugg

SEQ ID NO: 69977 - DNA, 25 bp, Artificial Sequence
  Synthetic
ctcaaatgtccagugtttccttcug

SEQ ID NO: 69978 - DNA, 22 bp, Artificial Sequence
  Synthetic
caagcacaacaucatccccauc

SEQ ID NO: 69979 - DNA, 22 bp, Artificial Sequence
  Synthetic
agaggtguctgagaagcuccat

SEQ ID NO: 69980 - DNA, 20 bp, Artificial Sequence
  Synthetic
gtgaggcagaucgcagagua

SEQ ID NO: 69981 - DNA, 21 bp, Artificial Sequence
  Synthetic
ggtgtagcugtaggtgcaguc

SEQ ID NO: 69982 - DNA, 22 bp, Artificial Sequence
  Synthetic
acaggctgaugctcttcctcua

SEQ ID NO: 69983 - DNA, 20 bp, Artificial Sequence
  Synthetic
ctcctugggccatcucacag

SEQ ID NO: 69984 - DNA, 29 bp, Artificial Sequence
  Synthetic
acaagacctgaucaaaagatgaaaatuct

SEQ ID NO: 69985 - DNA, 24 bp, Artificial Sequence
  Synthetic
ccagatgccutggaagaagaugat

SEQ ID NO: 69986 - DNA, 32 bp, Artificial Sequence
  Synthetic
ggttgaaaggagaagutctgtatttattatug

SEQ ID NO: 69987 - DNA, 26 bp, Artificial Sequence
  Synthetic
agccaactacauggattgtttugagt

SEQ ID NO: 69988 - DNA, 21 bp, Artificial Sequence
  Synthetic
cctcacuggccgtacatcaut

SEQ ID NO: 69989 - DNA, 21 bp, Artificial Sequence
  Synthetic
ctggugacaagcaugaccaag

SEQ ID NO: 69990 - DNA, 23 bp, Artificial Sequence
  Synthetic
cgagaagcaugaggaauggagat

SEQ ID NO: 69991 - DNA, 29 bp, Artificial Sequence
  Synthetic
gcttcaatggtcuccttactatgtaucag

SEQ ID NO: 69992 - DNA, 22 bp, Artificial Sequence
  Synthetic
ccctguggagagaggauaggag

SEQ ID NO: 69993 - DNA, 22 bp, Artificial Sequence
  Synthetic
tcctgggcucacactttctcua

SEQ ID NO: 69994 - DNA, 20 bp, Artificial Sequence
  Synthetic
tggcacccauaccctcatug

SEQ ID NO: 69995 - DNA, 27 bp, Artificial Sequence
  Synthetic
tctgacttcugacttctgtctguaact

SEQ ID NO: 69996 - DNA, 17 bp, Artificial Sequence
  Synthetic
ccctuggtgtcgucgct

SEQ ID NO: 69997 - DNA, 20 bp, Artificial Sequence
  Synthetic
gcagcaccauctccctctuc

SEQ ID NO: 69998 - DNA, 19 bp, Artificial Sequence
  Synthetic
cgaugaggcccttcugcat

SEQ ID NO: 69999 - DNA, 18 bp, Artificial Sequence
  Synthetic
cugaccgucaacgaggct

SEQ ID NO: 70000 - DNA, 18 bp, Artificial Sequence
  Synthetic
cctcagcgcucatcucca

SEQ ID NO: 70001 - DNA, 24 bp, Artificial Sequence
  Synthetic
gcagagaagaugcucaaggagaag

SEQ ID NO: 70002 - DNA, 20 bp, Artificial Sequence
  Synthetic
tctgccgguacaccttgtuc

SEQ ID NO: 70003 - DNA, 25 bp, Artificial Sequence
  Synthetic
acagtgtattttucagggtgagugt

SEQ ID NO: 70004 - DNA, 21 bp, Artificial Sequence
  Synthetic
ccuagccagaaagcggaucaa

SEQ ID NO: 70005 - DNA, 22 bp, Artificial Sequence
  Synthetic
gtgaagcuggtgaacaucagga

SEQ ID NO: 70006 - DNA, 23 bp, Artificial Sequence
  Synthetic
ctacttgccacccaucatgacut

SEQ ID NO: 70007 - DNA, 19 bp, Artificial Sequence
  Synthetic
gguctaccgucggaaggag

SEQ ID NO: 70008 - DNA, 23 bp, Artificial Sequence
  Synthetic
ccaaaaccccaaaucctcctcua

SEQ ID NO: 70009 - DNA, 21 bp, Artificial Sequence
  Synthetic
cacccctgutctgtgtccuac

SEQ ID NO: 70010 - DNA, 25 bp, Artificial Sequence
  Synthetic
ctaatutccccatgauacagccaga

SEQ ID NO: 70011 - DNA, 28 bp, Artificial Sequence
  Synthetic
caagtttctgagaaagugcttgtgauat

SEQ ID NO: 70012 - DNA, 26 bp, Artificial Sequence
  Synthetic
ttctggtccacuacttaccatctcut

SEQ ID NO: 70013 - DNA, 23 bp, Artificial Sequence
  Synthetic
gggacatcaccutttcgctttut

SEQ ID NO: 70014 - DNA, 21 bp, Artificial Sequence
  Synthetic
cacagggagaaugcaaggtuc

SEQ ID NO: 70015 - DNA, 21 bp, Artificial Sequence
  Synthetic
ggtcatccugatcgcttcugt

SEQ ID NO: 70016 - DNA, 19 bp, Artificial Sequence
  Synthetic
gaggcuggagucggagaac

SEQ ID NO: 70017 - DNA, 21 bp, Artificial Sequence
  Synthetic
cuttgcccaugaaacgcagat

SEQ ID NO: 70018 - DNA, 24 bp, Artificial Sequence
  Synthetic
ggatagtatgcutcatggcacugg

SEQ ID NO: 70019 - DNA, 28 bp, Artificial Sequence
  Synthetic
cctaactctuaagaagggctgcauaaaa

SEQ ID NO: 70020 - DNA, 21 bp, Artificial Sequence
  Synthetic
ctgcctccugaggttgtugat

SEQ ID NO: 70021 - DNA, 21 bp, Artificial Sequence
  Synthetic
gggaggcaccutagtgagtug

SEQ ID NO: 70022 - DNA, 32 bp, Artificial Sequence
  Synthetic
tggcaatatcagttuccaattcttttaactug

SEQ ID NO: 70023 - DNA, 26 bp, Artificial Sequence
  Synthetic
ataccttatctcutgccaccacttut

SEQ ID NO: 70024 - DNA, 24 bp, Artificial Sequence
  Synthetic
tgtgtggugagattttggtuccat

SEQ ID NO: 70025 - DNA, 29 bp, Artificial Sequence
  Synthetic
tgcagaaacuaaaagagaaagaatcugct

SEQ ID NO: 70026 - DNA, 29 bp, Artificial Sequence
  Synthetic
agaattgtataccugtaattgggtttcut

SEQ ID NO: 70027 - DNA, 24 bp, Artificial Sequence
  Synthetic
gatgctgauaggcaacggattcua

SEQ ID NO: 70028 - DNA, 28 bp, Artificial Sequence
  Synthetic
gauatttcagagauccagacaaaccact

SEQ ID NO: 70029 - DNA, 20 bp, Artificial Sequence
  Synthetic
agcgggcugaacattgucaa

SEQ ID NO: 70030 - DNA, 26 bp, Artificial Sequence
  Synthetic
tttttcacaaactucagcctccatug

SEQ ID NO: 70031 - DNA, 28 bp, Artificial Sequence
  Synthetic
ctcttcagatggautcggatgaaaugaa

SEQ ID NO: 70032 - DNA, 28 bp, Artificial Sequence
  Synthetic
tctatttcccugagacaaagtcauacca

SEQ ID NO: 70033 - DNA, 26 bp, Artificial Sequence
  Synthetic
ttttagttggcucttcgaaaugagga

SEQ ID NO: 70034 - DNA, 28 bp, Artificial Sequence
  Synthetic
aaaacgaagtgcuaaaatgtctctcuct

SEQ ID NO: 70035 - DNA, 23 bp, Artificial Sequence
  Synthetic
aucttaccaucagcacaccaaca

SEQ ID NO: 70036 - DNA, 18 bp, Artificial Sequence
  Synthetic
gaggcgugacacgtctuc

SEQ ID NO: 70037 - DNA, 20 bp, Artificial Sequence
  Synthetic
aggaaaucccatcggugcat

SEQ ID NO: 70038 - DNA, 22 bp, Artificial Sequence
  Synthetic
gggaaaugagaggcaagtucca

SEQ ID NO: 70039 - DNA, 23 bp, Artificial Sequence
  Synthetic
gtgtgagugcgagttctttctuc

SEQ ID NO: 70040 - DNA, 23 bp, Artificial Sequence
  Synthetic
ggaaagcugcaataaagugccat

SEQ ID NO: 70041 - DNA, 28 bp, Artificial Sequence
  Synthetic
caggactgtccautctaaatctcatcut

SEQ ID NO: 70042 - DNA, 21 bp, Artificial Sequence
  Synthetic
caagcucaggacatgccucaa

SEQ ID NO: 70043 - DNA, 22 bp, Artificial Sequence
  Synthetic
ccatugaaggcatgatcuccca

SEQ ID NO: 70044 - DNA, 26 bp, Artificial Sequence
  Synthetic
tgttgttcttatuctgaagcagguga

SEQ ID NO: 70045 - DNA, 27 bp, Artificial Sequence
  Synthetic
tcagtgctgaaugggataatgtcatut

SEQ ID NO: 70046 - DNA, 25 bp, Artificial Sequence
  Synthetic
caucaaaattggtucacacccagaa

SEQ ID NO: 70047 - DNA, 22 bp, Artificial Sequence
  Synthetic
aagggaatcutgccaatguggt

SEQ ID NO: 70048 - DNA, 21 bp, Artificial Sequence
  Synthetic
ggccaggguagctctttucaa

SEQ ID NO: 70049 - DNA, 27 bp, Artificial Sequence
  Synthetic
ggattgtgtgtuctgtcctcattguat

SEQ ID NO: 70050 - DNA, 21 bp, Artificial Sequence
  Synthetic
ggucaggaggctgucaaagag

SEQ ID NO: 70051 - DNA, 22 bp, Artificial Sequence
  Synthetic
cgtctucagtgcccuggaaaat

SEQ ID NO: 70052 - DNA, 21 bp, Artificial Sequence
  Synthetic
tgaagacccccugctttgtuc

SEQ ID NO: 70053 - DNA, 28 bp, Artificial Sequence
  Synthetic
ggttcttgtcauccctaactagtttcut

SEQ ID NO: 70054 - DNA, 21 bp, Artificial Sequence
  Synthetic
gctgctgaagcuctggaagug

SEQ ID NO: 70055 - DNA, 24 bp, Artificial Sequence
  Synthetic
tgctgacauctgttttctgtucct

SEQ ID NO: 70056 - DNA, 20 bp, Artificial Sequence
  Synthetic
ccattcgugctgcuagacac

SEQ ID NO: 70057 - DNA, 20 bp, Artificial Sequence
  Synthetic
ggtccauggcgattgtcuca

SEQ ID NO: 70058 - DNA, 20 bp, Artificial Sequence
  Synthetic
ggtgagggugggagtcttuc

SEQ ID NO: 70059 - DNA, 23 bp, Artificial Sequence
  Synthetic
cggcacacuacttcttgcaugat

SEQ ID NO: 70060 - DNA, 21 bp, Artificial Sequence
  Synthetic
caggcaccugtcgagtgtauc

SEQ ID NO: 70061 - DNA, 21 bp, Artificial Sequence
  Synthetic
gctgtcucaggttgcugacaa

SEQ ID NO: 70062 - DNA, 19 bp, Artificial Sequence
  Synthetic
gagggccaagacucacugg

SEQ ID NO: 70063 - DNA, 20 bp, Artificial Sequence
  Synthetic
accaaaggucgctacugcat

SEQ ID NO: 70064 - DNA, 21 bp, Artificial Sequence
  Synthetic
accttgttccucaggtccuca

SEQ ID NO: 70065 - DNA, 20 bp, Artificial Sequence
  Synthetic
ggcagugagaaggugaccat

SEQ ID NO: 70066 - DNA, 20 bp, Artificial Sequence
  Synthetic
ctgccacugacagcactcut

SEQ ID NO: 70067 - DNA, 22 bp, Artificial Sequence
  Synthetic
ggcaggaaagaaggauctggut

SEQ ID NO: 70068 - DNA, 27 bp, Artificial Sequence
  Synthetic
tgggtugatagacagtugaagaaacag

SEQ ID NO: 70069 - DNA, 23 bp, Artificial Sequence
  Synthetic
ccagcagugacaagtgtaatugt

SEQ ID NO: 70070 - DNA, 23 bp, Artificial Sequence
  Synthetic
atcctgacucacagccaagttut

SEQ ID NO: 70071 - DNA, 20 bp, Artificial Sequence
  Synthetic
aagaactgugagcggtguca

SEQ ID NO: 70072 - DNA, 22 bp, Artificial Sequence
  Synthetic
agggactauggtgagacugcat

SEQ ID NO: 70073 - DNA, 20 bp, Artificial Sequence
  Synthetic
tccctgaggucagaggucac

SEQ ID NO: 70074 - DNA, 21 bp, Artificial Sequence
  Synthetic
cccaggaucacagctgaguct

SEQ ID NO: 70075 - DNA, 20 bp, Artificial Sequence
  Synthetic
ggcgggacucacactcttut

SEQ ID NO: 70076 - DNA, 22 bp, Artificial Sequence
  Synthetic
cttcacccuggatggtgacaut

SEQ ID NO: 70077 - DNA, 21 bp, Artificial Sequence
  Synthetic
ccactgatucccctcacugat

SEQ ID NO: 70078 - DNA, 20 bp, Artificial Sequence
  Synthetic
gctccuggatgtugggacat

SEQ ID NO: 70079 - DNA, 21 bp, Artificial Sequence
  Synthetic
gagaaggcucaguccagacac

SEQ ID NO: 70080 - DNA, 22 bp, Artificial Sequence
  Synthetic
ggcattuggaaacaggcttgug

SEQ ID NO: 70081 - DNA, 22 bp, Artificial Sequence
  Synthetic
agctgugggcctgaaataugag

SEQ ID NO: 70082 - DNA, 22 bp, Artificial Sequence
  Synthetic
gggtctagggucctcatgugaa

SEQ ID NO: 70083 - DNA, 22 bp, Artificial Sequence
  Synthetic
tggtggccucttaccactcuat

SEQ ID NO: 70084 - DNA, 23 bp, Artificial Sequence
  Synthetic
gccctguggatggaaggauaaga

SEQ ID NO: 70085 - DNA, 22 bp, Artificial Sequence
  Synthetic
agcactgauggtctttgucacc

SEQ ID NO: 70086 - DNA, 23 bp, Artificial Sequence
  Synthetic
gcagtagtgucctcaagatgcug

SEQ ID NO: 70087 - DNA, 24 bp, Artificial Sequence
  Synthetic
caagctattugctgtggguaagga

SEQ ID NO: 70088 - DNA, 22 bp, Artificial Sequence
  Synthetic
ccaggagccauaccatcaccua

SEQ ID NO: 70089 - DNA, 21 bp, Artificial Sequence
  Synthetic
ccaagctcutccgtccttuct

SEQ ID NO: 70090 - DNA, 18 bp, Artificial Sequence
  Synthetic
catccagcuccacugcgt

SEQ ID NO: 70091 - DNA, 24 bp, Artificial Sequence
  Synthetic
tggagcugaaggagaagaagauca

SEQ ID NO: 70092 - DNA, 22 bp, Artificial Sequence
  Synthetic
tctcaccauccctcactcacut

SEQ ID NO: 70093 - DNA, 23 bp, Artificial Sequence
  Synthetic
cagatccagutgttctcaugcag

SEQ ID NO: 70094 - DNA, 25 bp, Artificial Sequence
  Synthetic
acattaccagguatggtgcttucag

SEQ ID NO: 70095 - DNA, 27 bp, Artificial Sequence
  Synthetic
ttcgataaaggcuagcttgttctgaut

SEQ ID NO: 70096 - DNA, 24 bp, Artificial Sequence
  Synthetic
ttgttctacutgttcggugagcat

SEQ ID NO: 70097 - DNA, 26 bp, Artificial Sequence
  Synthetic
ggtaaaaggcauacttguacccacaa

SEQ ID NO: 70098 - DNA, 30 bp, Artificial Sequence
  Synthetic
accttcaagcaaaauataagaacactucca

SEQ ID NO: 70099 - DNA, 27 bp, Artificial Sequence
  Synthetic
ccgtcaagaagaacuggcagataatut

SEQ ID NO: 70100 - DNA, 22 bp, Artificial Sequence
  Synthetic
gggaacagcuttccaaagucat

SEQ ID NO: 70101 - DNA, 21 bp, Artificial Sequence
  Synthetic
ccattcugcgagtuccaagag

SEQ ID NO: 70102 - DNA, 24 bp, Artificial Sequence
  Synthetic
catcaugaataaaccuccccggaa

SEQ ID NO: 70103 - DNA, 27 bp, Artificial Sequence
  Synthetic
gcatctctgtcutttgctaccctauac

SEQ ID NO: 70104 - DNA, 28 bp, Artificial Sequence
  Synthetic
agatactacttucatctctcaggauggg

SEQ ID NO: 70105 - DNA, 22 bp, Artificial Sequence
  Synthetic
aggtgatcauccggtttgctut

SEQ ID NO: 70106 - DNA, 24 bp, Artificial Sequence
  Synthetic
aacacagttgcugggtattcugaa

SEQ ID NO: 70107 - DNA, 27 bp, Artificial Sequence
  Synthetic
catcctgugtgtctaacauagaaagga

SEQ ID NO: 70108 - DNA, 23 bp, Artificial Sequence
  Synthetic
cccaatttgauggcaaacctgut

SEQ ID NO: 70109 - DNA, 22 bp, Artificial Sequence
  Synthetic
ggctatgaagguggtctggaug

SEQ ID NO: 70110 - DNA, 25 bp, Artificial Sequence
  Synthetic
tctcuggacaagatgtgaugagaca

SEQ ID NO: 70111 - DNA, 26 bp, Artificial Sequence
  Synthetic
gtaccttttgauctcatcctgtugct

SEQ ID NO: 70112 - DNA, 23 bp, Artificial Sequence
  Synthetic
ggtatccatcugagagcttgcut

SEQ ID NO: 70113 - DNA, 25 bp, Artificial Sequence
  Synthetic
cacattugagagagctctucaaggt

SEQ ID NO: 70114 - DNA, 23 bp, Artificial Sequence
  Synthetic
ctccctttuaccaatgcgttucc

SEQ ID NO: 70115 - DNA, 23 bp, Artificial Sequence
  Synthetic
ccccttccugtaccatcttucct

SEQ ID NO: 70116 - DNA, 21 bp, Artificial Sequence
  Synthetic
agtgcaacaagagcuccaugt

SEQ ID NO: 70117 - DNA, 20 bp, Artificial Sequence
  Synthetic
ctgaggaccugctcctcuct

SEQ ID NO: 70118 - DNA, 21 bp, Artificial Sequence
  Synthetic
gctgtggaguctcccacucat

SEQ ID NO: 70119 - DNA, 24 bp, Artificial Sequence
  Synthetic
cactctactagutgtgggtccuca

SEQ ID NO: 70120 - DNA, 26 bp, Artificial Sequence
  Synthetic
acagaagatccacaautcttcgcaut

SEQ ID NO: 70121 - DNA, 24 bp, Artificial Sequence
  Synthetic
ttgtgaccagutgtguagaaagca

SEQ ID NO: 70122 - DNA, 22 bp, Artificial Sequence
  Synthetic
caagaacgucatcagccugaca

SEQ ID NO: 70123 - DNA, 18 bp, Artificial Sequence
  Synthetic
tgcccagaagugcucacc

SEQ ID NO: 70124 - DNA, 20 bp, Artificial Sequence
  Synthetic
ccggcuactacacccucact

SEQ ID NO: 70125 - DNA, 20 bp, Artificial Sequence
  Synthetic
cgtcatccucaggccggaua

SEQ ID NO: 70126 - DNA, 22 bp, Artificial Sequence
  Synthetic
cccuacttugaggaggaggagt

SEQ ID NO: 70127 - DNA, 23 bp, Artificial Sequence
  Synthetic
gcaatgttcugtctcccctucat

SEQ ID NO: 70128 - DNA, 25 bp, Artificial Sequence
  Synthetic
caggatggaautgatggttacucct

SEQ ID NO: 70129 - DNA, 26 bp, Artificial Sequence
  Synthetic
gaaagagctaacuacaccatctguga

SEQ ID NO: 70130 - DNA, 21 bp, Artificial Sequence
  Synthetic
aatguaacccaaggctgugct

SEQ ID NO: 70131 - DNA, 27 bp, Artificial Sequence
  Synthetic
ggctcaatguaaatttcacagtctugt

SEQ ID NO: 70132 - DNA, 23 bp, Artificial Sequence
  Synthetic
ttcaccactautggctcagugac

SEQ ID NO: 70133 - DNA, 21 bp, Artificial Sequence
  Synthetic
tgtgtggauccccatcucgaa

SEQ ID NO: 70134 - DNA, 19 bp, Artificial Sequence
  Synthetic
ccuagaagggcagcaugga

SEQ ID NO: 70135 - DNA, 19 bp, Artificial Sequence
  Synthetic
cctttgtcugcccaacgug

SEQ ID NO: 70136 - DNA, 20 bp, Artificial Sequence
  Synthetic
ggattcaccaugccccuaca

SEQ ID NO: 70137 - DNA, 22 bp, Artificial Sequence
  Synthetic
gcattgaccautccctccctut

SEQ ID NO: 70138 - DNA, 28 bp, Artificial Sequence
  Synthetic
actatgtttctggaugcatctgtatguc

SEQ ID NO: 70139 - DNA, 23 bp, Artificial Sequence
  Synthetic
acatccaaccagugatctgtucc

SEQ ID NO: 70140 - DNA, 22 bp, Artificial Sequence
  Synthetic
tucgccctgauggaaaagaaga

SEQ ID NO: 70141 - DNA, 20 bp, Artificial Sequence
  Synthetic
gttggagttugggaccccut

SEQ ID NO: 70142 - DNA, 22 bp, Artificial Sequence
  Synthetic
tggtcagccacauggagaatug

SEQ ID NO: 70143 - DNA, 22 bp, Artificial Sequence
  Synthetic
tcaagagagccugatacccgua

SEQ ID NO: 70144 - DNA, 27 bp, Artificial Sequence
  Synthetic
aaggactatatccuatccacccatucc

SEQ ID NO: 70145 - DNA, 21 bp, Artificial Sequence
  Synthetic
gcaccccuccccactaauaac

SEQ ID NO: 70146 - DNA, 22 bp, Artificial Sequence
  Synthetic
tcggtcaggauctcgttcauct

SEQ ID NO: 70147 - DNA, 23 bp, Artificial Sequence
  Synthetic
cctactcugggaagctcatcucc

SEQ ID NO: 70148 - DNA, 22 bp, Artificial Sequence
  Synthetic
agatggacaccutctcctuggt

SEQ ID NO: 70149 - DNA, 20 bp, Artificial Sequence
  Synthetic
cccagttugagcagcucaag

SEQ ID NO: 70150 - DNA, 23 bp, Artificial Sequence
  Synthetic
caccaccgugatgatgatctuga

SEQ ID NO: 70151 - DNA, 21 bp, Artificial Sequence
  Synthetic
gctggtcuacactgacuccga

SEQ ID NO: 70152 - DNA, 17 bp, Artificial Sequence
  Synthetic
ctgcgccugtcgcttut

SEQ ID NO: 70153 - DNA, 17 bp, Artificial Sequence
  Synthetic
gaggagauccgcguggt

SEQ ID NO: 70154 - DNA, 17 bp, Artificial Sequence
  Synthetic
gaacgugggctgctgug

SEQ ID NO: 70155 - DNA, 18 bp, Artificial Sequence
  Synthetic
ccaccaaggccuctcuga

SEQ ID NO: 70156 - DNA, 20 bp, Artificial Sequence
  Synthetic
tgcagccggaugtcttugag

SEQ ID NO: 70157 - DNA, 18 bp, Artificial Sequence
  Synthetic
gatggcugagcgcgagua

SEQ ID NO: 70158 - DNA, 19 bp, Artificial Sequence
  Synthetic
cucgatctuggcccggaat

SEQ ID NO: 70159 - DNA, 20 bp, Artificial Sequence
  Synthetic
gagcuggaggactccacuct

SEQ ID NO: 70160 - DNA, 20 bp, Artificial Sequence
  Synthetic
gcgggaacucagtcaaccuc

SEQ ID NO: 70161 - DNA, 26 bp, Artificial Sequence
  Synthetic
agtctctgaagaugtctccaauggaa

SEQ ID NO: 70162 - DNA, 23 bp, Artificial Sequence
  Synthetic
actagtcaagucaccccaucaca

SEQ ID NO: 70163 - DNA, 24 bp, Artificial Sequence
  Synthetic
cuttagggaaauccacagagagca

SEQ ID NO: 70164 - DNA, 21 bp, Artificial Sequence
  Synthetic
ccacagccutcaucaccagaa

SEQ ID NO: 70165 - DNA, 20 bp, Artificial Sequence
  Synthetic
atgtccagugcagctcucag

SEQ ID NO: 70166 - DNA, 26 bp, Artificial Sequence
  Synthetic
gacuaaaacaaccaaaccaaacucca

SEQ ID NO: 70167 - DNA, 22 bp, Artificial Sequence
  Synthetic
ggcatttcgcautctgttguga

SEQ ID NO: 70168 - DNA, 19 bp, Artificial Sequence
  Synthetic
cgcucttacctuccaccca

SEQ ID NO: 70169 - DNA, 27 bp, Artificial Sequence
  Synthetic
gagagcgaagtutcagagactcttaut

SEQ ID NO: 70170 - DNA, 20 bp, Artificial Sequence
  Synthetic
gggagaaguacgagctggug

SEQ ID NO: 70171 - DNA, 21 bp, Artificial Sequence
  Synthetic
cggagacagacacuggguaga

SEQ ID NO: 70172 - DNA, 25 bp, Artificial Sequence
  Synthetic
gatccugtttgtgaaugacaccaag

SEQ ID NO: 70173 - DNA, 23 bp, Artificial Sequence
  Synthetic
tgcagctguactgcttttcucaa

SEQ ID NO: 70174 - DNA, 21 bp, Artificial Sequence
  Synthetic
ggtguggcccaagaaaaugga

SEQ ID NO: 70175 - DNA, 21 bp, Artificial Sequence
  Synthetic
tcatgccugggtagtgttugg

SEQ ID NO: 70176 - DNA, 28 bp, Artificial Sequence
  Synthetic
ctccttaattttccutagagcgatcuca

SEQ ID NO: 70177 - DNA, 24 bp, Artificial Sequence
  Synthetic
ctctcaatgcugcaactgctttut

SEQ ID NO: 70178 - DNA, 25 bp, Artificial Sequence
  Synthetic
ttcaacgacagcaucttcuaaacca

SEQ ID NO: 70179 - DNA, 32 bp, Artificial Sequence
  Synthetic
ataggcatatgtacautttcctttagactuag

SEQ ID NO: 70180 - DNA, 27 bp, Artificial Sequence
  Synthetic
tttaggaaccautgctctgaatugact

SEQ ID NO: 70181 - DNA, 28 bp, Artificial Sequence
  Synthetic
ccttcagaaugaacaactttgucaggat

SEQ ID NO: 70182 - DNA, 27 bp, Artificial Sequence
  Synthetic
tgcagaaaccugtctcaatgttuaact

SEQ ID NO: 70183 - DNA, 20 bp, Artificial Sequence
  Synthetic
atcatgaugacccggaugcc

SEQ ID NO: 70184 - DNA, 22 bp, Artificial Sequence
  Synthetic
agggcaggaugactggacauat

SEQ ID NO: 70185 - DNA, 22 bp, Artificial Sequence
  Synthetic
aagtggtctcugctcctgaaug

SEQ ID NO: 70186 - DNA, 22 bp, Artificial Sequence
  Synthetic
ccagccctucatgttccagtut

SEQ ID NO: 70187 - DNA, 28 bp, Artificial Sequence
  Synthetic
gcaggaauaacaacatgggataaaugag

SEQ ID NO: 70188 - DNA, 24 bp, Artificial Sequence
  Synthetic
cttccagagaaaugctagggugaa

SEQ ID NO: 70189 - DNA, 21 bp, Artificial Sequence
  Synthetic
ctgcacucaggattcccugat

SEQ ID NO: 70190 - DNA, 26 bp, Artificial Sequence
  Synthetic
ttttcctcaauccatgaccaacauct

SEQ ID NO: 70191 - DNA, 22 bp, Artificial Sequence
  Synthetic
ggaatcgagccuggtctcuaaa

SEQ ID NO: 70192 - DNA, 21 bp, Artificial Sequence
  Synthetic
gtctggaaacccugactugga

SEQ ID NO: 70193 - DNA, 29 bp, Artificial Sequence
  Synthetic
gccttatttagaaugacagcacagguaat

SEQ ID NO: 70194 - DNA, 23 bp, Artificial Sequence
  Synthetic
caggcagcaugacaagtacuagg

SEQ ID NO: 70195 - DNA, 28 bp, Artificial Sequence
  Synthetic
tgatctctgacutgaagtttttgtcugt

SEQ ID NO: 70196 - DNA, 28 bp, Artificial Sequence
  Synthetic
tgaactagaatgautagcataggccuca

SEQ ID NO: 70197 - DNA, 22 bp, Artificial Sequence
  Synthetic
ctggccuggagcttgaatttut

SEQ ID NO: 70198 - DNA, 24 bp, Artificial Sequence
  Synthetic
gaataagttugcaggactggctut

SEQ ID NO: 70199 - DNA, 21 bp, Artificial Sequence
  Synthetic
atgttcaagcucgaggtcugg

SEQ ID NO: 70200 - DNA, 18 bp, Artificial Sequence
  Synthetic
gtcgccuccgtgactucc

SEQ ID NO: 70201 - DNA, 19 bp, Artificial Sequence
  Synthetic
gaucactgcugcggacaga

SEQ ID NO: 70202 - DNA, 21 bp, Artificial Sequence
  Synthetic
actgucacccctctugaccat

SEQ ID NO: 70203 - DNA, 22 bp, Artificial Sequence
  Synthetic
cagcucagagaaagagcaguca

SEQ ID NO: 70204 - DNA, 21 bp, Artificial Sequence
  Synthetic
atcccctgaucctagcauggt

SEQ ID NO: 70205 - DNA, 22 bp, Artificial Sequence
  Synthetic
tccttacgttcucctccaccuc

SEQ ID NO: 70206 - DNA, 22 bp, Artificial Sequence
  Synthetic
gugtaagtacuccacccagcaa

SEQ ID NO: 70207 - DNA, 22 bp, Artificial Sequence
  Synthetic
agtcaactucttgcagcuccag

SEQ ID NO: 70208 - DNA, 21 bp, Artificial Sequence
  Synthetic
gggctacagugtggaguacca

SEQ ID NO: 70209 - DNA, 21 bp, Artificial Sequence
  Synthetic
gctttagcgcucaagggacut

SEQ ID NO: 70210 - DNA, 28 bp, Artificial Sequence
  Synthetic
gtcagtatgcguttgacttaaaatguga

SEQ ID NO: 70211 - DNA, 28 bp, Artificial Sequence
  Synthetic
tcgcgggctaucttccaaatttataaut

SEQ ID NO: 70212 - DNA, 20 bp, Artificial Sequence
  Synthetic
tcagcuggcgcttacaguag

SEQ ID NO: 70213 - DNA, 22 bp, Artificial Sequence
  Synthetic
gacccauctgcaguacacacat

SEQ ID NO: 70214 - DNA, 23 bp, Artificial Sequence
  Synthetic
gagcagcucaatgaacucaagac

SEQ ID NO: 70215 - DNA, 27 bp, Artificial Sequence
  Synthetic
aucagcaaaauacaagaaagagaccct

SEQ ID NO: 70216 - DNA, 29 bp, Artificial Sequence
  Synthetic
acacttatttucagaagaggacagatugg

SEQ ID NO: 70217 - DNA, 25 bp, Artificial Sequence
  Synthetic
ctctcaacuggaggacattcactut

SEQ ID NO: 70218 - DNA, 26 bp, Artificial Sequence
  Synthetic
cagcacaaaggucacaaagaaagaut

SEQ ID NO: 70219 - DNA, 27 bp, Artificial Sequence
  Synthetic
catgttgtcacaguctttgtccaaaut

SEQ ID NO: 70220 - DNA, 25 bp, Artificial Sequence
  Synthetic
gagatgaacaagaugaacagctgug

SEQ ID NO: 70221 - DNA, 25 bp, Artificial Sequence
  Synthetic
tctcttccagaaggcuctaatguga

SEQ ID NO: 70222 - DNA, 25 bp, Artificial Sequence
  Synthetic
cttagatttagugcccttcctgcut

SEQ ID NO: 70223 - DNA, 22 bp, Artificial Sequence
  Synthetic
ctactatgctgugtcccagcuc

SEQ ID NO: 70224 - DNA, 24 bp, Artificial Sequence
  Synthetic
caatacatgugagagccacctuct

SEQ ID NO: 70225 - DNA, 23 bp, Artificial Sequence
  Synthetic
ccatagaguccccctcctttcug

SEQ ID NO: 70226 - DNA, 19 bp, Artificial Sequence
  Synthetic
cttccugcctcucccacac

SEQ ID NO: 70227 - DNA, 21 bp, Artificial Sequence
  Synthetic
gtacagccaccagcautcuct

SEQ ID NO: 70228 - DNA, 20 bp, Artificial Sequence
  Synthetic
gugggcuacaagaaccccaa

SEQ ID NO: 70229 - DNA, 26 bp, Artificial Sequence
  Synthetic
ggttcctagcaguttgtcttcatcuc

SEQ ID NO: 70230 - DNA, 21 bp, Artificial Sequence
  Synthetic
ggccucagggagagguagaat

SEQ ID NO: 70231 - DNA, 23 bp, Artificial Sequence
  Synthetic
cgcttcaguaacttgttccccut

SEQ ID NO: 70232 - DNA, 20 bp, Artificial Sequence
  Synthetic
gctaatgcggugtggcuagt

SEQ ID NO: 70233 - DNA, 19 bp, Artificial Sequence
  Synthetic
tttgctagcccuggagcug

SEQ ID NO: 70234 - DNA, 17 bp, Artificial Sequence
  Synthetic
gagccgcugacgctgua

SEQ ID NO: 70235 - DNA, 22 bp, Artificial Sequence
  Synthetic
gcctacuccaagtaccucacct

SEQ ID NO: 70236 - DNA, 18 bp, Artificial Sequence
  Synthetic
ctccuccgcacucaggat

SEQ ID NO: 70237 - DNA, 17 bp, Artificial Sequence
  Synthetic
gcuggcgcacucagagg

SEQ ID NO: 70238 - DNA, 19 bp, Artificial Sequence
  Synthetic
aagatgagugcgcggtuct

SEQ ID NO: 70239 - DNA, 20 bp, Artificial Sequence
  Synthetic
agcaggagcugacaacacug

SEQ ID NO: 70240 - DNA, 21 bp, Artificial Sequence
  Synthetic
ggacacaacagguggugagat

SEQ ID NO: 70241 - DNA, 18 bp, Artificial Sequence
  Synthetic
agctcucgcagggcuaac

SEQ ID NO: 70242 - DNA, 23 bp, Artificial Sequence
  Synthetic
ctcctcctccuccttctcatuca

SEQ ID NO: 70243 - DNA, 18 bp, Artificial Sequence
  Synthetic
ggaccugcaguacgccaa

SEQ ID NO: 70244 - DNA, 20 bp, Artificial Sequence
  Synthetic
gtttcctucccaggcaguga

SEQ ID NO: 70245 - DNA, 20 bp, Artificial Sequence
  Synthetic
cctatagggccugagtgugg

SEQ ID NO: 70246 - DNA, 20 bp, Artificial Sequence
  Synthetic
tggtgucgcatccacugaag

SEQ ID NO: 70247 - DNA, 20 bp, Artificial Sequence
  Synthetic
acctacgtcucgtcgctgua

SEQ ID NO: 70248 - DNA, 20 bp, Artificial Sequence
  Synthetic
ggcaacacugctttcacuga

SEQ ID NO: 70249 - DNA, 19 bp, Artificial Sequence
  Synthetic
cctgtttcccuccctggug

SEQ ID NO: 70250 - DNA, 18 bp, Artificial Sequence
  Synthetic
ccauggcacgcaugacct

SEQ ID NO: 70251 - DNA, 17 bp, Artificial Sequence
  Synthetic
cgggccutctcgtggua

SEQ ID NO: 70252 - DNA, 22 bp, Artificial Sequence
  Synthetic
tggagagagucctgtaccacuc

SEQ ID NO: 70253 - DNA, 25 bp, Artificial Sequence
  Synthetic
gtttcttccccutgtgagtccatua

SEQ ID NO: 70254 - DNA, 26 bp, Artificial Sequence
  Synthetic
ggauaggattctttcugagggaagga

SEQ ID NO: 70255 - DNA, 26 bp, Artificial Sequence
  Synthetic
ctgttccaaaucacgattguaacgac

SEQ ID NO: 70256 - DNA, 27 bp, Artificial Sequence
  Synthetic
gggtcaaccaguttttcattacaaugg

SEQ ID NO: 70257 - DNA, 25 bp, Artificial Sequence
  Synthetic
atgactgtugatcaggtttugggaa

SEQ ID NO: 70258 - DNA, 23 bp, Artificial Sequence
  Synthetic
gttccatcucagccagacgaaua

SEQ ID NO: 70259 - DNA, 33 bp, Artificial Sequence
  Synthetic
accaaattaaaaatauggaataagtatggcaut

SEQ ID NO: 70260 - DNA, 28 bp, Artificial Sequence
  Synthetic
accttccattcutctacttttgcatuga

SEQ ID NO: 70261 - DNA, 28 bp, Artificial Sequence
  Synthetic
gttacatcagttugcaacaactctugaa

SEQ ID NO: 70262 - DNA, 21 bp, Artificial Sequence
  Synthetic
gctcattucagccgcctttut

SEQ ID NO: 70263 - DNA, 27 bp, Artificial Sequence
  Synthetic
cgaaggtctucagaaattcaatgacut

SEQ ID NO: 70264 - DNA, 22 bp, Artificial Sequence
  Synthetic
agutcagaaatugccacccagt

SEQ ID NO: 70265 - DNA, 27 bp, Artificial Sequence
  Synthetic
agaacatctcaatugcaatctgccaua

SEQ ID NO: 70266 - DNA, 24 bp, Artificial Sequence
  Synthetic
cugtatttcugagagagcggaagg

SEQ ID NO: 70267 - DNA, 27 bp, Artificial Sequence
  Synthetic
accatttagaaauaaccacagcctcut

SEQ ID NO: 70268 - DNA, 28 bp, Artificial Sequence
  Synthetic
ccatgggaaaagutgaagaattttggut

SEQ ID NO: 70269 - DNA, 24 bp, Artificial Sequence
  Synthetic
agcaaagcccutgttaagttugac

SEQ ID NO: 70270 - DNA, 26 bp, Artificial Sequence
  Synthetic
cagcaagaagacugaacagtacuact

SEQ ID NO: 70271 - DNA, 22 bp, Artificial Sequence
  Synthetic
cagactcccccutcagtacauc

SEQ ID NO: 70272 - DNA, 25 bp, Artificial Sequence
  Synthetic
ggaaagaaaaguccaggaaggcuat

SEQ ID NO: 70273 - DNA, 28 bp, Artificial Sequence
  Synthetic
gaagctggagaagaugatcaatactcug

SEQ ID NO: 70274 - DNA, 22 bp, Artificial Sequence
  Synthetic
agagatcgccaacaugtcacug

SEQ ID NO: 70275 - DNA, 24 bp, Artificial Sequence
  Synthetic
agttgcctccuctacaggaaauct

SEQ ID NO: 70276 - DNA, 20 bp, Artificial Sequence
  Synthetic
gcttaccgcauccacgugaa

SEQ ID NO: 70277 - DNA, 20 bp, Artificial Sequence
  Synthetic
atctcgaguctgcguggaac

SEQ ID NO: 70278 - DNA, 22 bp, Artificial Sequence
  Synthetic
gaaugccatucacaccagaagg

SEQ ID NO: 70279 - DNA, 19 bp, Artificial Sequence
  Synthetic
tgagccgcautcugaacga

SEQ ID NO: 70280 - DNA, 21 bp, Artificial Sequence
  Synthetic
gtgggaaagugcttgccttug

SEQ ID NO: 70281 - DNA, 26 bp, Artificial Sequence
  Synthetic
accctagattcauttccaccagcuat

SEQ ID NO: 70282 - DNA, 20 bp, Artificial Sequence
  Synthetic
gcagtccccaucatcccuga

SEQ ID NO: 70283 - DNA, 22 bp, Artificial Sequence
  Synthetic
tggacucactctguacccaaga

SEQ ID NO: 70284 - DNA, 25 bp, Artificial Sequence
  Synthetic
aattttcctugcaacgttagctgut

SEQ ID NO: 70285 - DNA, 27 bp, Artificial Sequence
  Synthetic
tgctctttttgcaaaugtttcactcuc

SEQ ID NO: 70286 - DNA, 27 bp, Artificial Sequence
  Synthetic
atgatggugaaggatgaatatgugcat

SEQ ID NO: 70287 - DNA, 23 bp, Artificial Sequence
  Synthetic
gcagtgctgguagcattagacuc

SEQ ID NO: 70288 - DNA, 24 bp, Artificial Sequence
  Synthetic
agaaacatttgutcactcccgugt

SEQ ID NO: 70289 - DNA, 27 bp, Artificial Sequence
  Synthetic
ctcactgagguttctgttatcttcuct

SEQ ID NO: 70290 - DNA, 22 bp, Artificial Sequence
  Synthetic
gcaataguaacccctgccaguc

SEQ ID NO: 70291 - DNA, 28 bp, Artificial Sequence
  Synthetic
agaaagtcaagtcauatcccatctccut

SEQ ID NO: 70292 - DNA, 28 bp, Artificial Sequence
  Synthetic
tgactccacuggttatgtcatcttuact

SEQ ID NO: 70293 - DNA, 23 bp, Artificial Sequence
  Synthetic
gggagagttuggagtcagcatug

SEQ ID NO: 70294 - DNA, 23 bp, Artificial Sequence
  Synthetic
atttcuccccaggcctactttuc

SEQ ID NO: 70295 - DNA, 20 bp, Artificial Sequence
  Synthetic
gatugagcgctccucagact

SEQ ID NO: 70296 - DNA, 22 bp, Artificial Sequence
  Synthetic
gctctcccugtggcagagauaa

SEQ ID NO: 70297 - DNA, 24 bp, Artificial Sequence
  Synthetic
gccattcttcucactggtcatucc

SEQ ID NO: 70298 - DNA, 20 bp, Artificial Sequence
  Synthetic
gtcagcccuggtuccaagaa

SEQ ID NO: 70299 - DNA, 18 bp, Artificial Sequence
  Synthetic
acugcttgctucgagcgt

SEQ ID NO: 70300 - DNA, 19 bp, Artificial Sequence
  Synthetic
ggtguccaccacacguagt

SEQ ID NO: 70301 - DNA, 26 bp, Artificial Sequence
  Synthetic
cccaugatgcttcaauaagacaaacc

SEQ ID NO: 70302 - DNA, 19 bp, Artificial Sequence
  Synthetic
ccttcugggccaggtugat

SEQ ID NO: 70303 - DNA, 18 bp, Artificial Sequence
  Synthetic
ggcuggcatccuggacac

SEQ ID NO: 70304 - DNA, 22 bp, Artificial Sequence
  Synthetic
gcaggtugtaggtcucgagaga

SEQ ID NO: 70305 - DNA, 24 bp, Artificial Sequence
  Synthetic
ccaaggaacgcaugatcatcauca

SEQ ID NO: 70306 - DNA, 18 bp, Artificial Sequence
  Synthetic
gtccugccctugaagcca

SEQ ID NO: 70307 - DNA, 18 bp, Artificial Sequence
  Synthetic
cgccaaggccuacaguga

SEQ ID NO: 70308 - DNA, 22 bp, Artificial Sequence
  Synthetic
ctgtagcaggcugtcctttuca

SEQ ID NO: 70309 - DNA, 21 bp, Artificial Sequence
  Synthetic
caaactgcugcagctcaaguc

SEQ ID NO: 70310 - DNA, 18 bp, Artificial Sequence
  Synthetic
ccagcutcuccgcaagca

SEQ ID NO: 70311 - DNA, 19 bp, Artificial Sequence
  Synthetic
cgagggcugaggaggaguc

SEQ ID NO: 70312 - DNA, 19 bp, Artificial Sequence
  Synthetic
gggtgauggtgtggucaga

SEQ ID NO: 70313 - DNA, 18 bp, Artificial Sequence
  Synthetic
cuaccgcgagagugcaga

SEQ ID NO: 70314 - DNA, 21 bp, Artificial Sequence
  Synthetic
tctccagguagauggcagaca

SEQ ID NO: 70315 - DNA, 19 bp, Artificial Sequence
  Synthetic
cggtgaugagtgcgtuccc

SEQ ID NO: 70316 - DNA, 17 bp, Artificial Sequence
  Synthetic
ccgugcagcccagacuc

SEQ ID NO: 70317 - DNA, 18 bp, Artificial Sequence
  Synthetic
ggaggcacugcguaggaa

SEQ ID NO: 70318 - DNA, 18 bp, Artificial Sequence
  Synthetic
ggccggugcagatagucc

SEQ ID NO: 70319 - DNA, 18 bp, Artificial Sequence
  Synthetic
atggccucggctgguaac

SEQ ID NO: 70320 - DNA, 18 bp, Artificial Sequence
  Synthetic
ggctgagugggctacguc

SEQ ID NO: 70321 - DNA, 22 bp, Artificial Sequence
  Synthetic
gatgtgctgutgagacctcugt

SEQ ID NO: 70322 - DNA, 19 bp, Artificial Sequence
  Synthetic
gcctgacgacucgtgcuat

SEQ ID NO: 70323 - DNA, 23 bp, Artificial Sequence
  Synthetic
tcauaaacatcucgggacaagcc

SEQ ID NO: 70324 - DNA, 24 bp, Artificial Sequence
  Synthetic
ccaccacccacaacutactaagug

SEQ ID NO: 70325 - DNA, 27 bp, Artificial Sequence
  Synthetic
ttgggagctgutaacccttaatucaat

SEQ ID NO: 70326 - DNA, 28 bp, Artificial Sequence
  Synthetic
tgtcagttccautcaaatctttcacuca

SEQ ID NO: 70327 - DNA, 22 bp, Artificial Sequence
  Synthetic
cagtgccaaucatccctgttuc

SEQ ID NO: 70328 - DNA, 28 bp, Artificial Sequence
  Synthetic
aacaactaaggaaggagutttaggcaut

SEQ ID NO: 70329 - DNA, 28 bp, Artificial Sequence
  Synthetic
gagtcagaugatcattgucagagagaac

SEQ ID NO: 70330 - DNA, 23 bp, Artificial Sequence
  Synthetic
aagacttcccccuctttctctut

SEQ ID NO: 70331 - DNA, 25 bp, Artificial Sequence
  Synthetic
ctggtaatttucctacctcctucgt

SEQ ID NO: 70332 - DNA, 28 bp, Artificial Sequence
  Synthetic
aagactgctgautgtacgttcatatuca

SEQ ID NO: 70333 - DNA, 33 bp, Artificial Sequence
  Synthetic
taaattgtaaatcttagguaatcaactggcaua

SEQ ID NO: 70334 - DNA, 20 bp, Artificial Sequence
  Synthetic
tttcctgtucccaggctugt

SEQ ID NO: 70335 - DNA, 28 bp, Artificial Sequence
  Synthetic
caatgtcattttguggtattggtcugaa

SEQ ID NO: 70336 - DNA, 27 bp, Artificial Sequence
  Synthetic
gacatacctccagutcattttccagut

SEQ ID NO: 70337 - DNA, 29 bp, Artificial Sequence
  Synthetic
tctagactccuattttatggatcugccat

SEQ ID NO: 70338 - DNA, 26 bp, Artificial Sequence
  Synthetic
tggattttctugcagagtcattucct

SEQ ID NO: 70339 - DNA, 22 bp, Artificial Sequence
  Synthetic
accgtgacuacacacaatuccc

SEQ ID NO: 70340 - DNA, 20 bp, Artificial Sequence
  Synthetic
cugcagaagggccctcuaag

SEQ ID NO: 70341 - DNA, 22 bp, Artificial Sequence
  Synthetic
cgtggcagucaccaaatacugt

SEQ ID NO: 70342 - DNA, 24 bp, Artificial Sequence
  Synthetic
ctttttgaacugcacauccaccag

SEQ ID NO: 70343 - DNA, 24 bp, Artificial Sequence
  Synthetic
ctgaagcctcutgaaggtagtgua

SEQ ID NO: 70344 - DNA, 21 bp, Artificial Sequence
  Synthetic
tcacugacccugcagagaaac

SEQ ID NO: 70345 - DNA, 22 bp, Artificial Sequence
  Synthetic
gattggcagagauctgcuacct

SEQ ID NO: 70346 - DNA, 20 bp, Artificial Sequence
  Synthetic
tugtauccccagccacgaag

SEQ ID NO: 70347 - DNA, 23 bp, Artificial Sequence
  Synthetic
ctttccagcaguctgtagccaut

SEQ ID NO: 70348 - DNA, 24 bp, Artificial Sequence
  Synthetic
ggatccagacauctccuaggaact

SEQ ID NO: 70349 - DNA, 21 bp, Artificial Sequence
  Synthetic
ccgucggagaaggaaggttuc

SEQ ID NO: 70350 - DNA, 20 bp, Artificial Sequence
  Synthetic
gcaaaaagaggugcggucag

SEQ ID NO: 70351 - DNA, 22 bp, Artificial Sequence
  Synthetic
cgccctuagccgtttcttugat

SEQ ID NO: 70352 - DNA, 22 bp, Artificial Sequence
  Synthetic
caggcacagaugtagctcucat

SEQ ID NO: 70353 - DNA, 23 bp, Artificial Sequence
  Synthetic
ccatagggutctctcuggagagg

SEQ ID NO: 70354 - DNA, 23 bp, Artificial Sequence
  Synthetic
gcagccatagugaaggactgtug

SEQ ID NO: 70355 - DNA, 22 bp, Artificial Sequence
  Synthetic
cagtccuacttccaguccaggt

SEQ ID NO: 70356 - DNA, 23 bp, Artificial Sequence
  Synthetic
tgaccttcgucgcttatgcauac

SEQ ID NO: 70357 - DNA, 21 bp, Artificial Sequence
  Synthetic
gtuaagggccccaacgguaaa

SEQ ID NO: 70358 - DNA, 21 bp, Artificial Sequence
  Synthetic
ctcacagtguccttccccaut

SEQ ID NO: 70359 - DNA, 23 bp, Artificial Sequence
  Synthetic
cccaccagtutcatcgagttcua

SEQ ID NO: 70360 - DNA, 21 bp, Artificial Sequence
  Synthetic
ccatggugccaaggagaagug

SEQ ID NO: 70361 - DNA, 21 bp, Artificial Sequence
  Synthetic
cgcucccagauggaggaagat

SEQ ID NO: 70362 - DNA, 20 bp, Artificial Sequence
  Synthetic
caggctgugccattgtctug

SEQ ID NO: 70363 - DNA, 22 bp, Artificial Sequence
  Synthetic
agatgtctggcugtttctggug

SEQ ID NO: 70364 - DNA, 22 bp, Artificial Sequence
  Synthetic
ccaaagggtuatagggcaccut

SEQ ID NO: 70365 - DNA, 22 bp, Artificial Sequence
  Synthetic
agtgtctgcuatctccctcucc

SEQ ID NO: 70366 - DNA, 26 bp, Artificial Sequence
  Synthetic
gaagattgggaggguttagcatuaca

SEQ ID NO: 70367 - DNA, 25 bp, Artificial Sequence
  Synthetic
caaaatatugggagggtctgtcuca

SEQ ID NO: 70368 - DNA, 21 bp, Artificial Sequence
  Synthetic
ggucacaagggccagaguaac

SEQ ID NO: 70369 - DNA, 25 bp, Artificial Sequence
  Synthetic
ggttgcaccutatactttgtcucct

SEQ ID NO: 70370 - DNA, 19 bp, Artificial Sequence
  Synthetic
gtggagtuggctgggtugt

SEQ ID NO: 70371 - DNA, 22 bp, Artificial Sequence
  Synthetic
tcctagcugacggcttttacug

SEQ ID NO: 70372 - DNA, 20 bp, Artificial Sequence
  Synthetic
gaagggttgugggctgauct

SEQ ID NO: 70373 - DNA, 21 bp, Artificial Sequence
  Synthetic
gctggaggcacuaatccctug

SEQ ID NO: 70374 - DNA, 17 bp, Artificial Sequence
  Synthetic
ctcgtgucccgggtgut

SEQ ID NO: 70375 - DNA, 17 bp, Artificial Sequence
  Synthetic
cctccucgggacucgac

SEQ ID NO: 70376 - DNA, 22 bp, Artificial Sequence
  Synthetic
tggcatcaucgatgtcgtacug

SEQ ID NO: 70377 - DNA, 22 bp, Artificial Sequence
  Synthetic
agatgtcagtguacgaggccua

SEQ ID NO: 70378 - DNA, 18 bp, Artificial Sequence
  Synthetic
cagggcuacagucagcgt

SEQ ID NO: 70379 - DNA, 17 bp, Artificial Sequence
  Synthetic
gcacagccgucccacug

SEQ ID NO: 70380 - DNA, 18 bp, Artificial Sequence
  Synthetic
gcaggcagaggucuccag

SEQ ID NO: 70381 - DNA, 19 bp, Artificial Sequence
  Synthetic
ccacucagggcctatuggt

SEQ ID NO: 70382 - DNA, 21 bp, Artificial Sequence
  Synthetic
ggagcccugctacctttctug

SEQ ID NO: 70383 - DNA, 17 bp, Artificial Sequence
  Synthetic
agagcaccgugccugag

SEQ ID NO: 70384 - DNA, 28 bp, Artificial Sequence
  Synthetic
gcaataactuaaacccagactgaagaug

SEQ ID NO: 70385 - DNA, 25 bp, Artificial Sequence
  Synthetic
agcagtctguaagaccaacattgut

SEQ ID NO: 70386 - DNA, 21 bp, Artificial Sequence
  Synthetic
gtcccagaccaguaatgccut

SEQ ID NO: 70387 - DNA, 22 bp, Artificial Sequence
  Synthetic
ttgccctcugacgtatctcuct

SEQ ID NO: 70388 - DNA, 23 bp, Artificial Sequence
  Synthetic
ctgctgtcguacagtcttuccaa

SEQ ID NO: 70389 - DNA, 23 bp, Artificial Sequence
  Synthetic
gccagagttcuttgaggctguaa

SEQ ID NO: 70390 - DNA, 22 bp, Artificial Sequence
  Synthetic
tcugcccaagguaagaagagat

SEQ ID NO: 70391 - DNA, 28 bp, Artificial Sequence
  Synthetic
gcactcagattugataaagaagttgcuc

SEQ ID NO: 70392 - DNA, 24 bp, Artificial Sequence
  Synthetic
actgtcgtcugggaactatacucc

SEQ ID NO: 70393 - DNA, 28 bp, Artificial Sequence
  Synthetic
gcaggtaaauggacaagaacactttuaa

SEQ ID NO: 70394 - DNA, 19 bp, Artificial Sequence
  Synthetic
acagccccaggcucgtaua

SEQ ID NO: 70395 - DNA, 21 bp, Artificial Sequence
  Synthetic
tcctaaccugtgcccttcuct

SEQ ID NO: 70396 - DNA, 22 bp, Artificial Sequence
  Synthetic
gtgttttgcuctccaccctuct

SEQ ID NO: 70397 - DNA, 25 bp, Artificial Sequence
  Synthetic
gaaatgctgaauaaggctgaggtug

SEQ ID NO: 70398 - DNA, 20 bp, Artificial Sequence
  Synthetic
caggagcgaucgttugcaac

SEQ ID NO: 70399 - DNA, 21 bp, Artificial Sequence
  Synthetic
gggagaacagggcugtaugga

SEQ ID NO: 70400 - DNA, 22 bp, Artificial Sequence
  Synthetic
ttggagaggucaggagatuggt

SEQ ID NO: 70401 - DNA, 21 bp, Artificial Sequence
  Synthetic
tctgagaggccgucgtcauaa

SEQ ID NO: 70402 - DNA, 22 bp, Artificial Sequence
  Synthetic
gagaccttcutcaccagcucac

SEQ ID NO: 70403 - DNA, 18 bp, Artificial Sequence
  Synthetic
ggctgucaaccgcgucat

SEQ ID NO: 70404 - DNA, 33 bp, Artificial Sequence
  Synthetic
atgctactcuagaactataaacacaauagaagt

SEQ ID NO: 70405 - DNA, 28 bp, Artificial Sequence
  Synthetic
aggcaaatuaaaagactaaccaguggat

SEQ ID NO: 70406 - DNA, 21 bp, Artificial Sequence
  Synthetic
acacgtgtugatgttcaccut

SEQ ID NO: 70407 - DNA, 18 bp, Artificial Sequence
  Synthetic
ggcacutagucgggcact

SEQ ID NO: 70408 - DNA, 28 bp, Artificial Sequence
  Synthetic
ggtcttcctcaugtttcttcacaattuc

SEQ ID NO: 70409 - DNA, 29 bp, Artificial Sequence
  Synthetic
gacatgcauaccagtctagatacauacat

SEQ ID NO: 70410 - DNA, 29 bp, Artificial Sequence
  Synthetic
gagaattaatgauactggcactagauggt

SEQ ID NO: 70411 - DNA, 27 bp, Artificial Sequence
  Synthetic
gagttgtgattcucattgctggattut

SEQ ID NO: 70412 - DNA, 22 bp, Artificial Sequence
  Synthetic
tggcttgguttgaagaagguga

SEQ ID NO: 70413 - DNA, 28 bp, Artificial Sequence
  Synthetic
cccgcaaacauatttttacucaacacat

SEQ ID NO: 70414 - DNA, 21 bp, Artificial Sequence
  Synthetic
tcugauggagaggagcacaca

SEQ ID NO: 70415 - DNA, 25 bp, Artificial Sequence
  Synthetic
agaauaaagggaagaaagucgccat

SEQ ID NO: 70416 - DNA, 25 bp, Artificial Sequence
  Synthetic
caatgtcaauacaacatgggcauct

SEQ ID NO: 70417 - DNA, 28 bp, Artificial Sequence
  Synthetic
cgatagctctcauttcacattctggtua

SEQ ID NO: 70418 - DNA, 28 bp, Artificial Sequence
  Synthetic
aagcattaagaguatcaacagtgcugaa

SEQ ID NO: 70419 - DNA, 23 bp, Artificial Sequence
  Synthetic
tgactcacugtctagctctugct

SEQ ID NO: 70420 - DNA, 25 bp, Artificial Sequence
  Synthetic
gagcagaaggcautatcacagauca

SEQ ID NO: 70421 - DNA, 24 bp, Artificial Sequence
  Synthetic
gggatttagtugagccttacguct

SEQ ID NO: 70422 - DNA, 20 bp, Artificial Sequence
  Synthetic
gaagacagaccggcugctua

SEQ ID NO: 70423 - DNA, 26 bp, Artificial Sequence
  Synthetic
gtcactaaaguacagtgtcactugct

SEQ ID NO: 70424 - DNA, 22 bp, Artificial Sequence
  Synthetic
gggatctuccagtgggatcugt

SEQ ID NO: 70425 - DNA, 21 bp, Artificial Sequence
  Synthetic
cctctgguaacgtcctctucc

SEQ ID NO: 70426 - DNA, 20 bp, Artificial Sequence
  Synthetic
tgcatcuccaggtcagcuct

SEQ ID NO: 70427 - DNA, 24 bp, Artificial Sequence
  Synthetic
tgtgatcaggaugggtgtctcaua

SEQ ID NO: 70428 - DNA, 22 bp, Artificial Sequence
  Synthetic
gatctccggugtacacaagcuc

SEQ ID NO: 70429 - DNA, 23 bp, Artificial Sequence
  Synthetic
acccacgagucttctactcacut

SEQ ID NO: 70430 - DNA, 20 bp, Artificial Sequence
  Synthetic
gcagaaccccaaugcuaagg

SEQ ID NO: 70431 - DNA, 20 bp, Artificial Sequence
  Synthetic
ccctcugaccacctgtgcua

SEQ ID NO: 70432 - DNA, 20 bp, Artificial Sequence
  Synthetic
ccaccctcugactggccuat

SEQ ID NO: 70433 - DNA, 18 bp, Artificial Sequence
  Synthetic
gagagccgggauccccua

SEQ ID NO: 70434 - DNA, 31 bp, Artificial Sequence
  Synthetic
gcataagcttgutttaaacaattccuaacct

SEQ ID NO: 70435 - DNA, 20 bp, Artificial Sequence
  Synthetic
aggctggaaugcaagcucat

SEQ ID NO: 70436 - DNA, 21 bp, Artificial Sequence
  Synthetic
gtctcgagcccugtgatucaa

SEQ ID NO: 70437 - DNA, 21 bp, Artificial Sequence
  Synthetic
gccaaggaaguccccaaguag

SEQ ID NO: 70438 - DNA, 28 bp, Artificial Sequence
  Synthetic
ccttctctcatuaggtattgcaaaugct

SEQ ID NO: 70439 - DNA, 28 bp, Artificial Sequence
  Synthetic
caggctcttttuctgcatgcaatatuat

SEQ ID NO: 70440 - DNA, 24 bp, Artificial Sequence
  Synthetic
tgugggagacagagctatugacaa

SEQ ID NO: 70441 - DNA, 23 bp, Artificial Sequence
  Synthetic
tcacagtutcctccaugcaaaca

SEQ ID NO: 70442 - DNA, 22 bp, Artificial Sequence
  Synthetic
cataatgccucaccucagcaac

SEQ ID NO: 70443 - DNA, 25 bp, Artificial Sequence
  Synthetic
gaaccacacautgattcactgtuca

SEQ ID NO: 70444 - DNA, 22 bp, Artificial Sequence
  Synthetic
gaactgcucggatctgcucaat

SEQ ID NO: 70445 - DNA, 22 bp, Artificial Sequence
  Synthetic
gaggctacugtaatcgcuaccc

SEQ ID NO: 70446 - DNA, 20 bp, Artificial Sequence
  Synthetic
ccaaaacggutggcatuccc

SEQ ID NO: 70447 - DNA, 24 bp, Artificial Sequence
  Synthetic
gacctttcaacccuctctgatucc

SEQ ID NO: 70448 - DNA, 21 bp, Artificial Sequence
  Synthetic
tgcattcauggacacccaugt

SEQ ID NO: 70449 - DNA, 20 bp, Artificial Sequence
  Synthetic
gctgcccauggtgactucag

SEQ ID NO: 70450 - DNA, 27 bp, Artificial Sequence
  Synthetic
gggagatauaggacagagtcagtaauc

SEQ ID NO: 70451 - DNA, 25 bp, Artificial Sequence
  Synthetic
gaaggtctctcaugcttcttctgut

SEQ ID NO: 70452 - DNA, 23 bp, Artificial Sequence
  Synthetic
acactcaccauctctcctttgug

SEQ ID NO: 70453 - DNA, 26 bp, Artificial Sequence
  Synthetic
tgggaatcactucttcatctgcttut

SEQ ID NO: 70454 - DNA, 21 bp, Artificial Sequence
  Synthetic
gggaacagggcucagggatua

SEQ ID NO: 70455 - DNA, 24 bp, Artificial Sequence
  Synthetic
ctccccctcaucagactcttttuc

SEQ ID NO: 70456 - DNA, 24 bp, Artificial Sequence
  Synthetic
caggaucacagagggttauagggt

SEQ ID NO: 70457 - DNA, 23 bp, Artificial Sequence
  Synthetic
ctgccaccccautttcttgttuc

SEQ ID NO: 70458 - DNA, 21 bp, Artificial Sequence
  Synthetic
cctcagagucacccugaagga

SEQ ID NO: 70459 - DNA, 28 bp, Artificial Sequence
  Synthetic
ggcttcatagtucttggctcatatttut

SEQ ID NO: 70460 - DNA, 22 bp, Artificial Sequence
  Synthetic
gaagaacccugggaagacacut

SEQ ID NO: 70461 - DNA, 22 bp, Artificial Sequence
  Synthetic
ctaaaggugagcaagccttguc

SEQ ID NO: 70462 - DNA, 20 bp, Artificial Sequence
  Synthetic
ggtctccacacucacccuct

SEQ ID NO: 70463 - DNA, 23 bp, Artificial Sequence
  Synthetic
cagcacagguctcactgatuacc

SEQ ID NO: 70464 - DNA, 22 bp, Artificial Sequence
  Synthetic
aacctcagcutgaccucagaac

SEQ ID NO: 70465 - DNA, 22 bp, Artificial Sequence
  Synthetic
cctgatctgcuccacctaccut

SEQ ID NO: 70466 - DNA, 21 bp, Artificial Sequence
  Synthetic
cttcggagagaccutgaggug

SEQ ID NO: 70467 - DNA, 21 bp, Artificial Sequence
  Synthetic
ctgtccgacugacttggctua

SEQ ID NO: 70468 - DNA, 18 bp, Artificial Sequence
  Synthetic
guggcguccacgaagaca

SEQ ID NO: 70469 - DNA, 18 bp, Artificial Sequence
  Synthetic
cgcaagcugacctuccgt

SEQ ID NO: 70470 - DNA, 21 bp, Artificial Sequence
  Synthetic
ctggaagagcgagauggtcug

SEQ ID NO: 70471 - DNA, 21 bp, Artificial Sequence
  Synthetic
ctcaagaaagggcugcugagt

SEQ ID NO: 70472 - DNA, 21 bp, Artificial Sequence
  Synthetic
ctgtacccugtcacagcctuc

SEQ ID NO: 70473 - DNA, 24 bp, Artificial Sequence
  Synthetic
gggcagaagcugagtatcuacaat

SEQ ID NO: 70474 - DNA, 17 bp, Artificial Sequence
  Synthetic
gccgccaggcucttcug

SEQ ID NO: 70475 - DNA, 17 bp, Artificial Sequence
  Synthetic
gcgcugaaggcgagcut

SEQ ID NO: 70476 - DNA, 21 bp, Artificial Sequence
  Synthetic
gcctcctccutctgcttcuca

SEQ ID NO: 70477 - DNA, 19 bp, Artificial Sequence
  Synthetic
cucccugcaggaggaacac

SEQ ID NO: 70478 - DNA, 18 bp, Artificial Sequence
  Synthetic
ccgtgtguacctgggcut

SEQ ID NO: 70479 - DNA, 19 bp, Artificial Sequence
  Synthetic
cuccgagtcauggcaacga

SEQ ID NO: 70480 - DNA, 25 bp, Artificial Sequence
  Synthetic
ggacacacgaaggcauatattuggt

SEQ ID NO: 70481 - DNA, 24 bp, Artificial Sequence
  Synthetic
gaagtacctggucttagcatcugg

SEQ ID NO: 70482 - DNA, 22 bp, Artificial Sequence
  Synthetic
gcagcaaagacutccgaatucc

SEQ ID NO: 70483 - DNA, 21 bp, Artificial Sequence
  Synthetic
cgcttgccucagaacaactuc

SEQ ID NO: 70484 - DNA, 20 bp, Artificial Sequence
  Synthetic
ggaaagagutgcugcaccag

SEQ ID NO: 70485 - DNA, 19 bp, Artificial Sequence
  Synthetic
cacatccaucggcgcttug

SEQ ID NO: 70486 - DNA, 23 bp, Artificial Sequence
  Synthetic
ccauctcagtgtucaaggcagat

SEQ ID NO: 70487 - DNA, 18 bp, Artificial Sequence
  Synthetic
tctccucctccgugcgaa

SEQ ID NO: 70488 - DNA, 20 bp, Artificial Sequence
  Synthetic
gatgtggucacggatcugct

SEQ ID NO: 70489 - DNA, 24 bp, Artificial Sequence
  Synthetic
cctctacacaugctacctccagut

SEQ ID NO: 70490 - DNA, 23 bp, Artificial Sequence
  Synthetic
ctcaccttgucaccctttagucc

SEQ ID NO: 70491 - DNA, 21 bp, Artificial Sequence
  Synthetic
gtagctcacggucaccttcuc

SEQ ID NO: 70492 - DNA, 20 bp, Artificial Sequence
  Synthetic
gagagaatgcuggtggcugt

SEQ ID NO: 70493 - DNA, 19 bp, Artificial Sequence
  Synthetic
ccgctccuctgacctctug

SEQ ID NO: 70494 - DNA, 22 bp, Artificial Sequence
  Synthetic
ctgauaacccaggctcatgucc

SEQ ID NO: 70495 - DNA, 24 bp, Artificial Sequence
  Synthetic
gctctgatttcutcctcccctauc

SEQ ID NO: 70496 - DNA, 22 bp, Artificial Sequence
  Synthetic
gggaagacccuaggaagaagug

SEQ ID NO: 70497 - DNA, 22 bp, Artificial Sequence
  Synthetic
gttcattcccugacctgctgut

SEQ ID NO: 70498 - DNA, 22 bp, Artificial Sequence
  Synthetic
ggtacaggaggagucacucaga

SEQ ID NO: 70499 - DNA, 20 bp, Artificial Sequence
  Synthetic
cgagcucagcagctaucacc

SEQ ID NO: 70500 - DNA, 22 bp, Artificial Sequence
  Synthetic
tcaggaucaggcccttctucat

SEQ ID NO: 70501 - DNA, 22 bp, Artificial Sequence
  Synthetic
gttacgtcaucgaccccaucaa

SEQ ID NO: 70502 - DNA, 19 bp, Artificial Sequence
  Synthetic
cagccccucacccagtuag

SEQ ID NO: 70503 - DNA, 21 bp, Artificial Sequence
  Synthetic
aagcccaugtgagggttuagg

SEQ ID NO: 70504 - DNA, 18 bp, Artificial Sequence
  Synthetic
ggagctgcugagcaccut

SEQ ID NO: 70505 - DNA, 17 bp, Artificial Sequence
  Synthetic
ctggccgugtgcgacua

SEQ ID NO: 70506 - DNA, 20 bp, Artificial Sequence
  Synthetic
cccagcautttggagcucct

SEQ ID NO: 70507 - DNA, 19 bp, Artificial Sequence
  Synthetic
gccgucccctatggucaga

SEQ ID NO: 70508 - DNA, 20 bp, Artificial Sequence
  Synthetic
gccgucagcgatgtcaucat

SEQ ID NO: 70509 - DNA, 23 bp, Artificial Sequence
  Synthetic
gtttccacaagcugcagaatguc

SEQ ID NO: 70510 - DNA, 23 bp, Artificial Sequence
  Synthetic
ccaaggacucuaggacaccaact

SEQ ID NO: 70511 - DNA, 28 bp, Artificial Sequence
  Synthetic
tgtcaagttcuaagactctgtactcugg

SEQ ID NO: 70512 - DNA, 27 bp, Artificial Sequence
  Synthetic
ggagaaaggtucataatgtaagccuct

SEQ ID NO: 70513 - DNA, 28 bp, Artificial Sequence
  Synthetic
ttgcataatgccuttactgaccaaaaut

SEQ ID NO: 70514 - DNA, 21 bp, Artificial Sequence
  Synthetic
gccagaaugcccttcaguaga

SEQ ID NO: 70515 - DNA, 20 bp, Artificial Sequence
  Synthetic
acccttcuaacccacccuca

SEQ ID NO: 70516 - DNA, 19 bp, Artificial Sequence
  Synthetic
gggtagcgucaacggauga

SEQ ID NO: 70517 - DNA, 21 bp, Artificial Sequence
  Synthetic
caaagccgacuacatgccuga

SEQ ID NO: 70518 - DNA, 18 bp, Artificial Sequence
  Synthetic
cugcacgccgatucgaag

SEQ ID NO: 70519 - DNA, 24 bp, Artificial Sequence
  Synthetic
tgcttccugggaatactgatgaug

SEQ ID NO: 70520 - DNA, 20 bp, Artificial Sequence
  Synthetic
gcagutcttgugccccaaca

SEQ ID NO: 70521 - DNA, 24 bp, Artificial Sequence
  Synthetic
aatgaactgauggcatgaagguga

SEQ ID NO: 70522 - DNA, 17 bp, Artificial Sequence
  Synthetic
gcugugccagcgacagt

SEQ ID NO: 70523 - DNA, 19 bp, Artificial Sequence
  Synthetic
cgcauagugagccgagagg

SEQ ID NO: 70524 - DNA, 27 bp, Artificial Sequence
  Synthetic
cttccttctttcuctctctttggcaut

SEQ ID NO: 70525 - DNA, 21 bp, Artificial Sequence
  Synthetic
ccctccuggaggtauccaaga

SEQ ID NO: 70526 - DNA, 27 bp, Artificial Sequence
  Synthetic
ccaaacaaacugttcaucaggaagaaa

SEQ ID NO: 70527 - DNA, 28 bp, Artificial Sequence
  Synthetic
tgacagttcaacuagaagagactgguaa

SEQ ID NO: 70528 - DNA, 28 bp, Artificial Sequence
  Synthetic
tttcaactgtucattttctctcuggact

SEQ ID NO: 70529 - DNA, 28 bp, Artificial Sequence
  Synthetic
gcctgttgtattgutggtacttcgtaut

SEQ ID NO: 70530 - DNA, 27 bp, Artificial Sequence
  Synthetic
attctttttctgacuccaaagctcgua

SEQ ID NO: 70531 - DNA, 26 bp, Artificial Sequence
  Synthetic
aattgaaaagccaaacacugaauggt

SEQ ID NO: 70532 - DNA, 22 bp, Artificial Sequence
  Synthetic
tctgcccggagutctaaaagug

SEQ ID NO: 70533 - DNA, 33 bp, Artificial Sequence
  Synthetic
agttgagttgttaauttgtgaaatatgtuccat

SEQ ID NO: 70534 - DNA, 33 bp, Artificial Sequence
  Synthetic
ttatcatttgccuatttttacaatacattucga

SEQ ID NO: 70535 - DNA, 28 bp, Artificial Sequence
  Synthetic
ctctttcctcacucttggtcaaacuaaa

SEQ ID NO: 70536 - DNA, 28 bp, Artificial Sequence
  Synthetic
caaactttgtugatgacgaatuacagca

SEQ ID NO: 70537 - DNA, 28 bp, Artificial Sequence
  Synthetic
gtgttgcttacagauttggtgactttua

SEQ ID NO: 70538 - DNA, 29 bp, Artificial Sequence
  Synthetic
tctgtgaatctatutgtttctggtaguca

SEQ ID NO: 70539 - DNA, 23 bp, Artificial Sequence
  Synthetic
accgttttccugtccttttcugt

SEQ ID NO: 70540 - DNA, 21 bp, Artificial Sequence
  Synthetic
gtagcagccautccugaaggt

SEQ ID NO: 70541 - DNA, 29 bp, Artificial Sequence
  Synthetic
aaccacgacacggaauattctaaatuact

SEQ ID NO: 70542 - DNA, 21 bp, Artificial Sequence
  Synthetic
ccagccaguaacaaccccuac

SEQ ID NO: 70543 - DNA, 25 bp, Artificial Sequence
  Synthetic
ggcgtgaagaugtaataaccucgaa

SEQ ID NO: 70544 - DNA, 23 bp, Artificial Sequence
  Synthetic
attgaaattgtcuccctggccut

SEQ ID NO: 70545 - DNA, 21 bp, Artificial Sequence
  Synthetic
gacttccucaccccaguaacc

SEQ ID NO: 70546 - DNA, 22 bp, Artificial Sequence
  Synthetic
ccaggacuctgcacagugaaac

SEQ ID NO: 70547 - DNA, 29 bp, Artificial Sequence
  Synthetic
tgcaggtaucacacaaattacagaagaut

SEQ ID NO: 70548 - DNA, 21 bp, Artificial Sequence
  Synthetic
cgggcagguttcctcatctut

SEQ ID NO: 70549 - DNA, 28 bp, Artificial Sequence
  Synthetic
gtctcatgtgtuaagagaaagctauggt

SEQ ID NO: 70550 - DNA, 21 bp, Artificial Sequence
  Synthetic
acaagggaaacugggugacag

SEQ ID NO: 70551 - DNA, 22 bp, Artificial Sequence
  Synthetic
cggccccaccaugtatctaaug

SEQ ID NO: 70552 - DNA, 23 bp, Artificial Sequence
  Synthetic
ctgccaatcauctcctggatcug

SEQ ID NO: 70553 - DNA, 23 bp, Artificial Sequence
  Synthetic
catgguaggaatagugccaggaa

SEQ ID NO: 70554 - DNA, 20 bp, Artificial Sequence
  Synthetic
caggcggucattgaggtuct

SEQ ID NO: 70555 - DNA, 20 bp, Artificial Sequence
  Synthetic
gtctcatccucccgcttcuc

SEQ ID NO: 70556 - DNA, 21 bp, Artificial Sequence
  Synthetic
ccagaagggcaacauccauct

SEQ ID NO: 70557 - DNA, 22 bp, Artificial Sequence
  Synthetic
aggagtccugcttcattccuca

SEQ ID NO: 70558 - DNA, 21 bp, Artificial Sequence
  Synthetic
tggaaagagcugcaggugaag

SEQ ID NO: 70559 - DNA, 22 bp, Artificial Sequence
  Synthetic
gtcttccctcucctcctgctua

SEQ ID NO: 70560 - DNA, 21 bp, Artificial Sequence
  Synthetic
tgaccctcugaagcactcuct

SEQ ID NO: 70561 - DNA, 20 bp, Artificial Sequence
  Synthetic
ggtggccaggutgatgaugg

SEQ ID NO: 70562 - DNA, 19 bp, Artificial Sequence
  Synthetic
cguggcaggaaacauccct

SEQ ID NO: 70563 - DNA, 26 bp, Artificial Sequence
  Synthetic
actgctcaaagaaacuaatcaacuga

SEQ ID NO: 70564 - DNA, 23 bp, Artificial Sequence
  Synthetic
aaccaagggcucagtttguaaca

SEQ ID NO: 70565 - DNA, 24 bp, Artificial Sequence
  Synthetic
cctctgcaaauattaccuccacga

SEQ ID NO: 70566 - DNA, 24 bp, Artificial Sequence
  Synthetic
ggagttgguaatggcagtagucat

SEQ ID NO: 70567 - DNA, 22 bp, Artificial Sequence
  Synthetic
caaacaccuccattgugacagg

SEQ ID NO: 70568 - DNA, 24 bp, Artificial Sequence
  Synthetic
gttaaatguctgcaacuccaaccc

SEQ ID NO: 70569 - DNA, 24 bp, Artificial Sequence
  Synthetic
ttcacagtucacaccagtgtaucc

SEQ ID NO: 70570 - DNA, 20 bp, Artificial Sequence
  Synthetic
tccaggaagugggacuccat

SEQ ID NO: 70571 - DNA, 18 bp, Artificial Sequence
  Synthetic
gcaggtcuccgacagcuc

SEQ ID NO: 70572 - DNA, 19 bp, Artificial Sequence
  Synthetic
acucgccaggtctuaccga

SEQ ID NO: 70573 - DNA, 21 bp, Artificial Sequence
  Synthetic
tgtggtaugccaggaggttug

SEQ ID NO: 70574 - DNA, 21 bp, Artificial Sequence
  Synthetic
ggtcaagucagcagggttugt

SEQ ID NO: 70575 - DNA, 21 bp, Artificial Sequence
  Synthetic
aggaguaccaggacccugaag

SEQ ID NO: 70576 - DNA, 20 bp, Artificial Sequence
  Synthetic
tgctgccccacucctcauat

SEQ ID NO: 70577 - DNA, 20 bp, Artificial Sequence
  Synthetic
cagcccugacagagctctuc

SEQ ID NO: 70578 - DNA, 21 bp, Artificial Sequence
  Synthetic
ggaagucccacagctccagua

SEQ ID NO: 70579 - DNA, 22 bp, Artificial Sequence
  Synthetic
ctcatgcaguctctgggttgut

SEQ ID NO: 70580 - DNA, 22 bp, Artificial Sequence
  Synthetic
acatctcccuggaggugacaaa

SEQ ID NO: 70581 - DNA, 21 bp, Artificial Sequence
  Synthetic
gccaagcugtatctgtccugt

SEQ ID NO: 70582 - DNA, 21 bp, Artificial Sequence
  Synthetic
cccacuacacatcactugcct

SEQ ID NO: 70583 - DNA, 26 bp, Artificial Sequence
  Synthetic
cgaataggaauagctggacatgtcua

SEQ ID NO: 70584 - DNA, 21 bp, Artificial Sequence
  Synthetic
acctttcugcccttcccacua

SEQ ID NO: 70585 - DNA, 28 bp, Artificial Sequence
  Synthetic
tggagacagcuttttaatcaagttcugt

SEQ ID NO: 70586 - DNA, 20 bp, Artificial Sequence
  Synthetic
cccaauccccagcacatuct

SEQ ID NO: 70587 - DNA, 23 bp, Artificial Sequence
  Synthetic
tgttgactctuctctgccttgug

SEQ ID NO: 70588 - DNA, 21 bp, Artificial Sequence
  Synthetic
aggtgaaccugggtcctcaua

SEQ ID NO: 70589 - DNA, 23 bp, Artificial Sequence
  Synthetic
agaagaaccgagacuaccctcug

SEQ ID NO: 70590 - DNA, 26 bp, Artificial Sequence
  Synthetic
gtgaatgaaaccaauacctcccauca

SEQ ID NO: 70591 - DNA, 22 bp, Artificial Sequence
  Synthetic
cattgccauggctgtgagtuac

SEQ ID NO: 70592 - DNA, 17 bp, Artificial Sequence
  Synthetic
gcgggccuccttcctuc

SEQ ID NO: 70593 - DNA, 17 bp, Artificial Sequence
  Synthetic
gcuacgugcccgaggat

SEQ ID NO: 70594 - DNA, 18 bp, Artificial Sequence
  Synthetic
tccagcaggaagccugug

SEQ ID NO: 70595 - DNA, 18 bp, Artificial Sequence
  Synthetic
ctccgtggcuggtgtcua

SEQ ID NO: 70596 - DNA, 19 bp, Artificial Sequence
  Synthetic
ccaccacacccucctucac

SEQ ID NO: 70597 - DNA, 18 bp, Artificial Sequence
  Synthetic
tgutgcugaaggccacca

SEQ ID NO: 70598 - DNA, 20 bp, Artificial Sequence
  Synthetic
agugggaacgcactcaucac

SEQ ID NO: 70599 - DNA, 18 bp, Artificial Sequence
  Synthetic
gcuggaggcctgugagac

SEQ ID NO: 70600 - DNA, 18 bp, Artificial Sequence
  Synthetic
cagcaggucctgcaggua

SEQ ID NO: 70601 - DNA, 19 bp, Artificial Sequence
  Synthetic
ggtguaccgtcugcacgag

SEQ ID NO: 70602 - DNA, 24 bp, Artificial Sequence
  Synthetic
ggtcccaaucagaaaatcauccct

SEQ ID NO: 70603 - DNA, 24 bp, Artificial Sequence
  Synthetic
cacatcauctctgcuacccaagat

SEQ ID NO: 70604 - DNA, 20 bp, Artificial Sequence
  Synthetic
cagacccucggacagguaac

SEQ ID NO: 70605 - DNA, 20 bp, Artificial Sequence
  Synthetic
gctccugcacaacagcugat

SEQ ID NO: 70606 - DNA, 21 bp, Artificial Sequence
  Synthetic
gggcctgaugaggaggtcaua

SEQ ID NO: 70607 - DNA, 28 bp, Artificial Sequence
  Synthetic
ccgtttcaatctuaatgttcatgctcut

SEQ ID NO: 70608 - DNA, 27 bp, Artificial Sequence
  Synthetic
agaaatgatuccaagcatctcctucaa

SEQ ID NO: 70609 - DNA, 21 bp, Artificial Sequence
  Synthetic
tgtcagctguagtctgccuct

SEQ ID NO: 70610 - DNA, 21 bp, Artificial Sequence
  Synthetic
tcucaaccggaacctcuccat

SEQ ID NO: 70611 - DNA, 21 bp, Artificial Sequence
  Synthetic
tccccagacaggcaauaggua

SEQ ID NO: 70612 - DNA, 18 bp, Artificial Sequence
  Synthetic
cccuggctccuggaagac

SEQ ID NO: 70613 - DNA, 17 bp, Artificial Sequence
  Synthetic
gtgagggcccgcucauc

SEQ ID NO: 70614 - DNA, 27 bp, Artificial Sequence
  Synthetic
tgtacctgtucacattcagacucaaat

SEQ ID NO: 70615 - DNA, 23 bp, Artificial Sequence
  Synthetic
cttctttguctcatgggucccaa

SEQ ID NO: 70616 - DNA, 25 bp, Artificial Sequence
  Synthetic
cctgaagaagugattcgtaaaugcc

SEQ ID NO: 70617 - DNA, 25 bp, Artificial Sequence
  Synthetic
tctagagtttcucctccgatggtut

SEQ ID NO: 70618 - DNA, 21 bp, Artificial Sequence
  Synthetic
cgaggguggttggaaacugat

SEQ ID NO: 70619 - DNA, 24 bp, Artificial Sequence
  Synthetic
ctatcgggaugaacacatcuaccc

SEQ ID NO: 70620 - DNA, 21 bp, Artificial Sequence
  Synthetic
gggaaacagggaugatuggca

SEQ ID NO: 70621 - DNA, 24 bp, Artificial Sequence
  Synthetic
tgctcatccuctgacaaacactuc

SEQ ID NO: 70622 - DNA, 26 bp, Artificial Sequence
  Synthetic
aggctttttgtutcttttgcagtuca

SEQ ID NO: 70623 - DNA, 32 bp, Artificial Sequence
  Synthetic
atcattgatacttcutgaagagtcatgaauaa

SEQ ID NO: 70624 - DNA, 29 bp, Artificial Sequence
  Synthetic
ctgctaacctuaaagcagattctttcuct

SEQ ID NO: 70625 - DNA, 28 bp, Artificial Sequence
  Synthetic
gcatgcaaauaactgctgtcaatuagaa

SEQ ID NO: 70626 - DNA, 28 bp, Artificial Sequence
  Synthetic
tggctaattucacaaggttcaagaauca

SEQ ID NO: 70627 - DNA, 28 bp, Artificial Sequence
  Synthetic
tgcagctcuccaaaaagttgtagauaat

SEQ ID NO: 70628 - DNA, 26 bp, Artificial Sequence
  Synthetic
aaatcaactggauagtgacagacuga

SEQ ID NO: 70629 - DNA, 29 bp, Artificial Sequence
  Synthetic
aagagatttagaaaggaguaggacaguga

SEQ ID NO: 70630 - DNA, 23 bp, Artificial Sequence
  Synthetic
gggaccagguggtagaagaaaut

SEQ ID NO: 70631 - DNA, 27 bp, Artificial Sequence
  Synthetic
cctaagggagaaacutaagaatgcuca

SEQ ID NO: 70632 - DNA, 23 bp, Artificial Sequence
  Synthetic
tgttggtgugctgatgguaagat

SEQ ID NO: 70633 - DNA, 28 bp, Artificial Sequence
  Synthetic
cccaatggacaucatttgttttctgaut

SEQ ID NO: 70634 - DNA, 21 bp, Artificial Sequence
  Synthetic
catgcuggatccuccgagaat

SEQ ID NO: 70635 - DNA, 23 bp, Artificial Sequence
  Synthetic
cctgtgaaagcutttgacgucac

SEQ ID NO: 70636 - DNA, 21 bp, Artificial Sequence
  Synthetic
gcgggcaaucuacaacaacat

SEQ ID NO: 70637 - DNA, 27 bp, Artificial Sequence
  Synthetic
atgacccattuagataaaggcguacag

SEQ ID NO: 70638 - DNA, 22 bp, Artificial Sequence
  Synthetic
acagccttuctaaaacgccuct

SEQ ID NO: 70639 - DNA, 24 bp, Artificial Sequence
  Synthetic
ggtccuggcactgatttauaacct

SEQ ID NO: 70640 - DNA, 20 bp, Artificial Sequence
  Synthetic
gggagtcautgaccccaucc

SEQ ID NO: 70641 - DNA, 22 bp, Artificial Sequence
  Synthetic
gggcaaggguaacttgaggtut

SEQ ID NO: 70642 - DNA, 28 bp, Artificial Sequence
  Synthetic
gataatatcccguggaccgataattucc

SEQ ID NO: 70643 - DNA, 22 bp, Artificial Sequence
  Synthetic
ggcttucacaggctttcctuga

SEQ ID NO: 70644 - DNA, 25 bp, Artificial Sequence
  Synthetic
gattttccucgacatguaccaaggt

SEQ ID NO: 70645 - DNA, 22 bp, Artificial Sequence
  Synthetic
gcatgcauagaccaatgggtut

SEQ ID NO: 70646 - DNA, 24 bp, Artificial Sequence
  Synthetic
tgatggagacagautcgctttuct

SEQ ID NO: 70647 - DNA, 24 bp, Artificial Sequence
  Synthetic
gaaattctgcautggtgctuagga

SEQ ID NO: 70648 - DNA, 28 bp, Artificial Sequence
  Synthetic
ggagucaggaagagatattcuagagcaa

SEQ ID NO: 70649 - DNA, 29 bp, Artificial Sequence
  Synthetic
tcaatccactttgugtcttatcaactuca

SEQ ID NO: 70650 - DNA, 22 bp, Artificial Sequence
  Synthetic
ccgagtcuatattgccugcaga

SEQ ID NO: 70651 - DNA, 24 bp, Artificial Sequence
  Synthetic
cctgcttttcuacctacccaucag

SEQ ID NO: 70652 - DNA, 22 bp, Artificial Sequence
  Synthetic
tggaatttuccagggcacugaa

SEQ ID NO: 70653 - DNA, 21 bp, Artificial Sequence
  Synthetic
actgatggttucacggctguc

SEQ ID NO: 70654 - DNA, 22 bp, Artificial Sequence
  Synthetic
ggccttcugggaagatcaggua

SEQ ID NO: 70655 - DNA, 25 bp, Artificial Sequence
  Synthetic
ttgctgtgacuatgtcatggttcut

SEQ ID NO: 70656 - DNA, 21 bp, Artificial Sequence
  Synthetic
gcacuggcagtagtugaggat

SEQ ID NO: 70657 - DNA, 22 bp, Artificial Sequence
  Synthetic
cuaaggaaccugcagaccaagg

SEQ ID NO: 70658 - DNA, 22 bp, Artificial Sequence
  Synthetic
gcatggagguaagcaggatcuc

SEQ ID NO: 70659 - DNA, 24 bp, Artificial Sequence
  Synthetic
tgaacagugtgtcuagagcagagt

SEQ ID NO: 70660 - DNA, 21 bp, Artificial Sequence
  Synthetic
gacgtcttuagcttggccauc

SEQ ID NO: 70661 - DNA, 23 bp, Artificial Sequence
  Synthetic
agagtgaggcuggctcttttcua

SEQ ID NO: 70662 - DNA, 22 bp, Artificial Sequence
  Synthetic
tcttcagcagcuttaccagcut

SEQ ID NO: 70663 - DNA, 22 bp, Artificial Sequence
  Synthetic
cggatcagaucctccaggtuac

SEQ ID NO: 70664 - DNA, 21 bp, Artificial Sequence
  Synthetic
gctcagctaucccctctcugt

SEQ ID NO: 70665 - DNA, 23 bp, Artificial Sequence
  Synthetic
aagttgtgggugaaagaggagug

SEQ ID NO: 70666 - DNA, 22 bp, Artificial Sequence
  Synthetic
tgcatctttcaugagggcacut

SEQ ID NO: 70667 - DNA, 21 bp, Artificial Sequence
  Synthetic
gcctcataguggaaggcugac

SEQ ID NO: 70668 - DNA, 24 bp, Artificial Sequence
  Synthetic
tcttttcttuagggcctgtucaca

SEQ ID NO: 70669 - DNA, 27 bp, Artificial Sequence
  Synthetic
gtgcgtttcaaucaccactaaaucaat

SEQ ID NO: 70670 - DNA, 21 bp, Artificial Sequence
  Synthetic
tgcttgcucaactcagtgcut

SEQ ID NO: 70671 - DNA, 24 bp, Artificial Sequence
  Synthetic
ggctgaaguggagattaacauccc

SEQ ID NO: 70672 - DNA, 28 bp, Artificial Sequence
  Synthetic
aattcctgagagagaugaaacattcugg

SEQ ID NO: 70673 - DNA, 22 bp, Artificial Sequence
  Synthetic
tgcctgtgcucatgtttgacut

SEQ ID NO: 70674 - DNA, 20 bp, Artificial Sequence
  Synthetic
gggaguctgcacugagagac

SEQ ID NO: 70675 - DNA, 25 bp, Artificial Sequence
  Synthetic
ggcttctuccttattctuccaccat

SEQ ID NO: 70676 - DNA, 18 bp, Artificial Sequence
  Synthetic
cuagagcgcggcagacua

SEQ ID NO: 70677 - DNA, 23 bp, Artificial Sequence
  Synthetic
cagguaggccaccaatgtagaug

SEQ ID NO: 70678 - DNA, 21 bp, Artificial Sequence
  Synthetic
catccgtguccagaagucacc

SEQ ID NO: 70679 - DNA, 22 bp, Artificial Sequence
  Synthetic
tgagaggugggcaattgtgtut

SEQ ID NO: 70680 - DNA, 22 bp, Artificial Sequence
  Synthetic
gcutaatccugggcagagagaa

SEQ ID NO: 70681 - DNA, 23 bp, Artificial Sequence
  Synthetic
ccacagacucagctactgttcug

SEQ ID NO: 70682 - DNA, 20 bp, Artificial Sequence
  Synthetic
cggtuccggaaatagugcag

SEQ ID NO: 70683 - DNA, 20 bp, Artificial Sequence
  Synthetic
tcagcccugggactctctut

SEQ ID NO: 70684 - DNA, 18 bp, Artificial Sequence
  Synthetic
tcaccaugggcagccauc

SEQ ID NO: 70685 - DNA, 18 bp, Artificial Sequence
  Synthetic
tgccagggccagutcauc

SEQ ID NO: 70686 - DNA, 20 bp, Artificial Sequence
  Synthetic
ccutcccccuaaaccccaga

SEQ ID NO: 70687 - DNA, 23 bp, Artificial Sequence
  Synthetic
ccgugacttctuacccaaaccaa

SEQ ID NO: 70688 - DNA, 21 bp, Artificial Sequence
  Synthetic
aaaaccacgaccuctgaccug

SEQ ID NO: 70689 - DNA, 21 bp, Artificial Sequence
  Synthetic
caaccacugctccatccucat

SEQ ID NO: 70690 - DNA, 20 bp, Artificial Sequence
  Synthetic
cagcgtgagggucctctcua

SEQ ID NO: 70691 - DNA, 20 bp, Artificial Sequence
  Synthetic
ggcauccccatcacugagac

SEQ ID NO: 70692 - DNA, 28 bp, Artificial Sequence
  Synthetic
ccttataggagaucttgagcttggtcut

SEQ ID NO: 70693 - DNA, 22 bp, Artificial Sequence
  Synthetic
gaagaagggcuggctctacuac

SEQ ID NO: 70694 - DNA, 17 bp, Artificial Sequence
  Synthetic
gccagcucggctuccag

SEQ ID NO: 70695 - DNA, 18 bp, Artificial Sequence
  Synthetic
cgggagcuggcugaacaa

SEQ ID NO: 70696 - DNA, 20 bp, Artificial Sequence
  Synthetic
gugacaacgugacccacaac

SEQ ID NO: 70697 - DNA, 17 bp, Artificial Sequence
  Synthetic
gggctguctagccugga

SEQ ID NO: 70698 - DNA, 20 bp, Artificial Sequence
  Synthetic
ggacaguggactgcatggua

SEQ ID NO: 70699 - DNA, 28 bp, Artificial Sequence
  Synthetic
gtttcagcataacautgcaacatgttuc

SEQ ID NO: 70700 - DNA, 19 bp, Artificial Sequence
  Synthetic
ccctgugaccctgcttguc

SEQ ID NO: 70701 - DNA, 18 bp, Artificial Sequence
  Synthetic
ctccctugggcgttucca

SEQ ID NO: 70702 - DNA, 20 bp, Artificial Sequence
  Synthetic
cagagcauacgcagcctgua

SEQ ID NO: 70703 - DNA, 20 bp, Artificial Sequence
  Synthetic
ggcttgugggcaaacttgug

SEQ ID NO: 70704 - DNA, 22 bp, Artificial Sequence
  Synthetic
gctcctctagauctgccaggut

SEQ ID NO: 70705 - DNA, 23 bp, Artificial Sequence
  Synthetic
cgtggctcauaactctctcctuc

SEQ ID NO: 70706 - DNA, 23 bp, Artificial Sequence
  Synthetic
tgccuagaagaggcaatcuccat

SEQ ID NO: 70707 - DNA, 19 bp, Artificial Sequence
  Synthetic
cctagguggtgggcucagt

SEQ ID NO: 70708 - DNA, 28 bp, Artificial Sequence
  Synthetic
gacattttgagcugtgtctctagatcut

SEQ ID NO: 70709 - DNA, 25 bp, Artificial Sequence
  Synthetic
ggaggcagcautaagtgtttacauc

SEQ ID NO: 70710 - DNA, 22 bp, Artificial Sequence
  Synthetic
ggugagcuacaggaggaagaat

SEQ ID NO: 70711 - DNA, 28 bp, Artificial Sequence
  Synthetic
tcacagattagaacuacaggctgauagt

SEQ ID NO: 70712 - DNA, 28 bp, Artificial Sequence
  Synthetic
tctgtgagtuaacactctagactaugct

SEQ ID NO: 70713 - DNA, 25 bp, Artificial Sequence
  Synthetic
cctgatgtctucgtgtatgtgtcug

SEQ ID NO: 70714 - DNA, 24 bp, Artificial Sequence
  Synthetic
aaagccagguaacttgaacaguga

SEQ ID NO: 70715 - DNA, 21 bp, Artificial Sequence
  Synthetic
gtctgcagguggacgagauac

SEQ ID NO: 70716 - DNA, 29 bp, Artificial Sequence
  Synthetic
tggcagatccauaaaataggagtcuagaa

SEQ ID NO: 70717 - DNA, 25 bp, Artificial Sequence
  Synthetic
agctggctutggaagaaguagaaaa

SEQ ID NO: 70718 - DNA, 28 bp, Artificial Sequence
  Synthetic
ccaattaagcaccutggataaggaaauc

SEQ ID NO: 70719 - DNA, 23 bp, Artificial Sequence
  Synthetic
tgttttgtuacagagguggagca

SEQ ID NO: 70720 - DNA, 24 bp, Artificial Sequence
  Synthetic
ccttgtgtcugttgccttagaugt

SEQ ID NO: 70721 - DNA, 25 bp, Artificial Sequence
  Synthetic
caggctcatatuccttaagggctuc

SEQ ID NO: 70722 - DNA, 21 bp, Artificial Sequence
  Synthetic
gggucacctgttucagaggag

SEQ ID NO: 70723 - DNA, 24 bp, Artificial Sequence
  Synthetic
cagtctctguagcttctccaacut

SEQ ID NO: 70724 - DNA, 25 bp, Artificial Sequence
  Synthetic
agtcatcagaugtactgctccucat

SEQ ID NO: 70725 - DNA, 22 bp, Artificial Sequence
  Synthetic
acataggcauggatgacaggug

SEQ ID NO: 70726 - DNA, 22 bp, Artificial Sequence
  Synthetic
gcaacagcaauccccaaaaugg

SEQ ID NO: 70727 - DNA, 22 bp, Artificial Sequence
  Synthetic
cctttccugacccctctttcug

SEQ ID NO: 70728 - DNA, 20 bp, Artificial Sequence
  Synthetic
cagaaacagggcacugucca

SEQ ID NO: 70729 - DNA, 20 bp, Artificial Sequence
  Synthetic
gccaacaugttcgccuacca

SEQ ID NO: 70730 - DNA, 21 bp, Artificial Sequence
  Synthetic
caguggagcccgagtacttug

SEQ ID NO: 70731 - DNA, 23 bp, Artificial Sequence
  Synthetic
gctggugaagctgaatugaaggt

SEQ ID NO: 70732 - DNA, 23 bp, Artificial Sequence
  Synthetic
tcatggagaugcttagccugaga

SEQ ID NO: 70733 - DNA, 20 bp, Artificial Sequence
  Synthetic
ccaccgugauccaagacacc

SEQ ID NO: 70734 - DNA, 20 bp, Artificial Sequence
  Synthetic
gaacctgcugaagccugaca

SEQ ID NO: 70735 - DNA, 22 bp, Artificial Sequence
  Synthetic
gagaccccuctcccctagtuaa

SEQ ID NO: 70736 - DNA, 18 bp, Artificial Sequence
  Synthetic
gccugaacctuccaccct

SEQ ID NO: 70737 - DNA, 19 bp, Artificial Sequence
  Synthetic
cgtggaaggcccuctgtuc

SEQ ID NO: 70738 - DNA, 17 bp, Artificial Sequence
  Synthetic
gtacgggugcccctcut

SEQ ID NO: 70739 - DNA, 18 bp, Artificial Sequence
  Synthetic
cacucuccccacccagac

SEQ ID NO: 70740 - DNA, 21 bp, Artificial Sequence
  Synthetic
gagtcgggcucagaugaaagg

SEQ ID NO: 70741 - DNA, 22 bp, Artificial Sequence
  Synthetic
ctatgguggctggaugacagat

SEQ ID NO: 70742 - DNA, 24 bp, Artificial Sequence
  Synthetic
cacaggaggaagugccaatauagt

SEQ ID NO: 70743 - DNA, 21 bp, Artificial Sequence
  Synthetic
tcctgggcaagutctcucaga

SEQ ID NO: 70744 - DNA, 24 bp, Artificial Sequence
  Synthetic
tgutcttgtucagacacagccaat

SEQ ID NO: 70745 - DNA, 22 bp, Artificial Sequence
  Synthetic
tccatgtuggcaggagttctug

SEQ ID NO: 70746 - DNA, 25 bp, Artificial Sequence
  Synthetic
ggtaacagaacauttgacaagugct

SEQ ID NO: 70747 - DNA, 22 bp, Artificial Sequence
  Synthetic
gcatccugacaagtugcaccat

SEQ ID NO: 70748 - DNA, 24 bp, Artificial Sequence
  Synthetic
tttttcaaacugctccctctucct

SEQ ID NO: 70749 - DNA, 28 bp, Artificial Sequence
  Synthetic
ggcaaaactcccucctatattttagugt

SEQ ID NO: 70750 - DNA, 22 bp, Artificial Sequence
  Synthetic
tcauaggtcuggaagcaagggt

SEQ ID NO: 70751 - DNA, 21 bp, Artificial Sequence
  Synthetic
acccctguctctgactgucat

SEQ ID NO: 70752 - DNA, 21 bp, Artificial Sequence
  Synthetic
cccatccugactccctgucat

SEQ ID NO: 70753 - DNA, 23 bp, Artificial Sequence
  Synthetic
gacacaaaggagagauggugagt

SEQ ID NO: 70754 - DNA, 22 bp, Artificial Sequence
  Synthetic
aagagagagucagcagcactug

SEQ ID NO: 70755 - DNA, 22 bp, Artificial Sequence
  Synthetic
tcctcgugaggacttaggaugg

SEQ ID NO: 70756 - DNA, 21 bp, Artificial Sequence
  Synthetic
cacccugttguggcgaaaaag

SEQ ID NO: 70757 - DNA, 21 bp, Artificial Sequence
  Synthetic
ccaagugaggcccagatugag

SEQ ID NO: 70758 - DNA, 22 bp, Artificial Sequence
  Synthetic
gggaagugggagttaguggaag

SEQ ID NO: 70759 - DNA, 28 bp, Artificial Sequence
  Synthetic
cctgagggcucctattgactataaucat

SEQ ID NO: 70760 - DNA, 27 bp, Artificial Sequence
  Synthetic
ccattacuccaaaatccacaucagagg

SEQ ID NO: 70761 - DNA, 27 bp, Artificial Sequence
  Synthetic
cctgtgcagtaugacttttctctcuat

SEQ ID NO: 70762 - DNA, 20 bp, Artificial Sequence
  Synthetic
ggagagcccugcaaauggag

SEQ ID NO: 70763 - DNA, 21 bp, Artificial Sequence
  Synthetic
cccttcctgucctgacctcut

SEQ ID NO: 70764 - DNA, 24 bp, Artificial Sequence
  Synthetic
cactgacacucaacccattctcua

SEQ ID NO: 70765 - DNA, 26 bp, Artificial Sequence
  Synthetic
gttcaaccucaaagagaccctatguc

SEQ ID NO: 70766 - DNA, 20 bp, Artificial Sequence
  Synthetic
ccctatucccagacccctuc

SEQ ID NO: 70767 - DNA, 22 bp, Artificial Sequence
  Synthetic
agggttcugacatgtcctucct

SEQ ID NO: 70768 - DNA, 22 bp, Artificial Sequence
  Synthetic
ccaccaccuatcactccugaca

SEQ ID NO: 70769 - DNA, 19 bp, Artificial Sequence
  Synthetic
tcctgccugatccccugat

SEQ ID NO: 70770 - DNA, 21 bp, Artificial Sequence
  Synthetic
gcgauccatcuggacaccaac

SEQ ID NO: 70771 - DNA, 24 bp, Artificial Sequence
  Synthetic
ggagagggaacaggucguaaaaac

SEQ ID NO: 70772 - DNA, 19 bp, Artificial Sequence
  Synthetic
gacacctuctccagcguct

SEQ ID NO: 70773 - DNA, 18 bp, Artificial Sequence
  Synthetic
cggcacgcuctccaucac

SEQ ID NO: 70774 - DNA, 27 bp, Artificial Sequence
  Synthetic
tctctgtcttcucaatgatctcgauga

SEQ ID NO: 70775 - DNA, 22 bp, Artificial Sequence
  Synthetic
aggugtacacugaggaggagac

SEQ ID NO: 70776 - DNA, 20 bp, Artificial Sequence
  Synthetic
gaaaggtccutgaccgucgt

SEQ ID NO: 70777 - DNA, 24 bp, Artificial Sequence
  Synthetic
ccgtggagaaggucatcaagatuc

SEQ ID NO: 70778 - DNA, 19 bp, Artificial Sequence
  Synthetic
augaagcccaagccucgaa

SEQ ID NO: 70779 - DNA, 20 bp, Artificial Sequence
  Synthetic
ctattgcucgagccccaugt

SEQ ID NO: 70780 - DNA, 18 bp, Artificial Sequence
  Synthetic
agcccccucctggcttua

SEQ ID NO: 70781 - DNA, 19 bp, Artificial Sequence
  Synthetic
gcaggcuggagtgtctuca

SEQ ID NO: 70782 - DNA, 20 bp, Artificial Sequence
  Synthetic
gctgcgttutcccaaggtuc

SEQ ID NO: 70783 - DNA, 23 bp, Artificial Sequence
  Synthetic
gggagagtucagtgtctaggtua

SEQ ID NO: 70784 - DNA, 24 bp, Artificial Sequence
  Synthetic
cattcaucccccaagucacaagaa

SEQ ID NO: 70785 - DNA, 20 bp, Artificial Sequence
  Synthetic
accccttcautgtggcacuc

SEQ ID NO: 70786 - DNA, 21 bp, Artificial Sequence
  Synthetic
ggcugcaaccaaguacaacag

SEQ ID NO: 70787 - DNA, 25 bp, Artificial Sequence
  Synthetic
gtaaagacagucctagggtggatug

SEQ ID NO: 70788 - DNA, 22 bp, Artificial Sequence
  Synthetic
actcccugccccgagtaatuat

SEQ ID NO: 70789 - DNA, 20 bp, Artificial Sequence
  Synthetic
tgacaaccccuccctcaugt

SEQ ID NO: 70790 - DNA, 21 bp, Artificial Sequence
  Synthetic
ggacgugcagcattcuaaggt

SEQ ID NO: 70791 - DNA, 19 bp, Artificial Sequence
  Synthetic
cttgtguaccgccucacca

SEQ ID NO: 70792 - DNA, 21 bp, Artificial Sequence
  Synthetic
gctcagaugacagccggtuct

SEQ ID NO: 70793 - DNA, 23 bp, Artificial Sequence
  Synthetic
gttgcctugaccactttuccaaa

SEQ ID NO: 70794 - DNA, 28 bp, Artificial Sequence
  Synthetic
agcaagaccaautattaaaggugacagt

SEQ ID NO: 70795 - DNA, 26 bp, Artificial Sequence
  Synthetic
ggaugagtugaaagaacagaagcaag

SEQ ID NO: 70796 - DNA, 21 bp, Artificial Sequence
  Synthetic
cauagccacccacuccacaag

SEQ ID NO: 70797 - DNA, 21 bp, Artificial Sequence
  Synthetic
cucttgcuccaccaggaacaa

SEQ ID NO: 70798 - DNA, 25 bp, Artificial Sequence
  Synthetic
ttcaagttttccutctgaagcucct

SEQ ID NO: 70799 - DNA, 24 bp, Artificial Sequence
  Synthetic
gctttcaccagaacacuccgatut

SEQ ID NO: 70800 - DNA, 28 bp, Artificial Sequence
  Synthetic
gtgtaatccaaucacatgcaaguaacaa

SEQ ID NO: 70801 - DNA, 28 bp, Artificial Sequence
  Synthetic
acaugcaagcaaggttaaaucaaaaaga

SEQ ID NO: 70802 - DNA, 29 bp, Artificial Sequence
  Synthetic
gtcgctccaatuctactaaggttgtauat

SEQ ID NO: 70803 - DNA, 28 bp, Artificial Sequence
  Synthetic
agtaatatggaugtgtctttgugcagaa

SEQ ID NO: 70804 - DNA, 23 bp, Artificial Sequence
  Synthetic
agattcaggacugaacccacuga

SEQ ID NO: 70805 - DNA, 28 bp, Artificial Sequence
  Synthetic
gucaaatggcucaagaaagaggaaaaag

SEQ ID NO: 70806 - DNA, 21 bp, Artificial Sequence
  Synthetic
cccaaguccacgtacctctut

SEQ ID NO: 70807 - DNA, 25 bp, Artificial Sequence
  Synthetic
gagttgtggtugtttttggcagaua

SEQ ID NO: 70808 - DNA, 26 bp, Artificial Sequence
  Synthetic
cttcattaccuttgacatcugagcct

SEQ ID NO: 70809 - DNA, 24 bp, Artificial Sequence
  Synthetic
tgagcaagugacagttgtctctut

SEQ ID NO: 70810 - DNA, 21 bp, Artificial Sequence
  Synthetic
gatatttgcugcacccctucc

SEQ ID NO: 70811 - DNA, 20 bp, Artificial Sequence
  Synthetic
ggcactuccacctgggaaut

SEQ ID NO: 70812 - DNA, 22 bp, Artificial Sequence
  Synthetic
cagactacutggcaagcuaggg

SEQ ID NO: 70813 - DNA, 28 bp, Artificial Sequence
  Synthetic
caattctcatuaagtaccttcuggagca

SEQ ID NO: 70814 - DNA, 24 bp, Artificial Sequence
  Synthetic
gagguactttcctttugacccaga

SEQ ID NO: 70815 - DNA, 28 bp, Artificial Sequence
  Synthetic
catccctgaagtugaaatgtagatggua

SEQ ID NO: 70816 - DNA, 26 bp, Artificial Sequence
  Synthetic
ctgagtcaauaagctagagtccucct

SEQ ID NO: 70817 - DNA, 26 bp, Artificial Sequence
  Synthetic
gtgacttcaagcutcagatcctcaut

SEQ ID NO: 70818 - DNA, 24 bp, Artificial Sequence
  Synthetic
tcucagctccaugaggagagaaat

SEQ ID NO: 70819 - DNA, 22 bp, Artificial Sequence
  Synthetic
ccccaugaggaggttttctcut

SEQ ID NO: 70820 - DNA, 22 bp, Artificial Sequence
  Synthetic
agcaacagcagcuacagaagut

SEQ ID NO: 70821 - DNA, 28 bp, Artificial Sequence
  Synthetic
ctttgtaaacgautgtttgagttgcuga

SEQ ID NO: 70822 - DNA, 21 bp, Artificial Sequence
  Synthetic
cctggagauaagcagcugcac

SEQ ID NO: 70823 - DNA, 25 bp, Artificial Sequence
  Synthetic
tccagttcggaaugcactaaatuca

SEQ ID NO: 70824 - DNA, 24 bp, Artificial Sequence
  Synthetic
tgagagacugacaaggaaagucct

SEQ ID NO: 70825 - DNA, 22 bp, Artificial Sequence
  Synthetic
gatgcactguctgcttctcugt

SEQ ID NO: 70826 - DNA, 22 bp, Artificial Sequence
  Synthetic
gccagaaaucaaacccgtcuga

SEQ ID NO: 70827 - DNA, 21 bp, Artificial Sequence
  Synthetic
ctttgttgcutgaagcggugt

SEQ ID NO: 70828 - DNA, 20 bp, Artificial Sequence
  Synthetic
tggcaugcctcccuagagaa

SEQ ID NO: 70829 - DNA, 26 bp, Artificial Sequence
  Synthetic
gctcacttccuacttacctcatucca

SEQ ID NO: 70830 - DNA, 21 bp, Artificial Sequence
  Synthetic
ggatgttcuggcccaccatut

SEQ ID NO: 70831 - DNA, 25 bp, Artificial Sequence
  Synthetic
tccatttgacaaautacctgugcct

SEQ ID NO: 70832 - DNA, 18 bp, Artificial Sequence
  Synthetic
accaagggacccugcuct

SEQ ID NO: 70833 - DNA, 19 bp, Artificial Sequence
  Synthetic
gtgttcugagcgggucagt

SEQ ID NO: 70834 - DNA, 21 bp, Artificial Sequence
  Synthetic
gatatcgucggctacctggug

SEQ ID NO: 70835 - DNA, 22 bp, Artificial Sequence
  Synthetic
ccttgaacttguagggcacgut

SEQ ID NO: 70836 - DNA, 21 bp, Artificial Sequence
  Synthetic
ccccaagccaggucatcuaat

SEQ ID NO: 70837 - DNA, 22 bp, Artificial Sequence
  Synthetic
tgcggucaagttuggaagaact

SEQ ID NO: 70838 - DNA, 27 bp, Artificial Sequence
  Synthetic
aataatgctacatgugaggacagtgut

SEQ ID NO: 70839 - DNA, 26 bp, Artificial Sequence
  Synthetic
gcagtaaataugtgtgagcacugaag

SEQ ID NO: 70840 - DNA, 26 bp, Artificial Sequence
  Synthetic
gtttcagaacaagggaugcaaatgua

SEQ ID NO: 70841 - DNA, 22 bp, Artificial Sequence
  Synthetic
gtcauggaaagggtcactucgt

SEQ ID NO: 70842 - DNA, 23 bp, Artificial Sequence
  Synthetic
gtattcaacagggaccugggtut

SEQ ID NO: 70843 - DNA, 29 bp, Artificial Sequence
  Synthetic
tgccagaauaagagagagacauaaaagga

SEQ ID NO: 70844 - DNA, 21 bp, Artificial Sequence
  Synthetic
cacgggaccaagucacugaaa

SEQ ID NO: 70845 - DNA, 19 bp, Artificial Sequence
  Synthetic
cugacgaccgttuccaacc

SEQ ID NO: 70846 - DNA, 22 bp, Artificial Sequence
  Synthetic
gcataugcacaccacctcuagt

SEQ ID NO: 70847 - DNA, 23 bp, Artificial Sequence
  Synthetic
ggactgacutgacatctcauccc

SEQ ID NO: 70848 - DNA, 22 bp, Artificial Sequence
  Synthetic
gcccuggagagaugaagacaaa

SEQ ID NO: 70849 - DNA, 22 bp, Artificial Sequence
  Synthetic
tttccccaccuggtcattctug

SEQ ID NO: 70850 - DNA, 21 bp, Artificial Sequence
  Synthetic
caaggauaccaggagcuccac

SEQ ID NO: 70851 - DNA, 22 bp, Artificial Sequence
  Synthetic
tgcctgaagcauccttgtctuc

SEQ ID NO: 70852 - DNA, 21 bp, Artificial Sequence
  Synthetic
gcuttccctgugggaacagat

SEQ ID NO: 70853 - DNA, 21 bp, Artificial Sequence
  Synthetic
tgtgccccaagggauatcuca

SEQ ID NO: 70854 - DNA, 19 bp, Artificial Sequence
  Synthetic
tgaugcaggacgcucgaag

SEQ ID NO: 70855 - DNA, 22 bp, Artificial Sequence
  Synthetic
cgggtgaaucaatgtgggaaug

SEQ ID NO: 70856 - DNA, 21 bp, Artificial Sequence
  Synthetic
ggtggccccugaatguagaga

SEQ ID NO: 70857 - DNA, 23 bp, Artificial Sequence
  Synthetic
tctagcccugtctgtccataucc

SEQ ID NO: 70858 - DNA, 20 bp, Artificial Sequence
  Synthetic
agagtgugaggcggtacuca

SEQ ID NO: 70859 - DNA, 21 bp, Artificial Sequence
  Synthetic
tctgctgguctgaccctgtua

SEQ ID NO: 70860 - DNA, 25 bp, Artificial Sequence
  Synthetic
gagtacaucatggaccuaggaggaa

SEQ ID NO: 70861 - DNA, 25 bp, Artificial Sequence
  Synthetic
caggacaaaggauccatucagaagt

SEQ ID NO: 70862 - DNA, 22 bp, Artificial Sequence
  Synthetic
gtacgtcuggtggtcaaucagg

SEQ ID NO: 70863 - DNA, 23 bp, Artificial Sequence
  Synthetic
ctgatggagcgutgtatcacuga

SEQ ID NO: 70864 - DNA, 21 bp, Artificial Sequence
  Synthetic
ctcctccauggtgatctgcut

SEQ ID NO: 70865 - DNA, 21 bp, Artificial Sequence
  Synthetic
tggcuaccucaacaaggacac

SEQ ID NO: 70866 - DNA, 17 bp, Artificial Sequence
  Synthetic
caccugcgaggcaguga

SEQ ID NO: 70867 - DNA, 17 bp, Artificial Sequence
  Synthetic
ctgguggccagcaugga

SEQ ID NO: 70868 - DNA, 19 bp, Artificial Sequence
  Synthetic
gtaguggtggcugcaggag

SEQ ID NO: 70869 - DNA, 17 bp, Artificial Sequence
  Synthetic
ctcagccccacgugcut

SEQ ID NO: 70870 - DNA, 18 bp, Artificial Sequence
  Synthetic
caccagcucccggtacuc

SEQ ID NO: 70871 - DNA, 18 bp, Artificial Sequence
  Synthetic
gtggaugtcccucagccc

SEQ ID NO: 70872 - DNA, 21 bp, Artificial Sequence
  Synthetic
ccaacgugtctgaagtugcct

SEQ ID NO: 70873 - DNA, 19 bp, Artificial Sequence
  Synthetic
ggcagucggaggacaugac

SEQ ID NO: 70874 - DNA, 19 bp, Artificial Sequence
  Synthetic
ccagccccacuaggugaga

SEQ ID NO: 70875 - DNA, 19 bp, Artificial Sequence
  Synthetic
cgagggaggucttgcugga

SEQ ID NO: 70876 - DNA, 21 bp, Artificial Sequence
  Synthetic
tctcaggugacacctccucaa

SEQ ID NO: 70877 - DNA, 17 bp, Artificial Sequence
  Synthetic
ccaccuccgccaguacc

SEQ ID NO: 70878 - DNA, 18 bp, Artificial Sequence
  Synthetic
cagcgacccacaguguca

SEQ ID NO: 70879 - DNA, 18 bp, Artificial Sequence
  Synthetic
tggactcugcctgguggt

SEQ ID NO: 70880 - DNA, 25 bp, Artificial Sequence
  Synthetic
gcatacccaagaccutgagugaaaa

SEQ ID NO: 70881 - DNA, 26 bp, Artificial Sequence
  Synthetic
gcattgtacauaaaaggcactugcat

SEQ ID NO: 70882 - DNA, 21 bp, Artificial Sequence
  Synthetic
gtgaacuccactcctaugcca

SEQ ID NO: 70883 - DNA, 23 bp, Artificial Sequence
  Synthetic
gatcugaaccgaggacacctuag

SEQ ID NO: 70884 - DNA, 27 bp, Artificial Sequence
  Synthetic
gtgcagcaauaaagtcatattctcugg

SEQ ID NO: 70885 - DNA, 21 bp, Artificial Sequence
  Synthetic
ctgaccttgugcctcttcugt

SEQ ID NO: 70886 - DNA, 20 bp, Artificial Sequence
  Synthetic
cctccgtcutctcccaguct

SEQ ID NO: 70887 - DNA, 25 bp, Artificial Sequence
  Synthetic
gaaacaggctugtaattgtgagucc

SEQ ID NO: 70888 - DNA, 22 bp, Artificial Sequence
  Synthetic
ccactccauctgactcccugat

SEQ ID NO: 70889 - DNA, 23 bp, Artificial Sequence
  Synthetic
gagaggaaggauagugcaaaggg

SEQ ID NO: 70890 - DNA, 29 bp, Artificial Sequence
  Synthetic
tgcttatatgcacutactttgacactuca

SEQ ID NO: 70891 - DNA, 22 bp, Artificial Sequence
  Synthetic
gcacagaagguggaacagaugt

SEQ ID NO: 70892 - DNA, 24 bp, Artificial Sequence
  Synthetic
gacttguaaatcaggtugcgcaaa

SEQ ID NO: 70893 - DNA, 28 bp, Artificial Sequence
  Synthetic
tggtttagaagaugctgtcgttgaaaua

SEQ ID NO: 70894 - DNA, 31 bp, Artificial Sequence
  Synthetic
gacagacaaaaautcacatccuagaaaaagt

SEQ ID NO: 70895 - DNA, 27 bp, Artificial Sequence
  Synthetic
caggaaauggagaagatgactgaugaa

SEQ ID NO: 70896 - DNA, 25 bp, Artificial Sequence
  Synthetic
caccaaauaaaccaagcaggacauc

SEQ ID NO: 70897 - DNA, 23 bp, Artificial Sequence
  Synthetic
gacuccagaggtcauaggaacct

SEQ ID NO: 70898 - DNA, 21 bp, Artificial Sequence
  Synthetic
gccacatuaacagccgcctua

SEQ ID NO: 70899 - DNA, 25 bp, Artificial Sequence
  Synthetic
gacatagaggaucaggaaguggagt

SEQ ID NO: 70900 - DNA, 19 bp, Artificial Sequence
  Synthetic
ggagaagccacgugctcua

SEQ ID NO: 70901 - DNA, 18 bp, Artificial Sequence
  Synthetic
cgacgcaguggaaaugcc

SEQ ID NO: 70902 - DNA, 25 bp, Artificial Sequence
  Synthetic
ggccacugagatagaaaagtucaga

SEQ ID NO: 70903 - DNA, 26 bp, Artificial Sequence
  Synthetic
cgaagugaggagaacaaaggacuaag

SEQ ID NO: 70904 - DNA, 21 bp, Artificial Sequence
  Synthetic
gttaatgtgucctcgguggct

SEQ ID NO: 70905 - DNA, 25 bp, Artificial Sequence
  Synthetic
caagttgctguggacctctaattug

SEQ ID NO: 70906 - DNA, 21 bp, Artificial Sequence
  Synthetic
gcacagacaacccutcccauc

SEQ ID NO: 70907 - DNA, 21 bp, Artificial Sequence
  Synthetic
gagttgccugagccacttcut

SEQ ID NO: 70908 - DNA, 17 bp, Artificial Sequence
  Synthetic
gaggaggucggctgguc

SEQ ID NO: 70909 - DNA, 19 bp, Artificial Sequence
  Synthetic
gggacaaggcguaguggat

SEQ ID NO: 70910 - DNA, 20 bp, Artificial Sequence
  Synthetic
ggctgguggagataaugggt

SEQ ID NO: 70911 - DNA, 18 bp, Artificial Sequence
  Synthetic
cgtcttguccccgucaca

SEQ ID NO: 70912 - DNA, 26 bp, Artificial Sequence
  Synthetic
tgctacttcugaattgaaatggtuca

SEQ ID NO: 70913 - DNA, 27 bp, Artificial Sequence
  Synthetic
gattacctaccautactctgcagtgut

SEQ ID NO: 70914 - DNA, 23 bp, Artificial Sequence
  Synthetic
cactcatcacgauttcaggccua

SEQ ID NO: 70915 - DNA, 24 bp, Artificial Sequence
  Synthetic
auagagagtaccugggaacaacct

SEQ ID NO: 70916 - DNA, 26 bp, Artificial Sequence
  Synthetic
tccattacagtccuaaacctgagcua

SEQ ID NO: 70917 - DNA, 24 bp, Artificial Sequence
  Synthetic
ggcaaggguttgaagaacatucat

SEQ ID NO: 70918 - DNA, 26 bp, Artificial Sequence
  Synthetic
gattggaaucacattacccuggagaa

SEQ ID NO: 70919 - DNA, 20 bp, Artificial Sequence
  Synthetic
ggcacucctagccauagcac

SEQ ID NO: 70920 - DNA, 21 bp, Artificial Sequence
  Synthetic
tctgacccaagccutggaauc

SEQ ID NO: 70921 - DNA, 23 bp, Artificial Sequence
  Synthetic
acctcauaaccatctuccagcct

SEQ ID NO: 70922 - DNA, 22 bp, Artificial Sequence
  Synthetic
cctctgacccagugccctaaua

SEQ ID NO: 70923 - DNA, 21 bp, Artificial Sequence
  Synthetic
cctcctcugacctcacaugga

SEQ ID NO: 70924 - DNA, 22 bp, Artificial Sequence
  Synthetic
gcaaagggagggaauggucaat

SEQ ID NO: 70925 - DNA, 23 bp, Artificial Sequence
  Synthetic
cttgatccgaugcctctttucct

SEQ ID NO: 70926 - DNA, 19 bp, Artificial Sequence
  Synthetic
acccauccgaagctcucca

SEQ ID NO: 70927 - DNA, 21 bp, Artificial Sequence
  Synthetic
gactgcucacccctaaccaut

SEQ ID NO: 70928 - DNA, 18 bp, Artificial Sequence
  Synthetic
caggcagcugtccuccac

SEQ ID NO: 70929 - DNA, 19 bp, Artificial Sequence
  Synthetic
tgcccaccuaccctgacut

SEQ ID NO: 70930 - DNA, 19 bp, Artificial Sequence
  Synthetic
acacugcggccaaauaggg

SEQ ID NO: 70931 - DNA, 23 bp, Artificial Sequence
  Synthetic
cctcagtggugagtgagagaugt

SEQ ID NO: 70932 - DNA, 24 bp, Artificial Sequence
  Synthetic
gggaatcctuacctctgtcuccaa

SEQ ID NO: 70933 - DNA, 21 bp, Artificial Sequence
  Synthetic
ctttgccacagugcaguacag

SEQ ID NO: 70934 - DNA, 21 bp, Artificial Sequence
  Synthetic
ggatggcagcagguctttcut

SEQ ID NO: 70935 - DNA, 19 bp, Artificial Sequence
  Synthetic
caucgaccgcgagctcuac

SEQ ID NO: 70936 - DNA, 18 bp, Artificial Sequence
  Synthetic
ccgccucagccttgaguc

SEQ ID NO: 70937 - DNA, 19 bp, Artificial Sequence
  Synthetic
acaauacgcagcgctucct

SEQ ID NO: 70938 - DNA, 20 bp, Artificial Sequence
  Synthetic
cttctcgaagcucgcctuca

SEQ ID NO: 70939 - DNA, 20 bp, Artificial Sequence
  Synthetic
acaaggcugacaucgaggag

SEQ ID NO: 70940 - DNA, 17 bp, Artificial Sequence
  Synthetic
ccguagcgcctcgtugg

SEQ ID NO: 70941 - DNA, 17 bp, Artificial Sequence
  Synthetic
agcaaacgcgccuccut

SEQ ID NO: 70942 - DNA, 20 bp, Artificial Sequence
  Synthetic
ggcuccggaagaaccttuca

SEQ ID NO: 70943 - DNA, 23 bp, Artificial Sequence
  Synthetic
ctgtggtcucagttcctgaagut

SEQ ID NO: 70944 - DNA, 23 bp, Artificial Sequence
  Synthetic
cagagaugaaaggugagcacaca

SEQ ID NO: 70945 - DNA, 22 bp, Artificial Sequence
  Synthetic
ccaggtaagcuggtcttgtcuc

SEQ ID NO: 70946 - DNA, 23 bp, Artificial Sequence
  Synthetic
agtcccagagagaauccaggtut

SEQ ID NO: 70947 - DNA, 20 bp, Artificial Sequence
  Synthetic
gttgagtgcugaccgtctug

SEQ ID NO: 70948 - DNA, 23 bp, Artificial Sequence
  Synthetic
ggagaacctugtcctcctcttug

SEQ ID NO: 70949 - DNA, 21 bp, Artificial Sequence
  Synthetic
aggagggautcgaagguggaa

SEQ ID NO: 70950 - DNA, 21 bp, Artificial Sequence
  Synthetic
tgtaggcaaggacuccaucgt

SEQ ID NO: 70951 - DNA, 28 bp, Artificial Sequence
  Synthetic
gctgcgagtuataatgtgttacaaucat

SEQ ID NO: 70952 - DNA, 22 bp, Artificial Sequence
  Synthetic
ccaagaactugccgcagtttut

SEQ ID NO: 70953 - DNA, 20 bp, Artificial Sequence
  Synthetic
actcctcccutctgctucgt

SEQ ID NO: 70954 - DNA, 22 bp, Artificial Sequence
  Synthetic
gcagatggucttttggtgucct

SEQ ID NO: 70955 - DNA, 22 bp, Artificial Sequence
  Synthetic
ggagggaaugcacacagatguc

SEQ ID NO: 70956 - DNA, 20 bp, Artificial Sequence
  Synthetic
tcctcccauttgcagaugcc

SEQ ID NO: 70957 - DNA, 24 bp, Artificial Sequence
  Synthetic
ttcccaaccuatgcttacctttuc

SEQ ID NO: 70958 - DNA, 23 bp, Artificial Sequence
  Synthetic
accttttgggcucctttggtauc

SEQ ID NO: 70959 - DNA, 25 bp, Artificial Sequence
  Synthetic
cgacgacagtutagtggagcttuac

SEQ ID NO: 70960 - DNA, 28 bp, Artificial Sequence
  Synthetic
ctcaccttuaaattagctttugccaact

SEQ ID NO: 70961 - DNA, 22 bp, Artificial Sequence
  Synthetic
gaguctgcattugaaagcccaa

SEQ ID NO: 70962 - DNA, 20 bp, Artificial Sequence
  Synthetic
gtgggucgcagagatctgut

SEQ ID NO: 70963 - DNA, 28 bp, Artificial Sequence
  Synthetic
ggttggcagugaaaaacataacattuga

SEQ ID NO: 70964 - DNA, 22 bp, Artificial Sequence
  Synthetic
gtggttugacccacctctacut

SEQ ID NO: 70965 - DNA, 22 bp, Artificial Sequence
  Synthetic
aactuggaacagagacctuggg

SEQ ID NO: 70966 - DNA, 26 bp, Artificial Sequence
  Synthetic
tcuatagaaacctucagggaagacac

SEQ ID NO: 70967 - DNA, 21 bp, Artificial Sequence
  Synthetic
tgctgcgcuctgctatctauc

SEQ ID NO: 70968 - DNA, 21 bp, Artificial Sequence
  Synthetic
gcuggacucaaaaaccccgaa

SEQ ID NO: 70969 - DNA, 23 bp, Artificial Sequence
  Synthetic
tgtgtgaatugtgctgtgauggt

SEQ ID NO: 70970 - DNA, 23 bp, Artificial Sequence
  Synthetic
ggagggatccugggaacaacuaa

SEQ ID NO: 70971 - DNA, 21 bp, Artificial Sequence
  Synthetic
agcaagaagaccgcgucauag

SEQ ID NO: 70972 - DNA, 20 bp, Artificial Sequence
  Synthetic
tccctccugctggacctuat

SEQ ID NO: 70973 - DNA, 23 bp, Artificial Sequence
  Synthetic
ttgagtacgaauctgccauccac

SEQ ID NO: 70974 - DNA, 18 bp, Artificial Sequence
  Synthetic
gctgugcgggtcuaggga

SEQ ID NO: 70975 - DNA, 18 bp, Artificial Sequence
  Synthetic
gcggcaugaguggcaaag

SEQ ID NO: 70976 - DNA, 25 bp, Artificial Sequence
  Synthetic
ctcatctgugcaaagaggacaguaa

SEQ ID NO: 70977 - DNA, 26 bp, Artificial Sequence
  Synthetic
acaccttcatcucatagtcgcaauac

SEQ ID NO: 70978 - DNA, 22 bp, Artificial Sequence
  Synthetic
gatgtgccauagacaaggugga

SEQ ID NO: 70979 - DNA, 27 bp, Artificial Sequence
  Synthetic
tgccaccauagagggtauagaaaaact

SEQ ID NO: 70980 - DNA, 20 bp, Artificial Sequence
  Synthetic
cagctctgutagccccauct

SEQ ID NO: 70981 - DNA, 28 bp, Artificial Sequence
  Synthetic
caatgattaggaaaacucaacttgcuga

SEQ ID NO: 70982 - DNA, 21 bp, Artificial Sequence
  Synthetic
gctaaagggcucagagugcag

SEQ ID NO: 70983 - DNA, 20 bp, Artificial Sequence
  Synthetic
tcctcacggugaacgtctug

SEQ ID NO: 70984 - DNA, 21 bp, Artificial Sequence
  Synthetic
tgacccaagcucctaauccga

SEQ ID NO: 70985 - DNA, 24 bp, Artificial Sequence
  Synthetic
cccaatcacucagtctagtucaca

SEQ ID NO: 70986 - DNA, 25 bp, Artificial Sequence
  Synthetic
tctaagactuacccccatggttuca

SEQ ID NO: 70987 - DNA, 24 bp, Artificial Sequence
  Synthetic
cctttcatucacaagcccattugt

SEQ ID NO: 70988 - DNA, 27 bp, Artificial Sequence
  Synthetic
ctaaattccugaacatcaccuagcact

SEQ ID NO: 70989 - DNA, 28 bp, Artificial Sequence
  Synthetic
catggcttgaaaautactggacugaaaa

SEQ ID NO: 70990 - DNA, 19 bp, Artificial Sequence
  Synthetic
gatuaggagccgtgugcgt

SEQ ID NO: 70991 - DNA, 24 bp, Artificial Sequence
  Synthetic
cttcctagguaggtcttggcauag

SEQ ID NO: 70992 - DNA, 21 bp, Artificial Sequence
  Synthetic
gagcacacuggtcacattugg

SEQ ID NO: 70993 - DNA, 20 bp, Artificial Sequence
  Synthetic
ttttcauggagcgtcugcct

SEQ ID NO: 70994 - DNA, 19 bp, Artificial Sequence
  Synthetic
agcauggccgugacagaag

SEQ ID NO: 70995 - DNA, 27 bp, Artificial Sequence
  Synthetic
agactctatgugcctctaacttcctut

SEQ ID NO: 70996 - DNA, 23 bp, Artificial Sequence
  Synthetic
cccugcaggaaacaagaaaaugg

SEQ ID NO: 70997 - DNA, 20 bp, Artificial Sequence
  Synthetic
cccucacccgctattugcat

SEQ ID NO: 70998 - DNA, 20 bp, Artificial Sequence
  Synthetic
ccuggacccccaauaaaccc

SEQ ID NO: 70999 - DNA, 20 bp, Artificial Sequence
  Synthetic
gttccagcagacuccccaut

SEQ ID NO: 71000 - DNA, 24 bp, Artificial Sequence
  Synthetic
aggaagacaccuttaagcgtugaa

SEQ ID NO: 71001 - DNA, 25 bp, Artificial Sequence
  Synthetic
tctccatgaccutctcttcatccuc

SEQ ID NO: 71002 - DNA, 20 bp, Artificial Sequence
  Synthetic
cacgguggccttcucaaaga

SEQ ID NO: 71003 - DNA, 19 bp, Artificial Sequence
  Synthetic
ggagaugaaccgcgtccug

SEQ ID NO: 71004 - DNA, 20 bp, Artificial Sequence
  Synthetic
cagcaggutcttctgguggt

SEQ ID NO: 71005 - DNA, 19 bp, Artificial Sequence
  Synthetic
cugacgcggagauggagaa

SEQ ID NO: 71006 - DNA, 17 bp, Artificial Sequence
  Synthetic
guccagcacgctcugct

SEQ ID NO: 71007 - DNA, 17 bp, Artificial Sequence
  Synthetic
cggcgcuggaggaaguc

SEQ ID NO: 71008 - DNA, 19 bp, Artificial Sequence
  Synthetic
tcctgaaugctgcgctuct

SEQ ID NO: 71009 - DNA, 17 bp, Artificial Sequence
  Synthetic
cagaggcuggcugagca

SEQ ID NO: 71010 - DNA, 18 bp, Artificial Sequence
  Synthetic
cggcauggcctggatcug

SEQ ID NO: 71011 - DNA, 17 bp, Artificial Sequence
  Synthetic
cgggacguggaggugga

SEQ ID NO: 71012 - DNA, 22 bp, Artificial Sequence
  Synthetic
cctgcaggutgccatgacauat

SEQ ID NO: 71013 - DNA, 21 bp, Artificial Sequence
  Synthetic
gctctuggccttctacuacgg

SEQ ID NO: 71014 - DNA, 21 bp, Artificial Sequence
  Synthetic
gggaggcaccuaagtaucgaa

SEQ ID NO: 71015 - DNA, 23 bp, Artificial Sequence
  Synthetic
gtgttcccguttcctcttgauct

SEQ ID NO: 71016 - DNA, 26 bp, Artificial Sequence
  Synthetic
gggtcagacugaggaaaatuaaagga

SEQ ID NO: 71017 - DNA, 23 bp, Artificial Sequence
  Synthetic
atgtctaaugccaccatcctcug

SEQ ID NO: 71018 - DNA, 25 bp, Artificial Sequence
  Synthetic
gcggaagaugaagatttcggattuc

SEQ ID NO: 71019 - DNA, 23 bp, Artificial Sequence
  Synthetic
ggtatcttucctaggctucccaa

SEQ ID NO: 71020 - DNA, 24 bp, Artificial Sequence
  Synthetic
cccctgttgucataggtaggtuag

SEQ ID NO: 71021 - DNA, 25 bp, Artificial Sequence
  Synthetic
cagccauagaaaugagcaaaaccag

SEQ ID NO: 71022 - DNA, 25 bp, Artificial Sequence
  Synthetic
tccagaaugagcattacttcuccct

SEQ ID NO: 71023 - DNA, 22 bp, Artificial Sequence
  Synthetic
acaggcagcugaauaagccaat

SEQ ID NO: 71024 - DNA, 27 bp, Artificial Sequence
  Synthetic
attttattttuggccctcaactuggac

SEQ ID NO: 71025 - DNA, 22 bp, Artificial Sequence
  Synthetic
gatgtagggcuggaagtggtut

SEQ ID NO: 71026 - DNA, 20 bp, Artificial Sequence
  Synthetic
gtgaccucagctgtctgcuc

SEQ ID NO: 71027 - DNA, 24 bp, Artificial Sequence
  Synthetic
acagaggacccuctttcatuacct

SEQ ID NO: 71028 - DNA, 19 bp, Artificial Sequence
  Synthetic
gagcucgggaacgttggua

SEQ ID NO: 71029 - DNA, 18 bp, Artificial Sequence
  Synthetic
gcccagaagacgcugtuc

SEQ ID NO: 71030 - DNA, 24 bp, Artificial Sequence
  Synthetic
ggccatgagucagactgaaauagt

SEQ ID NO: 71031 - DNA, 21 bp, Artificial Sequence
  Synthetic
gagctcaugaacaccaagcug

SEQ ID NO: 71032 - DNA, 29 bp, Artificial Sequence
  Synthetic
acagaattaauacagccaggtcaucaaat

SEQ ID NO: 71033 - DNA, 27 bp, Artificial Sequence
  Synthetic
acuagagaaccaatuagagggaaaggt

SEQ ID NO: 71034 - DNA, 27 bp, Artificial Sequence
  Synthetic
acgaagtccguaagtgttcatacatut

SEQ ID NO: 71035 - DNA, 27 bp, Artificial Sequence
  Synthetic
tgcatgtagguaatgaatctagcaugg

SEQ ID NO: 71036 - DNA, 26 bp, Artificial Sequence
  Synthetic
acagaataguctgtgaauggcaagaa

SEQ ID NO: 71037 - DNA, 28 bp, Artificial Sequence
  Synthetic
gctgatgcuagggaaaaggauaaagaat

SEQ ID NO: 71038 - DNA, 23 bp, Artificial Sequence
  Synthetic
cccatgtcuttgatcttcgucct

SEQ ID NO: 71039 - DNA, 28 bp, Artificial Sequence
  Synthetic
catgtaagguacagaaagaaaggugact

SEQ ID NO: 71040 - DNA, 20 bp, Artificial Sequence
  Synthetic
ccaccaaaucctgctcgtuc

SEQ ID NO: 71041 - DNA, 28 bp, Artificial Sequence
  Synthetic
gaaaattcagcagaaauagacagtugct

SEQ ID NO: 71042 - DNA, 20 bp, Artificial Sequence
  Synthetic
caaugcacagcaccgtgaug

SEQ ID NO: 71043 - DNA, 23 bp, Artificial Sequence
  Synthetic
agagcagtguggaataccatcug

SEQ ID NO: 71044 - DNA, 23 bp, Artificial Sequence
  Synthetic
catggtgtucagaggaagugaga

SEQ ID NO: 71045 - DNA, 22 bp, Artificial Sequence
  Synthetic
ggccacaagcautgcttatgut

SEQ ID NO: 71046 - DNA, 21 bp, Artificial Sequence
  Synthetic
atgcccaagaucctgactgug

SEQ ID NO: 71047 - DNA, 23 bp, Artificial Sequence
  Synthetic
ccagagaagcugggatgttguag

SEQ ID NO: 71048 - DNA, 26 bp, Artificial Sequence
  Synthetic
gagtggaagutctcagagacuaacag

SEQ ID NO: 71049 - DNA, 27 bp, Artificial Sequence
  Synthetic
accatttacaggaugtagaggttccut

SEQ ID NO: 71050 - DNA, 21 bp, Artificial Sequence
  Synthetic
actgtcttuctctgcccucca

SEQ ID NO: 71051 - DNA, 21 bp, Artificial Sequence
  Synthetic
ggcatggatugggcctgauaa

SEQ ID NO: 71052 - DNA, 27 bp, Artificial Sequence
  Synthetic
gattgaaaccaagcutgcgagaaaaua

SEQ ID NO: 71053 - DNA, 20 bp, Artificial Sequence
  Synthetic
tgcaaugaccccgttctcuc

SEQ ID NO: 71054 - DNA, 27 bp, Artificial Sequence
  Synthetic
cgcctggcaauaaatatcttaauagca

SEQ ID NO: 71055 - DNA, 28 bp, Artificial Sequence
  Synthetic
ggcgatacugaggaggattttattguat

SEQ ID NO: 71056 - DNA, 17 bp, Artificial Sequence
  Synthetic
tcgtggguccggugaac

SEQ ID NO: 71057 - DNA, 17 bp, Artificial Sequence
  Synthetic
gccuccacccacagguc

SEQ ID NO: 71058 - DNA, 18 bp, Artificial Sequence
  Synthetic
accccaguccgccuaagt

SEQ ID NO: 71059 - DNA, 17 bp, Artificial Sequence
  Synthetic
ccacgucatcgcugcct

SEQ ID NO: 71060 - DNA, 19 bp, Artificial Sequence
  Synthetic
ccagugaccccctgtccut

SEQ ID NO: 71061 - DNA, 22 bp, Artificial Sequence
  Synthetic
ccccataaauagccaggcugag

SEQ ID NO: 71062 - DNA, 22 bp, Artificial Sequence
  Synthetic
ccctcuccagagagaacccuat

SEQ ID NO: 71063 - DNA, 21 bp, Artificial Sequence
  Synthetic
cccacaccucgtaggtctuag

SEQ ID NO: 71064 - DNA, 22 bp, Artificial Sequence
  Synthetic
gtgggaguaacactgcacuact

SEQ ID NO: 71065 - DNA, 20 bp, Artificial Sequence
  Synthetic
gtgcaccugggattcaaugg

SEQ ID NO: 71066 - DNA, 22 bp, Artificial Sequence
  Synthetic
ggatttactggucagccagcua

SEQ ID NO: 71067 - DNA, 25 bp, Artificial Sequence
  Synthetic
tggtgaggcaaautaggtgtgtaug

SEQ ID NO: 71068 - DNA, 24 bp, Artificial Sequence
  Synthetic
ttcctaaggutgcacauaggcaaa

SEQ ID NO: 71069 - DNA, 27 bp, Artificial Sequence
  Synthetic
cccagcttcuctgtctaagtaguaact

SEQ ID NO: 71070 - DNA, 29 bp, Artificial Sequence
  Synthetic
tggcaaacaauaccaaatttacttcaugt

SEQ ID NO: 71071 - DNA, 28 bp, Artificial Sequence
  Synthetic
gcccataaaggaaugtaaaccaacaaug

SEQ ID NO: 71072 - DNA, 20 bp, Artificial Sequence
  Synthetic
aggctgucggactgaaacug

SEQ ID NO: 71073 - DNA, 28 bp, Artificial Sequence
  Synthetic
cttcacaagatgucactctgatatccut

SEQ ID NO: 71074 - DNA, 28 bp, Artificial Sequence
  Synthetic
ttcagacacaacaautgctttcatuacc

SEQ ID NO: 71075 - DNA, 28 bp, Artificial Sequence
  Synthetic
gaacagtgcttugagtatatgctaguca

SEQ ID NO: 71076 - DNA, 21 bp, Artificial Sequence
  Synthetic
tcctccagucctgggaaguag

SEQ ID NO: 71077 - DNA, 21 bp, Artificial Sequence
  Synthetic
ctggacugctccaucacacat

SEQ ID NO: 71078 - DNA, 22 bp, Artificial Sequence
  Synthetic
tgagccttcuctgctcaguagt

SEQ ID NO: 71079 - DNA, 22 bp, Artificial Sequence
  Synthetic
tctgtgactgaugcctgtgtug

SEQ ID NO: 71080 - DNA, 21 bp, Artificial Sequence
  Synthetic
cgacccaucaggactcaguca

SEQ ID NO: 71081 - DNA, 20 bp, Artificial Sequence
  Synthetic
gtgattugaccccugcacct

SEQ ID NO: 71082 - DNA, 19 bp, Artificial Sequence
  Synthetic
ggagaaccaggcccutcug

SEQ ID NO: 71083 - DNA, 18 bp, Artificial Sequence
  Synthetic
cggaaccagcgccuguat

SEQ ID NO: 71084 - DNA, 17 bp, Artificial Sequence
  Synthetic
tggagcucgccguaggt

SEQ ID NO: 71085 - DNA, 18 bp, Artificial Sequence
  Synthetic
cucatuccccgggagcag

SEQ ID NO: 71086 - DNA, 17 bp, Artificial Sequence
  Synthetic
gcccgucgcacguagag

SEQ ID NO: 71087 - DNA, 20 bp, Artificial Sequence
  Synthetic
ctggugcagacacuggagat

SEQ ID NO: 71088 - DNA, 21 bp, Artificial Sequence
  Synthetic
gcggagcgaucacaactguat

SEQ ID NO: 71089 - DNA, 21 bp, Artificial Sequence
  Synthetic
tttgccacuccttcctcagug

SEQ ID NO: 71090 - DNA, 20 bp, Artificial Sequence
  Synthetic
ggcctuggaggagttctgug

SEQ ID NO: 71091 - DNA, 21 bp, Artificial Sequence
  Synthetic
agacctcaccguctcatcugt

SEQ ID NO: 71092 - DNA, 22 bp, Artificial Sequence
  Synthetic
acttacagcaaaauggccucgt

SEQ ID NO: 71093 - DNA, 26 bp, Artificial Sequence
  Synthetic
tgcatggctcutagatttgagtgaut

SEQ ID NO: 71094 - DNA, 20 bp, Artificial Sequence
  Synthetic
gcggtccaugtaaccaugac

SEQ ID NO: 71095 - DNA, 28 bp, Artificial Sequence
  Synthetic
tcttttcatggtcucgtctcctaattuc

SEQ ID NO: 71096 - DNA, 26 bp, Artificial Sequence
  Synthetic
gaactaatacuccaggtgcattucca

SEQ ID NO: 71097 - DNA, 22 bp, Artificial Sequence
  Synthetic
ggtgcuaatgtccugaccacag

SEQ ID NO: 71098 - DNA, 20 bp, Artificial Sequence
  Synthetic
cagcatctcuacggcacgua

SEQ ID NO: 71099 - DNA, 21 bp, Artificial Sequence
  Synthetic
ccatgccaagcutcagtguca

SEQ ID NO: 71100 - DNA, 21 bp, Artificial Sequence
  Synthetic
gcaagagcaucucaagcagac

SEQ ID NO: 71101 - DNA, 28 bp, Artificial Sequence
  Synthetic
aggacacattcuaaatcaacacaccaut

SEQ ID NO: 71102 - DNA, 25 bp, Artificial Sequence
  Synthetic
agccattccuataaagcaucccaat

SEQ ID NO: 71103 - DNA, 22 bp, Artificial Sequence
  Synthetic
ggatagcatcaucgctgagguc

SEQ ID NO: 71104 - DNA, 27 bp, Artificial Sequence
  Synthetic
agtcgaaaaatgcutgtctctagtugt

SEQ ID NO: 71105 - DNA, 28 bp, Artificial Sequence
  Synthetic
tccatggcaaaccutatcttctaactut

SEQ ID NO: 71106 - DNA, 26 bp, Artificial Sequence
  Synthetic
catatcccacucccaacatctaaugt

SEQ ID NO: 71107 - DNA, 27 bp, Artificial Sequence
  Synthetic
caacaatcuagggacaaggaaguagag

SEQ ID NO: 71108 - DNA, 27 bp, Artificial Sequence
  Synthetic
acctggacaaagguacacaagauaaag

SEQ ID NO: 71109 - DNA, 28 bp, Artificial Sequence
  Synthetic
catctgatatatcugtgttgctgcatut

SEQ ID NO: 71110 - DNA, 25 bp, Artificial Sequence
  Synthetic
ctcttaccagcutctttcugcagat

SEQ ID NO: 71111 - DNA, 24 bp, Artificial Sequence
  Synthetic
tggtgcaaacuacagatgguacac

SEQ ID NO: 71112 - DNA, 27 bp, Artificial Sequence
  Synthetic
ctcaatatcaatuggtcccaggctuaa

SEQ ID NO: 71113 - DNA, 21 bp, Artificial Sequence
  Synthetic
agctccatugaaggcaagguc

SEQ ID NO: 71114 - DNA, 26 bp, Artificial Sequence
  Synthetic
gcagaaatagucgagttgtatugcca

SEQ ID NO: 71115 - DNA, 23 bp, Artificial Sequence
  Synthetic
cctgtgagttugcctgttttcuc

SEQ ID NO: 71116 - DNA, 20 bp, Artificial Sequence
  Synthetic
gguttgugaggacccacaac

SEQ ID NO: 71117 - DNA, 26 bp, Artificial Sequence
  Synthetic
gcttttcttaccugccttgaactcut

SEQ ID NO: 71118 - DNA, 20 bp, Artificial Sequence
  Synthetic
gggaaggaacggucaccuac

SEQ ID NO: 71119 - DNA, 22 bp, Artificial Sequence
  Synthetic
tcuctcuggacacacagaacct

SEQ ID NO: 71120 - DNA, 22 bp, Artificial Sequence
  Synthetic
gcacacaugagacacagcauga

SEQ ID NO: 71121 - DNA, 26 bp, Artificial Sequence
  Synthetic
gtgtctttccauctggtttcttccut

SEQ ID NO: 71122 - DNA, 18 bp, Artificial Sequence
  Synthetic
cacccuggctcagcaugt

SEQ ID NO: 71123 - DNA, 19 bp, Artificial Sequence
  Synthetic
ccccacaggcaucgugaag

SEQ ID NO: 71124 - DNA, 23 bp, Artificial Sequence
  Synthetic
gacagugagccaatggaaaugag

SEQ ID NO: 71125 - DNA, 20 bp, Artificial Sequence
  Synthetic
gagaaaccgauggccaccua

SEQ ID NO: 71126 - DNA, 24 bp, Artificial Sequence
  Synthetic
atcttctcatacuggtcacgcauc

SEQ ID NO: 71127 - DNA, 24 bp, Artificial Sequence
  Synthetic
gcagtautcaggccuaaggaacac

SEQ ID NO: 71128 - DNA, 21 bp, Artificial Sequence
  Synthetic
gctttcctccugggctgttuc

SEQ ID NO: 71129 - DNA, 24 bp, Artificial Sequence
  Synthetic
gggacacuggaagttgtcatacuc

SEQ ID NO: 71130 - DNA, 19 bp, Artificial Sequence
  Synthetic
cctuccgggacgaggauga

SEQ ID NO: 71131 - DNA, 17 bp, Artificial Sequence
  Synthetic
ccuccccaccgagcuct

SEQ ID NO: 71132 - DNA, 27 bp, Artificial Sequence
  Synthetic
actacgaagagcuaataagaggtcugt

SEQ ID NO: 71133 - DNA, 24 bp, Artificial Sequence
  Synthetic
caacgttugcactatgacctucag

SEQ ID NO: 71134 - DNA, 20 bp, Artificial Sequence
  Synthetic
ctcttgccuccactggtugt

SEQ ID NO: 71135 - DNA, 21 bp, Artificial Sequence
  Synthetic
ggatcgctuttccgagctuct

SEQ ID NO: 71136 - DNA, 20 bp, Artificial Sequence
  Synthetic
gccaccgcuatcacctucag

SEQ ID NO: 71137 - DNA, 25 bp, Artificial Sequence
  Synthetic
cutcaatggctauagagagaaccca

SEQ ID NO: 71138 - DNA, 25 bp, Artificial Sequence
  Synthetic
gacagcaaauggaaaaagauaggca

SEQ ID NO: 71139 - DNA, 28 bp, Artificial Sequence
  Synthetic
cgctgtcctucaaggtctaacttauaaa

SEQ ID NO: 71140 - DNA, 21 bp, Artificial Sequence
  Synthetic
gaaauctuccacgagcagggt

SEQ ID NO: 71141 - DNA, 21 bp, Artificial Sequence
  Synthetic
cccgcgggaagaugaauaagg

SEQ ID NO: 71142 - DNA, 26 bp, Artificial Sequence
  Synthetic
tagagaaataugctccagtgguaagt

SEQ ID NO: 71143 - DNA, 26 bp, Artificial Sequence
  Synthetic
tgtaagauaaattcccugaccccagt

SEQ ID NO: 71144 - DNA, 30 bp, Artificial Sequence; identical to SEQ ID NO: 53008
  Synthetic

SEQ ID NO: 71145 - DNA, 24 bp, Artificial Sequence
  Synthetic
catccatgcutgacactgaaauct

SEQ ID NO: 71146 - DNA, 26 bp, Artificial Sequence
  Synthetic
tcatgatgagauttcagtgucaagca

SEQ ID NO: 71147 - DNA, 22 bp, Artificial Sequence
  Synthetic
tgtctctccauttgccgcauat

SEQ ID NO: 71148 - DNA, 18 bp, Artificial Sequence
  Synthetic
gtcgcuctccagcuccag

SEQ ID NO: 71149 - DNA, 17 bp, Artificial Sequence
  Synthetic
ctgggcccgutgtcugt

SEQ ID NO: 71150 - DNA, 18 bp, Artificial Sequence
  Synthetic
gaaccagggccugtuggt

SEQ ID NO: 71151 - DNA, 22 bp, Artificial Sequence
  Synthetic
gcttccagcucctcuaaaagca

SEQ ID NO: 71152 - DNA, 28 bp, Artificial Sequence
  Synthetic
acaaagtatuaaaggccatctgtaccug

SEQ ID NO: 71153 - DNA, 27 bp, Artificial Sequence
  Synthetic
ttctccctggucatcttcttctaugat

SEQ ID NO: 71154 - DNA, 28 bp, Artificial Sequence
  Synthetic
agttctgttaaagutcatggcttttgug

SEQ ID NO: 71155 - DNA, 24 bp, Artificial Sequence
  Synthetic
agcgtttacgaucctctttcagug

SEQ ID NO: 71156 - DNA, 23 bp, Artificial Sequence
  Synthetic
accuggttucagagagagagagg

SEQ ID NO: 71157 - DNA, 28 bp, Artificial Sequence
  Synthetic
caaatcctactgaautggtgatccatug

SEQ ID NO: 71158 - DNA, 26 bp, Artificial Sequence
  Synthetic
gggtcagggaauttatctuacacaca

SEQ ID NO: 71159 - DNA, 27 bp, Artificial Sequence
  Synthetic
aacatagaaacaacacuggctgagtua

SEQ ID NO: 71160 - DNA, 17 bp, Artificial Sequence
  Synthetic
gcuggaccccgcgaaug

SEQ ID NO: 71161 - DNA, 17 bp, Artificial Sequence
  Synthetic
agcagcugcaccaugct

SEQ ID NO: 71162 - DNA, 22 bp, Artificial Sequence
  Synthetic
ggaaacgtgugccagtgatuct

SEQ ID NO: 71163 - DNA, 24 bp, Artificial Sequence
  Synthetic
gactttggaaacgcucatgttuca

SEQ ID NO: 71164 - DNA, 23 bp, Artificial Sequence
  Synthetic
gaaaacaacagccutagcauggt

SEQ ID NO: 71165 - DNA, 20 bp, Artificial Sequence
  Synthetic
aaaggaucagagcuggacgc

SEQ ID NO: 71166 - DNA, 28 bp, Artificial Sequence
  Synthetic
ggaggtttcugaaatgtgtatagctugt

SEQ ID NO: 71167 - DNA, 25 bp, Artificial Sequence
  Synthetic
tcatccaaaguttcagggttcucag

SEQ ID NO: 71168 - DNA, 22 bp, Artificial Sequence
  Synthetic
gctccaguccaaaguggaagat

SEQ ID NO: 71169 - DNA, 25 bp, Artificial Sequence
  Synthetic
ctcgttctagutcttgcttcuggaa

SEQ ID NO: 71170 - DNA, 21 bp, Artificial Sequence
  Synthetic
gtcccauagtgcugagaaccc

SEQ ID NO: 71171 - DNA, 27 bp, Artificial Sequence
  Synthetic
acaaggtgaggutctaatccattcuct

SEQ ID NO: 71172 - DNA, 23 bp, Artificial Sequence
  Synthetic
cgacuacaaggaatcaugcagga

SEQ ID NO: 71173 - DNA, 21 bp, Artificial Sequence
  Synthetic
gggctgcagugctttcctuaa

SEQ ID NO: 71174 - DNA, 24 bp, Artificial Sequence
  Synthetic
cgggcaugaaagtggacauaaaag

SEQ ID NO: 71175 - DNA, 25 bp, Artificial Sequence
  Synthetic
acugaagaaacagguggagaacaag

SEQ ID NO: 71176 - DNA, 19 bp, Artificial Sequence
  Synthetic
cagcgccccaaucctuact

SEQ ID NO: 71177 - DNA, 26 bp, Artificial Sequence
  Synthetic
aattattattggagugcaagcgaaug

SEQ ID NO: 71178 - DNA, 28 bp, Artificial Sequence
  Synthetic
aactgcttagtaacuagcagaagtgtuc

SEQ ID NO: 71179 - DNA, 24 bp, Artificial Sequence
  Synthetic
ggauatatgccauaccccagcaaa

SEQ ID NO: 71180 - DNA, 25 bp, Artificial Sequence
  Synthetic
cgagagcuggagttggatgaatuag

SEQ ID NO: 71181 - DNA, 24 bp, Artificial Sequence
  Synthetic
acuccagaatttucaagccagagg

SEQ ID NO: 71182 - DNA, 23 bp, Artificial Sequence
  Synthetic
agtatggatgcucccttctcugt

SEQ ID NO: 71183 - DNA, 19 bp, Artificial Sequence
  Synthetic
atgaggagggcgagucauc

SEQ ID NO: 71184 - DNA, 24 bp, Artificial Sequence
  Synthetic
aactaguaccggagaacactucct

SEQ ID NO: 71185 - DNA, 22 bp, Artificial Sequence
  Synthetic
tgtcttgucaactggccttuga

SEQ ID NO: 71186 - DNA, 28 bp, Artificial Sequence
  Synthetic
ttttagaactaauggacattgcttugcc

SEQ ID NO: 71187 - DNA, 22 bp, Artificial Sequence
  Synthetic
tcatatggccccucccttctut

SEQ ID NO: 71188 - DNA, 28 bp, Artificial Sequence
  Synthetic
gtcagcacaaaauttagcauccagaaat

SEQ ID NO: 71189 - DNA, 26 bp, Artificial Sequence
  Synthetic
gataaaacagtcutcaccaagcagug

SEQ ID NO: 71190 - DNA, 23 bp, Artificial Sequence
  Synthetic
aacggaautgtuaaggcaagcac

SEQ ID NO: 71191 - DNA, 24 bp, Artificial Sequence
  Synthetic
tctggttcaagutggtgttuggaa

SEQ ID NO: 71192 - DNA, 24 bp, Artificial Sequence
  Synthetic
aacatggtgtugaagtcctgcaua

SEQ ID NO: 71193 - DNA, 28 bp, Artificial Sequence
  Synthetic
aatcttctggtaaugcctctgaaaauct

SEQ ID NO: 71194 - DNA, 24 bp, Artificial Sequence
  Synthetic
gggtgggcutctgttctctttuaa

SEQ ID NO: 71195 - DNA, 21 bp, Artificial Sequence
  Synthetic
tctgagccgcauggguaaaaa

SEQ ID NO: 71196 - DNA, 25 bp, Artificial Sequence
  Synthetic
tgtttgcccugtgtaaatctgugaa

SEQ ID NO: 71197 - DNA, 27 bp, Artificial Sequence
  Synthetic
tgccacucagaaaatctagcttuaact

SEQ ID NO: 71198 - DNA, 21 bp, Artificial Sequence
  Synthetic
caagatgggcugccctacaut

SEQ ID NO: 71199 - DNA, 19 bp, Artificial Sequence
  Synthetic
gccacacguacaccauggg

SEQ ID NO: 71200 - DNA, 33 bp, Artificial Sequence
  Synthetic
tttatgauaacaccttatatuacaaaccaccat

SEQ ID NO: 71201 - DNA, 27 bp, Artificial Sequence
  Synthetic
accaaguagcattatcuccagaaagga

SEQ ID NO: 71202 - DNA, 27 bp, Artificial Sequence
  Synthetic
ctcctttcuggagataatgctactugg

SEQ ID NO: 71203 - DNA, 28 bp, Artificial Sequence
  Synthetic
acctctttaaaguacagtacctcaccut

SEQ ID NO: 71204 - DNA, 24 bp, Artificial Sequence
  Synthetic
gcagcagugcactaaauaacgagt

SEQ ID NO: 71205 - DNA, 27 bp, Artificial Sequence
  Synthetic
gggttttaaauaccaggagacaugcaa

SEQ ID NO: 71206 - DNA, 19 bp, Artificial Sequence
  Synthetic
acattcaccugggcgctua

SEQ ID NO: 71207 - DNA, 19 bp, Artificial Sequence
  Synthetic
tgctgatguccggctgaug

SEQ ID NO: 71208 - DNA, 21 bp, Artificial Sequence
  Synthetic
ctccagaacutcctggtugct

SEQ ID NO: 71209 - DNA, 26 bp, Artificial Sequence
  Synthetic
ggtgtgtctatauccatctccatguc

SEQ ID NO: 71210 - DNA, 26 bp, Artificial Sequence
  Synthetic
gaactaatcagcuagaggcgaucaat

SEQ ID NO: 71211 - DNA, 26 bp, Artificial Sequence
  Synthetic
gctttcattuaacatctgccaaugga

SEQ ID NO: 71212 - DNA, 20 bp, Artificial Sequence
  Synthetic
gcaccccaaaaagccutcug

SEQ ID NO: 71213 - DNA, 18 bp, Artificial Sequence
  Synthetic
cggaggcucccttuggat

SEQ ID NO: 71214 - DNA, 27 bp, Artificial Sequence
  Synthetic
atgatatgtggguattccgactttgut

SEQ ID NO: 71215 - DNA, 25 bp, Artificial Sequence
  Synthetic
tguctaagttttucaagcacagggt

SEQ ID NO: 71216 - DNA, 24 bp, Artificial Sequence
  Synthetic
gtctgtuacctgacaacugacact

SEQ ID NO: 71217 - DNA, 20 bp, Artificial Sequence
  Synthetic
tcctcccacccucactcauc

SEQ ID NO: 71218 - DNA, 27 bp, Artificial Sequence
  Synthetic
gggattgtauttgtagcaatucgagaa

SEQ ID NO: 71219 - DNA, 21 bp, Artificial Sequence
  Synthetic
gtgtggcagagagucctgaug

SEQ ID NO: 71220 - DNA, 20 bp, Artificial Sequence
  Synthetic
gcacgcagaggugaagugat

SEQ ID NO: 71221 - DNA, 24 bp, Artificial Sequence
  Synthetic
cccgacugaccagtcttttctaut

SEQ ID NO: 71222 - DNA, 27 bp, Artificial Sequence
  Synthetic
gatagatgactugctgcttccaguaaa

SEQ ID NO: 71223 - DNA, 28 bp, Artificial Sequence
  Synthetic
ggctgaatttuccaaaaagcaucaaaaa

SEQ ID NO: 71224 - DNA, 23 bp, Artificial Sequence
  Synthetic
gctttcauggactctgugaggaa

SEQ ID NO: 71225 - DNA, 26 bp, Artificial Sequence
  Synthetic
ctaggaatggacutggctctguaaag

SEQ ID NO: 71226 - DNA, 23 bp, Artificial Sequence
  Synthetic
tcttgtgccccutcaatgttcuc

SEQ ID NO: 71227 - DNA, 25 bp, Artificial Sequence
  Synthetic
ttttattggtccccutgtcttccuc

SEQ ID NO: 71228 - DNA, 24 bp, Artificial Sequence
  Synthetic
aattcagaaacucttgtccggugt

SEQ ID NO: 71229 - DNA, 27 bp, Artificial Sequence
  Synthetic
cctaccttggcuttctggaataatuct

SEQ ID NO: 71230 - DNA, 27 bp, Artificial Sequence
  Synthetic
gatagagaaaacacugtcugccaagaa

SEQ ID NO: 71231 - DNA, 28 bp, Artificial Sequence
  Synthetic
ctgcaatgtcautcattagctttgaugt

SEQ ID NO: 71232 - DNA, 28 bp, Artificial Sequence
  Synthetic
ggtgtaatagcugaagaggaagcataua

SEQ ID NO: 71233 - DNA, 31 bp, Artificial Sequence; identical to SEQ ID NO: 67359
  Synthetic

SEQ ID NO: 71234 - DNA, 21 bp, Artificial Sequence
  Synthetic
cacgaagugaggttccccauc

SEQ ID NO: 71235 - DNA, 25 bp, Artificial Sequence
  Synthetic
gggtgggaaagaugattatcctgut

SEQ ID NO: 71236 - DNA, 29 bp, Artificial Sequence
  Synthetic
cattgtcctgtatautggttctgtcctut

SEQ ID NO: 71237 - DNA, 22 bp, Artificial Sequence
  Synthetic
cuaaatggguacggcagcagat

SEQ ID NO: 71238 - DNA, 21 bp, Artificial Sequence
  Synthetic
ccuaggagguaggcagagaca

SEQ ID NO: 71239 - DNA, 20 bp, Artificial Sequence
  Synthetic
ggaggcgutccactttguca

SEQ ID NO: 71240 - DNA, 22 bp, Artificial Sequence
  Synthetic
aggtgtguaagcaagaaugcct

SEQ ID NO: 71241 - DNA, 27 bp, Artificial Sequence
  Synthetic
tcctaaacguaagaagcaacactcaut

SEQ ID NO: 71242 - DNA, 21 bp, Artificial Sequence
  Synthetic
cggcctgugataggcacauag

SEQ ID NO: 71243 - DNA, 21 bp, Artificial Sequence
  Synthetic
tttttgggcccugactctgut

SEQ ID NO: 71244 - DNA, 22 bp, Artificial Sequence
  Synthetic
gggataacagaugccgaguacc

SEQ ID NO: 71245 - DNA, 21 bp, Artificial Sequence
  Synthetic
ttcagaucccaagcacugcaa

SEQ ID NO: 71246 - DNA, 25 bp, Artificial Sequence
  Synthetic
cacaagtgucagtggataucaggaa

SEQ ID NO: 71247 - DNA, 21 bp, Artificial Sequence
  Synthetic
gtgactuccaccaggactgug

SEQ ID NO: 71248 - DNA, 21 bp, Artificial Sequence
  Synthetic
cataggcaagacuccaggcut

SEQ ID NO: 71249 - DNA, 19 bp, Artificial Sequence
  Synthetic
agugcaacaacgccuacca

SEQ ID NO: 71250 - DNA, 20 bp, Artificial Sequence
  Synthetic
ccacgcucaggttggagtuc

SEQ ID NO: 71251 - DNA, 21 bp, Artificial Sequence
  Synthetic
tgagtgacugcctctcctcut

SEQ ID NO: 71252 - DNA, 22 bp, Artificial Sequence
  Synthetic
atctggcuctcatcttcuccct

SEQ ID NO: 71253 - DNA, 23 bp, Artificial Sequence
  Synthetic
gcaaacttaccauggttgtgugt

SEQ ID NO: 71254 - DNA, 21 bp, Artificial Sequence
  Synthetic
actcctguttaggcctugcag

SEQ ID NO: 71255 - DNA, 23 bp, Artificial Sequence
  Synthetic
tccatgcugcttggtaaugaagt

SEQ ID NO: 71256 - DNA, 21 bp, Artificial Sequence
  Synthetic
gggagcutccagtugaaacat

SEQ ID NO: 71257 - DNA, 28 bp, Artificial Sequence
  Synthetic
aaataagaacatucttcagacacugcct

SEQ ID NO: 71258 - DNA, 25 bp, Artificial Sequence
  Synthetic
aagactggugtcctgaacuagaaga

SEQ ID NO: 71259 - DNA, 27 bp, Artificial Sequence
  Synthetic
tugtttagaaugaggagagaggcaaaa

SEQ ID NO: 71260 - DNA, 24 bp, Artificial Sequence
  Synthetic
aaaatgatacuccccctacuccca

SEQ ID NO: 71261 - DNA, 25 bp, Artificial Sequence
  Synthetic
ccttattttcutccccguagagcaa

SEQ ID NO: 71262 - DNA, 21 bp, Artificial Sequence
  Synthetic
gcattgccaaucgcataucct

SEQ ID NO: 71263 - DNA, 23 bp, Artificial Sequence
  Synthetic
tgttccttccgautcctggaaug

SEQ ID NO: 71264 - DNA, 28 bp, Artificial Sequence
  Synthetic
tcaactcagguaaaatgtcagtuccaaa

SEQ ID NO: 71265 - DNA, 22 bp, Artificial Sequence
  Synthetic
tgcatguggaagtgtuggagaa

SEQ ID NO: 71266 - DNA, 26 bp, Artificial Sequence
  Synthetic
caaagttgugtgttgtaaguggaaca

SEQ ID NO: 71267 - DNA, 27 bp, Artificial Sequence
  Synthetic
ccaagaaaggcutgtgtctacatttut

SEQ ID NO: 71268 - DNA, 33 bp, Artificial Sequence; identical to SEQ ID NO: 68766
  Synthetic

SEQ ID NO: 71269 - DNA, 20 bp, Artificial Sequence
  Synthetic
caaatgcgutgggctuccat

SEQ ID NO: 71270 - DNA, 28 bp, Artificial Sequence
  Synthetic
agaatgattuaaggctacagauggaagc

SEQ ID NO: 71271 - DNA, 26 bp, Artificial Sequence
  Synthetic
tccttgatcutttcctctugagcaaa

SEQ ID NO: 71272 - DNA, 28 bp, Artificial Sequence
  Synthetic
cagcctgctcutctaatttgtttactut

SEQ ID NO: 71273 - DNA, 27 bp, Artificial Sequence
  Synthetic
gactcaaaaactucctcctcttctuct

SEQ ID NO: 71274 - DNA, 29 bp, Artificial Sequence
  Synthetic
tggatcaggutcgtgaatatauggaaaat

SEQ ID NO: 71275 - DNA, 28 bp, Artificial Sequence
  Synthetic
acctgtttcttgugttttcatagtcugt

SEQ ID NO: 71276 - DNA, 28 bp, Artificial Sequence
  Synthetic
tcaaggaactucagaaaatacaccagut

SEQ ID NO: 71277 - DNA, 22 bp, Artificial Sequence
  Synthetic
caaatcaccutcctctgugggt

SEQ ID NO: 71278 - DNA, 21 bp, Artificial Sequence
  Synthetic
ggagaatugagccctggugac

SEQ ID NO: 71279 - DNA, 23 bp, Artificial Sequence
  Synthetic
tcaaggugaaggacgacaacuac

SEQ ID NO: 71280 - DNA, 23 bp, Artificial Sequence
  Synthetic
caaactctgutggcactugagaa

SEQ ID NO: 71281 - DNA, 19 bp, Artificial Sequence
  Synthetic
agagcaccuccuacacgga

SEQ ID NO: 71282 - DNA, 19 bp, Artificial Sequence
  Synthetic
ttgtguggagcgcuggaat

SEQ ID NO: 71283 - DNA, 22 bp, Artificial Sequence
  Synthetic
acataagcagcagcagugacuc

SEQ ID NO: 71284 - DNA, 23 bp, Artificial Sequence
  Synthetic
aaagacagcaagagcuccaauca

SEQ ID NO: 71285 - DNA, 28 bp, Artificial Sequence
  Synthetic
gcaaactagaagugtccacaggtataut

SEQ ID NO: 71286 - DNA, 20 bp, Artificial Sequence
  Synthetic
gcgtagcgcauggctaagut

SEQ ID NO: 71287 - DNA, 22 bp, Artificial Sequence
  Synthetic
agaagaagcagaugacgcugac

SEQ ID NO: 71288 - DNA, 23 bp, Artificial Sequence
  Synthetic
agtaagtgtugcacagcctguaa

SEQ ID NO: 71289 - DNA, 22 bp, Artificial Sequence
  Synthetic
gtacctuggaggtgcagaugag

SEQ ID NO: 71290 - DNA, 21 bp, Artificial Sequence
  Synthetic
gaagaagaagcugucggagca

SEQ ID NO: 71291 - DNA, 23 bp, Artificial Sequence
  Synthetic
aagtgaaaacgcacugccatuag

SEQ ID NO: 71292 - DNA, 22 bp, Artificial Sequence
  Synthetic
gaaugccuagaccccagagaag

SEQ ID NO: 71293 - DNA, 22 bp, Artificial Sequence
  Synthetic
tgatcctucagctcctucccat

SEQ ID NO: 71294 - DNA, 21 bp, Artificial Sequence
  Synthetic
gtaccgcucctggaaggtuag

SEQ ID NO: 71295 - DNA, 20 bp, Artificial Sequence
  Synthetic
gcctcacgcacutcctgaug

SEQ ID NO: 71296 - DNA, 28 bp, Artificial Sequence
  Synthetic
ggcttcaagtugtctttttaatgaucct

SEQ ID NO: 71297 - DNA, 26 bp, Artificial Sequence
  Synthetic
gtacctgctguaagtcttcacttuca

SEQ ID NO: 71298 - DNA, 24 bp, Artificial Sequence
  Synthetic
cagagatgtcuccaaaggttccut

SEQ ID NO: 71299 - DNA, 28 bp, Artificial Sequence
  Synthetic
tgatttgatttccutctccagtctgaut

SEQ ID NO: 71300 - DNA, 20 bp, Artificial Sequence
  Synthetic
ctgcagcutgatgaccucgt

SEQ ID NO: 71301 - DNA, 21 bp, Artificial Sequence
  Synthetic
tgcgtcuggaacctcctttut

SEQ ID NO: 71302 - DNA, 29 bp, Artificial Sequence
  Synthetic
ctgagaagtttaaaugttgggtagtucct

SEQ ID NO: 71303 - DNA, 23 bp, Artificial Sequence
  Synthetic
gcctcaacacutctgaccatcug

SEQ ID NO: 71304 - DNA, 28 bp, Artificial Sequence
  Synthetic
aagcagaaagagacugtgauaacaagaa

SEQ ID NO: 71305 - DNA, 24 bp, Artificial Sequence
  Synthetic
caccgtagatuaggtggttgcuaa

SEQ ID NO: 71306 - DNA, 27 bp, Artificial Sequence
  Synthetic
tcgaacagaggcugcaaatagaauaat

SEQ ID NO: 71307 - DNA, 24 bp, Artificial Sequence
  Synthetic
tccactgaguggcatctaagttug

SEQ ID NO: 71308 - DNA, 27 bp, Artificial Sequence
  Synthetic
gttgaggcactutgtgatgcttataut

SEQ ID NO: 71309 - DNA, 26 bp, Artificial Sequence
  Synthetic
tcuctacagagaguaacacagcaaga

SEQ ID NO: 71310 - DNA, 17 bp, Artificial Sequence
  Synthetic
ccucctgggugcaccaa

SEQ ID NO: 71311 - DNA, 17 bp, Artificial Sequence
  Synthetic
atgacagccugcugcgt

SEQ ID NO: 71312 - DNA, 29 bp, Artificial Sequence
  Synthetic
agaattagagatgcugaacaaaaggacut

SEQ ID NO: 71313 - DNA, 26 bp, Artificial Sequence
  Synthetic
caacaaagggagaagcuacgtaauga

SEQ ID NO: 71314 - DNA, 28 bp, Artificial Sequence
  Synthetic
tgtataaccctcauccattcttttgugg

SEQ ID NO: 71315 - DNA, 27 bp, Artificial Sequence
  Synthetic
tgcaccaaaagagagutcatatcacut

SEQ ID NO: 71316 - DNA, 27 bp, Artificial Sequence
  Synthetic
attaggccttctugtatcatggatgug

SEQ ID NO: 71317 - DNA, 28 bp, Artificial Sequence
  Synthetic
agtgtaccaacaauaacatgaagauggt

SEQ ID NO: 71318 - DNA, 22 bp, Artificial Sequence
  Synthetic
ggttgtagcguatgcagucaac

SEQ ID NO: 71319 - DNA, 20 bp, Artificial Sequence
  Synthetic
aguacagacacggcctcuga

SEQ ID NO: 71320 - DNA, 20 bp, Artificial Sequence
  Synthetic
ccagacagccgugactuact

SEQ ID NO: 71321 - DNA, 31 bp, Artificial Sequence
  Synthetic
accattttgaagaugagtcagaaaatuacct

SEQ ID NO: 71322 - DNA, 20 bp, Artificial Sequence
  Synthetic
gagtugaaagcacugccgat

SEQ ID NO: 71323 - DNA, 23 bp, Artificial Sequence
  Synthetic
tcttggcugagaagcucaaagag

SEQ ID NO: 71324 - DNA, 22 bp, Artificial Sequence
  Synthetic
gtttcttgtguttccgctguca

SEQ ID NO: 71325 - DNA, 28 bp, Artificial Sequence
  Synthetic
ctcttcttgaaguttttcagcctttuct

SEQ ID NO: 71326 - DNA, 23 bp, Artificial Sequence
  Synthetic
ccctcctctuagagtccagaugt

SEQ ID NO: 71327 - DNA, 29 bp, Artificial Sequence
  Synthetic
gagcctagaattutattacccagaacugt

SEQ ID NO: 71328 - DNA, 22 bp, Artificial Sequence
  Synthetic
gtggcuaccaaagcagaactug

SEQ ID NO: 71329 - DNA, 31 bp, Artificial Sequence
  Synthetic
tctagcttttaagtuatggagctcatttgut

SEQ ID NO: 71330 - DNA, 18 bp, Artificial Sequence
  Synthetic
ccggcucacagacccuct

SEQ ID NO: 71331 - DNA, 19 bp, Artificial Sequence
  Synthetic
ttccaccucggaggaguca

SEQ ID NO: 71332 - DNA, 28 bp, Artificial Sequence
  Synthetic
tgaagaagttgtcauaattctggctcut

SEQ ID NO: 71333 - DNA, 26 bp, Artificial Sequence
  Synthetic
tgaatagaatggucctctccaucact

SEQ ID NO: 71334 - DNA, 24 bp, Artificial Sequence
  Synthetic
caggaagtacutgctgtctucagg

SEQ ID NO: 71335 - DNA, 20 bp, Artificial Sequence
  Synthetic
ccaccacuaacgccagctut

SEQ ID NO: 71336 - DNA, 28 bp, Artificial Sequence
  Synthetic
ttaaattggtugtgttttctugaaggca

SEQ ID NO: 71337 - DNA, 25 bp, Artificial Sequence
  Synthetic
gagtatcugaaaaccgggctaauga

SEQ ID NO: 71338 - DNA, 23 bp, Artificial Sequence
  Synthetic
ggaattgagagguccttcuggga

SEQ ID NO: 71339 - DNA, 23 bp, Artificial Sequence
  Synthetic
cgttccctugcttcacatctuct

SEQ ID NO: 71340 - DNA, 22 bp, Artificial Sequence
  Synthetic
catgtcaagcaagauggctuca

SEQ ID NO: 71341 - DNA, 24 bp, Artificial Sequence
  Synthetic
gaatttgcuggattaccuccgaga

SEQ ID NO: 71342 - DNA, 18 bp, Artificial Sequence
  Synthetic
acagggugctuggcagac

SEQ ID NO: 71343 - DNA, 19 bp, Artificial Sequence
  Synthetic
gtgctuggcccctgaatut

SEQ ID NO: 71344 - DNA, 23 bp, Artificial Sequence
  Synthetic
ctctttcccagucaccagttugt

SEQ ID NO: 71345 - DNA, 24 bp, Artificial Sequence
  Synthetic
cagagtgatcuggtctttccccua

SEQ ID NO: 71346 - DNA, 25 bp, Artificial Sequence
  Synthetic
gctttctctcacugagtctcccuat

SEQ ID NO: 71347 - DNA, 27 bp, Artificial Sequence
  Synthetic
catagtattcttuggttacctcggcut

SEQ ID NO: 71348 - DNA, 28 bp, Artificial Sequence
  Synthetic
gagctaagaaauggaaaaaugaaggcat

SEQ ID NO: 71349 - DNA, 24 bp, Artificial Sequence
  Synthetic
agacctacttccuctttggctcut

SEQ ID NO: 71350 - DNA, 24 bp, Artificial Sequence
  Synthetic
tgaaaacaagcaagcuctccugaa

SEQ ID NO: 71351 - DNA, 28 bp, Artificial Sequence
  Synthetic
tctttctaugcaaaaacactcacucagt

SEQ ID NO: 71352 - DNA, 28 bp, Artificial Sequence
  Synthetic
tgagtctagccuatagtatgattggcut

SEQ ID NO: 71353 - DNA, 28 bp, Artificial Sequence
  Synthetic
tgcatactcatuttctcaggtttugaca

SEQ ID NO: 71354 - DNA, 27 bp, Artificial Sequence
  Synthetic
ctgacagaaaagaggaugttctuagca

SEQ ID NO: 71355 - DNA, 28 bp, Artificial Sequence
  Synthetic
gtctaaaatatugcttgtaccgucacag

SEQ ID NO: 71356 - DNA, 21 bp, Artificial Sequence
  Synthetic
gtcacctcutctcggtugcat

SEQ ID NO: 71357 - DNA, 26 bp, Artificial Sequence
  Synthetic
caaagtggttuggagtgtttgaaugt

SEQ ID NO: 71358 - DNA, 25 bp, Artificial Sequence
  Synthetic
gcaccaatcttucttctgcctttug

SEQ ID NO: 71359 - DNA, 27 bp, Artificial Sequence
  Synthetic
ccaaaucaagaaacctgttugagagaa

SEQ ID NO: 71360 - DNA, 22 bp, Artificial Sequence
  Synthetic
gcugaauccagaaaccagcaca

SEQ ID NO: 71361 - DNA, 27 bp, Artificial Sequence
  Synthetic
ccattttataacauacagccacaggut

SEQ ID NO: 71362 - DNA, 17 bp, Artificial Sequence
  Synthetic
aggccgcgaaguccauc

SEQ ID NO: 71363 - DNA, 20 bp, Artificial Sequence
  Synthetic
agttccagcuccccttccut

SEQ ID NO: 71364 - DNA, 22 bp, Artificial Sequence
  Synthetic
tgtaccctgugtcactgagcua

SEQ ID NO: 71365 - DNA, 28 bp, Artificial Sequence
  Synthetic
acaaattgttacatutctgaagcctgug

SEQ ID NO: 71366 - DNA, 28 bp, Artificial Sequence
  Synthetic
tctataccattgcuaccagttctttucc

SEQ ID NO: 71367 - DNA, 19 bp, Artificial Sequence
  Synthetic
gtgctguctctgacguggt

SEQ ID NO: 71368 - DNA, 26 bp, Artificial Sequence
  Synthetic
gccatcacagcutttgtttttctugt

SEQ ID NO: 71369 - DNA, 26 bp, Artificial Sequence
  Synthetic
cctttcagaaggugcagaaatacuca

SEQ ID NO: 71370 - DNA, 22 bp, Artificial Sequence
  Synthetic
ggtttcagcuccttgttugggt

SEQ ID NO: 71371 - DNA, 24 bp, Artificial Sequence
  Synthetic
cctgaaaucaaccctcaccuaact

SEQ ID NO: 71372 - DNA, 28 bp, Artificial Sequence
  Synthetic
gtugattatggaagatucccacaagagt

SEQ ID NO: 71373 - DNA, 22 bp, Artificial Sequence
  Synthetic
ctcagtattutggccaguccct

SEQ ID NO: 71374 - DNA, 22 bp, Artificial Sequence
  Synthetic
ccttgagcgaggaugccatuat

SEQ ID NO: 71375 - DNA, 26 bp, Artificial Sequence
  Synthetic
agaagggagauccttcaaggacatua

SEQ ID NO: 71376 - DNA, 28 bp, Artificial Sequence
  Synthetic
ttttagctgatggugctttttgtgatut

SEQ ID NO: 71377 - DNA, 28 bp, Artificial Sequence
  Synthetic
cagagacccugacattcatcaatactua

SEQ ID NO: 71378 - DNA, 26 bp, Artificial Sequence
  Synthetic
tggauaggattctttcugagggaagg

SEQ ID NO: 71379 - DNA, 26 bp, Artificial Sequence
  Synthetic
cttcatcctgtuccaaatcacgatug

SEQ ID NO: 71380 - DNA, 22 bp, Artificial Sequence
  Synthetic
gctgcagatucgttcagaguct

SEQ ID NO: 71381 - DNA, 23 bp, Artificial Sequence
  Synthetic
agccacggaaauatccactgtut

SEQ ID NO: 71382 - DNA, 22 bp, Artificial Sequence
  Synthetic
gcatcucaagcagacgtcgtua

SEQ ID NO: 71383 - DNA, 27 bp, Artificial Sequence
  Synthetic
acaccattcatguctataggaacgtut

SEQ ID NO: 71384 - DNA, 18 bp, Artificial Sequence
  Synthetic
gggccuaggttucaccga

SEQ ID NO: 71385 - DNA, 18 bp, Artificial Sequence
  Synthetic
gctcccucccagctccua

SEQ ID NO: 71386 - DNA, 20 bp, Artificial Sequence
  Synthetic
cagugagggacgggcaauag

SEQ ID NO: 71387 - DNA, 25 bp, Artificial Sequence
  Synthetic
attccataaggcacucaatacgcut

SEQ ID NO: 71388 - DNA, 28 bp, Artificial Sequence
  Synthetic
cgttttgtauccactccttttcaugaga

SEQ ID NO: 71389 - DNA, 24 bp, Artificial Sequence
  Synthetic
gtagatagugccacaagctgtcug

SEQ ID NO: 71390 - DNA, 28 bp, Artificial Sequence
  Synthetic
ctgtttcttacuaggaatcaacccucaa

SEQ ID NO: 71391 - DNA, 22 bp, Artificial Sequence
  Synthetic
ccgguaagtaagagugccaacc

SEQ ID NO: 71392 - DNA, 26 bp, Artificial Sequence
  Synthetic
agttattaccutgttgcctcuaccct

SEQ ID NO: 71393 - DNA, 22 bp, Artificial Sequence
  Synthetic
ccagactgugagccaaggaaut

SEQ ID NO: 71394 - DNA, 24 bp, Artificial Sequence
  Synthetic
acactcatuacttccggguacaga

SEQ ID NO: 71395 - DNA, 28 bp, Artificial Sequence
  Synthetic
ccatgtcugaaaagtaagtaatcuggca

SEQ ID NO: 71396 - DNA, 25 bp, Artificial Sequence
  Synthetic
agatguaaagacctcugaggaccag

SEQ ID NO: 71397 - DNA, 28 bp, Artificial Sequence
  Synthetic
aagcacaugcagaataagagaguaaaca

SEQ ID NO: 71398 - DNA, 25 bp, Artificial Sequence
  Synthetic
ctgtagatggugcacttgcatttut

SEQ ID NO: 71399 - DNA, 24 bp, Artificial Sequence
  Synthetic
cctgtggtccucatttgtagcuat

SEQ ID NO: 71400 - DNA, 26 bp, Artificial Sequence
  Synthetic
accutgtaagauggcaagaaacacaa

SEQ ID NO: 71401 - DNA, 27 bp, Artificial Sequence
  Synthetic
gaatctctgtgcuaccttccagaauac

SEQ ID NO: 71402 - DNA, 21 bp, Artificial Sequence
  Synthetic
ccagcgugggagaaagaauct

SEQ ID NO: 71403 - DNA, 19 bp, Artificial Sequence
  Synthetic
gctgucccgagctagguga

SEQ ID NO: 71404 - DNA, 26 bp, Artificial Sequence
  Synthetic
ctcccactucatcttggaacucaaat

SEQ ID NO: 71405 - DNA, 27 bp, Artificial Sequence
  Synthetic
ctaatttccatgccuttttcaggcaua

SEQ ID NO: 71406 - DNA, 17 bp, Artificial Sequence
  Synthetic
cuggcgcgggaaaaugt

SEQ ID NO: 71407 - DNA, 18 bp, Artificial Sequence
  Synthetic
cggcuacucagcccaacc

SEQ ID NO: 71408 - DNA, 22 bp, Artificial Sequence
  Synthetic
cgaagtcaacugccagactcut

SEQ ID NO: 71409 - DNA, 17 bp, Artificial Sequence
  Synthetic
gccaucgggctcctgug

SEQ ID NO: 71410 - DNA, 26 bp, Artificial Sequence
  Synthetic
ctggaataugctttggaaaguagggt

SEQ ID NO: 71411 - DNA, 25 bp, Artificial Sequence
  Synthetic
gcattttcaaaagcugtttgcugaa

SEQ ID NO: 71412 - DNA, 18 bp, Artificial Sequence
  Synthetic
cacagcugccguggaaag

SEQ ID NO: 71413 - DNA, 22 bp, Artificial Sequence
  Synthetic
tggguaccaaggactgtucaga

SEQ ID NO: 71414 - DNA, 24 bp, Artificial Sequence
  Synthetic
ccaggttacugaaagcacttccut

SEQ ID NO: 71415 - DNA, 28 bp, Artificial Sequence
  Synthetic
accaaacttggugaagtaatttauggga

SEQ ID NO: 71416 - DNA, 23 bp, Artificial Sequence
  Synthetic
agagcagaacaggagugaaguct

SEQ ID NO: 71417 - DNA, 21 bp, Artificial Sequence
  Synthetic
ccagatggacutgctggaugg

SEQ ID NO: 71418 - DNA, 20 bp, Artificial Sequence
  Synthetic
gggcauctcctuagaacgct

SEQ ID NO: 71419 - DNA, 22 bp, Artificial Sequence
  Synthetic
tctggagugcagctttgactuc

SEQ ID NO: 71420 - DNA, 18 bp, Artificial Sequence
  Synthetic
gtggguggtgggcaugaa

SEQ ID NO: 71421 - DNA, 17 bp, Artificial Sequence
  Synthetic
gacgccagcccuagcuc

SEQ ID NO: 71422 - DNA, 22 bp, Artificial Sequence
  Synthetic
tccgtaggttutggtctcggua

SEQ ID NO: 71423 - DNA, 27 bp, Artificial Sequence
  Synthetic
acaatactttucacatcgtcagucaca

SEQ ID NO: 71424 - DNA, 21 bp, Artificial Sequence
  Synthetic
gggaatacuccagcucacagg

SEQ ID NO: 71425 - DNA, 21 bp, Artificial Sequence
  Synthetic
ctuggacagggcaaaggaugt

SEQ ID NO: 71426 - DNA, 27 bp, Artificial Sequence
  Synthetic
ctaccacugtgcaatgaauaacgaaaa

SEQ ID NO: 71427 - DNA, 21 bp, Artificial Sequence
  Synthetic
ccttcggtucccaattgcuca

SEQ ID NO: 71428 - DNA, 26 bp, Artificial Sequence
  Synthetic
aaaacaagagaugtgactgacgaugt

SEQ ID NO: 71429 - DNA, 27 bp, Artificial Sequence
  Synthetic
caagaaaatgucgaccagcatatucat

SEQ ID NO: 71430 - DNA, 28 bp, Artificial Sequence
  Synthetic
agatgtgacugacgatgtgaaaagtaut

SEQ ID NO: 71431 - DNA, 30 bp, Artificial Sequence
  Synthetic
tcaattgaaguaactcaaacatucaaaaca

SEQ ID NO: 71432 - DNA, 28 bp, Artificial Sequence
  Synthetic
atttaaatagtugccattccaagtguct

SEQ ID NO: 71433 - DNA, 28 bp, Artificial Sequence
  Synthetic
gctccgtaaauagcaccattagaugaat

SEQ ID NO: 71434 - DNA, 17 bp, Artificial Sequence
  Synthetic
ggcgtccgugccttcut

SEQ ID NO: 71435 - DNA, 20 bp, Artificial Sequence
  Synthetic
ccatgaggcuctgactuccc

SEQ ID NO: 71436 - DNA, 28 bp, Artificial Sequence
  Synthetic
ttgcctctuatatttcaggtugaacagt

SEQ ID NO: 71437 - DNA, 28 bp, Artificial Sequence
  Synthetic
ttctcttactcugaactccagtttcuct

SEQ ID NO: 71438 - DNA, 27 bp, Artificial Sequence
  Synthetic
gcacctaggcuaaaatgtcaagaacuc

SEQ ID NO: 71439 - DNA, 28 bp, Artificial Sequence
  Synthetic
tgttgctgagatauttcacaccagtaut

SEQ ID NO: 71440 - DNA, 30 bp, Artificial Sequence
  Synthetic
tctgggttacucactagatttaatcuggat

SEQ ID NO: 71441 - DNA, 28 bp, Artificial Sequence
  Synthetic
ggagtggaaaugaaatgctcttaactut

SEQ ID NO: 71442 - DNA, 22 bp, Artificial Sequence
  Synthetic
agggtgtctcuctgtggcttua

SEQ ID NO: 71443 - DNA, 22 bp, Artificial Sequence
  Synthetic
gactctguaggctgcagttcuc

SEQ ID NO: 71444 - DNA, 28 bp, Artificial Sequence
  Synthetic
cagcutcaaagggatauacaagaaagga

SEQ ID NO: 71445 - DNA, 32 bp, Artificial Sequence
  Synthetic
aacacttattaagtuagcccaaataaaaugcc

SEQ ID NO: 71446 - DNA, 28 bp, Artificial Sequence
  Synthetic
gagctgattguagcaacatactacucaa

SEQ ID NO: 71447 - DNA, 26 bp, Artificial Sequence
  Synthetic
agacagauacagacagagtgcttuct

SEQ ID NO: 71448 - DNA, 24 bp, Artificial Sequence
  Synthetic
gcagtggtgauacccattttgugt

SEQ ID NO: 71449 - DNA, 26 bp, Artificial Sequence
  Synthetic
gtgtgtgtaaggaugatactggtuga

SEQ ID NO: 71450 - DNA, 19 bp, Artificial Sequence
  Synthetic
gaggucctgcugacacaca

SEQ ID NO: 71451 - DNA, 19 bp, Artificial Sequence
  Synthetic
gcaggagcuggucaacagg

SEQ ID NO: 71452 - DNA, 21 bp, Artificial Sequence
  Synthetic
gctttgccugtgguggaaaat

SEQ ID NO: 71453 - DNA, 26 bp, Artificial Sequence
  Synthetic
tgcatgctcagautagaaactgtgua

SEQ ID NO: 71454 - DNA, 22 bp, Artificial Sequence
  Synthetic
cctcctccugcaggttguagat

SEQ ID NO: 71455 - DNA, 21 bp, Artificial Sequence
  Synthetic
ctgaccctcugaaacctccuc

SEQ ID NO: 71456 - DNA, 25 bp, Artificial Sequence
  Synthetic
tgcttcgucaacatagctttaugga

SEQ ID NO: 71457 - DNA, 21 bp, Artificial Sequence
  Synthetic
cgtcccaacutggctttcuct

SEQ ID NO: 71458 - DNA, 28 bp, Artificial Sequence
  Synthetic
agaaaatcagcutcaagacactucaaga

SEQ ID NO: 71459 - DNA, 25 bp, Artificial Sequence
  Synthetic
acccacataauaaaaacccgcacut

SEQ ID NO: 71460 - DNA, 20 bp, Artificial Sequence
  Synthetic
ctccagugggcttuggagaa

SEQ ID NO: 71461 - DNA, 28 bp, Artificial Sequence
  Synthetic
ttgacattttagauggaggaaagcctua

SEQ ID NO: 71462 - DNA, 21 bp, Artificial Sequence
  Synthetic
tcggtgcaugtgaacgttcut

SEQ ID NO: 71463 - DNA, 20 bp, Artificial Sequence
  Synthetic
caaagcguccagctccucat

SEQ ID NO: 71464 - DNA, 28 bp, Artificial Sequence
  Synthetic
tgctcaacagaugattatttcaccctut

SEQ ID NO: 71465 - DNA, 26 bp, Artificial Sequence
  Synthetic
cccctctttacugtctactctggtut

SEQ ID NO: 71466 - DNA, 26 bp, Artificial Sequence
  Synthetic
tgtgtgatgtauttgctcttggtugt

SEQ ID NO: 71467 - DNA, 22 bp, Artificial Sequence
  Synthetic
aggactcagagcuccttctguc

SEQ ID NO: 71468 - DNA, 28 bp, Artificial Sequence
  Synthetic
ccaagugaacccagaaaatattcuccat

SEQ ID NO: 71469 - DNA, 27 bp, Artificial Sequence
  Synthetic
ctttccttauaaagcttacccgucaca

SEQ ID NO: 71470 - DNA, 26 bp, Artificial Sequence
  Synthetic
cagaattcatcauagcaagctgugac

SEQ ID NO: 71471 - DNA, 28 bp, Artificial Sequence
  Synthetic
gtaaggcgtguctcaatatttgacatut

SEQ ID NO: 71472 - DNA, 22 bp, Artificial Sequence
  Synthetic
gcttccagauggtggaugaact

SEQ ID NO: 71473 - DNA, 21 bp, Artificial Sequence
  Synthetic
ccacucugaccacaccaaacc

SEQ ID NO: 71474 - DNA, 24 bp, Artificial Sequence
  Synthetic
tggttcaauagatgaccuccccat

SEQ ID NO: 71475 - DNA, 22 bp, Artificial Sequence
  Synthetic
gggagguaugaggagagaaagg

SEQ ID NO: 71476 - DNA, 29 bp, Artificial Sequence
  Synthetic
atgtgggtaagaaacugaatctgctaaut

SEQ ID NO: 71477 - DNA, 21 bp, Artificial Sequence
  Synthetic
caacaccugagtccaccauca

SEQ ID NO: 71478 - DNA, 28 bp, Artificial Sequence
  Synthetic
ggtaacagtgaugatgtcaaatgcttut

SEQ ID NO: 71479 - DNA, 29 bp, Artificial Sequence
  Synthetic
aggtgaacacauataagcaatctcaugat

SEQ ID NO: 71480 - DNA, 23 bp, Artificial Sequence
  Synthetic
agcagagtaauccagctcaguct

SEQ ID NO: 71481 - DNA, 20 bp, Artificial Sequence
  Synthetic
cccuaaagcccagcactuga

SEQ ID NO: 71482 - DNA, 28 bp, Artificial Sequence
  Synthetic
atgtagttttcuggtgaatttggaguga

SEQ ID NO: 71483 - DNA, 28 bp, Artificial Sequence
  Synthetic
aaggcucaaagggaatauaaaccaagat

SEQ ID NO: 71484 - DNA, 25 bp, Artificial Sequence
  Synthetic
ctctaatttgtgcugaccagctgua

SEQ ID NO: 71485 - DNA, 21 bp, Artificial Sequence
  Synthetic
ccccctguttaccctgatugg

SEQ ID NO: 71486 - DNA, 22 bp, Artificial Sequence
  Synthetic
tcagaggacccutcagccauaa

SEQ ID NO: 71487 - DNA, 28 bp, Artificial Sequence
  Synthetic
gatcttcgtctugttgtaacactttuca

SEQ ID NO: 71488 - DNA, 23 bp, Artificial Sequence
  Synthetic
cagacccugaggatactgtgcua

SEQ ID NO: 71489 - DNA, 22 bp, Artificial Sequence
  Synthetic
atgaaaaaggacgccaugcauc

SEQ ID NO: 71490 - DNA, 22 bp, Artificial Sequence
  Synthetic
ccccagcuggattccaaatuct

SEQ ID NO: 71491 - DNA, 22 bp, Artificial Sequence
  Synthetic
ccattuccagccccattctuca

SEQ ID NO: 71492 - DNA, 18 bp, Artificial Sequence
  Synthetic
cgcacacccugccacuaa

SEQ ID NO: 71493 - DNA, 20 bp, Artificial Sequence
  Synthetic
agctgttcutccacctgucc

SEQ ID NO: 71494 - DNA, 28 bp, Artificial Sequence
  Synthetic
tcatttgaugaagagcatagacaugcaa

SEQ ID NO: 71495 - DNA, 28 bp, Artificial Sequence
  Synthetic
gaagttggtggccutatatcctaatuca

SEQ ID NO: 71496 - DNA, 23 bp, Artificial Sequence
  Synthetic
tggtgcgatuttcctgttacuct

SEQ ID NO: 71497 - DNA, 22 bp, Artificial Sequence
  Synthetic
cgtactucccagtttggtgugg

SEQ ID NO: 71498 - DNA, 22 bp, Artificial Sequence
  Synthetic
ccataccccuaaagcacuccct

SEQ ID NO: 71499 - DNA, 21 bp, Artificial Sequence
  Synthetic
ggagtcccaggauctctcuga

SEQ ID NO: 71500 - DNA, 20 bp, Artificial Sequence
  Synthetic
cucctctgugaagacacgct

SEQ ID NO: 71501 - DNA, 21 bp, Artificial Sequence
  Synthetic
agctgtcacutgctggtucat

SEQ ID NO: 71502 - DNA, 21 bp, Artificial Sequence
  Synthetic
aagacaggacaucgtccccua

SEQ ID NO: 71503 - DNA, 19 bp, Artificial Sequence
  Synthetic
cacccagcccugcttuaca

SEQ ID NO: 71504 - DNA, 22 bp, Artificial Sequence
  Synthetic
gggaaacagcucagatggcuaa

SEQ ID NO: 71505 - DNA, 26 bp, Artificial Sequence
  Synthetic
ggaagttgaattautaccccctgcuc

SEQ ID NO: 71506 - DNA, 22 bp, Artificial Sequence
  Synthetic
gtattuccgccgactccttuga

SEQ ID NO: 71507 - DNA, 21 bp, Artificial Sequence
  Synthetic
ctgtcgaatgucagaggccut

SEQ ID NO: 71508 - DNA, 20 bp, Artificial Sequence
  Synthetic
ccaccucgtcctguaaagca

SEQ ID NO: 71509 - DNA, 22 bp, Artificial Sequence
  Synthetic
cgctacuacgccatgaagaucc

SEQ ID NO: 71510 - DNA, 27 bp, Artificial Sequence
  Synthetic
tttgtgatcuattccatctguccaaac

SEQ ID NO: 71511 - DNA, 28 bp, Artificial Sequence
  Synthetic
tcgtgaauaagcagatcctttuccaaat

SEQ ID NO: 71512 - DNA, 20 bp, Artificial Sequence
  Synthetic
cttccgaccuttgcccttug

SEQ ID NO: 71513 - DNA, 22 bp, Artificial Sequence
  Synthetic
cctggacuctctgtgtctucag

SEQ ID NO: 71514 - DNA, 24 bp, Artificial Sequence
  Synthetic
tcttgtcctcucttgccacagaua

SEQ ID NO: 71515 - DNA, 23 bp, Artificial Sequence
  Synthetic
gagcuctgcggauaaagagagac

SEQ ID NO: 71516 - DNA, 28 bp, Artificial Sequence
  Synthetic
gtaagagtgcaaaaauccagtcagguat

SEQ ID NO: 71517 - DNA, 23 bp, Artificial Sequence
  Synthetic
gggctttatutccgagcaucaca

SEQ ID NO: 71518 - DNA, 20 bp, Artificial Sequence
  Synthetic
tctucgcacaacggcttcut

SEQ ID NO: 71519 - DNA, 20 bp, Artificial Sequence
  Synthetic
gtgtggcagutttcggaugg

SEQ ID NO: 71520 - DNA, 20 bp, Artificial Sequence
  Synthetic
aatgaccaggcgaucgctua

SEQ ID NO: 71521 - DNA, 29 bp, Artificial Sequence
  Synthetic
gcttggacaaagacacuatactucacaat

SEQ ID NO: 71522 - DNA, 22 bp, Artificial Sequence
  Synthetic
ggaggatggaguctgaaagcug

SEQ ID NO: 71523 - DNA, 27 bp, Artificial Sequence
  Synthetic
agtgattgacagugttgactctcauag

SEQ ID NO: 71524 - DNA, 22 bp, Artificial Sequence
  Synthetic
acuaaacaacgaagccgctuga

SEQ ID NO: 71525 - DNA, 21 bp, Artificial Sequence
  Synthetic
acctcttaagugcaggctugg

SEQ ID NO: 71526 - DNA, 28 bp, Artificial Sequence
  Synthetic
tgaaagaugcagacttttactgugaagt

SEQ ID NO: 71527 - DNA, 25 bp, Artificial Sequence
  Synthetic
tttccatcucacagaccttgctuag

SEQ ID NO: 71528 - DNA, 31 bp, Artificial Sequence; identical to SEQ ID NO: 60670
  Synthetic

SEQ ID NO: 71529 - DNA, 26 bp, Artificial Sequence
  Synthetic
cagauagagcctgaaguacacagaga

SEQ ID NO: 71530 - DNA, 26 bp, Artificial Sequence
  Synthetic
acaaacucttggtactucaaacacga

SEQ ID NO: 71531 - DNA, 28 bp, Artificial Sequence
  Synthetic
ttcccaatctccuttttcatgttctcut

SEQ ID NO: 71532 - DNA, 24 bp, Artificial Sequence
  Synthetic
tgttctctgtguacttcaggcuct

SEQ ID NO: 71533 - DNA, 24 bp, Artificial Sequence
  Synthetic
gcacacugaatagcctuggaaaaa

SEQ ID NO: 71534 - DNA, 26 bp, Artificial Sequence
  Synthetic
ggctctauctgaaacctucacaagat

SEQ ID NO: 71535 - DNA, 27 bp, Artificial Sequence
  Synthetic
aaagagattagatuacctcgcacacug

SEQ ID NO: 71536 - DNA, 21 bp, Artificial Sequence
  Synthetic
ccaaggcuattcagtgugcga

SEQ ID NO: 71537 - DNA, 28 bp, Artificial Sequence
  Synthetic
aggaatccacuagttctgttatgaugga

SEQ ID NO: 71538 - DNA, 18 bp, Artificial Sequence
  Synthetic
aaccgugaggccatgcut

SEQ ID NO: 71539 - DNA, 27 bp, Artificial Sequence
  Synthetic
ccccagatattcuagacagttcagtut

SEQ ID NO: 71540 - DNA, 25 bp, Artificial Sequence
  Synthetic
gtcaatatgcuaggactgtctggut

SEQ ID NO: 71541 - DNA, 28 bp, Artificial Sequence
  Synthetic
gctttgaaacaaucctttttctctccut

SEQ ID NO: 71542 - DNA, 28 bp, Artificial Sequence
  Synthetic
gtgtcaatgaguatagcatttgcucaac

SEQ ID NO: 71543 - DNA, 28 bp, Artificial Sequence
  Synthetic
agtctgaaaaccaauttgatcctgugat

SEQ ID NO: 71544 - DNA, 26 bp, Artificial Sequence
  Synthetic
cagcaaagaaguagaaggaaccagut

SEQ ID NO: 71545 - DNA, 28 bp, Artificial Sequence
  Synthetic
caagtttucagaaaagaagccaugacat

SEQ ID NO: 71546 - DNA, 22 bp, Artificial Sequence
  Synthetic
gaacttaagggcuctcgagcut

SEQ ID NO: 71547 - DNA, 23 bp, Artificial Sequence
  Synthetic
gccaagucacacctgtactttut

SEQ ID NO: 71548 - DNA, 23 bp, Artificial Sequence
  Synthetic
gtgatguggaaaagacctgugac

SEQ ID NO: 71549 - DNA, 21 bp, Artificial Sequence
  Synthetic
gggccctugtggaatcagtuc

SEQ ID NO: 71550 - DNA, 28 bp, Artificial Sequence
  Synthetic
ctgtgtgucagcaagaacaacattatut

SEQ ID NO: 71551 - DNA, 29 bp, Artificial Sequence
  Synthetic
tcctttccatgtuctcctaactcttuact

SEQ ID NO: 71552 - DNA, 22 bp, Artificial Sequence
  Synthetic
gcccccuccatctaacuaccag

SEQ ID NO: 71553 - DNA, 23 bp, Artificial Sequence
  Synthetic
attttcaucccagagugcaggaa

SEQ ID NO: 71554 - DNA, 28 bp, Artificial Sequence
  Synthetic
agacttttgagacaguggatgtgaaaut

SEQ ID NO: 71555 - DNA, 27 bp, Artificial Sequence
  Synthetic
tutcttctgaaatagucagcacacagt

SEQ ID NO: 71556 - DNA, 24 bp, Artificial Sequence
  Synthetic
gaattcccaggcutagccatgaua

SEQ ID NO: 71557 - DNA, 25 bp, Artificial Sequence
  Synthetic
gcaatgctugattggttcauggaag

SEQ ID NO: 71558 - DNA, 23 bp, Artificial Sequence
  Synthetic
agaatcaaaggacugtgtgcuga

SEQ ID NO: 71559 - DNA, 28 bp, Artificial Sequence
  Synthetic
ccaaacatuaagcagcactattgcuaat

SEQ ID NO: 71560 - DNA, 23 bp, Artificial Sequence
  Synthetic
tgcatauagggagcugagggaat

SEQ ID NO: 71561 - DNA, 23 bp, Artificial Sequence
  Synthetic
agactcctuccctttcctgtcuc

SEQ ID NO: 71562 - DNA, 18 bp, Artificial Sequence
  Synthetic
gaccgaggutggcucgat

SEQ ID NO: 71563 - DNA, 20 bp, Artificial Sequence
  Synthetic
cccgagaacugagggtggua

SEQ ID NO: 71564 - DNA, 21 bp, Artificial Sequence
  Synthetic
acctctccuagcaagtcucca

SEQ ID NO: 71565 - DNA, 21 bp, Artificial Sequence
  Synthetic
ggtgataucccgccgaaucat

SEQ ID NO: 71566 - DNA, 25 bp, Artificial Sequence
  Synthetic
acagtccucaaagaaggaaatgcuc

SEQ ID NO: 71567 - DNA, 23 bp, Artificial Sequence
  Synthetic
atggaagaguctttgtggtugct

SEQ ID NO: 71568 - DNA, 23 bp, Artificial Sequence
  Synthetic
ccttccaggcugacttctgtcua

SEQ ID NO: 71569 - DNA, 22 bp, Artificial Sequence
  Synthetic
cagctcccuaaatcctccucac

SEQ ID NO: 71570 - DNA, 17 bp, Artificial Sequence
  Synthetic
ccccttugcccgctuct

SEQ ID NO: 71571 - DNA, 19 bp, Artificial Sequence
  Synthetic
gggaggagacgucaaugcc

SEQ ID NO: 71572 - DNA, 21 bp, Artificial Sequence
  Synthetic
agtcggacagcaucatgcauc

SEQ ID NO: 71573 - DNA, 24 bp, Artificial Sequence
  Synthetic
ggtcaaacagcuctccaaaagcua

SEQ ID NO: 71574 - DNA, 20 bp, Artificial Sequence
  Synthetic
atcctccutgtccucggact

SEQ ID NO: 71575 - DNA, 20 bp, Artificial Sequence
  Synthetic
ccgaggaggaccucacugaa

SEQ ID NO: 71576 - DNA, 21 bp, Artificial Sequence
  Synthetic
cagtaccugcctcgcacauag

SEQ ID NO: 71577 - DNA, 22 bp, Artificial Sequence
  Synthetic
ggcagatuaggcaaccgaauga

SEQ ID NO: 71578 - DNA, 23 bp, Artificial Sequence
  Synthetic
gcgttacucacgtccttctucac

SEQ ID NO: 71579 - DNA, 23 bp, Artificial Sequence
  Synthetic
tcctctcctucttccccatuacc

SEQ ID NO: 71580 - DNA, 27 bp, Artificial Sequence
  Synthetic
aagctgatatgtcugatttggttccut

SEQ ID NO: 71581 - DNA, 22 bp, Artificial Sequence
  Synthetic
tggtaccaggagugtttcucca

SEQ ID NO: 71582 - DNA, 22 bp, Artificial Sequence
  Synthetic
caaaagugccagcaguaccaag

SEQ ID NO: 71583 - DNA, 25 bp, Artificial Sequence
  Synthetic
caatgcatcccaucttacagaguga

SEQ ID NO: 71584 - DNA, 26 bp, Artificial Sequence
  Synthetic
catatactuaccatatcggcugcgat

SEQ ID NO: 71585 - DNA, 27 bp, Artificial Sequence
  Synthetic
caagcacatggaucagtgttttcttua

SEQ ID NO: 71586 - DNA, 23 bp, Artificial Sequence
  Synthetic
ggcaggtggucattgagaaugat

SEQ ID NO: 71587 - DNA, 23 bp, Artificial Sequence
  Synthetic
gtgtttcagcutcttgtggtgut

SEQ ID NO: 71588 - DNA, 20 bp, Artificial Sequence
  Synthetic
acgctcuacccactgcagua

SEQ ID NO: 71589 - DNA, 28 bp, Artificial Sequence
  Synthetic
ggccagtataauaaacaaagtgtgaugg

SEQ ID NO: 71590 - DNA, 24 bp, Artificial Sequence
  Synthetic
aatttcaatggaucacccccauca

SEQ ID NO: 71591 - DNA, 28 bp, Artificial Sequence
  Synthetic
gagagctttgtutaggcacattttuagt

SEQ ID NO: 71592 - DNA, 23 bp, Artificial Sequence
  Synthetic
gcuggtacugagcaagaagacaa

SEQ ID NO: 71593 - DNA, 27 bp, Artificial Sequence
  Synthetic
cagacaaaaaugggttgttggttcuac

SEQ ID NO: 71594 - DNA, 28 bp, Artificial Sequence
  Synthetic
atcacccccaucacactttgtttatuat

SEQ ID NO: 71595 - DNA, 23 bp, Artificial Sequence
  Synthetic
gctgagagcuttgttuaggcaca

SEQ ID NO: 71596 - DNA, 28 bp, Artificial Sequence
  Synthetic
ctaaaaatgtgccuaaacaaagctcuca

SEQ ID NO: 71597 - DNA, 28 bp, Artificial Sequence
  Synthetic
ccttgaaccgatuttagatggcatctua

SEQ ID NO: 71598 - DNA, 29 bp, Artificial Sequence
  Synthetic
cagttttctgtcgugaacgtttcttatut

SEQ ID NO: 71599 - DNA, 28 bp, Artificial Sequence
  Synthetic
ccacttaatuagcactttctttgcauct

SEQ ID NO: 71600 - DNA, 19 bp, Artificial Sequence
  Synthetic
cactcucaggcacctucca

SEQ ID NO: 71601 - DNA, 21 bp, Artificial Sequence
  Synthetic
ccacagagaccggcutcaaua

SEQ ID NO: 71602 - DNA, 21 bp, Artificial Sequence
  Synthetic
acatcacgccagucaacaguc

SEQ ID NO: 71603 - DNA, 22 bp, Artificial Sequence
  Synthetic
tggtacacccucccttcgtauc

SEQ ID NO: 71604 - DNA, 21 bp, Artificial Sequence
  Synthetic
gggaggacugaccuaagcaag

SEQ ID NO: 71605 - DNA, 22 bp, Artificial Sequence
  Synthetic
ctctgctcuggtttgctacuca

SEQ ID NO: 71606 - DNA, 21 bp, Artificial Sequence
  Synthetic
cttgacaccugcgaugaggaa

SEQ ID NO: 71607 - DNA, 20 bp, Artificial Sequence
  Synthetic
ccatcacccccucctctugt

SEQ ID NO: 71608 - DNA, 29 bp, Artificial Sequence
  Synthetic
tctgttaagcagucactaccattgtatuc

SEQ ID NO: 71609 - DNA, 24 bp, Artificial Sequence
  Synthetic
gagctacctuggcaacttcuagat

SEQ ID NO: 71610 - DNA, 23 bp, Artificial Sequence
  Synthetic
ctagaagtugccaaggtagcuca

SEQ ID NO: 71611 - DNA, 28 bp, Artificial Sequence
  Synthetic
acccttattgagacaaugccaacatuaa

SEQ ID NO: 71612 - DNA, 24 bp, Artificial Sequence
  Synthetic
gaagtacacaugctcctaggctut

SEQ ID NO: 71613 - DNA, 20 bp, Artificial Sequence
  Synthetic
caguagttcaccucgccagt

SEQ ID NO: 71614 - DNA, 20 bp, Artificial Sequence
  Synthetic
ccagagguccatctcgcuga

SEQ ID NO: 71615 - DNA, 25 bp, Artificial Sequence
  Synthetic
cttcttggtugagctttctugcaat

SEQ ID NO: 71616 - DNA, 19 bp, Artificial Sequence
  Synthetic
cutctcagacuggcgaggt

SEQ ID NO: 71617 - DNA, 28 bp, Artificial Sequence
  Synthetic
cctgttctugtattctctgtuccaaaca

SEQ ID NO: 71618 - DNA, 28 bp, Artificial Sequence
  Synthetic
ggtactacagaugcagttggtttacuaa

SEQ ID NO: 71619 - DNA, 33 bp, Artificial Sequence
  Synthetic
atattcatagtggcucctattaaaatctuaacc

SEQ ID NO: 71620 - DNA, 21 bp, Artificial Sequence
  Synthetic
gggtgaggcaguctttacuca

SEQ ID NO: 71621 - DNA, 26 bp, Artificial Sequence
  Synthetic
cgttgtacacucatcttccuagggat

SEQ ID NO: 71622 - DNA, 23 bp, Artificial Sequence
  Synthetic
gggaucccaaggaagagaaguga

SEQ ID NO: 71623 - DNA, 23 bp, Artificial Sequence
  Synthetic
cacttccctugtgggaatgucaa

SEQ ID NO: 71624 - DNA, 27 bp, Artificial Sequence
  Synthetic
catacagacacutcatttggaguacct

SEQ ID NO: 71625 - DNA, 27 bp, Artificial Sequence
  Synthetic
agtgtgtgcuactagaacucaaaacac

SEQ ID NO: 71626 - DNA, 28 bp, Artificial Sequence
  Synthetic
aaaggcagcacaaauacactaauagaca

SEQ ID NO: 71627 - DNA, 26 bp, Artificial Sequence
  Synthetic
ggaatcagcaagutacagtguaacag

SEQ ID NO: 71628 - DNA, 21 bp, Artificial Sequence
  Synthetic
gagcaaaccgaagcugaacut

SEQ ID NO: 71629 - DNA, 27 bp, Artificial Sequence
  Synthetic
cctgctgtugttaaatctatttugcca

SEQ ID NO: 71630 - DNA, 22 bp, Artificial Sequence
  Synthetic
cgaauggaccaugaaacagcca

SEQ ID NO: 71631 - DNA, 28 bp, Artificial Sequence
  Synthetic
cttagcaaagtagucatggcattaguga

SEQ ID NO: 71632 - DNA, 28 bp, Artificial Sequence
  Synthetic
catttcacattcautcttctctgtgucc

SEQ ID NO: 71633 - DNA, 25 bp, Artificial Sequence
  Synthetic
gttagaacaagcagcucagatcugt

SEQ ID NO: 71634 - DNA, 20 bp, Artificial Sequence
  Synthetic
cctgttgcuggtagccguaa

SEQ ID NO: 71635 - DNA, 21 bp, Artificial Sequence
  Synthetic
ctggagggaagcugtactguc

SEQ ID NO: 71636 - DNA, 25 bp, Artificial Sequence
  Synthetic
gctactctccugaactctctcacuc

SEQ ID NO: 71637 - DNA, 23 bp, Artificial Sequence
  Synthetic
tgcatcagaacccuccttgaauc

SEQ ID NO: 71638 - DNA, 21 bp, Artificial Sequence
  Synthetic
ctcccagutgcaacgtuaggt

SEQ ID NO: 71639 - DNA, 22 bp, Artificial Sequence
  Synthetic
gguccacggauccagaaacaag

SEQ ID NO: 71640 - DNA, 20 bp, Artificial Sequence
  Synthetic
cctgccuggatgggtgttut

SEQ ID NO: 71641 - DNA, 25 bp, Artificial Sequence
  Synthetic
gtagattctcgccuctattgagcug

SEQ ID NO: 71642 - DNA, 18 bp, Artificial Sequence
  Synthetic
cgggccagcagcucaaua

SEQ ID NO: 71643 - DNA, 29 bp, Artificial Sequence
  Synthetic
ggacucttaaagatttauaccacccagat

SEQ ID NO: 71644 - DNA, 18 bp, Artificial Sequence
  Synthetic
gcaagcgagacccugcuc

SEQ ID NO: 71645 - DNA, 18 bp, Artificial Sequence
  Synthetic
ggagcugcacgacuacca

SEQ ID NO: 71646 - DNA, 19 bp, Artificial Sequence
  Synthetic
acccacagcucctcuccat

SEQ ID NO: 71647 - DNA, 18 bp, Artificial Sequence
  Synthetic
accctgcugccttcaucc

SEQ ID NO: 71648 - DNA, 21 bp, Artificial Sequence
  Synthetic
ccatcgggugcttgatgaugt

SEQ ID NO: 71649 - DNA, 19 bp, Artificial Sequence
  Synthetic
gcaagaagggcaagcuguc

SEQ ID NO: 71650 - DNA, 20 bp, Artificial Sequence
  Synthetic
ctgaggatgcugtcgcagua

SEQ ID NO: 71651 - DNA, 17 bp, Artificial Sequence
  Synthetic
cccgccgutgucagacc

SEQ ID NO: 71652 - DNA, 20 bp, Artificial Sequence
  Synthetic
cgtacgutgggtuccacaag

SEQ ID NO: 71653 - DNA, 24 bp, Artificial Sequence
  Synthetic
gagatctctgutcgagtcccuaga

SEQ ID NO: 71654 - DNA, 26 bp, Artificial Sequence
  Synthetic
cacagactcuggaaatgtguaaccaa

SEQ ID NO: 71655 - DNA, 21 bp, Artificial Sequence
  Synthetic
ccctcuggaaggtacatugcc

SEQ ID NO: 71656 - DNA, 19 bp, Artificial Sequence
  Synthetic
ccaccactutggcctgcut

SEQ ID NO: 71657 - DNA, 17 bp, Artificial Sequence
  Synthetic
gcgacaugcgtctucgg

SEQ ID NO: 71658 - DNA, 28 bp, Artificial Sequence
  Synthetic
ggtaaaaatgtgaugatctctgcaggua

SEQ ID NO: 71659 - DNA, 27 bp, Artificial Sequence
  Synthetic
gggcagtctgautgcttttaatctcut

SEQ ID NO: 71660 - DNA, 27 bp, Artificial Sequence
  Synthetic
acatacttcacautggtgttgguacag

SEQ ID NO: 71661 - DNA, 27 bp, Artificial Sequence
  Synthetic
tcagguagtgaaatuaaaaggccaagt

SEQ ID NO: 71662 - DNA, 25 bp, Artificial Sequence
  Synthetic
ctgtcacagagacugtctgatctut

SEQ ID NO: 71663 - DNA, 28 bp, Artificial Sequence
  Synthetic
tgccctgttguggttaataatgattuct

SEQ ID NO: 71664 - DNA, 24 bp, Artificial Sequence
  Synthetic
ccaggcttgucaacttaccagtut

SEQ ID NO: 71665 - DNA, 20 bp, Artificial Sequence
  Synthetic
catcgccacauttccuagcc

SEQ ID NO: 71666 - DNA, 18 bp, Artificial Sequence
  Synthetic
tcacgtguccccctucca

SEQ ID NO: 71667 - DNA, 21 bp, Artificial Sequence
  Synthetic
ggttcctccuctcctggtcuc

SEQ ID NO: 71668 - DNA, 27 bp, Artificial Sequence
  Synthetic
attttattttuggccctcaactuggac

SEQ ID NO: 71669 - DNA, 22 bp, Artificial Sequence
  Synthetic
gatgtagggcuggaagtggtut

SEQ ID NO: 71670 - DNA, 28 bp, Artificial Sequence
  Synthetic
gcaagagaaagaacaaguttcatugaga

SEQ ID NO: 71671 - DNA, 28 bp, Artificial Sequence
  Synthetic
cttgtcatggucacaactccatctaaua

SEQ ID NO: 71672 - DNA, 28 bp, Artificial Sequence
  Synthetic
cagtcatgtgauactcaagtaagctcut

SEQ ID NO: 71673 - DNA, 29 bp, Artificial Sequence
  Synthetic
ttgcttactttctuctccaacagtcauat

SEQ ID NO: 71674 - DNA, 23 bp, Artificial Sequence
  Synthetic
ctgggagaaaugagcttgtcuga

SEQ ID NO: 71675 - DNA, 19 bp, Artificial Sequence
  Synthetic
gccuggccacgaauagcag

SEQ ID NO: 71676 - DNA, 20 bp, Artificial Sequence
  Synthetic
ttggccucacacgttccuac

SEQ ID NO: 71677 - DNA, 22 bp, Artificial Sequence
  Synthetic
tggaaaaccucatgcuggacaa

SEQ ID NO: 71678 - DNA, 28 bp, Artificial Sequence
  Synthetic
ggtgctgaaggaucagtttctaaaguaa

SEQ ID NO: 71679 - DNA, 27 bp, Artificial Sequence
  Synthetic
agttgctctaagugatgattccttugt

SEQ ID NO: 71680 - DNA, 28 bp, Artificial Sequence
  Synthetic
aacaaaggaaucatcactuagagcaact

SEQ ID NO: 71681 - DNA, 27 bp, Artificial Sequence
  Synthetic
tgaaggtgaaaccutagtgtgaaaugt

SEQ ID NO: 71682 - DNA, 21 bp, Artificial Sequence
  Synthetic
gatctctctugcagcctcgut

SEQ ID NO: 71683 - DNA, 23 bp, Artificial Sequence
  Synthetic
cttctcaacaccucagctgacuc

SEQ ID NO: 71684 - DNA, 21 bp, Artificial Sequence
  Synthetic
gutctuagaccggaaccggaa

SEQ ID NO: 71685 - DNA, 21 bp, Artificial Sequence
  Synthetic
tggtgccucaaggacaaugac

SEQ ID NO: 71686 - DNA, 19 bp, Artificial Sequence
  Synthetic
gctgtgccutcagggtuct

SEQ ID NO: 71687 - DNA, 18 bp, Artificial Sequence
  Synthetic
tcacctguggctggctuc

SEQ ID NO: 71688 - DNA, 17 bp, Artificial Sequence
  Synthetic
ccgctccugagaggcut

SEQ ID NO: 71689 - DNA, 26 bp, Artificial Sequence
  Synthetic
ggccacccaagaaguaaaaauaaact

SEQ ID NO: 71690 - DNA, 19 bp, Artificial Sequence
  Synthetic
ggtgaccccuacagtcgug

SEQ ID NO: 71691 - DNA, 23 bp, Artificial Sequence
  Synthetic
agaggcagatugagcccactaua

SEQ ID NO: 71692 - DNA, 23 bp, Artificial Sequence
  Synthetic
cagtgatctugatgtggccauct

SEQ ID NO: 71693 - DNA, 20 bp, Artificial Sequence
  Synthetic
gcatgggagggutgatgucc

SEQ ID NO: 71694 - DNA, 28 bp, Artificial Sequence
  Synthetic
agaccttacaauttccatgattuccagt

SEQ ID NO: 71695 - DNA, 28 bp, Artificial Sequence
  Synthetic
ccacatgttaatgucatttcttggcaua

SEQ ID NO: 71696 - DNA, 28 bp, Artificial Sequence
  Synthetic
gaatccattcccucttattctggaagug

SEQ ID NO: 71697 - DNA, 27 bp, Artificial Sequence
  Synthetic
agcataagttctucattttcaggguct

SEQ ID NO: 71698 - DNA, 21 bp, Artificial Sequence
  Synthetic
ccccuttctctuccagaagcc

SEQ ID NO: 71699 - DNA, 27 bp, Artificial Sequence
  Synthetic
gttatctccacuggccacaaaatcaua

SEQ ID NO: 71700 - DNA, 21 bp, Artificial Sequence
  Synthetic
cctcauccacggacucaggat

SEQ ID NO: 71701 - DNA, 28 bp, Artificial Sequence
  Synthetic
cagtatctctgautttgatgccattugt

SEQ ID NO: 71702 - DNA, 21 bp, Artificial Sequence
  Synthetic
gcuggacgaaagccugaacaa

SEQ ID NO: 71703 - DNA, 24 bp, Artificial Sequence
  Synthetic
cagaaacuactcaaacucccacct

SEQ ID NO: 71704 - DNA, 18 bp, Artificial Sequence
  Synthetic
ggcaaaagcccaguccuc

SEQ ID NO: 71705 - DNA, 23 bp, Artificial Sequence
  Synthetic
gtaacgtgtgugtgtctgtguct

SEQ ID NO: 71706 - DNA, 28 bp, Artificial Sequence
  Synthetic
acatttggcugtgacttcuaagaagaaa

SEQ ID NO: 71707 - DNA, 27 bp, Artificial Sequence
  Synthetic
gctcactaacuaacgtgaaagcctuac

SEQ ID NO: 71708 - DNA, 24 bp, Artificial Sequence
  Synthetic
gagtggtttugctggaacugaaat

SEQ ID NO: 71709 - DNA, 24 bp, Artificial Sequence
  Synthetic
ggttaccugactgctagttucact

SEQ ID NO: 71710 - DNA, 30 bp, Artificial Sequence; identical to SEQ ID NO: 6760
  Synthetic

SEQ ID NO: 71711 - DNA, 23 bp, Artificial Sequence
  Synthetic
aagtcctugaccctttgctgaut

SEQ ID NO: 71712 - DNA, 22 bp, Artificial Sequence
  Synthetic
ctccaggcaugatgatguccat

SEQ ID NO: 71713 - DNA, 21 bp, Artificial Sequence
  Synthetic
cggcacaucccatctuagcag

SEQ ID NO: 71714 - DNA, 28 bp, Artificial Sequence
  Synthetic
gatacattatgugtgtacaagugaccca

SEQ ID NO: 71715 - DNA, 25 bp, Artificial Sequence
  Synthetic
aagcugagaacatgcuaaagaacca

SEQ ID NO: 71716 - DNA, 21 bp, Artificial Sequence
  Synthetic
gctgaggucctggagattuct

SEQ ID NO: 71717 - DNA, 28 bp, Artificial Sequence
  Synthetic
cccctgataaautaacatacttgcucct

SEQ ID NO: 71718 - DNA, 23 bp, Artificial Sequence
  Synthetic
tgattcgggugtctcttcucagt

SEQ ID NO: 71719 - DNA, 19 bp, Artificial Sequence
  Synthetic
tctcucgcgagcaagctuc

SEQ ID NO: 71720 - DNA, 21 bp, Artificial Sequence
  Synthetic
gaaccucuacccaacaccaca

SEQ ID NO: 71721 - DNA, 25 bp, Artificial Sequence
  Synthetic
tgtgtttugggtagtgcauacaact

SEQ ID NO: 71722 - DNA, 25 bp, Artificial Sequence
  Synthetic
ctcatcatcagugcatagcttcuca

SEQ ID NO: 71723 - DNA, 21 bp, Artificial Sequence
  Synthetic
ggtgaggacuttgctggtugt

SEQ ID NO: 71724 - DNA, 21 bp, Artificial Sequence
  Synthetic
ggagagccutaccugaaggag

SEQ ID NO: 71725 - DNA, 26 bp, Artificial Sequence
  Synthetic
cagggccugactgattgataaatuca

SEQ ID NO: 71726 - DNA, 27 bp, Artificial Sequence
  Synthetic
gcagttgaaaaacucctagaagccaua

SEQ ID NO: 71727 - DNA, 28 bp, Artificial Sequence
  Synthetic
tgccaaacagcuatccatgaaaatauca

SEQ ID NO: 71728 - DNA, 17 bp, Artificial Sequence
  Synthetic
acagcacccgcugctut

SEQ ID NO: 71729 - DNA, 22 bp, Artificial Sequence
  Synthetic
ccagctgucagtcatggtgaua

SEQ ID NO: 71730 - DNA, 21 bp, Artificial Sequence
  Synthetic
cccaaccttutcgttgcacug

SEQ ID NO: 71731 - DNA, 26 bp, Artificial Sequence
  Synthetic
tcaaaccgcaautcccagatttcuat

SEQ ID NO: 71732 - DNA, 23 bp, Artificial Sequence
  Synthetic
gatttcutgcagacuccgaagga

SEQ ID NO: 71733 - DNA, 28 bp, Artificial Sequence
  Synthetic
ccatatcatcccaaucattgatgguact

SEQ ID NO: 71734 - DNA, 18 bp, Artificial Sequence
  Synthetic
accucgccacggtcttug

SEQ ID NO: 71735 - DNA, 19 bp, Artificial Sequence
  Synthetic
ccacctcugtcaggucagg

SEQ ID NO: 71736 - DNA, 22 bp, Artificial Sequence
  Synthetic
gcactccagcugatttcaaucc

SEQ ID NO: 71737 - DNA, 24 bp, Artificial Sequence
  Synthetic
tgccaagaugtggttaaacucaga

SEQ ID NO: 71738 - DNA, 26 bp, Artificial Sequence
  Synthetic
ccgggatacugctctcaagaaatuag

SEQ ID NO: 71739 - DNA, 27 bp, Artificial Sequence
  Synthetic
atttctgagcagugcttactctuacaa

SEQ ID NO: 71740 - DNA, 22 bp, Artificial Sequence
  Synthetic
gtuacaccaccccaaagucact

SEQ ID NO: 71741 - DNA, 26 bp, Artificial Sequence
  Synthetic
gtcatccttcugttcctcagucaaat

SEQ ID NO: 71742 - DNA, 22 bp, Artificial Sequence
  Synthetic
caacagggccagacuccataut

SEQ ID NO: 71743 - DNA, 21 bp, Artificial Sequence
  Synthetic
ctgggaguatggaggcugaga

SEQ ID NO: 71744 - DNA, 21 bp, Artificial Sequence
  Synthetic
gggacagucgaagaactucag

SEQ ID NO: 71745 - DNA, 21 bp, Artificial Sequence
  Synthetic
gctgcccauacatctcaucca

SEQ ID NO: 71746 - DNA, 24 bp, Artificial Sequence
  Synthetic
ggaaggaagttugtgagcagagut

SEQ ID NO: 71747 - DNA, 28 bp, Artificial Sequence
  Synthetic
tccaggatuggaattacacaagucaaat

SEQ ID NO: 71748 - DNA, 22 bp, Artificial Sequence
  Synthetic
gtgagaggugaacaaccccuaa

SEQ ID NO: 71749 - DNA, 17 bp, Artificial Sequence
  Synthetic
gagccucacctgccgua

SEQ ID NO: 71750 - DNA, 28 bp, Artificial Sequence
  Synthetic
cggaagaatagaauggcacttttucaac

SEQ ID NO: 71751 - DNA, 24 bp, Artificial Sequence
  Synthetic
ttgcttguaaagacgtctgtguct

SEQ ID NO: 71752 - DNA, 19 bp, Artificial Sequence
  Synthetic
ggtctcuggctcgttguga

SEQ ID NO: 71753 - DNA, 19 bp, Artificial Sequence
  Synthetic
catgggagagcugggcuac

SEQ ID NO: 71754 - DNA, 18 bp, Artificial Sequence
  Synthetic
ccaccacagcuccagucc

SEQ ID NO: 71755 - DNA, 19 bp, Artificial Sequence
  Synthetic
gaggttgcugctgctggua

SEQ ID NO: 71756 - DNA, 21 bp, Artificial Sequence
  Synthetic
gutagaacaacuccgggcaga

SEQ ID NO: 71757 - DNA, 24 bp, Artificial Sequence
  Synthetic
catttctcccutatgccgtgttut

SEQ ID NO: 71758 - DNA, 20 bp, Artificial Sequence
  Synthetic
caggacgaguatgcgcugaa

SEQ ID NO: 71759 - DNA, 26 bp, Artificial Sequence
  Synthetic
agggtgtttgauctctttcatgacug

SEQ ID NO: 71760 - DNA, 29 bp, Artificial Sequence
  Synthetic
gccggaattatuaatgaacaagaacauga

SEQ ID NO: 71761 - DNA, 25 bp, Artificial Sequence
  Synthetic
tgctcatauaacacagcttcagcut

SEQ ID NO: 71762 - DNA, 24 bp, Artificial Sequence
  Synthetic
gggaccgacauaaaagaacucaca

SEQ ID NO: 71763 - DNA, 27 bp, Artificial Sequence
  Synthetic
aaaaagcatttcacutacgatgacgut

SEQ ID NO: 71764 - DNA, 22 bp, Artificial Sequence
  Synthetic
cacauggcacagauggaggaaa

SEQ ID NO: 71765 - DNA, 28 bp, Artificial Sequence
  Synthetic
ttccttttgagagutagtatctugcaat

SEQ ID NO: 71766 - DNA, 19 bp, Artificial Sequence
  Synthetic
cagccacaggcucagtcuc

SEQ ID NO: 71767 - DNA, 20 bp, Artificial Sequence
  Synthetic
gcaggaggcagggauatcut

SEQ ID NO: 71768 - DNA, 20 bp, Artificial Sequence
  Synthetic
cgctccuaccttcctgugac

SEQ ID NO: 71769 - DNA, 20 bp, Artificial Sequence
  Synthetic
ggagtacauttgcgcgtuca

SEQ ID NO: 71770 - DNA, 27 bp, Artificial Sequence
  Synthetic
aaaaactcacucaaattcucagcaagg

SEQ ID NO: 71771 - DNA, 24 bp, Artificial Sequence
  Synthetic
ttccctttagaaugcagcagtcut

SEQ ID NO: 71772 - DNA, 25 bp, Artificial Sequence
  Synthetic
caggtaagugctagtcattcucact

SEQ ID NO: 71773 - DNA, 25 bp, Artificial Sequence
  Synthetic
ccatctgccutgttgttcatttugg

SEQ ID NO: 71774 - DNA, 19 bp, Artificial Sequence
  Synthetic
caacgugaacgcgcaaaug

SEQ ID NO: 71775 - DNA, 18 bp, Artificial Sequence
  Synthetic
cgtgtcgutgtggcagut

SEQ ID NO: 71776 - DNA, 18 bp, Artificial Sequence
  Synthetic
gcugacagcagccucaag

SEQ ID NO: 71777 - DNA, 17 bp, Artificial Sequence
  Synthetic
acacucgccugcaacca

SEQ ID NO: 71778 - DNA, 23 bp, Artificial Sequence
  Synthetic
gacctacctuctggaacctugaa

SEQ ID NO: 71779 - DNA, 21 bp, Artificial Sequence
  Synthetic
gtgtatagugcaccaggucca

SEQ ID NO: 71780 - DNA, 27 bp, Artificial Sequence
  Synthetic
gaaaattcttcutgccatatgugagca

SEQ ID NO: 71781 - DNA, 28 bp, Artificial Sequence
  Synthetic
gctcctccuaagccactttttatatcut

SEQ ID NO: 71782 - DNA, 23 bp, Artificial Sequence
  Synthetic
catatgugagcaagcagcugaaa

SEQ ID NO: 71783 - DNA, 19 bp, Artificial Sequence
  Synthetic
acaaaggcccaagcuccuc

SEQ ID NO: 71784 - DNA, 28 bp, Artificial Sequence
  Synthetic
gatataaaaagtggcutaggaggagcut

SEQ ID NO: 71785 - DNA, 28 bp, Artificial Sequence
  Synthetic
ggaagaacaggauagaaagactgctuat

SEQ ID NO: 71786 - DNA, 25 bp, Artificial Sequence
  Synthetic
gtggaagagtucttgaaagaagcug

SEQ ID NO: 71787 - DNA, 21 bp, Artificial Sequence
  Synthetic
caacgaggutttgtgcaguga

SEQ ID NO: 71788 - DNA, 21 bp, Artificial Sequence
  Synthetic
cagcacaaaugtgtgcaccut

SEQ ID NO: 71789 - DNA, 28 bp, Artificial Sequence
  Synthetic
aaaatagtucccaaggcattgaaucaac

SEQ ID NO: 71790 - DNA, 24 bp, Artificial Sequence
  Synthetic
gggatguaaagttaacuccagcca

SEQ ID NO: 71791 - DNA, 28 bp, Artificial Sequence
  Synthetic
ttgtcactctcutttctttttcctucct

SEQ ID NO: 71792 - DNA, 28 bp, Artificial Sequence
  Synthetic
gcagattctgcuaataccctgcaaauag

SEQ ID NO: 71793 - DNA, 21 bp, Artificial Sequence
  Synthetic
tttgtgccuggctgattcuga

SEQ ID NO: 71794 - DNA, 24 bp, Artificial Sequence
  Synthetic
catctagaccagcutctcccacua

SEQ ID NO: 71795 - DNA, 22 bp, Artificial Sequence
  Synthetic
gctttgctggucttccatcaut

SEQ ID NO: 71796 - DNA, 28 bp, Artificial Sequence
  Synthetic
gcctaccaattauagtgaacgttacuct

SEQ ID NO: 71797 - DNA, 28 bp, Artificial Sequence
  Synthetic
tgtttctgtgaugaaggaatatctgugg

SEQ ID NO: 71798 - DNA, 21 bp, Artificial Sequence
  Synthetic
ccgggaagcaacaacucugat

SEQ ID NO: 71799 - DNA, 21 bp, Artificial Sequence
  Synthetic
ggauccaggauaacggaggct

SEQ ID NO: 71800 - DNA, 25 bp, Artificial Sequence
  Synthetic
cagactgcagggutctagtttauct

SEQ ID NO: 71801 - DNA, 26 bp, Artificial Sequence
  Synthetic
gtgaactgacagaaguacatctgcua

SEQ ID NO: 71802 - DNA, 28 bp, Artificial Sequence
  Synthetic
cgtcatgtggaucagcctattgattaua

SEQ ID NO: 71803 - DNA, 23 bp, Artificial Sequence
  Synthetic
tgtggacgtautctcactgctug

SEQ ID NO: 71804 - DNA, 22 bp, Artificial Sequence
  Synthetic
ggccctguaaagcagcacauat

SEQ ID NO: 71805 - DNA, 22 bp, Artificial Sequence
  Synthetic
cccaacuccttttgguccacag

SEQ ID NO: 71806 - DNA, 21 bp, Artificial Sequence
  Synthetic
ggtggugaccagggagtctua

SEQ ID NO: 71807 - DNA, 20 bp, Artificial Sequence
  Synthetic
acgcagugcagctgagtauc

SEQ ID NO: 71808 - DNA, 28 bp, Artificial Sequence
  Synthetic
caaagcaguaaaaccgaacatatgtcut

SEQ ID NO: 71809 - DNA, 21 bp, Artificial Sequence
  Synthetic
ccttttgaggcugaccactuc

SEQ ID NO: 71810 - DNA, 21 bp, Artificial Sequence
  Synthetic
acatcaccaagugcaccuacc

SEQ ID NO: 71811 - DNA, 23 bp, Artificial Sequence
  Synthetic
ggattgtggccutctttgagtuc

SEQ ID NO: 71812 - DNA, 23 bp, Artificial Sequence
  Synthetic
ccatccaagtuctgcacagagua

SEQ ID NO: 71813 - DNA, 28 bp, Artificial Sequence
  Synthetic
acatcctatttcaucttcagctgaugac

SEQ ID NO: 71814 - DNA, 20 bp, Artificial Sequence
  Synthetic
gacgctcuccacacacauga

SEQ ID NO: 71815 - DNA, 19 bp, Artificial Sequence
  Synthetic
cgactucgccgagatgucc

SEQ ID NO: 71816 - DNA, 20 bp, Artificial Sequence
  Synthetic
tccctgtccugccccaauaa

SEQ ID NO: 71817 - DNA, 20 bp, Artificial Sequence
  Synthetic
cugcagacccacagugacaa

SEQ ID NO: 71818 - DNA, 18 bp, Artificial Sequence
  Synthetic
gttcaccccgucccugaa

SEQ ID NO: 71819 - DNA, 17 bp, Artificial Sequence
  Synthetic
cggtgccaccugtgguc

SEQ ID NO: 71820 - DNA, 17 bp, Artificial Sequence
  Synthetic
gcggagggucaggugga

SEQ ID NO: 71821 - DNA, 17 bp, Artificial Sequence
  Synthetic
cgcaccgggcauctuct

SEQ ID NO: 71822 - DNA, 28 bp, Artificial Sequence
  Synthetic
tcagagatactutagggacaaaauccga

SEQ ID NO: 71823 - DNA, 24 bp, Artificial Sequence
  Synthetic
catctctgcccuttctttctucca

SEQ ID NO: 71824 - DNA, 27 bp, Artificial Sequence
  Synthetic
acataccagttccuatggttccagtua

SEQ ID NO: 71825 - DNA, 22 bp, Artificial Sequence
  Synthetic
agcauacagggcctuaaaccag

SEQ ID NO: 71826 - DNA, 27 bp, Artificial Sequence
  Synthetic
aaatttcacuccacttaccuaccaagg

SEQ ID NO: 71827 - DNA, 28 bp, Artificial Sequence
  Synthetic
actaaaacgacaauacaaugaccaccat

SEQ ID NO: 71828 - DNA, 27 bp, Artificial Sequence
  Synthetic
agtgtcagtaguagtgatggttauggt

SEQ ID NO: 71829 - DNA, 28 bp, Artificial Sequence
  Synthetic
ttgcactatgtatuttatgggctagguc

SEQ ID NO: 71830 - DNA, 25 bp, Artificial Sequence
  Synthetic
caaggtctucaatgataagcuccca

SEQ ID NO: 71831 - DNA, 28 bp, Artificial Sequence
  Synthetic
ggaaaggucaacatcatcatcaucaaaa

SEQ ID NO: 71832 - DNA, 29 bp, Artificial Sequence
  Synthetic
cacctaatctcagucccactatagaguat

SEQ ID NO: 71833 - DNA, 25 bp, Artificial Sequence
  Synthetic
tcgaggaagggaugatgaatgttug

SEQ ID NO: 71834 - DNA, 26 bp, Artificial Sequence
  Synthetic
agttttgcagutatggtcaauaccca

SEQ ID NO: 71835 - DNA, 25 bp, Artificial Sequence
  Synthetic
cttgcccauctttcattctgugaag

SEQ ID NO: 71836 - DNA, 20 bp, Artificial Sequence
  Synthetic
gcagcggucacacttguagg

SEQ ID NO: 71837 - DNA, 21 bp, Artificial Sequence
  Synthetic
ccttcctcgugctgacttugg

SEQ ID NO: 71838 - DNA, 28 bp, Artificial Sequence
  Synthetic
ctttacatggctuttggtcttctaagug

SEQ ID NO: 71839 - DNA, 23 bp, Artificial Sequence
  Synthetic
cattcuggcacgcttuggaaaaa

SEQ ID NO: 71840 - DNA, 21 bp, Artificial Sequence
  Synthetic
tcaggagaccccacucatgut

SEQ ID NO: 71841 - DNA, 22 bp, Artificial Sequence
  Synthetic
gcatggtttguccagggctauc

SEQ ID NO: 71842 - DNA, 28 bp, Artificial Sequence
  Synthetic
ctcactaugaaaaactgtaaagcugcaa

SEQ ID NO: 71843 - DNA, 22 bp, Artificial Sequence
  Synthetic
agatgcagcuactacccagcua

SEQ ID NO: 71844 - DNA, 20 bp, Artificial Sequence
  Synthetic
accuggaaacgugagcacag

SEQ ID NO: 71845 - DNA, 28 bp, Artificial Sequence
  Synthetic
tggttcctgaaauagagttcacatgtut

SEQ ID NO: 71846 - DNA, 23 bp, Artificial Sequence
  Synthetic
ctgccattgautagactgcugag

SEQ ID NO: 71847 - DNA, 25 bp, Artificial Sequence
  Synthetic
cttggtuacaaccagaatggugagt

SEQ ID NO: 71848 - DNA, 25 bp, Artificial Sequence
  Synthetic
cgggctattuaagagggatgguact

SEQ ID NO: 71849 - DNA, 26 bp, Artificial Sequence
  Synthetic
caaagaaggcacuggaaaaggattug

SEQ ID NO: 71850 - DNA, 22 bp, Artificial Sequence
  Synthetic
gcacaggaaccuggtggaaauc

SEQ ID NO: 71851 - DNA, 28 bp, Artificial Sequence
  Synthetic
acaatgtgauagaagaagaaatccgugt

SEQ ID NO: 71852 - DNA, 24 bp, Artificial Sequence
  Synthetic
agttgaactcuggaaggcaaaguc

SEQ ID NO: 71853 - DNA, 23 bp, Artificial Sequence
  Synthetic
tgtggttggaacutgaggtgtut

SEQ ID NO: 71854 - DNA, 28 bp, Artificial Sequence
  Synthetic
gaactccttacugtttttcacgaaauga

SEQ ID NO: 71855 - DNA, 24 bp, Artificial Sequence
  Synthetic
gctgattgtuggttggaggtuagt

SEQ ID NO: 71856 - DNA, 23 bp, Artificial Sequence
  Synthetic
gaagggttctuccggagatacug

SEQ ID NO: 71857 - DNA, 28 bp, Artificial Sequence
  Synthetic
agagcaagaagaaaucatctgaagtcut

SEQ ID NO: 71858 - DNA, 28 bp, Artificial Sequence
  Synthetic
gatcctggtautcttagcaggtuaaagg

SEQ ID NO: 71859 - DNA, 21 bp, Artificial Sequence
  Synthetic
acgcacagaacacucauggat

SEQ ID NO: 71860 - DNA, 25 bp, Artificial Sequence
  Synthetic
ccattctuagagcgaacttcacucc

SEQ ID NO: 71861 - DNA, 28 bp, Artificial Sequence
  Synthetic
tgacagtacacugcttcagttgaaauaa

SEQ ID NO: 71862 - DNA, 25 bp, Artificial Sequence
  Synthetic
tcagatgaacagacuagccacttug

SEQ ID NO: 71863 - DNA, 28 bp, Artificial Sequence
  Synthetic
agttgcaaaatugaaaaagaccaaacut

SEQ ID NO: 71864 - DNA, 23 bp, Artificial Sequence
  Synthetic
gcuaaagtuaccagccacacaga

SEQ ID NO: 71865 - DNA, 28 bp, Artificial Sequence
  Synthetic
gggaaaagtggautgtttctgaagtaug

SEQ ID NO: 71866 - DNA, 21 bp, Artificial Sequence
  Synthetic
cactcaugcacgcttctgtuc

SEQ ID NO: 71867 - DNA, 22 bp, Artificial Sequence
  Synthetic
agaacuctggttuggccacaaa

SEQ ID NO: 71868 - DNA, 28 bp, Artificial Sequence
  Synthetic
cagtgaaaaagcaaaaagugaggaugaa

SEQ ID NO: 71869 - DNA, 22 bp, Artificial Sequence
  Synthetic
agcaccattugtagcaccugag

SEQ ID NO: 71870 - DNA, 28 bp, Artificial Sequence
  Synthetic
tcctgtttatacugagagcactgaugat

SEQ ID NO: 71871 - DNA, 28 bp, Artificial Sequence
  Synthetic
gacacaaagacuggcttacattttgaut

SEQ ID NO: 71872 - DNA, 26 bp, Artificial Sequence
  Synthetic
ccaataaaucgaggtcagccuaaacc

SEQ ID NO: 71873 - DNA, 28 bp, Artificial Sequence
  Synthetic
gcaaaccggaguattttcaauagcaaaa

SEQ ID NO: 71874 - DNA, 28 bp, Artificial Sequence
  Synthetic
ccacaaatagtacutctcagaccgttuc

SEQ ID NO: 71875 - DNA, 24 bp, Artificial Sequence
  Synthetic
ggattgttaaugggacagtccuca

SEQ ID NO: 71876 - DNA, 28 bp, Artificial Sequence
  Synthetic
ccgtgttcgctutctaagtagattctua

SEQ ID NO: 71877 - DNA, 27 bp, Artificial Sequence
  Synthetic
cctcagtgatuaaacattgatgtuggt

SEQ ID NO: 71878 - DNA, 28 bp, Artificial Sequence
  Synthetic
aaatcgagtgggutctaatcatggaaut

SEQ ID NO: 71879 - DNA, 28 bp, Artificial Sequence
  Synthetic
tctcttcttcttcaugctgttcttctuc

SEQ ID NO: 71880 - DNA, 26 bp, Artificial Sequence
  Synthetic
gcagcaacugatgaaaagtuacagaa

SEQ ID NO: 71881 - DNA, 23 bp, Artificial Sequence
  Synthetic
ggtttacttggutctccctguga

SEQ ID NO: 71882 - DNA, 25 bp, Artificial Sequence
  Synthetic
ttgtaccagaagautagggctcuct

SEQ ID NO: 71883 - DNA, 18 bp, Artificial Sequence
  Synthetic
ctcacccgcaguctguct

SEQ ID NO: 71884 - DNA, 24 bp, Artificial Sequence
  Synthetic
tggactgtagutccagacacguaa

SEQ ID NO: 71885 - DNA, 20 bp, Artificial Sequence
  Synthetic
agcacttgacugggacccua

SEQ ID NO: 71886 - DNA, 24 bp, Artificial Sequence
  Synthetic
caattgagcagautgtgugcagat

SEQ ID NO: 71887 - DNA, 28 bp, Artificial Sequence
  Synthetic
gtgtctcaaaatcuatttcttccccuct

SEQ ID NO: 71888 - DNA, 28 bp, Artificial Sequence
  Synthetic
caatgtctuacaggtatcttcucaacct

SEQ ID NO: 71889 - DNA, 28 bp, Artificial Sequence
  Synthetic
gaagcagtutatatattggugccaaaca

SEQ ID NO: 71890 - DNA, 28 bp, Artificial Sequence
  Synthetic
catcacttaatuggtttttggctttugg

SEQ ID NO: 71891 - DNA, 24 bp, Artificial Sequence
  Synthetic
caaagttcgcgacauatcatccut

SEQ ID NO: 71892 - DNA, 21 bp, Artificial Sequence
  Synthetic
tttccccaaugccttctccug

SEQ ID NO: 71893 - DNA, 23 bp, Artificial Sequence
  Synthetic
aaggucaaaggcgguaagaacat

SEQ ID NO: 71894 - DNA, 27 bp, Artificial Sequence
  Synthetic
agctgttatcaauatcaagatggcugt

SEQ ID NO: 71895 - DNA, 27 bp, Artificial Sequence
  Synthetic
gctaaauggagcacaaatctctcuact

SEQ ID NO: 71896 - DNA, 24 bp, Artificial Sequence
  Synthetic
caccuactgcugaaaagagagaga

SEQ ID NO: 71897 - DNA, 20 bp, Artificial Sequence
  Synthetic
aatggctcaucgaggcucag

SEQ ID NO: 71898 - DNA, 24 bp, Artificial Sequence
  Synthetic
ggcaagcatutttggaggaaauct

SEQ ID NO: 71899 - DNA, 28 bp, Artificial Sequence
  Synthetic
cctctcgttttcutctttcttaccttuc

SEQ ID NO: 71900 - DNA, 26 bp, Artificial Sequence
  Synthetic
tgttgtcaatgcutggtactcaugat

SEQ ID NO: 71901 - DNA, 27 bp, Artificial Sequence
  Synthetic
gggaatttcccaacaauacagagtcut

SEQ ID NO: 71902 - DNA, 19 bp, Artificial Sequence
  Synthetic
ccctctgugacccgtccua

SEQ ID NO: 71903 - DNA, 21 bp, Artificial Sequence
  Synthetic
cactcacaugcatgcttuccc

SEQ ID NO: 71904 - DNA, 24 bp, Artificial Sequence
  Synthetic
cttcctatgucaccatcacauccc

SEQ ID NO: 71905 - DNA, 25 bp, Artificial Sequence
  Synthetic
aatccaaacaccccaguaatuacca

SEQ ID NO: 71906 - DNA, 21 bp, Artificial Sequence
  Synthetic
tcugcagacctugaccagagt

SEQ ID NO: 71907 - DNA, 24 bp, Artificial Sequence
  Synthetic
gcaaaccacugcaacatgaacauc

SEQ ID NO: 71908 - DNA, 21 bp, Artificial Sequence
  Synthetic
gccaggccccuttatctctua

SEQ ID NO: 71909 - DNA, 24 bp, Artificial Sequence
  Synthetic
ccactgagagugaccctaatcuct

SEQ ID NO: 71910 - DNA, 26 bp, Artificial Sequence
  Synthetic
aaaucataggtcaaaugaagcgcaac

SEQ ID NO: 71911 - DNA, 22 bp, Artificial Sequence
  Synthetic
tguctactucaggcaggaggaa

SEQ ID NO: 71912 - DNA, 26 bp, Artificial Sequence
  Synthetic
ctttcaagagautcacccagatucca

SEQ ID NO: 71913 - DNA, 23 bp, Artificial Sequence
  Synthetic
cucgaaaaccagacaagcuaacc

SEQ ID NO: 71914 - DNA, 23 bp, Artificial Sequence
  Synthetic
cccaggauaaggauggagagcat

SEQ ID NO: 71915 - DNA, 22 bp, Artificial Sequence
  Synthetic
gtgtguatctgtccuccggaag

SEQ ID NO: 71916 - DNA, 23 bp, Artificial Sequence
  Synthetic
ccttaccaucacactuccagcag

SEQ ID NO: 71917 - DNA, 20 bp, Artificial Sequence
  Synthetic
catccguccccaccuagaag

SEQ ID NO: 71918 - DNA, 22 bp, Artificial Sequence
  Synthetic
gactcctgcgugtcctttgtua

SEQ ID NO: 71919 - DNA, 22 bp, Artificial Sequence
  Synthetic
tgatacccaggguttggaguca

SEQ ID NO: 71920 - DNA, 21 bp, Artificial Sequence
  Synthetic
gagggaaugcacgtacctgut

SEQ ID NO: 71921 - DNA, 28 bp, Artificial Sequence
  Synthetic
agtgctgatugactttagtttatuccca

SEQ ID NO: 71922 - DNA, 19 bp, Artificial Sequence
  Synthetic
cagccttauctccgcguca

SEQ ID NO: 71923 - DNA, 24 bp, Artificial Sequence
  Synthetic
actgttttctccuctcacccguat

SEQ ID NO: 71924 - DNA, 23 bp, Artificial Sequence
  Synthetic
ccagctttuacatggcaaugaca

SEQ ID NO: 71925 - DNA, 23 bp, Artificial Sequence
  Synthetic
agcgcguatctgtuccaaaagat

SEQ ID NO: 71926 - DNA, 28 bp, Artificial Sequence
  Synthetic
cttgctacaaaaucataaagugcaacga

SEQ ID NO: 71927 - DNA, 28 bp, Artificial Sequence
  Synthetic
aattcccttcccutcttatgtcttucag

SEQ ID NO: 71928 - DNA, 21 bp, Artificial Sequence
  Synthetic
gcuctgagguccacaagaggt

SEQ ID NO: 71929 - DNA, 22 bp, Artificial Sequence
  Synthetic
cagagcugatucagacccacaa

SEQ ID NO: 71930 - DNA, 25 bp, Artificial Sequence
  Synthetic
ctctttgttuagcttgaacaugcga

SEQ ID NO: 71931 - DNA, 20 bp, Artificial Sequence
  Synthetic
ctcaugaaggcgctcucgaa

SEQ ID NO: 71932 - DNA, 23 bp, Artificial Sequence
  Synthetic
tcctgtatgacauggatgccuct

SEQ ID NO: 71933 - DNA, 23 bp, Artificial Sequence
  Synthetic
gttagagucttccugcccaacaa

SEQ ID NO: 71934 - DNA, 23 bp, Artificial Sequence
  Synthetic
tgagaaacugccatgcguaagat

SEQ ID NO: 71935 - DNA, 23 bp, Artificial Sequence
  Synthetic
ggcttctcuttctttccaugcag

SEQ ID NO: 71936 - DNA, 22 bp, Artificial Sequence
  Synthetic
aaagtcggagcaugcttcucaa

SEQ ID NO: 71937 - DNA, 25 bp, Artificial Sequence
  Synthetic
cagccauagaaaugagcaaaaccag

SEQ ID NO: 71938 - DNA, 20 bp, Artificial Sequence
  Synthetic
gcgtgaaauccgagtcctuc

SEQ ID NO: 71939 - DNA, 28 bp, Artificial Sequence
  Synthetic
ttgaaacatgcacuacgatgtacacuat

SEQ ID NO: 71940 - DNA, 21 bp, Artificial Sequence
  Synthetic
ggcagcugtgactctugagac

SEQ ID NO: 71941 - DNA, 25 bp, Artificial Sequence
  Synthetic
aggtccucagcccttagctattuaa

SEQ ID NO: 71942 - DNA, 21 bp, Artificial Sequence
  Synthetic
tgactcaccacugtcctcugt

SEQ ID NO: 71943 - DNA, 27 bp, Artificial Sequence
  Synthetic
catcttcttccucttctagccttucag

SEQ ID NO: 71944 - DNA, 22 bp, Artificial Sequence
  Synthetic
tcccutaagugccaagaggaac

SEQ ID NO: 71945 - DNA, 23 bp, Artificial Sequence
  Synthetic
aaacctggcugtgcaucaaaaat

SEQ ID NO: 71946 - DNA, 22 bp, Artificial Sequence
  Synthetic
acatuccagaagcggaatucca

SEQ ID NO: 71947 - DNA, 27 bp, Artificial Sequence
  Synthetic
gagcacaagutcaaatagcaaucagat

SEQ ID NO: 71948 - DNA, 23 bp, Artificial Sequence
  Synthetic
tttttgauggcagcattcgaugg

SEQ ID NO: 71949 - DNA, 27 bp, Artificial Sequence
  Synthetic
acagcggtugacatctaatattugaca

SEQ ID NO: 71950 - DNA, 21 bp, Artificial Sequence
  Synthetic
gcggagauaactgggtgtgut

SEQ ID NO: 71951 - DNA, 22 bp, Artificial Sequence
  Synthetic
ccctcucaggacagaggauact

SEQ ID NO: 71952 - DNA, 17 bp, Artificial Sequence
  Synthetic
gggtgugcgctcaccuc

SEQ ID NO: 71953 - DNA, 17 bp, Artificial Sequence
  Synthetic
aucccacagcgcaucca

SEQ ID NO: 71954 - DNA, 28 bp, Artificial Sequence
  Synthetic
tgaaaaacugaaagagatgaagguagca

SEQ ID NO: 71955 - DNA, 25 bp, Artificial Sequence
  Synthetic
gaugcacuccaacaaagagaacaac

SEQ ID NO: 71956 - DNA, 19 bp, Artificial Sequence
  Synthetic
tggtgatgcugacgtggut

SEQ ID NO: 71957 - DNA, 20 bp, Artificial Sequence
  Synthetic
catgtcucccaacccctcuc

SEQ ID NO: 71958 - DNA, 18 bp, Artificial Sequence
  Synthetic
ggagaggcugcccugaga

SEQ ID NO: 71959 - DNA, 18 bp, Artificial Sequence
  Synthetic
gccacugcgctttgctut

SEQ ID NO: 71960 - DNA, 20 bp, Artificial Sequence
  Synthetic
gctctatggucacgcccauc

SEQ ID NO: 71961 - DNA, 21 bp, Artificial Sequence
  Synthetic
ggaggtugggaacggtttcuc

SEQ ID NO: 71962 - DNA, 22 bp, Artificial Sequence
  Synthetic
gagatgagcuccaaaggcagut

SEQ ID NO: 71963 - DNA, 29 bp, Artificial Sequence
  Synthetic
tgctgagtagttuggatttcttttagcut

SEQ ID NO: 71964 - DNA, 24 bp, Artificial Sequence
  Synthetic
cgttccccagagautccaauaact

SEQ ID NO: 71965 - DNA, 25 bp, Artificial Sequence
  Synthetic
ttaatgtcaggacaaaguccggaut

SEQ ID NO: 71966 - DNA, 27 bp, Artificial Sequence
  Synthetic
gcagaaacagautgaagagauggagaa

SEQ ID NO: 71967 - DNA, 21 bp, Artificial Sequence
  Synthetic
gggtugggaggacttuaacct

SEQ ID NO: 71968 - DNA, 22 bp, Artificial Sequence
  Synthetic
ccagaucaggcaacuggagaaa

SEQ ID NO: 71969 - DNA, 20 bp, Artificial Sequence
  Synthetic
ccccgaucagaggtgcaaug

SEQ ID NO: 71970 - DNA, 28 bp, Artificial Sequence
  Synthetic
gagtataactacgauctgccaaactuga

SEQ ID NO: 71971 - DNA, 25 bp, Artificial Sequence
  Synthetic
tcaccatggacuatttctgcttugt

SEQ ID NO: 71972 - DNA, 29 bp, Artificial Sequence
  Synthetic
gagcttttaaguggtagccatagtaugat

SEQ ID NO: 71973 - DNA, 21 bp, Artificial Sequence
  Synthetic
gcttctgtugcttgggacugt

SEQ ID NO: 71974 - DNA, 27 bp, Artificial Sequence
  Synthetic
accttttgacaauagtggagatgcuac

SEQ ID NO: 71975 - DNA, 28 bp, Artificial Sequence
  Synthetic
tgttttaagagacagcuggcagaatuat

SEQ ID NO: 71976 - DNA, 19 bp, Artificial Sequence
  Synthetic
gcaagcgcagcaucccaua

SEQ ID NO: 71977 - DNA, 20 bp, Artificial Sequence
  Synthetic
gagcucaggaaagtguccga

SEQ ID NO: 71978 - DNA, 21 bp, Artificial Sequence
  Synthetic
ccgcaaagaggucctaaggut

SEQ ID NO: 71979 - DNA, 20 bp, Artificial Sequence
  Synthetic
tgtaaccggcacaugcucag

SEQ ID NO: 71980 - DNA, 26 bp, Artificial Sequence
  Synthetic
tugtgatggaattugaagaccacaga

SEQ ID NO: 71981 - DNA, 25 bp, Artificial Sequence
  Synthetic
gcttcatcaauaacaaaacgugcca

SEQ ID NO: 71982 - DNA, 19 bp, Artificial Sequence
  Synthetic
ctggccugctctgcattut

SEQ ID NO: 71983 - DNA, 24 bp, Artificial Sequence
  Synthetic
cctugttgaatctatucggcgaga

SEQ ID NO: 71984 - DNA, 28 bp, Artificial Sequence
  Synthetic
tttcagcacttcauctgtaatcttcugt

SEQ ID NO: 71985 - DNA, 27 bp, Artificial Sequence
  Synthetic
caagtagaaaaagggcuggaaaatugt

SEQ ID NO: 71986 - DNA, 20 bp, Artificial Sequence
  Synthetic
ggtgactuggatcccgauct

SEQ ID NO: 71987 - DNA, 25 bp, Artificial Sequence
  Synthetic
gggacaucctggtttttauagagca

SEQ ID NO: 71988 - DNA, 28 bp, Artificial Sequence
  Synthetic
ccttttgggtttucctgtaagtagtcua

SEQ ID NO: 71989 - DNA, 26 bp, Artificial Sequence
  Synthetic
acctgtgugagaaaatcatagcugag

SEQ ID NO: 71990 - DNA, 27 bp, Artificial Sequence
  Synthetic
ttgcacgtagaugatcaaaatgtcuct

SEQ ID NO: 71991 - DNA, 28 bp, Artificial Sequence
  Synthetic
tgccaactaatagucacgtatgtgatut

SEQ ID NO: 71992 - DNA, 26 bp, Artificial Sequence
  Synthetic
ggagaatctctaugagaggaagcuct

SEQ ID NO: 71993 - DNA, 22 bp, Artificial Sequence
  Synthetic
tcgttcacucagtgtgggttut

SEQ ID NO: 71994 - DNA, 20 bp, Artificial Sequence
  Synthetic
cgccacacugcttcctttug

SEQ ID NO: 71995 - DNA, 21 bp, Artificial Sequence
  Synthetic
cgaagaagacgagggucugga

SEQ ID NO: 71996 - DNA, 28 bp, Artificial Sequence
  Synthetic
acaggagaatauggaaatctggtgacua

SEQ ID NO: 71997 - DNA, 25 bp, Artificial Sequence
  Synthetic
cactaaaacuctaagggcuaagcca

SEQ ID NO: 71998 - DNA, 21 bp, Artificial Sequence
  Synthetic
catttugaccgccttgcauct

SEQ ID NO: 71999 - DNA, 28 bp, Artificial Sequence
  Synthetic
tctctttgtctuctgcatttactucaca

SEQ ID NO: 72000 - DNA, 23 bp, Artificial Sequence
  Synthetic
tgagctuggcagggttgatauag

SEQ ID NO: 72001 - DNA, 28 bp, Artificial Sequence
  Synthetic
ccagtgagacugctttattaagcttgut

SEQ ID NO: 72002 - DNA, 20 bp, Artificial Sequence
  Synthetic
aggccactuggctcctcuat

SEQ ID NO: 72003 - DNA, 21 bp, Artificial Sequence
  Synthetic
ccgccuaagcccatctctauc

SEQ ID NO: 72004 - DNA, 22 bp, Artificial Sequence
  Synthetic
gctcugaagacagaaccugaca

SEQ ID NO: 72005 - DNA, 26 bp, Artificial Sequence
  Synthetic
acttacauccaaggaagtcagcttut

SEQ ID NO: 72006 - DNA, 28 bp, Artificial Sequence
  Synthetic
cttatcgtagaucaagtccaaaagcuga

SEQ ID NO: 72007 - DNA, 28 bp, Artificial Sequence
  Synthetic
actgcaaatttaacugctgtgctttaut

SEQ ID NO: 72008 - DNA, 18 bp, Artificial Sequence
  Synthetic
cacucaccctugcaccga

SEQ ID NO: 72009 - DNA, 20 bp, Artificial Sequence
  Synthetic
ggcgctgugacttacaugga

SEQ ID NO: 72010 - DNA, 24 bp, Artificial Sequence
  Synthetic
cagtttgtuccccctgttauaccc

SEQ ID NO: 72011 - DNA, 28 bp, Artificial Sequence
  Synthetic
gcaaagtgggaagaauttcatctccuaa

SEQ ID NO: 72012 - DNA, 32 bp, Artificial Sequence
  Synthetic
ataatgcctatacautttgttggttttacaut

SEQ ID NO: 72013 - DNA, 24 bp, Artificial Sequence
  Synthetic
cttctgaatggucttctccaggut

SEQ ID NO: 72014 - DNA, 24 bp, Artificial Sequence
  Synthetic
ccautttgaaccuggagaagacca

SEQ ID NO: 72015 - DNA, 28 bp, Artificial Sequence
  Synthetic
gctaggatttttcuctgaactgtctgut

SEQ ID NO: 72016 - DNA, 25 bp, Artificial Sequence
  Synthetic
gactttggctgucaactttcgaaut

SEQ ID NO: 72017 - DNA, 19 bp, Artificial Sequence
  Synthetic
gggtttuggctccttucgg

SEQ ID NO: 72018 - DNA, 29 bp, Artificial Sequence
  Synthetic
ctgcaaattuatatccatcauccgaaagg

SEQ ID NO: 72019 - DNA, 28 bp, Artificial Sequence
  Synthetic
accagagaaauccagaggaaagtcauat

SEQ ID NO: 72020 - DNA, 29 bp, Artificial Sequence
  Synthetic
ttcttgtgtaagaauccgttttagtucca

SEQ ID NO: 72021 - DNA, 27 bp, Artificial Sequence
  Synthetic
ggatcactcgguaccatgttgtaauat

SEQ ID NO: 72022 - DNA, 24 bp, Artificial Sequence
  Synthetic
ccgtggaaaugggctttaguagaa

SEQ ID NO: 72023 - DNA, 27 bp, Artificial Sequence
  Synthetic
acttgattcttttucctcagttgcuct

SEQ ID NO: 72024 - DNA, 25 bp, Artificial Sequence
  Synthetic
cagttctttcugtgggtatugagca

SEQ ID NO: 72025 - DNA, 26 bp, Artificial Sequence
  Synthetic
ttctcaaggcugtcaaatacaacuca

SEQ ID NO: 72026 - DNA, 24 bp, Artificial Sequence
  Synthetic
gatcguggaagaataccaatugcc

SEQ ID NO: 72027 - DNA, 25 bp, Artificial Sequence
  Synthetic
gtggcattuacgaatcacttctuca

SEQ ID NO: 72028 - DNA, 28 bp, Artificial Sequence
  Synthetic
ctaccatgtgacuggcttatttgtauga

SEQ ID NO: 72029 - DNA, 27 bp, Artificial Sequence
  Synthetic
cctctgctguaaatacaaagcttucaa

SEQ ID NO: 72030 - DNA, 22 bp, Artificial Sequence
  Synthetic
gccctcctugagaagtgagtua

SEQ ID NO: 72031 - DNA, 24 bp, Artificial Sequence
  Synthetic
gtcgacacaagguacttcgaugat

SEQ ID NO: 72032 - DNA, 24 bp, Artificial Sequence
  Synthetic
ctctttgacuggaccatgaaucct

SEQ ID NO: 72033 - DNA, 27 bp, Artificial Sequence
  Synthetic
acaggacctucttaaaatactgcucac

SEQ ID NO: 72034 - DNA, 22 bp, Artificial Sequence
  Synthetic
tgatggacugggcggtaaatuc

SEQ ID NO: 72035 - DNA, 20 bp, Artificial Sequence
  Synthetic
cactcgtggugaccttggut

SEQ ID NO: 72036 - DNA, 19 bp, Artificial Sequence
  Synthetic
gcuccacgcaggcaactua

SEQ ID NO: 72037 - DNA, 28 bp, Artificial Sequence
  Synthetic
ccgacgagauagaaattgacttugagac

SEQ ID NO: 72038 - DNA, 19 bp, Artificial Sequence
  Synthetic
cggactugaccgtcauggg

SEQ ID NO: 72039 - DNA, 19 bp, Artificial Sequence
  Synthetic
tcugcggcaagacgtucaa

SEQ ID NO: 72040 - DNA, 22 bp, Artificial Sequence
  Synthetic
cggtggaacagugatgaaguga

SEQ ID NO: 72041 - DNA, 27 bp, Artificial Sequence
  Synthetic
ccagcattcugacattagctucaaaac

SEQ ID NO: 72042 - DNA, 21 bp, Artificial Sequence
  Synthetic
accaccaggutgctcugaaat

SEQ ID NO: 72043 - DNA, 23 bp, Artificial Sequence
  Synthetic
gccctaugcaaaggttacugcaa

SEQ ID NO: 72044 - DNA, 21 bp, Artificial Sequence
  Synthetic
gcctgccacagugttcagtua

SEQ ID NO: 72045 - DNA, 27 bp, Artificial Sequence
  Synthetic
tgtagaattcugtcatccugaagacca

SEQ ID NO: 72046 - DNA, 21 bp, Artificial Sequence
  Synthetic
cgcaaaguggtgggttucaga

SEQ ID NO: 72047 - DNA, 23 bp, Artificial Sequence
  Synthetic
tgcccaugagctacgaugaaaag

SEQ ID NO: 72048 - DNA, 20 bp, Artificial Sequence
  Synthetic
gcttgcuacctggcuggaat

SEQ ID NO: 72049 - DNA, 20 bp, Artificial Sequence
  Synthetic
cctcccgccauggatttcuc

SEQ ID NO: 72050 - DNA, 30 bp, Artificial Sequence; identical to SEQ ID NO: 6362
  Synthetic

SEQ ID NO: 72051 - DNA, 27 bp, Artificial Sequence
  Synthetic
ccctgaacatgugtagaaagcagatut

SEQ ID NO: 72052 - DNA, 21 bp, Artificial Sequence
  Synthetic
ccggttgaugtccaggcuaag

SEQ ID NO: 72053 - DNA, 22 bp, Artificial Sequence
  Synthetic
gcagguagacggagacucaaca

SEQ ID NO: 72054 - DNA, 29 bp, Artificial Sequence
  Synthetic
gtcagactgtacutccatacttgatucat

SEQ ID NO: 72055 - DNA, 20 bp, Artificial Sequence
  Synthetic
ggttgtggaucggctcgtut

SEQ ID NO: 72056 - DNA, 22 bp, Artificial Sequence
  Synthetic
ccagctgtcutcgacacttcuc

SEQ ID NO: 72057 - DNA, 27 bp, Artificial Sequence
  Synthetic
atcctgtaaagugcttttagtgggaut

SEQ ID NO: 72058 - DNA, 19 bp, Artificial Sequence
  Synthetic
cttuagaggcgccccaguc

SEQ ID NO: 72059 - DNA, 20 bp, Artificial Sequence
  Synthetic
gggaguggcctttctttucc

SEQ ID NO: 72060 - DNA, 23 bp, Artificial Sequence
  Synthetic
ctgccagctcuctaagtctccua

SEQ ID NO: 72061 - DNA, 21 bp, Artificial Sequence
  Synthetic
ccaccaccgagacaucactug

SEQ ID NO: 72062 - DNA, 22 bp, Artificial Sequence
  Synthetic
ccttttgtggcuagaggaguct

SEQ ID NO: 72063 - DNA, 22 bp, Artificial Sequence
  Synthetic
catcagtgaccugaaggaggug

SEQ ID NO: 72064 - DNA, 25 bp, Artificial Sequence
  Synthetic
gtgtggtguagattttgcaugaaca

SEQ ID NO: 72065 - DNA, 32 bp, Artificial Sequence; identical to SEQ ID NO: 68769
  Synthetic

SEQ ID NO: 72066 - DNA, 27 bp, Artificial Sequence
  Synthetic
aactcatcaacuggacaggtttcauag

SEQ ID NO: 72067 - DNA, 22 bp, Artificial Sequence
  Synthetic
agaccacaggcagcugaauaag

SEQ ID NO: 72068 - DNA, 18 bp, Artificial Sequence
  Synthetic
gcgagggutctccgggua

SEQ ID NO: 72069 - DNA, 18 bp, Artificial Sequence
  Synthetic
cggatccgcucgaagtug

SEQ ID NO: 72070 - DNA, 17 bp, Artificial Sequence
  Synthetic
cccccaggcgcuctaug

SEQ ID NO: 72071 - DNA, 25 bp, Artificial Sequence
  Synthetic
cctctccaugggattcatatugcag

SEQ ID NO: 72072 - DNA, 19 bp, Artificial Sequence
  Synthetic
gagggtuctccggguaagg

SEQ ID NO: 72073 - DNA, 17 bp, Artificial Sequence
  Synthetic
ccauggccctugcggat

SEQ ID NO: 72074 - DNA, 20 bp, Artificial Sequence
  Synthetic
cgctcagguccaactucgag

SEQ ID NO: 72075 - DNA, 23 bp, Artificial Sequence
  Synthetic
cacctctttgucgttgacctuca

SEQ ID NO: 72076 - DNA, 23 bp, Artificial Sequence
  Synthetic
ccttctacgugaacgtcgagtut

SEQ ID NO: 72077 - DNA, 17 bp, Artificial Sequence
  Synthetic
gaugcaucccccacgct

SEQ ID NO: 72078 - DNA, 22 bp, Artificial Sequence
  Synthetic
gtcacgtgcaguttcacttcug

SEQ ID NO: 72079 - DNA, 21 bp, Artificial Sequence
  Synthetic
cutgcaatgcauggagaaggt

SEQ ID NO: 72080 - DNA, 23 bp, Artificial Sequence
  Synthetic
ccgaatgagggugatgttttucc

SEQ ID NO: 72081 - DNA, 21 bp, Artificial Sequence
  Synthetic
agagcccugagtacaagcuga

SEQ ID NO: 72082 - DNA, 24 bp, Artificial Sequence
  Synthetic
aattctggtuctggctcuaggaga

SEQ ID NO: 72083 - DNA, 20 bp, Artificial Sequence
  Synthetic
ggagcaggucaacctcaugt

SEQ ID NO: 72084 - DNA, 21 bp, Artificial Sequence
  Synthetic
augcagauggagcgcaaaaag

SEQ ID NO: 72085 - DNA, 18 bp, Artificial Sequence
  Synthetic
ccatuggcgtcgaucagg

SEQ ID NO: 72086 - DNA, 19 bp, Artificial Sequence
  Synthetic
ttcagctgccugtggtcug

SEQ ID NO: 72087 - DNA, 28 bp, Artificial Sequence
  Synthetic
caaagaaccacucacctgttgaattuaa

SEQ ID NO: 72088 - DNA, 20 bp, Artificial Sequence
  Synthetic
tgcatgugaacggtgcugat

SEQ ID NO: 72089 - DNA, 24 bp, Artificial Sequence
  Synthetic
cctgatgaguctcctaagcugaag

SEQ ID NO: 72090 - DNA, 22 bp, Artificial Sequence
  Synthetic
ggttgtagucggtcatgauggt

SEQ ID NO: 72091 - DNA, 20 bp, Artificial Sequence
  Synthetic
tggcctgugtagtgctucaa

SEQ ID NO: 72092 - DNA, 25 bp, Artificial Sequence
  Synthetic
acagaaauttauggcacccaaggaa

SEQ ID NO: 72093 - DNA, 20 bp, Artificial Sequence
  Synthetic
ggcaaagaaccacucaccug

SEQ ID NO: 72094 - DNA, 19 bp, Artificial Sequence
  Synthetic
cccgcutccugaaggacaa

SEQ ID NO: 72095 - DNA, 19 bp, Artificial Sequence
  Synthetic
aggtaaggcgcutctccug

SEQ ID NO: 72096 - DNA, 25 bp, Artificial Sequence
  Synthetic
acacttcgagagutcttccaaaguc

SEQ ID NO: 72097 - DNA, 28 bp, Artificial Sequence
  Synthetic
aggcaaagugacatatgtaagcauacaa

SEQ ID NO: 72098 - DNA, 23 bp, Artificial Sequence
  Synthetic
ctgggccutgctgttaaatucaa

SEQ ID NO: 72099 - DNA, 31 bp, Artificial Sequence; identical to SEQ ID NO: 69947
  Synthetic

SEQ ID NO: 72100 - DNA, 24 bp, Artificial Sequence
  Synthetic
accttuccagagagaacttccuga

SEQ ID NO: 72101 - DNA, 19 bp, Artificial Sequence
  Synthetic
gccaccccuggtactgaug

SEQ ID NO: 72102 - DNA, 31 bp, Artificial Sequence
  Synthetic
ttttattttctttcuaggactctcagcaugt

SEQ ID NO: 72103 - DNA, 24 bp, Artificial Sequence
  Synthetic
tcaacauaggaaggcctcatcuct

SEQ ID NO: 72104 - DNA, 19 bp, Artificial Sequence
  Synthetic
cgcuggttuccgaagacga

SEQ ID NO: 72105 - DNA, 21 bp, Artificial Sequence
  Synthetic
gcggacacugtgtucagaact

SEQ ID NO: 72106 - DNA, 24 bp, Artificial Sequence
  Synthetic
aaggcaaagcautaggtactuggt

SEQ ID NO: 72107 - DNA, 28 bp, Artificial Sequence
  Synthetic
tccatcttgucaaaagttgtcugaagaa

SEQ ID NO: 72108 - DNA, 26 bp, Artificial Sequence
  Synthetic
aaatgttcctucaagtctgtgcctua

SEQ ID NO: 72109 - DNA, 24 bp, Artificial Sequence
  Synthetic
tgccagatucttggtaguaaccct

SEQ ID NO: 72110 - DNA, 28 bp, Artificial Sequence
  Synthetic
tcttgaagugaacaccaccaaaaagaua

SEQ ID NO: 72111 - DNA, 24 bp, Artificial Sequence
  Synthetic
ccttgagautctgguggacagaga

SEQ ID NO: 72112 - DNA, 20 bp, Artificial Sequence
  Synthetic
gcaccaguccagtatuggct

SEQ ID NO: 72113 - DNA, 28 bp, Artificial Sequence
  Synthetic
tccttcctaacaguttaccaaagtugaa

SEQ ID NO: 72114 - DNA, 27 bp, Artificial Sequence
  Synthetic
cctgttctttcugtctcattagtggut

SEQ ID NO: 72115 - DNA, 26 bp, Artificial Sequence
  Synthetic
gagaagguggaacaaaatccgtauca

SEQ ID NO: 72116 - DNA, 28 bp, Artificial Sequence
  Synthetic
gcttcttcttccucttcaaaatgcctua

SEQ ID NO: 72117 - DNA, 30 bp, Artificial Sequence
  Synthetic
tgaggctttcacutgaatgtaaaataatug

SEQ ID NO: 72118 - DNA, 22 bp, Artificial Sequence
  Synthetic
ggcattcucagacacagacuga

SEQ ID NO: 72119 - DNA, 23 bp, Artificial Sequence
  Synthetic
cccagcaguactcagatgaugag

SEQ ID NO: 72120 - DNA, 24 bp, Artificial Sequence
  Synthetic
gttttgaagcuagggauggaggaa

SEQ ID NO: 72121 - DNA, 21 bp, Artificial Sequence
  Synthetic
gctctcucaggaccttgctug

SEQ ID NO: 72122 - DNA, 25 bp, Artificial Sequence
  Synthetic
catgcatctcuccctaaatctgugg

SEQ ID NO: 72123 - DNA, 23 bp, Artificial Sequence
  Synthetic
tctctacaauggagcccagctua

SEQ ID NO: 72124 - DNA, 28 bp, Artificial Sequence
  Synthetic
cagagtcaacaaaccaauttaacagcua

SEQ ID NO: 72125 - DNA, 22 bp, Artificial Sequence
  Synthetic
tcuatgatcaggugcacccaga

SEQ ID NO: 72126 - DNA, 21 bp, Artificial Sequence
  Synthetic
agttggtgutctgcacgucat

SEQ ID NO: 72127 - DNA, 20 bp, Artificial Sequence
  Synthetic
ccgagcagcacutgtttgua

SEQ ID NO: 72128 - DNA, 26 bp, Artificial Sequence
  Synthetic
tcccaaauctattcctaaucccacct

SEQ ID NO: 72129 - DNA, 23 bp, Artificial Sequence
  Synthetic
aggccctautggacaaattuggt

SEQ ID NO: 72130 - DNA, 26 bp, Artificial Sequence
  Synthetic
caguagcaaagcctatgaugagaact

SEQ ID NO: 72131 - DNA, 24 bp, Artificial Sequence
  Synthetic
gggatagagcgaauacacagacuc

SEQ ID NO: 72132 - DNA, 23 bp, Artificial Sequence
  Synthetic
tggattatgcuccccaccaaaut

SEQ ID NO: 72133 - DNA, 29 bp, Artificial Sequence
  Synthetic
gcagttactgtgaugtagttgtctatgut

SEQ ID NO: 72134 - DNA, 21 bp, Artificial Sequence
  Synthetic
gctgtcugccaacaccatcuc

SEQ ID NO: 72135 - DNA, 28 bp, Artificial Sequence
  Synthetic
acaaatctgcuaaaacccagagaacuat

SEQ ID NO: 72136 - DNA, 26 bp, Artificial Sequence
  Synthetic
caacattggugtgtaacaaaauccgt

SEQ ID NO: 72137 - DNA, 28 bp, Artificial Sequence
  Synthetic
gatgagatacacaguctacctgguaaga

SEQ ID NO: 72138 - DNA, 20 bp, Artificial Sequence
  Synthetic
agatgtguaagcgcagccut

SEQ ID NO: 72139 - DNA, 27 bp, Artificial Sequence
  Synthetic
acagaaaagcugcactttaggauaaca

SEQ ID NO: 72140 - DNA, 26 bp, Artificial Sequence
  Synthetic
gcctuaggaagaacttucccaaagag

SEQ ID NO: 72141 - DNA, 21 bp, Artificial Sequence
  Synthetic
cctccttcugccatggaacug

SEQ ID NO: 72142 - DNA, 21 bp, Artificial Sequence
  Synthetic
aggttcctcugtgcaaagcuc

SEQ ID NO: 72143 - DNA, 24 bp, Artificial Sequence
  Synthetic
gagaaatggagaaucagccccaua

SEQ ID NO: 72144 - DNA, 24 bp, Artificial Sequence
  Synthetic
tgctcacgaaguttatccacauca

SEQ ID NO: 72145 - DNA, 23 bp, Artificial Sequence
  Synthetic
auttgatctuggaggcagcagat

SEQ ID NO: 72146 - DNA, 27 bp, Artificial Sequence
  Synthetic
aattgtcacgaaacaaugagctttuca

SEQ ID NO: 72147 - DNA, 28 bp, Artificial Sequence
  Synthetic
tgctaaggttacuccattttctgactut

SEQ ID NO: 72148 - DNA, 24 bp, Artificial Sequence
  Synthetic
gaugaaatcagacuccgaccagaa

SEQ ID NO: 72149 - DNA, 28 bp, Artificial Sequence
  Synthetic
cctaactctuaagaagggctgcauaaaa

SEQ ID NO: 72150 - DNA, 26 bp, Artificial Sequence
  Synthetic
gaagttacccgugagttcgtattuct

SEQ ID NO: 72151 - DNA, 21 bp, Artificial Sequence
  Synthetic
cagcctcutggaagaugccaa

SEQ ID NO: 72152 - DNA, 23 bp, Artificial Sequence
  Synthetic
acaccagtgccuctatccctuaa

SEQ ID NO: 72153 - DNA, 19 bp, Artificial Sequence
  Synthetic
ctuggcgccacccagaaua

SEQ ID NO: 72154 - DNA, 17 bp, Artificial Sequence
  Synthetic
autctggguggcgccaa

SEQ ID NO: 72155 - DNA, 28 bp, Artificial Sequence
  Synthetic
aaagattugatggtaacaugaggacagt

SEQ ID NO: 72156 - DNA, 27 bp, Artificial Sequence
  Synthetic
cucacatgagacaauaaacagaaagcc

SEQ ID NO: 72157 - DNA, 22 bp, Artificial Sequence
  Synthetic
gcatgtggccugaagtgtctua

SEQ ID NO: 72158 - DNA, 21 bp, Artificial Sequence
  Synthetic
gagcccccugaactgtgtuat

SEQ ID NO: 72159 - DNA, 20 bp, Artificial Sequence
  Synthetic
agtgactccuccacgacuga

SEQ ID NO: 72160 - DNA, 20 bp, Artificial Sequence
  Synthetic
cagacuccccagucaaccag

SEQ ID NO: 72161 - DNA, 25 bp, Artificial Sequence
  Synthetic
caaggagttcccaugcacttatcut

SEQ ID NO: 72162 - DNA, 23 bp, Artificial Sequence
  Synthetic
ctatccctggugaagcatgtcuc

SEQ ID NO: 72163 - DNA, 28 bp, Artificial Sequence
  Synthetic
ttttaagttactgaucggccatttcuca

SEQ ID NO: 72164 - DNA, 21 bp, Artificial Sequence
  Synthetic
gactaccccuttgccagtcut

SEQ ID NO: 72165 - DNA, 21 bp, Artificial Sequence
  Synthetic
acttttucgccacgccattug

SEQ ID NO: 72166 - DNA, 18 bp, Artificial Sequence
  Synthetic
gcugaccgccactuccat

SEQ ID NO: 72167 - DNA, 18 bp, Artificial Sequence
  Synthetic
ggacucacgtgtguccct

SEQ ID NO: 72168 - DNA, 23 bp, Artificial Sequence
  Synthetic
ccaccccuagaatctgcctauct

SEQ ID NO: 72169 - DNA, 28 bp, Artificial Sequence
  Synthetic
gatgatacgtccgugattgatgatgaua

SEQ ID NO: 72170 - DNA, 21 bp, Artificial Sequence
  Synthetic
aggaggagggugttgagtgut

SEQ ID NO: 72171 - DNA, 25 bp, Artificial Sequence
  Synthetic
catcttcaaccuggagaaggaugac

SEQ ID NO: 72172 - DNA, 27 bp, Artificial Sequence
  Synthetic
ttcatggtacaucactgacaatgcaua

SEQ ID NO: 72173 - DNA, 23 bp, Artificial Sequence
  Synthetic
gatttctccuggctgtctcugaa

SEQ ID NO: 72174 - DNA, 21 bp, Artificial Sequence
  Synthetic
acagcaggcacuagggacuaa

SEQ ID NO: 72175 - DNA, 24 bp, Artificial Sequence
  Synthetic
ggctaggctcuacctcttcctuac

SEQ ID NO: 72176 - DNA, 21 bp, Artificial Sequence
  Synthetic
cccaaccaggauguacagcat

SEQ ID NO: 72177 - DNA, 22 bp, Artificial Sequence
  Synthetic
aacgttctutgtcccatugcag

SEQ ID NO: 72178 - DNA, 20 bp, Artificial Sequence
  Synthetic
gggccaaacugagcagaguc

SEQ ID NO: 72179 - DNA, 27 bp, Artificial Sequence
  Synthetic
ggcattctcugctctctctctaauact

SEQ ID NO: 72180 - DNA, 23 bp, Artificial Sequence
  Synthetic
gguaaaggccgatauggagaagt

SEQ ID NO: 72181 - DNA, 26 bp, Artificial Sequence
  Synthetic
aaattgactgaaucagtgtguaccca

SEQ ID NO: 72182 - DNA, 22 bp, Artificial Sequence
  Synthetic
tgcaguaaaaggcccacatgut

SEQ ID NO: 72183 - DNA, 25 bp, Artificial Sequence
  Synthetic
gtcgagacaucttgactgatgtugt

SEQ ID NO: 72184 - DNA, 27 bp, Artificial Sequence
  Synthetic
ggtaaaauaaacaccaagacgtgguaa

SEQ ID NO: 72185 - DNA, 27 bp, Artificial Sequence
  Synthetic
caccagaagtcaucagaatgcaagaua

SEQ ID NO: 72186 - DNA, 26 bp, Artificial Sequence
  Synthetic
gtgggcaaagaacaugttatucacaa

SEQ ID NO: 72187 - DNA, 22 bp, Artificial Sequence
  Synthetic
cttctccccuttggctgatcug

SEQ ID NO: 72188 - DNA, 28 bp, Artificial Sequence
  Synthetic
acatctgacugaaagctgtatggattut

SEQ ID NO: 72189 - DNA, 29 bp, Artificial Sequence
  Synthetic
gcattgctcuaggaattatagtaggtugt

SEQ ID NO: 72190 - DNA, 22 bp, Artificial Sequence
  Synthetic
tcccgtactuggtgagggttua

SEQ ID NO: 72191 - DNA, 25 bp, Artificial Sequence
  Synthetic
ggtgtgugagaagaacaucaagagg

SEQ ID NO: 72192 - DNA, 22 bp, Artificial Sequence
  Synthetic
gtggatagacgacauggaggut

SEQ ID NO: 72193 - DNA, 27 bp, Artificial Sequence
  Synthetic
atcatacagcaggaugttgatggtauc

SEQ ID NO: 72194 - DNA, 19 bp, Artificial Sequence
  Synthetic
tctgggagcccuaccugaa

SEQ ID NO: 72195 - DNA, 18 bp, Artificial Sequence
  Synthetic
cugaccaaagccgctgug

SEQ ID NO: 72196 - DNA, 20 bp, Artificial Sequence
  Synthetic
gggaagucgtcctggtucat

SEQ ID NO: 72197 - DNA, 18 bp, Artificial Sequence
  Synthetic
ccgugctctucacaccca

SEQ ID NO: 72198 - DNA, 23 bp, Artificial Sequence
  Synthetic
gcaccatgacugacgtattugct

SEQ ID NO: 72199 - DNA, 24 bp, Artificial Sequence
  Synthetic
gccttgctucatattccaatugcc

SEQ ID NO: 72200 - DNA, 18 bp, Artificial Sequence
  Synthetic
ctcugcaccagcgtctug

SEQ ID NO: 72201 - DNA, 17 bp, Artificial Sequence
  Synthetic
tcugaccgccacccuct

SEQ ID NO: 72202 - DNA, 24 bp, Artificial Sequence
  Synthetic
ccutcctgcttucaaacaacacaa

SEQ ID NO: 72203 - DNA, 29 bp, Artificial Sequence
  Synthetic
aactcatcaaaaauggagaaagguacact

SEQ ID NO: 72204 - DNA, 26 bp, Artificial Sequence
  Synthetic
tcaccgaccaugaaataattuccagt

SEQ ID NO: 72205 - DNA, 25 bp, Artificial Sequence
  Synthetic
ggtgaagacagucattguagaacca

SEQ ID NO: 72206 - DNA, 27 bp, Artificial Sequence
  Synthetic
cutacaaacagataugaccagaaggca

SEQ ID NO: 72207 - DNA, 28 bp, Artificial Sequence
  Synthetic
gctcttcgcugttttatcactuagaaac

SEQ ID NO: 72208 - DNA, 21 bp, Artificial Sequence
  Synthetic
gcagagagcacaugggcatua

SEQ ID NO: 72209 - DNA, 25 bp, Artificial Sequence
  Synthetic
agaagaucccaaaccctctcaauct

SEQ ID NO: 72210 - DNA, 28 bp, Artificial Sequence
  Synthetic
ttgtatttgatugcgtcataguacacct

SEQ ID NO: 72211 - DNA, 22 bp, Artificial Sequence
  Synthetic
gaacgttggcuctctactggut

SEQ ID NO: 72212 - DNA, 20 bp, Artificial Sequence
  Synthetic
gctcacggcucacaacaaug

SEQ ID NO: 72213 - DNA, 26 bp, Artificial Sequence
  Synthetic
ggactaacaggautttggcctcttut

SEQ ID NO: 72214 - DNA, 22 bp, Artificial Sequence
  Synthetic
cugggcugaacagacagaagat

SEQ ID NO: 72215 - DNA, 29 bp, Artificial Sequence
  Synthetic
ggcacgtttaatuctagttactctctcut

SEQ ID NO: 72216 - DNA, 22 bp, Artificial Sequence
  Synthetic
ctguagatctgguggcaaagga

SEQ ID NO: 72217 - DNA, 23 bp, Artificial Sequence
  Synthetic
cauccagaaggagaauccagcac

SEQ ID NO: 72218 - DNA, 21 bp, Artificial Sequence
  Synthetic
agcgcatgcuttttcctgaug

SEQ ID NO: 72219 - DNA, 23 bp, Artificial Sequence
  Synthetic
cttacctaggcuttgggatuggg

SEQ ID NO: 72220 - DNA, 23 bp, Artificial Sequence
  Synthetic
agaaacaggautgctgcttcuca

SEQ ID NO: 72221 - DNA, 26 bp, Artificial Sequence
  Synthetic
ctagggacaatuctggtttagctuct

SEQ ID NO: 72222 - DNA, 23 bp, Artificial Sequence
  Synthetic
accgaaaacacuttggagctgua

SEQ ID NO: 72223 - DNA, 27 bp, Artificial Sequence
  Synthetic
tcaaaccacgcugtgtcattuaaaaat

SEQ ID NO: 72224 - DNA, 20 bp, Artificial Sequence
  Synthetic
gggccaauacaggccaugat

SEQ ID NO: 72225 - DNA, 19 bp, Artificial Sequence
  Synthetic
ggtggucgggtcctauggt

SEQ ID NO: 72226 - DNA, 26 bp, Artificial Sequence
  Synthetic
ttcuagaacaggcaaatucagagaag

SEQ ID NO: 72227 - DNA, 21 bp, Artificial Sequence
  Synthetic
tuttccagauggagccacgaa

SEQ ID NO: 72228 - DNA, 27 bp, Artificial Sequence
  Synthetic
tcatctgaatttgauctggagaggtug

SEQ ID NO: 72229 - DNA, 27 bp, Artificial Sequence
  Synthetic
tttaacaagucacaagatggacaguga

SEQ ID NO: 72230 - DNA, 28 bp, Artificial Sequence
  Synthetic
ctgttcctcaguttgtcactaaaatcuc

SEQ ID NO: 72231 - DNA, 31 bp, Artificial Sequence; identical to SEQ ID NO: 59127
  Synthetic

SEQ ID NO: 72232 - DNA, 28 bp, Artificial Sequence
  Synthetic
tgtttagcucagacttttctucagagac

SEQ ID NO: 72233 - DNA, 22 bp, Artificial Sequence
  Synthetic
agcctcugccctttucaaagat

SEQ ID NO: 72234 - DNA, 23 bp, Artificial Sequence
  Synthetic
catctaccttguagggctcacug

SEQ ID NO: 72235 - DNA, 24 bp, Artificial Sequence
  Synthetic
tttgtgtgtguggttgttctcuct

SEQ ID NO: 72236 - DNA, 32 bp, Artificial Sequence; identical to SEQ ID NO: 58964
  Synthetic

SEQ ID NO: 72237 - DNA, 27 bp, Artificial Sequence
  Synthetic
gcccaccagaagaaugataaaaugagt

SEQ ID NO: 72238 - DNA, 26 bp, Artificial Sequence
  Synthetic
ggttactttaggugcagaaaagacug

SEQ ID NO: 72239 - DNA, 27 bp, Artificial Sequence
  Synthetic
attccaggcaggutttctcatattcut

SEQ ID NO: 72240 - DNA, 33 bp, Artificial Sequence
  Synthetic
tttcctttgatagguttgatatgtgactaauaa

SEQ ID NO: 72241 - DNA, 25 bp, Artificial Sequence
  Synthetic
tctgagtcagucttatcacctguca

SEQ ID NO: 72242 - DNA, 23 bp, Artificial Sequence
  Synthetic
agtgaugaagctgcaguacacac

SEQ ID NO: 72243 - DNA, 27 bp, Artificial Sequence
  Synthetic
gttgcactuaagccataatgacgttua

SEQ ID NO: 72244 - DNA, 24 bp, Artificial Sequence
  Synthetic
ccaccttctaugaactcccaguct

SEQ ID NO: 72245 - DNA, 21 bp, Artificial Sequence
  Synthetic
accaucatgtccuggagggaa

SEQ ID NO: 72246 - DNA, 22 bp, Artificial Sequence
  Synthetic
ggctcctaaaugtcaccacuga

SEQ ID NO: 72247 - DNA, 19 bp, Artificial Sequence
  Synthetic
cttcgugcactcggucaag

SEQ ID NO: 72248 - DNA, 17 bp, Artificial Sequence
  Synthetic
cggcuttcucggccaga

SEQ ID NO: 72249 - DNA, 18 bp, Artificial Sequence
  Synthetic
gccttcggucacctcugt

SEQ ID NO: 72250 - DNA, 18 bp, Artificial Sequence
  Synthetic
gctgucgccatucagcgt

SEQ ID NO: 72251 - DNA, 21 bp, Artificial Sequence
  Synthetic
tgtgtcccaguagggctttuc

SEQ ID NO: 72252 - DNA, 28 bp, Artificial Sequence
  Synthetic
ggaacagagaaaaautgactcuccagaa

SEQ ID NO: 72253 - DNA, 26 bp, Artificial Sequence
  Synthetic
ctgtgatgttuagatgggagatguct

SEQ ID NO: 72254 - DNA, 19 bp, Artificial Sequence
  Synthetic
gtcucccacgaugcaccaa

SEQ ID NO: 72255 - DNA, 20 bp, Artificial Sequence
  Synthetic
gagguggacaggugaagcag

SEQ ID NO: 72256 - DNA, 21 bp, Artificial Sequence
  Synthetic
aacaaguggttguccagcagt

SEQ ID NO: 72257 - DNA, 24 bp, Artificial Sequence
  Synthetic
ggcagagaatguggcatgttgaua

SEQ ID NO: 72258 - DNA, 22 bp, Artificial Sequence
  Synthetic
accccttatccucaccccaaua

SEQ ID NO: 72259 - DNA, 28 bp, Artificial Sequence
  Synthetic
gtgtgtgacccaaacutaatcttttuct

SEQ ID NO: 72260 - DNA, 24 bp, Artificial Sequence
  Synthetic
cctcauatcctcttugcagcaaca

SEQ ID NO: 72261 - DNA, 22 bp, Artificial Sequence
  Synthetic
gcagaugaatacctuggcggaa

SEQ ID NO: 72262 - DNA, 22 bp, Artificial Sequence
  Synthetic
ctgctgcugcttccattaaguc

SEQ ID NO: 72263 - DNA, 23 bp, Artificial Sequence
  Synthetic
ggtgcuttatggttuggagggat

SEQ ID NO: 72264 - DNA, 23 bp, Artificial Sequence
  Synthetic
gggtacagagccautttctgaug

SEQ ID NO: 72265 - DNA, 21 bp, Artificial Sequence
  Synthetic
ttcggcccutccattucagag

SEQ ID NO: 72266 - DNA, 23 bp, Artificial Sequence
  Synthetic
gcttcaagcugttagtgagucca

SEQ ID NO: 72267 - DNA, 25 bp, Artificial Sequence
  Synthetic
gctacaucctatctcttuccagcaa

SEQ ID NO: 72268 - DNA, 22 bp, Artificial Sequence
  Synthetic
ccttgggcuaagaaagccuaca

SEQ ID NO: 72269 - DNA, 23 bp, Artificial Sequence
  Synthetic
ctgaccatuaccagaagtugcca

SEQ ID NO: 72270 - DNA, 21 bp, Artificial Sequence
  Synthetic
ggaagacugcaggaugaggaa

SEQ ID NO: 72271 - DNA, 19 bp, Artificial Sequence
  Synthetic
caccagcugucaccaggag

SEQ ID NO: 72272 - DNA, 27 bp, Artificial Sequence
  Synthetic
ggcactgtccugatagataaagtctut

SEQ ID NO: 72273 - DNA, 26 bp, Artificial Sequence
  Synthetic
tgctctattcccauttttaccgtucc

SEQ ID NO: 72274 - DNA, 20 bp, Artificial Sequence
  Synthetic
gctcgatgcucaaaccccua

SEQ ID NO: 72275 - DNA, 24 bp, Artificial Sequence
  Synthetic
gcuagcucaggaaaagaagaagga

SEQ ID NO: 72276 - DNA, 21 bp, Artificial Sequence
  Synthetic
tgtggtcaugggccaaatcuc

SEQ ID NO: 72277 - DNA, 22 bp, Artificial Sequence
  Synthetic
ctgcagucactgtgagguagac

SEQ ID NO: 72278 - DNA, 23 bp, Artificial Sequence
  Synthetic
gtgatcaccacautaccgtcugt

SEQ ID NO: 72279 - DNA, 18 bp, Artificial Sequence
  Synthetic
gcctccagguccaacgug

SEQ ID NO: 72280 - DNA, 17 bp, Artificial Sequence
  Synthetic
tccggcucctggugaca

SEQ ID NO: 72281 - DNA, 20 bp, Artificial Sequence
  Synthetic
gtcataatugcgggccucca

SEQ ID NO: 72282 - DNA, 17 bp, Artificial Sequence
  Synthetic
cgggcacgutggaccug

SEQ ID NO: 72283 - DNA, 19 bp, Artificial Sequence
  Synthetic
agaggagggcucggugaaa

SEQ ID NO: 72284 - DNA, 20 bp, Artificial Sequence
  Synthetic
ggagacucactcgggaucct

SEQ ID NO: 72285 - DNA, 22 bp, Artificial Sequence
  Synthetic
gggtagaacucgtcagugaaga

SEQ ID NO: 72286 - DNA, 21 bp, Artificial Sequence
  Synthetic
tgacatccugcagacgcttut

SEQ ID NO: 72287 - DNA, 19 bp, Artificial Sequence
  Synthetic
catcgguctgctcugcagt

SEQ ID NO: 72288 - DNA, 24 bp, Artificial Sequence
  Synthetic
gtcaaggagugggagaaaucaaca

SEQ ID NO: 72289 - DNA, 29 bp, Artificial Sequence
  Synthetic
cttctggaaataugcattcaggacuaaga

SEQ ID NO: 72290 - DNA, 27 bp, Artificial Sequence
  Synthetic
agagagtaugttcacgaaucagagaca

SEQ ID NO: 72291 - DNA, 21 bp, Artificial Sequence
  Synthetic
gaucaagtaugaggccaggct

SEQ ID NO: 72292 - DNA, 21 bp, Artificial Sequence
  Synthetic
aaccaggcgggagauauacct

SEQ ID NO: 72293 - DNA, 26 bp, Artificial Sequence
  Synthetic
cattcaaaggcauagagacacuggat

SEQ ID NO: 72294 - DNA, 22 bp, Artificial Sequence
  Synthetic
cagatacttgugcccagcaauc

SEQ ID NO: 72295 - DNA, 27 bp, Artificial Sequence
  Synthetic
tgtagttcggauctgatatgttugcat

SEQ ID NO: 72296 - DNA, 23 bp, Artificial Sequence
  Synthetic
cactgaccaccaguatagtucca

SEQ ID NO: 72297 - DNA, 22 bp, Artificial Sequence
  Synthetic
ccugtgaagaatuggaggcact

SEQ ID NO: 72298 - DNA, 20 bp, Artificial Sequence
  Synthetic
tgacggutcacctucagcac

SEQ ID NO: 72299 - DNA, 21 bp, Artificial Sequence
  Synthetic
tgccaggauatctgccucaac

SEQ ID NO: 72300 - DNA, 23 bp, Artificial Sequence
  Synthetic
ctttcaggguccatgtgacatuc

SEQ ID NO: 72301 - DNA, 24 bp, Artificial Sequence
  Synthetic
cagtgaccaccuggagacatagua

SEQ ID NO: 72302 - DNA, 21 bp, Artificial Sequence
  Synthetic
aaacctccccutcagagucct

SEQ ID NO: 72303 - DNA, 22 bp, Artificial Sequence
  Synthetic
caggtctagcaguctccagcua

SEQ ID NO: 72304 - DNA, 25 bp, Artificial Sequence
  Synthetic
gactagcauaacgaagtgacaccut

SEQ ID NO: 72305 - DNA, 22 bp, Artificial Sequence
  Synthetic
gatcctctcugtggtgaccuct

SEQ ID NO: 72306 - DNA, 26 bp, Artificial Sequence
  Synthetic
gagggugacttagaaaauagcacaga

SEQ ID NO: 72307 - DNA, 26 bp, Artificial Sequence
  Synthetic
catctggcaucaaataaguggagaga

SEQ ID NO: 72308 - DNA, 27 bp, Artificial Sequence
  Synthetic
tggutttaatugggaaaggaagagcat

SEQ ID NO: 72309 - DNA, 24 bp, Artificial Sequence
  Synthetic
cacaaauacaccagcgaggactua

SEQ ID NO: 72310 - DNA, 25 bp, Artificial Sequence
  Synthetic
acaagtgcacauatacccactccua

SEQ ID NO: 72311 - DNA, 28 bp, Artificial Sequence
  Synthetic
cagacttctgtaagutctccaagacaut

SEQ ID NO: 72312 - DNA, 23 bp, Artificial Sequence
  Synthetic
accaaucatgaugccggagaaag

SEQ ID NO: 72313 - DNA, 22 bp, Artificial Sequence
  Synthetic
tgactugggaccaacucaaagg

SEQ ID NO: 72314 - DNA, 17 bp, Artificial Sequence
  Synthetic
ccagcaaucccgccuca

SEQ ID NO: 72315 - DNA, 18 bp, Artificial Sequence
  Synthetic
cugagagcagccguagca

SEQ ID NO: 72316 - DNA, 27 bp, Artificial Sequence
  Synthetic
aggaacaattcugctcattcacuagac

SEQ ID NO: 72317 - DNA, 23 bp, Artificial Sequence
  Synthetic
cttctgggccugtttctctttuc

SEQ ID NO: 72318 - DNA, 23 bp, Artificial Sequence
  Synthetic
accatcuagctgcaucaggagat

SEQ ID NO: 72319 - DNA, 26 bp, Artificial Sequence
  Synthetic
gtcatctgucttagttgtcugagagg

SEQ ID NO: 72320 - DNA, 24 bp, Artificial Sequence
  Synthetic
tgatgacatcucctgtgactcuca

SEQ ID NO: 72321 - DNA, 28 bp, Artificial Sequence
  Synthetic
tgtatacagttccagutaacatctggut

SEQ ID NO: 72322 - DNA, 20 bp, Artificial Sequence
  Synthetic
tgaguccgaagagctcucct

SEQ ID NO: 72323 - DNA, 20 bp, Artificial Sequence
  Synthetic
cgcaggacgugtttgagaug

SEQ ID NO: 72324 - DNA, 22 bp, Artificial Sequence
  Synthetic
tgtcucagagggaagagauggt

SEQ ID NO: 72325 - DNA, 23 bp, Artificial Sequence
  Synthetic
ggcctattaauctgtgccacgua

SEQ ID NO: 72326 - DNA, 24 bp, Artificial Sequence
  Synthetic
cccgaaugcacttacuagaagagg

SEQ ID NO: 72327 - DNA, 22 bp, Artificial Sequence
  Synthetic
ccaggactcauagctccaacug

SEQ ID NO: 72328 - DNA, 21 bp, Artificial Sequence
  Synthetic
catcuggcatctuggcaaacc

SEQ ID NO: 72329 - DNA, 20 bp, Artificial Sequence
  Synthetic
tccuagccccaccttcguaa

SEQ ID NO: 72330 - DNA, 24 bp, Artificial Sequence
  Synthetic
gccagctccutgaaaaagcaguat

SEQ ID NO: 72331 - DNA, 19 bp, Artificial Sequence
  Synthetic
ccgcugaccccatcctuac

SEQ ID NO: 72332 - DNA, 28 bp, Artificial Sequence
  Synthetic
acagctttctaautgctggattatguat

SEQ ID NO: 72333 - DNA, 27 bp, Artificial Sequence
  Synthetic
gtcttccaaatuggtcatctgagaaug

SEQ ID NO: 72334 - DNA, 22 bp, Artificial Sequence
  Synthetic
cattaggucggcuggaagaagt

SEQ ID NO: 72335 - DNA, 28 bp, Artificial Sequence
  Synthetic
ctgactctgtaacautccattaccguaa

SEQ ID NO: 72336 - DNA, 27 bp, Artificial Sequence
  Synthetic
ccattctcagaugaccaattuggaaga

SEQ ID NO: 72337 - DNA, 29 bp, Artificial Sequence
  Synthetic
ggtcactacgutagctcacatttuaaagt

SEQ ID NO: 72338 - DNA, 27 bp, Artificial Sequence
  Synthetic
caagaccaugaataatcaccttucgga

SEQ ID NO: 72339 - DNA, 28 bp, Artificial Sequence
  Synthetic
ccttgccttaaaggutgtacattttcut

SEQ ID NO: 72340 - DNA, 33 bp, Artificial Sequence
  Synthetic
tttctatgatatgcuctatttttcccctauaag

SEQ ID NO: 72341 - DNA, 28 bp, Artificial Sequence
  Synthetic
tcctgcattccgutatattttcacagua

SEQ ID NO: 72342 - DNA, 28 bp, Artificial Sequence
  Synthetic
ggaaaccatcauacaagagaaacucact

SEQ ID NO: 72343 - DNA, 27 bp, Artificial Sequence
  Synthetic
agcaattaucacaagaaacatcugggt

SEQ ID NO: 72344 - DNA, 24 bp, Artificial Sequence
  Synthetic
cgtgcttugagagtgatctgaaut

SEQ ID NO: 72345 - DNA, 23 bp, Artificial Sequence
  Synthetic
gtccagaagaagccauagctuca

SEQ ID NO: 72346 - DNA, 29 bp, Artificial Sequence
  Synthetic
acaaggaagtatugaagatgaagctaugg

SEQ ID NO: 72347 - DNA, 24 bp, Artificial Sequence
  Synthetic
tcgagagaagcugtacttggauct

SEQ ID NO: 72348 - DNA, 22 bp, Artificial Sequence
  Synthetic
ggagugacacctugaacacgaa

SEQ ID NO: 72349 - DNA, 22 bp, Artificial Sequence
  Synthetic
cggaaaaucttugcaggagggt

SEQ ID NO: 72350 - DNA, 28 bp, Artificial Sequence
  Synthetic
tccugatttttguaagaaacacccagat

SEQ ID NO: 72351 - DNA, 28 bp, Artificial Sequence
  Synthetic
gagaccaccttutgcaatctaatttgua

SEQ ID NO: 72352 - DNA, 24 bp, Artificial Sequence
  Synthetic
agggagatgaaugggaactgagua

SEQ ID NO: 72353 - DNA, 24 bp, Artificial Sequence
  Synthetic
ttgagacucagccattcuacacac

SEQ ID NO: 72354 - DNA, 24 bp, Artificial Sequence
  Synthetic
cctggcctugctagttcataauca

SEQ ID NO: 72355 - DNA, 28 bp, Artificial Sequence
  Synthetic
atgguataaggtgtacuagagggaagac

SEQ ID NO: 72356 - DNA, 20 bp, Artificial Sequence
  Synthetic
tgtcccguttgtgacugcaa

SEQ ID NO: 72357 - DNA, 21 bp, Artificial Sequence
  Synthetic
tcatggtgugcctatggcauc

SEQ ID NO: 72358 - DNA, 20 bp, Artificial Sequence
  Synthetic
ccacccccacutcttcaugg

SEQ ID NO: 72359 - DNA, 20 bp, Artificial Sequence
  Synthetic
ctcacgcaggutccctauct

SEQ ID NO: 72360 - DNA, 24 bp, Artificial Sequence
  Synthetic
cctgagtcucccatctgtctaugt

SEQ ID NO: 72361 - DNA, 20 bp, Artificial Sequence
  Synthetic
cacacucctcaauggcaggt

SEQ ID NO: 72362 - DNA, 23 bp, Artificial Sequence
  Synthetic
cagggaaaatcuctccagctgua

SEQ ID NO: 72363 - DNA, 21 bp, Artificial Sequence
  Synthetic
gtcaucgagaggacctuccac

SEQ ID NO: 72364 - DNA, 23 bp, Artificial Sequence
  Synthetic
actgacctcucgtctggagaauc

SEQ ID NO: 72365 - DNA, 19 bp, Artificial Sequence
  Synthetic
gcaggcuagcagggctauc

SEQ ID NO: 72366 - DNA, 23 bp, Artificial Sequence
  Synthetic
tgcctctgugaatatcccuggaa

SEQ ID NO: 72367 - DNA, 24 bp, Artificial Sequence
  Synthetic
gccacagtcutgatagcatcaugg

SEQ ID NO: 72368 - DNA, 20 bp, Artificial Sequence
  Synthetic
gggcatccuttagggtccug

SEQ ID NO: 72369 - DNA, 25 bp, Artificial Sequence
  Synthetic
ttttgccttuagtggtccugaaaat

SEQ ID NO: 72370 - DNA, 18 bp, Artificial Sequence
  Synthetic
ccuggcagcgggtacuaa

SEQ ID NO: 72371 - DNA, 22 bp, Artificial Sequence
  Synthetic
cttccuttgcttcucccagagg

SEQ ID NO: 72372 - DNA, 23 bp, Artificial Sequence
  Synthetic
ccaccaguaccatcactctugac

SEQ ID NO: 72373 - DNA, 25 bp, Artificial Sequence
  Synthetic
gtaaatggatguacgcctaccuact

SEQ ID NO: 72374 - DNA, 20 bp, Artificial Sequence
  Synthetic
cccagtuccaccccgttaua

SEQ ID NO: 72375 - DNA, 26 bp, Artificial Sequence
  Synthetic
cacaacctgccuttctgatttctuac

SEQ ID NO: 72376 - DNA, 26 bp, Artificial Sequence
  Synthetic
acagtgctgacugtgtaatcttgaut

SEQ ID NO: 72377 - DNA, 23 bp, Artificial Sequence
  Synthetic
gtctgcgauactgugaacaccat

SEQ ID NO: 72378 - DNA, 22 bp, Artificial Sequence
  Synthetic
ggcagaaaacccuactcaguca

SEQ ID NO: 72379 - DNA, 24 bp, Artificial Sequence
  Synthetic
ccagaggacaugagttcaatggua

SEQ ID NO: 72380 - DNA, 17 bp, Artificial Sequence
  Synthetic
caggcgguccccatgua

SEQ ID NO: 72381 - DNA, 20 bp, Artificial Sequence
  Synthetic
ccctcccucttctccuccag

SEQ ID NO: 72382 - DNA, 22 bp, Artificial Sequence
  Synthetic
gagaagaguacccctugccaat

SEQ ID NO: 72383 - DNA, 27 bp, Artificial Sequence
  Synthetic
aaagaacacacautgctgtgguaaaaa

SEQ ID NO: 72384 - DNA, 28 bp, Artificial Sequence
  Synthetic
ctcttgatccutcctataccaaaucaca

SEQ ID NO: 72385 - DNA, 24 bp, Artificial Sequence
  Synthetic
actgctctucacatcttcctucag

SEQ ID NO: 72386 - DNA, 22 bp, Artificial Sequence
  Synthetic
cagauatcaacugacccaggca

SEQ ID NO: 72387 - DNA, 25 bp, Artificial Sequence
  Synthetic
ttgtgcatgccautcaaaggattut

SEQ ID NO: 72388 - DNA, 21 bp, Artificial Sequence
  Synthetic
gcacctgucccactctctcut

SEQ ID NO: 72389 - DNA, 22 bp, Artificial Sequence
  Synthetic
ctgaacggcaucaaggcatuac

SEQ ID NO: 72390 - DNA, 26 bp, Artificial Sequence
  Synthetic
gttccttggtucatgtcattgttugt

SEQ ID NO: 72391 - DNA, 29 bp, Artificial Sequence
  Synthetic
tgggctgtagagaaugattgatgtttaut

SEQ ID NO: 72392 - DNA, 31 bp, Artificial Sequence
  Synthetic
aaagtgtaagaattaugccaatgtgtttuga

SEQ ID NO: 72393 - DNA, 26 bp, Artificial Sequence
  Synthetic
gctgggttataaugccatctcttugt

SEQ ID NO: 72394 - DNA, 28 bp, Artificial Sequence
  Synthetic
acaagaattugaagctgccatuaaacaa

SEQ ID NO: 72395 - DNA, 31 bp, Artificial Sequence; identical to SEQ ID NO: 68765
  Synthetic

SEQ ID NO: 72396 - DNA, 25 bp, Artificial Sequence
  Synthetic
ccagcucactgctaattuacaacaa

SEQ ID NO: 72397 - DNA, 33 bp, Artificial Sequence; identical to SEQ ID NO: 53865
  Synthetic

SEQ ID NO: 72398 - DNA, 21 bp, Artificial Sequence
  Synthetic
cagttagggcagutggctcut

SEQ ID NO: 72399 - DNA, 25 bp, Artificial Sequence
  Synthetic
caagctcttatcugagcatcagguc

SEQ ID NO: 72400 - DNA, 23 bp, Artificial Sequence
  Synthetic
ggagcagcacuttcctctgatut

SEQ ID NO: 72401 - DNA, 21 bp, Artificial Sequence
  Synthetic
cttccatgucctcagggctuc

SEQ ID NO: 72402 - DNA, 28 bp, Artificial Sequence
  Synthetic
agcaagaccaautattaaaggugacagt

SEQ ID NO: 72403 - DNA, 27 bp, Artificial Sequence
  Synthetic
acacugatttacctugaacacgagaaa

SEQ ID NO: 72404 - DNA, 22 bp, Artificial Sequence
  Synthetic
ggtccttguctccagaggaugt

SEQ ID NO: 72405 - DNA, 22 bp, Artificial Sequence
  Synthetic
aaccacaaagugccagtcctua

SEQ ID NO: 72406 - DNA, 29 bp, Artificial Sequence
  Synthetic
cagattattgggagccuatttgttcauca

SEQ ID NO: 72407 - DNA, 26 bp, Artificial Sequence
  Synthetic
acagggaugagtugaaagaacagaag

SEQ ID NO: 72408 - DNA, 28 bp, Artificial Sequence
  Synthetic
tgaatctctcuccctaaggaatatugct

SEQ ID NO: 72409 - DNA, 27 bp, Artificial Sequence
  Synthetic
ccaactcactutccatcatctcuagat

SEQ ID NO: 72410 - DNA, 20 bp, Artificial Sequence
  Synthetic
agcacaagacaguccgacuc

SEQ ID NO: 72411 - DNA, 28 bp, Artificial Sequence
  Synthetic
gaguagcaaaucaaaagccacagaaaat

SEQ ID NO: 72412 - DNA, 30 bp, Artificial Sequence
  Synthetic
caacagagttuaacataagcatgaugacat

SEQ ID NO: 72413 - DNA, 27 bp, Artificial Sequence
  Synthetic
tggataaaugaactggaacugggaaaa

SEQ ID NO: 72414 - DNA, 27 bp, Artificial Sequence
  Synthetic
gcctttattttuggaaggagatggtut

SEQ ID NO: 72415 - DNA, 28 bp, Artificial Sequence
  Synthetic
gctgaggatugcatagatacaaagtuga

SEQ ID NO: 72416 - DNA, 29 bp, Artificial Sequence
  Synthetic
tcatcttctgctuctgtttcaaaatcuct

SEQ ID NO: 72417 - DNA, 24 bp, Artificial Sequence
  Synthetic
aatcattctgaacauccgctcugt

SEQ ID NO: 72418 - DNA, 28 bp, Artificial Sequence
  Synthetic
attgctaagugaggtatgtcttttucca

SEQ ID NO: 72419 - DNA, 27 bp, Artificial Sequence
  Synthetic
ttacacaaacatcuggagacacatcut

SEQ ID NO: 72420 - DNA, 21 bp, Artificial Sequence
  Synthetic
tggauccagggcttctucaga

SEQ ID NO: 72421 - DNA, 28 bp, Artificial Sequence
  Synthetic
cccttcactgauaaatgtgaatccucaa

SEQ ID NO: 72422 - DNA, 21 bp, Artificial Sequence
  Synthetic
ggactcuccagctgggacuat

SEQ ID NO: 72423 - DNA, 18 bp, Artificial Sequence
  Synthetic
gaaacgctcucgccccua

SEQ ID NO: 72424 - DNA, 29 bp, Artificial Sequence
  Synthetic
cagttccagttcauttatccaagttgtut

SEQ ID NO: 72425 - DNA, 26 bp, Artificial Sequence
  Synthetic
agaagtagatucagccagagaaguga

SEQ ID NO: 72426 - DNA, 28 bp, Artificial Sequence
  Synthetic
aactttgtatctaugcaatcctcagcut

SEQ ID NO: 72427 - DNA, 28 bp, Artificial Sequence
  Synthetic
tgacctagcugaaactgauagaggaaat

SEQ ID NO: 72428 - DNA, 24 bp, Artificial Sequence
  Synthetic
aatcctcagcuttcacttctcugg

SEQ ID NO: 72429 - DNA, 26 bp, Artificial Sequence
  Synthetic
tgacctagcugaaactgauagaggaa

SEQ ID NO: 72430 - DNA, 28 bp, Artificial Sequence
  Synthetic
cctctatcagttucagctaggtcattut

SEQ ID NO: 72431 - DNA, 25 bp, Artificial Sequence
  Synthetic
tggatccagacautgaattgtcuct

SEQ ID NO: 72432 - DNA, 22 bp, Artificial Sequence
  Synthetic
gtgtgttucagagtgggugaga

SEQ ID NO: 72433 - DNA, 25 bp, Artificial Sequence
  Synthetic
cccaaggguaaagagaagaatggug

SEQ ID NO: 72434 - DNA, 24 bp, Artificial Sequence
  Synthetic
ctctaagcccagcugagatctuac

SEQ ID NO: 72435 - DNA, 26 bp, Artificial Sequence
  Synthetic
tgtcccacuggaaaactggatttaut

SEQ ID NO: 72436 - DNA, 18 bp, Artificial Sequence
  Synthetic
cagtccucactggcgcut

SEQ ID NO: 72437 - DNA, 21 bp, Artificial Sequence
  Synthetic
cacctgcucaagggtctcuac

SEQ ID NO: 72438 - DNA, 24 bp, Artificial Sequence
  Synthetic
cctcagaaagcaucacctcaaaug

SEQ ID NO: 72439 - DNA, 27 bp, Artificial Sequence
  Synthetic
gtgcttaatucaagtcagtggttucaa

SEQ ID NO: 72440 - DNA, 24 bp, Artificial Sequence
  Synthetic
accaccccagaguaagaagcttua

SEQ ID NO: 72441 - DNA, 26 bp, Artificial Sequence
  Synthetic
aacttggtgaucttctcattggtugt

SEQ ID NO: 72442 - DNA, 22 bp, Artificial Sequence
  Synthetic
cattgccaucctatcctgcuct

SEQ ID NO: 72443 - DNA, 24 bp, Artificial Sequence
  Synthetic
gcttcttuacaccacgcttaauca

SEQ ID NO: 72444 - DNA, 20 bp, Artificial Sequence
  Synthetic
aactccagccaucccaaguc

SEQ ID NO: 72445 - DNA, 23 bp, Artificial Sequence
  Synthetic
cacagcucttcctcucagaacac

SEQ ID NO: 72446 - DNA, 26 bp, Artificial Sequence
  Synthetic
atccaaacgaugtgtttactgucaga

SEQ ID NO: 72447 - DNA, 20 bp, Artificial Sequence
  Synthetic
cctgagcucgggtcaucaga

SEQ ID NO: 72448 - DNA, 23 bp, Artificial Sequence
  Synthetic
gaggccaucaaagctcaggtuaa

SEQ ID NO: 72449 - DNA, 20 bp, Artificial Sequence
  Synthetic
gggtacccaugtccttgcug

SEQ ID NO: 72450 - DNA, 22 bp, Artificial Sequence
  Synthetic
gggaggacuagaggcactatuc

SEQ ID NO: 72451 - DNA, 23 bp, Artificial Sequence
  Synthetic
gauccacaagcccaacttucaac

SEQ ID NO: 72452 - DNA, 24 bp, Artificial Sequence
  Synthetic
ctctgtaauggctagauccccaga

SEQ ID NO: 72453 - DNA, 22 bp, Artificial Sequence
  Synthetic
ggccaaugacatgctuccaaaa

SEQ ID NO: 72454 - DNA, 28 bp, Artificial Sequence
  Synthetic
ccttcaatgacuttctagtaacucagca

SEQ ID NO: 72455 - DNA, 21 bp, Artificial Sequence
  Synthetic
gagtgggucccatcagttuga

SEQ ID NO: 72456 - DNA, 27 bp, Artificial Sequence
  Synthetic
tgaccagctaacuctctttgtttgtut

SEQ ID NO: 72457 - DNA, 28 bp, Artificial Sequence
  Synthetic
gcaautatgttagcuaggagcagaaagt

SEQ ID NO: 72458 - DNA, 26 bp, Artificial Sequence
  Synthetic
ttacatgaactcuatgtcgtggcaut

SEQ ID NO: 72459 - DNA, 28 bp, Artificial Sequence
  Synthetic
ccatgataggcucctgaaaactaaaauc

SEQ ID NO: 72460 - DNA, 22 bp, Artificial Sequence
  Synthetic
gcagggauacctggaggaugat

SEQ ID NO: 72461 - DNA, 25 bp, Artificial Sequence
  Synthetic
ctagtttggtuttcctctcctuccc

SEQ ID NO: 72462 - DNA, 25 bp, Artificial Sequence
  Synthetic
ccacaaaatggauccagacaacugt

SEQ ID NO: 72463 - DNA, 28 bp, Artificial Sequence
  Synthetic
gcttgctctgauaggaaaatgagatcua

SEQ ID NO: 72464 - DNA, 19 bp, Artificial Sequence
  Synthetic
caacagggaccuccgucag

SEQ ID NO: 72465 - DNA, 26 bp, Artificial Sequence
  Synthetic
aacaagggucaaggtaatcacaauca

SEQ ID NO: 72466 - DNA, 27 bp, Artificial Sequence
  Synthetic
agatgggctgugaaattttatctugga

SEQ ID NO: 72467 - DNA, 28 bp, Artificial Sequence
  Synthetic
tgctattttgacutcaccttgatucagt

SEQ ID NO: 72468 - DNA, 27 bp, Artificial Sequence
  Synthetic
accttccagaaauccagttcttcuact

SEQ ID NO: 72469 - DNA, 22 bp, Artificial Sequence
  Synthetic
agagguccagaggtttccuacc

SEQ ID NO: 72470 - DNA, 21 bp, Artificial Sequence
  Synthetic
tcccagcutcucaaggacagt

SEQ ID NO: 72471 - DNA, 27 bp, Artificial Sequence
  Synthetic
ttctggccaguatagagagttcuacaa

SEQ ID NO: 72472 - DNA, 25 bp, Artificial Sequence
  Synthetic
atcatctcttugaggtactgcccua

SEQ ID NO: 72473 - DNA, 27 bp, Artificial Sequence
  Synthetic
ttgggtttcaagaucccttatcagtuc

SEQ ID NO: 72474 - DNA, 22 bp, Artificial Sequence
  Synthetic
gcutgagaugggagcaaacagt

SEQ ID NO: 72475 - DNA, 20 bp, Artificial Sequence
  Synthetic
tgaagagccaccugcgaauc

SEQ ID NO: 72476 - DNA, 26 bp, Artificial Sequence
  Synthetic
gaactgauaagggatctugaaaccca

SEQ ID NO: 72477 - DNA, 27 bp, Artificial Sequence
  Synthetic
agcattcatugatgtcttctguccaat

SEQ ID NO: 72478 - DNA, 28 bp, Artificial Sequence
  Synthetic
tgaaaaactucaacaggaatuggcaaat

SEQ ID NO: 72479 - DNA, 26 bp, Artificial Sequence
  Synthetic
ttcttcatuagcggtttctactugct

SEQ ID NO: 72480 - DNA, 28 bp, Artificial Sequence
  Synthetic
tguattaaggacattcucaccaaacacc

SEQ ID NO: 72481 - DNA, 24 bp, Artificial Sequence
  Synthetic
tctttttcccucaggctttctgut

SEQ ID NO: 72482 - DNA, 21 bp, Artificial Sequence
  Synthetic
tcctggcacugtcttcccuaa

SEQ ID NO: 72483 - DNA, 24 bp, Artificial Sequence
  Synthetic
ccctactgctutcctttcctcauc

SEQ ID NO: 72484 - DNA, 22 bp, Artificial Sequence
  Synthetic
actctgcctcucccaactgaua

SEQ ID NO: 72485 - DNA, 25 bp, Artificial Sequence
  Synthetic
caatcaggcaucgtcggaaatatuc

SEQ ID NO: 72486 - DNA, 24 bp, Artificial Sequence
  Synthetic
catggtaagguttctctcctgugt

SEQ ID NO: 72487 - DNA, 21 bp, Artificial Sequence
  Synthetic
ccagaagaccuctcatgccut

SEQ ID NO: 72488 - DNA, 21 bp, Artificial Sequence
  Synthetic
ctgaaaagcuggcctuggaac

SEQ ID NO: 72489 - DNA, 25 bp, Artificial Sequence
  Synthetic
ttccacacttucacgttctctctut

SEQ ID NO: 72490 - DNA, 25 bp, Artificial Sequence
  Synthetic
catcugagcaaagacaaaccugaac

SEQ ID NO: 72491 - DNA, 27 bp, Artificial Sequence
  Synthetic
aagttgtagcaaccutgtttccaaaut

SEQ ID NO: 72492 - DNA, 29 bp, Artificial Sequence
  Synthetic
ttcttgaacttcugaaaccactatcguaa

SEQ ID NO: 72493 - DNA, 24 bp, Artificial Sequence
  Synthetic
caaacatcttggucacgacgauac

SEQ ID NO: 72494 - DNA, 26 bp, Artificial Sequence
  Synthetic
tttaccacagcaaugtgtgttcttug

SEQ ID NO: 72495 - DNA, 21 bp, Artificial Sequence
  Synthetic
ctgtcctugagcatccctugt

SEQ ID NO: 72496 - DNA, 22 bp, Artificial Sequence
  Synthetic
catgacaaatcugcctgctgug

SEQ ID NO: 72497 - DNA, 26 bp, Artificial Sequence
  Synthetic
catgaagccagugagtaccuagaaag

SEQ ID NO: 72498 - DNA, 27 bp, Artificial Sequence
  Synthetic
ttttgaagaaaauggcaaaggtuccat

SEQ ID NO: 72499 - DNA, 28 bp, Artificial Sequence
  Synthetic
gccttgttctugcatgtcttttattugt

SEQ ID NO: 72500 - DNA, 28 bp, Artificial Sequence
  Synthetic
atcagctaacacaggaautattcagcut

SEQ ID NO: 72501 - DNA, 27 bp, Artificial Sequence
  Synthetic
gagcatcctctguaaggactacttcua

SEQ ID NO: 72502 - DNA, 28 bp, Artificial Sequence
  Synthetic
caaaggacttagaacutacccagtgtua

SEQ ID NO: 72503 - DNA, 26 bp, Artificial Sequence
  Synthetic
ctcaagtuggatttgacugacaagag

SEQ ID NO: 72504 - DNA, 28 bp, Artificial Sequence
  Synthetic
gaaaatagtugaagaaaaagtggcugct

SEQ ID NO: 72505 - DNA, 25 bp, Artificial Sequence
  Synthetic
tgaccccaacucatcttctctuagt

SEQ ID NO: 72506 - DNA, 27 bp, Artificial Sequence
  Synthetic
ggtcaaagcaauatggactcugagaac

SEQ ID NO: 72507 - DNA, 28 bp, Artificial Sequence
  Synthetic
gcattcguatccacagauagcaaaagaa

SEQ ID NO: 72508 - DNA, 22 bp, Artificial Sequence
  Synthetic
agggttgcuagagctccttgua

SEQ ID NO: 72509 - DNA, 21 bp, Artificial Sequence
  Synthetic
ggagctggacuagacacctug

SEQ ID NO: 72510 - DNA, 21 bp, Artificial Sequence
  Synthetic
cacugagcatauccagaccca

SEQ ID NO: 72511 - DNA, 21 bp, Artificial Sequence
  Synthetic
tggtctgttguccctggtgua

SEQ ID NO: 72512 - DNA, 27 bp, Artificial Sequence
  Synthetic
ctgttcttttggauagcatgaagctut

SEQ ID NO: 72513 - DNA, 28 bp, Artificial Sequence
  Synthetic
cagauaatttttatggugggacgaggat

SEQ ID NO: 72514 - DNA, 27 bp, Artificial Sequence
  Synthetic
tgttcatagaacguaggtaacatgugg

SEQ ID NO: 72515 - DNA, 25 bp, Artificial Sequence
  Synthetic
aactgtctcaggaguaggaaggaut

SEQ ID NO: 72516 - DNA, 20 bp, Artificial Sequence
  Synthetic
tcccaggugccagtgacuaa

SEQ ID NO: 72517 - DNA, 25 bp, Artificial Sequence
  Synthetic
ggagaataacucctcggttcuaggg

SEQ ID NO: 72518 - DNA, 28 bp, Artificial Sequence
  Synthetic
cagttcaggaauatgcaaaattctguca

SEQ ID NO: 72519 - DNA, 28 bp, Artificial Sequence
  Synthetic
gcatttcaacaaccuggctttctaatuc

SEQ ID NO: 72520 - DNA, 28 bp, Artificial Sequence
  Synthetic
gggtcagatataucagcattaacctuga

SEQ ID NO: 72521 - DNA, 29 bp, Artificial Sequence
  Synthetic
tctgtagttcuagcagcttcttttcttut

SEQ ID NO: 72522 - DNA, 24 bp, Artificial Sequence
  Synthetic
ttttaggcuacagatugcaaccca

SEQ ID NO: 72523 - DNA, 26 bp, Artificial Sequence
  Synthetic
cttccgtaaggcaucgtaacacauat

SEQ ID NO: 72524 - DNA, 22 bp, Artificial Sequence
  Synthetic
ggaagcaugugacaacagcaga

SEQ ID NO: 72525 - DNA, 22 bp, Artificial Sequence
  Synthetic
tctccttgauggcctcugaact

SEQ ID NO: 72526 - DNA, 28 bp, Artificial Sequence
  Synthetic
caggttgttgaaaugcatactagttuga

SEQ ID NO: 72527 - DNA, 24 bp, Artificial Sequence
  Synthetic
aacttcaacaucttgagggctuct

SEQ ID NO: 72528 - DNA, 20 bp, Artificial Sequence
  Synthetic
gctccggaautgccgttuag

SEQ ID NO: 72529 - DNA, 21 bp, Artificial Sequence
  Synthetic
tgtctgaaugtctccccuggt

SEQ ID NO: 72530 - DNA, 22 bp, Artificial Sequence
  Synthetic
ctactggaucctgggaggtuca

SEQ ID NO: 72531 - DNA, 24 bp, Artificial Sequence
  Synthetic
cactattctcugaagctggctugt

SEQ ID NO: 72532 - DNA, 24 bp, Artificial Sequence
  Synthetic
actauctcagcttcuaccccaaca

SEQ ID NO: 72533 - DNA, 28 bp, Artificial Sequence
  Synthetic
aatctgacttttgugagctttctaggut

SEQ ID NO: 72534 - DNA, 22 bp, Artificial Sequence
  Synthetic
gugttgctttugaacagggcaa

SEQ ID NO: 72535 - DNA, 22 bp, Artificial Sequence
  Synthetic
cccagcccaugtaatttugaca

SEQ ID NO: 72536 - DNA, 23 bp, Artificial Sequence
  Synthetic
aggagauagcctttucaggcaag

SEQ ID NO: 72537 - DNA, 25 bp, Artificial Sequence
  Synthetic
cutatctgagcaguccaccacaaat

SEQ ID NO: 72538 - DNA, 22 bp, Artificial Sequence
  Synthetic
tgtcccttcuctgtcctccaut

SEQ ID NO: 72539 - DNA, 21 bp, Artificial Sequence
  Synthetic
cauggcgatgucagcagaaag

SEQ ID NO: 72540 - DNA, 24 bp, Artificial Sequence
  Synthetic
gcattgtgucaagacaagagguca

SEQ ID NO: 72541 - DNA, 27 bp, Artificial Sequence
  Synthetic
ctaaactacccugaattatggcuccaa

SEQ ID NO: 72542 - DNA, 21 bp, Artificial Sequence
  Synthetic
cttgaccgaggauggagcuaa

SEQ ID NO: 72543 - DNA, 21 bp, Artificial Sequence
  Synthetic
gtccagaaggguacacagugg

SEQ ID NO: 72544 - DNA, 18 bp, Artificial Sequence
  Synthetic
gccccagcagaacucuca

SEQ ID NO: 72545 - DNA, 17 bp, Artificial Sequence
  Synthetic
ccggagugccacctcuc

SEQ ID NO: 72546 - DNA, 17 bp, Artificial Sequence
  Synthetic
cgcctccucgtcgtcut

SEQ ID NO: 72547 - DNA, 17 bp, Artificial Sequence
  Synthetic
ggguagccctgguagcc

SEQ ID NO: 72548 - DNA, 26 bp, Artificial Sequence
  Synthetic
agaagaaugacatgctgttuccaagt

SEQ ID NO: 72549 - DNA, 29 bp, Artificial Sequence
  Synthetic
acatcttcaggttutctgtctaattccut

SEQ ID NO: 72550 - DNA, 20 bp, Artificial Sequence
  Synthetic
ctcaaccaacugctcacguc

SEQ ID NO: 72551 - DNA, 18 bp, Artificial Sequence
  Synthetic
aacacugcgaggccaugt

SEQ ID NO: 72552 - DNA, 17 bp, Artificial Sequence
  Synthetic
gggcuaccagggcuacc

SEQ ID NO: 72553 - DNA, 19 bp, Artificial Sequence
  Synthetic
gcgtgguggctcctttgut

SEQ ID NO: 72554 - DNA, 18 bp, Artificial Sequence
  Synthetic
acatggccucgcagtgut

SEQ ID NO: 72555 - DNA, 18 bp, Artificial Sequence
  Synthetic
ccctccccacucagcugt

SEQ ID NO: 72556 - DNA, 28 bp, Artificial Sequence
  Synthetic
gcttccaguaaagatcguacagaagaat

SEQ ID NO: 72557 - DNA, 21 bp, Artificial Sequence
  Synthetic
agctctgucttgctcucgaag

SEQ ID NO: 72558 - DNA, 28 bp, Artificial Sequence
  Synthetic
ccaaggagaagutgaagaacaaacatut

SEQ ID NO: 72559 - DNA, 30 bp, Artificial Sequence; identical to SEQ ID NO: 55317
  Synthetic

SEQ ID NO: 72560 - DNA, 20 bp, Artificial Sequence
  Synthetic
catgatgugccccauggaac

SEQ ID NO: 72561 - DNA, 21 bp, Artificial Sequence
  Synthetic
gtgttauggacggctggtcut

SEQ ID NO: 72562 - DNA, 27 bp, Artificial Sequence
  Synthetic
agcactttagguagagaagttugcaat

SEQ ID NO: 72563 - DNA, 28 bp, Artificial Sequence
  Synthetic
agcgtaataccaguctttttcctttuct

SEQ ID NO: 72564 - DNA, 28 bp, Artificial Sequence
  Synthetic
ccatatgtcatuttcatttcagcuccct

SEQ ID NO: 72565 - DNA, 24 bp, Artificial Sequence
  Synthetic
tgagaatacucagggcaagacuct

SEQ ID NO: 72566 - DNA, 28 bp, Artificial Sequence
  Synthetic
caaatacaagcugaaaactttggctuac

SEQ ID NO: 72567 - DNA, 27 bp, Artificial Sequence
  Synthetic
gtcagacataaugcatgctgaactuac

SEQ ID NO: 72568 - DNA, 26 bp, Artificial Sequence
  Synthetic
attgcttctugctgatctugacaaag

SEQ ID NO: 72569 - DNA, 29 bp, Artificial Sequence
  Synthetic
tgtactgccaagutacttacatttucagt

SEQ ID NO: 72570 - DNA, 17 bp, Artificial Sequence
  Synthetic
cucgcgagcgcaatucc

SEQ ID NO: 72571 - DNA, 26 bp, Artificial Sequence
  Synthetic
cagaccatgaaugacttcgactauct

SEQ ID NO: 72572 - DNA, 22 bp, Artificial Sequence
  Synthetic
tgtaauttggctcugggcagaa

SEQ ID NO: 72573 - DNA, 29 bp, Artificial Sequence
  Synthetic
gcaggttcauacaatggtgtttatucaaa

SEQ ID NO: 72574 - DNA, 24 bp, Artificial Sequence
  Synthetic
gaagcacaaguattcugggcaaaa

SEQ ID NO: 72575 - DNA, 33 bp, Artificial Sequence; identical to SEQ ID NO: 54021
  Synthetic

SEQ ID NO: 72576 - DNA, 23 bp, Artificial Sequence
  Synthetic
cgaaccccacaguaaggaugaga

SEQ ID NO: 72577 - DNA, 22 bp, Artificial Sequence
  Synthetic
aagtcattgccuggcacaaaug

SEQ ID NO: 72578 - DNA, 20 bp, Artificial Sequence
  Synthetic
gcccacccuaatcctgtgut

SEQ ID NO: 72579 - DNA, 20 bp, Artificial Sequence
  Synthetic
ccagtccautcccagcuacc

SEQ ID NO: 72580 - DNA, 21 bp, Artificial Sequence
  Synthetic
gttccctugccaaggagttug

SEQ ID NO: 72581 - DNA, 28 bp, Artificial Sequence
  Synthetic
acagtgtctttuggttttcctctttcut

SEQ ID NO: 72582 - DNA, 21 bp, Artificial Sequence
  Synthetic
ccagcacccugaagctauagt

SEQ ID NO: 72583 - DNA, 23 bp, Artificial Sequence
  Synthetic
aggagaatacauccccgagtcug

SEQ ID NO: 72584 - DNA, 23 bp, Artificial Sequence
  Synthetic
gtccaataccautcgaagccugt

SEQ ID NO: 72585 - DNA, 20 bp, Artificial Sequence
  Synthetic
ctcaccccutggtcctgtuc

SEQ ID NO: 72586 - DNA, 22 bp, Artificial Sequence
  Synthetic
agcagtgguggatttgugaagt

SEQ ID NO: 72587 - DNA, 20 bp, Artificial Sequence
  Synthetic
gcatgggcugtgtaggtguc

SEQ ID NO: 72588 - DNA, 25 bp, Artificial Sequence
  Synthetic
cctttcagugagttttctgagugct

SEQ ID NO: 72589 - DNA, 27 bp, Artificial Sequence
  Synthetic
acctcaagcaaagutttaaggcaatut

SEQ ID NO: 72590 - DNA, 28 bp, Artificial Sequence
  Synthetic
tgatttattctgttutgtttgccaccut

SEQ ID NO: 72591 - DNA, 28 bp, Artificial Sequence
  Synthetic
gctagaaatagtugtattctggctucct

SEQ ID NO: 72592 - DNA, 24 bp, Artificial Sequence
  Synthetic
tcutgcattugaagaaggaagcca

SEQ ID NO: 72593 - DNA, 27 bp, Artificial Sequence
  Synthetic
acatggcatcugtacagtgtctauaac

SEQ ID NO: 72594 - DNA, 27 bp, Artificial Sequence
  Synthetic
aggcaaguataaaggaaauaagcagca

SEQ ID NO: 72595 - DNA, 28 bp, Artificial Sequence
  Synthetic
ctactctctgautatatgcttgctugga

SEQ ID NO: 72596 - DNA, 24 bp, Artificial Sequence
  Synthetic
gctgttgucactattgcataugct

SEQ ID NO: 72597 - DNA, 27 bp, Artificial Sequence
  Synthetic
aaacatggccauaaggacttatctgut

SEQ ID NO: 72598 - DNA, 28 bp, Artificial Sequence
  Synthetic
aacgtggtttgutaaatggtagtttucc

SEQ ID NO: 72599 - DNA, 23 bp, Artificial Sequence
  Synthetic
aggcgatgagugtgagactuagt

SEQ ID NO: 72600 - DNA, 21 bp, Artificial Sequence
  Synthetic
cgaatcucatgcctuccaacc

SEQ ID NO: 72601 - DNA, 20 bp, Artificial Sequence
  Synthetic
gtggcgaagccugatccaua

SEQ ID NO: 72602 - DNA, 19 bp, Artificial Sequence
  Synthetic
aaatctggcuccgcaggut

SEQ ID NO: 72603 - DNA, 27 bp, Artificial Sequence
  Synthetic
tggtaataggugagaaaccctatcgut

SEQ ID NO: 72604 - DNA, 21 bp, Artificial Sequence
  Synthetic
gtgtagccugtagctgggaug

SEQ ID NO: 72605 - DNA, 24 bp, Artificial Sequence
  Synthetic
ttcuacaaccaggaccaugagaag

SEQ ID NO: 72606 - DNA, 23 bp, Artificial Sequence
  Synthetic
aattcgagugtgggtttucaggt

SEQ ID NO: 72607 - DNA, 22 bp, Artificial Sequence
  Synthetic
gaggagcaggcugctuagaaat

SEQ ID NO: 72608 - DNA, 26 bp, Artificial Sequence
  Synthetic
caggcaccacuaacttaugaaaagga

SEQ ID NO: 72609 - DNA, 23 bp, Artificial Sequence
  Synthetic
agatgtuggcgagtguaaccaag

SEQ ID NO: 72610 - DNA, 23 bp, Artificial Sequence
  Synthetic
gcaacaagaguggaaatgugggt

SEQ ID NO: 72611 - DNA, 22 bp, Artificial Sequence
  Synthetic
tggacactugccggaagttuat

SEQ ID NO: 72612 - DNA, 28 bp, Artificial Sequence
  Synthetic
gattaatttgcaggutattgcgagtgut

SEQ ID NO: 72613 - DNA, 28 bp, Artificial Sequence
  Synthetic
aggtaccuttttaacttcuaaagcacat

SEQ ID NO: 72614 - DNA, 23 bp, Artificial Sequence
  Synthetic
cctccaugaggatgagcucaaaa

SEQ ID NO: 72615 - DNA, 19 bp, Artificial Sequence
  Synthetic
cccttgaugccgagtccug

SEQ ID NO: 72616 - DNA, 25 bp, Artificial Sequence
  Synthetic
ggaagtgugaaagcattgauggaat

SEQ ID NO: 72617 - DNA, 32 bp, Artificial Sequence; identical to SEQ ID NO: 59649
  Synthetic

SEQ ID NO: 72618 - DNA, 21 bp, Artificial Sequence
  Synthetic
gccugagcaggttgaugacag

SEQ ID NO: 72619 - DNA, 23 bp, Artificial Sequence
  Synthetic
cctgtagucaggaaggaccacut

SEQ ID NO: 72620 - DNA, 25 bp, Artificial Sequence
  Synthetic
cgaagaagugaaggagttcctuagt

SEQ ID NO: 72621 - DNA, 21 bp, Artificial Sequence
  Synthetic
gcaggagugtgaatggacugg

SEQ ID NO: 72622 - DNA, 26 bp, Artificial Sequence
  Synthetic
tgaccacggaaaautacugaagaaca

SEQ ID NO: 72623 - DNA, 29 bp, Artificial Sequence
  Synthetic
ttttattttgatuttccaggacugcaact

SEQ ID NO: 72624 - DNA, 21 bp, Artificial Sequence
  Synthetic
gtagcaacucacctggcctua

SEQ ID NO: 72625 - DNA, 23 bp, Artificial Sequence
  Synthetic
gagatcaacccugagggattcug

SEQ ID NO: 72626 - DNA, 27 bp, Artificial Sequence
  Synthetic
tttctccagtuggttacatactuggac

SEQ ID NO: 72627 - DNA, 27 bp, Artificial Sequence
  Synthetic
gcaaacaacautccatgaugaccaaat

SEQ ID NO: 72628 - DNA, 28 bp, Artificial Sequence
  Synthetic
cctgtaaacatcugcattttccattugt

SEQ ID NO: 72629 - DNA, 28 bp, Artificial Sequence
  Synthetic
gcatctttttccucttcctttcattuct

SEQ ID NO: 72630 - DNA, 21 bp, Artificial Sequence
  Synthetic
cagtactgauggctgcuggat

SEQ ID NO: 72631 - DNA, 21 bp, Artificial Sequence
  Synthetic
cagtggtguctctgtgctcug

SEQ ID NO: 72632 - DNA, 24 bp, Artificial Sequence
  Synthetic
accctttctcucccagcttcuaat

SEQ ID NO: 72633 - DNA, 27 bp, Artificial Sequence
  Synthetic
cctcatcatcgutcaagttctagugag

SEQ ID NO: 72634 - DNA, 27 bp, Artificial Sequence
  Synthetic
gcattaatacauactttctguggcgaa

SEQ ID NO: 72635 - DNA, 28 bp, Artificial Sequence
  Synthetic
caccttaaactucattttggttctgugt

SEQ ID NO: 72636 - DNA, 19 bp, Artificial Sequence
  Synthetic
aggaccuccaggagagcug

SEQ ID NO: 72637 - DNA, 19 bp, Artificial Sequence
  Synthetic
agcttcccgutggcctaug

SEQ ID NO: 72638 - DNA, 19 bp, Artificial Sequence
  Synthetic
cugaaucccgagaggccaa

SEQ ID NO: 72639 - DNA, 25 bp, Artificial Sequence
  Synthetic
cgctacttccucctcaagaatgaug

SEQ ID NO: 72640 - DNA, 24 bp, Artificial Sequence
  Synthetic
gtgtacatgaaguccaggaggaug

SEQ ID NO: 72641 - DNA, 28 bp, Artificial Sequence
  Synthetic
aagggatcacagautcgatatgtcuact

SEQ ID NO: 72642 - DNA, 21 bp, Artificial Sequence
  Synthetic
tggcggtugttgaacatgtug

SEQ ID NO: 72643 - DNA, 28 bp, Artificial Sequence
  Synthetic
tggagttgtttatucttccttgctguat

SEQ ID NO: 72644 - DNA, 26 bp, Artificial Sequence
  Synthetic
cttcccacuactttgcaaguaaaacc

SEQ ID NO: 72645 - DNA, 28 bp, Artificial Sequence
  Synthetic
tcctttcttcccutgttccctatatuga

SEQ ID NO: 72646 - DNA, 18 bp, Artificial Sequence
  Synthetic
ccttgtcgucccccugga

SEQ ID NO: 72647 - DNA, 21 bp, Artificial Sequence
  Synthetic
tggtgacccuatgctctgugt

SEQ ID NO: 72648 - DNA, 22 bp, Artificial Sequence
  Synthetic
gctcctugtagccaaugaaggt

SEQ ID NO: 72649 - DNA, 20 bp, Artificial Sequence
  Synthetic
gggtcugacgggtagagugt

SEQ ID NO: 72650 - DNA, 21 bp, Artificial Sequence
  Synthetic
catccagcuccttccacacua

SEQ ID NO: 72651 - DNA, 22 bp, Artificial Sequence
  Synthetic
cagcttttggcauggagactug

SEQ ID NO: 72652 - DNA, 20 bp, Artificial Sequence
  Synthetic
acctccgggugtgcagauat

SEQ ID NO: 72653 - DNA, 18 bp, Artificial Sequence
  Synthetic
agaugcccacctccucca

SEQ ID NO: 72654 - DNA, 18 bp, Artificial Sequence
  Synthetic
cgcacuccgcagacacut

SEQ ID NO: 72655 - DNA, 19 bp, Artificial Sequence
  Synthetic
cccatcagugcagctcucc

SEQ ID NO: 72656 - DNA, 26 bp, Artificial Sequence
  Synthetic
tgtgcttaagugaccttacaccatut

SEQ ID NO: 72657 - DNA, 25 bp, Artificial Sequence
  Synthetic
ttccagcttcauaaccatgttccut

SEQ ID NO: 72658 - DNA, 21 bp, Artificial Sequence
  Synthetic
ggctgttgugcccttctctua

SEQ ID NO: 72659 - DNA, 23 bp, Artificial Sequence
  Synthetic
tgcccuaaaggacacagtatugg

SEQ ID NO: 72660 - DNA, 22 bp, Artificial Sequence
  Synthetic
gcagccaagaacugaaccaaug

SEQ ID NO: 72661 - DNA, 21 bp, Artificial Sequence
  Synthetic
gtcagctctucggtcacctut

SEQ ID NO: 72662 - DNA, 18 bp, Artificial Sequence
  Synthetic
gcagcaacgcguaugcac

SEQ ID NO: 72663 - DNA, 21 bp, Artificial Sequence
  Synthetic
gaaccucatgcuggacaagga

SEQ ID NO: 72664 - DNA, 22 bp, Artificial Sequence
  Synthetic
cagcccgaaguctgtgatctua

SEQ ID NO: 72665 - DNA, 20 bp, Artificial Sequence
  Synthetic
actcggagaagaacguggug

SEQ ID NO: 72666 - DNA, 23 bp, Artificial Sequence
  Synthetic
ggttcggcuctagtcaucacaag

SEQ ID NO: 72667 - DNA, 25 bp, Artificial Sequence
  Synthetic
ggaagagtttgcuggttggaatgua

SEQ ID NO: 72668 - DNA, 21 bp, Artificial Sequence
  Synthetic
ccccuagagagcagggugaat

SEQ ID NO: 72669 - DNA, 24 bp, Artificial Sequence
  Synthetic
ccaguaacagcagcaggtattuct

SEQ ID NO: 72670 - DNA, 26 bp, Artificial Sequence
  Synthetic
gtgtttgtgugtaactactgcucaga

SEQ ID NO: 72671 - DNA, 28 bp, Artificial Sequence
  Synthetic
agcaacatcagauaaaatccaagagcut

SEQ ID NO: 72672 - DNA, 28 bp, Artificial Sequence
  Synthetic
gcatagtaagtugtatttgtgtcugcct

SEQ ID NO: 72673 - DNA, 28 bp, Artificial Sequence
  Synthetic
gacaaaggaaaauacgcaccauaaaaca

SEQ ID NO: 72674 - DNA, 28 bp, Artificial Sequence
  Synthetic
gtcaactgacugaagagaagaatgacut

SEQ ID NO: 72675 - DNA, 28 bp, Artificial Sequence
  Synthetic
cagcagaaatgauaagcatgcactaaut

SEQ ID NO: 72676 - DNA, 26 bp, Artificial Sequence
  Synthetic
ttttcgaaaggcuctcattuaccaga

SEQ ID NO: 72677 - DNA, 20 bp, Artificial Sequence
  Synthetic
ccgaccgaaaccuggugaag

SEQ ID NO: 72678 - DNA, 26 bp, Artificial Sequence
  Synthetic
gccaacacaagagaaaauatttgcug

SEQ ID NO: 72679 - DNA, 28 bp, Artificial Sequence
  Synthetic
cttttgaccaaaguactgacttgcttut

SEQ ID NO: 72680 - DNA, 30 bp, Artificial Sequence
  Synthetic
ctagcagttaattugattttccgaagtuga

SEQ ID NO: 72681 - DNA, 27 bp, Artificial Sequence
  Synthetic
caacagaaaugagaagtgcatggaaut

SEQ ID NO: 72682 - DNA, 26 bp, Artificial Sequence
  Synthetic
tttactcacguttttcccatcuagca

SEQ ID NO: 72683 - DNA, 20 bp, Artificial Sequence
  Synthetic
cggaggacggcauatucagg

SEQ ID NO: 72684 - DNA, 22 bp, Artificial Sequence
  Synthetic
gtacaugaagggcagttgggua

SEQ ID NO: 72685 - DNA, 21 bp, Artificial Sequence
  Synthetic
gcuaaccagtugccacaaacc

SEQ ID NO: 72686 - DNA, 21 bp, Artificial Sequence
  Synthetic
gugatcaccaaucgcccaaag

SEQ ID NO: 72687 - DNA, 25 bp, Artificial Sequence
  Synthetic
accagcagagaauagagggagaaut

SEQ ID NO: 72688 - DNA, 28 bp, Artificial Sequence
  Synthetic
ccagcctaaaacutacatacacagaaug

SEQ ID NO: 72689 - DNA, 25 bp, Artificial Sequence
  Synthetic
aagggttgcuccaaaaatctuacct

SEQ ID NO: 72690 - DNA, 26 bp, Artificial Sequence
  Synthetic
tgctggaaagaauagtcatuggaacc

SEQ ID NO: 72691 - DNA, 28 bp, Artificial Sequence
  Synthetic
aaacagtcaagagucatcgaataccaut

SEQ ID NO: 72692 - DNA, 27 bp, Artificial Sequence
  Synthetic
cttggatttcccugtatgatccttcut

SEQ ID NO: 72693 - DNA, 28 bp, Artificial Sequence
  Synthetic
gattccatgtgagguttgataacgttut

SEQ ID NO: 72694 - DNA, 28 bp, Artificial Sequence
  Synthetic
cggccttaaggutaattcttgaaguaca

SEQ ID NO: 72695 - DNA, 24 bp, Artificial Sequence
  Synthetic
tctauaggacccacttcucccaag

SEQ ID NO: 72696 - DNA, 26 bp, Artificial Sequence
  Synthetic
ctatatgtagaggcugttggaagcug

SEQ ID NO: 72697 - DNA, 25 bp, Artificial Sequence
  Synthetic
agcattatgaagguccactgaagut

SEQ ID NO: 72698 - DNA, 27 bp, Artificial Sequence
  Synthetic
gaactgctagcutatgccttcaaaaut

SEQ ID NO: 72699 - DNA, 24 bp, Artificial Sequence
  Synthetic
cctgtctcagguctatgaccuact

SEQ ID NO: 72700 - DNA, 27 bp, Artificial Sequence
  Synthetic
ctgttgtaguggaaatactgtcctuga

SEQ ID NO: 72701 - DNA, 25 bp, Artificial Sequence
  Synthetic
aggaaatggattutggagtcctcug

SEQ ID NO: 72702 - DNA, 26 bp, Artificial Sequence
  Synthetic
ggctgttccautcgatatccttttuc

SEQ ID NO: 72703 - DNA, 26 bp, Artificial Sequence
  Synthetic
atcggagaagaaacacuaagtgctut

SEQ ID NO: 72704 - DNA, 21 bp, Artificial Sequence
  Synthetic
atgatctgcutatctgcugcc

SEQ ID NO: 72705 - DNA, 28 bp, Artificial Sequence
  Synthetic
gcgcttaaattuctcaacttctttcuga

SEQ ID NO: 72706 - DNA, 24 bp, Artificial Sequence
  Synthetic
gauccaaaagaaagcggtucaagt

SEQ ID NO: 72707 - DNA, 21 bp, Artificial Sequence
  Synthetic
gaagaggcgucctuagcagag

SEQ ID NO: 72708 - DNA, 28 bp, Artificial Sequence
  Synthetic
actagaacaugatagagcuacagaacga

SEQ ID NO: 72709 - DNA, 28 bp, Artificial Sequence
  Synthetic
gccgatctagaugtttaattgttucagg

SEQ ID NO: 72710 - DNA, 22 bp, Artificial Sequence
  Synthetic
gccttacccuctgccaggatua

SEQ ID NO: 72711 - DNA, 20 bp, Artificial Sequence
  Synthetic
ccaguggagaaggaggucgt

SEQ ID NO: 72712 - DNA, 20 bp, Artificial Sequence
  Synthetic
cucctagcuccaagccagaa

SEQ ID NO: 72713 - DNA, 23 bp, Artificial Sequence
  Synthetic
gtaggctuagacaactctgcugt

SEQ ID NO: 72714 - DNA, 27 bp, Artificial Sequence
  Synthetic
aactggtgtacutgataggcattugaa

SEQ ID NO: 72715 - DNA, 28 bp, Artificial Sequence
  Synthetic
ccagcattggauctgttgtcatcttaua

SEQ ID NO: 72716 - DNA, 20 bp, Artificial Sequence
  Synthetic
caccatccccgucttctcuc

SEQ ID NO: 72717 - DNA, 24 bp, Artificial Sequence
  Synthetic
aaagtgtccugcactctgatgaut

SEQ ID NO: 72718 - DNA, 23 bp, Artificial Sequence
  Synthetic
gatgauccagatgtuagggcagt

SEQ ID NO: 72719 - DNA, 27 bp, Artificial Sequence
  Synthetic
ggttttgcacaagutaggtttgtttug

SEQ ID NO: 72720 - DNA, 26 bp, Artificial Sequence
  Synthetic
agactggacauagtttctgggagaut

SEQ ID NO: 72721 - DNA, 25 bp, Artificial Sequence
  Synthetic
ccacagcaaacagaacugtttuaga

SEQ ID NO: 72722 - DNA, 22 bp, Artificial Sequence
  Synthetic
agcagagtuagcttgtcaccug

SEQ ID NO: 72723 - DNA, 23 bp, Artificial Sequence
  Synthetic
cctccuccccaaaccagtactua

SEQ ID NO: 72724 - DNA, 25 bp, Artificial Sequence
  Synthetic
tgatgaaaatgcugatgaggctuct

SEQ ID NO: 72725 - DNA, 27 bp, Artificial Sequence
  Synthetic
caaagcactggauctaagagtcctuac

SEQ ID NO: 72726 - DNA, 18 bp, Artificial Sequence
  Synthetic
cacaagagcucccuccct

SEQ ID NO: 72727 - DNA, 17 bp, Artificial Sequence
  Synthetic
ggcggcagccacuaguc

SEQ ID NO: 72728 - DNA, 24 bp, Artificial Sequence
  Synthetic
gcacttcacaacuccttactgcut

SEQ ID NO: 72729 - DNA, 25 bp, Artificial Sequence
  Synthetic
tcaacgtcauctagaggaattugcc

SEQ ID NO: 72730 - DNA, 28 bp, Artificial Sequence
  Synthetic
aagacaaaaugcagaagaaaaagucagg

SEQ ID NO: 72731 - DNA, 25 bp, Artificial Sequence
  Synthetic
agtcctttagcccuactcaggtuaa

SEQ ID NO: 72732 - DNA, 22 bp, Artificial Sequence
  Synthetic
actttgctcutgttccccugac

SEQ ID NO: 72733 - DNA, 21 bp, Artificial Sequence
  Synthetic
agcagctuggtgtctcucaaa

SEQ ID NO: 72734 - DNA, 17 bp, Artificial Sequence
  Synthetic
accccagccutcccugt

SEQ ID NO: 72735 - DNA, 18 bp, Artificial Sequence
  Synthetic
gggccacaucgtcacuca

SEQ ID NO: 72736 - DNA, 21 bp, Artificial Sequence
  Synthetic
ccgcaaagacagacucccaut

SEQ ID NO: 72737 - DNA, 26 bp, Artificial Sequence
  Synthetic
gctgtttatctuctgctttcctcugg

SEQ ID NO: 72738 - DNA, 21 bp, Artificial Sequence
  Synthetic
gcgagtgugtgggaaatcugg

SEQ ID NO: 72739 - DNA, 22 bp, Artificial Sequence
  Synthetic
agatcatgcagcaucgcttcut

SEQ ID NO: 72740 - DNA, 21 bp, Artificial Sequence
  Synthetic
ccttcugaggtctgcugcaaa

SEQ ID NO: 72741 - DNA, 22 bp, Artificial Sequence
  Synthetic
gggacaugccatagguagcaat

SEQ ID NO: 72742 - DNA, 18 bp, Artificial Sequence
  Synthetic
cgtgcugccacacgauac

SEQ ID NO: 72743 - DNA, 21 bp, Artificial Sequence
  Synthetic
ggcccuacaucacaggaggaa

SEQ ID NO: 72744 - DNA, 17 bp, Artificial Sequence
  Synthetic
cgagcgugcgtcctcug

SEQ ID NO: 72745 - DNA, 18 bp, Artificial Sequence
  Synthetic
ccaggcccuctccugact

SEQ ID NO: 72746 - DNA, 23 bp, Artificial Sequence
  Synthetic
cctagaccugctctctcggauac

SEQ ID NO: 72747 - DNA, 21 bp, Artificial Sequence
  Synthetic
agtctccccacacucacctut

SEQ ID NO: 72748 - DNA, 23 bp, Artificial Sequence
  Synthetic
acctgctatgugttcctgttugg

SEQ ID NO: 72749 - DNA, 22 bp, Artificial Sequence
  Synthetic
aatggcagccuctgctuagaaa

SEQ ID NO: 72750 - DNA, 23 bp, Artificial Sequence
  Synthetic
cucaagcaagtuggccaaaaaga

SEQ ID NO: 72751 - DNA, 21 bp, Artificial Sequence
  Synthetic
aggcuacagcgaaucaaagca

SEQ ID NO: 72752 - DNA, 28 bp, Artificial Sequence
  Synthetic
gttctagcaatgcuggatacttacauca

SEQ ID NO: 72753 - DNA, 27 bp, Artificial Sequence
  Synthetic
ccttcaaaauccattccaatuccacag

SEQ ID NO: 72754 - DNA, 18 bp, Artificial Sequence
  Synthetic
gcccggacutgctaucct

SEQ ID NO: 72755 - DNA, 18 bp, Artificial Sequence
  Synthetic
cagctccuccagcgacuc

SEQ ID NO: 72756 - DNA, 26 bp, Artificial Sequence
  Synthetic
gcccaaattgauttcgatgatctuca

SEQ ID NO: 72757 - DNA, 33 bp, Artificial Sequence
  Synthetic
acctttatatcgtuactctgaatcttatctucc

SEQ ID NO: 72758 - DNA, 23 bp, Artificial Sequence
  Synthetic
gtgggtttgugttgtgatgcuat

SEQ ID NO: 72759 - DNA, 20 bp, Artificial Sequence
  Synthetic
gggctguagcatttgauggg

SEQ ID NO: 72760 - DNA, 22 bp, Artificial Sequence
  Synthetic
ttttgccaguaagcaagtggut

SEQ ID NO: 72761 - DNA, 22 bp, Artificial Sequence
  Synthetic
gcattttcatcucctgggcugt

SEQ ID NO: 72762 - DNA, 22 bp, Artificial Sequence
  Synthetic
cctctccauccctccaagcuat

SEQ ID NO: 72763 - DNA, 21 bp, Artificial Sequence
  Synthetic
cugagctgtcuacacccacag

SEQ ID NO: 72764 - DNA, 19 bp, Artificial Sequence
  Synthetic
agatccggagcugctcuct

SEQ ID NO: 72765 - DNA, 23 bp, Artificial Sequence
  Synthetic
gtttgctcacutggctttcctuc

SEQ ID NO: 72766 - DNA, 19 bp, Artificial Sequence
  Synthetic
cgacacacugcgacccuac

SEQ ID NO: 72767 - DNA, 21 bp, Artificial Sequence
  Synthetic
gcttgcugggctgctuaagaa

SEQ ID NO: 72768 - DNA, 22 bp, Artificial Sequence
  Synthetic
gaaggtggcutatccacagcut

SEQ ID NO: 72769 - DNA, 22 bp, Artificial Sequence
  Synthetic
ggatcatgaccucctcaccugt

SEQ ID NO: 72770 - DNA, 21 bp, Artificial Sequence
  Synthetic
cugtggaucaggaacccaagg

SEQ ID NO: 72771 - DNA, 24 bp, Artificial Sequence
  Synthetic
cggtgtgaacacuttcaattgugt

SEQ ID NO: 72772 - DNA, 18 bp, Artificial Sequence
  Synthetic
cagcccucacctctgcut

SEQ ID NO: 72773 - DNA, 17 bp, Artificial Sequence
  Synthetic
gaccacgagcgccucut

SEQ ID NO: 72774 - DNA, 22 bp, Artificial Sequence
  Synthetic
cggatctctuccatgaggauga

SEQ ID NO: 72775 - DNA, 23 bp, Artificial Sequence
  Synthetic
cctcatttcucctccatccucag

SEQ ID NO: 72776 - DNA, 24 bp, Artificial Sequence
  Synthetic
gcatttggaguattgcttugggaa

SEQ ID NO: 72777 - DNA, 21 bp, Artificial Sequence
  Synthetic
aacaggcugaggaaggctuac

SEQ ID NO: 72778 - DNA, 20 bp, Artificial Sequence
  Synthetic
gcacacaccacacucgauga

SEQ ID NO: 72779 - DNA, 23 bp, Artificial Sequence
  Synthetic
agcaagacacagccaucaactua

SEQ ID NO: 72780 - DNA, 26 bp, Artificial Sequence
  Synthetic
tggaggatcagucatccatgaatcua

SEQ ID NO: 72781 - DNA, 25 bp, Artificial Sequence
  Synthetic
caatgaggccucttatacugccaaa

SEQ ID NO: 72782 - DNA, 25 bp, Artificial Sequence
  Synthetic
cttgaagatcgucagtcctttcgua

SEQ ID NO: 72783 - DNA, 21 bp, Artificial Sequence
  Synthetic
acccucaaagaaaaccuggct

SEQ ID NO: 72784 - DNA, 21 bp, Artificial Sequence
  Synthetic
tgggaagtucatctggcacug

SEQ ID NO: 72785 - DNA, 23 bp, Artificial Sequence
  Synthetic
tttctgtcctcuctggcactcua

SEQ ID NO: 72786 - DNA, 21 bp, Artificial Sequence
  Synthetic
gcccagggaaguggtattgua

SEQ ID NO: 72787 - DNA, 21 bp, Artificial Sequence
  Synthetic
gtgaggcugaactggauccaa

SEQ ID NO: 72788 - DNA, 25 bp, Artificial Sequence
  Synthetic
ccttaaaactutgcttgaggugagt

SEQ ID NO: 72789 - DNA, 28 bp, Artificial Sequence
  Synthetic
cccattacatuaagaatggcccatttug

SEQ ID NO: 72790 - DNA, 29 bp, Artificial Sequence
  Synthetic
ggtaatatatgccutttgagctgtctuga

SEQ ID NO: 72791 - DNA, 24 bp, Artificial Sequence
  Synthetic
gcactagaattugctggctcaugt

SEQ ID NO: 72792 - DNA, 26 bp, Artificial Sequence
  Synthetic
atgttccatgaucatcagtccttugt

SEQ ID NO: 72793 - DNA, 28 bp, Artificial Sequence
  Synthetic
tggaatacatctcuctcatgttctcugt

SEQ ID NO: 72794 - DNA, 25 bp, Artificial Sequence
  Synthetic
cttttcccguaggctgatccttaut

SEQ ID NO: 72795 - DNA, 20 bp, Artificial Sequence
  Synthetic
gcagccaacaugcgaactug

SEQ ID NO: 72796 - DNA, 28 bp, Artificial Sequence
  Synthetic
gtcattaaacttuaggagcaagccatug

SEQ ID NO: 72797 - DNA, 26 bp, Artificial Sequence
  Synthetic
agttgggcaataucagtgaagttcut

SEQ ID NO: 72798 - DNA, 25 bp, Artificial Sequence
  Synthetic
ttgtggtggagutattgatgacgut

SEQ ID NO: 72799 - DNA, 28 bp, Artificial Sequence
  Synthetic
agacattgaaggugtcaaccaauaaact

SEQ ID NO: 72800 - DNA, 27 bp, Artificial Sequence
  Synthetic
acacaatttctugctgacaatcaucac

SEQ ID NO: 72801 - DNA, 28 bp, Artificial Sequence
  Synthetic
gcaactgtgagcugttactatguaagac

SEQ ID NO: 72802 - DNA, 26 bp, Artificial Sequence
  Synthetic
agccatggtcuatatatgctgtcuga

SEQ ID NO: 72803 - DNA, 25 bp, Artificial Sequence
  Synthetic
ccacatauggagtgaaacugggaag

SEQ ID NO: 72804 - DNA, 21 bp, Artificial Sequence
  Synthetic
gggcatatuctgcactcaucc

SEQ ID NO: 72805 - DNA, 28 bp, Artificial Sequence
  Synthetic
gttgtttgtagcugtagtgcttgattut

SEQ ID NO: 72806 - DNA, 23 bp, Artificial Sequence
  Synthetic
caaaacgaaaucctccagcauca

SEQ ID NO: 72807 - DNA, 26 bp, Artificial Sequence
  Synthetic
gggtctatgtacautgagattcggut

SEQ ID NO: 72808 - DNA, 28 bp, Artificial Sequence
  Synthetic
ctgaacatcguaagagaagctcuaaaga

SEQ ID NO: 72809 - DNA, 24 bp, Artificial Sequence
  Synthetic
tcatgcuggagccaaatttccuat

SEQ ID NO: 72810 - DNA, 27 bp, Artificial Sequence
  Synthetic
cttaatacatugagcagtgttggctut

SEQ ID NO: 72811 - DNA, 26 bp, Artificial Sequence
  Synthetic
cttctggcgaagcauattcattctut

SEQ ID NO: 72812 - DNA, 20 bp, Artificial Sequence
  Synthetic
gggagugaggatggcuacag

SEQ ID NO: 72813 - DNA, 20 bp, Artificial Sequence
  Synthetic
actgtcaucgaacgcaccut

SEQ ID NO: 72814 - DNA, 17 bp, Artificial Sequence
  Synthetic
cccacguaccgctccuc

SEQ ID NO: 72815 - DNA, 20 bp, Artificial Sequence
  Synthetic
gcagagugccagctgaugaa

SEQ ID NO: 72816 - DNA, 21 bp, Artificial Sequence
  Synthetic
ctgatagctguacccgctgug

SEQ ID NO: 72817 - DNA, 24 bp, Artificial Sequence
  Synthetic
ctgccttugggaagtagaauaggt

SEQ ID NO: 72818 - DNA, 18 bp, Artificial Sequence
  Synthetic
cgguggagggaggtcuca

SEQ ID NO: 72819 - DNA, 19 bp, Artificial Sequence
  Synthetic
cgctgtcuctgctcuccag

SEQ ID NO: 72820 - DNA, 21 bp, Artificial Sequence
  Synthetic
cagcggaugatgaaggtgtug

SEQ ID NO: 72821 - DNA, 20 bp, Artificial Sequence
  Synthetic
cctggugggtggtaugcaag

SEQ ID NO: 72822 - DNA, 21 bp, Artificial Sequence
  Synthetic
gctcaagagugagccactuct

SEQ ID NO: 72823 - DNA, 25 bp, Artificial Sequence
  Synthetic
tgactctgtcucctcttgtcttcuc

SEQ ID NO: 72824 - DNA, 25 bp, Artificial Sequence
  Synthetic
ggtaguaaacacccccaatugagaa

SEQ ID NO: 72825 - DNA, 18 bp, Artificial Sequence
  Synthetic
ttcaccutgcuggccagt

SEQ ID NO: 72826 - DNA, 24 bp, Artificial Sequence
  Synthetic
tgaagtctucatggatgttugcca

SEQ ID NO: 72827 - DNA, 24 bp, Artificial Sequence
  Synthetic
aagtagctacacugcgcgtauaag

SEQ ID NO: 72828 - DNA, 26 bp, Artificial Sequence
  Synthetic
gggacatgatuttcgtcaagatuaca

SEQ ID NO: 72829 - DNA, 25 bp, Artificial Sequence
  Synthetic
aaatacgtgacgugcaacaactuac

SEQ ID NO: 72830 - DNA, 22 bp, Artificial Sequence
  Synthetic
actctctggugctgtccactua

SEQ ID NO: 72831 - DNA, 26 bp, Artificial Sequence
  Synthetic
gaatcacatuagggttctcttuccca

SEQ ID NO: 72832 - DNA, 28 bp, Artificial Sequence
  Synthetic
caagagaatcaaguagagaatccugcaa

SEQ ID NO: 72833 - DNA, 23 bp, Artificial Sequence
  Synthetic
acaaacccaagcuagtggugaag

SEQ ID NO: 72834 - DNA, 25 bp, Artificial Sequence
  Synthetic
gctatttggttugagaagcgatugg

SEQ ID NO: 72835 - DNA, 27 bp, Artificial Sequence
  Synthetic
cctgcaacucagaatgtagaaaaagug

SEQ ID NO: 72836 - DNA, 19 bp, Artificial Sequence
  Synthetic
gaaccccautgaggcugct

SEQ ID NO: 72837 - DNA, 25 bp, Artificial Sequence
  Synthetic
gtgagcttttcutggagatccuact

SEQ ID NO: 72838 - DNA, 28 bp, Artificial Sequence
  Synthetic
ttaggttuagcatgagcttuaacagaca

SEQ ID NO: 72839 - DNA, 24 bp, Artificial Sequence
  Synthetic
agctaatcacauggctgtacucac

SEQ ID NO: 72840 - DNA, 22 bp, Artificial Sequence
  Synthetic
cccactagaaaugcctgcauga

SEQ ID NO: 72841 - DNA, 28 bp, Artificial Sequence
  Synthetic
caatattgtttgttuttatcccgtccut

SEQ ID NO: 72842 - DNA, 27 bp, Artificial Sequence
  Synthetic
tgcaaagtaccuaactccactgattuc

SEQ ID NO: 72843 - DNA, 25 bp, Artificial Sequence
  Synthetic
acagcaaaccagucaaaacactuac

SEQ ID NO: 72844 - DNA, 28 bp, Artificial Sequence
  Synthetic
ttctttctattccutcctctccctuaca

SEQ ID NO: 72845 - DNA, 25 bp, Artificial Sequence
  Synthetic
tctggatguggaaagagacgauagt

SEQ ID NO: 72846 - DNA, 27 bp, Artificial Sequence
  Synthetic
tcaccaacaguaaatccaacagatuct

SEQ ID NO: 72847 - DNA, 28 bp, Artificial Sequence
  Synthetic
actggatattgaauttctgcaaggagut

SEQ ID NO: 72848 - DNA, 24 bp, Artificial Sequence
  Synthetic
tctttaaaucacagccgtcaucac

SEQ ID NO: 72849 - DNA, 24 bp, Artificial Sequence
  Synthetic
aagcaggtttcugtcgtcattgua

SEQ ID NO: 72850 - DNA, 18 bp, Artificial Sequence
  Synthetic
caccttgaggucccggua

SEQ ID NO: 72851 - DNA, 17 bp, Artificial Sequence
  Synthetic
cggctgugcctcaggut

SEQ ID NO: 72852 - DNA, 22 bp, Artificial Sequence
  Synthetic
tgtttugaagggccaggtugaa

SEQ ID NO: 72853 - DNA, 28 bp, Artificial Sequence
  Synthetic
tgcagtcacugtagaatcatuaaaccat

SEQ ID NO: 72854 - DNA, 24 bp, Artificial Sequence
  Synthetic
cgactctgtcucaatgaactccut

SEQ ID NO: 72855 - DNA, 19 bp, Artificial Sequence
  Synthetic
accaaaaccaggcccugug

SEQ ID NO: 72856 - DNA, 17 bp, Artificial Sequence
  Synthetic
cccggcugaggtccuct

SEQ ID NO: 72857 - DNA, 22 bp, Artificial Sequence
  Synthetic
aguaaaggcgugaagcagaagt

SEQ ID NO: 72858 - DNA, 17 bp, Artificial Sequence
  Synthetic
gcctggugggcttctug

SEQ ID NO: 72859 - DNA, 18 bp, Artificial Sequence
  Synthetic
acaaggccccugggagua

SEQ ID NO: 72860 - DNA, 20 bp, Artificial Sequence
  Synthetic
ggacttctgcutcacgccut

SEQ ID NO: 72861 - DNA, 19 bp, Artificial Sequence
  Synthetic
ggaaaguccccgacgttug

SEQ ID NO: 72862 - DNA, 27 bp, Artificial Sequence
  Synthetic
cctttcttuaaaaacaagcagccacua

SEQ ID NO: 72863 - DNA, 27 bp, Artificial Sequence
  Synthetic
tctagctcttgucgaagatttgagtuc

SEQ ID NO: 72864 - DNA, 23 bp, Artificial Sequence
  Synthetic
caagtugaggcactgaagaugga

SEQ ID NO: 72865 - DNA, 28 bp, Artificial Sequence
  Synthetic
cctcaagttuacaagagggaatacugaa

SEQ ID NO: 72866 - DNA, 25 bp, Artificial Sequence
  Synthetic
gctcttgatcuccttctctcucagg

SEQ ID NO: 72867 - DNA, 24 bp, Artificial Sequence
  Synthetic
agttaauccccacaagcctccuat

SEQ ID NO: 72868 - DNA, 26 bp, Artificial Sequence
  Synthetic
tcttttgtggcauctgaaacagttug

SEQ ID NO: 72869 - DNA, 29 bp, Artificial Sequence
  Synthetic
caggacttcaaugtctagtgttcaguaaa

SEQ ID NO: 72870 - DNA, 19 bp, Artificial Sequence
  Synthetic
tgcgcgcuctcgtgatuat

SEQ ID NO: 72871 - DNA, 17 bp, Artificial Sequence
  Synthetic
gugaaccgagccgucgt

SEQ ID NO: 72872 - DNA, 19 bp, Artificial Sequence
  Synthetic
gcagcagaacguggctcut

SEQ ID NO: 72873 - DNA, 21 bp, Artificial Sequence
  Synthetic
caagaccaaccagcugcagua

SEQ ID NO: 72874 - DNA, 22 bp, Artificial Sequence
  Synthetic
tctucaccaccacattcugcat

SEQ ID NO: 72875 - DNA, 23 bp, Artificial Sequence
  Synthetic
tgtgacagaaagugagtgagcug

SEQ ID NO: 72876 - DNA, 19 bp, Artificial Sequence
  Synthetic
gaggccucaaccaagguca

SEQ ID NO: 72877 - DNA, 19 bp, Artificial Sequence
  Synthetic
gcgaugccaaggaggucat

SEQ ID NO: 72878 - DNA, 21 bp, Artificial Sequence
  Synthetic
gctgaggaagaaccugtgcuc

SEQ ID NO: 72879 - DNA, 24 bp, Artificial Sequence
  Synthetic
tggtttgtggucaagacagaauca

SEQ ID NO: 72880 - DNA, 23 bp, Artificial Sequence
  Synthetic
caggtatgcacuccagaaagcua

SEQ ID NO: 72881 - DNA, 25 bp, Artificial Sequence
  Synthetic
ggcagatgacuggcttttacuagat

SEQ ID NO: 72882 - DNA, 19 bp, Artificial Sequence
  Synthetic
ccctggcaggutcatcgut

SEQ ID NO: 72883 - DNA, 22 bp, Artificial Sequence
  Synthetic
actggagcgggagaaugaaaug

SEQ ID NO: 72884 - DNA, 25 bp, Artificial Sequence
  Synthetic
gccatgtcctugggattctagauag

SEQ ID NO: 72885 - DNA, 28 bp, Artificial Sequence
  Synthetic
tugaaatgattgttuccacaacacagaa

SEQ ID NO: 72886 - DNA, 24 bp, Artificial Sequence
  Synthetic
actgauaaaagcaaagccaugcac

SEQ ID NO: 72887 - DNA, 26 bp, Artificial Sequence
  Synthetic
ggtacagttcacaugacaagtcguat

SEQ ID NO: 72888 - DNA, 23 bp, Artificial Sequence
  Synthetic
agctcctgguttttggtctucag

SEQ ID NO: 72889 - DNA, 24 bp, Artificial Sequence
  Synthetic
cggutgaataagauggaggaggaa

SEQ ID NO: 72890 - DNA, 26 bp, Artificial Sequence
  Synthetic
agagactgattuctctccagctuaca

SEQ ID NO: 72891 - DNA, 24 bp, Artificial Sequence
  Synthetic
cgttgcctttuctgagtgtttcut

SEQ ID NO: 72892 - DNA, 25 bp, Artificial Sequence
  Synthetic
gttgatttcagggugagagatgaut

SEQ ID NO: 72893 - DNA, 24 bp, Artificial Sequence
  Synthetic
gacaatatcuccatcagccuggac

SEQ ID NO: 72894 - DNA, 21 bp, Artificial Sequence
  Synthetic
caggtcagcautctctcggut

SEQ ID NO: 72895 - DNA, 21 bp, Artificial Sequence
  Synthetic
cuacagcacccuggagaaaca

SEQ ID NO: 72896 - DNA, 21 bp, Artificial Sequence
  Synthetic
cgccaacacguttgaacugaa

SEQ ID NO: 72897 - DNA, 25 bp, Artificial Sequence
  Synthetic
catttgaccutgtcatucacaccag

SEQ ID NO: 72898 - DNA, 25 bp, Artificial Sequence
  Synthetic
tttaaagaccagcuatgcagctuct

SEQ ID NO: 72899 - DNA, 25 bp, Artificial Sequence
  Synthetic
accctaaggucaacactguaggaaa

SEQ ID NO: 72900 - DNA, 27 bp, Artificial Sequence
  Synthetic
ggcaactaauaggcattcaatacguga

SEQ ID NO: 72901 - DNA, 28 bp, Artificial Sequence
  Synthetic
gcttcatattctuctgcccatgagauat

SEQ ID NO: 72902 - DNA, 19 bp, Artificial Sequence
  Synthetic
ctcgccgugccacttttuc

SEQ ID NO: 72903 - DNA, 19 bp, Artificial Sequence
  Synthetic
agtgcgagcugtgcaacua

SEQ ID NO: 72904 - DNA, 22 bp, Artificial Sequence
  Synthetic
tgaactcacuggtgagguagca

SEQ ID NO: 72905 - DNA, 24 bp, Artificial Sequence
  Synthetic
cctcacacacautcctcttgaugt

SEQ ID NO: 72906 - DNA, 26 bp, Artificial Sequence
  Synthetic
aaacttaaggtuttgatggccuacct

SEQ ID NO: 72907 - DNA, 24 bp, Artificial Sequence
  Synthetic
agtttgtcguggtaaagtgaguga

SEQ ID NO: 72908 - DNA, 22 bp, Artificial Sequence
  Synthetic
ggacugaggagcagagucagaa

SEQ ID NO: 72909 - DNA, 24 bp, Artificial Sequence
  Synthetic
cgtaggtcaugaactcagtgauga

SEQ ID NO: 72910 - DNA, 19 bp, Artificial Sequence
  Synthetic
ccagccacugcgaguacac

SEQ ID NO: 72911 - DNA, 17 bp, Artificial Sequence
  Synthetic
cctuccccgggctctuc

SEQ ID NO: 72912 - DNA, 17 bp, Artificial Sequence
  Synthetic
gccuaggcccacgtuct

SEQ ID NO: 72913 - DNA, 17 bp, Artificial Sequence
  Synthetic
ggcccgagucgagctuc

SEQ ID NO: 72914 - DNA, 18 bp, Artificial Sequence
  Synthetic
cagcuccgagtccaugct

SEQ ID NO: 72915 - DNA, 17 bp, Artificial Sequence
  Synthetic
cggccgacggugactuc

SEQ ID NO: 72916 - DNA, 23 bp, Artificial Sequence
  Synthetic
tggtgtttcacutgctcagtuct

SEQ ID NO: 72917 - DNA, 29 bp, Artificial Sequence
  Synthetic
agagttaagacaagcuccaaagaaagtut

SEQ ID NO: 72918 - DNA, 28 bp, Artificial Sequence
  Synthetic
cctgtagauctttcacattuggaaaagg

SEQ ID NO: 72919 - DNA, 25 bp, Artificial Sequence
  Synthetic
tgttgtttaagauggagctctccug

SEQ ID NO: 72920 - DNA, 28 bp, Artificial Sequence
  Synthetic
cggtatttgccauctttaagactgttuc

SEQ ID NO: 72921 - DNA, 25 bp, Artificial Sequence
  Synthetic
agataccggauaatgactcagugct

SEQ ID NO: 72922 - DNA, 28 bp, Artificial Sequence
  Synthetic
aacaatcaagcuttgaagataguggact

SEQ ID NO: 72923 - DNA, 28 bp, Artificial Sequence
  Synthetic
catatttgctcaggcutgttttacacut

SEQ ID NO: 72924 - DNA, 21 bp, Artificial Sequence
  Synthetic
tgtctucaggctgatgtugcc

SEQ ID NO: 72925 - DNA, 22 bp, Artificial Sequence
  Synthetic
agttcgcacccucaacgtatuc

SEQ ID NO: 72926 - DNA, 27 bp, Artificial Sequence
  Synthetic
ttacauctccatgaguaggaagaaggt

SEQ ID NO: 72927 - DNA, 26 bp, Artificial Sequence
  Synthetic
ccatatuacacagcccgagaacuaat

SEQ ID NO: 72928 - DNA, 25 bp, Artificial Sequence
  Synthetic
ggcaaacaaccagauttgaaaugga

SEQ ID NO: 72929 - DNA, 22 bp, Artificial Sequence
  Synthetic
aactggcutgaactugacggat

SEQ ID NO: 72930 - DNA, 19 bp, Artificial Sequence
  Synthetic
cgggagcccccgutctaua

SEQ ID NO: 72931 - DNA, 23 bp, Artificial Sequence
  Synthetic
cccctaccugtggatgaagttut

SEQ ID NO: 72932 - DNA, 24 bp, Artificial Sequence
  Synthetic
ttgctcgtgcuggtttctatuaca

SEQ ID NO: 72933 - DNA, 27 bp, Artificial Sequence
  Synthetic
gtagcttccaagutgttaacggaatut

SEQ ID NO: 72934 - DNA, 26 bp, Artificial Sequence
  Synthetic
gaatuaaaggacaggagttcauccgt

SEQ ID NO: 72935 - DNA, 28 bp, Artificial Sequence
  Synthetic
ttgtcttttcacucaaatagcactcuct

SEQ ID NO: 72936 - DNA, 28 bp, Artificial Sequence
  Synthetic
gtagggacaaaauatgatgtcagcauct

SEQ ID NO: 72937 - DNA, 26 bp, Artificial Sequence
  Synthetic
gtgatcagcacacautacagacttuc

SEQ ID NO: 72938 - DNA, 25 bp, Artificial Sequence
  Synthetic
cgtauggaagaaaaacccucacaga

SEQ ID NO: 72939 - DNA, 28 bp, Artificial Sequence
  Synthetic
tggttataaattucaccagcgttguagt

SEQ ID NO: 72940 - DNA, 26 bp, Artificial Sequence
  Synthetic
gaagauctgctctaatugaacgggaa

SEQ ID NO: 72941 - DNA, 23 bp, Artificial Sequence
  Synthetic
ggaggtccccgutaaacctttua

SEQ ID NO: 72942 - DNA, 25 bp, Artificial Sequence
  Synthetic
tcccttggaaaguctgtaatgtgug

SEQ ID NO: 72943 - DNA, 27 bp, Artificial Sequence
  Synthetic
cttgtggcttuaatgatgttccucaaa

SEQ ID NO: 72944 - DNA, 22 bp, Artificial Sequence
  Synthetic
gccauggagtaccuggagaaga

SEQ ID NO: 72945 - DNA, 22 bp, Artificial Sequence
  Synthetic
ccagcacugaggttagaagcug

SEQ ID NO: 72946 - DNA, 27 bp, Artificial Sequence
  Synthetic
attaacacacaucagtggaacttcugt

SEQ ID NO: 72947 - DNA, 26 bp, Artificial Sequence
  Synthetic
aaacgttttucaccttagcatttugt

SEQ ID NO: 72948 - DNA, 25 bp, Artificial Sequence
  Synthetic
gcaauccaaaagaauagcagccaaa

SEQ ID NO: 72949 - DNA, 28 bp, Artificial Sequence
  Synthetic
caccatcuccatatcatugagaccaaat

SEQ ID NO: 72950 - DNA, 25 bp, Artificial Sequence
  Synthetic
cagcccacuctagacttttctucat

SEQ ID NO: 72951 - DNA, 22 bp, Artificial Sequence
  Synthetic
cagtggacutctttgcccugaa

SEQ ID NO: 72952 - DNA, 29 bp, Artificial Sequence
  Synthetic
gcagtctgtcgugcaatatctataagtut

SEQ ID NO: 72953 - DNA, 26 bp, Artificial Sequence
  Synthetic
caggaaaacacgacaugtgaataucc

SEQ ID NO: 72954 - DNA, 26 bp, Artificial Sequence
  Synthetic
ctttgtggaauagcccatgaagagua

SEQ ID NO: 72955 - DNA, 27 bp, Artificial Sequence
  Synthetic
cgacagactacuttggttctctttugt

SEQ ID NO: 72956 - DNA, 21 bp, Artificial Sequence
  Synthetic
ccagtgcucctctgtgtcuaa

SEQ ID NO: 72957 - DNA, 23 bp, Artificial Sequence
  Synthetic
tgatctccucattgatgcuggac

SEQ ID NO: 72958 - DNA, 22 bp, Artificial Sequence
  Synthetic
ggccccuttcactcacugaaat

SEQ ID NO: 72959 - DNA, 28 bp, Artificial Sequence
  Synthetic
ggttacataaatuggtccgacaacatuc

SEQ ID NO: 72960 - DNA, 19 bp, Artificial Sequence
  Synthetic
ccagcuacgccggacaaua

SEQ ID NO: 72961 - DNA, 25 bp, Artificial Sequence
  Synthetic
aagatattugagaagcatgcuccga

SEQ ID NO: 72962 - DNA, 24 bp, Artificial Sequence
  Synthetic
ctgtatgccaugacccttaagcua

SEQ ID NO: 72963 - DNA, 21 bp, Artificial Sequence
  Synthetic
agtgggcugaccttuaaccac

SEQ ID NO: 72964 - DNA, 22 bp, Artificial Sequence
  Synthetic
tcacctgagutgtaccttgcug

SEQ ID NO: 72965 - DNA, 25 bp, Artificial Sequence
  Synthetic
tcacccatccautaaagggtcctua

SEQ ID NO: 72966 - DNA, 21 bp, Artificial Sequence
  Synthetic
cctccgcauctcacagaacut

SEQ ID NO: 72967 - DNA, 19 bp, Artificial Sequence
  Synthetic
ctcagcaggauggguggac

SEQ ID NO: 72968 - DNA, 25 bp, Artificial Sequence
  Synthetic
tcactcttggucttatcttgcccua

SEQ ID NO: 72969 - DNA, 28 bp, Artificial Sequence
  Synthetic
tctaccaaagagauaaagggccaauact

SEQ ID NO: 72970 - DNA, 26 bp, Artificial Sequence
  Synthetic
agattcagataccutcactgcagtuc

SEQ ID NO: 72971 - DNA, 26 bp, Artificial Sequence
  Synthetic
ttttctcctcugttttccaaugcaac

SEQ ID NO: 72972 - DNA, 27 bp, Artificial Sequence
  Synthetic
cagattcaacuttcacgtaucaaacca

SEQ ID NO: 72973 - DNA, 17 bp, Artificial Sequence
  Synthetic
ccccucggaccugcaga

SEQ ID NO: 72974 - DNA, 22 bp, Artificial Sequence
  Synthetic
aggacccucgcagacatuaaag

SEQ ID NO: 72975 - DNA, 19 bp, Artificial Sequence
  Synthetic
accaccaucaccactgcug

SEQ ID NO: 72976 - DNA, 19 bp, Artificial Sequence
  Synthetic
cgaugagggagguggcaga

SEQ ID NO: 72977 - DNA, 19 bp, Artificial Sequence
  Synthetic
cctgggtaugctccccaut

SEQ ID NO: 72978 - DNA, 28 bp, Artificial Sequence
  Synthetic
ggcatattuaagaacaggcatctcugat

SEQ ID NO: 72979 - DNA, 30 bp, Artificial Sequence
  Synthetic
tcttaaagactguaagactcatatgucggt

SEQ ID NO: 72980 - DNA, 30 bp, Artificial Sequence
  Synthetic
tttatgaaggagutatgtgtgtguaaaacc

SEQ ID NO: 72981 - DNA, 27 bp, Artificial Sequence
  Synthetic
attgctgttucgaggtcatatgtuact

SEQ ID NO: 72982 - DNA, 23 bp, Artificial Sequence
  Synthetic
aactactgccgccutatcctcua

SEQ ID NO: 72983 - DNA, 21 bp, Artificial Sequence
  Synthetic
tcctagcccauctgtgagucc

SEQ ID NO: 72984 - DNA, 21 bp, Artificial Sequence
  Synthetic
gagccgcagguttcctttcua

SEQ ID NO: 72985 - DNA, 28 bp, Artificial Sequence
  Synthetic
ggtcatcaatctautccatcaggctuaa

SEQ ID NO: 72986 - DNA, 22 bp, Artificial Sequence
  Synthetic
actgcagcaaagacuggttcuc

SEQ ID NO: 72987 - DNA, 22 bp, Artificial Sequence
  Synthetic
gctcugcagcaaatucaaccac

SEQ ID NO: 72988 - DNA, 21 bp, Artificial Sequence
  Synthetic
ctcagcagggcautccagtua

SEQ ID NO: 72989 - DNA, 26 bp, Artificial Sequence
  Synthetic
gctctcagtcutcttctctccuacag

SEQ ID NO: 72990 - DNA, 20 bp, Artificial Sequence
  Synthetic
atccugagcagctugcaagt

SEQ ID NO: 72991 - DNA, 28 bp, Artificial Sequence
  Synthetic
agcatttgacaucatcactgttaccuaa

SEQ ID NO: 72992 - DNA, 23 bp, Artificial Sequence
  Synthetic
ccaaugcagcgaacaatgttcug

SEQ ID NO: 72993 - DNA, 28 bp, Artificial Sequence
  Synthetic
agctgctgaaaaugtaactttgtaucct

SEQ ID NO: 72994 - DNA, 27 bp, Artificial Sequence
  Synthetic
tggattacaggugcttatgaaucaaca

SEQ ID NO: 72995 - DNA, 28 bp, Artificial Sequence
  Synthetic
acggcaatautacgaaatccugaagaat

SEQ ID NO: 72996 - DNA, 28 bp, Artificial Sequence
  Synthetic
ggatttcguaatattgccgucaaagaaa

SEQ ID NO: 72997 - DNA, 26 bp, Artificial Sequence
  Synthetic
ggctttttgugagaacacaggtttua

SEQ ID NO: 72998 - DNA, 25 bp, Artificial Sequence
  Synthetic
gaattacattccucccacaccctut

SEQ ID NO: 72999 - DNA, 23 bp, Artificial Sequence
  Synthetic
caatttctcutttgcctcugcga

SEQ ID NO: 73000 - DNA, 23 bp, Artificial Sequence
  Synthetic
ggatactcuctgtcccucccaaa

SEQ ID NO: 73001 - DNA, 23 bp, Artificial Sequence
  Synthetic
gattccttgucttggtcuccact

SEQ ID NO: 73002 - DNA, 17 bp, Artificial Sequence
  Synthetic
gtcccaccuccguccaa

SEQ ID NO: 73003 - DNA, 17 bp, Artificial Sequence
  Synthetic
gttgccucgggctcucc

SEQ ID NO: 73004 - DNA, 26 bp, Artificial Sequence
  Synthetic
gattgtcttttucctcttgcccttut

SEQ ID NO: 73005 - DNA, 28 bp, Artificial Sequence
  Synthetic
ccattccagcauatcgtcttagtguaat

SEQ ID NO: 73006 - DNA, 26 bp, Artificial Sequence
  Synthetic
cccaattatugaagacagtcgugaag

SEQ ID NO: 73007 - DNA, 28 bp, Artificial Sequence
  Synthetic
ttcactaggcauggatatagtggtaugt

SEQ ID NO: 73008 - DNA, 20 bp, Artificial Sequence
  Synthetic
gccttccutctcccugacaa

SEQ ID NO: 73009 - DNA, 18 bp, Artificial Sequence
  Synthetic
gtcctgcggcuctcaguc

SEQ ID NO: 73010 - DNA, 25 bp, Artificial Sequence
  Synthetic
gacttaagccaagutagggaucacc

SEQ ID NO: 73011 - DNA, 27 bp, Artificial Sequence
  Synthetic
gggatgcaatgcucttactcagtttua

SEQ ID NO: 73012 - DNA, 24 bp, Artificial Sequence
  Synthetic
ttttcacugaagaagcaaacugcc

SEQ ID NO: 73013 - DNA, 28 bp, Artificial Sequence
  Synthetic
acacttctttguccatacacacttuaca

SEQ ID NO: 73014 - DNA, 28 bp, Artificial Sequence
  Synthetic
cagaattatugcaagtggactgugaaat

SEQ ID NO: 73015 - DNA, 25 bp, Artificial Sequence
  Synthetic
aacataccttgutggctacatcucc

SEQ ID NO: 73016 - DNA, 20 bp, Artificial Sequence
  Synthetic
gtggaggcacauctcugcat

SEQ ID NO: 73017 - DNA, 22 bp, Artificial Sequence
  Synthetic
ccaggtgcugaggctgttttua

SEQ ID NO: 73018 - DNA, 27 bp, Artificial Sequence
  Synthetic
aautgcggagacuacaagaagaaagaa

SEQ ID NO: 73019 - DNA, 28 bp, Artificial Sequence
  Synthetic
ctgtaccctugattgtactccuacaaat

SEQ ID NO: 73020 - DNA, 27 bp, Artificial Sequence
  Synthetic
gtagtatgcaaagautgtgctcctuct

SEQ ID NO: 73021 - DNA, 33 bp, Artificial Sequence
  Synthetic
aattaattctaaagttuagacgatgttttggut

SEQ ID NO: 73022 - DNA, 22 bp, Artificial Sequence
  Synthetic
tgcatgttugagccacttccua

SEQ ID NO: 73023 - DNA, 28 bp, Artificial Sequence
  Synthetic
cttcttctgaggaacautcactctguaa

SEQ ID NO: 73024 - DNA, 24 bp, Artificial Sequence
  Synthetic
tgaattcagugggttttctauggg

SEQ ID NO: 73025 - DNA, 27 bp, Artificial Sequence
  Synthetic
tttccagttugtcttcaguaacaccat

SEQ ID NO: 73026 - DNA, 26 bp, Artificial Sequence
  Synthetic
attttgctgugtagtgaatuaaggct

SEQ ID NO: 73027 - DNA, 19 bp, Artificial Sequence
  Synthetic
tcggccaccgutgaaugat

SEQ ID NO: 73028 - DNA, 26 bp, Artificial Sequence
  Synthetic
tgatcctgaggutttgcttcaaatug

SEQ ID NO: 73029 - DNA, 22 bp, Artificial Sequence
  Synthetic
cgcgucgcttcacatuaaacag

SEQ ID NO: 73030 - DNA, 28 bp, Artificial Sequence
  Synthetic
gcaatcagacuccacaaattcttgtuaa

SEQ ID NO: 73031 - DNA, 28 bp, Artificial Sequence
  Synthetic
ctgaaatatgtcuggattccatguccaa

SEQ ID NO: 73032 - DNA, 25 bp, Artificial Sequence
  Synthetic
gcaagaactacaugctgctgaaaut

SEQ ID NO: 73033 - DNA, 23 bp, Artificial Sequence
  Synthetic
cagacactguatcactgcctuca

SEQ ID NO: 73034 - DNA, 21 bp, Artificial Sequence
  Synthetic
cacctgtgcuacctcactugt

SEQ ID NO: 73035 - DNA, 26 bp, Artificial Sequence
  Synthetic
ccatcatagaacuccttgtggatcuc

SEQ ID NO: 73036 - DNA, 20 bp, Artificial Sequence
  Synthetic
cctggccgagutggttcauc

SEQ ID NO: 73037 - DNA, 20 bp, Artificial Sequence
  Synthetic
tgatgtccgugcgttccauc

SEQ ID NO: 73038 - DNA, 27 bp, Artificial Sequence
  Synthetic
agttacugaaagaggaatgtgguacct

SEQ ID NO: 73039 - DNA, 25 bp, Artificial Sequence
  Synthetic
tgagttgcatuttggtttgtcauct

SEQ ID NO: 73040 - DNA, 24 bp, Artificial Sequence
  Synthetic
cttcttcaaagugcctgagctcua

SEQ ID NO: 73041 - DNA, 18 bp, Artificial Sequence
  Synthetic
cggcccugggttacucac

SEQ ID NO: 73042 - DNA, 25 bp, Artificial Sequence
  Synthetic
gggagaaagaagaaauccacctugt

SEQ ID NO: 73043 - DNA, 24 bp, Artificial Sequence
  Synthetic
tctgagtcugaggaactgtcugag

SEQ ID NO: 73044 - DNA, 22 bp, Artificial Sequence
  Synthetic
cucccctcauccagcaagaaaa

SEQ ID NO: 73045 - DNA, 23 bp, Artificial Sequence
  Synthetic
ggcttugaactatgcugaagcag

SEQ ID NO: 73046 - DNA, 22 bp, Artificial Sequence
  Synthetic
agagacucccaaagctgcttut

SEQ ID NO: 73047 - DNA, 19 bp, Artificial Sequence
  Synthetic
ctctgcccauccgacugag

SEQ ID NO: 73048 - DNA, 21 bp, Artificial Sequence
  Synthetic
gtgucccccaacuacgacaag

SEQ ID NO: 73049 - DNA, 22 bp, Artificial Sequence
  Synthetic
cagcctaccutcaaggtctuca

SEQ ID NO: 73050 - DNA, 22 bp, Artificial Sequence
  Synthetic
cutgcccagttucgacaaagaa

SEQ ID NO: 73051 - DNA, 28 bp, Artificial Sequence
  Synthetic
ttgatcaatatucaaatcatggtgugct

SEQ ID NO: 73052 - DNA, 25 bp, Artificial Sequence
  Synthetic
acgtcaagcaguaaacatgatgugt

SEQ ID NO: 73053 - DNA, 28 bp, Artificial Sequence
  Synthetic
ctcatgactggutatttctccactaugt

SEQ ID NO: 73054 - DNA, 22 bp, Artificial Sequence
  Synthetic
ggaagaaauacagccugacggt

SEQ ID NO: 73055 - DNA, 22 bp, Artificial Sequence
  Synthetic
ggagguagactuccaggcagat

SEQ ID NO: 73056 - DNA, 27 bp, Artificial Sequence
  Synthetic
catttccacacucgataaacgacaaug

SEQ ID NO: 73057 - DNA, 28 bp, Artificial Sequence
  Synthetic
cagagttgggttuctcaaataaggtgua

SEQ ID NO: 73058 - DNA, 28 bp, Artificial Sequence
  Synthetic
agttctcagagaguagaatcaactguga

SEQ ID NO: 73059 - DNA, 27 bp, Artificial Sequence
  Synthetic
gttatgacuactttccaucgagaacca

SEQ ID NO: 73060 - DNA, 18 bp, Artificial Sequence
  Synthetic
ggcuccgccaaatgguga

SEQ ID NO: 73061 - DNA, 23 bp, Artificial Sequence
  Synthetic
acgaacgcguttgaaaagttuct

SEQ ID NO: 73062 - DNA, 22 bp, Artificial Sequence
  Synthetic
cagagucagaaagcaccaguga

SEQ ID NO: 73063 - DNA, 20 bp, Artificial Sequence
  Synthetic
ctgccauctaagguggccat

SEQ ID NO: 73064 - DNA, 28 bp, Artificial Sequence
  Synthetic
gatcatcaaatgcuctttaatggcctut

SEQ ID NO: 73065 - DNA, 28 bp, Artificial Sequence
  Synthetic
cctgtatcttttaugagcaccatctuca

SEQ ID NO: 73066 - DNA, 19 bp, Artificial Sequence
  Synthetic
cagcccuccacaguccaag

SEQ ID NO: 73067 - DNA, 19 bp, Artificial Sequence
  Synthetic
cugacggccucaagaagca

SEQ ID NO: 73068 - DNA, 22 bp, Artificial Sequence
  Synthetic
ggaagtccauctcctcctccuc

SEQ ID NO: 73069 - DNA, 21 bp, Artificial Sequence
  Synthetic
ggtggagcucctgatctggua

SEQ ID NO: 73070 - DNA, 27 bp, Artificial Sequence
  Synthetic
tgtccccatuggtgaatttcttgtuaa

SEQ ID NO: 73071 - DNA, 23 bp, Artificial Sequence
  Synthetic
acagctgucagctttaauaagcc

SEQ ID NO: 73072 - DNA, 27 bp, Artificial Sequence
  Synthetic
tggaaaaacacuggaagattacugact

SEQ ID NO: 73073 - DNA, 28 bp, Artificial Sequence
  Synthetic
ccaggatagagauccaagatttucagaa

SEQ ID NO: 73074 - DNA, 26 bp, Artificial Sequence
  Synthetic
agugttccaaagtuaaagaagggcat

SEQ ID NO: 73075 - DNA, 20 bp, Artificial Sequence
  Synthetic
gcggtcaguatggagaggut

SEQ ID NO: 73076 - DNA, 28 bp, Artificial Sequence
  Synthetic
tcattttggaagutcactggtctaugaa

SEQ ID NO: 73077 - DNA, 24 bp, Artificial Sequence
  Synthetic
gttgctttaaucacatgcgaugga

SEQ ID NO: 73078 - DNA, 23 bp, Artificial Sequence
  Synthetic
cctgctccuaatccacctcatut

SEQ ID NO: 73079 - DNA, 28 bp, Artificial Sequence
  Synthetic
tcatcatgtatacutacagggctttugg

SEQ ID NO: 73080 - DNA, 28 bp, Artificial Sequence
  Synthetic
tgtattataggcgucattgatggctaug

SEQ ID NO: 73081 - DNA, 26 bp, Artificial Sequence
  Synthetic
ctccaattctugcaacctgttactug

SEQ ID NO: 73082 - DNA, 26 bp, Artificial Sequence
  Synthetic
catacccgcautgatgttgtgauaga

SEQ ID NO: 73083 - DNA, 20 bp, Artificial Sequence
  Synthetic
tggtucagcctgugacaacc

SEQ ID NO: 73084 - DNA, 22 bp, Artificial Sequence
  Synthetic
cgccgccuctttccaaaauaaa

SEQ ID NO: 73085 - DNA, 18 bp, Artificial Sequence
  Synthetic
ccaggcuctgtucaacgg

SEQ ID NO: 73086 - DNA, 20 bp, Artificial Sequence
  Synthetic
cactcaccucctccggaaug

SEQ ID NO: 73087 - DNA, 19 bp, Artificial Sequence
  Synthetic
gccccggcuctcggttaua

SEQ ID NO: 73088 - DNA, 21 bp, Artificial Sequence
  Synthetic
cttgctgtgutctggtccugt

SEQ ID NO: 73089 - DNA, 27 bp, Artificial Sequence
  Synthetic
agtgttctccgguactagttagaaugt

SEQ ID NO: 73090 - DNA, 24 bp, Artificial Sequence
  Synthetic
gtcttgagcaggagutgttatgug

SEQ ID NO: 73091 - DNA, 27 bp, Artificial Sequence
  Synthetic
cagaggactguttcatacaaattcuga

SEQ ID NO: 73092 - DNA, 23 bp, Artificial Sequence
  Synthetic
ggtccuccatagacucagggaaa

SEQ ID NO: 73093 - DNA, 20 bp, Artificial Sequence
  Synthetic
gtgacgatgutgtgcacguc

SEQ ID NO: 73094 - DNA, 27 bp, Artificial Sequence
  Synthetic
tgcagaacataatuattgatggcccut

SEQ ID NO: 73095 - DNA, 28 bp, Artificial Sequence
  Synthetic
gtgcttaggatguggtttatactaggut

SEQ ID NO: 73096 - DNA, 29 bp, Artificial Sequence
  Synthetic
agtaattttgcttcuttaggacaccaugt

SEQ ID NO: 73097 - DNA, 20 bp, Artificial Sequence
  Synthetic
cttctccucagacgctugct

SEQ ID NO: 73098 - DNA, 27 bp, Artificial Sequence
  Synthetic
gaaattgcacacugaaattaggacgut

SEQ ID NO: 73099 - DNA, 28 bp, Artificial Sequence
  Synthetic
ctatgaaacccucatgtuaagcaacaag

SEQ ID NO: 73100 - DNA, 25 bp, Artificial Sequence
  Synthetic
ggagatccuctacaaagggtucaga

SEQ ID NO: 73101 - DNA, 26 bp, Artificial Sequence
  Synthetic
agcccgaattucttcaaaggagaaut

SEQ ID NO: 73102 - DNA, 21 bp, Artificial Sequence
  Synthetic
ctgtcctgguacatggtguca

SEQ ID NO: 73103 - DNA, 20 bp, Artificial Sequence
  Synthetic
gaggacggccugatcacauc

SEQ ID NO: 73104 - DNA, 25 bp, Artificial Sequence
  Synthetic
ggagaagattuatgcaggaguaggg

SEQ ID NO: 73105 - DNA, 22 bp, Artificial Sequence
  Synthetic
tcagcucaacctucacacaact

SEQ ID NO: 73106 - DNA, 24 bp, Artificial Sequence
  Synthetic
gtatttctuccagacgccaacgua

SEQ ID NO: 73107 - DNA, 20 bp, Artificial Sequence
  Synthetic
tgaugggctggugacaacat

SEQ ID NO: 73108 - DNA, 20 bp, Artificial Sequence
  Synthetic
gccggatguagaacgagucc

SEQ ID NO: 73109 - DNA, 21 bp, Artificial Sequence
  Synthetic
gtggugaggaaagctgctgua

SEQ ID NO: 73110 - DNA, 21 bp, Artificial Sequence
  Synthetic
acttgggtgcugggtagtgua

SEQ ID NO: 73111 - DNA, 26 bp, Artificial Sequence
  Synthetic
agcttttctccutttcttaccaggug

SEQ ID NO: 73112 - DNA, 22 bp, Artificial Sequence
  Synthetic
gctgaagaaaccugtagcucct

SEQ ID NO: 73113 - DNA, 21 bp, Artificial Sequence
  Synthetic
gacaccagcugcttgacuact

SEQ ID NO: 73114 - DNA, 21 bp, Artificial Sequence
  Synthetic
gatgcaguccacatagccuga

SEQ ID NO: 73115 - DNA, 25 bp, Artificial Sequence
  Synthetic
cucagcagacaaaaucagcaaagag

SEQ ID NO: 73116 - DNA, 27 bp, Artificial Sequence
  Synthetic
ttgattttctcguaccaggatcugaag

SEQ ID NO: 73117 - DNA, 25 bp, Artificial Sequence
  Synthetic
ctgggcatcauatagcattctcugt

SEQ ID NO: 73118 - DNA, 22 bp, Artificial Sequence
  Synthetic
gacagtaggucagcacatucca

SEQ ID NO: 73119 - DNA, 21 bp, Artificial Sequence
  Synthetic
cagtgaugcctccaccucaag

SEQ ID NO: 73120 - DNA, 25 bp, Artificial Sequence
  Synthetic
acuactgaacgaaucccagcaaaaa

SEQ ID NO: 73121 - DNA, 21 bp, Artificial Sequence
  Synthetic
ccgctcccuatctaggguact

SEQ ID NO: 73122 - DNA, 22 bp, Artificial Sequence
  Synthetic
ctccccucagaaatgtgugcat

SEQ ID NO: 73123 - DNA, 21 bp, Artificial Sequence
  Synthetic
gagcaaacuggaacucagcct

SEQ ID NO: 73124 - DNA, 22 bp, Artificial Sequence
  Synthetic
gagauggaagatgugggcagag

SEQ ID NO: 73125 - DNA, 22 bp, Artificial Sequence
  Synthetic
tccatctgcucagacccuacag

SEQ ID NO: 73126 - DNA, 22 bp, Artificial Sequence
  Synthetic
gctcguaagcccagtgtcttut

SEQ ID NO: 73127 - DNA, 20 bp, Artificial Sequence
  Synthetic
gaauctggugccacccaagt

SEQ ID NO: 73128 - DNA, 26 bp, Artificial Sequence
  Synthetic
agaaagttcgaautcgggaaaugagt

SEQ ID NO: 73129 - DNA, 24 bp, Artificial Sequence
  Synthetic
cgactgtgttuttcctctagcugt

SEQ ID NO: 73130 - DNA, 23 bp, Artificial Sequence
  Synthetic
gacctacugaaagagcugcagaa

SEQ ID NO: 73131 - DNA, 22 bp, Artificial Sequence
  Synthetic
ctgcagugttttcctgugaacc

SEQ ID NO: 73132 - DNA, 21 bp, Artificial Sequence
  Synthetic
cgatgaagcagagcugaggut

SEQ ID NO: 73133 - DNA, 17 bp, Artificial Sequence
  Synthetic
gcaatucgcgccuccca

SEQ ID NO: 73134 - DNA, 22 bp, Artificial Sequence
  Synthetic
ccagucccgaagatcuggaaga

SEQ ID NO: 73135 - DNA, 21 bp, Artificial Sequence
  Synthetic
agttcaatcucagcgagcugt

SEQ ID NO: 73136 - DNA, 20 bp, Artificial Sequence
  Synthetic
ttggcgaauccaccaacuga

SEQ ID NO: 73137 - DNA, 19 bp, Artificial Sequence
  Synthetic
gctguccagggtgcugaag

SEQ ID NO: 73138 - DNA, 19 bp, Artificial Sequence
  Synthetic
gcuccagcaccaactgcut

SEQ ID NO: 73139 - DNA, 18 bp, Artificial Sequence
  Synthetic
ggctcgcuagctcuggac

SEQ ID NO: 73140 - DNA, 18 bp, Artificial Sequence
  Synthetic
cctucagcacccuggaca

SEQ ID NO: 73141 - DNA, 19 bp, Artificial Sequence
  Synthetic
ctactgcugccaccaucct

SEQ ID NO: 73142 - DNA, 18 bp, Artificial Sequence
  Synthetic
gcaguccagagcuagcga

SEQ ID NO: 73143 - DNA, 19 bp, Artificial Sequence
  Synthetic
cgggagccacucagcuact

SEQ ID NO: 73144 - DNA, 26 bp, Artificial Sequence
  Synthetic
gauttgattgatuacagcacgggaaa

SEQ ID NO: 73145 - DNA, 28 bp, Artificial Sequence
  Synthetic
cttaccactggagcauatttctctaguc

SEQ ID NO: 73146 - DNA, 28 bp, Artificial Sequence
  Synthetic
cattctgatgcutaccagacuagagaaa

SEQ ID NO: 73147 - DNA, 28 bp, Artificial Sequence
  Synthetic
accccagtctgauccagaatctaaaaua

SEQ ID NO: 73148 - DNA, 23 bp, Artificial Sequence
  Synthetic
catccatctgucctgttctgucc

SEQ ID NO: 73149 - DNA, 19 bp, Artificial Sequence
  Synthetic
gcatctcccugcccatguc

SEQ ID NO: 73150 - DNA, 27 bp, Artificial Sequence
  Synthetic
caccacattuaaaagcgtctgaactua

SEQ ID NO: 73151 - DNA, 28 bp, Artificial Sequence
  Synthetic
tgtgtgtugtttgttgttuagaaagcag

SEQ ID NO: 73152 - DNA, 23 bp, Artificial Sequence
  Synthetic
ctgagccacucttctcttcccua

SEQ ID NO: 73153 - DNA, 23 bp, Artificial Sequence
  Synthetic
agatggacugggaccttuagact

SEQ ID NO: 73154 - DNA, 22 bp, Artificial Sequence
  Synthetic
gcaagagacagagcaucctgut

SEQ ID NO: 73155 - DNA, 21 bp, Artificial Sequence
  Synthetic
caaggacaccucaggaaggut

SEQ ID NO: 73156 - DNA, 26 bp, Artificial Sequence
  Synthetic
gggaatgtttucagaattgttgugag

SEQ ID NO: 73157 - DNA, 27 bp, Artificial Sequence
  Synthetic
acaaagaugttctguagagccaaagat

SEQ ID NO: 73158 - DNA, 32 bp, Artificial Sequence; identical to SEQ ID NO: 61476
  Synthetic

SEQ ID NO: 73159 - DNA, 26 bp, Artificial Sequence
  Synthetic
gcaatggactucacctcatcaaaaug

SEQ ID NO: 73160 - DNA, 21 bp, Artificial Sequence
  Synthetic
gagactgucaagaggugcaca

SEQ ID NO: 73161 - DNA, 22 bp, Artificial Sequence
  Synthetic
tctggaagaccugttgcaugac

SEQ ID NO: 73162 - DNA, 28 bp, Artificial Sequence
  Synthetic
ggttttgatuccacatctggtgatuaga

SEQ ID NO: 73163 - DNA, 29 bp, Artificial Sequence
  Synthetic
gtaccctcauaggcaaaauaaggaagaat

SEQ ID NO: 73164 - DNA, 28 bp, Artificial Sequence
  Synthetic
acagactgcttuccaaagattcttguaa

SEQ ID NO: 73165 - DNA, 24 bp, Artificial Sequence
  Synthetic
attgaagccauacctgtttuccca

SEQ ID NO: 73166 - DNA, 19 bp, Artificial Sequence
  Synthetic
gccgaggaguccagaguga

SEQ ID NO: 73167 - DNA, 18 bp, Artificial Sequence
  Synthetic
gggctttccuccagccut

SEQ ID NO: 73168 - DNA, 17 bp, Artificial Sequence
  Synthetic
cctccugcgtuccccat

SEQ ID NO: 73169 - DNA, 20 bp, Artificial Sequence
  Synthetic
gccggctuctcacttttgug

SEQ ID NO: 73170 - DNA, 23 bp, Artificial Sequence
  Synthetic
gtgatgaccugagacaagaugct

SEQ ID NO: 73171 - DNA, 28 bp, Artificial Sequence
  Synthetic
cccaaccaaauggcatcttttatatgut

SEQ ID NO: 73172 - DNA, 22 bp, Artificial Sequence
  Synthetic
gggaaattguccaggcucaaac

SEQ ID NO: 73173 - DNA, 19 bp, Artificial Sequence
  Synthetic
cttggcagcgucactgtuc

SEQ ID NO: 73174 - DNA, 26 bp, Artificial Sequence
  Synthetic
gttatcaagccuccctgaaactauca

SEQ ID NO: 73175 - DNA, 21 bp, Artificial Sequence
  Synthetic
cutttgtgcttcugggcagag

SEQ ID NO: 73176 - DNA, 20 bp, Artificial Sequence
  Synthetic
tgccucgccatctcuaggaa

SEQ ID NO: 73177 - DNA, 22 bp, Artificial Sequence
  Synthetic
tccagtttgtugatggcctcuc

SEQ ID NO: 73178 - DNA, 21 bp, Artificial Sequence
  Synthetic
gagttgtcagcucttccccut

SEQ ID NO: 73179 - DNA, 20 bp, Artificial Sequence
  Synthetic
gcgcugaacaagttggtcut

SEQ ID NO: 73180 - DNA, 22 bp, Artificial Sequence
  Synthetic
aaaagccacgaguctggtugat

SEQ ID NO: 73181 - DNA, 19 bp, Artificial Sequence
  Synthetic
ggatgctgauggcaacgug

SEQ ID NO: 73182 - DNA, 24 bp, Artificial Sequence
  Synthetic
agacagtttgacucgtccacatut

SEQ ID NO: 73183 - DNA, 21 bp, Artificial Sequence
  Synthetic
aagacctcaucagcagctucc

SEQ ID NO: 73184 - DNA, 23 bp, Artificial Sequence
  Synthetic
cccaggcuggtgaaaaagaauga

SEQ ID NO: 73185 - DNA, 22 bp, Artificial Sequence
  Synthetic
ctttccagcutcttccttgugg

SEQ ID NO: 73186 - DNA, 20 bp, Artificial Sequence
  Synthetic
ccacuccaaagccacagucc

SEQ ID NO: 73187 - DNA, 24 bp, Artificial Sequence
  Synthetic
agagacacucgggttgataugaga

SEQ ID NO: 73188 - DNA, 18 bp, Artificial Sequence
  Synthetic
cgtctuccaccgcctuca

SEQ ID NO: 73189 - DNA, 17 bp, Artificial Sequence
  Synthetic
ctggccauctgcucgga

SEQ ID NO: 73190 - DNA, 20 bp, Artificial Sequence
  Synthetic
cgcccaaccugacuccaaaa

SEQ ID NO: 73191 - DNA, 18 bp, Artificial Sequence
  Synthetic
tgagccugctttgcuggt

SEQ ID NO: 73192 - DNA, 20 bp, Artificial Sequence
  Synthetic
tggaaagggcagugcctuag

SEQ ID NO: 73193 - DNA, 21 bp, Artificial Sequence
  Synthetic
cgactcagaggagugcttgug

SEQ ID NO: 73194 - DNA, 23 bp, Artificial Sequence
  Synthetic
agttgactugggctctctttugt

SEQ ID NO: 73195 - DNA, 26 bp, Artificial Sequence
  Synthetic
agcatcacaaccaugagttuacacat

SEQ ID NO: 73196 - DNA, 21 bp, Artificial Sequence
  Synthetic
cgccutcuccccaaagacaaa

SEQ ID NO: 73197 - DNA, 20 bp, Artificial Sequence
  Synthetic
ctgatgtcucggccctctuc

SEQ ID NO: 73198 - DNA, 19 bp, Artificial Sequence
  Synthetic
caaacgcagcagcucctuc

SEQ ID NO: 73199 - DNA, 18 bp, Artificial Sequence
  Synthetic
gccccatugctgggctut

SEQ ID NO: 73200 - DNA, 25 bp, Artificial Sequence
  Synthetic
caaatgaggaacaaguttgcctucc

SEQ ID NO: 73201 - DNA, 22 bp, Artificial Sequence
  Synthetic
gctgctaccuctgcactatguc

SEQ ID NO: 73202 - DNA, 20 bp, Artificial Sequence
  Synthetic
cttucaccccctuggacaca

SEQ ID NO: 73203 - DNA, 17 bp, Artificial Sequence
  Synthetic
ctggucagcgtgcugga

SEQ ID NO: 73204 - DNA, 20 bp, Artificial Sequence
  Synthetic
tcuccccacctguggaagaa

SEQ ID NO: 73205 - DNA, 19 bp, Artificial Sequence
  Synthetic
tgactgaccuccacuccgt

SEQ ID NO: 73206 - DNA, 22 bp, Artificial Sequence
  Synthetic
ccaccatucagcttggtuaaca

SEQ ID NO: 73207 - DNA, 28 bp, Artificial Sequence
  Synthetic
tctttgtacctcuttgttccttcttuca

SEQ ID NO: 73208 - DNA, 24 bp, Artificial Sequence
  Synthetic
ctcagttcggugaaggaaaucagt

SEQ ID NO: 73209 - DNA, 21 bp, Artificial Sequence
  Synthetic
tcactagucccttgucagcca

SEQ ID NO: 73210 - DNA, 22 bp, Artificial Sequence
  Synthetic
gccacgaugacttccttctuga

SEQ ID NO: 73211 - DNA, 21 bp, Artificial Sequence
  Synthetic
gcccauagaccaugaacgagt

SEQ ID NO: 73212 - DNA, 28 bp, Artificial Sequence
  Synthetic
aacaaaattucacgtcacauacaaacca

SEQ ID NO: 73213 - DNA, 22 bp, Artificial Sequence
  Synthetic
cctgcaaggugtggagtuacag

SEQ ID NO: 73214 - DNA, 21 bp, Artificial Sequence
  Synthetic
catggcugaaccagtcuggat

SEQ ID NO: 73215 - DNA, 24 bp, Artificial Sequence
  Synthetic
aacattgttugttggagaguccca

SEQ ID NO: 73216 - DNA, 21 bp, Artificial Sequence
  Synthetic
ccagcagcutcaggtacucaa

SEQ ID NO: 73217 - DNA, 19 bp, Artificial Sequence
  Synthetic
gtgaaguggacgcctcucc

SEQ ID NO: 73218 - DNA, 24 bp, Artificial Sequence
  Synthetic
gtgctttctutagactgtcucgga

SEQ ID NO: 73219 - DNA, 28 bp, Artificial Sequence
  Synthetic
gttgtatctgaccuagtaacccattuga

SEQ ID NO: 73220 - DNA, 20 bp, Artificial Sequence
  Synthetic
cctcccgutttgcctgtuga

SEQ ID NO: 73221 - DNA, 27 bp, Artificial Sequence
  Synthetic
gttttaauaatttccccuacggcagga

SEQ ID NO: 73222 - DNA, 27 bp, Artificial Sequence
  Synthetic
tgtctgttcccuaatacagtcactuca

SEQ ID NO: 73223 - DNA, 24 bp, Artificial Sequence
  Synthetic
cttgttctucaagctgctgtugat

SEQ ID NO: 73224 - DNA, 23 bp, Artificial Sequence
  Synthetic
agccaaacaacagaucctcacuc

SEQ ID NO: 73225 - DNA, 27 bp, Artificial Sequence
  Synthetic
gcttctacaagtuagctgacttcctua

SEQ ID NO: 73226 - DNA, 23 bp, Artificial Sequence
  Synthetic
ggctaagcttuttccacttccug

SEQ ID NO: 73227 - DNA, 28 bp, Artificial Sequence
  Synthetic
caatctcactttuccttgctgttctaut

SEQ ID NO: 73228 - DNA, 29 bp, Artificial Sequence
  Synthetic
ccaagaucaaagtacactguaaaaagcaa

SEQ ID NO: 73229 - DNA, 27 bp, Artificial Sequence
  Synthetic
cugcatcatatttcucaaggaaccaat

SEQ ID NO: 73230 - DNA, 22 bp, Artificial Sequence
  Synthetic
agcagaagcaguctcaaaugct

SEQ ID NO: 73231 - DNA, 23 bp, Artificial Sequence
  Synthetic
agtttgtgcaagcucactctuca

SEQ ID NO: 73232 - DNA, 27 bp, Artificial Sequence
  Synthetic
gtgcaggagaaaguatcactctgttua

SEQ ID NO: 73233 - DNA, 28 bp, Artificial Sequence
  Synthetic
aagaaaatcttaccutggtacagtugct

SEQ ID NO: 73234 - DNA, 24 bp, Artificial Sequence
  Synthetic
gaaagcugaaattgtugccaaagg

SEQ ID NO: 73235 - DNA, 21 bp, Artificial Sequence
  Synthetic
gagaccucagcaugcagaact

SEQ ID NO: 73236 - DNA, 30 bp, Artificial Sequence; identical to SEQ ID NO: 68774
  Synthetic

SEQ ID NO: 73237 - DNA, 25 bp, Artificial Sequence
  Synthetic
gcatcagattccuttatggcaaguc

SEQ ID NO: 73238 - DNA, 26 bp, Artificial Sequence
  Synthetic
tgttccuaggatgacauggagaaact

SEQ ID NO: 73239 - DNA, 28 bp, Artificial Sequence
  Synthetic
ttggtcaatttcuacctctttttccugt

SEQ ID NO: 73240 - DNA, 28 bp, Artificial Sequence
  Synthetic
ggaggcacaaaaugtgaaattctucaat

SEQ ID NO: 73241 - DNA, 28 bp, Artificial Sequence
  Synthetic
ggtgatattatgugaagatgatgugcag

SEQ ID NO: 73242 - DNA, 24 bp, Artificial Sequence
  Synthetic
gccaugtctacucaagaccaacat

SEQ ID NO: 73243 - DNA, 27 bp, Artificial Sequence
  Synthetic
tgttgtaatttuaagttgctgcuggag

SEQ ID NO: 73244 - DNA, 22 bp, Artificial Sequence
  Synthetic
gtgggtcugatacagguagcaa

SEQ ID NO: 73245 - DNA, 29 bp, Artificial Sequence
  Synthetic
gcacaaaagaaccautgattuacaaaagg

SEQ ID NO: 73246 - DNA, 21 bp, Artificial Sequence
  Synthetic
cctgcuccccagatgaaacuc

SEQ ID NO: 73247 - DNA, 29 bp, Artificial Sequence
  Synthetic
ggttctgaaugaccagttttaaacaugat

SEQ ID NO: 73248 - DNA, 24 bp, Artificial Sequence
  Synthetic
ctgagaaaauggtggttgcugaac

SEQ ID NO: 73249 - DNA, 26 bp, Artificial Sequence
  Synthetic
gtttttaauaaggaagccuggcacac

SEQ ID NO: 73250 - DNA, 18 bp, Artificial Sequence
  Synthetic
cccacccauccggacuca

SEQ ID NO: 73251 - DNA, 20 bp, Artificial Sequence
  Synthetic
cacccctguaccaaccauca

SEQ ID NO: 73252 - DNA, 18 bp, Artificial Sequence
  Synthetic
ccgacgugacgttugcag

SEQ ID NO: 73253 - DNA, 25 bp, Artificial Sequence
  Synthetic
tgttgaacatcccutccttgtctug

SEQ ID NO: 73254 - DNA, 25 bp, Artificial Sequence
  Synthetic
acagataagttuacagcagcagcut

SEQ ID NO: 73255 - DNA, 23 bp, Artificial Sequence
  Synthetic
gataccttatgutccgctgcuga

SEQ ID NO: 73256 - DNA, 21 bp, Artificial Sequence
  Synthetic
ggattgugggaacgaacugct

SEQ ID NO: 73257 - DNA, 22 bp, Artificial Sequence
  Synthetic
ggccagaaagccugaacattut

SEQ ID NO: 73258 - DNA, 20 bp, Artificial Sequence
  Synthetic
caatcccagcacugctgcua

SEQ ID NO: 73259 - DNA, 19 bp, Artificial Sequence
  Synthetic
cagaagaaggcuccugcca

SEQ ID NO: 73260 - DNA, 20 bp, Artificial Sequence
  Synthetic
cttggcaggagccutctuct

SEQ ID NO: 73261 - DNA, 22 bp, Artificial Sequence
  Synthetic
tcucaggccccaguaaacaaac

SEQ ID NO: 73262 - DNA, 20 bp, Artificial Sequence
  Synthetic
tcttctgcugagcctgctug

SEQ ID NO: 73263 - DNA, 20 bp, Artificial Sequence
  Synthetic
ctgtcucaggccccaguaaa

SEQ ID NO: 73264 - DNA, 28 bp, Artificial Sequence
  Synthetic
ccctaggaauaaaagacatacacgugaa

SEQ ID NO: 73265 - DNA, 27 bp, Artificial Sequence
  Synthetic
aatttgtaggctutcctgttctcauca

SEQ ID NO: 73266 - DNA, 25 bp, Artificial Sequence
  Synthetic
acaggtaaatggutgcagttttgug

SEQ ID NO: 73267 - DNA, 28 bp, Artificial Sequence
  Synthetic
cagaaagaagtacaugcaggaaaaagut

SEQ ID NO: 73268 - DNA, 24 bp, Artificial Sequence
  Synthetic
gttcacctcacugaaacctttgug

SEQ ID NO: 73269 - DNA, 22 bp, Artificial Sequence
  Synthetic
ctatggccugctgtaugagcaa

SEQ ID NO: 73270 - DNA, 28 bp, Artificial Sequence
  Synthetic
ggagaaatggagaaugctttaaggucat

SEQ ID NO: 73271 - DNA, 27 bp, Artificial Sequence
  Synthetic
gtcctagttcutccttgagttttucct

SEQ ID NO: 73272 - DNA, 28 bp, Artificial Sequence
  Synthetic
actcucaaaaggaaaaacucaaggaaga

SEQ ID NO: 73273 - DNA, 25 bp, Artificial Sequence
  Synthetic
tctagctctcugaatctgttcccut

SEQ ID NO: 73274 - DNA, 28 bp, Artificial Sequence
  Synthetic
agctttccaaacugaaggaagattuaga

SEQ ID NO: 73275 - DNA, 27 bp, Artificial Sequence
  Synthetic
tcaaattgtccutttcaaactgcaugg

SEQ ID NO: 73276 - DNA, 28 bp, Artificial Sequence
  Synthetic
agctaaaagattuacagcagtctctugt

SEQ ID NO: 73277 - DNA, 28 bp, Artificial Sequence
  Synthetic
gaacttcttgtucaagtgtaccctttuc

SEQ ID NO: 73278 - DNA, 27 bp, Artificial Sequence
  Synthetic
agaaaaggguacactugaacaagaagt

SEQ ID NO: 73279 - DNA, 28 bp, Artificial Sequence
  Synthetic
caacatgtctucaagggttttctttuca

SEQ ID NO: 73280 - DNA, 25 bp, Artificial Sequence
  Synthetic
gcacaactugaagcagagaauagca

SEQ ID NO: 73281 - DNA, 28 bp, Artificial Sequence
  Synthetic
gtctttggattuggacttaatggaguct

SEQ ID NO: 73282 - DNA, 28 bp, Artificial Sequence
  Synthetic
gaagaccttgtugaagaattgagcttut

SEQ ID NO: 73283 - DNA, 28 bp, Artificial Sequence
  Synthetic
gcagaaacaatcucagctttcaaatcut

SEQ ID NO: 73284 - DNA, 27 bp, Artificial Sequence
  Synthetic
tgaagcacauaagtcccttaguacagt

SEQ ID NO: 73285 - DNA, 28 bp, Artificial Sequence
  Synthetic
cattctgtcuaacacagcattctttuct

SEQ ID NO: 73286 - DNA, 28 bp, Artificial Sequence
  Synthetic
ctcctgtuagccaagaagaaagatugat

SEQ ID NO: 73287 - DNA, 29 bp, Artificial Sequence
  Synthetic
gtgttcctttgcutttcaatctcttcaut

SEQ ID NO: 73288 - DNA, 23 bp, Artificial Sequence
  Synthetic
tcagtgttgguggacaagugaat

SEQ ID NO: 73289 - DNA, 28 bp, Artificial Sequence
  Synthetic
gtatgtuggcaggttaaaaauaaaggct

SEQ ID NO: 73290 - DNA, 28 bp, Artificial Sequence
  Synthetic
ggacctcaaacaacaaugtattcagcua

SEQ ID NO: 73291 - DNA, 27 bp, Artificial Sequence
  Synthetic
tcaucttttacttugagaaggcaagca

SEQ ID NO: 73292 - DNA, 28 bp, Artificial Sequence
  Synthetic
ctatgcacattggaugcacaatagttut

SEQ ID NO: 73293 - DNA, 19 bp, Artificial Sequence
  Synthetic
tgagggutggcaucggaac

SEQ ID NO: 73294 - DNA, 21 bp, Artificial Sequence
  Synthetic
ccutcggtgttuacagaccca

SEQ ID NO: 73295 - DNA, 21 bp, Artificial Sequence
  Synthetic
gctgttuacggcctggaacut

SEQ ID NO: 73296 - DNA, 24 bp, Artificial Sequence
  Synthetic
agaaacatuggaaatgggugaggt

SEQ ID NO: 73297 - DNA, 28 bp, Artificial Sequence
  Synthetic
tcaccatgttuctgtttcaattgtucag

SEQ ID NO: 73298 - DNA, 28 bp, Artificial Sequence
  Synthetic
gcatctgaauccagaaaggaacuagaat

SEQ ID NO: 73299 - DNA, 28 bp, Artificial Sequence
  Synthetic
ttcttcgtgacuaaatagaagctgtgut

SEQ ID NO: 73300 - DNA, 25 bp, Artificial Sequence
  Synthetic
gctgaatuagagaggcugagaacac

SEQ ID NO: 73301 - DNA, 30 bp, Artificial Sequence
  Synthetic
tttcattctgtaaaccauctatctgctgut

SEQ ID NO: 73302 - DNA, 25 bp, Artificial Sequence
  Synthetic
agaatccucgaatttcagguccaaa

SEQ ID NO: 73303 - DNA, 20 bp, Artificial Sequence
  Synthetic
catugggaccccaugaggag

SEQ ID NO: 73304 - DNA, 28 bp, Artificial Sequence
  Synthetic
gcctttcaugaacgtaaaattuggacat

SEQ ID NO: 73305 - DNA, 27 bp, Artificial Sequence
  Synthetic
atcacgtactttutcagcttgacatug

SEQ ID NO: 73306 - DNA, 26 bp, Artificial Sequence
  Synthetic
caatgtcaagcugaaaaagtacguga

SEQ ID NO: 73307 - DNA, 26 bp, Artificial Sequence
  Synthetic
atgcttggtttugctgtcttaaaucc

SEQ ID NO: 73308 - DNA, 18 bp, Artificial Sequence
  Synthetic
gccgugggacccaacaua

SEQ ID NO: 73309 - DNA, 20 bp, Artificial Sequence
  Synthetic
gagggaauggaacctgcugt

SEQ ID NO: 73310 - DNA, 29 bp, Artificial Sequence
  Synthetic
cagtagguttatagagcuggaacaagaaa

SEQ ID NO: 73311 - DNA, 28 bp, Artificial Sequence
  Synthetic
agtatacuagcaaagaacattccacuga

SEQ ID NO: 73312 - DNA, 21 bp, Artificial Sequence
  Synthetic
cagccagacgcugcaatatut

SEQ ID NO: 73313 - DNA, 20 bp, Artificial Sequence
  Synthetic
gatgtccggagutcccacug

SEQ ID NO: 73314 - DNA, 26 bp, Artificial Sequence
  Synthetic
acagggaacacacagaugataagtut

SEQ ID NO: 73315 - DNA, 22 bp, Artificial Sequence
  Synthetic
ccctccugtaaccattguccag

SEQ ID NO: 73316 - DNA, 21 bp, Artificial Sequence
  Synthetic
ggcttcccuccagtacaguct

SEQ ID NO: 73317 - DNA, 20 bp, Artificial Sequence
  Synthetic
gcttgcaaagugctgcauct

SEQ ID NO: 73318 - DNA, 23 bp, Artificial Sequence
  Synthetic
acaggaagagcacagucacttug

SEQ ID NO: 73319 - DNA, 20 bp, Artificial Sequence
  Synthetic
ctcacugacaagctccucgt

SEQ ID NO: 73320 - DNA, 22 bp, Artificial Sequence
  Synthetic
atctgtccugcagaagctgaug

SEQ ID NO: 73321 - DNA, 22 bp, Artificial Sequence
  Synthetic
ttaaccugcaggaagucaaggg

SEQ ID NO: 73322 - DNA, 22 bp, Artificial Sequence
  Synthetic
ggactagcautacctggcaugg

SEQ ID NO: 73323 - DNA, 21 bp, Artificial Sequence
  Synthetic
aggtcccaucatgccttgtug

SEQ ID NO: 73324 - DNA, 20 bp, Artificial Sequence
  Synthetic
gcaaccugccccaaagtuca

SEQ ID NO: 73325 - DNA, 20 bp, Artificial Sequence
  Synthetic
tcggaugacctccugcagat

SEQ ID NO: 73326 - DNA, 24 bp, Artificial Sequence
  Synthetic
cctcctcugaaagcgagcaaauag

SEQ ID NO: 73327 - DNA, 28 bp, Artificial Sequence
  Synthetic
gagtcactttccugagcatcttcattua

SEQ ID NO: 73328 - DNA, 21 bp, Artificial Sequence
  Synthetic
caugagaccaccagccttuct

SEQ ID NO: 73329 - DNA, 21 bp, Artificial Sequence
  Synthetic
ccgatcctugccaggaaucat

SEQ ID NO: 73330 - DNA, 19 bp, Artificial Sequence
  Synthetic
gcccacccugaugagcaat

SEQ ID NO: 73331 - DNA, 22 bp, Artificial Sequence
  Synthetic
gggatcaugatgttctgtuggg

SEQ ID NO: 73332 - DNA, 21 bp, Artificial Sequence
  Synthetic
gccccatugctgaagtgcaua

SEQ ID NO: 73333 - DNA, 26 bp, Artificial Sequence
  Synthetic
catgactattcccaauggctagctut

SEQ ID NO: 73334 - DNA, 17 bp, Artificial Sequence
  Synthetic
cgggaugcggctggaug

SEQ ID NO: 73335 - DNA, 26 bp, Artificial Sequence
  Synthetic
cgataaccgggagauagtgaugaagt

SEQ ID NO: 73336 - DNA, 28 bp, Artificial Sequence
  Synthetic
ttgttactgcauacacattgtgacctua

SEQ ID NO: 73337 - DNA, 27 bp, Artificial Sequence
  Synthetic
gatttcttgcugagagatuccacaaag

SEQ ID NO: 73338 - DNA, 25 bp, Artificial Sequence
  Synthetic
ctctgcgacagcutataatggaugt

SEQ ID NO: 73339 - DNA, 29 bp, Artificial Sequence
  Synthetic
agctggattataacucctcttctttcuct

SEQ ID NO: 73340 - DNA, 28 bp, Artificial Sequence
  Synthetic
ttgacaatagucagtaatgcatguggaa

SEQ ID NO: 73341 - DNA, 27 bp, Artificial Sequence
  Synthetic
cccatagcaaucattttgtgcttugaa

SEQ ID NO: 73342 - DNA, 26 bp, Artificial Sequence
  Synthetic
gcaacatgacugtcctttcaccauat

SEQ ID NO: 73343 - DNA, 23 bp, Artificial Sequence
  Synthetic
ctggattttcugttgctggaugg

SEQ ID NO: 73344 - DNA, 25 bp, Artificial Sequence
  Synthetic
aagcttcguctgattcagatuccat

SEQ ID NO: 73345 - DNA, 26 bp, Artificial Sequence
  Synthetic
ccaatgtactttuctcccctggttut

SEQ ID NO: 73346 - DNA, 26 bp, Artificial Sequence
  Synthetic
acaagtaauaaaggcccacgaatuct

SEQ ID NO: 73347 - DNA, 20 bp, Artificial Sequence
  Synthetic
ggctgttucatttggccuga

SEQ ID NO: 73348 - DNA, 24 bp, Artificial Sequence
  Synthetic
gtgggtcaaguaaagcaccttcua

SEQ ID NO: 73349 - DNA, 29 bp, Artificial Sequence
  Synthetic
tgatgtcctuggaagttgagataattugt

SEQ ID NO: 73350 - DNA, 20 bp, Artificial Sequence
  Synthetic
gccaaaugaaacagccccut

SEQ ID NO: 73351 - DNA, 22 bp, Artificial Sequence
  Synthetic
ggtggctgtutgaccttcacua

SEQ ID NO: 73352 - DNA, 19 bp, Artificial Sequence
  Synthetic
aagagacugagcccccuga

SEQ ID NO: 73353 - DNA, 27 bp, Artificial Sequence
  Synthetic
caacaggtcaucttcagagtcaauact

SEQ ID NO: 73354 - DNA, 20 bp, Artificial Sequence
  Synthetic
ggccauctcagaucccaact

SEQ ID NO: 73355 - DNA, 28 bp, Artificial Sequence
  Synthetic
tcctctcttutaaacagatgucacaagg

SEQ ID NO: 73356 - DNA, 23 bp, Artificial Sequence
  Synthetic
agcatgcucaagaacctcatuca

SEQ ID NO: 73357 - DNA, 28 bp, Artificial Sequence
  Synthetic
gcttctagggcuttttgtttccuaacat

SEQ ID NO: 73358 - DNA, 20 bp, Artificial Sequence
  Synthetic
cgccatuctgggtctuacct

SEQ ID NO: 73359 - DNA, 28 bp, Artificial Sequence
  Synthetic
ccagaacaaaaacccuctaacaagaauc

SEQ ID NO: 73360 - DNA, 28 bp, Artificial Sequence
  Synthetic
gacacctataaacutttccacagcuaca

SEQ ID NO: 73361 - DNA, 24 bp, Artificial Sequence
  Synthetic
ctccttgagccucatctgtactuc

SEQ ID NO: 73362 - DNA, 22 bp, Artificial Sequence
  Synthetic
gcggaattgguctaggcaacua

SEQ ID NO: 73363 - DNA, 23 bp, Artificial Sequence
  Synthetic
cccagaactuctgtcttccugag

SEQ ID NO: 73364 - DNA, 28 bp, Artificial Sequence
  Synthetic
ctcaagaaacagtuctctcagttctcut

SEQ ID NO: 73365 - DNA, 25 bp, Artificial Sequence
  Synthetic
ccacccatattuctgggactatgut

SEQ ID NO: 73366 - DNA, 26 bp, Artificial Sequence
  Synthetic
aaaacagaggaugtttgggugagaat

SEQ ID NO: 73367 - DNA, 28 bp, Artificial Sequence
  Synthetic
cccacattttgtuttgcctgattatcut

SEQ ID NO: 73368 - DNA, 24 bp, Artificial Sequence
  Synthetic
ttttcttgtucatccagccugagt

SEQ ID NO: 73369 - DNA, 25 bp, Artificial Sequence
  Synthetic
ttctgcctctutctcttggtttuca

SEQ ID NO: 73370 - DNA, 28 bp, Artificial Sequence
  Synthetic
cctggtagaaauggaataagtcctccua

SEQ ID NO: 73371 - DNA, 27 bp, Artificial Sequence
  Synthetic
tggataaaccugtttgtttgguaaggt

SEQ ID NO: 73372 - DNA, 28 bp, Artificial Sequence
  Synthetic
ccttcaagacucaagggtgataaugaaa

SEQ ID NO: 73373 - DNA, 28 bp, Artificial Sequence
  Synthetic
accttcctgaauagctttccaaucaaaa

SEQ ID NO: 73374 - DNA, 24 bp, Artificial Sequence
  Synthetic
ccttaagacuccagccuccaaaag

SEQ ID NO: 73375 - DNA, 23 bp, Artificial Sequence
  Synthetic
gggtcgaauctctagatccugat

SEQ ID NO: 73376 - DNA, 26 bp, Artificial Sequence
  Synthetic
catggtctaucccctgatucagaaaa

SEQ ID NO: 73377 - DNA, 26 bp, Artificial Sequence
  Synthetic
gagagautcctgattucagggaaagg

SEQ ID NO: 73378 - DNA, 21 bp, Artificial Sequence
  Synthetic
gctcaagctugccatctctuc

SEQ ID NO: 73379 - DNA, 24 bp, Artificial Sequence
  Synthetic
gcttgtgtcuctgcttacuacgat

SEQ ID NO: 73380 - DNA, 24 bp, Artificial Sequence
  Synthetic
gagauaccattccuacagaaggca

SEQ ID NO: 73381 - DNA, 22 bp, Artificial Sequence
  Synthetic
acacggaaaggcutgtgactut

SEQ ID NO: 73382 - DNA, 26 bp, Artificial Sequence
  Synthetic
cagtgttucagaaaaggcaaauccaa

SEQ ID NO: 73383 - DNA, 28 bp, Artificial Sequence
  Synthetic
gttttatctcagutcctttttggucagg

SEQ ID NO: 73384 - DNA, 23 bp, Artificial Sequence
  Synthetic
agguagacagaugagccaacaga

SEQ ID NO: 73385 - DNA, 28 bp, Artificial Sequence
  Synthetic
ttctaccttttuattggctccatuacca

SEQ ID NO: 73386 - DNA, 25 bp, Artificial Sequence
  Synthetic
gaagaagtgucagccattcauacct

SEQ ID NO: 73387 - DNA, 29 bp, Artificial Sequence
  Synthetic
gaacatgtcctatutgaattttccgacut

SEQ ID NO: 73388 - DNA, 27 bp, Artificial Sequence
  Synthetic
agaatcagagcagccuaaagaaucaaa

SEQ ID NO: 73389 - DNA, 26 bp, Artificial Sequence
  Synthetic
tttgctttacgugatgactttgtugg

SEQ ID NO: 73390 - DNA, 28 bp, Artificial Sequence
  Synthetic
agaagaatgtautatttctgccaugcca

SEQ ID NO: 73391 - DNA, 27 bp, Artificial Sequence
  Synthetic
acctgttttgugatggtagaagttugt

SEQ ID NO: 73392 - DNA, 26 bp, Artificial Sequence
  Synthetic
agacaatttaagucccaaggcatcuc

SEQ ID NO: 73393 - DNA, 26 bp, Artificial Sequence
  Synthetic
gagctggguaacactgtagtatucaa

SEQ ID NO: 73394 - DNA, 25 bp, Artificial Sequence
  Synthetic
autaattctgctaugcccaaaggga

SEQ ID NO: 73395 - DNA, 28 bp, Artificial Sequence
  Synthetic
tgtggtataggtuttactggtgaagtug

SEQ ID NO: 73396 - DNA, 26 bp, Artificial Sequence
  Synthetic
agaaaccaacutcaccaguaaaacct

SEQ ID NO: 73397 - DNA, 25 bp, Artificial Sequence
  Synthetic
ggagcttatcautgaagacctugga

SEQ ID NO: 73398 - DNA, 28 bp, Artificial Sequence
  Synthetic
gcccatacacautcaaacacttacaaut

SEQ ID NO: 73399 - DNA, 25 bp, Artificial Sequence
  Synthetic
aatcgagggttucatttgacctcut

SEQ ID NO: 73400 - DNA, 24 bp, Artificial Sequence
  Synthetic
aactcctttautcaggtggaugcc

SEQ ID NO: 73401 - DNA, 22 bp, Artificial Sequence
  Synthetic
gtcccacuaggtgaactgtgut

SEQ ID NO: 73402 - DNA, 29 bp, Artificial Sequence
  Synthetic
gcctccaaaggacuaaatcagatgaauaa

SEQ ID NO: 73403 - DNA, 23 bp, Artificial Sequence
  Synthetic
ggcttggagcutctttgaugaaa

SEQ ID NO: 73404 - DNA, 25 bp, Artificial Sequence
  Synthetic
gacctgtatuagtacgccagucaac

SEQ ID NO: 73405 - DNA, 25 bp, Artificial Sequence
  Synthetic
ggacttaaaacuggagtttgugcct

SEQ ID NO: 73406 - DNA, 27 bp, Artificial Sequence
  Synthetic
ctctttactuttcagtgtcuacgagca

SEQ ID NO: 73407 - DNA, 27 bp, Artificial Sequence
  Synthetic
tctagagtttcucctccgatggttuaa

SEQ ID NO: 73408 - DNA, 21 bp, Artificial Sequence
  Synthetic
ctactcugggcacaggcauag

SEQ ID NO: 73409 - DNA, 24 bp, Artificial Sequence
  Synthetic
gacacttgugagtactgugggaaa

SEQ ID NO: 73410 - DNA, 21 bp, Artificial Sequence
  Synthetic
ggccatuaacagtgccaucgt

SEQ ID NO: 73411 - DNA, 17 bp, Artificial Sequence
  Synthetic
ggcatggugctcagcuc

SEQ ID NO: 73412 - DNA, 27 bp, Artificial Sequence
  Synthetic
agtgagatugctacagttctugaagac

SEQ ID NO: 73413 - DNA, 18 bp, Artificial Sequence
  Synthetic
agcuggacggagggauct

SEQ ID NO: 73414 - DNA, 19 bp, Artificial Sequence
  Synthetic
ggaaggccucgctgaagug

SEQ ID NO: 73415 - DNA, 17 bp, Artificial Sequence
  Synthetic
ctacggcutcgggcuga

SEQ ID NO: 73416 - DNA, 17 bp, Artificial Sequence
  Synthetic
ccccgcgagcugttcuc

SEQ ID NO: 73417 - DNA, 19 bp, Artificial Sequence
  Synthetic
aacgaccccaaccugaucc

SEQ ID NO: 73418 - DNA, 18 bp, Artificial Sequence
  Synthetic
ctcgctcuccgtcagcuc

SEQ ID NO: 73419 - DNA, 17 bp, Artificial Sequence
  Synthetic
guccgtgguggccaagt

SEQ ID NO: 73420 - DNA, 20 bp, Artificial Sequence
  Synthetic
aaaccaagucagctgccugt

SEQ ID NO: 73421 - DNA, 28 bp, Artificial Sequence
  Synthetic
gggattcgatugttagatcactuagaga

SEQ ID NO: 73422 - DNA, 20 bp, Artificial Sequence
  Synthetic
ggcccggaccacuaataugg

SEQ ID NO: 73423 - DNA, 22 bp, Artificial Sequence
  Synthetic
cccutccttagctucggagact

SEQ ID NO: 73424 - DNA, 19 bp, Artificial Sequence
  Synthetic
gggtcgtuctcgctctuga

SEQ ID NO: 73425 - DNA, 20 bp, Artificial Sequence
  Synthetic
gacgcacaugcacaaaucgt

SEQ ID NO: 73426 - DNA, 21 bp, Artificial Sequence
  Synthetic
gaggcaaaaggcgautgtcug

SEQ ID NO: 73427 - DNA, 22 bp, Artificial Sequence
  Synthetic
ccccttcuctaagcgcaucaag

SEQ ID NO: 73428 - DNA, 20 bp, Artificial Sequence
  Synthetic
ggcaggucgaactccttcuc

SEQ ID NO: 73429 - DNA, 17 bp, Artificial Sequence
  Synthetic
gcgagucggaccgcaua

SEQ ID NO: 73430 - DNA, 23 bp, Artificial Sequence
  Synthetic
cgagagagacagagugacagaug

SEQ ID NO: 73431 - DNA, 29 bp, Artificial Sequence
  Synthetic
tttgatttgtgtcutgtgtcttgtttcut

SEQ ID NO: 73432 - DNA, 23 bp, Artificial Sequence
  Synthetic
attcagttcuagcagcucaagca

SEQ ID NO: 73433 - DNA, 26 bp, Artificial Sequence
  Synthetic
cgcttctttgugttgttattcacugg

SEQ ID NO: 73434 - DNA, 25 bp, Artificial Sequence
  Synthetic
agacttctgutgccttgaaaugagt

SEQ ID NO: 73435 - DNA, 28 bp, Artificial Sequence
  Synthetic
ctattaccugaaacatcttctgugggaa

SEQ ID NO: 73436 - DNA, 29 bp, Artificial Sequence
  Synthetic
ctcccttagugcaacaggacataaaauat

SEQ ID NO: 73437 - DNA, 28 bp, Artificial Sequence
  Synthetic
tccacuggtagatcuagaaagaggaaag

SEQ ID NO: 73438 - DNA, 23 bp, Artificial Sequence
  Synthetic
tcttttcccaccugcattgtuca

SEQ ID NO: 73439 - DNA, 25 bp, Artificial Sequence
  Synthetic
gggcttcauacaagagagtacucac

SEQ ID NO: 73440 - DNA, 22 bp, Artificial Sequence
  Synthetic
ccctctguctctcttcctucct

SEQ ID NO: 73441 - DNA, 18 bp, Artificial Sequence
  Synthetic
ggaaggcggguggagaug

SEQ ID NO: 73442 - DNA, 24 bp, Artificial Sequence
  Synthetic
ctcctcccaauttcttccttccut

SEQ ID NO: 73443 - DNA, 22 bp, Artificial Sequence
  Synthetic
cccctccucatgaguccaagat

SEQ ID NO: 73444 - DNA, 33 bp, Artificial Sequence; identical to SEQ ID NO: 58954
  Synthetic

SEQ ID NO: 73445 - DNA, 24 bp, Artificial Sequence
  Synthetic
cagtcatctgcugtggttgaaaut

SEQ ID NO: 73446 - DNA, 24 bp, Artificial Sequence
  Synthetic
gaaattucaaccacagcagaugac

SEQ ID NO: 73447 - DNA, 28 bp, Artificial Sequence
  Synthetic
gtgacaagaaaucaagtagcaacaauca

SEQ ID NO: 73448 - DNA, 24 bp, Artificial Sequence
  Synthetic
gtgctaauagaggagcactgtcut

SEQ ID NO: 73449 - DNA, 21 bp, Artificial Sequence
  Synthetic
guccccattcuagcagccaat

SEQ ID NO: 73450 - DNA, 19 bp, Artificial Sequence
  Synthetic
gggtgucaggtgggaguga

SEQ ID NO: 73451 - DNA, 24 bp, Artificial Sequence
  Synthetic
gggaaggacguttacaaatgugaa

SEQ ID NO: 73452 - DNA, 17 bp, Artificial Sequence
  Synthetic
cguggaaggcgcagtuc

SEQ ID NO: 73453 - DNA, 17 bp, Artificial Sequence
  Synthetic
cggaagcgcucctggut

SEQ ID NO: 73454 - DNA, 21 bp, Artificial Sequence
  Synthetic
ccttggtcgcutctgtagcuc

SEQ ID NO: 73455 - DNA, 21 bp, Artificial Sequence
  Synthetic
agcagctttcucccgtaccua

SEQ ID NO: 73456 - DNA, 18 bp, Artificial Sequence
  Synthetic
cagccagagcaccucuga

SEQ ID NO: 73457 - DNA, 18 bp, Artificial Sequence
  Synthetic
ctcgcuggaggtgaggut

SEQ ID NO: 73458 - DNA, 19 bp, Artificial Sequence
  Synthetic
caucgagcaggagcuggag

SEQ ID NO: 73459 - DNA, 17 bp, Artificial Sequence
  Synthetic
ccatcgcugccggucat

SEQ ID NO: 73460 - DNA, 17 bp, Artificial Sequence
  Synthetic
gcuaugaccggcagcga

SEQ ID NO: 73461 - DNA, 18 bp, Artificial Sequence
  Synthetic
cuggcctuacccggagaa

SEQ ID NO: 73462 - DNA, 20 bp, Artificial Sequence
  Synthetic
cggacugcagctccaaugag

SEQ ID NO: 73463 - DNA, 19 bp, Artificial Sequence
  Synthetic
tgctgctgucgaaggacug

SEQ ID NO: 73464 - DNA, 18 bp, Artificial Sequence
  Synthetic
cccucgcagaacucgcaa

SEQ ID NO: 73465 - DNA, 19 bp, Artificial Sequence
  Synthetic
cacctgcguctccauggaa

SEQ ID NO: 73466 - DNA, 27 bp, Artificial Sequence
  Synthetic
gtacacgcuaaaaggcatctuacaaat

SEQ ID NO: 73467 - DNA, 23 bp, Artificial Sequence
  Synthetic
ccttataaaugcgagctgugcaa

SEQ ID NO: 73468 - DNA, 20 bp, Artificial Sequence
  Synthetic
gcagatcuggcccaacgaug

SEQ ID NO: 73469 - DNA, 23 bp, Artificial Sequence
  Synthetic
acaagtgcaccugatacacucaa

SEQ ID NO: 73470 - DNA, 27 bp, Artificial Sequence
  Synthetic
tgtattgcctutacattgctctucact

SEQ ID NO: 73471 - DNA, 28 bp, Artificial Sequence
  Synthetic
tgcctgaattucagataacaaactccut

SEQ ID NO: 73472 - DNA, 25 bp, Artificial Sequence
  Synthetic
tgctagtgagugactaaccaaguct

SEQ ID NO: 73473 - DNA, 21 bp, Artificial Sequence
  Synthetic
gctgtccaugcatttgaccuc

SEQ ID NO: 73474 - DNA, 25 bp, Artificial Sequence
  Synthetic
tgctagcauccaaattaggctatut

SEQ ID NO: 73475 - DNA, 27 bp, Artificial Sequence
  Synthetic
ccaauttatgguaaagaggaggcaaga

SEQ ID NO: 73476 - DNA, 29 bp, Artificial Sequence
  Synthetic
tgagttgatgcacuaataacaggtactuc

SEQ ID NO: 73477 - DNA, 23 bp, Artificial Sequence
  Synthetic
aattcccucccaacccctctaua

SEQ ID NO: 73478 - DNA, 24 bp, Artificial Sequence
  Synthetic
ggaatgccuccagaaagcagauag

SEQ ID NO: 73479 - DNA, 28 bp, Artificial Sequence
  Synthetic
tgtaaccataugagcttgtcauacaaca

SEQ ID NO: 73480 - DNA, 22 bp, Artificial Sequence
  Synthetic
caattggugcacctctttucca

SEQ ID NO: 73481 - DNA, 19 bp, Artificial Sequence
  Synthetic
gcccuguacacggaaacgg

SEQ ID NO: 73482 - DNA, 20 bp, Artificial Sequence
  Synthetic
catggcuggaggcauaaacc

SEQ ID NO: 73483 - DNA, 20 bp, Artificial Sequence
  Synthetic
ggacacaucccugacccaac

SEQ ID NO: 73484 - DNA, 31 bp, Artificial Sequence
  Synthetic
gagttgggagtuacatattggtaatgauaca

SEQ ID NO: 73485 - DNA, 27 bp, Artificial Sequence
  Synthetic
ggctcccctauacttctgtagattuct

SEQ ID NO: 73486 - DNA, 24 bp, Artificial Sequence
  Synthetic
ccagatagttugtatggctguggt

SEQ ID NO: 73487 - DNA, 27 bp, Artificial Sequence
  Synthetic
ttgggtttuacacacacataactccut

SEQ ID NO: 73488 - DNA, 20 bp, Artificial Sequence
  Synthetic
atggccaauatgccaccuca

SEQ ID NO: 73489 - DNA, 20 bp, Artificial Sequence
  Synthetic
ctctgctucccaggcctuac

SEQ ID NO: 73490 - DNA, 22 bp, Artificial Sequence
  Synthetic
cttgccugccctgcattttauc

SEQ ID NO: 73491 - DNA, 28 bp, Artificial Sequence
  Synthetic
gaggaaaaccaugagcagaaatttugaa

SEQ ID NO: 73492 - DNA, 24 bp, Artificial Sequence
  Synthetic
tcacaggctuaaccaatacgtgut

SEQ ID NO: 73493 - DNA, 28 bp, Artificial Sequence
  Synthetic
cttcgaagatccuttagtccttcaaguc

SEQ ID NO: 73494 - DNA, 27 bp, Artificial Sequence
  Synthetic
gtgtttatgaugcacttccatugacaa

SEQ ID NO: 73495 - DNA, 27 bp, Artificial Sequence
  Synthetic
gaaacaggtagaaauagcccatgucat

SEQ ID NO: 73496 - DNA, 23 bp, Artificial Sequence
  Synthetic
agacgaaagcaucaacacuccat

SEQ ID NO: 73497 - DNA, 23 bp, Artificial Sequence
  Synthetic
tgcagtgugagaagtgtaaccug

SEQ ID NO: 73498 - DNA, 26 bp, Artificial Sequence
  Synthetic
gatacttgacuaccatgttcagcugt

SEQ ID NO: 73499 - DNA, 24 bp, Artificial Sequence
  Synthetic
ctctggcugcaaagttatctgcua

SEQ ID NO: 73500 - DNA, 30 bp, Artificial Sequence
  Synthetic
cttacattgcattutaaaagacatgcauca

SEQ ID NO: 73501 - DNA, 27 bp, Artificial Sequence
  Synthetic
ttcccttaagaucacgtactgttucac

SEQ ID NO: 73502 - DNA, 27 bp, Artificial Sequence
  Synthetic
gcaataaagugtcattgtcgugaaaca

SEQ ID NO: 73503 - DNA, 24 bp, Artificial Sequence
  Synthetic
tcutcaactacactucccagacct

SEQ ID NO: 73504 - DNA, 27 bp, Artificial Sequence
  Synthetic
catctctgtatauggatgcctgttuct

SEQ ID NO: 73505 - DNA, 27 bp, Artificial Sequence
  Synthetic
ccttacatccuggttccagttttctuc

SEQ ID NO: 73506 - DNA, 24 bp, Artificial Sequence
  Synthetic
ggagacggagaaaautctggagut

SEQ ID NO: 73507 - DNA, 28 bp, Artificial Sequence
  Synthetic
ctacagaaaagucaggttttgtgtgtut

SEQ ID NO: 73508 - DNA, 25 bp, Artificial Sequence
  Synthetic
gctcttttaatugcccttctgtuca

SEQ ID NO: 73509 - DNA, 21 bp, Artificial Sequence
  Synthetic
gagttggcugcagtctgguat

SEQ ID NO: 73510 - DNA, 22 bp, Artificial Sequence
  Synthetic
gctggctttugtgacggaaaug

SEQ ID NO: 73511 - DNA, 24 bp, Artificial Sequence
  Synthetic
ctcgtagggagaaucttcctcuct

SEQ ID NO: 73512 - DNA, 18 bp, Artificial Sequence
  Synthetic
ccctggucgggaactuga

SEQ ID NO: 73513 - DNA, 19 bp, Artificial Sequence
  Synthetic
agcaggcagcaugtcugag

SEQ ID NO: 73514 - DNA, 22 bp, Artificial Sequence
  Synthetic
caggaccagaautctucccaga

SEQ ID NO: 73515 - DNA, 20 bp, Artificial Sequence
  Synthetic
ggagcuggcaggacttccua

SEQ ID NO: 73516 - DNA, 27 bp, Artificial Sequence
  Synthetic
gggtagaaaacaaacugattccttcug

SEQ ID NO: 73517 - DNA, 24 bp, Artificial Sequence
  Synthetic
ttgggatctgcugaagagctatug

SEQ ID NO: 73518 - DNA, 23 bp, Artificial Sequence
  Synthetic
cctggattugcaggcatgauaaa

SEQ ID NO: 73519 - DNA, 24 bp, Artificial Sequence
  Synthetic
ccaggaggaaaauttcgaccauct

SEQ ID NO: 73520 - DNA, 22 bp, Artificial Sequence
  Synthetic
caacucccaacaauagggcagt

SEQ ID NO: 73521 - DNA, 21 bp, Artificial Sequence
  Synthetic
ctccagcugctcctgagauag

SEQ ID NO: 73522 - DNA, 23 bp, Artificial Sequence
  Synthetic
ccagatgaugtgccaaaaauccc

SEQ ID NO: 73523 - DNA, 22 bp, Artificial Sequence
  Synthetic
gctgctgcugaaacatctctuc

SEQ ID NO: 73524 - DNA, 21 bp, Artificial Sequence
  Synthetic
gggcttttugccactccttug

SEQ ID NO: 73525 - DNA, 26 bp, Artificial Sequence
  Synthetic
agtactgccugaatttgtcatggtua

SEQ ID NO: 73526 - DNA, 20 bp, Artificial Sequence
  Synthetic
ccccacacugggagagaauc

SEQ ID NO: 73527 - DNA, 26 bp, Artificial Sequence
  Synthetic
actttgtgcucctgtgaattcttuct

SEQ ID NO: 73528 - DNA, 21 bp, Artificial Sequence
  Synthetic
ccaaacccccaaggautguct

SEQ ID NO: 73529 - DNA, 21 bp, Artificial Sequence
  Synthetic
ggttatucccaggctccaugt

SEQ ID NO: 73530 - DNA, 20 bp, Artificial Sequence
  Synthetic
tgcugaaatuacgcccaggt

SEQ ID NO: 73531 - DNA, 20 bp, Artificial Sequence
  Synthetic
gatuccgcaagccactgtug

SEQ ID NO: 73532 - DNA, 23 bp, Artificial Sequence
  Synthetic
gctgaccgtuctggaagatctug

SEQ ID NO: 73533 - DNA, 23 bp, Artificial Sequence
  Synthetic
gattccttctuccctgctcctut

SEQ ID NO: 73534 - DNA, 18 bp, Artificial Sequence
  Synthetic
cattcauggccgccucct

SEQ ID NO: 73535 - DNA, 24 bp, Artificial Sequence
  Synthetic
gcaatgcctuacgcttttcacuaa

SEQ ID NO: 73536 - DNA, 23 bp, Artificial Sequence
  Synthetic
gatgaacaggaugatuccaggct

SEQ ID NO: 73537 - DNA, 22 bp, Artificial Sequence
  Synthetic
cccacuaggaaccaucccaaac

SEQ ID NO: 73538 - DNA, 23 bp, Artificial Sequence
  Synthetic
tggaguacagggactucagacat

SEQ ID NO: 73539 - DNA, 27 bp, Artificial Sequence
  Synthetic
acagtgtuaggagactttctguagaca

SEQ ID NO: 73540 - DNA, 23 bp, Artificial Sequence
  Synthetic
gaccattccutcccatgtcucag

SEQ ID NO: 73541 - DNA, 21 bp, Artificial Sequence
  Synthetic
ctgaacuggaggagctgtgut

SEQ ID NO: 73542 - DNA, 24 bp, Artificial Sequence
  Synthetic
actacctcucaacccttccaguaa

SEQ ID NO: 73543 - DNA, 20 bp, Artificial Sequence
  Synthetic
cccagcautggtgacuggac

SEQ ID NO: 73544 - DNA, 27 bp, Artificial Sequence
  Synthetic
ttgtactgtuagtggatgtcuagggaa

SEQ ID NO: 73545 - DNA, 28 bp, Artificial Sequence
  Synthetic
gcaatttgcagtutagttgtctccttug

SEQ ID NO: 73546 - DNA, 22 bp, Artificial Sequence
  Synthetic
cagcaagaagagacgaugccua

SEQ ID NO: 73547 - DNA, 26 bp, Artificial Sequence
  Synthetic
tgtcccttccaccuatgtagtctuac

SEQ ID NO: 73548 - DNA, 25 bp, Artificial Sequence
  Synthetic
tggtgcataaaugtaccactgagut

SEQ ID NO: 73549 - DNA, 26 bp, Artificial Sequence
  Synthetic
gcattcagaauccgcacaaagaatut

SEQ ID NO: 73550 - DNA, 27 bp, Artificial Sequence
  Synthetic
aggctaaaagauggtgaattguggaat

SEQ ID NO: 73551 - DNA, 24 bp, Artificial Sequence
  Synthetic
ttccataaggcuttgttcagguga

SEQ ID NO: 73552 - DNA, 20 bp, Artificial Sequence
  Synthetic
gtgccautgcagugcagaag

SEQ ID NO: 73553 - DNA, 18 bp, Artificial Sequence
  Synthetic
cgccgcaucatguccaca

SEQ ID NO: 73554 - DNA, 25 bp, Artificial Sequence
  Synthetic
gggttttugacactacatuccaaag

SEQ ID NO: 73555 - DNA, 21 bp, Artificial Sequence
  Synthetic
ctgaggcagcaauctgugaga

SEQ ID NO: 73556 - DNA, 21 bp, Artificial Sequence
  Synthetic
cutggagatgcuccgggaaaa

SEQ ID NO: 73557 - DNA, 22 bp, Artificial Sequence
  Synthetic
caaactgcccagugtaggaguc

SEQ ID NO: 73558 - DNA, 20 bp, Artificial Sequence
  Synthetic
cccaccctutgagccaacua

SEQ ID NO: 73559 - DNA, 27 bp, Artificial Sequence
  Synthetic
tgacttgugaaaccaatgagttcauca

SEQ ID NO: 73560 - DNA, 21 bp, Artificial Sequence
  Synthetic
tccauaccccgagagcattug

SEQ ID NO: 73561 - DNA, 23 bp, Artificial Sequence
  Synthetic
acattgttgucctggatgcugag

SEQ ID NO: 73562 - DNA, 21 bp, Artificial Sequence
  Synthetic
tggacauctcggtaucaccgt

SEQ ID NO: 73563 - DNA, 26 bp, Artificial Sequence
  Synthetic
cagtcagtutctaagttcuccacaca

SEQ ID NO: 73564 - DNA, 22 bp, Artificial Sequence
  Synthetic
ggtctuggaaacccucagcaaa

SEQ ID NO: 73565 - DNA, 20 bp, Artificial Sequence
  Synthetic
cgggttctutcggtcacuga

SEQ ID NO: 73566 - DNA, 23 bp, Artificial Sequence
  Synthetic
ttgtatagcacuatggtgcgcut

SEQ ID NO: 73567 - DNA, 20 bp, Artificial Sequence
  Synthetic
ccaggaggutgccgatacug

SEQ ID NO: 73568 - DNA, 17 bp, Artificial Sequence
  Synthetic
cgcccucggagcugaag

SEQ ID NO: 73569 - DNA, 18 bp, Artificial Sequence
  Synthetic
ccgtccugcagctcctut

SEQ ID NO: 73570 - DNA, 20 bp, Artificial Sequence
  Synthetic
gagccggaccugaagaacuc

SEQ ID NO: 73571 - DNA, 17 bp, Artificial Sequence
  Synthetic
ggtugcccgaagccgua

SEQ ID NO: 73572 - DNA, 19 bp, Artificial Sequence
  Synthetic
ggcccgcccugaacaauaa

SEQ ID NO: 73573 - DNA, 17 bp, Artificial Sequence
  Synthetic
ctccggccguagggtug

SEQ ID NO: 73574 - DNA, 17 bp, Artificial Sequence
  Synthetic
ggctucgggcaacccua

SEQ ID NO: 73575 - DNA, 20 bp, Artificial Sequence
  Synthetic
ccgtggtcgugagagttcug

SEQ ID NO: 73576 - DNA, 21 bp, Artificial Sequence
  Synthetic
gccguctuccaccaacaacat

SEQ ID NO: 73577 - DNA, 25 bp, Artificial Sequence
  Synthetic
gtagtaggagtugtactggtggtug

SEQ ID NO: 73578 - DNA, 23 bp, Artificial Sequence
  Synthetic
gcctcuctgagtguggagagaaa

SEQ ID NO: 73579 - DNA, 21 bp, Artificial Sequence
  Synthetic
tcggagacugacaccagguat

SEQ ID NO: 73580 - DNA, 21 bp, Artificial Sequence
  Synthetic
cagttcccccuttgtcaccua

SEQ ID NO: 73581 - DNA, 25 bp, Artificial Sequence
  Synthetic
gggtctcttuatcatggacttucac

SEQ ID NO: 73582 - DNA, 21 bp, Artificial Sequence
  Synthetic
ggccgugaactcctcaucaaa

SEQ ID NO: 73583 - DNA, 21 bp, Artificial Sequence
  Synthetic
cttgagcacacutgagggugt

SEQ ID NO: 73584 - DNA, 21 bp, Artificial Sequence
  Synthetic
gcttutgtggccuaccagagt

SEQ ID NO: 73585 - DNA, 20 bp, Artificial Sequence
  Synthetic
ccctccauagggccaucaag

SEQ ID NO: 73586 - DNA, 26 bp, Artificial Sequence
  Synthetic
gatgaugatgatgacugggaagacat

SEQ ID NO: 73587 - DNA, 25 bp, Artificial Sequence
  Synthetic
tttgagcaguagatgacacuggaag

SEQ ID NO: 73588 - DNA, 22 bp, Artificial Sequence
  Synthetic
caaatcucccaaggaccuagca

SEQ ID NO: 73589 - DNA, 20 bp, Artificial Sequence
  Synthetic
atccaugggccggacauaag

SEQ ID NO: 73590 - DNA, 23 bp, Artificial Sequence
  Synthetic
ctggaguaaaactgcggucaaaa

SEQ ID NO: 73591 - DNA, 26 bp, Artificial Sequence
  Synthetic
tccattuacaaaccctcttctuggaa

SEQ ID NO: 73592 - DNA, 24 bp, Artificial Sequence
  Synthetic
acagactgtcutccagtgtcauct

SEQ ID NO: 73593 - DNA, 28 bp, Artificial Sequence
  Synthetic
ggcaatgatgauttgctatggttttuct

SEQ ID NO: 73594 - DNA, 23 bp, Artificial Sequence
  Synthetic
tgtggagauacaggcctgatuca

SEQ ID NO: 73595 - DNA, 21 bp, Artificial Sequence
  Synthetic
cttcctgguggcagagaaucc

SEQ ID NO: 73596 - DNA, 23 bp, Artificial Sequence
  Synthetic
cagtcctgtucctatgggtucat

SEQ ID NO: 73597 - DNA, 26 bp, Artificial Sequence
  Synthetic
aactggaguacacaaggcaatgttua

SEQ ID NO: 73598 - DNA, 25 bp, Artificial Sequence
  Synthetic
gatctcatggaugatctgactuggg

SEQ ID NO: 73599 - DNA, 20 bp, Artificial Sequence
  Synthetic
ctttcaccccacugcaggua

SEQ ID NO: 73600 - DNA, 21 bp, Artificial Sequence
  Synthetic
catgcatugtctggctuacgg

SEQ ID NO: 73601 - DNA, 22 bp, Artificial Sequence
  Synthetic
tggcactcacugtcagtgttut

SEQ ID NO: 73602 - DNA, 25 bp, Artificial Sequence
  Synthetic
agctgauagaggagaagggtatugg

SEQ ID NO: 73603 - DNA, 20 bp, Artificial Sequence
  Synthetic
cgtgtcctuggtgctagugg

SEQ ID NO: 73604 - DNA, 24 bp, Artificial Sequence
  Synthetic
agcagatutgtgcaaaucaagcaa

SEQ ID NO: 73605 - DNA, 21 bp, Artificial Sequence
  Synthetic
agccctcguctatctguagca

SEQ ID NO: 73606 - DNA, 22 bp, Artificial Sequence
  Synthetic
aagugttgcaaugcagcagaag

SEQ ID NO: 73607 - DNA, 23 bp, Artificial Sequence
  Synthetic
catcttcagtutggtgagctugg

SEQ ID NO: 73608 - DNA, 24 bp, Artificial Sequence
  Synthetic
ctgacuaccacccuaggaaagaca

SEQ ID NO: 73609 - DNA, 27 bp, Artificial Sequence
  Synthetic
agaacatttccugggaaataagagcut

SEQ ID NO: 73610 - DNA, 21 bp, Artificial Sequence
  Synthetic
tgacccacucaucccaagaca

SEQ ID NO: 73611 - DNA, 22 bp, Artificial Sequence
  Synthetic
ctcccttccugcctcattucag

SEQ ID NO: 73612 - DNA, 21 bp, Artificial Sequence
  Synthetic
gctcctucccggttttgtuct

SEQ ID NO: 73613 - DNA, 25 bp, Artificial Sequence
  Synthetic
ttcagcaatcauaccttgtcctcug

SEQ ID NO: 73614 - DNA, 21 bp, Artificial Sequence
  Synthetic
gctgctggugtggaagttgua

SEQ ID NO: 73615 - DNA, 22 bp, Artificial Sequence
  Synthetic
gagtcatcucgttggagtuccc

SEQ ID NO: 73616 - DNA, 26 bp, Artificial Sequence
  Synthetic
ggcugaaacaccaagacuaggaaaaa

SEQ ID NO: 73617 - DNA, 28 bp, Artificial Sequence
  Synthetic
gaaggttggguttctctttctaagucat

SEQ ID NO: 73618 - DNA, 28 bp, Artificial Sequence
  Synthetic
cactgctgugaaagatcagaauaaacat

SEQ ID NO: 73619 - DNA, 26 bp, Artificial Sequence
  Synthetic
atttgctggcugctaaattatgcaut

SEQ ID NO: 73620 - DNA, 22 bp, Artificial Sequence
  Synthetic
gactugaaagtgccugccaaag

SEQ ID NO: 73621 - DNA, 24 bp, Artificial Sequence
  Synthetic
cggacattutcatctcaaauccgt

SEQ ID NO: 73622 - DNA, 21 bp, Artificial Sequence
  Synthetic
agtcugaggaaccccaggtut

SEQ ID NO: 73623 - DNA, 28 bp, Artificial Sequence
  Synthetic
caatagcgtggaugtgtttttctttcuc

SEQ ID NO: 73624 - DNA, 29 bp, Artificial Sequence
  Synthetic
tcttgtttctcaguactcttggtttctug

SEQ ID NO: 73625 - DNA, 22 bp, Artificial Sequence
  Synthetic
atccacttcugctgcactucat

SEQ ID NO: 73626 - DNA, 17 bp, Artificial Sequence
  Synthetic
ctgcagguggtgccugt

SEQ ID NO: 73627 - DNA, 26 bp, Artificial Sequence
  Synthetic
gcatattgattuctctgtgtggtuca

SEQ ID NO: 73628 - DNA, 28 bp, Artificial Sequence
  Synthetic
taggatgaagtacuctccttagaccuaa

SEQ ID NO: 73629 - DNA, 25 bp, Artificial Sequence
  Synthetic
ctcaggctggautttgatgatgaug

SEQ ID NO: 73630 - DNA, 28 bp, Artificial Sequence
  Synthetic
acctcaaaaattuactgttcccttcucc

SEQ ID NO: 73631 - DNA, 24 bp, Artificial Sequence
  Synthetic
ttccgguagcttgtgtugagaaat

SEQ ID NO: 73632 - DNA, 21 bp, Artificial Sequence
  Synthetic
gcctcagugattcugccagag

SEQ ID NO: 73633 - DNA, 24 bp, Artificial Sequence
  Synthetic
tgcattctacaugtgcatgttugg

SEQ ID NO: 73634 - DNA, 27 bp, Artificial Sequence
  Synthetic
gttttggctgucttaggaactacauga

SEQ ID NO: 73635 - DNA, 22 bp, Artificial Sequence
  Synthetic
gagutcatcucccgacacaaca

SEQ ID NO: 73636 - DNA, 25 bp, Artificial Sequence
  Synthetic
ctggcactucaggtatcttcuaact

SEQ ID NO: 73637 - DNA, 26 bp, Artificial Sequence
  Synthetic
tcaccaatgaaauccttttcgucaga

SEQ ID NO: 73638 - DNA, 28 bp, Artificial Sequence
  Synthetic
tgaagataccagauccttggagattuct

SEQ ID NO: 73639 - DNA, 28 bp, Artificial Sequence
  Synthetic
attctgtgacttcugaaggtgatcttut

SEQ ID NO: 73640 - DNA, 21 bp, Artificial Sequence
  Synthetic
catgtccacuctggccugaaa

SEQ ID NO: 73641 - DNA, 22 bp, Artificial Sequence
  Synthetic
acugattctccugggacacaca

SEQ ID NO: 73642 - DNA, 25 bp, Artificial Sequence
  Synthetic
gaggugggaggagaaatuagagaac

SEQ ID NO: 73643 - DNA, 26 bp, Artificial Sequence
  Synthetic
gcttgtgattctuttcctctctccua

SEQ ID NO: 73644 - DNA, 29 bp, Artificial Sequence
  Synthetic
gaagaaaatagaacuaggctgggaaguaa

SEQ ID NO: 73645 - DNA, 26 bp, Artificial Sequence
  Synthetic
gttctggtugagatgaaaggatucca

SEQ ID NO: 73646 - DNA, 23 bp, Artificial Sequence
  Synthetic
agttgctcttugtgatggcauga

SEQ ID NO: 73647 - DNA, 24 bp, Artificial Sequence
  Synthetic
ggcttgtgtugaggctgatacaut

SEQ ID NO: 73648 - DNA, 27 bp, Artificial Sequence
  Synthetic
gatccacaaaagugaagatacccucaa

SEQ ID NO: 73649 - DNA, 28 bp, Artificial Sequence
  Synthetic
accatgaggagauaggaaatacatcugt

SEQ ID NO: 73650 - DNA, 27 bp, Artificial Sequence
  Synthetic
acagaaugtctgagaauagcaaaacca

SEQ ID NO: 73651 - DNA, 28 bp, Artificial Sequence
  Synthetic
gcgacagtaatcugttaagccatttaut

SEQ ID NO: 73652 - DNA, 22 bp, Artificial Sequence
  Synthetic
gaggcugaaatcaaaaguggct

SEQ ID NO: 73653 - DNA, 24 bp, Artificial Sequence
  Synthetic
cctgcttgttcugactcctgttut

SEQ ID NO: 73654 - DNA, 20 bp, Artificial Sequence
  Synthetic
ggcgugaaccgaacagauga

SEQ ID NO: 73655 - DNA, 23 bp, Artificial Sequence
  Synthetic
aatgtgattcugcatgcttggug

SEQ ID NO: 73656 - DNA, 20 bp, Artificial Sequence
  Synthetic
cctcugcaggacagtgtugt

SEQ ID NO: 73657 - DNA, 21 bp, Artificial Sequence
  Synthetic
ctgactttggucagccagtug

SEQ ID NO: 73658 - DNA, 24 bp, Artificial Sequence
  Synthetic
gggtatgtcautgaggaccucaaa

SEQ ID NO: 73659 - DNA, 23 bp, Artificial Sequence
  Synthetic
ccttcccaccutgaggatagtuc

SEQ ID NO: 73660 - DNA, 23 bp, Artificial Sequence
  Synthetic
agguatatcagcuggacagagca

SEQ ID NO: 73661 - DNA, 26 bp, Artificial Sequence
  Synthetic
tcagatggcacutgagaaagactuac

SEQ ID NO: 73662 - DNA, 25 bp, Artificial Sequence
  Synthetic
ctttatgtcccugagtgcagaguat

SEQ ID NO: 73663 - DNA, 18 bp, Artificial Sequence
  Synthetic
caactgcugctgcugagg

SEQ ID NO: 73664 - DNA, 21 bp, Artificial Sequence
  Synthetic
gcacctgguttgccaatgaug

SEQ ID NO: 73665 - DNA, 22 bp, Artificial Sequence
  Synthetic
cctccuccccgctttttcuaag

SEQ ID NO: 73666 - DNA, 22 bp, Artificial Sequence
  Synthetic
ccgaggaggguctctcttctuc

SEQ ID NO: 73667 - DNA, 29 bp, Artificial Sequence
  Synthetic
gcaatatctatucacccaaggaaacaauc

SEQ ID NO: 73668 - DNA, 32 bp, Artificial Sequence
  Synthetic
caataattgtgttcccutaagatagactguga

SEQ ID NO: 73669 - DNA, 28 bp, Artificial Sequence
  Synthetic
gcgtagtttgatucttttgtttctccut

SEQ ID NO: 73670 - DNA, 22 bp, Artificial Sequence
  Synthetic
caacaaacaaauggcagcugga

SEQ ID NO: 73671 - DNA, 24 bp, Artificial Sequence
  Synthetic
gggaggatcuttggattcagaaug

SEQ ID NO: 73672 - DNA, 20 bp, Artificial Sequence
  Synthetic
cagacccagacaguctcuga

SEQ ID NO: 73673 - DNA, 20 bp, Artificial Sequence
  Synthetic
cttuccccacgagccuacac

SEQ ID NO: 73674 - DNA, 24 bp, Artificial Sequence
  Synthetic
cagagccagaaggaauctguacaa

SEQ ID NO: 73675 - DNA, 20 bp, Artificial Sequence
  Synthetic
ccctgcugggtcagtctuag

SEQ ID NO: 73676 - DNA, 19 bp, Artificial Sequence
  Synthetic
cgacagugccacgagucag

SEQ ID NO: 73677 - DNA, 21 bp, Artificial Sequence
  Synthetic
ttccaacgguttgcctttgug

SEQ ID NO: 73678 - DNA, 21 bp, Artificial Sequence
  Synthetic
ggagatguacagcgtgccaua

SEQ ID NO: 73679 - DNA, 23 bp, Artificial Sequence
  Synthetic
gataggcatugccatactggtug

SEQ ID NO: 73680 - DNA, 22 bp, Artificial Sequence
  Synthetic
agcctaugggtgctctauccaa

SEQ ID NO: 73681 - DNA, 19 bp, Artificial Sequence
  Synthetic
cacaccucggacacaccug

SEQ ID NO: 73682 - DNA, 28 bp, Artificial Sequence
  Synthetic
tggagctuaaccagtgatagaacuagaa

SEQ ID NO: 73683 - DNA, 26 bp, Artificial Sequence
  Synthetic
agctacacatugaagcttttgtcuga

SEQ ID NO: 73684 - DNA, 23 bp, Artificial Sequence
  Synthetic
gcatatcactucgtgcctctuct

SEQ ID NO: 73685 - DNA, 21 bp, Artificial Sequence
  Synthetic
cactcccaugtgatagugcca

SEQ ID NO: 73686 - DNA, 23 bp, Artificial Sequence
  Synthetic
gatgttccccuctacaaggaugg

SEQ ID NO: 73687 - DNA, 20 bp, Artificial Sequence
  Synthetic
ctcagccuggauccgagaag

SEQ ID NO: 73688 - DNA, 21 bp, Artificial Sequence
  Synthetic
gtcaaggtuctcaggcuccat

SEQ ID NO: 73689 - DNA, 25 bp, Artificial Sequence
  Synthetic
caaagccugcaactggaagaaauac

SEQ ID NO: 73690 - DNA, 23 bp, Artificial Sequence
  Synthetic
ccttccccucagcaagatgtaua

SEQ ID NO: 73691 - DNA, 21 bp, Artificial Sequence
  Synthetic
atgttttgcugggcattggug

SEQ ID NO: 73692 - DNA, 18 bp, Artificial Sequence
  Synthetic
aagucuccggcacagcag

SEQ ID NO: 73693 - DNA, 22 bp, Artificial Sequence
  Synthetic
ccttgggcutgtcttuggaagt

SEQ ID NO: 73694 - DNA, 28 bp, Artificial Sequence
  Synthetic
accggctgtaaucatgaattagaaauga

SEQ ID NO: 73695 - DNA, 25 bp, Artificial Sequence
  Synthetic
ctacuttcccaaagaucaggcagaa

SEQ ID NO: 73696 - DNA, 19 bp, Artificial Sequence
  Synthetic
cuatggcucccgagaccag

SEQ ID NO: 73697 - DNA, 20 bp, Artificial Sequence
  Synthetic
tgggccugagagagcctuag

SEQ ID NO: 73698 - DNA, 22 bp, Artificial Sequence
  Synthetic
acagcactatutggctccagut

SEQ ID NO: 73699 - DNA, 28 bp, Artificial Sequence
  Synthetic
cagccatactatuaatcccttgtccaua

SEQ ID NO: 73700 - DNA, 23 bp, Artificial Sequence
  Synthetic
cgaattcccagutgagtctgugg

SEQ ID NO: 73701 - DNA, 26 bp, Artificial Sequence
  Synthetic
ctgctcaaaggauttcctcttcugat

SEQ ID NO: 73702 - DNA, 21 bp, Artificial Sequence
  Synthetic
gctgtugagcacgatgaacut

SEQ ID NO: 73703 - DNA, 21 bp, Artificial Sequence
  Synthetic
gagcccccagaaauctgacug

SEQ ID NO: 73704 - DNA, 20 bp, Artificial Sequence
  Synthetic
ggcugtacucaccagggact

SEQ ID NO: 73705 - DNA, 20 bp, Artificial Sequence
  Synthetic
acaccgccagccucttatuc

SEQ ID NO: 73706 - DNA, 25 bp, Artificial Sequence
  Synthetic
cttggatttuggcaaagcctttuct

SEQ ID NO: 73707 - DNA, 22 bp, Artificial Sequence
  Synthetic
gagatcagguctctctggguca

SEQ ID NO: 73708 - DNA, 20 bp, Artificial Sequence
  Synthetic
ccautccagttuggccgaga

SEQ ID NO: 73709 - DNA, 28 bp, Artificial Sequence
  Synthetic
cctgttggcauaattataggtcatguca

SEQ ID NO: 73710 - DNA, 22 bp, Artificial Sequence
  Synthetic
catacaggcaucagctgaggut

SEQ ID NO: 73711 - DNA, 22 bp, Artificial Sequence
  Synthetic
cctctgatcugtgtgcagcaut

SEQ ID NO: 73712 - DNA, 21 bp, Artificial Sequence
  Synthetic
cttactgcugcaggactcugt

SEQ ID NO: 73713 - DNA, 20 bp, Artificial Sequence
  Synthetic
cutgugacaaggccagcaaa

SEQ ID NO: 73714 - DNA, 21 bp, Artificial Sequence
  Synthetic
acaggagggucaggtcgatut

SEQ ID NO: 73715 - DNA, 20 bp, Artificial Sequence
  Synthetic
ccaggaccaccagugacauc

SEQ ID NO: 73716 - DNA, 20 bp, Artificial Sequence
  Synthetic
acagggagguggctguacat

SEQ ID NO: 73717 - DNA, 22 bp, Artificial Sequence
  Synthetic
ccccaagacaucatggcctauc

SEQ ID NO: 73718 - DNA, 27 bp, Artificial Sequence
  Synthetic
caagttgaagugagatggtcaggaaua

SEQ ID NO: 73719 - DNA, 23 bp, Artificial Sequence
  Synthetic
gaattcaagguggaggagccaut

SEQ ID NO: 73720 - DNA, 23 bp, Artificial Sequence
  Synthetic
cgtggctutcattttggaucaga

SEQ ID NO: 73721 - DNA, 26 bp, Artificial Sequence
  Synthetic
aagatgttttgttugtcaccggttut

SEQ ID NO: 73722 - DNA, 20 bp, Artificial Sequence
  Synthetic
tgatgggaacuggaccucct

SEQ ID NO: 73723 - DNA, 28 bp, Artificial Sequence
  Synthetic
tgactctugaagaaatccctagugagaa

SEQ ID NO: 73724 - DNA, 21 bp, Artificial Sequence
  Synthetic
gtagaactgcucctccagcuc

SEQ ID NO: 73725 - DNA, 21 bp, Artificial Sequence
  Synthetic
gaguaccctctguccaaagca

SEQ ID NO: 73726 - DNA, 20 bp, Artificial Sequence
  Synthetic
tgaggaucaucacggagggt

SEQ ID NO: 73727 - DNA, 24 bp, Artificial Sequence
  Synthetic
gaugagttccucagaaggcagaag

SEQ ID NO: 73728 - DNA, 21 bp, Artificial Sequence
  Synthetic
ccgcttaauagccctcuggac

SEQ ID NO: 73729 - DNA, 28 bp, Artificial Sequence
  Synthetic
gatactgatgauaagcaaggactgtcut

SEQ ID NO: 73730 - DNA, 20 bp, Artificial Sequence
  Synthetic
gttcuccaccaccucacgac

SEQ ID NO: 73731 - DNA, 22 bp, Artificial Sequence
  Synthetic
ggccggtguctttcctctttut

SEQ ID NO: 73732 - DNA, 22 bp, Artificial Sequence
  Synthetic
cacacttcuccctggccauaat

SEQ ID NO: 73733 - DNA, 22 bp, Artificial Sequence
  Synthetic
caagacggcutccaggtactua

SEQ ID NO: 73734 - DNA, 22 bp, Artificial Sequence
  Synthetic
gggagtagaugatggtcuccgt

SEQ ID NO: 73735 - DNA, 24 bp, Artificial Sequence
  Synthetic
gatcggacaucgagttctguagag

SEQ ID NO: 73736 - DNA, 21 bp, Artificial Sequence
  Synthetic
cuctgatcatucccggaggag

SEQ ID NO: 73737 - DNA, 22 bp, Artificial Sequence
  Synthetic
ctaagcaggaucguccccaaat

SEQ ID NO: 73738 - DNA, 18 bp, Artificial Sequence
  Synthetic
ctggctucaggtgugggt

SEQ ID NO: 73739 - DNA, 21 bp, Artificial Sequence
  Synthetic
caucgtcaaccuggagagcaa

SEQ ID NO: 73740 - DNA, 20 bp, Artificial Sequence
  Synthetic
tggtccaggutgttgctguc

SEQ ID NO: 73741 - DNA, 21 bp, Artificial Sequence
  Synthetic
gacacagtacucgcagtgcut

SEQ ID NO: 73742 - DNA, 26 bp, Artificial Sequence
  Synthetic
gcttcctgtacutgtccttttcgaut

SEQ ID NO: 73743 - DNA, 20 bp, Artificial Sequence
  Synthetic
gggttgggaugatgcctguc

SEQ ID NO: 73744 - DNA, 17 bp, Artificial Sequence
  Synthetic
gggtcgcuctcgtggug

SEQ ID NO: 73745 - DNA, 19 bp, Artificial Sequence
  Synthetic
agcucaagcgccacaugaa

SEQ ID NO: 73746 - DNA, 17 bp, Artificial Sequence
  Synthetic
ccggccutgtgcatgug

SEQ ID NO: 73747 - DNA, 19 bp, Artificial Sequence
  Synthetic
gcaagtcgugcgagttcug

SEQ ID NO: 73748 - DNA, 18 bp, Artificial Sequence
  Synthetic
cgagtcgauggccauggg

SEQ ID NO: 73749 - DNA, 17 bp, Artificial Sequence
  Synthetic
acgccgccuctctucag

SEQ ID NO: 73750 - DNA, 18 bp, Artificial Sequence
  Synthetic
ccatctccucggcacuga

SEQ ID NO: 73751 - DNA, 18 bp, Artificial Sequence
  Synthetic
tutccugggcgacagcaa

SEQ ID NO: 73752 - DNA, 18 bp, Artificial Sequence
  Synthetic
tcaugcgcagcaggtuga

SEQ ID NO: 73753 - DNA, 19 bp, Artificial Sequence
  Synthetic
gcttccgcauctaccugga

SEQ ID NO: 73754 - DNA, 24 bp, Artificial Sequence
  Synthetic
attgctctggaacutgaaggtcut

SEQ ID NO: 73755 - DNA, 17 bp, Artificial Sequence
  Synthetic
gcggcaacccuaugcac

SEQ ID NO: 73756 - DNA, 18 bp, Artificial Sequence
  Synthetic
gcccgugcgtcttcaugt

SEQ ID NO: 73757 - DNA, 18 bp, Artificial Sequence
  Synthetic
cagcgacacgugcgagua

SEQ ID NO: 73758 - DNA, 21 bp, Artificial Sequence
  Synthetic
gctgucgcccaggaaatucat

SEQ ID NO: 73759 - DNA, 19 bp, Artificial Sequence
  Synthetic
cttcaacagcgcguggtuc

SEQ ID NO: 73760 - DNA, 18 bp, Artificial Sequence
  Synthetic
gtucaggagccggugcat

SEQ ID NO: 73761 - DNA, 18 bp, Artificial Sequence
  Synthetic
gtgcctucgaccgaguca

SEQ ID NO: 73762 - DNA, 19 bp, Artificial Sequence
  Synthetic
cagggtgccugcctcauag

SEQ ID NO: 73763 - DNA, 20 bp, Artificial Sequence
  Synthetic
cggtggaaccugacatgugg

SEQ ID NO: 73764 - DNA, 19 bp, Artificial Sequence
  Synthetic
tgaacacctugccgcagua

SEQ ID NO: 73765 - DNA, 17 bp, Artificial Sequence
  Synthetic
cagccugcgcttcucca

SEQ ID NO: 73766 - DNA, 17 bp, Artificial Sequence
  Synthetic
acgagugcucggacgac

SEQ ID NO: 73767 - DNA, 19 bp, Artificial Sequence
  Synthetic
gcucatcccguccgagaac

SEQ ID NO: 73768 - DNA, 18 bp, Artificial Sequence
  Synthetic
gaagccgugcgtgttcug

SEQ ID NO: 73769 - DNA, 18 bp, Artificial Sequence
  Synthetic
ccgcttcucacgctguct

SEQ ID NO: 73770 - DNA, 17 bp, Artificial Sequence
  Synthetic
gcggagcagcucctcua

SEQ ID NO: 73771 - DNA, 17 bp, Artificial Sequence
  Synthetic
ctgcgugtctccuccca

SEQ ID NO: 73772 - DNA, 21 bp, Artificial Sequence
  Synthetic
ggacagggutggaaaggctut

SEQ ID NO: 73773 - DNA, 21 bp, Artificial Sequence
  Synthetic
gcacaatgacucggcactuac

SEQ ID NO: 73774 - DNA, 20 bp, Artificial Sequence
  Synthetic
gatgaaggcacugcagccua

SEQ ID NO: 73775 - DNA, 27 bp, Artificial Sequence
  Synthetic
tgtgtatgggugactattcttggttuc

SEQ ID NO: 73776 - DNA, 27 bp, Artificial Sequence
  Synthetic
ctggaaaagaguaattcacacaagcuc

SEQ ID NO: 73777 - DNA, 28 bp, Artificial Sequence
  Synthetic
tgacacttggaguaacaattgcctttua

SEQ ID NO: 73778 - DNA, 29 bp, Artificial Sequence
  Synthetic
gagggaaagugatacuagacaagaaaact

SEQ ID NO: 73779 - DNA, 22 bp, Artificial Sequence
  Synthetic
gctttcucccactcctcuccaa

SEQ ID NO: 73780 - DNA, 23 bp, Artificial Sequence
  Synthetic
gcctacuacagagggctacagut

SEQ ID NO: 73781 - DNA, 22 bp, Artificial Sequence
  Synthetic
ggctgcuccactaatctcucag

SEQ ID NO: 73782 - DNA, 26 bp, Artificial Sequence
  Synthetic
ccatccagugacaaatcccatuacat

SEQ ID NO: 73783 - DNA, 26 bp, Artificial Sequence
  Synthetic
tgttctcgagguagtaagatctccug

SEQ ID NO: 73784 - DNA, 21 bp, Artificial Sequence
  Synthetic
tccgccaaaagaucccagaut

SEQ ID NO: 73785 - DNA, 23 bp, Artificial Sequence
  Synthetic
tggtggaagaaccutctcuaggg

SEQ ID NO: 73786 - DNA, 23 bp, Artificial Sequence
  Synthetic
ccutctggaaatuaccccgagag

SEQ ID NO: 73787 - DNA, 23 bp, Artificial Sequence
  Synthetic
aaaggugggagagcuagaggaat

SEQ ID NO: 73788 - DNA, 26 bp, Artificial Sequence
  Synthetic
gaatccagagaacacauaccatcugt

SEQ ID NO: 73789 - DNA, 20 bp, Artificial Sequence
  Synthetic
ctcctcgagauggcacaguc

SEQ ID NO: 73790 - DNA, 22 bp, Artificial Sequence
  Synthetic
ctgtccucccaaacctcaguag

SEQ ID NO: 73791 - DNA, 20 bp, Artificial Sequence
  Synthetic
ccautgtcugcaggaacggt

SEQ ID NO: 73792 - DNA, 20 bp, Artificial Sequence
  Synthetic
agttgcugcagggtagctug

SEQ ID NO: 73793 - DNA, 23 bp, Artificial Sequence
  Synthetic
ccatcaaccaugccactgtttut

SEQ ID NO: 73794 - DNA, 25 bp, Artificial Sequence
  Synthetic
agtaattcaaaugctgcuccaggaa

SEQ ID NO: 73795 - DNA, 23 bp, Artificial Sequence
  Synthetic
gagccaaaaagcutcttccctug

SEQ ID NO: 73796 - DNA, 24 bp, Artificial Sequence
  Synthetic
ctcttgacagccutacttcacuct

SEQ ID NO: 73797 - DNA, 23 bp, Artificial Sequence
  Synthetic
gaggtgaccutcaaagucagagg

SEQ ID NO: 73798 - DNA, 24 bp, Artificial Sequence
  Synthetic
gaaagugatgaugaggagcaagga

SEQ ID NO: 73799 - DNA, 22 bp, Artificial Sequence
  Synthetic
gtgaggautcaggtguggaact

SEQ ID NO: 73800 - DNA, 26 bp, Artificial Sequence
  Synthetic
ccaactgagtuccaccagctttaaut

SEQ ID NO: 73801 - DNA, 23 bp, Artificial Sequence
  Synthetic
tgctgtcagugaacattugcaag

SEQ ID NO: 73802 - DNA, 23 bp, Artificial Sequence
  Synthetic
cgctacgcaugggatcttuacat

SEQ ID NO: 73803 - DNA, 21 bp, Artificial Sequence
  Synthetic
tcaatccuggcaagaccagug

SEQ ID NO: 73804 - DNA, 22 bp, Artificial Sequence
  Synthetic
ggaaatgtucaccgcagtcuga

SEQ ID NO: 73805 - DNA, 20 bp, Artificial Sequence
  Synthetic
gguccagtacucccaacagg

SEQ ID NO: 73806 - DNA, 24 bp, Artificial Sequence
  Synthetic
ctgggtgaucagagcaatgtuaca

SEQ ID NO: 73807 - DNA, 22 bp, Artificial Sequence
  Synthetic
gtttgtgctuggtcccaactuc

SEQ ID NO: 73808 - DNA, 21 bp, Artificial Sequence
  Synthetic
gagccacagugcatcacttuc

SEQ ID NO: 73809 - DNA, 23 bp, Artificial Sequence
  Synthetic
acaaggcacaauacacagagcut

SEQ ID NO: 73810 - DNA, 27 bp, Artificial Sequence
  Synthetic
tcccactaugaaggatcctgtaaaugt

SEQ ID NO: 73811 - DNA, 23 bp, Artificial Sequence
  Synthetic
agaaacgagagccutggtttuca

SEQ ID NO: 73812 - DNA, 21 bp, Artificial Sequence
  Synthetic
cagggugaggtccctaugaca

SEQ ID NO: 73813 - DNA, 24 bp, Artificial Sequence
  Synthetic
gcatgtguggcattctuaacaact

SEQ ID NO: 73814 - DNA, 22 bp, Artificial Sequence
  Synthetic
gatcccuccagttttucccagt

SEQ ID NO: 73815 - DNA, 23 bp, Artificial Sequence
  Synthetic
tgttctcggcauttgcctuaaga

SEQ ID NO: 73816 - DNA, 23 bp, Artificial Sequence
  Synthetic
acgatgactguattggacccuca

SEQ ID NO: 73817 - DNA, 25 bp, Artificial Sequence
  Synthetic
agagtgctccugcctaaagagtaut

SEQ ID NO: 73818 - DNA, 20 bp, Artificial Sequence
  Synthetic
cggtgaguccacggauacag

SEQ ID NO: 73819 - DNA, 22 bp, Artificial Sequence
  Synthetic
gtcaccautcacctuggacagt

SEQ ID NO: 73820 - DNA, 23 bp, Artificial Sequence
  Synthetic
ttctgccagauagctgugaaaca

SEQ ID NO: 73821 - DNA, 28 bp, Artificial Sequence
  Synthetic
ggaatccatttcutccagtttccuagag

SEQ ID NO: 73822 - DNA, 26 bp, Artificial Sequence
  Synthetic
agcgtcaagaaugagaagactttugt

SEQ ID NO: 73823 - DNA, 18 bp, Artificial Sequence
  Synthetic
tcacugagcccctuccct

SEQ ID NO: 73824 - DNA, 25 bp, Artificial Sequence
  Synthetic
ggaugagaaacccaatuggaaccaa

SEQ ID NO: 73825 - DNA, 21 bp, Artificial Sequence
  Synthetic
ctcagtacuggccagcaguag

SEQ ID NO: 73826 - DNA, 27 bp, Artificial Sequence
  Synthetic
caaaaccaugaggagaatactuacgga

SEQ ID NO: 73827 - DNA, 24 bp, Artificial Sequence
  Synthetic
gtattccatcgaucgtcacacuga

SEQ ID NO: 73828 - DNA, 22 bp, Artificial Sequence
  Synthetic
ctgtccuaagcactagcagcut

SEQ ID NO: 73829 - DNA, 23 bp, Artificial Sequence
  Synthetic
tcttcttcaauccttggcacucc

SEQ ID NO: 73830 - DNA, 25 bp, Artificial Sequence
  Synthetic
aaaccaacgugttatgaaaccauca

SEQ ID NO: 73831 - DNA, 23 bp, Artificial Sequence
  Synthetic
tgactgtcuggtcatttgcaugt

SEQ ID NO: 73832 - DNA, 27 bp, Artificial Sequence
  Synthetic
aagtttagtgauacgacacaagaucgg

SEQ ID NO: 73833 - DNA, 27 bp, Artificial Sequence
  Synthetic
taattattttctgccuacccgagacua

SEQ ID NO: 73834 - DNA, 26 bp, Artificial Sequence
  Synthetic
agtctgtcccaacuacatagatucca

SEQ ID NO: 73835 - DNA, 25 bp, Artificial Sequence
  Synthetic
ggaaaacctgguagcctatgcuaag

SEQ ID NO: 73836 - DNA, 21 bp, Artificial Sequence
  Synthetic
cccgugaaaggaaacaugcaa

SEQ ID NO: 73837 - DNA, 26 bp, Artificial Sequence
  Synthetic
tgatgtggtauctatcttgguggact

SEQ ID NO: 73838 - DNA, 28 bp, Artificial Sequence
  Synthetic
cttgcatagaagacutgaaagcattugt

SEQ ID NO: 73839 - DNA, 28 bp, Artificial Sequence
  Synthetic
tcagtcttaccuagaagcactgttuact

SEQ ID NO: 73840 - DNA, 21 bp, Artificial Sequence
  Synthetic
tcatcccagucttcccuccaa

SEQ ID NO: 73841 - DNA, 22 bp, Artificial Sequence
  Synthetic
ctacagagggaucaccaugacc

SEQ ID NO: 73842 - DNA, 20 bp, Artificial Sequence
  Synthetic
atgaacgugccttgcccuaa

SEQ ID NO: 73843 - DNA, 23 bp, Artificial Sequence
  Synthetic
ttgcaguatgagtttuccccaca

SEQ ID NO: 73844 - DNA, 28 bp, Artificial Sequence
  Synthetic
tttgaatgacutatcttctgaugcacca

SEQ ID NO: 73845 - DNA, 27 bp, Artificial Sequence
  Synthetic
actcactatactguccactgctagtut

SEQ ID NO: 73846 - DNA, 28 bp, Artificial Sequence
  Synthetic
aaggccttttagauaatcccataaguga

SEQ ID NO: 73847 - DNA, 28 bp, Artificial Sequence
  Synthetic
aagaagtgttttgauccacggaaaaaut

SEQ ID NO: 73848 - DNA, 22 bp, Artificial Sequence
  Synthetic
cgtacatguccccttccactut

SEQ ID NO: 73849 - DNA, 23 bp, Artificial Sequence
  Synthetic
ctggacgaaaccccaugtcttua

SEQ ID NO: 73850 - DNA, 28 bp, Artificial Sequence
  Synthetic
tcctctctauccagaggttttgtagtut

SEQ ID NO: 73851 - DNA, 23 bp, Artificial Sequence
  Synthetic
gctgctctgaaugtcttggtcua

SEQ ID NO: 73852 - DNA, 27 bp, Artificial Sequence
  Synthetic
gtcccatacugttttcattgacuacca

SEQ ID NO: 73853 - DNA, 25 bp, Artificial Sequence
  Synthetic
cctggaaagaaaacacuctccucag

SEQ ID NO: 73854 - DNA, 22 bp, Artificial Sequence
  Synthetic
cacaccgaggacucaagaauga

SEQ ID NO: 73855 - DNA, 25 bp, Artificial Sequence
  Synthetic
gcacaucaggaaaagcactacatut

SEQ ID NO: 73856 - DNA, 21 bp, Artificial Sequence
  Synthetic
cggtgccaacuccaattuacc

SEQ ID NO: 73857 - DNA, 26 bp, Artificial Sequence
  Synthetic
ggcacttguattggtttctcugaaga

SEQ ID NO: 73858 - DNA, 28 bp, Artificial Sequence
  Synthetic
cgtggaucaaaacacttctucagaaaat

SEQ ID NO: 73859 - DNA, 29 bp, Artificial Sequence
  Synthetic
tcggttcctuggaataaataggtatcuca

SEQ ID NO: 73860 - DNA, 25 bp, Artificial Sequence
  Synthetic
tgcttttccugatgtgcctgauaaa

SEQ ID NO: 73861 - DNA, 28 bp, Artificial Sequence
  Synthetic
ggtgaaattcaucccatcatcttttuct

SEQ ID NO: 73862 - DNA, 27 bp, Artificial Sequence
  Synthetic
gaacaccaacagugatatgtactccua

SEQ ID NO: 73863 - DNA, 25 bp, Artificial Sequence
  Synthetic
cctcuacagggcccctattatuaga

SEQ ID NO: 73864 - DNA, 22 bp, Artificial Sequence
  Synthetic
gtcccaaagugcagcttgtcua

SEQ ID NO: 73865 - DNA, 26 bp, Artificial Sequence
  Synthetic
catatttttgucagggagcucaggat

SEQ ID NO: 73866 - DNA, 28 bp, Artificial Sequence
  Synthetic
gcctcttctacacaucaaatgcatguat

SEQ ID NO: 73867 - DNA, 23 bp, Artificial Sequence
  Synthetic
cctttagatucccgtgagtuggt

SEQ ID NO: 73868 - DNA, 21 bp, Artificial Sequence
  Synthetic
ctaaccccuctggaggaaugg

SEQ ID NO: 73869 - DNA, 28 bp, Artificial Sequence
  Synthetic
ctctgactttugcttgatagaggtucat

SEQ ID NO: 73870 - DNA, 28 bp, Artificial Sequence
  Synthetic
aaagatgtacaaagucctggatttcuga

SEQ ID NO: 73871 - DNA, 24 bp, Artificial Sequence
  Synthetic
ctccagggcacuttcgttatcuat

SEQ ID NO: 73872 - DNA, 22 bp, Artificial Sequence
  Synthetic
gctuacaccatccucagccaag

SEQ ID NO: 73873 - DNA, 26 bp, Artificial Sequence
  Synthetic
cacgggatugagctaatacacattug

SEQ ID NO: 73874 - DNA, 27 bp, Artificial Sequence
  Synthetic
gatattacccagagutgtatgguggaa

SEQ ID NO: 73875 - DNA, 25 bp, Artificial Sequence
  Synthetic
tcctagtgatcuccatgtcatccug

SEQ ID NO: 73876 - DNA, 27 bp, Artificial Sequence
  Synthetic
ctggaggauaaagaggacttccattug

SEQ ID NO: 73877 - DNA, 23 bp, Artificial Sequence
  Synthetic
cggttttgtccaugggcctaaua

SEQ ID NO: 73878 - DNA, 28 bp, Artificial Sequence
  Synthetic
cacacaactgccutagaatgtaaaacuc

SEQ ID NO: 73879 - DNA, 24 bp, Artificial Sequence
  Synthetic
gtggctugacagtcaaugaaaaca

SEQ ID NO: 73880 - DNA, 23 bp, Artificial Sequence
  Synthetic
tctggaagucaccgattcccaua

SEQ ID NO: 73881 - DNA, 21 bp, Artificial Sequence
  Synthetic
tttccuacagccagtgctugt

SEQ ID NO: 73882 - DNA, 25 bp, Artificial Sequence
  Synthetic
aagatgcttttgucccttcttctut

SEQ ID NO: 73883 - DNA, 23 bp, Artificial Sequence
  Synthetic
tggtctttguctgactcugagga

SEQ ID NO: 73884 - DNA, 26 bp, Artificial Sequence
  Synthetic
cgattgttaattutagggcccatugt

SEQ ID NO: 73885 - DNA, 20 bp, Artificial Sequence
  Synthetic
accaacaacgcuacctucca

SEQ ID NO: 73886 - DNA, 25 bp, Artificial Sequence
  Synthetic
gctgtgtucaagaaatcgcugaaaa

SEQ ID NO: 73887 - DNA, 23 bp, Artificial Sequence
  Synthetic
gcctggtcuacaactttcccuat

SEQ ID NO: 73888 - DNA, 21 bp, Artificial Sequence
  Synthetic
gctagtcugagctcccugaac

SEQ ID NO: 73889 - DNA, 23 bp, Artificial Sequence
  Synthetic
gauttctgcattucccagcacat

SEQ ID NO: 73890 - DNA, 19 bp, Artificial Sequence
  Synthetic
gcgatagguccccgtgtut

SEQ ID NO: 73891 - DNA, 19 bp, Artificial Sequence
  Synthetic
cggtgaccutgcgatgugt

SEQ ID NO: 73892 - DNA, 24 bp, Artificial Sequence
  Synthetic
agtgctgctauggatgaaaagguc

SEQ ID NO: 73893 - DNA, 26 bp, Artificial Sequence
  Synthetic
agcagttgcaugactacttguaaagt

SEQ ID NO: 73894 - DNA, 19 bp, Artificial Sequence
  Synthetic
gcggcugguaagggaagag

SEQ ID NO: 73895 - DNA, 17 bp, Artificial Sequence
  Synthetic
aggcuggagcccctgua

SEQ ID NO: 73896 - DNA, 17 bp, Artificial Sequence
  Synthetic
cggccgggucgatguag

SEQ ID NO: 73897 - DNA, 18 bp, Artificial Sequence
  Synthetic
ccgaugagcagccaccug

SEQ ID NO: 73898 - DNA, 28 bp, Artificial Sequence
  Synthetic
cgcaagttgaaagcugtcagttaaauaa

SEQ ID NO: 73899 - DNA, 29 bp, Artificial Sequence
  Synthetic
actacccuccaaattatcaguacaggaaa

SEQ ID NO: 73900 - DNA, 24 bp, Artificial Sequence
  Synthetic
aaggaagggccautagaacacauc

SEQ ID NO: 73901 - DNA, 24 bp, Artificial Sequence
  Synthetic
tgatggtctttuctctccctcuca

SEQ ID NO: 73902 - DNA, 19 bp, Artificial Sequence
  Synthetic
ccattccacgcugccatug

SEQ ID NO: 73903 - DNA, 22 bp, Artificial Sequence
  Synthetic
cgcatccuagacctcacttcug

SEQ ID NO: 73904 - DNA, 24 bp, Artificial Sequence
  Synthetic
tgaaatgtgtgugatgcctctugt

SEQ ID NO: 73905 - DNA, 21 bp, Artificial Sequence
  Synthetic
gaggatgcugtcctgaaggug

SEQ ID NO: 73906 - DNA, 24 bp, Artificial Sequence
  Synthetic
ctcactcacacutcagcatctuca

SEQ ID NO: 73907 - DNA, 21 bp, Artificial Sequence
  Synthetic
ccagggacutaagggaccugt

SEQ ID NO: 73908 - DNA, 27 bp, Artificial Sequence
  Synthetic
ttccaaagatcautatggcacttucct

SEQ ID NO: 73909 - DNA, 22 bp, Artificial Sequence
  Synthetic
acttaccaaaggugctgctcuc

SEQ ID NO: 73910 - DNA, 19 bp, Artificial Sequence
  Synthetic
cccaggcgccauctaucac

SEQ ID NO: 73911 - DNA, 27 bp, Artificial Sequence
  Synthetic
gcttagaucaagctatctcaatugcca

SEQ ID NO: 73912 - DNA, 29 bp, Artificial Sequence
  Synthetic
aggatggaaaaauaaaaacgcauaaaact

SEQ ID NO: 73913 - DNA, 26 bp, Artificial Sequence
  Synthetic
agccgtttaccaugagatccttatug

SEQ ID NO: 73914 - DNA, 29 bp, Artificial Sequence
  Synthetic
ccaaactcacccuaatttcttcacauact

SEQ ID NO: 73915 - DNA, 24 bp, Artificial Sequence
  Synthetic
cctgagttaaacaugtgcctccut

SEQ ID NO: 73916 - DNA, 23 bp, Artificial Sequence
  Synthetic
ctgttggtacugtttgggtggua

SEQ ID NO: 73917 - DNA, 24 bp, Artificial Sequence
  Synthetic
agcttgatcaucactccacucaac

SEQ ID NO: 73918 - DNA, 21 bp, Artificial Sequence
  Synthetic
caggcuaagggatggcaguag

SEQ ID NO: 73919 - DNA, 22 bp, Artificial Sequence
  Synthetic
aaacggaggucgcgtttacaua

SEQ ID NO: 73920 - DNA, 21 bp, Artificial Sequence
  Synthetic
gggagaacagccaacucaucc

SEQ ID NO: 73921 - DNA, 21 bp, Artificial Sequence
  Synthetic
tgatgcctcugtgctctccua

SEQ ID NO: 73922 - DNA, 21 bp, Artificial Sequence
  Synthetic
ggttccccaagaugccttgut

SEQ ID NO: 73923 - DNA, 28 bp, Artificial Sequence
  Synthetic
cacagatcatucagttgcttttuacagt

SEQ ID NO: 73924 - DNA, 21 bp, Artificial Sequence
  Synthetic
agcttgtcugagtgggatguc

SEQ ID NO: 73925 - DNA, 27 bp, Artificial Sequence
  Synthetic
agtgagtguagccattcatttttcugt

SEQ ID NO: 73926 - DNA, 23 bp, Artificial Sequence
  Synthetic
ggtctcaagtutgtggctcttug

SEQ ID NO: 73927 - DNA, 19 bp, Artificial Sequence
  Synthetic
ttcacuggcctcctcucct

SEQ ID NO: 73928 - DNA, 22 bp, Artificial Sequence
  Synthetic
gtgggtuggaaagctcaggaut

SEQ ID NO: 73929 - DNA, 20 bp, Artificial Sequence
  Synthetic
ccttccaugggcaccaugag

SEQ ID NO: 73930 - DNA, 27 bp, Artificial Sequence
  Synthetic
aaaatccattggcutttagttgccaut

SEQ ID NO: 73931 - DNA, 24 bp, Artificial Sequence
  Synthetic
tcagtggtcugtgcatactguaga

SEQ ID NO: 73932 - DNA, 17 bp, Artificial Sequence
  Synthetic
ggagcgcuguagcacct

SEQ ID NO: 73933 - DNA, 21 bp, Artificial Sequence
  Synthetic
tgtgccuaccacguaaccaaa

SEQ ID NO: 73934 - DNA, 25 bp, Artificial Sequence
  Synthetic
cctgcaaacautaaccaugaccaat

SEQ ID NO: 73935 - DNA, 25 bp, Artificial Sequence
  Synthetic
accacacctgugaattctgaatucc

SEQ ID NO: 73936 - DNA, 22 bp, Artificial Sequence
  Synthetic
gacaccacgutgcugaaaacat

SEQ ID NO: 73937 - DNA, 26 bp, Artificial Sequence
  Synthetic
agtagggtgaagugactttttctugg

SEQ ID NO: 73938 - DNA, 28 bp, Artificial Sequence
  Synthetic
cacagagtuacttttggcaatuaccaat

SEQ ID NO: 73939 - DNA, 24 bp, Artificial Sequence
  Synthetic
cccagatcucagctgtacttucac

SEQ ID NO: 73940 - DNA, 21 bp, Artificial Sequence
  Synthetic
acagggagacaugaaccccut

SEQ ID NO: 73941 - DNA, 25 bp, Artificial Sequence
  Synthetic
cgctgacauctccatttcatucaca

SEQ ID NO: 73942 - DNA, 21 bp, Artificial Sequence
  Synthetic
caaatagacgugggctgucct

SEQ ID NO: 73943 - DNA, 26 bp, Artificial Sequence
  Synthetic
caacuccaaagaatatuccggagact

SEQ ID NO: 73944 - DNA, 25 bp, Artificial Sequence
  Synthetic
tcacaatgagutcaggcttauggag

SEQ ID NO: 73945 - DNA, 27 bp, Artificial Sequence
  Synthetic
cggtacttuaaggagcttttgtgttug

SEQ ID NO: 73946 - DNA, 21 bp, Artificial Sequence
  Synthetic
aggaccccugtuagcagagag

SEQ ID NO: 73947 - DNA, 27 bp, Artificial Sequence
  Synthetic
tgcatacaaauacacagacacacauga

SEQ ID NO: 73948 - DNA, 24 bp, Artificial Sequence
  Synthetic
caagaaugcagcgtuacagacaaa

SEQ ID NO: 73949 - DNA, 28 bp, Artificial Sequence
  Synthetic
actgcatgaggutgctctagaattttua

SEQ ID NO: 73950 - DNA, 27 bp, Artificial Sequence
  Synthetic
gaaatcacatugaatggtcaugcaaac

SEQ ID NO: 73951 - DNA, 26 bp, Artificial Sequence
  Synthetic
acattttgccaagaaacugcactuac

SEQ ID NO: 73952 - DNA, 28 bp, Artificial Sequence
  Synthetic
gcaaaaggcaagaaaaaucagatuggat

SEQ ID NO: 73953 - DNA, 25 bp, Artificial Sequence
  Synthetic
ttttaaacaggcugaacctctccuc

SEQ ID NO: 73954 - DNA, 22 bp, Artificial Sequence
  Synthetic
ggaugagaaaggcaagccuaca

SEQ ID NO: 73955 - DNA, 22 bp, Artificial Sequence
  Synthetic
tttctcccccucttctuagcct

SEQ ID NO: 73956 - DNA, 20 bp, Artificial Sequence
  Synthetic
cagttguggccctguaggac

SEQ ID NO: 73957 - DNA, 26 bp, Artificial Sequence
  Synthetic
aggtttcuaacgcctgttttcttuct

SEQ ID NO: 73958 - DNA, 27 bp, Artificial Sequence
  Synthetic
acgtgttaataaaaggugatcagccut

SEQ ID NO: 73959 - DNA, 19 bp, Artificial Sequence
  Synthetic
tggtgccugtggagaggua

SEQ ID NO: 73960 - DNA, 22 bp, Artificial Sequence
  Synthetic
gactctguggacaagugagcat

SEQ ID NO: 73961 - DNA, 20 bp, Artificial Sequence
  Synthetic
ccgaaacucaggcaacucag

SEQ ID NO: 73962 - DNA, 22 bp, Artificial Sequence
  Synthetic
ctcacccatguggcttaaccut

SEQ ID NO: 73963 - DNA, 27 bp, Artificial Sequence
  Synthetic
aaaaatacctuagaaagccggaaguca

SEQ ID NO: 73964 - DNA, 28 bp, Artificial Sequence
  Synthetic
gataaaatattggtugacttccggctut

SEQ ID NO: 73965 - DNA, 28 bp, Artificial Sequence
  Synthetic
gcaagtaaccuatttacaaaugccacat

SEQ ID NO: 73966 - DNA, 20 bp, Artificial Sequence
  Synthetic
tggactucgaagagcgctut

SEQ ID NO: 73967 - DNA, 18 bp, Artificial Sequence
  Synthetic
tgcccaaugctcgccuac

SEQ ID NO: 73968 - DNA, 17 bp, Artificial Sequence
  Synthetic
ccacgcaucccgcctut

SEQ ID NO: 73969 - DNA, 23 bp, Artificial Sequence
  Synthetic
gggcucattuaccagagagacag

SEQ ID NO: 73970 - DNA, 20 bp, Artificial Sequence
  Synthetic
ttucagcccagcggattuct

SEQ ID NO: 73971 - DNA, 18 bp, Artificial Sequence
  Synthetic
ggagcucagggaucccca

SEQ ID NO: 73972 - DNA, 27 bp, Artificial Sequence
  Synthetic
agaaataggtctucagcgatctacuca

SEQ ID NO: 73973 - DNA, 27 bp, Artificial Sequence
  Synthetic
ggtttctttgcutctgctaaaactuca

SEQ ID NO: 73974 - DNA, 25 bp, Artificial Sequence
  Synthetic
guccaagaacaugaaagggaaaagg

SEQ ID NO: 73975 - DNA, 20 bp, Artificial Sequence
  Synthetic
cccgaacagagugcaaugct

SEQ ID NO: 73976 - DNA, 27 bp, Artificial Sequence
  Synthetic
ttcttttatagucaaacgagcugcaga

SEQ ID NO: 73977 - DNA, 27 bp, Artificial Sequence
  Synthetic
ggttactgcaaucaaagaatccttgut

SEQ ID NO: 73978 - DNA, 18 bp, Artificial Sequence
  Synthetic
gggacagutcgcuggaca

SEQ ID NO: 73979 - DNA, 19 bp, Artificial Sequence
  Synthetic
gtcucaccccagactggut

SEQ ID NO: 73980 - DNA, 19 bp, Artificial Sequence
  Synthetic
ccatggugactgcgagucc

SEQ ID NO: 73981 - DNA, 21 bp, Artificial Sequence
  Synthetic
atcgccacgucccttaguaac

SEQ ID NO: 73982 - DNA, 23 bp, Artificial Sequence
  Synthetic
cacttgggtcuttttgtgcctut

SEQ ID NO: 73983 - DNA, 18 bp, Artificial Sequence
  Synthetic
gutcacgtugggcaggga

SEQ ID NO: 73984 - DNA, 20 bp, Artificial Sequence
  Synthetic
cagccgaggccaguactaug

SEQ ID NO: 73985 - DNA, 22 bp, Artificial Sequence
  Synthetic
gataaccccagcugtccucaat

SEQ ID NO: 73986 - DNA, 17 bp, Artificial Sequence
  Synthetic
gcuggagaccgcaccug

SEQ ID NO: 73987 - DNA, 18 bp, Artificial Sequence
  Synthetic
cagcggautcugcagcaa

SEQ ID NO: 73988 - DNA, 19 bp, Artificial Sequence
  Synthetic
gggacccaauctgctgcut

SEQ ID NO: 73989 - DNA, 18 bp, Artificial Sequence
  Synthetic
agatggcggcucagaugg

SEQ ID NO: 73990 - DNA, 18 bp, Artificial Sequence
  Synthetic
cccatcuggccaagcugt

SEQ ID NO: 73991 - DNA, 19 bp, Artificial Sequence
  Synthetic
ccagtuccagcagccucaa

SEQ ID NO: 73992 - DNA, 17 bp, Artificial Sequence
  Synthetic
ggtagccuccgggucct

SEQ ID NO: 73993 - DNA, 28 bp, Artificial Sequence
  Synthetic
gtatgaatccacaguaccgagaaatgut

SEQ ID NO: 73994 - DNA, 23 bp, Artificial Sequence
  Synthetic
gggtctuctgttgacucacaacc

SEQ ID NO: 73995 - DNA, 27 bp, Artificial Sequence
  Synthetic
agcggtcuacttattctgttuccaaaa

SEQ ID NO: 73996 - DNA, 17 bp, Artificial Sequence
  Synthetic
catgccggcacucccut

SEQ ID NO: 73997 - DNA, 22 bp, Artificial Sequence
  Synthetic
ccaggccutgaacatcaugaac

SEQ ID NO: 73998 - DNA, 24 bp, Artificial Sequence
  Synthetic
agagccaggacaagauctagacut

SEQ ID NO: 73999 - DNA, 21 bp, Artificial Sequence
  Synthetic
cagaagtguccctgtuccagt

SEQ ID NO: 74000 - DNA, 23 bp, Artificial Sequence
  Synthetic
ctgtggattcauactcgccaugt

SEQ ID NO: 74001 - DNA, 18 bp, Artificial Sequence
  Synthetic
ccagccugcagaaccuga

SEQ ID NO: 74002 - DNA, 21 bp, Artificial Sequence
  Synthetic
ctggctctucatggatccuca

SEQ ID NO: 74003 - DNA, 22 bp, Artificial Sequence
  Synthetic
ctttcgtgccucccatcctuag

SEQ ID NO: 74004 - DNA, 28 bp, Artificial Sequence
  Synthetic
gtattttctctuaggttctccagtugct

SEQ ID NO: 74005 - DNA, 27 bp, Artificial Sequence
  Synthetic
tctgcatcaaugatgtttatgaccuga

SEQ ID NO: 74006 - DNA, 21 bp, Artificial Sequence
  Synthetic
ccuacagggcttucccagaac

SEQ ID NO: 74007 - DNA, 20 bp, Artificial Sequence
  Synthetic
gccccaagutacauccacga

SEQ ID NO: 74008 - DNA, 23 bp, Artificial Sequence
  Synthetic
ttctgugagaggaauccaaagcc

SEQ ID NO: 74009 - DNA, 28 bp, Artificial Sequence
  Synthetic
gcaaagttgccaaaauaaaactcaggua

SEQ ID NO: 74010 - DNA, 21 bp, Artificial Sequence
  Synthetic
gcagcugcattttctuggact

SEQ ID NO: 74011 - DNA, 25 bp, Artificial Sequence
  Synthetic
gaagtttatcagcaauggcccttuc

SEQ ID NO: 74012 - DNA, 21 bp, Artificial Sequence
  Synthetic
cttgacggucacagtgtccut

SEQ ID NO: 74013 - DNA, 26 bp, Artificial Sequence
  Synthetic
tgtcaatctuctcttcattctugcca

SEQ ID NO: 74014 - DNA, 28 bp, Artificial Sequence
  Synthetic
cttagatauggatatgtgtgugccacaa

SEQ ID NO: 74015 - DNA, 28 bp, Artificial Sequence
  Synthetic
actttgacatgugaatatgctctucagt

SEQ ID NO: 74016 - DNA, 20 bp, Artificial Sequence
  Synthetic
ctcccuctcaccugcagaga

SEQ ID NO: 74017 - DNA, 19 bp, Artificial Sequence
  Synthetic
acaaggugacggugcagag

SEQ ID NO: 74018 - DNA, 24 bp, Artificial Sequence
  Synthetic
ctctaagguctcaacagucagcag

SEQ ID NO: 74019 - DNA, 21 bp, Artificial Sequence
  Synthetic
cctgaagcuctgagccacaut

SEQ ID NO: 74020 - DNA, 21 bp, Artificial Sequence
  Synthetic
accaaacagcuttguccacca

SEQ ID NO: 74021 - DNA, 22 bp, Artificial Sequence
  Synthetic
cccagagagcauctttgacugt

SEQ ID NO: 74022 - DNA, 21 bp, Artificial Sequence
  Synthetic
gtcgctcugaaccgtguagac

SEQ ID NO: 74023 - DNA, 22 bp, Artificial Sequence
  Synthetic
tgtcaagggcaaugtaagugct

SEQ ID NO: 74024 - DNA, 24 bp, Artificial Sequence
  Synthetic
gaaccgtguagacacagucaaaga

SEQ ID NO: 74025 - DNA, 25 bp, Artificial Sequence
  Synthetic
atgactccaacuacattgucaaggg

SEQ ID NO: 74026 - DNA, 23 bp, Artificial Sequence
  Synthetic
ccatctccuaacactggctcuga

SEQ ID NO: 74027 - DNA, 22 bp, Artificial Sequence
  Synthetic
gcaacauggagactggugagac

SEQ ID NO: 74028 - DNA, 21 bp, Artificial Sequence
  Synthetic
cccctucagatcttcucagca

SEQ ID NO: 74029 - DNA, 22 bp, Artificial Sequence
  Synthetic
gcutcgattcuccggaaaaagg

SEQ ID NO: 74030 - DNA, 25 bp, Artificial Sequence
  Synthetic
tcttgctgatguaccagttcttcug

SEQ ID NO: 74031 - DNA, 22 bp, Artificial Sequence
  Synthetic
tccctttcccugactccatcut

SEQ ID NO: 74032 - DNA, 22 bp, Artificial Sequence
  Synthetic
ccutctgaaaacuccccaggaa

SEQ ID NO: 74033 - DNA, 21 bp, Artificial Sequence
  Synthetic
caccgaauagttacggucgga

SEQ ID NO: 74034 - DNA, 20 bp, Artificial Sequence
  Synthetic
agctugcggaagtcagtuca

SEQ ID NO: 74035 - DNA, 18 bp, Artificial Sequence
  Synthetic
gcgtcccucgcaagucag

SEQ ID NO: 74036 - DNA, 18 bp, Artificial Sequence
  Synthetic
ccgcugcagaccctcuac

SEQ ID NO: 74037 - DNA, 18 bp, Artificial Sequence
  Synthetic
ggagcagcauggagccut

SEQ ID NO: 74038 - DNA, 20 bp, Artificial Sequence
  Synthetic
cacagcaggccuctcttcug

SEQ ID NO: 74039 - DNA, 19 bp, Artificial Sequence
  Synthetic
ggucccagcaagcatcugt

SEQ ID NO: 74040 - DNA, 24 bp, Artificial Sequence
  Synthetic
gcatccaggaggguctgaaagaua

SEQ ID NO: 74041 - DNA, 20 bp, Artificial Sequence
  Synthetic
catccccacccutcacucac

SEQ ID NO: 74042 - DNA, 25 bp, Artificial Sequence
  Synthetic
actgtaagcaugagaacttgtgugt

SEQ ID NO: 74043 - DNA, 23 bp, Artificial Sequence
  Synthetic
ctggctgagaacuggagtactuc

SEQ ID NO: 74044 - DNA, 23 bp, Artificial Sequence
  Synthetic
cagagagaaggagagaugcugag

SEQ ID NO: 74045 - DNA, 21 bp, Artificial Sequence
  Synthetic
cttcagggaaugcctggugaa

SEQ ID NO: 74046 - DNA, 27 bp, Artificial Sequence
  Synthetic
ctttctgtctuaatgcctcagugaaga

SEQ ID NO: 74047 - DNA, 26 bp, Artificial Sequence
  Synthetic
caaaagcatatgaucaggacatgugg

SEQ ID NO: 74048 - DNA, 28 bp, Artificial Sequence
  Synthetic
gcccctcauacattgataaattgguaca

SEQ ID NO: 74049 - DNA, 28 bp, Artificial Sequence
  Synthetic
aaaaattaaatuccctcacctgugagga

SEQ ID NO: 74050 - DNA, 26 bp, Artificial Sequence
  Synthetic
ggttgaacttacuctgtcaccctuag

SEQ ID NO: 74051 - DNA, 21 bp, Artificial Sequence
  Synthetic
aggcctcacuccagtcttcut

SEQ ID NO: 74052 - DNA, 20 bp, Artificial Sequence
  Synthetic
atctagcccccuccccauac

SEQ ID NO: 74053 - DNA, 18 bp, Artificial Sequence
  Synthetic
gaugggacagcaccguga

SEQ ID NO: 74054 - DNA, 23 bp, Artificial Sequence
  Synthetic
ggtctatccuaacacggcucact

SEQ ID NO: 74055 - DNA, 24 bp, Artificial Sequence
  Synthetic
cccataucgaaccaaagctctgut

SEQ ID NO: 74056 - DNA, 22 bp, Artificial Sequence
  Synthetic
gccgucaatttccucaaaagca

SEQ ID NO: 74057 - DNA, 25 bp, Artificial Sequence
  Synthetic
gtcagcaacagccuttgtaaatguc

SEQ ID NO: 74058 - DNA, 17 bp, Artificial Sequence
  Synthetic
aggguccccgaggugag

SEQ ID NO: 74059 - DNA, 20 bp, Artificial Sequence
  Synthetic
tgggccugaactgcctttut

SEQ ID NO: 74060 - DNA, 21 bp, Artificial Sequence
  Synthetic
gctctctguccccactctuca

SEQ ID NO: 74061 - DNA, 20 bp, Artificial Sequence
  Synthetic
ccauccacagggccaagtuc

SEQ ID NO: 74062 - DNA, 26 bp, Artificial Sequence
  Synthetic
gttgcaatguttctgtctuacaccat

SEQ ID NO: 74063 - DNA, 23 bp, Artificial Sequence
  Synthetic
ggaggaugccataacaacuccag

SEQ ID NO: 74064 - DNA, 24 bp, Artificial Sequence
  Synthetic
gcattgatagucctggctcugaat

SEQ ID NO: 74065 - DNA, 20 bp, Artificial Sequence
  Synthetic
ctactgcccugtctgcucac

SEQ ID NO: 74066 - DNA, 17 bp, Artificial Sequence
  Synthetic
ctuccagcaccggguct

SEQ ID NO: 74067 - DNA, 21 bp, Artificial Sequence
  Synthetic
gtaaccctgugccctcctcua

SEQ ID NO: 74068 - DNA, 21 bp, Artificial Sequence
  Synthetic
gcacccacuagcactatugcc

SEQ ID NO: 74069 - DNA, 23 bp, Artificial Sequence
  Synthetic
atccagcagaaugugaagacaca

SEQ ID NO: 74070 - DNA, 27 bp, Artificial Sequence
  Synthetic
ctctgtagcataugcacttgaaggaut

SEQ ID NO: 74071 - DNA, 22 bp, Artificial Sequence
  Synthetic
gcgaaaccagutcggtcttuca

SEQ ID NO: 74072 - DNA, 22 bp, Artificial Sequence
  Synthetic
cccctggtutcgcaaattcuca

SEQ ID NO: 74073 - DNA, 24 bp, Artificial Sequence
  Synthetic
ggaaucgtttgaaaucacaacgga

SEQ ID NO: 74074 - DNA, 25 bp, Artificial Sequence
  Synthetic
ctacttagaggugctaatcccgaut

SEQ ID NO: 74075 - DNA, 20 bp, Artificial Sequence
  Synthetic
ccttcttuggcagccaagug

SEQ ID NO: 74076 - DNA, 25 bp, Artificial Sequence
  Synthetic
aacaagaaccacaggautcucaagt

SEQ ID NO: 74077 - DNA, 21 bp, Artificial Sequence
  Synthetic
agatgaacagcaugggcucag

SEQ ID NO: 74078 - DNA, 22 bp, Artificial Sequence
  Synthetic
cacccccucctgtgtttcauag

SEQ ID NO: 74079 - DNA, 22 bp, Artificial Sequence
  Synthetic
ccagaugtctgtgucagaagca

SEQ ID NO: 74080 - DNA, 21 bp, Artificial Sequence
  Synthetic
agagaacacutaccccuggca

SEQ ID NO: 74081 - DNA, 25 bp, Artificial Sequence
  Synthetic
tgaaccgttgugggtacattuacag

SEQ ID NO: 74082 - DNA, 28 bp, Artificial Sequence
  Synthetic
tctttagcttucactcttcctactucct

SEQ ID NO: 74083 - DNA, 29 bp, Artificial Sequence
  Synthetic
caatgaaatctauagtcttacagcugcca

SEQ ID NO: 74084 - DNA, 21 bp, Artificial Sequence
  Synthetic
gccuggtuaggagcaaaggaa

SEQ ID NO: 74085 - DNA, 28 bp, Artificial Sequence
  Synthetic
gcattgacguttacattatttugcaaca

SEQ ID NO: 74086 - DNA, 25 bp, Artificial Sequence
  Synthetic
acaucgaggataaugaagggaacct

SEQ ID NO: 74087 - DNA, 22 bp, Artificial Sequence
  Synthetic
gctaacaaccucattccuccca

SEQ ID NO: 74088 - DNA, 21 bp, Artificial Sequence
  Synthetic
acaggaacugacgcaggtcua

SEQ ID NO: 74089 - DNA, 23 bp, Artificial Sequence
  Synthetic
catactggguagaaggcttuggg

SEQ ID NO: 74090 - DNA, 24 bp, Artificial Sequence
  Synthetic
gggaccuagagcaacttactagut

SEQ ID NO: 74091 - DNA, 28 bp, Artificial Sequence
  Synthetic
cgtaggcaacautattgacttgtttucc

SEQ ID NO: 74092 - DNA, 21 bp, Artificial Sequence
  Synthetic
ctgtgattuggccaggctcua

SEQ ID NO: 74093 - DNA, 28 bp, Artificial Sequence
  Synthetic
agtcaggagagcuactcagttaatugat

SEQ ID NO: 74094 - DNA, 19 bp, Artificial Sequence
  Synthetic
ggccctgcaucgtactcug

SEQ ID NO: 74095 - DNA, 23 bp, Artificial Sequence
  Synthetic
tcatcactcgucatgtccucact

SEQ ID NO: 74096 - DNA, 20 bp, Artificial Sequence
  Synthetic
gagctuctcgttcucagcgt

SEQ ID NO: 74097 - DNA, 19 bp, Artificial Sequence
  Synthetic
ctgggtccugggcaagaut

SEQ ID NO: 74098 - DNA, 27 bp, Artificial Sequence
  Synthetic
tttatcttcccautttcatcacgugga

SEQ ID NO: 74099 - DNA, 28 bp, Artificial Sequence
  Synthetic
gttgcatctggucttttcttctttguat

SEQ ID NO: 74100 - DNA, 27 bp, Artificial Sequence
  Synthetic
aaggttgucaacgagaaaatgaaacuc

SEQ ID NO: 74101 - DNA, 28 bp, Artificial Sequence
  Synthetic
agactatcttaccagucttgaggcauaa

SEQ ID NO: 74102 - DNA, 28 bp, Artificial Sequence
  Synthetic
cttatagagtaguagaccagcccctuaa

SEQ ID NO: 74103 - DNA, 20 bp, Artificial Sequence
  Synthetic
gcaacgucaucaacggcaat

SEQ ID NO: 74104 - DNA, 21 bp, Artificial Sequence
  Synthetic
gcccucccagcacttacatug

SEQ ID NO: 74105 - DNA, 22 bp, Artificial Sequence
  Synthetic
aagactaacccugcagtgctut

SEQ ID NO: 74106 - DNA, 21 bp, Artificial Sequence
  Synthetic
ggcagaagggagaguttggua

SEQ ID NO: 74107 - DNA, 20 bp, Artificial Sequence
  Synthetic
tttcccuctgctccuaggct

SEQ ID NO: 74108 - DNA, 21 bp, Artificial Sequence
  Synthetic
ctgatgttcgcugcctcatut

SEQ ID NO: 74109 - DNA, 23 bp, Artificial Sequence
  Synthetic
tggacatcucctatgtugaggct

SEQ ID NO: 74110 - DNA, 24 bp, Artificial Sequence
  Synthetic
ctgctccatguatgaggacatcuc

SEQ ID NO: 74111 - DNA, 21 bp, Artificial Sequence
  Synthetic
agggaagugagcugagacact

SEQ ID NO: 74112 - DNA, 23 bp, Artificial Sequence
  Synthetic
gggtagagcugtggattcattut

SEQ ID NO: 74113 - DNA, 24 bp, Artificial Sequence
  Synthetic
gacggacatttutcctccctctut

SEQ ID NO: 74114 - DNA, 18 bp, Artificial Sequence
  Synthetic
tccaggcuguccagggat

SEQ ID NO: 74115 - DNA, 20 bp, Artificial Sequence
  Synthetic
aaggguaagcgttgcacuct

SEQ ID NO: 74116 - DNA, 18 bp, Artificial Sequence
  Synthetic
gcccagagugcaacgcut

SEQ ID NO: 74117 - DNA, 24 bp, Artificial Sequence
  Synthetic
gtaatctccugccctcgaatttug

SEQ ID NO: 74118 - DNA, 22 bp, Artificial Sequence
  Synthetic
tgtgaaggcugctctggagaua

SEQ ID NO: 74119 - DNA, 23 bp, Artificial Sequence
  Synthetic
tttgctcactguctgttcctcuc

SEQ ID NO: 74120 - DNA, 19 bp, Artificial Sequence
  Synthetic
agacccuacacgggauggt

SEQ ID NO: 74121 - DNA, 19 bp, Artificial Sequence
  Synthetic
cgctggugaacgtggtuct

SEQ ID NO: 74122 - DNA, 22 bp, Artificial Sequence
  Synthetic
agctucaccaggagatccttug

SEQ ID NO: 74123 - DNA, 23 bp, Artificial Sequence
  Synthetic
cctgggcaucttcttcctcttut

SEQ ID NO: 74124 - DNA, 17 bp, Artificial Sequence
  Synthetic
gcaggcgaggcuacuga

SEQ ID NO: 74125 - DNA, 21 bp, Artificial Sequence
  Synthetic
gggaacauagagggcaugcag

SEQ ID NO: 74126 - DNA, 19 bp, Artificial Sequence
  Synthetic
cgcaccaaacagccuaucc

SEQ ID NO: 74127 - DNA, 23 bp, Artificial Sequence
  Synthetic
ctgccuctcaagtucaacacaac

SEQ ID NO: 74128 - DNA, 26 bp, Artificial Sequence
  Synthetic
gtgctaagagaaagugatgaccagut

SEQ ID NO: 74129 - DNA, 26 bp, Artificial Sequence
  Synthetic
tttcttactgaagaaugccgtctuct

SEQ ID NO: 74130 - DNA, 22 bp, Artificial Sequence
  Synthetic
gagaccugtuagaagacggcat

SEQ ID NO: 74131 - DNA, 23 bp, Artificial Sequence
  Synthetic
ccagtaaggguaggatggugaag

SEQ ID NO: 74132 - DNA, 21 bp, Artificial Sequence
  Synthetic
caggccugggagttcttcuat

SEQ ID NO: 74133 - DNA, 28 bp, Artificial Sequence
  Synthetic
acttgtcttcuaacccatctttttccut

SEQ ID NO: 74134 - DNA, 24 bp, Artificial Sequence
  Synthetic
ctgttcucaaatactgcugggaca

SEQ ID NO: 74135 - DNA, 24 bp, Artificial Sequence
  Synthetic
gggaacgccaacuttctcatttut

SEQ ID NO: 74136 - DNA, 28 bp, Artificial Sequence
  Synthetic
gcaggtcaaaagguacaagattgtuact

SEQ ID NO: 74137 - DNA, 28 bp, Artificial Sequence
  Synthetic
tcccacagacuttcacataaaauaccac

SEQ ID NO: 74138 - DNA, 23 bp, Artificial Sequence
  Synthetic
tgtgataggaagcugtggaguga

SEQ ID NO: 74139 - DNA, 25 bp, Artificial Sequence
  Synthetic
ctggaagatcaucgagagctaugag

SEQ ID NO: 74140 - DNA, 28 bp, Artificial Sequence
  Synthetic
tcagaatgtcuacccaataccagtacut

SEQ ID NO: 74141 - DNA, 25 bp, Artificial Sequence
  Synthetic
gtacaauagcagacaccatcugagg

SEQ ID NO: 74142 - DNA, 25 bp, Artificial Sequence
  Synthetic
ggtcgaugaaagtataactgtugcc

SEQ ID NO: 74143 - DNA, 23 bp, Artificial Sequence
  Synthetic
gucagaaacaagguccaggaact

SEQ ID NO: 74144 - DNA, 21 bp, Artificial Sequence
  Synthetic
agacacgcuatcatgcgtuct

SEQ ID NO: 74145 - DNA, 23 bp, Artificial Sequence
  Synthetic
gcaggaaugcctccagactuaaa

SEQ ID NO: 74146 - DNA, 21 bp, Artificial Sequence
  Synthetic
cggagccutaugaaccagaga

SEQ ID NO: 74147 - DNA, 23 bp, Artificial Sequence
  Synthetic
cgcattgucgaaccaugaaaaac

SEQ ID NO: 74148 - DNA, 27 bp, Artificial Sequence
  Synthetic
acaagaautttatttccuagggagcca

SEQ ID NO: 74149 - DNA, 19 bp, Artificial Sequence
  Synthetic
cccgcucagagccagttuc

SEQ ID NO: 74150 - DNA, 20 bp, Artificial Sequence
  Synthetic
gtgagggcutactggccauc

SEQ ID NO: 74151 - DNA, 23 bp, Artificial Sequence
  Synthetic
aacacagaauccactggugaact

SEQ ID NO: 74152 - DNA, 25 bp, Artificial Sequence
  Synthetic
ccttctctgaguggtaaaggcaauc

SEQ ID NO: 74153 - DNA, 27 bp, Artificial Sequence
  Synthetic
gttctcaaaacugcattctgacttuca

SEQ ID NO: 74154 - DNA, 21 bp, Artificial Sequence
  Synthetic
gatgacgggaacuggttcugt

SEQ ID NO: 74155 - DNA, 22 bp, Artificial Sequence
  Synthetic
cttccgaacuacagctctggug

SEQ ID NO: 74156 - DNA, 18 bp, Artificial Sequence
  Synthetic
ccaagccucaccccacuc

SEQ ID NO: 74157 - DNA, 22 bp, Artificial Sequence
  Synthetic
tgggcatccuctgtcctatcuc

SEQ ID NO: 74158 - DNA, 26 bp, Artificial Sequence
  Synthetic
tgacaatgcgucatgtgatucaaaac

SEQ ID NO: 74159 - DNA, 23 bp, Artificial Sequence
  Synthetic
gcagauccugaaaaacgcaaact

SEQ ID NO: 74160 - DNA, 21 bp, Artificial Sequence
  Synthetic
agaaccagcugctgctgtauc

SEQ ID NO: 74161 - DNA, 28 bp, Artificial Sequence
  Synthetic
tgaatatgactuggaactctgagaggut

SEQ ID NO: 74162 - DNA, 28 bp, Artificial Sequence
  Synthetic
aagttcuacaaaccttaaguaacaccag

SEQ ID NO: 74163 - DNA, 23 bp, Artificial Sequence
  Synthetic
cgaaauactgtugccaagccaaa

SEQ ID NO: 74164 - DNA, 22 bp, Artificial Sequence
  Synthetic
aatctcagacuttggctuggca

SEQ ID NO: 74165 - DNA, 27 bp, Artificial Sequence
  Synthetic
actggttctgcaugaaattctcttcuc

SEQ ID NO: 74166 - DNA, 28 bp, Artificial Sequence
  Synthetic
ttgaacaagaugtgtggtacttuaccat

SEQ ID NO: 74167 - DNA, 21 bp, Artificial Sequence
  Synthetic
ctcttaccuccagcgagcaut

SEQ ID NO: 74168 - DNA, 23 bp, Artificial Sequence
  Synthetic
acagugagacagagagugaccat

SEQ ID NO: 74169 - DNA, 19 bp, Artificial Sequence
  Synthetic
actggguccgacgtttucc

SEQ ID NO: 74170 - DNA, 20 bp, Artificial Sequence
  Synthetic
agagacauggccctcacugt

SEQ ID NO: 74171 - DNA, 20 bp, Artificial Sequence
  Synthetic
ctgcguccatccttcucaga

SEQ ID NO: 74172 - DNA, 20 bp, Artificial Sequence
  Synthetic
ccaaggaacgggacucauct

SEQ ID NO: 74173 - DNA, 21 bp, Artificial Sequence
  Synthetic
tctcccgcugcatuaaacaca

SEQ ID NO: 74174 - DNA, 31 bp, Artificial Sequence
  Synthetic
gttctccagactutacttattttcctctuct

SEQ ID NO: 74175 - DNA, 28 bp, Artificial Sequence
  Synthetic
gtaacacagtguccagaacagaacuaaa

SEQ ID NO: 74176 - DNA, 27 bp, Artificial Sequence
  Synthetic
tcctttttcttutgcagcttattugct

SEQ ID NO: 74177 - DNA, 26 bp, Artificial Sequence
  Synthetic
acaatttctgtccucagtagctctug

SEQ ID NO: 74178 - DNA, 28 bp, Artificial Sequence
  Synthetic
acacugtgttactuagacccaaagaaaa

SEQ ID NO: 74179 - DNA, 27 bp, Artificial Sequence
  Synthetic
cagaaaacagcaaauagaacaccaugt

SEQ ID NO: 74180 - DNA, 25 bp, Artificial Sequence
  Synthetic
cttggaaggaugacctcaaacucaa

SEQ ID NO: 74181 - DNA, 21 bp, Artificial Sequence
  Synthetic
gaggtttttguccgagtggug

SEQ ID NO: 74182 - DNA, 20 bp, Artificial Sequence
  Synthetic
cttgaccuccaccgtctugt

SEQ ID NO: 74183 - DNA, 22 bp, Artificial Sequence
  Synthetic
cctgctcctuctggacttccua

SEQ ID NO: 74184 - DNA, 25 bp, Artificial Sequence
  Synthetic
ggtcctattcuaaaagccagagcut

SEQ ID NO: 74185 - DNA, 21 bp, Artificial Sequence
  Synthetic
gattagggcugtgtacgugct

SEQ ID NO: 74186 - DNA, 22 bp, Artificial Sequence
  Synthetic
ggctcctctucctttctggaut

SEQ ID NO: 74187 - DNA, 23 bp, Artificial Sequence
  Synthetic
actctcagcucatcctcttcucc

SEQ ID NO: 74188 - DNA, 20 bp, Artificial Sequence
  Synthetic
gccatgacuccgtgtgucag

SEQ ID NO: 74189 - DNA, 23 bp, Artificial Sequence
  Synthetic
tctcttccatucctgggactgut

SEQ ID NO: 74190 - DNA, 24 bp, Artificial Sequence
  Synthetic
gaggatttugagcacgugaagaac

SEQ ID NO: 74191 - DNA, 28 bp, Artificial Sequence
  Synthetic
aaagaatgaacucttcccuccaaaagaa

SEQ ID NO: 74192 - DNA, 22 bp, Artificial Sequence
  Synthetic
gaggcuatgtgtuagggcagaa

SEQ ID NO: 74193 - DNA, 26 bp, Artificial Sequence
  Synthetic
ttatccatgtctutagggtgatgcug

SEQ ID NO: 74194 - DNA, 21 bp, Artificial Sequence
  Synthetic
ccaccuccccagtcttacugt

SEQ ID NO: 74195 - DNA, 23 bp, Artificial Sequence
  Synthetic
ccaggugatgctugagaagagaa

SEQ ID NO: 74196 - DNA, 21 bp, Artificial Sequence
  Synthetic
caucttugccaggagagccat

SEQ ID NO: 74197 - DNA, 20 bp, Artificial Sequence
  Synthetic
cagagggccucucaggaaac

SEQ ID NO: 74198 - DNA, 23 bp, Artificial Sequence
  Synthetic
aautgggaatgttugcaccacag

SEQ ID NO: 74199 - DNA, 23 bp, Artificial Sequence
  Synthetic
aatagcttcugcagcttcctugt

SEQ ID NO: 74200 - DNA, 17 bp, Artificial Sequence
  Synthetic
ccugaagccacgggugt

SEQ ID NO: 74201 - DNA, 28 bp, Artificial Sequence
  Synthetic
cctgttaattcuggcatactcttacuga

SEQ ID NO: 74202 - DNA, 22 bp, Artificial Sequence
  Synthetic
gtcctctgugaacttgcucagg

SEQ ID NO: 74203 - DNA, 24 bp, Artificial Sequence
  Synthetic
acacatctgcuaaaggctttggut

SEQ ID NO: 74204 - DNA, 24 bp, Artificial Sequence
  Synthetic
ctttuattctctagcuccgcagca

SEQ ID NO: 74205 - DNA, 23 bp, Artificial Sequence
  Synthetic
cttaccctgtuggccctttacuc

SEQ ID NO: 74206 - DNA, 23 bp, Artificial Sequence
  Synthetic
tttcccgtccucttttgcttgua

SEQ ID NO: 74207 - DNA, 29 bp, Artificial Sequence
  Synthetic
cttttagctccucaatcaatgtcttgtut

SEQ ID NO: 74208 - DNA, 23 bp, Artificial Sequence
  Synthetic
agagtggcagugcttgaaaauca

SEQ ID NO: 74209 - DNA, 25 bp, Artificial Sequence
  Synthetic
ccagtccautttccacctuaacagg

SEQ ID NO: 74210 - DNA, 21 bp, Artificial Sequence
  Synthetic
ctccgcaggaucagctuaagg

SEQ ID NO: 74211 - DNA, 25 bp, Artificial Sequence
  Synthetic
ccagccaaaagaauatctgccuaca

SEQ ID NO: 74212 - DNA, 22 bp, Artificial Sequence
  Synthetic
ctggaaguatgggugagacagg

SEQ ID NO: 74213 - DNA, 26 bp, Artificial Sequence
  Synthetic
agatgcgctuaacatatgacagugaa

SEQ ID NO: 74214 - DNA, 18 bp, Artificial Sequence
  Synthetic
cacagaccugggtggcua

SEQ ID NO: 74215 - DNA, 17 bp, Artificial Sequence
  Synthetic
tgcccugacgcctctuc

SEQ ID NO: 74216 - DNA, 19 bp, Artificial Sequence
  Synthetic
cagcugcgagtcttuccct

SEQ ID NO: 74217 - DNA, 20 bp, Artificial Sequence
  Synthetic
catgcccaacgugtccaaug

SEQ ID NO: 74218 - DNA, 21 bp, Artificial Sequence
  Synthetic
cauacagcttcugggacaggt

SEQ ID NO: 74219 - DNA, 19 bp, Artificial Sequence
  Synthetic
cacagcctugcgtgttgut

SEQ ID NO: 74220 - DNA, 22 bp, Artificial Sequence
  Synthetic
tcaaaacccutctgcucacact

SEQ ID NO: 74221 - DNA, 23 bp, Artificial Sequence
  Synthetic
tgaccctcaaccucgatcaagua

SEQ ID NO: 74222 - DNA, 20 bp, Artificial Sequence
  Synthetic
ttgccggcaugttggaaauc

SEQ ID NO: 74223 - DNA, 28 bp, Artificial Sequence
  Synthetic
accttggtataacauctccattcctuct

SEQ ID NO: 74224 - DNA, 25 bp, Artificial Sequence
  Synthetic
gtgagccacuaagcattgaaatgut

SEQ ID NO: 74225 - DNA, 29 bp, Artificial Sequence
  Synthetic
tggtccccatcuctttaaatactcaauct

SEQ ID NO: 74226 - DNA, 21 bp, Artificial Sequence
  Synthetic
cuaaggaugggaggcacgaaa

SEQ ID NO: 74227 - DNA, 22 bp, Artificial Sequence
  Synthetic
ctcatacctcuctgcctcccua

SEQ ID NO: 74228 - DNA, 21 bp, Artificial Sequence
  Synthetic
aatgtgtcaccauccccaguc

SEQ ID NO: 74229 - DNA, 21 bp, Artificial Sequence
  Synthetic
gttggcgtugttgctgctaut

SEQ ID NO: 74230 - DNA, 20 bp, Artificial Sequence
  Synthetic
gaagacgcccacutccaaug

SEQ ID NO: 74231 - DNA, 23 bp, Artificial Sequence
  Synthetic
ccatggctcutgttcacattcug

SEQ ID NO: 74232 - DNA, 21 bp, Artificial Sequence
  Synthetic
ccccaatgguacgctgaucat

SEQ ID NO: 74233 - DNA, 18 bp, Artificial Sequence
  Synthetic
gcgggacagugggaguag

SEQ ID NO: 74234 - DNA, 28 bp, Artificial Sequence
  Synthetic
ttaacttcattguttctgctctcuaggg

SEQ ID NO: 74235 - DNA, 23 bp, Artificial Sequence
  Synthetic
ttcattcacauccagcacaucca

SEQ ID NO: 74236 - DNA, 21 bp, Artificial Sequence
  Synthetic
ggactaucgcattgtcugcct

SEQ ID NO: 74237 - DNA, 19 bp, Artificial Sequence
  Synthetic
cccgagucccctgtccaua

SEQ ID NO: 74238 - DNA, 24 bp, Artificial Sequence
  Synthetic
tggtacctttugaggtctctcuca

SEQ ID NO: 74239 - DNA, 20 bp, Artificial Sequence
  Synthetic
gccaaagtccucggacacut

SEQ ID NO: 74240 - DNA, 22 bp, Artificial Sequence
  Synthetic
gtgcctccugaaaagagagugg

SEQ ID NO: 74241 - DNA, 25 bp, Artificial Sequence
  Synthetic
agttgcugcaagtcagtugaaaaat

SEQ ID NO: 74242 - DNA, 21 bp, Artificial Sequence
  Synthetic
gactgaagccuggcaggauac

SEQ ID NO: 74243 - DNA, 24 bp, Artificial Sequence
  Synthetic
ccactttctaaccucagagtccut

SEQ ID NO: 74244 - DNA, 19 bp, Artificial Sequence
  Synthetic
aggtgucggagtgtccuga

SEQ ID NO: 74245 - DNA, 21 bp, Artificial Sequence
  Synthetic
ggaaccauagccttugccaaa

SEQ ID NO: 74246 - DNA, 19 bp, Artificial Sequence
  Synthetic
cccccggaucctcctguag

SEQ ID NO: 74247 - DNA, 19 bp, Artificial Sequence
  Synthetic
tgggcctugaaggttccug

SEQ ID NO: 74248 - DNA, 18 bp, Artificial Sequence
  Synthetic
gugcugcccccaaacaag

SEQ ID NO: 74249 - DNA, 19 bp, Artificial Sequence
  Synthetic
tuagaggcgaugggcacag

SEQ ID NO: 74250 - DNA, 19 bp, Artificial Sequence
  Synthetic
cagccaccuccttcucact

SEQ ID NO: 74251 - DNA, 21 bp, Artificial Sequence
  Synthetic
gcaggauccatugggaggaac

SEQ ID NO: 74252 - DNA, 28 bp, Artificial Sequence
  Synthetic
ctctgttatttcacuttatgcctccuct

SEQ ID NO: 74253 - DNA, 28 bp, Artificial Sequence
  Synthetic
accgaaatataaucattgcaggucagat

SEQ ID NO: 74254 - DNA, 19 bp, Artificial Sequence
  Synthetic
guccagcgacacctuccaa

SEQ ID NO: 74255 - DNA, 22 bp, Artificial Sequence
  Synthetic
gtctgcaggaugtttcctccuc

SEQ ID NO: 74256 - DNA, 18 bp, Artificial Sequence
  Synthetic
ggcctgucagcagcacuc

SEQ ID NO: 74257 - DNA, 23 bp, Artificial Sequence
  Synthetic
gccgactucttgtccgaauacac

SEQ ID NO: 74258 - DNA, 20 bp, Artificial Sequence
  Synthetic
gggaaucacccagguacagt

SEQ ID NO: 74259 - DNA, 20 bp, Artificial Sequence
  Synthetic
acttugccgttgguggaagt

SEQ ID NO: 74260 - DNA, 19 bp, Artificial Sequence
  Synthetic
gagacccgaaagugugggt

SEQ ID NO: 74261 - DNA, 19 bp, Artificial Sequence
  Synthetic
gccccauaggccagtgaug

SEQ ID NO: 74262 - DNA, 19 bp, Artificial Sequence
  Synthetic
catccguttcacccuccca

SEQ ID NO: 74263 - DNA, 19 bp, Artificial Sequence
  Synthetic
ctatggccccuccccuagt

SEQ ID NO: 74264 - DNA, 24 bp, Artificial Sequence
  Synthetic
gccctgttugttaaccatgttuct

SEQ ID NO: 74265 - DNA, 28 bp, Artificial Sequence
  Synthetic
gaacacttcacutaaaacataccugcac

SEQ ID NO: 74266 - DNA, 24 bp, Artificial Sequence
  Synthetic
ccatggctcugaaatccactatug

SEQ ID NO: 74267 - DNA, 25 bp, Artificial Sequence
  Synthetic
ccgaagtagcaguaaccagttuagt

SEQ ID NO: 74268 - DNA, 18 bp, Artificial Sequence
  Synthetic
ccgctgggugtcagctua

SEQ ID NO: 74269 - DNA, 17 bp, Artificial Sequence
  Synthetic
ggugcccaccaguaggt

SEQ ID NO: 74270 - DNA, 24 bp, Artificial Sequence
  Synthetic
aggacaccaauatuaaggcagaac

SEQ ID NO: 74271 - DNA, 25 bp, Artificial Sequence
  Synthetic
aagtcttttccaaaucgaggcauct

SEQ ID NO: 74272 - DNA, 18 bp, Artificial Sequence
  Synthetic
cgccugccactgtcacua

SEQ ID NO: 74273 - DNA, 18 bp, Artificial Sequence
  Synthetic
cacucccagcacctgcuc

SEQ ID NO: 74274 - DNA, 27 bp, Artificial Sequence
  Synthetic
ctgattattcagaugcctcgattugga

SEQ ID NO: 74275 - DNA, 28 bp, Artificial Sequence
  Synthetic
tcugacaattuccacaaaaccaacaaaa

SEQ ID NO: 74276 - DNA, 21 bp, Artificial Sequence
  Synthetic
cccctgcugtccagttcatug

SEQ ID NO: 74277 - DNA, 17 bp, Artificial Sequence
  Synthetic
cagcgugggcaggaugt

SEQ ID NO: 74278 - DNA, 22 bp, Artificial Sequence
  Synthetic
tcccaaugggtagctucaggat

SEQ ID NO: 74279 - DNA, 29 bp, Artificial Sequence
  Synthetic
ctcaagctctcutcacaaatagtatcuct

SEQ ID NO: 74280 - DNA, 28 bp, Artificial Sequence
  Synthetic
cagtagtcaaauggaatcacagtttcuc

SEQ ID NO: 74281 - DNA, 30 bp, Artificial Sequence
  Synthetic
acgtgtattagaaaugagacgttuaaacct

SEQ ID NO: 74282 - DNA, 26 bp, Artificial Sequence
  Synthetic
attctttgctgugtactagtgggtut

SEQ ID NO: 74283 - DNA, 21 bp, Artificial Sequence
  Synthetic
cagaatauggccggtcuggag

SEQ ID NO: 74284 - DNA, 20 bp, Artificial Sequence
  Synthetic
ccctgggaucccttcgctua

SEQ ID NO: 74285 - DNA, 24 bp, Artificial Sequence
  Synthetic
cctcttaccugatcttggccttug

SEQ ID NO: 74286 - DNA, 24 bp, Artificial Sequence
  Synthetic
gagggagtggugagaaagggtaua

SEQ ID NO: 74287 - DNA, 22 bp, Artificial Sequence
  Synthetic
ggtgaaauaccgagtgcctcug

SEQ ID NO: 74288 - DNA, 22 bp, Artificial Sequence
  Synthetic
caccaucagguacagacaccaa

SEQ ID NO: 74289 - DNA, 22 bp, Artificial Sequence
  Synthetic
ttugtctacaccugcaacgagt

SEQ ID NO: 74290 - DNA, 18 bp, Artificial Sequence
  Synthetic
cgtctccacguggtgcut

SEQ ID NO: 74291 - DNA, 17 bp, Artificial Sequence
  Synthetic
tccucacccucgccaga

SEQ ID NO: 74292 - DNA, 22 bp, Artificial Sequence
  Synthetic
cutcgagatctuccaccaccac

SEQ ID NO: 74293 - DNA, 19 bp, Artificial Sequence
  Synthetic
agtcuccaaggcggcuaga

SEQ ID NO: 74294 - DNA, 21 bp, Artificial Sequence
  Synthetic
ggagaacucccagtgcttguc

SEQ ID NO: 74295 - DNA, 21 bp, Artificial Sequence
  Synthetic
gactaaagccccucctcucct

SEQ ID NO: 74296 - DNA, 20 bp, Artificial Sequence
  Synthetic
ggctgtacggauggaaccut

SEQ ID NO: 74297 - DNA, 20 bp, Artificial Sequence
  Synthetic
attggaaaccggcugcaaug

SEQ ID NO: 74298 - DNA, 21 bp, Artificial Sequence
  Synthetic
ggcctgacuctaggttugcat

SEQ ID NO: 74299 - DNA, 29 bp, Artificial Sequence
  Synthetic
cactgtcaccaucacctaatataacauga

SEQ ID NO: 74300 - DNA, 22 bp, Artificial Sequence
  Synthetic
ctgtcccuccagagacaaacug

SEQ ID NO: 74301 - DNA, 21 bp, Artificial Sequence
  Synthetic
aagtgagugccggttggtuaa

SEQ ID NO: 74302 - DNA, 27 bp, Artificial Sequence
  Synthetic
tgatacctcaguaaagcaggaauaggt

SEQ ID NO: 74303 - DNA, 20 bp, Artificial Sequence
  Synthetic
cggacucucagggacaacca

SEQ ID NO: 74304 - DNA, 22 bp, Artificial Sequence
  Synthetic
tgaucccuggacaggaagagaa

SEQ ID NO: 74305 - DNA, 28 bp, Artificial Sequence
  Synthetic
gcccacacatauttcttaacaggtuaga

SEQ ID NO: 74306 - DNA, 30 bp, Artificial Sequence
  Synthetic
aatatatttatgauacactccaggaaugcc

SEQ ID NO: 74307 - DNA, 28 bp, Artificial Sequence
  Synthetic
gcagttatgtcaucatctagatcaguct

SEQ ID NO: 74308 - DNA, 22 bp, Artificial Sequence
  Synthetic
gccaaugggcaacacaggaaua

SEQ ID NO: 74309 - DNA, 23 bp, Artificial Sequence
  Synthetic
cactauaccaacagcagctccuc

SEQ ID NO: 74310 - DNA, 21 bp, Artificial Sequence
  Synthetic
cggtcagtgugatcgtcacut

SEQ ID NO: 74311 - DNA, 22 bp, Artificial Sequence
  Synthetic
tgatgttgccugcttacctguc

SEQ ID NO: 74312 - DNA, 27 bp, Artificial Sequence
  Synthetic
tgcaatcaaagccaaaautatggcuaa

SEQ ID NO: 74313 - DNA, 26 bp, Artificial Sequence
  Synthetic
gtaagatagtugttcgtgtccuccat

SEQ ID NO: 74314 - DNA, 23 bp, Artificial Sequence
  Synthetic
tttcctuacaccggtgcuagaag

SEQ ID NO: 74315 - DNA, 27 bp, Artificial Sequence
  Synthetic
gtttgagtcacutcagtagatggauga

SEQ ID NO: 74316 - DNA, 26 bp, Artificial Sequence
  Synthetic
cgagauattgucagcagagagagagt

SEQ ID NO: 74317 - DNA, 28 bp, Artificial Sequence
  Synthetic
cttccaccuaaaagcaaagttuaaccaa

SEQ ID NO: 74318 - DNA, 18 bp, Artificial Sequence
  Synthetic
ggtccagguggccuagga

SEQ ID NO: 74319 - DNA, 17 bp, Artificial Sequence
  Synthetic
cgggtccugggctcuca

SEQ ID NO: 74320 - DNA, 17 bp, Artificial Sequence
  Synthetic
cccuggagccacaugcc

SEQ ID NO: 74321 - DNA, 21 bp, Artificial Sequence
  Synthetic
tcagggaacucacgcatcauc

SEQ ID NO: 74322 - DNA, 25 bp, Artificial Sequence
  Synthetic
ctttggtctuccctcagaaaguaac

SEQ ID NO: 74323 - DNA, 20 bp, Artificial Sequence
  Synthetic
agccucugaagacaccccat

SEQ ID NO: 74324 - DNA, 22 bp, Artificial Sequence
  Synthetic
gggtgtctucagaggctaauga

SEQ ID NO: 74325 - DNA, 28 bp, Artificial Sequence
  Synthetic
tggaacacaauggaaaaagatcucagaa

SEQ ID NO: 74326 - DNA, 25 bp, Artificial Sequence
  Synthetic
atcttttcagcauttggaggcuact

SEQ ID NO: 74327 - DNA, 24 bp, Artificial Sequence
  Synthetic
gaattgtaaugaccctggaugcct

SEQ ID NO: 74328 - DNA, 28 bp, Artificial Sequence
  Synthetic
gctuggagataatgatugggaagaagaa

SEQ ID NO: 74329 - DNA, 26 bp, Artificial Sequence
  Synthetic
tgcctcatggcacuatctataccuat

SEQ ID NO: 74330 - DNA, 24 bp, Artificial Sequence
  Synthetic
ctggaaaatgaaugctctgagcut

SEQ ID NO: 74331 - DNA, 18 bp, Artificial Sequence
  Synthetic
ctgaggagcugggccauc

SEQ ID NO: 74332 - DNA, 18 bp, Artificial Sequence
  Synthetic
gcagguaccgugcgacat

SEQ ID NO: 74333 - DNA, 17 bp, Artificial Sequence
  Synthetic
gaccccgccacucucac

SEQ ID NO: 74334 - DNA, 17 bp, Artificial Sequence
  Synthetic
cacgggucgggugagag

SEQ ID NO: 74335 - DNA, 22 bp, Artificial Sequence
  Synthetic
acacaagctucctttccgucat

SEQ ID NO: 74336 - DNA, 25 bp, Artificial Sequence
  Synthetic
agaagggagggaagguttagaauct

SEQ ID NO: 74337 - DNA, 23 bp, Artificial Sequence
  Synthetic
ccgtgactguagtgttctctcug

SEQ ID NO: 74338 - DNA, 18 bp, Artificial Sequence
  Synthetic
gggugctgtgugaaggga

SEQ ID NO: 74339 - DNA, 19 bp, Artificial Sequence
  Synthetic
cctgacccugagcctctug

SEQ ID NO: 74340 - DNA, 23 bp, Artificial Sequence
  Synthetic
tcaggctcucctgtcttctctut

SEQ ID NO: 74341 - DNA, 24 bp, Artificial Sequence
  Synthetic
caaccucaagagaguggacagaat

SEQ ID NO: 74342 - DNA, 20 bp, Artificial Sequence
  Synthetic
cacuggctctgugcagaact

SEQ ID NO: 74343 - DNA, 23 bp, Artificial Sequence
  Synthetic
gctttaacagugcgccttcttug

SEQ ID NO: 74344 - DNA, 22 bp, Artificial Sequence
  Synthetic
tgugcaguccaggaaacagaaa

SEQ ID NO: 74345 - DNA, 28 bp, Artificial Sequence
  Synthetic
ctgcattttgtuggtttgacaattuaca

SEQ ID NO: 74346 - DNA, 21 bp, Artificial Sequence
  Synthetic
gtcaggccugggacttctuat

SEQ ID NO: 74347 - DNA, 22 bp, Artificial Sequence
  Synthetic
cagatgcagaugaccccactua

SEQ ID NO: 74348 - DNA, 26 bp, Artificial Sequence
  Synthetic
agattaaagcuttctgcaucgaacca

SEQ ID NO: 74349 - DNA, 27 bp, Artificial Sequence
  Synthetic
tcgttcagaatgucttcactgattcuc

SEQ ID NO: 74350 - DNA, 24 bp, Artificial Sequence
  Synthetic
tacactaactuggcgctattucca

SEQ ID NO: 74351 - DNA, 27 bp, Artificial Sequence
  Synthetic
ggtgccttctucagggttaatttuaga

SEQ ID NO: 74352 - DNA, 21 bp, Artificial Sequence
  Synthetic
cugggtucagcagaaagagga

SEQ ID NO: 74353 - DNA, 28 bp, Artificial Sequence
  Synthetic
tgctaccttataucccttctcacctuag

SEQ ID NO: 74354 - DNA, 22 bp, Artificial Sequence
  Synthetic
ccgcggtuaggtaggaagtaut

SEQ ID NO: 74355 - DNA, 21 bp, Artificial Sequence
  Synthetic
gaatgccguaccctacuccag

SEQ ID NO: 74356 - DNA, 21 bp, Artificial Sequence
  Synthetic
aaacctgcgutagggtcucag

SEQ ID NO: 74357 - DNA, 26 bp, Artificial Sequence
  Synthetic
ctcaatagtaacuctggccatagcut

SEQ ID NO: 74358 - DNA, 20 bp, Artificial Sequence
  Synthetic
ctccgaagcagucacugagg

SEQ ID NO: 74359 - DNA, 23 bp, Artificial Sequence
  Synthetic
agacagccaccuatgaggacaua

SEQ ID NO: 74360 - DNA, 24 bp, Artificial Sequence
  Synthetic
tgcccttgugaagcctgattaaut

SEQ ID NO: 74361 - DNA, 20 bp, Artificial Sequence
  Synthetic
ccaagcacugaauccgcaag

SEQ ID NO: 74362 - DNA, 22 bp, Artificial Sequence
  Synthetic
ctagtgttccuggtcctgacut

SEQ ID NO: 74363 - DNA, 26 bp, Artificial Sequence
  Synthetic
ggattgaagaucggaggattatcgut

SEQ ID NO: 74364 - DNA, 26 bp, Artificial Sequence
  Synthetic
agaacaaaacuatggctcugaaacct

SEQ ID NO: 74365 - DNA, 22 bp, Artificial Sequence
  Synthetic
gugagagtgaucagaccaagcc

SEQ ID NO: 74366 - DNA, 21 bp, Artificial Sequence
  Synthetic
gtgaucacagtcacugacacc

SEQ ID NO: 74367 - DNA, 24 bp, Artificial Sequence
  Synthetic
agttttcaaagacutcgcccauga

SEQ ID NO: 74368 - DNA, 20 bp, Artificial Sequence
  Synthetic
cagccccacutgcttttgug

SEQ ID NO: 74369 - DNA, 19 bp, Artificial Sequence
  Synthetic
tcagugccaugggcaagag

SEQ ID NO: 74370 - DNA, 22 bp, Artificial Sequence
  Synthetic
tgaagaatcuccctggcucaga

SEQ ID NO: 74371 - DNA, 20 bp, Artificial Sequence
  Synthetic
aggcagcggcuctagtauca

SEQ ID NO: 74372 - DNA, 25 bp, Artificial Sequence
  Synthetic
gactctgaggutagaaaguggcaaa

SEQ ID NO: 74373 - DNA, 27 bp, Artificial Sequence
  Synthetic
gatatgtccuttcttctgatucagggt

SEQ ID NO: 74374 - DNA, 23 bp, Artificial Sequence
  Synthetic
gcaggatuacctggtuggaaagt

SEQ ID NO: 74375 - DNA, 22 bp, Artificial Sequence
  Synthetic
ctgtctgcautctgtctuccca

SEQ ID NO: 74376 - DNA, 28 bp, Artificial Sequence
  Synthetic
gctgcaacuaaacaggtaaattcugagt

SEQ ID NO: 74377 - DNA, 25 bp, Artificial Sequence
  Synthetic
ctgcacaggugaccacatttatauc

SEQ ID NO: 74378 - DNA, 24 bp, Artificial Sequence
  Synthetic
cttgttcagcutctgggtucagat

SEQ ID NO: 74379 - DNA, 22 bp, Artificial Sequence
  Synthetic
ctcagtgatgucttccctguca

SEQ ID NO: 74380 - DNA, 25 bp, Artificial Sequence
  Synthetic
tgccttccttcutgcctattttgut

SEQ ID NO: 74381 - DNA, 20 bp, Artificial Sequence
  Synthetic
gatcuggcagcccaucaact

SEQ ID NO: 74382 - DNA, 24 bp, Artificial Sequence
  Synthetic
gccuttaaagucacgaaagcacaa

SEQ ID NO: 74383 - DNA, 26 bp, Artificial Sequence
  Synthetic
gtcatttgttggutttcagcttcugt

SEQ ID NO: 74384 - DNA, 20 bp, Artificial Sequence
  Synthetic
ccaccctggugctgactauc

SEQ ID NO: 74385 - DNA, 28 bp, Artificial Sequence
  Synthetic
ggatgattuacaggtcagtaucaaacca

SEQ ID NO: 74386 - DNA, 21 bp, Artificial Sequence
  Synthetic
cactccaagucctgtgauggt

SEQ ID NO: 74387 - DNA, 21 bp, Artificial Sequence
  Synthetic
caaagggtgcucctggtacuc

SEQ ID NO: 74388 - DNA, 19 bp, Artificial Sequence
  Synthetic
tgtgcguactgtcctucgg

SEQ ID NO: 74389 - DNA, 27 bp, Artificial Sequence
  Synthetic
cttaaccacaacuggtagtccatagug

SEQ ID NO: 74390 - DNA, 21 bp, Artificial Sequence
  Synthetic
cagagtggagaugcagctgua

SEQ ID NO: 74391 - DNA, 26 bp, Artificial Sequence
  Synthetic
ctcuaggaagagacacaaacuggaat

SEQ ID NO: 74392 - DNA, 21 bp, Artificial Sequence
  Synthetic
cgctguccagcaatacctuga

SEQ ID NO: 74393 - DNA, 21 bp, Artificial Sequence
  Synthetic
ggtgctgauggtcctgctgua

SEQ ID NO: 74394 - DNA, 21 bp, Artificial Sequence
  Synthetic
cctccaggugacagcaaucag

SEQ ID NO: 74395 - DNA, 27 bp, Artificial Sequence
  Synthetic
tggcagattuacaaatagccuaaacca

SEQ ID NO: 74396 - DNA, 22 bp, Artificial Sequence
  Synthetic
gctacgggcaaucactctccua

SEQ ID NO: 74397 - DNA, 23 bp, Artificial Sequence
  Synthetic
cgagaucugaagccagagaacat

SEQ ID NO: 74398 - DNA, 20 bp, Artificial Sequence
  Synthetic
cccagaaugcagttcgccut

SEQ ID NO: 74399 - DNA, 28 bp, Artificial Sequence
  Synthetic
caacagctagagaugcttcatttucaat

SEQ ID NO: 74400 - DNA, 22 bp, Artificial Sequence
  Synthetic
gtggcatgugatgcctauagca

SEQ ID NO: 74401 - DNA, 27 bp, Artificial Sequence
  Synthetic
ccaaccaatugagaagtttguaacaga

SEQ ID NO: 74402 - DNA, 17 bp, Artificial Sequence
  Synthetic
ccucgcctgcugagcat

SEQ ID NO: 74403 - DNA, 18 bp, Artificial Sequence
  Synthetic
ccgccugggugaagaagg

SEQ ID NO: 74404 - DNA, 17 bp, Artificial Sequence
  Synthetic
cgccagccugactcgug

SEQ ID NO: 74405 - DNA, 17 bp, Artificial Sequence
  Synthetic
accccacccugggctua

SEQ ID NO: 74406 - DNA, 27 bp, Artificial Sequence
  Synthetic
agtaggtcttugcctagttcatcgaua

SEQ ID NO: 74407 - DNA, 28 bp, Artificial Sequence
  Synthetic
cttatgtccatgugtggttcttttguag

SEQ ID NO: 74408 - DNA, 21 bp, Artificial Sequence
  Synthetic
gtuccaccacttgucaccaga

SEQ ID NO: 74409 - DNA, 25 bp, Artificial Sequence
  Synthetic
catctgtaccucccctttgaaacua

SEQ ID NO: 74410 - DNA, 27 bp, Artificial Sequence
  Synthetic
tcaaggaaagcagagugaaacaaaaug

SEQ ID NO: 74411 - DNA, 20 bp, Artificial Sequence
  Synthetic
cttggauccgcttgccatug

SEQ ID NO: 74412 - DNA, 20 bp, Artificial Sequence
  Synthetic
tctccccucccctuccaaaa

SEQ ID NO: 74413 - DNA, 18 bp, Artificial Sequence
  Synthetic
tcgtcucggagcaggtug

SEQ ID NO: 74414 - DNA, 17 bp, Artificial Sequence
  Synthetic
cugctgugccacgaggt

SEQ ID NO: 74415 - DNA, 20 bp, Artificial Sequence
  Synthetic
cgcatguagggttggatguc

SEQ ID NO: 74416 - DNA, 27 bp, Artificial Sequence
  Synthetic
gatatagagtauccttgcacucccaaa

SEQ ID NO: 74417 - DNA, 28 bp, Artificial Sequence
  Synthetic
cacaaagagtcuacatgtctagggtcua

SEQ ID NO: 74418 - DNA, 22 bp, Artificial Sequence
  Synthetic
cctactucaagtgcgugcagaa

SEQ ID NO: 74419 - DNA, 22 bp, Artificial Sequence
  Synthetic
gattgcccuctcccaggttuag

SEQ ID NO: 74420 - DNA, 27 bp, Artificial Sequence
  Synthetic
atttctgacaaugaactgagagtuggt

SEQ ID NO: 74421 - DNA, 21 bp, Artificial Sequence
  Synthetic
ggctgtuccaattccugagca

SEQ ID NO: 74422 - DNA, 22 bp, Artificial Sequence
  Synthetic
ccccttctccutttcccttgut

SEQ ID NO: 74423 - DNA, 22 bp, Artificial Sequence
  Synthetic
ccccaacccuctctcctatgua

SEQ ID NO: 74424 - DNA, 23 bp, Artificial Sequence
  Synthetic
gtttctttagcccuggtcctcut

SEQ ID NO: 74425 - DNA, 29 bp, Artificial Sequence
  Synthetic
gaataaatctcttugcgtcattgaacuga

SEQ ID NO: 74426 - DNA, 24 bp, Artificial Sequence
  Synthetic
ctctctctguttccatctccucct

SEQ ID NO: 74427 - DNA, 20 bp, Artificial Sequence
  Synthetic
ggatatcugccgtccgtgut

SEQ ID NO: 74428 - DNA, 17 bp, Artificial Sequence
  Synthetic
gccccugtcaguggaca

SEQ ID NO: 74429 - DNA, 20 bp, Artificial Sequence
  Synthetic
agatggtgcugccctgatuc

SEQ ID NO: 74430 - DNA, 19 bp, Artificial Sequence
  Synthetic
gccuggcucagcaaacaat

SEQ ID NO: 74431 - DNA, 19 bp, Artificial Sequence
  Synthetic
agaggcaccugccucaaag

SEQ ID NO: 74432 - DNA, 17 bp, Artificial Sequence
  Synthetic
gccaucgccagcatucc

SEQ ID NO: 74433 - DNA, 20 bp, Artificial Sequence
  Synthetic
gccccucaagctcagacuct

SEQ ID NO: 74434 - DNA, 19 bp, Artificial Sequence
  Synthetic
ccaguccgagagccaacug

SEQ ID NO: 74435 - DNA, 19 bp, Artificial Sequence
  Synthetic
cgctcaccauggtcucagg

SEQ ID NO: 74436 - DNA, 17 bp, Artificial Sequence
  Synthetic
cccccaccugcugagga

SEQ ID NO: 74437 - DNA, 24 bp, Artificial Sequence
  Synthetic
acacaggcauggaaagaagaguag

SEQ ID NO: 74438 - DNA, 23 bp, Artificial Sequence
  Synthetic
acctggcctutttcttgtcctut

SEQ ID NO: 74439 - DNA, 20 bp, Artificial Sequence
  Synthetic
gctauggcgacctgcucaac

SEQ ID NO: 74440 - DNA, 20 bp, Artificial Sequence
  Synthetic
tcagccutcctucgcagaaa

SEQ ID NO: 74441 - DNA, 22 bp, Artificial Sequence
  Synthetic
gtctcatgcucctgttcaugga

SEQ ID NO: 74442 - DNA, 25 bp, Artificial Sequence
  Synthetic
ggttttgtcugcaagataccagtuc

SEQ ID NO: 74443 - DNA, 29 bp, Artificial Sequence
  Synthetic
acgagcctcacaaucttctctataaauct

SEQ ID NO: 74444 - DNA, 28 bp, Artificial Sequence
  Synthetic
ggacccacttccuaaaatagagaacaut

SEQ ID NO: 74445 - DNA, 26 bp, Artificial Sequence
  Synthetic
catacagcaagaaacacuttcggaut

SEQ ID NO: 74446 - DNA, 23 bp, Artificial Sequence
  Synthetic
gcttctgttugcctaagcacaut

SEQ ID NO: 74447 - DNA, 25 bp, Artificial Sequence
  Synthetic
gccatgagtugatggaagaatcuct

SEQ ID NO: 74448 - DNA, 29 bp, Artificial Sequence
  Synthetic
aagtcaatatgttuaccgacccaagauac

SEQ ID NO: 74449 - DNA, 26 bp, Artificial Sequence
  Synthetic
aactattaactgauccctccccucaa

SEQ ID NO: 74450 - DNA, 27 bp, Artificial Sequence
  Synthetic
acatgggtatucattacctacccugaa

SEQ ID NO: 74451 - DNA, 28 bp, Artificial Sequence
  Synthetic
gccctctgaugcatgcttttatatuaca

SEQ ID NO: 74452 - DNA, 20 bp, Artificial Sequence
  Synthetic
catgccugaaccagatgcuc

SEQ ID NO: 74453 - DNA, 28 bp, Artificial Sequence
  Synthetic
gcagagagaaacacacuagaatttggua

SEQ ID NO: 74454 - DNA, 22 bp, Artificial Sequence
  Synthetic
ctgtatctugccttgcctucca

SEQ ID NO: 74455 - DNA, 25 bp, Artificial Sequence
  Synthetic
atcagcaguaacatacccaauagcc

SEQ ID NO: 74456 - DNA, 28 bp, Artificial Sequence
  Synthetic
tttgctttctattcutccttgctttgug

SEQ ID NO: 74457 - DNA, 28 bp, Artificial Sequence
  Synthetic
aaccggctctuctgataaaagtttuaga

SEQ ID NO: 74458 - DNA, 21 bp, Artificial Sequence
  Synthetic
ctgtactcguctgggtcagug

SEQ ID NO: 74459 - DNA, 26 bp, Artificial Sequence
  Synthetic
actctaacagauggtatgcaguaggt

SEQ ID NO: 74460 - DNA, 23 bp, Artificial Sequence
  Synthetic
ccctccctccuacttcctctcua

SEQ ID NO: 74461 - DNA, 19 bp, Artificial Sequence
  Synthetic
ccctcgcaccugagtgaug

SEQ ID NO: 74462 - DNA, 20 bp, Artificial Sequence
  Synthetic
ctgtcauagcgccactcuct

SEQ ID NO: 74463 - DNA, 19 bp, Artificial Sequence
  Synthetic
ccgctgugggagaaagcuc

SEQ ID NO: 74464 - DNA, 17 bp, Artificial Sequence
  Synthetic
cctguccccgctgucac

SEQ ID NO: 74465 - DNA, 26 bp, Artificial Sequence
  Synthetic
aactaaaagtgtugggagcattcuca

SEQ ID NO: 74466 - DNA, 21 bp, Artificial Sequence
  Synthetic
agaacggcuacacacagtugg

SEQ ID NO: 74467 - DNA, 21 bp, Artificial Sequence
  Synthetic
cctagaccugcgtcagtucct

SEQ ID NO: 74468 - DNA, 22 bp, Artificial Sequence
  Synthetic
agaagtagacagucaggcgcua

SEQ ID NO: 74469 - DNA, 22 bp, Artificial Sequence
  Synthetic
agacaccauctgcaggauaggt

SEQ ID NO: 74470 - DNA, 21 bp, Artificial Sequence
  Synthetic
ccaccucctctggauacccat

SEQ ID NO: 74471 - DNA, 28 bp, Artificial Sequence
  Synthetic
ctcactctgactuctcttgtttgttcua

SEQ ID NO: 74472 - DNA, 17 bp, Artificial Sequence
  Synthetic
gggctgaucaggcugct

SEQ ID NO: 74473 - DNA, 18 bp, Artificial Sequence
  Synthetic
cgaggugggagactggut

SEQ ID NO: 74474 - DNA, 19 bp, Artificial Sequence
  Synthetic
ctgcagcaguaccgcacua

SEQ ID NO: 74475 - DNA, 21 bp, Artificial Sequence
  Synthetic
caugaacaagacaagcgugga

SEQ ID NO: 74476 - DNA, 28 bp, Artificial Sequence
  Synthetic
aattctgcttaucagcaaaaaggaaugg

SEQ ID NO: 74477 - DNA, 18 bp, Artificial Sequence
  Synthetic
cctgtcccugccagugaa

SEQ ID NO: 74478 - DNA, 28 bp, Artificial Sequence
  Synthetic
cagaatgaattugaggagtttcagagut

SEQ ID NO: 74479 - DNA, 21 bp, Artificial Sequence
  Synthetic
ccacctcugaggtccugaaga

SEQ ID NO: 74480 - DNA, 26 bp, Artificial Sequence
  Synthetic
ctagatatugaaacccccaaggaguc

SEQ ID NO: 74481 - DNA, 26 bp, Artificial Sequence
  Synthetic
gaaactcatgggaugcttacacatut

SEQ ID NO: 74482 - DNA, 22 bp, Artificial Sequence
  Synthetic
acctugagaaacttgcaugcga

SEQ ID NO: 74483 - DNA, 27 bp, Artificial Sequence
  Synthetic
ggacctattggcugttttccctttuaa

SEQ ID NO: 74484 - DNA, 18 bp, Artificial Sequence
  Synthetic
acugaccccgaggacuca

SEQ ID NO: 74485 - DNA, 25 bp, Artificial Sequence
  Synthetic
gacactaacacuctgatctccaucc

SEQ ID NO: 74486 - DNA, 23 bp, Artificial Sequence
  Synthetic
aaagggtcutaccaagatuggca

SEQ ID NO: 74487 - DNA, 23 bp, Artificial Sequence
  Synthetic
acagtgtccacucaggaactcua

SEQ ID NO: 74488 - DNA, 27 bp, Artificial Sequence
  Synthetic
gggtggtagguatagttgtctattucc

SEQ ID NO: 74489 - DNA, 26 bp, Artificial Sequence
  Synthetic
acccctttcauccaacagaagattut

SEQ ID NO: 74490 - DNA, 26 bp, Artificial Sequence
  Synthetic
catggtautggaataacucacaggga

SEQ ID NO: 74491 - DNA, 27 bp, Artificial Sequence
  Synthetic
agacttgatttugccttgtatggcuat

SEQ ID NO: 74492 - DNA, 22 bp, Artificial Sequence
  Synthetic
caaacugtacacugcccacaga

SEQ ID NO: 74493 - DNA, 23 bp, Artificial Sequence
  Synthetic
caggagaggagutgggaaatgug

SEQ ID NO: 74494 - DNA, 22 bp, Artificial Sequence
  Synthetic
tgcactgaguctgcttctgtut

SEQ ID NO: 74495 - DNA, 22 bp, Artificial Sequence
  Synthetic
acggtcaaaggugaagatgucc

SEQ ID NO: 74496 - DNA, 25 bp, Artificial Sequence
  Synthetic
aggttcttggucctcaggaauagaa

SEQ ID NO: 74497 - DNA, 20 bp, Artificial Sequence
  Synthetic
cagggcatauccagctccuc

SEQ ID NO: 74498 - DNA, 17 bp, Artificial Sequence
  Synthetic
cugcgccggaccatgua

SEQ ID NO: 74499 - DNA, 19 bp, Artificial Sequence
  Synthetic
ctuagcaccccgacaccut

SEQ ID NO: 74500 - DNA, 25 bp, Artificial Sequence
  Synthetic
acgaagttgagagutccttcaccua

SEQ ID NO: 74501 - DNA, 17 bp, Artificial Sequence
  Synthetic
ccagcuccaugcagcga

SEQ ID NO: 74502 - DNA, 19 bp, Artificial Sequence
  Synthetic
ccaagagugccaagugcga

SEQ ID NO: 74503 - DNA, 24 bp, Artificial Sequence
  Synthetic
ccaccctaccuctctcactctcua

SEQ ID NO: 74504 - DNA, 20 bp, Artificial Sequence
  Synthetic
gggaguccgagagcagcaua

SEQ ID NO: 74505 - DNA, 24 bp, Artificial Sequence
  Synthetic
tttgtctgtcugtctgtttgucgt

SEQ ID NO: 74506 - DNA, 23 bp, Artificial Sequence
  Synthetic
tctggaauccaagcagaatugct

SEQ ID NO: 74507 - DNA, 23 bp, Artificial Sequence
  Synthetic
aaucccucccagagaaacagaga

SEQ ID NO: 74508 - DNA, 20 bp, Artificial Sequence
  Synthetic
agtttggcaucgtgctggua

SEQ ID NO: 74509 - DNA, 24 bp, Artificial Sequence
  Synthetic
tggacacttuctttttgaggucgt

SEQ ID NO: 74510 - DNA, 23 bp, Artificial Sequence
  Synthetic
ggcatggcautgagagttaggut

SEQ ID NO: 74511 - DNA, 23 bp, Artificial Sequence
  Synthetic
gtggtcacacuctggacctacua

SEQ ID NO: 74512 - DNA, 24 bp, Artificial Sequence
  Synthetic
tccagaguatgaauagcagcccat

SEQ ID NO: 74513 - DNA, 28 bp, Artificial Sequence
  Synthetic
agctttttacaaguaacaactccacugt

SEQ ID NO: 74514 - DNA, 27 bp, Artificial Sequence
  Synthetic
ctttttctctttugctgatgctaugct

SEQ ID NO: 74515 - DNA, 20 bp, Artificial Sequence
  Synthetic
gccaagaaacgguccaggua

SEQ ID NO: 74516 - DNA, 19 bp, Artificial Sequence
  Synthetic
cccacagccauctccagua

SEQ ID NO: 74517 - DNA, 18 bp, Artificial Sequence
  Synthetic
tcccccacagccugatug

SEQ ID NO: 74518 - DNA, 22 bp, Artificial Sequence
  Synthetic
ccccaagagcagauacugagac

SEQ ID NO: 74519 - DNA, 22 bp, Artificial Sequence
  Synthetic
gccagtgcucagtggactuaac

SEQ ID NO: 74520 - DNA, 23 bp, Artificial Sequence
  Synthetic
gatacatcucgaggccagtcauc

SEQ ID NO: 74521 - DNA, 27 bp, Artificial Sequence
  Synthetic
ctattctgagucctctttctgcugaac

SEQ ID NO: 74522 - DNA, 21 bp, Artificial Sequence
  Synthetic
gtcttcccuctggccaugaat

SEQ ID NO: 74523 - DNA, 22 bp, Artificial Sequence
  Synthetic
ggtgtaaaugcacagcttcucc

SEQ ID NO: 74524 - DNA, 22 bp, Artificial Sequence
  Synthetic
gccuccaaacucaaagagacca

SEQ ID NO: 74525 - DNA, 21 bp, Artificial Sequence
  Synthetic
gctctggcaguggtgauagaa

SEQ ID NO: 74526 - DNA, 20 bp, Artificial Sequence
  Synthetic
aaatgaatggcugccccgua

SEQ ID NO: 74527 - DNA, 24 bp, Artificial Sequence
  Synthetic
ggacatcauacccatcatccucat

SEQ ID NO: 74528 - DNA, 27 bp, Artificial Sequence
  Synthetic
gcttttaatccuccacatggaatccua

SEQ ID NO: 74529 - DNA, 22 bp, Artificial Sequence
  Synthetic
gagaguagcaguaacggcacag

SEQ ID NO: 74530 - DNA, 23 bp, Artificial Sequence
  Synthetic
cgaaggagaugttgacugagagg

SEQ ID NO: 74531 - DNA, 27 bp, Artificial Sequence
  Synthetic
agcutcccaagtuaaagaagaaacaga

SEQ ID NO: 74532 - DNA, 20 bp, Artificial Sequence
  Synthetic
ctctggaacugggcacacuc

SEQ ID NO: 74533 - DNA, 23 bp, Artificial Sequence
  Synthetic
tgaacatcatggucctccacauc

SEQ ID NO: 74534 - DNA, 20 bp, Artificial Sequence
  Synthetic
tggucccgaggagucagaaa

SEQ ID NO: 74535 - DNA, 23 bp, Artificial Sequence
  Synthetic
cccaaagtaguctggagacucac

SEQ ID NO: 74536 - DNA, 21 bp, Artificial Sequence
  Synthetic
gucttctccaucacaccccaa

SEQ ID NO: 74537 - DNA, 22 bp, Artificial Sequence
  Synthetic
agctagtagcugagagctcugt

SEQ ID NO: 74538 - DNA, 26 bp, Artificial Sequence
  Synthetic
tttccaagtugggattcttagtguga

SEQ ID NO: 74539 - DNA, 19 bp, Artificial Sequence
  Synthetic
gtcacugggttggucccat

SEQ ID NO: 74540 - DNA, 28 bp, Artificial Sequence
  Synthetic
actgggacttgcuttgtttttagaatug

SEQ ID NO: 74541 - DNA, 28 bp, Artificial Sequence
  Synthetic
ccaagaaatcgguactctttcacucaag

SEQ ID NO: 74542 - DNA, 23 bp, Artificial Sequence
  Synthetic
caggtuagagaagggaggacugt

SEQ ID NO: 74543 - DNA, 21 bp, Artificial Sequence
  Synthetic
cagcatuagcaaacctuggct

SEQ ID NO: 74544 - DNA, 28 bp, Artificial Sequence
  Synthetic
agctaatgacuagggccttatatcctut

SEQ ID NO: 74545 - DNA, 27 bp, Artificial Sequence
  Synthetic
catggcaccaguttactcagaattuac

SEQ ID NO: 74546 - DNA, 25 bp, Artificial Sequence
  Synthetic
tggttctgattuctgctctgctaug

SEQ ID NO: 74547 - DNA, 24 bp, Artificial Sequence
  Synthetic
aggttgcgguaacataaaggtgut

SEQ ID NO: 74548 - DNA, 26 bp, Artificial Sequence
  Synthetic
agggacagacugtcattcaaaauagg

SEQ ID NO: 74549 - DNA, 25 bp, Artificial Sequence
  Synthetic
tcgcgatcuaaaaccacagaacaut

SEQ ID NO: 74550 - DNA, 25 bp, Artificial Sequence
  Synthetic
tgctagcagucttggtactttguaa

SEQ ID NO: 74551 - DNA, 20 bp, Artificial Sequence
  Synthetic
tguatacagccucccacgct

SEQ ID NO: 74552 - DNA, 22 bp, Artificial Sequence
  Synthetic
gttttatttguccgctgcuggt

SEQ ID NO: 74553 - DNA, 25 bp, Artificial Sequence
  Synthetic
catagcaaatgcucaacttccgtut

SEQ ID NO: 74554 - DNA, 28 bp, Artificial Sequence
  Synthetic
gatgcatctgtuactatcttttgctuct

SEQ ID NO: 74555 - DNA, 20 bp, Artificial Sequence
  Synthetic
gctgccacuccctcuaggat

SEQ ID NO: 74556 - DNA, 26 bp, Artificial Sequence
  Synthetic
tcagaaaugagaaaccaccaaucaca

SEQ ID NO: 74557 - DNA, 29 bp, Artificial Sequence
  Synthetic
gatgatcagtcaguttatcctaaggcaut

SEQ ID NO: 74558 - DNA, 28 bp, Artificial Sequence
  Synthetic
accttccaagaguttttgacatgatgua

SEQ ID NO: 74559 - DNA, 27 bp, Artificial Sequence
  Synthetic
attttagaatcagugatcgcctctugt

SEQ ID NO: 74560 - DNA, 21 bp, Artificial Sequence
  Synthetic
tgatgctgaugcccccaauac

SEQ ID NO: 74561 - DNA, 21 bp, Artificial Sequence
  Synthetic
gctgtgaggaugccagttuct

SEQ ID NO: 74562 - DNA, 22 bp, Artificial Sequence
  Synthetic
cccatcgtgguagatccgttug

SEQ ID NO: 74563 - DNA, 24 bp, Artificial Sequence
  Synthetic
ccagtctccuaaactgccatctua

SEQ ID NO: 74564 - DNA, 28 bp, Artificial Sequence
  Synthetic
gtaattcaacuaaaagaaaggcagcugt

SEQ ID NO: 74565 - DNA, 22 bp, Artificial Sequence
  Synthetic
ttgcctugcctttgtgttucag

SEQ ID NO: 74566 - DNA, 27 bp, Artificial Sequence
  Synthetic
aggaguatatggcauagcaaagaggaa

SEQ ID NO: 74567 - DNA, 28 bp, Artificial Sequence
  Synthetic
cactattttcataugagactccgtcugg

SEQ ID NO: 74568 - DNA, 30 bp, Artificial Sequence
  Synthetic
tccaagaacatttutgcaattcttcaauct

SEQ ID NO: 74569 - DNA, 28 bp, Artificial Sequence
  Synthetic
atgtcttcaacgutactacactgcaaua

SEQ ID NO: 74570 - DNA, 20 bp, Artificial Sequence
  Synthetic
cctatgggugcccttcucca

SEQ ID NO: 74571 - DNA, 23 bp, Artificial Sequence
  Synthetic
agtatgggcucagctgcaatuac

SEQ ID NO: 74572 - DNA, 21 bp, Artificial Sequence
  Synthetic
gaacuggagcccagctactua

SEQ ID NO: 74573 - DNA, 21 bp, Artificial Sequence
  Synthetic
ctgacccatautcccctgcuc

SEQ ID NO: 74574 - DNA, 22 bp, Artificial Sequence
  Synthetic
gccccttcucccatgttttcut

SEQ ID NO: 74575 - DNA, 24 bp, Artificial Sequence
  Synthetic
tcggttaccgugatcaaaatcucc

SEQ ID NO: 74576 - DNA, 23 bp, Artificial Sequence
  Synthetic
gggaatgcagutgaggauccaat

SEQ ID NO: 74577 - DNA, 23 bp, Artificial Sequence
  Synthetic
gggtccaaagaaccuaagaguct

SEQ ID NO: 74578 - DNA, 17 bp, Artificial Sequence
  Synthetic
guggcggcgagaagaug

SEQ ID NO: 74579 - DNA, 18 bp, Artificial Sequence
  Synthetic
cgtcaggcucaggtccut

SEQ ID NO: 74580 - DNA, 28 bp, Artificial Sequence
  Synthetic
aaaagataaccucacaccagaaatucca

SEQ ID NO: 74581 - DNA, 28 bp, Artificial Sequence
  Synthetic
gaagaaaaaugatacctuagaccccgaa

SEQ ID NO: 74582 - DNA, 25 bp, Artificial Sequence
  Synthetic
ctagccttccuagaccatttaccuc

SEQ ID NO: 74583 - DNA, 22 bp, Artificial Sequence
  Synthetic
gcttgccauacagagccactut

SEQ ID NO: 74584 - DNA, 18 bp, Artificial Sequence
  Synthetic
cctggtgugcctccctuc

SEQ ID NO: 74585 - DNA, 18 bp, Artificial Sequence
  Synthetic
ggctggcguatcccagut

SEQ ID NO: 74586 - DNA, 21 bp, Artificial Sequence
  Synthetic
gggctccacacucaactacuc

SEQ ID NO: 74587 - DNA, 19 bp, Artificial Sequence
  Synthetic
tggccucacctgugaggat

SEQ ID NO: 74588 - DNA, 20 bp, Artificial Sequence
  Synthetic
acagtggcauccccaacauc

SEQ ID NO: 74589 - DNA, 21 bp, Artificial Sequence
  Synthetic
ccatcaagcutgggucacaac

SEQ ID NO: 74590 - DNA, 26 bp, Artificial Sequence
  Synthetic
tgactaaagucttcacucaccaagga

SEQ ID NO: 74591 - DNA, 28 bp, Artificial Sequence
  Synthetic
gcccaagtcttautcacatgtcttcuaa

SEQ ID NO: 74592 - DNA, 20 bp, Artificial Sequence
  Synthetic
cagacaggcutgcaggctua

SEQ ID NO: 74593 - DNA, 18 bp, Artificial Sequence
  Synthetic
cgacgtugcaggguacct

SEQ ID NO: 74594 - DNA, 17 bp, Artificial Sequence
  Synthetic
gggaaccuggcgucagt

SEQ ID NO: 74595 - DNA, 18 bp, Artificial Sequence
  Synthetic
cttccuggacacgcuggt

SEQ ID NO: 74596 - DNA, 17 bp, Artificial Sequence
  Synthetic
cgctccucggccaaguc

SEQ ID NO: 74597 - DNA, 18 bp, Artificial Sequence
  Synthetic
cagacccugccactcuca

SEQ ID NO: 74598 - DNA, 20 bp, Artificial Sequence
  Synthetic
ggcagctaguggctgtcuaa

SEQ ID NO: 74599 - DNA, 21 bp, Artificial Sequence
  Synthetic
cuctccuccgaagaaacagca

SEQ ID NO: 74600 - DNA, 21 bp, Artificial Sequence
  Synthetic
ccutcagcuaagacagccagt

SEQ ID NO: 74601 - DNA, 28 bp, Artificial Sequence
  Synthetic
atgttaacttugatgtcttccuccaaca

SEQ ID NO: 74602 - DNA, 17 bp, Artificial Sequence
  Synthetic
cgggcagcaucaugcac

SEQ ID NO: 74603 - DNA, 18 bp, Artificial Sequence
  Synthetic
gccggcauctcccauacc

SEQ ID NO: 74604 - DNA, 23 bp, Artificial Sequence
  Synthetic
ggagguagggauggaaaggagat

SEQ ID NO: 74605 - DNA, 21 bp, Artificial Sequence
  Synthetic
aguaaaugagaggccccagga

SEQ ID NO: 74606 - DNA, 21 bp, Artificial Sequence
  Synthetic
ggactgaccutggtgttgtug

SEQ ID NO: 74607 - DNA, 18 bp, Artificial Sequence
  Synthetic
tctcucccccggtcucag

SEQ ID NO: 74608 - DNA, 22 bp, Artificial Sequence
  Synthetic
ccagttctgautctgctgcuct

SEQ ID NO: 74609 - DNA, 25 bp, Artificial Sequence
  Synthetic
ccactgagcuaccaaggtttucaaa

SEQ ID NO: 74610 - DNA, 18 bp, Artificial Sequence
  Synthetic
cgtgccuccgtaggtcug

SEQ ID NO: 74611 - DNA, 24 bp, Artificial Sequence
  Synthetic
cutcatctuagaggccacgaacat

SEQ ID NO: 74612 - DNA, 20 bp, Artificial Sequence
  Synthetic
cuggagcccgugaaaaagag

SEQ ID NO: 74613 - DNA, 18 bp, Artificial Sequence
  Synthetic
ccggauggagttgucggt

SEQ ID NO: 74614 - DNA, 21 bp, Artificial Sequence
  Synthetic
gccgagaagcugtgcatcuac

SEQ ID NO: 74615 - DNA, 22 bp, Artificial Sequence
  Synthetic
tcggaggagcagauatgucaga

SEQ ID NO: 74616 - DNA, 24 bp, Artificial Sequence
  Synthetic
gtgtggtugtctcccauaagaact

SEQ ID NO: 74617 - DNA, 25 bp, Artificial Sequence
  Synthetic
tcctgtgaaucttcactttcugcaa

SEQ ID NO: 74618 - DNA, 25 bp, Artificial Sequence
  Synthetic
ttgcagaaagugaagatucacagga

SEQ ID NO: 74619 - DNA, 28 bp, Artificial Sequence
  Synthetic
tctgacatctcuttatctgcaacuacct

SEQ ID NO: 74620 - DNA, 26 bp, Artificial Sequence
  Synthetic
tgttctgucaccagattatggttugt

SEQ ID NO: 74621 - DNA, 19 bp, Artificial Sequence
  Synthetic
cctttgucgaccggugcaa

SEQ ID NO: 74622 - DNA, 18 bp, Artificial Sequence
  Synthetic
cctgccuctggcctttuc

SEQ ID NO: 74623 - DNA, 17 bp, Artificial Sequence
  Synthetic
gggaaggugggctccuc

SEQ ID NO: 74624 - DNA, 22 bp, Artificial Sequence
  Synthetic
cgaccugaccaacatccactuc

SEQ ID NO: 74625 - DNA, 18 bp, Artificial Sequence
  Synthetic
cggagtguccctgcctua

SEQ ID NO: 74626 - DNA, 26 bp, Artificial Sequence
  Synthetic
tggccagaaagaauattugaagaggt

SEQ ID NO: 74627 - DNA, 25 bp, Artificial Sequence
  Synthetic
gaagaugagggacagtttggtuagg

SEQ ID NO: 74628 - DNA, 25 bp, Artificial Sequence
  Synthetic
gcattcugatcatttguaggcgaaa

SEQ ID NO: 74629 - DNA, 23 bp, Artificial Sequence
  Synthetic
ctuttctccaaaatuccgcagca

SEQ ID NO: 74630 - DNA, 23 bp, Artificial Sequence
  Synthetic
tgcugcggaatttuggagaaaag

SEQ ID NO: 74631 - DNA, 26 bp, Artificial Sequence
  Synthetic
accaaagccaggaaauacauacacat

SEQ ID NO: 74632 - DNA, 22 bp, Artificial Sequence
  Synthetic
gcccugcagtgaatttugaaga

SEQ ID NO: 74633 - DNA, 23 bp, Artificial Sequence
  Synthetic
ggatcugtgggttaugaaaccgt

SEQ ID NO: 74634 - DNA, 25 bp, Artificial Sequence
  Synthetic
gtgtgattacagucaaaaggccuct

SEQ ID NO: 74635 - DNA, 28 bp, Artificial Sequence
  Synthetic
cgaacttcucagaaaaatgccaacauac

SEQ ID NO: 74636 - DNA, 27 bp, Artificial Sequence
  Synthetic
tgttgttaaaugaggattuccccagat

SEQ ID NO: 74637 - DNA, 21 bp, Artificial Sequence
  Synthetic
aggaccacuaccttgcugaca

SEQ ID NO: 74638 - DNA, 24 bp, Artificial Sequence
  Synthetic
gaatcaactcugaacggaaagcug

SEQ ID NO: 74639 - DNA, 22 bp, Artificial Sequence
  Synthetic
ctcgatgttgutctgggcaaug

SEQ ID NO: 74640 - DNA, 22 bp, Artificial Sequence
  Synthetic
aggacauccagaaagcttuggt

SEQ ID NO: 74641 - DNA, 21 bp, Artificial Sequence
  Synthetic
cuaaaccugcagcagggagat

SEQ ID NO: 74642 - DNA, 20 bp, Artificial Sequence
  Synthetic
ctgagggccaaggguaacut

SEQ ID NO: 74643 - DNA, 21 bp, Artificial Sequence
  Synthetic
ctggagugaacccccagtuag

SEQ ID NO: 74644 - DNA, 22 bp, Artificial Sequence
  Synthetic
cccttccccutctcacattuca

SEQ ID NO: 74645 - DNA, 27 bp, Artificial Sequence
  Synthetic
ttatccattaagugaagggaagcucac

SEQ ID NO: 74646 - DNA, 22 bp, Artificial Sequence
  Synthetic
ggaagccctuctgttctgagut

SEQ ID NO: 74647 - DNA, 24 bp, Artificial Sequence
  Synthetic
tgacctttgaagcucctcttctuc

SEQ ID NO: 74648 - DNA, 26 bp, Artificial Sequence
  Synthetic
ccaaagaatuggaacagcugaaaact

SEQ ID NO: 74649 - DNA, 22 bp, Artificial Sequence
  Synthetic
tccccaaaucctgtcagtcuct

SEQ ID NO: 74650 - DNA, 22 bp, Artificial Sequence
  Synthetic
gttgaccaugctctgtttgcug

SEQ ID NO: 74651 - DNA, 23 bp, Artificial Sequence
  Synthetic
caccacagcugatgttacctcut

SEQ ID NO: 74652 - DNA, 20 bp, Artificial Sequence
  Synthetic
ggtaacgcugttgcctctug

SEQ ID NO: 74653 - DNA, 21 bp, Artificial Sequence
  Synthetic
ctgagcuggacttcttucggt

SEQ ID NO: 74654 - DNA, 22 bp, Artificial Sequence
  Synthetic
cagatuggaagtggugcaacaa

SEQ ID NO: 74655 - DNA, 17 bp, Artificial Sequence
  Synthetic
gcagcagugcccgtcuc

SEQ ID NO: 74656 - DNA, 17 bp, Artificial Sequence
  Synthetic
cgggagcggagcauguc

SEQ ID NO: 74657 - DNA, 22 bp, Artificial Sequence
  Synthetic
agggucgccaaatuaaagcgat

SEQ ID NO: 74658 - DNA, 30 bp, Artificial Sequence
  Synthetic
ctgttagtgtttgucgtaagtatacagugt

SEQ ID NO: 74659 - DNA, 22 bp, Artificial Sequence
  Synthetic
agagagctgcugcaactagaug

SEQ ID NO: 74660 - DNA, 29 bp, Artificial Sequence
  Synthetic
cagatttttgaucaccatacugaagagga

SEQ ID NO: 74661 - DNA, 20 bp, Artificial Sequence
  Synthetic
agaggtcccaucagcctuga

SEQ ID NO: 74662 - DNA, 21 bp, Artificial Sequence
  Synthetic
gcagcagcuctctggatucaa

SEQ ID NO: 74663 - DNA, 28 bp, Artificial Sequence
  Synthetic
ccccaaaaaggcauatacaacatucaaa

SEQ ID NO: 74664 - DNA, 18 bp, Artificial Sequence
  Synthetic
agggaacccuccgaguca

SEQ ID NO: 74665 - DNA, 17 bp, Artificial Sequence
  Synthetic
gcggccuctcuccaggt

SEQ ID NO: 74666 - DNA, 22 bp, Artificial Sequence
  Synthetic
ggcactguctgcatctguagag

SEQ ID NO: 74667 - DNA, 22 bp, Artificial Sequence
  Synthetic
gccaagagcucatgctttccut

SEQ ID NO: 74668 - DNA, 20 bp, Artificial Sequence
  Synthetic
gagagcuacacgtucacggt

SEQ ID NO: 74669 - DNA, 21 bp, Artificial Sequence
  Synthetic
aatttcucggccccttuccaa

SEQ ID NO: 74670 - DNA, 31 bp, Artificial Sequence
  Synthetic
ggaaacaagtcutcactttttctgtuaacat

SEQ ID NO: 74671 - DNA, 21 bp, Artificial Sequence
  Synthetic
ttggaatguggagcccatcuc

SEQ ID NO: 74672 - DNA, 26 bp, Artificial Sequence
  Synthetic
gaattatactgugagatgggcuccac

SEQ ID NO: 74673 - DNA, 20 bp, Artificial Sequence
  Synthetic
agauccgtaccugccaggat

SEQ ID NO: 74674 - DNA, 20 bp, Artificial Sequence
  Synthetic
cctaccaguctgugcagcaa

SEQ ID NO: 74675 - DNA, 22 bp, Artificial Sequence
  Synthetic
ccttatguggaacccccaccua

SEQ ID NO: 74676 - DNA, 23 bp, Artificial Sequence
  Synthetic
gtaaagatugagccctguggaca

SEQ ID NO: 74677 - DNA, 21 bp, Artificial Sequence
  Synthetic
aggccaccccutgtatcagua

SEQ ID NO: 74678 - DNA, 21 bp, Artificial Sequence
  Synthetic
aagaactucaggcgccaagua

SEQ ID NO: 74679 - DNA, 27 bp, Artificial Sequence
  Synthetic
ggcaagttcaacautattccctttugt

SEQ ID NO: 74680 - DNA, 18 bp, Artificial Sequence
  Synthetic
gccgcucaccctgtgtuc

SEQ ID NO: 74681 - DNA, 19 bp, Artificial Sequence
  Synthetic
cctccgccuctggcattut

SEQ ID NO: 74682 - DNA, 27 bp, Artificial Sequence
  Synthetic
gaatccagccugaagagttgaatuaga

SEQ ID NO: 74683 - DNA, 19 bp, Artificial Sequence
  Synthetic
cttacagcugcacgucgga

SEQ ID NO: 74684 - DNA, 25 bp, Artificial Sequence
  Synthetic
cacgatttcatugaacacttccuct

SEQ ID NO: 74685 - DNA, 17 bp, Artificial Sequence
  Synthetic
ccggccagggucaccua

SEQ ID NO: 74686 - DNA, 18 bp, Artificial Sequence
  Synthetic
ccaggcaaugagggugga

SEQ ID NO: 74687 - DNA, 20 bp, Artificial Sequence
  Synthetic
gccctgutggtgtucaagga

SEQ ID NO: 74688 - DNA, 18 bp, Artificial Sequence
  Synthetic
cctcgagcucctcgctut

SEQ ID NO: 74689 - DNA, 19 bp, Artificial Sequence
  Synthetic
aggaaccccugacacugga

SEQ ID NO: 74690 - DNA, 27 bp, Artificial Sequence
  Synthetic
gaacaagaauctacaggaauagccaca

SEQ ID NO: 74691 - DNA, 22 bp, Artificial Sequence
  Synthetic
gtcatgccugcctttctgtgua

SEQ ID NO: 74692 - DNA, 28 bp, Artificial Sequence
  Synthetic
ggtaattaacaaguatgcgaaugcaaga

SEQ ID NO: 74693 - DNA, 22 bp, Artificial Sequence
  Synthetic
caaaacgacugcaggagtggua

SEQ ID NO: 74694 - DNA, 28 bp, Artificial Sequence
  Synthetic
gtggcattattatutccggtttcttcut

SEQ ID NO: 74695 - DNA, 28 bp, Artificial Sequence
  Synthetic
cattcacaauccaaatttcacagucaga

SEQ ID NO: 74696 - DNA, 21 bp, Artificial Sequence
  Synthetic
acgccttguccagcatcttut

SEQ ID NO: 74697 - DNA, 21 bp, Artificial Sequence
  Synthetic
gcacgttcauctgacgtgugt

SEQ ID NO: 74698 - DNA, 24 bp, Artificial Sequence
  Synthetic
ccacttcctuggtttctccttugt

SEQ ID NO: 74699 - DNA, 25 bp, Artificial Sequence
  Synthetic
gcgactgctucttcagttactcuat

SEQ ID NO: 74700 - DNA, 27 bp, Artificial Sequence
  Synthetic
tcctttttagagutcaacttgctguga

SEQ ID NO: 74701 - DNA, 28 bp, Artificial Sequence
  Synthetic
ccttctctcctgugaccatagaatttua

SEQ ID NO: 74702 - DNA, 20 bp, Artificial Sequence
  Synthetic
cggacgcuctctttcaggug

SEQ ID NO: 74703 - DNA, 21 bp, Artificial Sequence
  Synthetic
agcaggugaaaatggcugaga

SEQ ID NO: 74704 - DNA, 25 bp, Artificial Sequence
  Synthetic
aaccttaguacaaacctcggttguc

SEQ ID NO: 74705 - DNA, 26 bp, Artificial Sequence
  Synthetic
agcatgatttattuatgggccaccut

SEQ ID NO: 74706 - DNA, 28 bp, Artificial Sequence
  Synthetic
gccgtagacugtccagaaaatatuaaga

SEQ ID NO: 74707 - DNA, 26 bp, Artificial Sequence
  Synthetic
ctattctgucaaaaagctctccucca

SEQ ID NO: 74708 - DNA, 24 bp, Artificial Sequence
  Synthetic
ttctggaguactgtaguggaggag

SEQ ID NO: 74709 - DNA, 26 bp, Artificial Sequence
  Synthetic
caugagcaatttugaaaggacaacga

SEQ ID NO: 74710 - DNA, 25 bp, Artificial Sequence
  Synthetic
gggagctguccttaaaattcuccaa

SEQ ID NO: 74711 - DNA, 28 bp, Artificial Sequence
  Synthetic
tctggtagcagguctaagatataaggug

SEQ ID NO: 74712 - DNA, 21 bp, Artificial Sequence
  Synthetic
agctggcgcuaaagaauagcc

SEQ ID NO: 74713 - DNA, 28 bp, Artificial Sequence
  Synthetic
ggcttatggttugcttagttttctucat

SEQ ID NO: 74714 - DNA, 22 bp, Artificial Sequence
  Synthetic
gcttacctcacucctccccaut

SEQ ID NO: 74715 - DNA, 20 bp, Artificial Sequence
  Synthetic
cagcgaggugaagccuagag

SEQ ID NO: 74716 - DNA, 18 bp, Artificial Sequence
  Synthetic
ggcccacgagcuctguag

SEQ ID NO: 74717 - DNA, 19 bp, Artificial Sequence
  Synthetic
caagtuagggcccggacug

SEQ ID NO: 74718 - DNA, 29 bp, Artificial Sequence
  Synthetic
gatggagacactuggagaaaatgagtaut

SEQ ID NO: 74719 - DNA, 27 bp, Artificial Sequence
  Synthetic
cagtcacagaccugcataattattugt

SEQ ID NO: 74720 - DNA, 24 bp, Artificial Sequence
  Synthetic
ggctcttcucagacatgtgaucaa

SEQ ID NO: 74721 - DNA, 22 bp, Artificial Sequence
  Synthetic
cagatagcaccutcagcacuct

SEQ ID NO: 74722 - DNA, 24 bp, Artificial Sequence
  Synthetic
gcacatatgcacucccagtauaca

SEQ ID NO: 74723 - DNA, 20 bp, Artificial Sequence
  Synthetic
ttgacccugtcatgcagucc

SEQ ID NO: 74724 - DNA, 24 bp, Artificial Sequence
  Synthetic
cgaaaaacuactguggaccacaag

SEQ ID NO: 74725 - DNA, 28 bp, Artificial Sequence
  Synthetic
ctaattagaacugcagatgctauacaca

SEQ ID NO: 74726 - DNA, 26 bp, Artificial Sequence
  Synthetic
aacatgcttacugtttcagagagugt

SEQ ID NO: 74727 - DNA, 27 bp, Artificial Sequence
  Synthetic
ggcaagtuaggcattatgcaaatuact

SEQ ID NO: 74728 - DNA, 21 bp, Artificial Sequence
  Synthetic
tgcguccacagcaatauccaa

SEQ ID NO: 74729 - DNA, 19 bp, Artificial Sequence
  Synthetic
agtacguggacgacgtcug

SEQ ID NO: 74730 - DNA, 21 bp, Artificial Sequence
  Synthetic
tgagggtguctcccctttuct

SEQ ID NO: 74731 - DNA, 22 bp, Artificial Sequence
  Synthetic
cctaacccugagttccccttug

SEQ ID NO: 74732 - DNA, 22 bp, Artificial Sequence
  Synthetic
gccaggcautgttgaacaugag

SEQ ID NO: 74733 - DNA, 23 bp, Artificial Sequence
  Synthetic
gggatuccctatacugagaccat

SEQ ID NO: 74734 - DNA, 20 bp, Artificial Sequence
  Synthetic
gccccgutaagtccacugag

SEQ ID NO: 74735 - DNA, 24 bp, Artificial Sequence
  Synthetic
tgacttctctuggtttggttguca

SEQ ID NO: 74736 - DNA, 22 bp, Artificial Sequence
  Synthetic
cctctctgacucccctgugaaa

SEQ ID NO: 74737 - DNA, 22 bp, Artificial Sequence
  Synthetic
cauactctagcuccccaagcac

SEQ ID NO: 74738 - DNA, 19 bp, Artificial Sequence
  Synthetic
gcccugcacagguacagaa

SEQ ID NO: 74739 - DNA, 19 bp, Artificial Sequence
  Synthetic
cgagugaccccaagacucc

SEQ ID NO: 74740 - DNA, 28 bp, Artificial Sequence
  Synthetic
aagaaccuaagaaaaggaaaaucaggct

SEQ ID NO: 74741 - DNA, 23 bp, Artificial Sequence
  Synthetic
tccttctgtugcatctgggtaug

SEQ ID NO: 74742 - DNA, 22 bp, Artificial Sequence
  Synthetic
cacattgcttuctgctcccaut

SEQ ID NO: 74743 - DNA, 28 bp, Artificial Sequence
  Synthetic
gcctttccagtutatgctgattcattut

SEQ ID NO: 74744 - DNA, 23 bp, Artificial Sequence
  Synthetic
caatttaaggucaccctcccuca

SEQ ID NO: 74745 - DNA, 22 bp, Artificial Sequence
  Synthetic
aagtatggccutcttgcugaca

SEQ ID NO: 74746 - DNA, 28 bp, Artificial Sequence
  Synthetic
cgtgaatcuttttatgtctucagcaaca

SEQ ID NO: 74747 - DNA, 27 bp, Artificial Sequence
  Synthetic
tggaatgggcutctgaaagttcaauat

SEQ ID NO: 74748 - DNA, 28 bp, Artificial Sequence
  Synthetic
tttctcctagaucctgaggaattctuga

SEQ ID NO: 74749 - DNA, 27 bp, Artificial Sequence
  Synthetic
ggaaatcatguctgttgaataauggca

SEQ ID NO: 74750 - DNA, 22 bp, Artificial Sequence
  Synthetic
gtcctgttuggctcccttguaa

SEQ ID NO: 74751 - DNA, 19 bp, Artificial Sequence
  Synthetic
cccgcacugacatgcuagg

SEQ ID NO: 74752 - DNA, 20 bp, Artificial Sequence
  Synthetic
gggaaggucctagtgccuct

SEQ ID NO: 74753 - DNA, 23 bp, Artificial Sequence
  Synthetic
caacauccagcagguagagagaa

SEQ ID NO: 74754 - DNA, 23 bp, Artificial Sequence
  Synthetic
ggtcatggagugttgccatctua

SEQ ID NO: 74755 - DNA, 20 bp, Artificial Sequence
  Synthetic
gtacccucagcatggccaut

SEQ ID NO: 74756 - DNA, 25 bp, Artificial Sequence
  Synthetic
aatgcttggguaagaaaacatguca

SEQ ID NO: 74757 - DNA, 25 bp, Artificial Sequence
  Synthetic
ggttgtggagagutgtaatggcaua

SEQ ID NO: 74758 - DNA, 22 bp, Artificial Sequence
  Synthetic
cttgctgaagcauaccccauct

SEQ ID NO: 74759 - DNA, 22 bp, Artificial Sequence
  Synthetic
gcctgcaaggutttaacuggac

SEQ ID NO: 74760 - DNA, 23 bp, Artificial Sequence
  Synthetic
gctctgagccauactacctccut

SEQ ID NO: 74761 - DNA, 19 bp, Artificial Sequence
  Synthetic
ggctgacucagagguccga

SEQ ID NO: 74762 - DNA, 27 bp, Artificial Sequence
  Synthetic
tctgccacacauttagaaagaaucagt

SEQ ID NO: 74763 - DNA, 22 bp, Artificial Sequence
  Synthetic
agcccccaaacutgattucaga

SEQ ID NO: 74764 - DNA, 24 bp, Artificial Sequence
  Synthetic
tcaccagtggautctgtgttgtut

SEQ ID NO: 74765 - DNA, 29 bp, Artificial Sequence
  Synthetic
agtctgtcgtaauagccaagaattuaaca

SEQ ID NO: 74766 - DNA, 21 bp, Artificial Sequence
  Synthetic
agggaagucggaagagcugat

SEQ ID NO: 74767 - DNA, 27 bp, Artificial Sequence
  Synthetic
gcatgttggutatctgtcaucaaaact

SEQ ID NO: 74768 - DNA, 33 bp, Artificial Sequence
  Synthetic
atactgtctacttuagaaactaagaattuggag

SEQ ID NO: 74769 - DNA, 28 bp, Artificial Sequence
  Synthetic
cccacacccauttatctccttaacuaat

SEQ ID NO: 74770 - DNA, 25 bp, Artificial Sequence
  Synthetic
accacagcacauacacatttuagca

SEQ ID NO: 74771 - DNA, 23 bp, Artificial Sequence
  Synthetic
ggtatccaccuttctcugagcat

SEQ ID NO: 74772 - DNA, 24 bp, Artificial Sequence
  Synthetic
ggutgccttgcucaacaaaacaaa

SEQ ID NO: 74773 - DNA, 28 bp, Artificial Sequence
  Synthetic
caatgctccaugaaaaccacauaaagaa

SEQ ID NO: 74774 - DNA, 22 bp, Artificial Sequence
  Synthetic
gtcagaaaagggucccagguag

SEQ ID NO: 74775 - DNA, 23 bp, Artificial Sequence
  Synthetic
cagatgcttgugtgttctgctut

SEQ ID NO: 74776 - DNA, 31 bp, Artificial Sequence
  Synthetic
agaatatggtttttaugacacagagttguga

SEQ ID NO: 74777 - DNA, 27 bp, Artificial Sequence
  Synthetic
ggcctggtttugcaatcatttacttut

SEQ ID NO: 74778 - DNA, 25 bp, Artificial Sequence
  Synthetic
gttgtatgccagutcttccttcugt

SEQ ID NO: 74779 - DNA, 21 bp, Artificial Sequence
  Synthetic
gaugugcacgaacaagcaact

SEQ ID NO: 74780 - DNA, 22 bp, Artificial Sequence
  Synthetic
gcagaagacccugcaaaatcuc

SEQ ID NO: 74781 - DNA, 28 bp, Artificial Sequence
  Synthetic
actgaatgguaaagagtggaatctgtuc

SEQ ID NO: 74782 - DNA, 22 bp, Artificial Sequence
  Synthetic
ggtgccatuccacgactagtuc

SEQ ID NO: 74783 - DNA, 28 bp, Artificial Sequence
  Synthetic
gcattcctttuagatagccaggtaucac

SEQ ID NO: 74784 - DNA, 25 bp, Artificial Sequence
  Synthetic
gcagaaatcucttagaacuggaggt

SEQ ID NO: 74785 - DNA, 24 bp, Artificial Sequence
  Synthetic
acacaaacaaaugatgcctgcaut

SEQ ID NO: 74786 - DNA, 20 bp, Artificial Sequence
  Synthetic
gugaactcacugaccaccga

SEQ ID NO: 74787 - DNA, 25 bp, Artificial Sequence
  Synthetic
gtgcagtgttuagctcttccatuac

SEQ ID NO: 74788 - DNA, 24 bp, Artificial Sequence
  Synthetic
ggccugacacacaatttttauggg

SEQ ID NO: 74789 - DNA, 20 bp, Artificial Sequence
  Synthetic
agccucaaaccccagtucag

SEQ ID NO: 74790 - DNA, 20 bp, Artificial Sequence
  Synthetic
gctgttgcugcgatgacuga

SEQ ID NO: 74791 - DNA, 21 bp, Artificial Sequence
  Synthetic
cagugcuacccaaacccagag

SEQ ID NO: 74792 - DNA, 18 bp, Artificial Sequence
  Synthetic
gctgctgccuggactgua

SEQ ID NO: 74793 - DNA, 19 bp, Artificial Sequence
  Synthetic
tgccauctcuccagcacac

SEQ ID NO: 74794 - DNA, 20 bp, Artificial Sequence
  Synthetic
gagtcaucccaggtggtguc

SEQ ID NO: 74795 - DNA, 24 bp, Artificial Sequence
  Synthetic
tgctcttccuaaccctcucaacat

SEQ ID NO: 74796 - DNA, 19 bp, Artificial Sequence
  Synthetic
ggtgcaguggtgactgugt

SEQ ID NO: 74797 - DNA, 24 bp, Artificial Sequence
  Synthetic
accatactctguccatttctggua

SEQ ID NO: 74798 - DNA, 27 bp, Artificial Sequence
  Synthetic
gaaaatgtguttcttaccucaagccat

SEQ ID NO: 74799 - DNA, 28 bp, Artificial Sequence
  Synthetic
ggtaattcttgcugatggattcucaact

SEQ ID NO: 74800 - DNA, 28 bp, Artificial Sequence
  Synthetic
gtaatgtttgttuttagctctgcugcat

SEQ ID NO: 74801 - DNA, 27 bp, Artificial Sequence
  Synthetic
ctttgcaatuaccttttctuccacaga

SEQ ID NO: 74802 - DNA, 24 bp, Artificial Sequence
  Synthetic
cagcctgtatutgagaagcatgug

SEQ ID NO: 74803 - DNA, 18 bp, Artificial Sequence
  Synthetic
tcuccugcaacgcagagg

SEQ ID NO: 74804 - DNA, 19 bp, Artificial Sequence
  Synthetic
ccagccagcutgcgauaac

SEQ ID NO: 74805 - DNA, 27 bp, Artificial Sequence
  Synthetic
gagcacatgaauaaatgagcatccaut

SEQ ID NO: 74806 - DNA, 19 bp, Artificial Sequence
  Synthetic
gccggcgutcagaatguag

SEQ ID NO: 74807 - DNA, 22 bp, Artificial Sequence
  Synthetic
gcagaagcaggacutgtaccut

SEQ ID NO: 74808 - DNA, 23 bp, Artificial Sequence
  Synthetic
gaacgtucattcaaguaggccat

SEQ ID NO: 74809 - DNA, 25 bp, Artificial Sequence
  Synthetic
ctccaaatcuaggacctaggacuca

SEQ ID NO: 74810 - DNA, 22 bp, Artificial Sequence
  Synthetic
actttctctgucagcccaguct

SEQ ID NO: 74811 - DNA, 23 bp, Artificial Sequence
  Synthetic
gggttcuccttaactucagccaa

SEQ ID NO: 74812 - DNA, 19 bp, Artificial Sequence
  Synthetic
cctggcauggcaggaguag

SEQ ID NO: 74813 - DNA, 19 bp, Artificial Sequence
  Synthetic
accacccucaagagccuga

SEQ ID NO: 74814 - DNA, 20 bp, Artificial Sequence
  Synthetic
ccgccaucgctgatcacuat

SEQ ID NO: 74815 - DNA, 22 bp, Artificial Sequence
  Synthetic
cgctgtgatuccaatggtctug

SEQ ID NO: 74816 - DNA, 21 bp, Artificial Sequence
  Synthetic
ctcaggguccccacttctcua

SEQ ID NO: 74817 - DNA, 21 bp, Artificial Sequence
  Synthetic
catcagcacagutcgugaggt

SEQ ID NO: 74818 - DNA, 21 bp, Artificial Sequence
  Synthetic
gctccggaugttctcgatcug

SEQ ID NO: 74819 - DNA, 21 bp, Artificial Sequence
  Synthetic
caagagaaggcucacgauggt

SEQ ID NO: 74820 - DNA, 21 bp, Artificial Sequence
  Synthetic
ttcctccccuggtctcaucat

SEQ ID NO: 74821 - DNA, 21 bp, Artificial Sequence
  Synthetic
gtcacacacgcugacctcuaa

SEQ ID NO: 74822 - DNA, 21 bp, Artificial Sequence
  Synthetic
gcatcaucagcccggtaguag

SEQ ID NO: 74823 - DNA, 21 bp, Artificial Sequence
  Synthetic
gccggtaauccccactctcut

SEQ ID NO: 74824 - DNA, 21 bp, Artificial Sequence
  Synthetic
ctgacgccuttgtcctcatuc

SEQ ID NO: 74825 - DNA, 29 bp, Artificial Sequence
  Synthetic
atctctccaatcugactccttttcttcua

SEQ ID NO: 74826 - DNA, 23 bp, Artificial Sequence
  Synthetic
gaacccctuttcctatggaucgt

SEQ ID NO: 74827 - DNA, 24 bp, Artificial Sequence
  Synthetic
agttctagcutgtccaaugcaaca

SEQ ID NO: 74828 - DNA, 22 bp, Artificial Sequence
  Synthetic
acatggtcuagaagtgggcuca

SEQ ID NO: 74829 - DNA, 25 bp, Artificial Sequence
  Synthetic
cugcacaaaaccucacagagaaaaa

SEQ ID NO: 74830 - DNA, 17 bp, Artificial Sequence
  Synthetic
cugggccactugccaga

SEQ ID NO: 74831 - DNA, 20 bp, Artificial Sequence
  Synthetic
tgccctguccttcccttcua

SEQ ID NO: 74832 - DNA, 17 bp, Artificial Sequence
  Synthetic
gccccagcuaccuggat

SEQ ID NO: 74833 - DNA, 18 bp, Artificial Sequence
  Synthetic
ggcagcgaugagggtcug

SEQ ID NO: 74834 - DNA, 21 bp, Artificial Sequence
  Synthetic
gtcgcaccutctccactaguc

SEQ ID NO: 74835 - DNA, 22 bp, Artificial Sequence
  Synthetic
tttacggccaacgguggatuat

SEQ ID NO: 74836 - DNA, 22 bp, Artificial Sequence
  Synthetic
gtgatgaagautgtggcgtgut

SEQ ID NO: 74837 - DNA, 25 bp, Artificial Sequence
  Synthetic
tctccaacctucaaagaaactcugg

SEQ ID NO: 74838 - DNA, 21 bp, Artificial Sequence
  Synthetic
cctccagucgcctcaguaaag

SEQ ID NO: 74839 - DNA, 20 bp, Artificial Sequence
  Synthetic
tggctgaaautggtgucggt

SEQ ID NO: 74840 - DNA, 28 bp, Artificial Sequence
  Synthetic
gataaccagaauaaagaccaagugacca

SEQ ID NO: 74841 - DNA, 21 bp, Artificial Sequence
  Synthetic
tcacttgccagcuggactuac

SEQ ID NO: 74842 - DNA, 22 bp, Artificial Sequence
  Synthetic
ggagcucagagaagggtctgua

SEQ ID NO: 74843 - DNA, 22 bp, Artificial Sequence
  Synthetic
gtgatttcuggcccaatgtgut

SEQ ID NO: 74844 - DNA, 18 bp, Artificial Sequence
  Synthetic
ctgctgcugttggtucgt

SEQ ID NO: 74845 - DNA, 21 bp, Artificial Sequence
  Synthetic
ggatgutgtactgucgcagga

SEQ ID NO: 74846 - DNA, 19 bp, Artificial Sequence
  Synthetic
aagauggcggacgtgctua

SEQ ID NO: 74847 - DNA, 19 bp, Artificial Sequence
  Synthetic
acagccaugccggactuac

SEQ ID NO: 74848 - DNA, 27 bp, Artificial Sequence
  Synthetic
tcgaacttccucctttggaaauaaact

SEQ ID NO: 74849 - DNA, 27 bp, Artificial Sequence
  Synthetic
ccaaaatttucttaccatguccacacc

SEQ ID NO: 74850 - DNA, 19 bp, Artificial Sequence
  Synthetic
agaggcaucaagccuggac

SEQ ID NO: 74851 - DNA, 21 bp, Artificial Sequence
  Synthetic
gcuaaaggcgaacctggugat

SEQ ID NO: 74852 - DNA, 19 bp, Artificial Sequence
  Synthetic
ccagcaucgccttuagcac

SEQ ID NO: 74853 - DNA, 21 bp, Artificial Sequence
  Synthetic
ggautgttucccacccaagca

SEQ ID NO: 74854 - DNA, 22 bp, Artificial Sequence
  Synthetic
ggccttguacactgtcccauag

SEQ ID NO: 74855 - DNA, 22 bp, Artificial Sequence
  Synthetic
ctgcaggcucataccatccuaa

SEQ ID NO: 74856 - DNA, 29 bp, Artificial Sequence
  Synthetic
cttgttctagtuccttaatgctctctuct

SEQ ID NO: 74857 - DNA, 23 bp, Artificial Sequence
  Synthetic
cctcatctcacugttgtgcttug

SEQ ID NO: 74858 - DNA, 24 bp, Artificial Sequence
  Synthetic
ggatcuaacaaagagccacacugt

SEQ ID NO: 74859 - DNA, 28 bp, Artificial Sequence
  Synthetic
ttacagctatcugtctgttcattgtugt

SEQ ID NO: 74860 - DNA, 24 bp, Artificial Sequence
  Synthetic
acattgatucccacatccagugag

SEQ ID NO: 74861 - DNA, 28 bp, Artificial Sequence
  Synthetic
tccatggcattcugagtttgattttcua

SEQ ID NO: 74862 - DNA, 28 bp, Artificial Sequence
  Synthetic
catggaaaugaccaaatgtctcucaaat

SEQ ID NO: 74863 - DNA, 28 bp, Artificial Sequence
  Synthetic
cctctccggaauaaatagttttctcugt

SEQ ID NO: 74864 - DNA, 22 bp, Artificial Sequence
  Synthetic
ctcagccucatttcucaaccga

SEQ ID NO: 74865 - DNA, 28 bp, Artificial Sequence
  Synthetic
cctcactattgaguattttgggcttgut

SEQ ID NO: 74866 - DNA, 25 bp, Artificial Sequence
  Synthetic
gcaatccagaugctatgtcttcuct

SEQ ID NO: 74867 - DNA, 29 bp, Artificial Sequence
  Synthetic
tgctatttgcacauttgattgatcttgut

SEQ ID NO: 74868 - DNA, 25 bp, Artificial Sequence
  Synthetic
tcgtaatgaaccauttcagcgauca

SEQ ID NO: 74869 - DNA, 25 bp, Artificial Sequence
  Synthetic
ggcttgttgcuatctcctgatuaca

SEQ ID NO: 74870 - DNA, 21 bp, Artificial Sequence
  Synthetic
gaacacactacuggccagcua

SEQ ID NO: 74871 - DNA, 27 bp, Artificial Sequence
  Synthetic
tttaggtttctguacactttcgtccuc

SEQ ID NO: 74872 - DNA, 27 bp, Artificial Sequence
  Synthetic
tttaaccacacuttgcagatctuacct

SEQ ID NO: 74873 - DNA, 28 bp, Artificial Sequence
  Synthetic
ggaaaggtctugaaaagcagtatttugt

SEQ ID NO: 74874 - DNA, 25 bp, Artificial Sequence
  Synthetic
aaattcctcugcacccatatgugaa

SEQ ID NO: 74875 - DNA, 29 bp, Artificial Sequence
  Synthetic
tgagttactguggaaatctagagctguat

SEQ ID NO: 74876 - DNA, 28 bp, Artificial Sequence
  Synthetic
atggacatuaccaagagtcatacagtug

SEQ ID NO: 74877 - DNA, 28 bp, Artificial Sequence
  Synthetic
attttcccatctuctgatgtggtcauaa

SEQ ID NO: 74878 - DNA, 28 bp, Artificial Sequence
  Synthetic
tgataaagattcucctcagtcagcugat

SEQ ID NO: 74879 - DNA, 28 bp, Artificial Sequence
  Synthetic
cctgatgaaaataauggctttgtgguag

SEQ ID NO: 74880 - DNA, 24 bp, Artificial Sequence
  Synthetic
cccgaaaaagaaaugatgcuccaa

SEQ ID NO: 74881 - DNA, 22 bp, Artificial Sequence
  Synthetic
aaaggattugacaggctcugct

SEQ ID NO: 74882 - DNA, 26 bp, Artificial Sequence
  Synthetic
tgctgtttgtggauccagtgataaut

SEQ ID NO: 74883 - DNA, 26 bp, Artificial Sequence
  Synthetic
tggcaaaaucatttgcauaagcaaga

SEQ ID NO: 74884 - DNA, 28 bp, Artificial Sequence
  Synthetic
actgtgguggagttcttgauaaacaaat

SEQ ID NO: 74885 - DNA, 27 bp, Artificial Sequence
  Synthetic
ctggcctaguacagatttcactgtaug

SEQ ID NO: 74886 - DNA, 28 bp, Artificial Sequence
  Synthetic
aggttauggaactaaagctucaggaaat

SEQ ID NO: 74887 - DNA, 24 bp, Artificial Sequence
  Synthetic
ctggcatccugattacaagtcugt

SEQ ID NO: 74888 - DNA, 25 bp, Artificial Sequence
  Synthetic
cuaaggaaagaauacagcagagcct

SEQ ID NO: 74889 - DNA, 22 bp, Artificial Sequence
  Synthetic
tggtactcuccggtgctagaut

SEQ ID NO: 74890 - DNA, 22 bp, Artificial Sequence
  Synthetic
gggaaggaaaagugttggugga

SEQ ID NO: 74891 - DNA, 19 bp, Artificial Sequence
  Synthetic
tccugccaauggcaccaaa

SEQ ID NO: 74892 - DNA, 22 bp, Artificial Sequence
  Synthetic
ggtttgcugcagcctguaaaaa

SEQ ID NO: 74893 - DNA, 26 bp, Artificial Sequence
  Synthetic
cagcattgacaugagtttgaaugact

SEQ ID NO: 74894 - DNA, 22 bp, Artificial Sequence
  Synthetic
gggcagaaacucacatagtcuc

SEQ ID NO: 74895 - DNA, 28 bp, Artificial Sequence
  Synthetic
ggtcatttccauggcatcattacaacua

SEQ ID NO: 74896 - DNA, 28 bp, Artificial Sequence
  Synthetic
gccattattttcaucaggacagttcuct

SEQ ID NO: 74897 - DNA, 25 bp, Artificial Sequence
  Synthetic
tcatcttgtcauggcaatagucagg

SEQ ID NO: 74898 - DNA, 22 bp, Artificial Sequence
  Synthetic
cgtgattgucatttggugccat

SEQ ID NO: 74899 - DNA, 28 bp, Artificial Sequence
  Synthetic
ggcctagtagutatttcatctggugaga

SEQ ID NO: 74900 - DNA, 26 bp, Artificial Sequence
  Synthetic
cacagtaacucagacgtaacuaagca

SEQ ID NO: 74901 - DNA, 28 bp, Artificial Sequence
  Synthetic
tggtagatgaacaguttgaaaggcuaaa

SEQ ID NO: 74902 - DNA, 25 bp, Artificial Sequence
  Synthetic
ccaattatugcccagtgcaaaauga

SEQ ID NO: 74903 - DNA, 28 bp, Artificial Sequence
  Synthetic
tgtcctttggtacuggtttgaataacut

SEQ ID NO: 74904 - DNA, 28 bp, Artificial Sequence
  Synthetic
agaatattagccaugaccccagaatcua

SEQ ID NO: 74905 - DNA, 28 bp, Artificial Sequence
  Synthetic
tgctttagcaaauttttctcctctcuca

SEQ ID NO: 74906 - DNA, 24 bp, Artificial Sequence
  Synthetic
ggagaagcaccagaucctgtaaut

SEQ ID NO: 74907 - DNA, 29 bp, Artificial Sequence
  Synthetic
cattgtgtgccutatttcctaatucaagt

SEQ ID NO: 74908 - DNA, 23 bp, Artificial Sequence
  Synthetic
gtcaggttccucttgcagctuat

SEQ ID NO: 74909 - DNA, 28 bp, Artificial Sequence
  Synthetic
cggttaagctguttttggctattatguc

SEQ ID NO: 74910 - DNA, 24 bp, Artificial Sequence
  Synthetic
ctctgctccutgtcctttgtuaga

SEQ ID NO: 74911 - DNA, 28 bp, Artificial Sequence
  Synthetic
catctcccccagaucttgactatauact

SEQ ID NO: 74912 - DNA, 20 bp, Artificial Sequence
  Synthetic
ccacccctuccagagcaaut

SEQ ID NO: 74913 - DNA, 28 bp, Artificial Sequence
  Synthetic
tggtttcagcuccattatgagactttut

SEQ ID NO: 74914 - DNA, 26 bp, Artificial Sequence
  Synthetic
tgaggaaaaguttaagcaaucccaca

SEQ ID NO: 74915 - DNA, 26 bp, Artificial Sequence
  Synthetic
agttcagaaggaccaaauccaaugac

SEQ ID NO: 74916 - DNA, 29 bp, Artificial Sequence
  Synthetic
ccacgaaatctatuggctaatcaaactut

SEQ ID NO: 74917 - DNA, 21 bp, Artificial Sequence
  Synthetic
aatggaggutggtcggtugag

SEQ ID NO: 74918 - DNA, 28 bp, Artificial Sequence
  Synthetic
tctccagcaaugctaaagataguagaga

SEQ ID NO: 74919 - DNA, 24 bp, Artificial Sequence
  Synthetic
tgutgggcaatcuaggcaaaaaga

SEQ ID NO: 74920 - DNA, 24 bp, Artificial Sequence
  Synthetic
ctctcuaccgccaaagacagttut

SEQ ID NO: 74921 - DNA, 24 bp, Artificial Sequence
  Synthetic
agttgtgtcugctggaatctgtuc

SEQ ID NO: 74922 - DNA, 28 bp, Artificial Sequence
  Synthetic
cacacaactgccutagaatgtaaaacug

SEQ ID NO: 74923 - DNA, 28 bp, Artificial Sequence
  Synthetic
gttaggtctgtcugttctttcctttuct

SEQ ID NO: 74924 - DNA, 26 bp, Artificial Sequence
  Synthetic
tgtagtgtcacuggtattgaugacct

SEQ ID NO: 74925 - DNA, 25 bp, Artificial Sequence
  Synthetic
ttcagtttaccugcaacagauccaa

SEQ ID NO: 74926 - DNA, 23 bp, Artificial Sequence
  Synthetic
ggtctcuagcaaagatucaggca

SEQ ID NO: 74927 - DNA, 28 bp, Artificial Sequence
  Synthetic
aaggccttttccucagtttctatgtuaa

SEQ ID NO: 74928 - DNA, 28 bp, Artificial Sequence
  Synthetic
tcctgatgagaucaattcttcagacuct

SEQ ID NO: 74929 - DNA, 26 bp, Artificial Sequence
  Synthetic
ttcttcttcttguacccacgttctut

SEQ ID NO: 74930 - DNA, 19 bp, Artificial Sequence
  Synthetic
cggactttucgagggccut

SEQ ID NO: 74931 - DNA, 17 bp, Artificial Sequence
  Synthetic
gccgcgagugagggtut

SEQ ID NO: 74932 - DNA, 26 bp, Artificial Sequence
  Synthetic
aatgggaaaaacutgcaauagccaaa

SEQ ID NO: 74933 - DNA, 21 bp, Artificial Sequence
  Synthetic
ggtucaagacagagcucacct

SEQ ID NO: 74934 - DNA, 18 bp, Artificial Sequence
  Synthetic
gcgggaugugaaccacga

SEQ ID NO: 74935 - DNA, 19 bp, Artificial Sequence
  Synthetic
gctcaccuctggugccaaa

SEQ ID NO: 74936 - DNA, 23 bp, Artificial Sequence
  Synthetic
cccagggtuggttactcttuaca

SEQ ID NO: 74937 - DNA, 29 bp, Artificial Sequence
  Synthetic
ctaaagcttgtguccagtgatatggtuat

SEQ ID NO: 74938 - DNA, 19 bp, Artificial Sequence
  Synthetic
caccuggctccttuccaca

SEQ ID NO: 74939 - DNA, 21 bp, Artificial Sequence
  Synthetic
ctcaccttugctctggtugga

SEQ ID NO: 74940 - DNA, 22 bp, Artificial Sequence
  Synthetic
cgaggacaccugggtaaagtug

SEQ ID NO: 74941 - DNA, 20 bp, Artificial Sequence
  Synthetic
ctgacguacctgtgcuggaa

SEQ ID NO: 74942 - DNA, 21 bp, Artificial Sequence
  Synthetic
gttccctuggcactcctuagt

SEQ ID NO: 74943 - DNA, 17 bp, Artificial Sequence
  Synthetic
cuggaccccacacccut

SEQ ID NO: 74944 - DNA, 20 bp, Artificial Sequence
  Synthetic
gcttggguctccgtctucat

SEQ ID NO: 74945 - DNA, 24 bp, Artificial Sequence
  Synthetic
ctgaagtcagugctttcggtttut

SEQ ID NO: 74946 - DNA, 21 bp, Artificial Sequence
  Synthetic
ccaggtcagccugtggaatut

SEQ ID NO: 74947 - DNA, 21 bp, Artificial Sequence
  Synthetic
ttgcgcaagaugtgctcaaug

SEQ ID NO: 74948 - DNA, 22 bp, Artificial Sequence
  Synthetic
cagctgtcacucctcatgacut

SEQ ID NO: 74949 - DNA, 21 bp, Artificial Sequence
  Synthetic
ccggcucaagcctcatctuac

SEQ ID NO: 74950 - DNA, 22 bp, Artificial Sequence
  Synthetic
cctccttcccuctctccttcug

SEQ ID NO: 74951 - DNA, 24 bp, Artificial Sequence
  Synthetic
acacutgatcactcuggagaggaa

SEQ ID NO: 74952 - DNA, 24 bp, Artificial Sequence
  Synthetic
cccaacaactucctgtcctacuac

SEQ ID NO: 74953 - DNA, 20 bp, Artificial Sequence
  Synthetic
tttccguggcactaggtguc

SEQ ID NO: 74954 - DNA, 23 bp, Artificial Sequence
  Synthetic
ccatccauggaggagttgaagut

SEQ ID NO: 74955 - DNA, 21 bp, Artificial Sequence
  Synthetic
ctctagugagcacctgaccug

SEQ ID NO: 74956 - DNA, 18 bp, Artificial Sequence
  Synthetic
gttgcccauggcctugac

SEQ ID NO: 74957 - DNA, 19 bp, Artificial Sequence
  Synthetic
agaaggugctggagcugac

SEQ ID NO: 74958 - DNA, 18 bp, Artificial Sequence
  Synthetic
cgcaggcggucattguca

SEQ ID NO: 74959 - DNA, 18 bp, Artificial Sequence
  Synthetic
ggccaagaagucggugga

SEQ ID NO: 74960 - DNA, 17 bp, Artificial Sequence
  Synthetic
ggcugcaggtgcauggt

SEQ ID NO: 74961 - DNA, 19 bp, Artificial Sequence
  Synthetic
cggccucttccctuaccag

SEQ ID NO: 74962 - DNA, 19 bp, Artificial Sequence
  Synthetic
agtgcgcgauctggaacug

SEQ ID NO: 74963 - DNA, 20 bp, Artificial Sequence
  Synthetic
cgcuggtgaucaagcaggag

SEQ ID NO: 74964 - DNA, 19 bp, Artificial Sequence
  Synthetic
gctgggcgauatcccctug

SEQ ID NO: 74965 - DNA, 23 bp, Artificial Sequence
  Synthetic
ctgatggatcuggactgacagut

SEQ ID NO: 74966 - DNA, 23 bp, Artificial Sequence
  Synthetic
ctgtttctgaguctctgcaguct

SEQ ID NO: 74967 - DNA, 20 bp, Artificial Sequence
  Synthetic
cccacacutccagtugcgat

SEQ ID NO: 74968 - DNA, 20 bp, Artificial Sequence
  Synthetic
gcattaccacgugggaguga

SEQ ID NO: 74969 - DNA, 21 bp, Artificial Sequence
  Synthetic
gctccaacgagaucgagaucc

SEQ ID NO: 74970 - DNA, 20 bp, Artificial Sequence
  Synthetic
ggaggcaccggaauctccua

SEQ ID NO: 74971 - DNA, 18 bp, Artificial Sequence
  Synthetic
gcugccagagagctccut

SEQ ID NO: 74972 - DNA, 21 bp, Artificial Sequence
  Synthetic
acagtgacgcugtaggugaag

SEQ ID NO: 74973 - DNA, 22 bp, Artificial Sequence
  Synthetic
cctcccagaacaucaccuacca

SEQ ID NO: 74974 - DNA, 19 bp, Artificial Sequence
  Synthetic
ccatguacccaccgucgat

SEQ ID NO: 74975 - DNA, 24 bp, Artificial Sequence
  Synthetic
gacauctggactuagccaagaagg

SEQ ID NO: 74976 - DNA, 18 bp, Artificial Sequence
  Synthetic
gccacgcugttctugcag

SEQ ID NO: 74977 - DNA, 19 bp, Artificial Sequence
  Synthetic
cgcatagcggcucactcut

SEQ ID NO: 74978 - DNA, 17 bp, Artificial Sequence
  Synthetic
gccagccugcauggcat

SEQ ID NO: 74979 - DNA, 23 bp, Artificial Sequence
  Synthetic
caaaucaaacccgcagctaaugg

SEQ ID NO: 74980 - DNA, 17 bp, Artificial Sequence
  Synthetic
ccgcucacctggtuggg

SEQ ID NO: 74981 - DNA, 17 bp, Artificial Sequence
  Synthetic
ctccugcagcgguggaa

SEQ ID NO: 74982 - DNA, 18 bp, Artificial Sequence
  Synthetic
ggccucacgctcgatcug

SEQ ID NO: 74983 - DNA, 17 bp, Artificial Sequence
  Synthetic
cccucacccgugagcat

SEQ ID NO: 74984 - DNA, 17 bp, Artificial Sequence
  Synthetic
gggaagccagcugguga

SEQ ID NO: 74985 - DNA, 19 bp, Artificial Sequence
  Synthetic
cggauggccaccaugaaca

SEQ ID NO: 74986 - DNA, 24 bp, Artificial Sequence
  Synthetic
gcatttgttttcutggcagtgcut

SEQ ID NO: 74987 - DNA, 17 bp, Artificial Sequence
  Synthetic
cgcaacgccaacugcuc

SEQ ID NO: 74988 - DNA, 21 bp, Artificial Sequence
  Synthetic
gctgtgcgcugtttgaugaaa

SEQ ID NO: 74989 - DNA, 18 bp, Artificial Sequence
  Synthetic
agcgctcugcaagaccug

SEQ ID NO: 74990 - DNA, 19 bp, Artificial Sequence
  Synthetic
gactctgcugaggcacgut

SEQ ID NO: 74991 - DNA, 18 bp, Artificial Sequence
  Synthetic
gccctcugctgcuaccac

SEQ ID NO: 74992 - DNA, 19 bp, Artificial Sequence
  Synthetic
gcaccacccgcutcatcut

SEQ ID NO: 74993 - DNA, 18 bp, Artificial Sequence
  Synthetic
ctgggccuggaugacgag

SEQ ID NO: 74994 - DNA, 17 bp, Artificial Sequence
  Synthetic
cugggcgactucagggt

SEQ ID NO: 74995 - DNA, 17 bp, Artificial Sequence
  Synthetic
ctugcccaggcctguga

SEQ ID NO: 74996 - DNA, 18 bp, Artificial Sequence
  Synthetic
cctgggccugcatggaua

SEQ ID NO: 74997 - DNA, 19 bp, Artificial Sequence
  Synthetic
ccccgugagcctgaatgug

SEQ ID NO: 74998 - DNA, 19 bp, Artificial Sequence
  Synthetic
gggctcuttgactguggct

SEQ ID NO: 74999 - DNA, 20 bp, Artificial Sequence
  Synthetic
cctgtccccuttccttgcut

SEQ ID NO: 75000 - DNA, 25 bp, Artificial Sequence
  Synthetic
tcactggcaaaaggguttagaacut

SEQ ID NO: 75001 - DNA, 21 bp, Artificial Sequence
  Synthetic
gccttggatuctcctggaguc

SEQ ID NO: 75002 - DNA, 22 bp, Artificial Sequence
  Synthetic
tctggaagaccugcattcctug

SEQ ID NO: 75003 - DNA, 22 bp, Artificial Sequence
  Synthetic
cgttaggacuctgccttcagut

SEQ ID NO: 75004 - DNA, 29 bp, Artificial Sequence
  Synthetic
aaggctttgtauattattgaaccaucaca

SEQ ID NO: 75005 - DNA, 28 bp, Artificial Sequence
  Synthetic
ggtaggttcccauagtgtcaatttugaa

SEQ ID NO: 75006 - DNA, 23 bp, Artificial Sequence
  Synthetic
tttcguagaaacggaaggctuca

SEQ ID NO: 75007 - DNA, 28 bp, Artificial Sequence
  Synthetic
actcacauaaaatcccuggaacaaaaga

SEQ ID NO: 75008 - DNA, 22 bp, Artificial Sequence
  Synthetic
ccagaagggaaauggcagctut

SEQ ID NO: 75009 - DNA, 22 bp, Artificial Sequence
  Synthetic
gttttctgaccuttgcctcucc

SEQ ID NO: 75010 - DNA, 20 bp, Artificial Sequence
  Synthetic
tggagacccugcataugcct

SEQ ID NO: 75011 - DNA, 24 bp, Artificial Sequence
  Synthetic
cacgctgaaggauggtatcaucat

SEQ ID NO: 75012 - DNA, 21 bp, Artificial Sequence
  Synthetic
gatgaucagcagcgtcuggat

SEQ ID NO: 75013 - DNA, 21 bp, Artificial Sequence
  Synthetic
gctgcccutgtaggccuaaaa

SEQ ID NO: 75014 - DNA, 28 bp, Artificial Sequence
  Synthetic
cttaggtaaatgcugaactgtggauagt

SEQ ID NO: 75015 - DNA, 23 bp, Artificial Sequence
  Synthetic
gccctcauctaatgtcucaggga

SEQ ID NO: 75016 - DNA, 25 bp, Artificial Sequence
  Synthetic
catgttttctccguaggatgctcua

SEQ ID NO: 75017 - DNA, 20 bp, Artificial Sequence
  Synthetic
ctccgacutggatccgucac

SEQ ID NO: 75018 - DNA, 21 bp, Artificial Sequence
  Synthetic
agaggguacgagctgctaugt

SEQ ID NO: 75019 - DNA, 26 bp, Artificial Sequence
  Synthetic
caagtttacaacugcatgttucagca

SEQ ID NO: 75020 - DNA, 33 bp, Artificial Sequence
  Synthetic
aatgtcaacttgttuttacatgcattattcuaa

SEQ ID NO: 75021 - DNA, 28 bp, Artificial Sequence
  Synthetic
ggagccaaataautcagaatctcaagug

SEQ ID NO: 75022 - DNA, 26 bp, Artificial Sequence
  Synthetic
caggtacauggtaaagcataaaucgc

SEQ ID NO: 75023 - DNA, 28 bp, Artificial Sequence
  Synthetic
gaagcacaaagcaucaaataaggtctua

SEQ ID NO: 75024 - DNA, 20 bp, Artificial Sequence
  Synthetic
gcaguaccgucaggaccaac

SEQ ID NO: 75025 - DNA, 24 bp, Artificial Sequence
  Synthetic
attatggacgcguctctctcttuc

SEQ ID NO: 75026 - DNA, 22 bp, Artificial Sequence
  Synthetic
cgtttggcugaaccaucacaga

SEQ ID NO: 75027 - DNA, 28 bp, Artificial Sequence
  Synthetic
gcagactaaaaagcuagctatgtcatug

SEQ ID NO: 75028 - DNA, 27 bp, Artificial Sequence
  Synthetic
tggtaaggaaaagutacatgtagcgut

SEQ ID NO: 75029 - DNA, 27 bp, Artificial Sequence
  Synthetic
tgttcagtctguacaatcccttcttug

SEQ ID NO: 75030 - DNA, 24 bp, Artificial Sequence
  Synthetic
cgccttgauaaagagagatuggct

SEQ ID NO: 75031 - DNA, 28 bp, Artificial Sequence
  Synthetic
aagagguaaatgtaaatguggagagcat

SEQ ID NO: 75032 - DNA, 24 bp, Artificial Sequence
  Synthetic
cuagattctugagaacgccagaca

SEQ ID NO: 75033 - DNA, 27 bp, Artificial Sequence
  Synthetic
ccacagattcagacutggactatgaut

SEQ ID NO: 75034 - DNA, 21 bp, Artificial Sequence
  Synthetic
ccctgccutcataaccguaga

SEQ ID NO: 75035 - DNA, 22 bp, Artificial Sequence
  Synthetic
cccgcaaagacaucaaaccuga

SEQ ID NO: 75036 - DNA, 22 bp, Artificial Sequence
  Synthetic
cgagguccccagttctguagat

SEQ ID NO: 75037 - DNA, 25 bp, Artificial Sequence
  Synthetic
gctcctccutatgactccatucaaa

SEQ ID NO: 75038 - DNA, 24 bp, Artificial Sequence
  Synthetic
ctcttataaaggcutccgggucat

SEQ ID NO: 75039 - DNA, 19 bp, Artificial Sequence
  Synthetic
gcaggcutgacuccagcag

SEQ ID NO: 75040 - DNA, 24 bp, Artificial Sequence
  Synthetic
ccaggtcuaggcatgtactgauac

SEQ ID NO: 75041 - DNA, 24 bp, Artificial Sequence
  Synthetic
ggaagaagaugtccgugagaacat

SEQ ID NO: 75042 - DNA, 19 bp, Artificial Sequence
  Synthetic
cugccaggagcagaucgaa

SEQ ID NO: 75043 - DNA, 19 bp, Artificial Sequence
  Synthetic
gccctcagaugtccacguc

SEQ ID NO: 75044 - DNA, 18 bp, Artificial Sequence
  Synthetic
tggaccuggctugcacac

SEQ ID NO: 75045 - DNA, 26 bp, Artificial Sequence
  Synthetic
gaatgaagcttucccttctggtauca

SEQ ID NO: 75046 - DNA, 27 bp, Artificial Sequence
  Synthetic
ccaccccctucatcatcataagtaaug

SEQ ID NO: 75047 - DNA, 26 bp, Artificial Sequence
  Synthetic
ctggacttaacgaaugcttacctuct

SEQ ID NO: 75048 - DNA, 28 bp, Artificial Sequence
  Synthetic
atattgaacaugagtacugccaaagagt

SEQ ID NO: 75049 - DNA, 22 bp, Artificial Sequence
  Synthetic
ccatugggcagctgtacuagag

SEQ ID NO: 75050 - DNA, 21 bp, Artificial Sequence
  Synthetic
gggatuaccggcatccaagug

SEQ ID NO: 75051 - DNA, 22 bp, Artificial Sequence
  Synthetic
ctccuggcaaagatggacucaa

SEQ ID NO: 75052 - DNA, 23 bp, Artificial Sequence
  Synthetic
acauacaacaggaccagcaucac

SEQ ID NO: 75053 - DNA, 22 bp, Artificial Sequence
  Synthetic
cttcuggcagcctttcucaaac

SEQ ID NO: 75054 - DNA, 21 bp, Artificial Sequence
  Synthetic
catcatctgcucccaccguaa

SEQ ID NO: 75055 - DNA, 26 bp, Artificial Sequence
  Synthetic
acacataccugaactgtttggactug

SEQ ID NO: 75056 - DNA, 20 bp, Artificial Sequence
  Synthetic
ccctgacacutggagcagua

SEQ ID NO: 75057 - DNA, 22 bp, Artificial Sequence
  Synthetic
gaacatcgucaaccttcuggga

SEQ ID NO: 75058 - DNA, 25 bp, Artificial Sequence
  Synthetic
aaacaatggacacucagaagucaca

SEQ ID NO: 75059 - DNA, 24 bp, Artificial Sequence
  Synthetic
ctagaagcacugtaucgacaggac

SEQ ID NO: 75060 - DNA, 21 bp, Artificial Sequence
  Synthetic
ccaacggagacucctguacaa

SEQ ID NO: 75061 - DNA, 20 bp, Artificial Sequence
  Synthetic
ccaacggagucaaccgttuc

SEQ ID NO: 75062 - DNA, 21 bp, Artificial Sequence
  Synthetic
gcccttaccuccatggguaca

SEQ ID NO: 75063 - DNA, 23 bp, Artificial Sequence
  Synthetic
tgtctttgggacugtggttctuc

SEQ ID NO: 75064 - DNA, 23 bp, Artificial Sequence
  Synthetic
ctcaccuacagaccacttcacut

SEQ ID NO: 75065 - DNA, 22 bp, Artificial Sequence
  Synthetic
ccactatctgcuggtgtggtug

SEQ ID NO: 75066 - DNA, 22 bp, Artificial Sequence
  Synthetic
gccggaaagguaatgactcugg

SEQ ID NO: 75067 - DNA, 25 bp, Artificial Sequence
  Synthetic
agggatcugagcacctttuacaaag

SEQ ID NO: 75068 - DNA, 26 bp, Artificial Sequence
  Synthetic
gttataatacggcutcagttggugga

SEQ ID NO: 75069 - DNA, 25 bp, Artificial Sequence
  Synthetic
ttctgaacauttggauccagacgaa

SEQ ID NO: 75070 - DNA, 29 bp, Artificial Sequence
  Synthetic
ggacttgatctcugtctatagtactcugg

SEQ ID NO: 75071 - DNA, 22 bp, Artificial Sequence
  Synthetic
aaagctgacucgacgagagtut

SEQ ID NO: 75072 - DNA, 28 bp, Artificial Sequence
  Synthetic
cccttaggaauccaatgcttugagaaat

SEQ ID NO: 75073 - DNA, 29 bp, Artificial Sequence
  Synthetic
ttggtttgauacacaaaataccaguacct

SEQ ID NO: 75074 - DNA, 25 bp, Artificial Sequence
  Synthetic
ggcctaaugacattcttttcauggt

SEQ ID NO: 75075 - DNA, 24 bp, Artificial Sequence
  Synthetic
tgcagagaacagcaaauaacucca

SEQ ID NO: 75076 - DNA, 20 bp, Artificial Sequence
  Synthetic
cctttcugggcctgaggaut

SEQ ID NO: 75077 - DNA, 18 bp, Artificial Sequence
  Synthetic
caugccgctcuccaccat

SEQ ID NO: 75078 - DNA, 18 bp, Artificial Sequence
  Synthetic
ggtcuccaggtgccucag

SEQ ID NO: 75079 - DNA, 18 bp, Artificial Sequence
  Synthetic
cgaaugcguggcggagat

SEQ ID NO: 75080 - DNA, 18 bp, Artificial Sequence
  Synthetic
ccatctcccugcccauct

SEQ ID NO: 75081 - DNA, 17 bp, Artificial Sequence
  Synthetic
ccacugctgctcucgct

SEQ ID NO: 75082 - DNA, 21 bp, Artificial Sequence
  Synthetic
ggcctugaacaccttcccaua

SEQ ID NO: 75083 - DNA, 17 bp, Artificial Sequence
  Synthetic
ggccgccagcuagtuga

SEQ ID NO: 75084 - DNA, 23 bp, Artificial Sequence
  Synthetic
gggagcutaaatgacucaaaggt

SEQ ID NO: 75085 - DNA, 23 bp, Artificial Sequence
  Synthetic
tgttctaauggcccttccttguc

SEQ ID NO: 75086 - DNA, 22 bp, Artificial Sequence
  Synthetic
ggaaaagacccagugtugggat

SEQ ID NO: 75087 - DNA, 28 bp, Artificial Sequence
  Synthetic
ttcagccatccugtttctctttcaauaa

SEQ ID NO: 75088 - DNA, 21 bp, Artificial Sequence
  Synthetic
ccgctcugggctgtgttuaat

SEQ ID NO: 75089 - DNA, 19 bp, Artificial Sequence
  Synthetic
ccaggaucttgcugacggt

SEQ ID NO: 75090 - DNA, 17 bp, Artificial Sequence
  Synthetic
cagctguagccccuggt

SEQ ID NO: 75091 - DNA, 19 bp, Artificial Sequence
  Synthetic
cagcccaugctcacttguc

SEQ ID NO: 75092 - DNA, 23 bp, Artificial Sequence
  Synthetic
gctcacatutcctattccugggt

SEQ ID NO: 75093 - DNA, 27 bp, Artificial Sequence
  Synthetic
ccaatggaggagaautaggcctttuaa

SEQ ID NO: 75094 - DNA, 24 bp, Artificial Sequence
  Synthetic
cctgaagaagaccuttgactcugt

SEQ ID NO: 75095 - DNA, 20 bp, Artificial Sequence
  Synthetic
acttcugacaggacccugct

SEQ ID NO: 75096 - DNA, 21 bp, Artificial Sequence
  Synthetic
cgucaucccaaccaggacaac

SEQ ID NO: 75097 - DNA, 19 bp, Artificial Sequence
  Synthetic
gcagggcaacccutcacuc

SEQ ID NO: 75098 - DNA, 27 bp, Artificial Sequence
  Synthetic
aagccttccauctgaagtatgaugaag

SEQ ID NO: 75099 - DNA, 28 bp, Artificial Sequence
  Synthetic
cacacacaagcauattttagaaucggaa

SEQ ID NO: 75100 - DNA, 21 bp, Artificial Sequence
  Synthetic
cacccccugttggtgtcttua

SEQ ID NO: 75101 - DNA, 21 bp, Artificial Sequence
  Synthetic
tgtuaccccggtgucaacaag

SEQ ID NO: 75102 - DNA, 21 bp, Artificial Sequence
  Synthetic
gctgcatcccutgccagaaua

SEQ ID NO: 75103 - DNA, 23 bp, Artificial Sequence
  Synthetic
atgcagaagaaaggcguttucag

SEQ ID NO: 75104 - DNA, 21 bp, Artificial Sequence
  Synthetic
ctggaacaaggutcccacugt

SEQ ID NO: 75105 - DNA, 28 bp, Artificial Sequence
  Synthetic
gctgtaaaggtugcttagtttctcatut

SEQ ID NO: 75106 - DNA, 19 bp, Artificial Sequence
  Synthetic
ccaggugagggaggugagt

SEQ ID NO: 75107 - DNA, 21 bp, Artificial Sequence
  Synthetic
gcctccucctttcttccucag

SEQ ID NO: 75108 - DNA, 21 bp, Artificial Sequence
  Synthetic
gccaugaccaucaccacaaga

SEQ ID NO: 75109 - DNA, 24 bp, Artificial Sequence
  Synthetic
caatggcauctacttctgucagca

SEQ ID NO: 75110 - DNA, 21 bp, Artificial Sequence
  Synthetic
gtagaccuccgaggtgttgut

SEQ ID NO: 75111 - DNA, 21 bp, Artificial Sequence
  Synthetic
caggagauggacgagaauccc

SEQ ID NO: 75112 - DNA, 23 bp, Artificial Sequence
  Synthetic
gattcgttcugggactctuccat

SEQ ID NO: 75113 - DNA, 22 bp, Artificial Sequence
  Synthetic
cccacguttcauagccaggaaa

SEQ ID NO: 75114 - DNA, 27 bp, Artificial Sequence
  Synthetic
agaccgaaaagaaaauggtagcuagac

SEQ ID NO: 75115 - DNA, 24 bp, Artificial Sequence
  Synthetic
tcaggaagtguctcttgaacucca

SEQ ID NO: 75116 - DNA, 23 bp, Artificial Sequence
  Synthetic
gggtgauggattggagtucaaga

SEQ ID NO: 75117 - DNA, 26 bp, Artificial Sequence
  Synthetic
actatatucaccaggatuccccagag

SEQ ID NO: 75118 - DNA, 26 bp, Artificial Sequence
  Synthetic
aggtgacatguattttgctctgtuca

SEQ ID NO: 75119 - DNA, 22 bp, Artificial Sequence
  Synthetic
cctcttcacccucacattgcuc

SEQ ID NO: 75120 - DNA, 22 bp, Artificial Sequence
  Synthetic
tgtagcagugcatttucaccgt

SEQ ID NO: 75121 - DNA, 20 bp, Artificial Sequence
  Synthetic
ggaagaugccaagcggaaug

SEQ ID NO: 75122 - DNA, 24 bp, Artificial Sequence
  Synthetic
tgatggctguctgattagcuagga

SEQ ID NO: 75123 - DNA, 20 bp, Artificial Sequence
  Synthetic
tcccccauttcccaccuaca

SEQ ID NO: 75124 - DNA, 22 bp, Artificial Sequence
  Synthetic
acctcttccugtgccaaaacug

SEQ ID NO: 75125 - DNA, 25 bp, Artificial Sequence
  Synthetic
agggtgtcaautacccacauaaagg

SEQ ID NO: 75126 - DNA, 22 bp, Artificial Sequence
  Synthetic
ggaatucaaggtaguccagggt

SEQ ID NO: 75127 - DNA, 27 bp, Artificial Sequence
  Synthetic
cccatccattcutcctattcccttuag

SEQ ID NO: 75128 - DNA, 27 bp, Artificial Sequence
  Synthetic
catacaacugttttgaaaauccagcgt

SEQ ID NO: 75129 - DNA, 23 bp, Artificial Sequence
  Synthetic
ccugacaaguaagcagggagaga

SEQ ID NO: 75130 - DNA, 28 bp, Artificial Sequence
  Synthetic
agtggctggguattcattttcttatgut

SEQ ID NO: 75131 - DNA, 24 bp, Artificial Sequence
  Synthetic
cauaggcatcattuccagcagaga

SEQ ID NO: 75132 - DNA, 28 bp, Artificial Sequence
  Synthetic
tttcagctgatgaguaaagaatctccug

SEQ ID NO: 75133 - DNA, 28 bp, Artificial Sequence
  Synthetic
acatctgatgctuatccttttcaaccut

SEQ ID NO: 75134 - DNA, 28 bp, Artificial Sequence
  Synthetic
gtaaagtgactcaugaatacagccuact

SEQ ID NO: 75135 - DNA, 23 bp, Artificial Sequence
  Synthetic
ccagaccgugagatctacgauga

SEQ ID NO: 75136 - DNA, 20 bp, Artificial Sequence
  Synthetic
ggtccuggtgtctcugagga

SEQ ID NO: 75137 - DNA, 18 bp, Artificial Sequence
  Synthetic
guggaagaggcggccaut

SEQ ID NO: 75138 - DNA, 19 bp, Artificial Sequence
  Synthetic
gcaacugctcgtctuccga

SEQ ID NO: 75139 - DNA, 23 bp, Artificial Sequence
  Synthetic
gggaattcagucccttactggut

SEQ ID NO: 75140 - DNA, 28 bp, Artificial Sequence
  Synthetic
gaaatcttaccugacatcatcagagcut

SEQ ID NO: 75141 - DNA, 28 bp, Artificial Sequence
  Synthetic
aatcaatgccauactgacaggaaauagt

SEQ ID NO: 75142 - DNA, 17 bp, Artificial Sequence
  Synthetic
gccacccccgucatcut

SEQ ID NO: 75143 - DNA, 20 bp, Artificial Sequence
  Synthetic
acccaacaucctgtgucagt

SEQ ID NO: 75144 - DNA, 31 bp, Artificial Sequence
  Synthetic
tgcattcatttccautttaaagtgctacuac

SEQ ID NO: 75145 - DNA, 27 bp, Artificial Sequence
  Synthetic
ttttaatagcaugcctggtucaagaga

SEQ ID NO: 75146 - DNA, 21 bp, Artificial Sequence
  Synthetic
ccttccugcagtccttgcuaa

SEQ ID NO: 75147 - DNA, 23 bp, Artificial Sequence
  Synthetic
gccauccatgttcuggaaaaagg

SEQ ID NO: 75148 - DNA, 24 bp, Artificial Sequence
  Synthetic
cccacagagccuacaagattguaa

SEQ ID NO: 75149 - DNA, 27 bp, Artificial Sequence
  Synthetic
gctttcagagcugttaaggtacuacac

SEQ ID NO: 75150 - DNA, 27 bp, Artificial Sequence
  Synthetic
gttctgtcacaccuccaatctuaaagt

SEQ ID NO: 75151 - DNA, 29 bp, Artificial Sequence
  Synthetic
ctgggtttctttucaacttgtaatagugt

SEQ ID NO: 75152 - DNA, 24 bp, Artificial Sequence
  Synthetic
ggcaggagutgagtatguaaaccc

SEQ ID NO: 75153 - DNA, 27 bp, Artificial Sequence
  Synthetic
aaattgttgaagucagaattggugcaa

SEQ ID NO: 75154 - DNA, 25 bp, Artificial Sequence
  Synthetic
tgttgattagutcaagctctugcct

SEQ ID NO: 75155 - DNA, 21 bp, Artificial Sequence
  Synthetic
ggttggguggcggttactuac

SEQ ID NO: 75156 - DNA, 22 bp, Artificial Sequence
  Synthetic
cauctcaucaccagaggcagat

SEQ ID NO: 75157 - DNA, 28 bp, Artificial Sequence
  Synthetic
cattagttttccaautggcctcttuagt

SEQ ID NO: 75158 - DNA, 23 bp, Artificial Sequence
  Synthetic
cagctugatggagaucgacacat

SEQ ID NO: 75159 - DNA, 20 bp, Artificial Sequence
  Synthetic
ggtactugggcggcactuac

SEQ ID NO: 75160 - DNA, 24 bp, Artificial Sequence
  Synthetic
ttaaaacgugaagctaacccucca

SEQ ID NO: 75161 - DNA, 27 bp, Artificial Sequence
  Synthetic
aaatcatcuggtttgtacucgcaaaac

SEQ ID NO: 75162 - DNA, 21 bp, Artificial Sequence
  Synthetic
gcaccttgucctgtctgtguc

SEQ ID NO: 75163 - DNA, 20 bp, Artificial Sequence
  Synthetic
gggtgaccucttgccaucac

SEQ ID NO: 75164 - DNA, 18 bp, Artificial Sequence
  Synthetic
ggcgccugggttctcauc

SEQ ID NO: 75165 - DNA, 17 bp, Artificial Sequence
  Synthetic
agctgcugccuccagac

SEQ ID NO: 75166 - DNA, 17 bp, Artificial Sequence
  Synthetic
tgcgcgggutccatgua

SEQ ID NO: 75167 - DNA, 18 bp, Artificial Sequence
  Synthetic
tcugcacccagacccuga

SEQ ID NO: 75168 - DNA, 22 bp, Artificial Sequence
  Synthetic
ggtgcaaggaguttggtttgug

SEQ ID NO: 75169 - DNA, 21 bp, Artificial Sequence
  Synthetic
ctgcagcuggctcagttuaga

SEQ ID NO: 75170 - DNA, 17 bp, Artificial Sequence
  Synthetic
gcagccgagccauggut

SEQ ID NO: 75171 - DNA, 18 bp, Artificial Sequence
  Synthetic
gcaggacucccccttguc

SEQ ID NO: 75172 - DNA, 20 bp, Artificial Sequence
  Synthetic
ctaccucctggcuggagaag

SEQ ID NO: 75173 - DNA, 20 bp, Artificial Sequence
  Synthetic
cgtgaagucttccccaucgt

SEQ ID NO: 75174 - DNA, 17 bp, Artificial Sequence
  Synthetic
ggctgagcugcccaaug

SEQ ID NO: 75175 - DNA, 19 bp, Artificial Sequence
  Synthetic
tctccaccacggcuttcug

SEQ ID NO: 75176 - DNA, 22 bp, Artificial Sequence
  Synthetic
tccucaaagagcuggagaacct

SEQ ID NO: 75177 - DNA, 18 bp, Artificial Sequence
  Synthetic
gggctcgutaggagcuga

SEQ ID NO: 75178 - DNA, 23 bp, Artificial Sequence
  Synthetic
gcttgacaaugcctgttttcuct

SEQ ID NO: 75179 - DNA, 21 bp, Artificial Sequence
  Synthetic
catattggcugtccagccgua

SEQ ID NO: 75180 - DNA, 26 bp, Artificial Sequence
  Synthetic
caatagacttgugtcttcacctugct

SEQ ID NO: 75181 - DNA, 18 bp, Artificial Sequence
  Synthetic
ccgcagcgucuccacaat

SEQ ID NO: 75182 - DNA, 21 bp, Artificial Sequence
  Synthetic
ctggagaucaacccugaccac

SEQ ID NO: 75183 - DNA, 20 bp, Artificial Sequence
  Synthetic
atgcgauagatgcggtugga

SEQ ID NO: 75184 - DNA, 21 bp, Artificial Sequence
  Synthetic
aaccgggucaatgtguggaat

SEQ ID NO: 75185 - DNA, 19 bp, Artificial Sequence
  Synthetic
ggagagaggccacguctuc

SEQ ID NO: 75186 - DNA, 21 bp, Artificial Sequence
  Synthetic
cgcctugagagcgagtactut

SEQ ID NO: 75187 - DNA, 20 bp, Artificial Sequence
  Synthetic
guagggaggcgggauaaagg

SEQ ID NO: 75188 - DNA, 22 bp, Artificial Sequence
  Synthetic
gggaagaugttcagcguagagt

SEQ ID NO: 75189 - DNA, 17 bp, Artificial Sequence
  Synthetic
ggagggucccgguaggt

SEQ ID NO: 75190 - DNA, 27 bp, Artificial Sequence
  Synthetic
cagagatcauggtttcttgacatucac

SEQ ID NO: 75191 - DNA, 22 bp, Artificial Sequence
  Synthetic
gutcttuacgaacagccaagcc

SEQ ID NO: 75192 - DNA, 25 bp, Artificial Sequence
  Synthetic
ccaauggaaaagaaatgcugcagaa

SEQ ID NO: 75193 - DNA, 21 bp, Artificial Sequence
  Synthetic
gccagcuacagatgguacagg

SEQ ID NO: 75194 - DNA, 23 bp, Artificial Sequence
  Synthetic
cttctggcutttccctugaggat

SEQ ID NO: 75195 - DNA, 25 bp, Artificial Sequence
  Synthetic
aattaagccaugtgagactugacca

SEQ ID NO: 75196 - DNA, 27 bp, Artificial Sequence
  Synthetic
tttgtaagagtgcutagctggattuga

SEQ ID NO: 75197 - DNA, 24 bp, Artificial Sequence
  Synthetic
tccgaacctucttggttaagctut

SEQ ID NO: 75198 - DNA, 22 bp, Artificial Sequence
  Synthetic
tcattatcugaggagccgguca

SEQ ID NO: 75199 - DNA, 26 bp, Artificial Sequence
  Synthetic
accctgctaauttgtcacaaguacaa

SEQ ID NO: 75200 - DNA, 28 bp, Artificial Sequence
  Synthetic
ttcgtcttcagcaugagaataagatgut

SEQ ID NO: 75201 - DNA, 25 bp, Artificial Sequence
  Synthetic
gatgcggccaccuataatactcuac

SEQ ID NO: 75202 - DNA, 21 bp, Artificial Sequence
  Synthetic
gtgaugggtcagtugaaagcc

SEQ ID NO: 75203 - DNA, 28 bp, Artificial Sequence
  Synthetic
aacaaaccagtgucttctcttcatuaca

SEQ ID NO: 75204 - DNA, 25 bp, Artificial Sequence
  Synthetic
ccaacaugacttacttgauccccat

SEQ ID NO: 75205 - DNA, 28 bp, Artificial Sequence
  Synthetic
aagttgaaacaaaugtggaaaucaccaa

SEQ ID NO: 75206 - DNA, 22 bp, Artificial Sequence
  Synthetic
cgugccacccagaatattucgt

SEQ ID NO: 75207 - DNA, 21 bp, Artificial Sequence
  Synthetic
acgaccaagucaccaaggaug

SEQ ID NO: 75208 - DNA, 19 bp, Artificial Sequence
  Synthetic
cgggugtcuaggaggcaca

SEQ ID NO: 75209 - DNA, 27 bp, Artificial Sequence
  Synthetic
cctgaacccagacagugacaaaatuat

SEQ ID NO: 75210 - DNA, 17 bp, Artificial Sequence
  Synthetic
ccagccccuggguacac

SEQ ID NO: 75211 - DNA, 17 bp, Artificial Sequence
  Synthetic
gtttgcccuggcuggac

SEQ ID NO: 75212 - DNA, 18 bp, Artificial Sequence
  Synthetic
gcagagagggcugcttug

SEQ ID NO: 75213 - DNA, 19 bp, Artificial Sequence
  Synthetic
ccctagcuctgccuaccct

SEQ ID NO: 75214 - DNA, 27 bp, Artificial Sequence
  Synthetic
cagcaccagaaauacaagctctuaaaa

SEQ ID NO: 75215 - DNA, 31 bp, Artificial Sequence
  Synthetic
gaacacaattguaaaatataacaaggcuccc

SEQ ID NO: 75216 - DNA, 20 bp, Artificial Sequence
  Synthetic
cgcacgugaagtgggaguag

SEQ ID NO: 75217 - DNA, 23 bp, Artificial Sequence
  Synthetic
aaagtgtcccucttgtctctugg

SEQ ID NO: 75218 - DNA, 28 bp, Artificial Sequence
  Synthetic
gccaacattaugcttctttatagctuct

SEQ ID NO: 75219 - DNA, 24 bp, Artificial Sequence
  Synthetic
gctctatatgccaucactgcagut

SEQ ID NO: 75220 - DNA, 17 bp, Artificial Sequence
  Synthetic
tggagguggccgagtug

SEQ ID NO: 75221 - DNA, 19 bp, Artificial Sequence
  Synthetic
ttctcccccucttggcuct

SEQ ID NO: 75222 - DNA, 27 bp, Artificial Sequence
  Synthetic
cttgcagtggugtttgttctacattua

SEQ ID NO: 75223 - DNA, 23 bp, Artificial Sequence
  Synthetic
catggagutcctgtctuccagaa

SEQ ID NO: 75224 - DNA, 25 bp, Artificial Sequence
  Synthetic
aaacaguaaacagcaagacugacct

SEQ ID NO: 75225 - DNA, 25 bp, Artificial Sequence
  Synthetic
acagttacggutctaatgcttucca

SEQ ID NO: 75226 - DNA, 21 bp, Artificial Sequence
  Synthetic
cgaacccacaacucccugaag

SEQ ID NO: 75227 - DNA, 25 bp, Artificial Sequence
  Synthetic
caatcgcctcuttcaggttgtttut

SEQ ID NO: 75228 - DNA, 23 bp, Artificial Sequence
  Synthetic
ccccaagaagutcacacugaaac

SEQ ID NO: 75229 - DNA, 20 bp, Artificial Sequence
  Synthetic
ggttgagacgutcgccttuc

SEQ ID NO: 75230 - DNA, 22 bp, Artificial Sequence
  Synthetic
gcaggaagucaagtcccugaga

SEQ ID NO: 75231 - DNA, 22 bp, Artificial Sequence
  Synthetic
ctgcactgugctgatgatgtug

SEQ ID NO: 75232 - DNA, 19 bp, Artificial Sequence
  Synthetic
tcugcagggaccugaggaa

SEQ ID NO: 75233 - DNA, 17 bp, Artificial Sequence
  Synthetic
gugggcauggagcagga

SEQ ID NO: 75234 - DNA, 21 bp, Artificial Sequence
  Synthetic
gcaaccaaagugcaggacauc

SEQ ID NO: 75235 - DNA, 28 bp, Artificial Sequence
  Synthetic
ccacaatgguctgaaaatgattuagcaa

SEQ ID NO: 75236 - DNA, 21 bp, Artificial Sequence
  Synthetic
tcaacugggcaatttcugcct

SEQ ID NO: 75237 - DNA, 22 bp, Artificial Sequence
  Synthetic
tgtagacgucctgcaaggttut

SEQ ID NO: 75238 - DNA, 18 bp, Artificial Sequence
  Synthetic
gaccgcuccccctgaauc

SEQ ID NO: 75239 - DNA, 17 bp, Artificial Sequence
  Synthetic
ggagcgucgtccctucc

SEQ ID NO: 75240 - DNA, 18 bp, Artificial Sequence
  Synthetic
tgctcacgcucttggcut

SEQ ID NO: 75241 - DNA, 18 bp, Artificial Sequence
  Synthetic
ggcggucacuccacaaac

SEQ ID NO: 75242 - DNA, 25 bp, Artificial Sequence
  Synthetic
tttgatctgucttgcctttuaccca

SEQ ID NO: 75243 - DNA, 28 bp, Artificial Sequence
  Synthetic
ccgatagtaacacutctaagcagaauga

SEQ ID NO: 75244 - DNA, 25 bp, Artificial Sequence
  Synthetic
gaagtatgagccutgattccctuga

SEQ ID NO: 75245 - DNA, 27 bp, Artificial Sequence
  Synthetic
actataagcaugaagctccaacauacc

SEQ ID NO: 75246 - DNA, 27 bp, Artificial Sequence
  Synthetic
cttatttgcagugaaagtatgcugaga

SEQ ID NO: 75247 - DNA, 27 bp, Artificial Sequence
  Synthetic
tccccgaaatuatacacatgacugaag

SEQ ID NO: 75248 - DNA, 20 bp, Artificial Sequence
  Synthetic
gggaaugacgagctccctuc

SEQ ID NO: 75249 - DNA, 25 bp, Artificial Sequence
  Synthetic
tgtctagatgcutgcatgtcaauca

SEQ ID NO: 75250 - DNA, 25 bp, Artificial Sequence
  Synthetic
gctgttcucaaacactgatccacut

SEQ ID NO: 75251 - DNA, 28 bp, Artificial Sequence
  Synthetic
gctgatgaatgaguctctaatgttggug

SEQ ID NO: 75252 - DNA, 28 bp, Artificial Sequence
  Synthetic
acttacctataugaggattgagagcugt

SEQ ID NO: 75253 - DNA, 25 bp, Artificial Sequence
  Synthetic
gggatgctucagtttccttuacaga

SEQ ID NO: 75254 - DNA, 19 bp, Artificial Sequence
  Synthetic
ctcagcccagugggcttua

SEQ ID NO: 75255 - DNA, 22 bp, Artificial Sequence
  Synthetic
ccctgaugggaagacgatugag

SEQ ID NO: 75256 - DNA, 20 bp, Artificial Sequence
  Synthetic
cttctggugctcccgauagt

SEQ ID NO: 75257 - DNA, 22 bp, Artificial Sequence
  Synthetic
gcccugagagaaaggctttcua

SEQ ID NO: 75258 - DNA, 22 bp, Artificial Sequence
  Synthetic
gagaugagtgacauggccaact

SEQ ID NO: 75259 - DNA, 20 bp, Artificial Sequence
  Synthetic
gccacccagaaguacagugt

SEQ ID NO: 75260 - DNA, 20 bp, Artificial Sequence
  Synthetic
ggatucccaccacgcagtut

SEQ ID NO: 75261 - DNA, 28 bp, Artificial Sequence
  Synthetic
aacatgttgcctuagtaatgtctctcuc

SEQ ID NO: 75262 - DNA, 21 bp, Artificial Sequence
  Synthetic
tgatgguggcacactugacag

SEQ ID NO: 75263 - DNA, 27 bp, Artificial Sequence
  Synthetic
cgtggacauccagctaaagtatttuga

SEQ ID NO: 75264 - DNA, 21 bp, Artificial Sequence
  Synthetic
atcagtctggucacggttugg

SEQ ID NO: 75265 - DNA, 22 bp, Artificial Sequence
  Synthetic
ccatggccugcagacttctuat

SEQ ID NO: 75266 - DNA, 28 bp, Artificial Sequence
  Synthetic
caagtttggauaactgaaagtucaccat

SEQ ID NO: 75267 - DNA, 21 bp, Artificial Sequence
  Synthetic
tgaaactgcgcucctgtctuc

SEQ ID NO: 75268 - DNA, 21 bp, Artificial Sequence
  Synthetic
ggatcutccagacugaagcca

SEQ ID NO: 75269 - DNA, 22 bp, Artificial Sequence
  Synthetic
acaaugggttacauggcagcaa

SEQ ID NO: 75270 - DNA, 19 bp, Artificial Sequence
  Synthetic
ggaauctcucccgccaagt

SEQ ID NO: 75271 - DNA, 17 bp, Artificial Sequence
  Synthetic
ccgtgcccucgtttugg

SEQ ID NO: 75272 - DNA, 17 bp, Artificial Sequence
  Synthetic
accatucgagccgcgut

SEQ ID NO: 75273 - DNA, 21 bp, Artificial Sequence
  Synthetic
acagccgcccagaaautcuac

SEQ ID NO: 75274 - DNA, 24 bp, Artificial Sequence
  Synthetic
cagggtttatcuccaggtgttuct

SEQ ID NO: 75275 - DNA, 27 bp, Artificial Sequence
  Synthetic
actttttgatuacaggtggttgtguca

SEQ ID NO: 75276 - DNA, 26 bp, Artificial Sequence
  Synthetic
tcttagggctugagctttcatgatuc

SEQ ID NO: 75277 - DNA, 28 bp, Artificial Sequence
  Synthetic
agtcatcacttttugattacaggtggut

SEQ ID NO: 75278 - DNA, 25 bp, Artificial Sequence
  Synthetic
tgtggtacaaucattccttgtgcut

SEQ ID NO: 75279 - DNA, 23 bp, Artificial Sequence
  Synthetic
cctgcaagatucaggcacctaug

SEQ ID NO: 75280 - DNA, 23 bp, Artificial Sequence
  Synthetic
ggagatgucaccaatcggttuga

SEQ ID NO: 75281 - DNA, 32 bp, Artificial Sequence
  Synthetic
aagttgtatttgacaguagatagtatttugga

SEQ ID NO: 75282 - DNA, 28 bp, Artificial Sequence
  Synthetic
gtgtattccaagcugaaacaaagtaugt

SEQ ID NO: 75283 - DNA, 25 bp, Artificial Sequence
  Synthetic
gaacuggcggaagauaaagagaact

SEQ ID NO: 75284 - DNA, 25 bp, Artificial Sequence
  Synthetic
gtagutctctttatctuccgccagt

SEQ ID NO: 75285 - DNA, 25 bp, Artificial Sequence
  Synthetic
ctcggaggatcuccctctaaacaua

SEQ ID NO: 75286 - DNA, 28 bp, Artificial Sequence
  Synthetic
gccagttcaguaaagagttctaagcaut

SEQ ID NO: 75287 - DNA, 23 bp, Artificial Sequence
  Synthetic
tggaatgacucagtgcattuggt

SEQ ID NO: 75288 - DNA, 24 bp, Artificial Sequence
  Synthetic
cctgtgtatacautcctggctcug

SEQ ID NO: 75289 - DNA, 27 bp, Artificial Sequence
  Synthetic
ttacttggatttuactgcggacagtua

SEQ ID NO: 75290 - DNA, 28 bp, Artificial Sequence
  Synthetic
tgctaatactgtagugcattgttctgut

SEQ ID NO: 75291 - DNA, 26 bp, Artificial Sequence
  Synthetic
ccaaatggguttcatgttaactugga

SEQ ID NO: 75292 - DNA, 23 bp, Artificial Sequence
  Synthetic
agcacaauccaagctaggcuaag

SEQ ID NO: 75293 - DNA, 24 bp, Artificial Sequence
  Synthetic
tcacaagtgtuttgtgcgaguaga

SEQ ID NO: 75294 - DNA, 21 bp, Artificial Sequence
  Synthetic
tctccttccgucggcatttut

SEQ ID NO: 75295 - DNA, 28 bp, Artificial Sequence
  Synthetic
gtgcacgaacaautcttaagatcttuga

SEQ ID NO: 75296 - DNA, 21 bp, Artificial Sequence
  Synthetic
ccggcaccucatctctgaaut

SEQ ID NO: 75297 - DNA, 24 bp, Artificial Sequence
  Synthetic
ctggtacagcaucatcaccaucat

SEQ ID NO: 75298 - DNA, 23 bp, Artificial Sequence
  Synthetic
tccatacugcccctttaacgtut

SEQ ID NO: 75299 - DNA, 28 bp, Artificial Sequence
  Synthetic
ctgaatttactgcugtttttggagtcut

SEQ ID NO: 75300 - DNA, 21 bp, Artificial Sequence
  Synthetic
acaagctugaagcacccauca

SEQ ID NO: 75301 - DNA, 28 bp, Artificial Sequence
  Synthetic
gaaaagtacatcgaucaagaagagcuca

SEQ ID NO: 75302 - DNA, 23 bp, Artificial Sequence
  Synthetic
ttgatgagguagatccgguccat

SEQ ID NO: 75303 - DNA, 20 bp, Artificial Sequence
  Synthetic
tcutcggagaugagcagcac

SEQ ID NO: 75304 - DNA, 22 bp, Artificial Sequence
  Synthetic
gaaggugtggcugaacacaaag

SEQ ID NO: 75305 - DNA, 21 bp, Artificial Sequence
  Synthetic
tttgtgccagcugactcugaa

SEQ ID NO: 75306 - DNA, 22 bp, Artificial Sequence
  Synthetic
gggctttgutttgttgagcuct

SEQ ID NO: 75307 - DNA, 26 bp, Artificial Sequence
  Synthetic
aaagagucggaagacaaaccugaaat

SEQ ID NO: 75308 - DNA, 28 bp, Artificial Sequence
  Synthetic
ttgagctcttctugatcgatgtacttut

SEQ ID NO: 75309 - DNA, 24 bp, Artificial Sequence
  Synthetic
agaaagagucggaagacaaaccug

SEQ ID NO: 75310 - DNA, 21 bp, Artificial Sequence
  Synthetic
cctggctcutgtaggcactua

SEQ ID NO: 75311 - DNA, 26 bp, Artificial Sequence
  Synthetic
gagatctctcugatcctatctugcac

SEQ ID NO: 75312 - DNA, 28 bp, Artificial Sequence
  Synthetic
ctcatcagaaccaacaucttcaattuca

SEQ ID NO: 75313 - DNA, 28 bp, Artificial Sequence
  Synthetic
gcagtgatgtgauttcgtgttttcttut

SEQ ID NO: 75314 - DNA, 22 bp, Artificial Sequence
  Synthetic
acagugaaauggcagaagacct

SEQ ID NO: 75315 - DNA, 28 bp, Artificial Sequence
  Synthetic
acttgcatcuaaaacacccacatagtut

SEQ ID NO: 75316 - DNA, 26 bp, Artificial Sequence
  Synthetic
tcaaccaaatuacagtctgactugaa

SEQ ID NO: 75317 - DNA, 26 bp, Artificial Sequence
  Synthetic
gctgcaattguctaatgttttccuca

SEQ ID NO: 75318 - DNA, 20 bp, Artificial Sequence
  Synthetic
tgtgugagcagcctgcatua

SEQ ID NO: 75319 - DNA, 28 bp, Artificial Sequence
  Synthetic
ggcaactacttugagatgagtacctaut

SEQ ID NO: 75320 - DNA, 33 bp, Artificial Sequence
  Synthetic
tgtagattcagatuatatttttaggcagucaca

SEQ ID NO: 75321 - DNA, 23 bp, Artificial Sequence
  Synthetic
cggaacccaaaaggugacauacc

SEQ ID NO: 75322 - DNA, 28 bp, Artificial Sequence
  Synthetic
gcttatgctacagucatacatacctuca

SEQ ID NO: 75323 - DNA, 25 bp, Artificial Sequence
  Synthetic
cctttttccccuctacacaguacag

SEQ ID NO: 75324 - DNA, 24 bp, Artificial Sequence
  Synthetic
ccaggaacaacaaaaucagtugct

SEQ ID NO: 75325 - DNA, 27 bp, Artificial Sequence
  Synthetic
ccctatttgtcuaggtgtcttcuaggt

SEQ ID NO: 75326 - DNA, 26 bp, Artificial Sequence
  Synthetic
ccacugatgauacaaaagcaaacaga

SEQ ID NO: 75327 - DNA, 29 bp, Artificial Sequence
  Synthetic
caagtttguattctgaaaaugcaggaaca

SEQ ID NO: 75328 - DNA, 29 bp, Artificial Sequence
  Synthetic
gttttgggagccutgttatatttuacaat

SEQ ID NO: 75329 - DNA, 28 bp, Artificial Sequence
  Synthetic
tttctcttccatcuctctctgactctut

SEQ ID NO: 75330 - DNA, 28 bp, Artificial Sequence
  Synthetic
gagaaaacaaagagucagagagagaugg

SEQ ID NO: 75331 - DNA, 30 bp, Artificial Sequence
  Synthetic
ctttcagattcattuggtagagtgactuct

SEQ ID NO: 75332 - DNA, 20 bp, Artificial Sequence
  Synthetic
ggacccccaauccctcatuc

SEQ ID NO: 75333 - DNA, 24 bp, Artificial Sequence
  Synthetic
aaggcatctggugttaggtaggua

SEQ ID NO: 75334 - DNA, 21 bp, Artificial Sequence
  Synthetic
cctgtgccuctgctgcataut

SEQ ID NO: 75335 - DNA, 28 bp, Artificial Sequence
  Synthetic
agtcgactgtguttaactttgagtttut

SEQ ID NO: 75336 - DNA, 20 bp, Artificial Sequence
  Synthetic
cctgcgggauttcactugct

SEQ ID NO: 75337 - DNA, 25 bp, Artificial Sequence
  Synthetic
ggccatactcutgtcctcaattgua

SEQ ID NO: 75338 - DNA, 21 bp, Artificial Sequence
  Synthetic
gcaatgagucctgctccacua

SEQ ID NO: 75339 - DNA, 21 bp, Artificial Sequence
  Synthetic
tgtgggccugcaagaactaug

SEQ ID NO: 75340 - DNA, 26 bp, Artificial Sequence
  Synthetic
ggagaaaaggcagacuttaagggaua

SEQ ID NO: 75341 - DNA, 28 bp, Artificial Sequence
  Synthetic
catatcaagtugccaaaggaatggaaut

SEQ ID NO: 75342 - DNA, 25 bp, Artificial Sequence
  Synthetic
ggagcauaccgacttaaatuccaga

SEQ ID NO: 75343 - DNA, 25 bp, Artificial Sequence
  Synthetic
gcaaaagtgaagacuggctctatut

SEQ ID NO: 75344 - DNA, 22 bp, Artificial Sequence
  Synthetic
gtgtucaagggagtgguagcag

SEQ ID NO: 75345 - DNA, 28 bp, Artificial Sequence
  Synthetic
ccgaagtgctcugtatttttatctgugt

SEQ ID NO: 75346 - DNA, 20 bp, Artificial Sequence
  Synthetic
gtctgacugcacatcuccgt

SEQ ID NO: 75347 - DNA, 27 bp, Artificial Sequence
  Synthetic
ctctccccauaacagacctttttacuc

SEQ ID NO: 75348 - DNA, 22 bp, Artificial Sequence
  Synthetic
aaaggcagtuttggacccauct

SEQ ID NO: 75349 - DNA, 23 bp, Artificial Sequence
  Synthetic
gcaacaaucacagcagttuggat

SEQ ID NO: 75350 - DNA, 21 bp, Artificial Sequence
  Synthetic
gtttcggtuggctttggugag

SEQ ID NO: 75351 - DNA, 28 bp, Artificial Sequence
  Synthetic
tgaatgtcaagaaaccaugatctctgut

SEQ ID NO: 75352 - DNA, 23 bp, Artificial Sequence
  Synthetic
accaatggaguttgaagtgcuga

SEQ ID NO: 75353 - DNA, 23 bp, Artificial Sequence
  Synthetic
gggtguagacactgtcacuaagg

SEQ ID NO: 75354 - DNA, 27 bp, Artificial Sequence
  Synthetic
tttttaagtccagcuttcccttctuct

SEQ ID NO: 75355 - DNA, 23 bp, Artificial Sequence
  Synthetic
guatctccgtcauagggaagggt

SEQ ID NO: 75356 - DNA, 18 bp, Artificial Sequence
  Synthetic
gugggcucccacagagac

SEQ ID NO: 75357 - DNA, 20 bp, Artificial Sequence
  Synthetic
agggcacccgggauatauca

SEQ ID NO: 75358 - DNA, 21 bp, Artificial Sequence
  Synthetic
tgcagaaguacccucaagcag

SEQ ID NO: 75359 - DNA, 23 bp, Artificial Sequence
  Synthetic
aatctcccugccaaggaaagaug

SEQ ID NO: 75360 - DNA, 21 bp, Artificial Sequence
  Synthetic
gggccuaccttaugggacaaa

SEQ ID NO: 75361 - DNA, 21 bp, Artificial Sequence
  Synthetic
gctgtggucatgctgagaugg

SEQ ID NO: 75362 - DNA, 28 bp, Artificial Sequence
  Synthetic
gctgacgtatttaauggaggtctcttua

SEQ ID NO: 75363 - DNA, 25 bp, Artificial Sequence
  Synthetic
aaatagcttgagutttccgagcuca

SEQ ID NO: 75364 - DNA, 27 bp, Artificial Sequence
  Synthetic
aggagtttttgucagaaaatggcatuc

SEQ ID NO: 75365 - DNA, 22 bp, Artificial Sequence
  Synthetic
gctcugcatacagtucggagat

SEQ ID NO: 75366 - DNA, 21 bp, Artificial Sequence
  Synthetic
ggagacacaugtcgtggucag

SEQ ID NO: 75367 - DNA, 28 bp, Artificial Sequence
  Synthetic
tttgaagaggacggaautagctgtuaat

SEQ ID NO: 75368 - DNA, 19 bp, Artificial Sequence
  Synthetic
ccctcggucatggaccuca

SEQ ID NO: 75369 - DNA, 22 bp, Artificial Sequence
  Synthetic
ctctacctugcctgtcccatuc

SEQ ID NO: 75370 - DNA, 20 bp, Artificial Sequence
  Synthetic
tgucaagggagagggucagt

SEQ ID NO: 75371 - DNA, 19 bp, Artificial Sequence
  Synthetic
gaagcuacggcatccccua

SEQ ID NO: 75372 - DNA, 19 bp, Artificial Sequence
  Synthetic
tctuggccgaggtcucgat

SEQ ID NO: 75373 - DNA, 20 bp, Artificial Sequence
  Synthetic
ctctcgctutccacctcuca

SEQ ID NO: 75374 - DNA, 25 bp, Artificial Sequence
  Synthetic
cuacctttttactcugccagggaat

SEQ ID NO: 75375 - DNA, 27 bp, Artificial Sequence
  Synthetic
aagatccugaactgagttuaaaaggca

SEQ ID NO: 75376 - DNA, 26 bp, Artificial Sequence
  Synthetic
tgccttttaaacucagttcaggauct

SEQ ID NO: 75377 - DNA, 30 bp, Artificial Sequence
  Synthetic
tgaaaaactcaccutcatggaaagauaact

SEQ ID NO: 75378 - DNA, 17 bp, Artificial Sequence
  Synthetic
cctcacgccuggtguct

SEQ ID NO: 75379 - DNA, 20 bp, Artificial Sequence
  Synthetic
ggttgtgguaccagcggaug

SEQ ID NO: 75380 - DNA, 25 bp, Artificial Sequence
  Synthetic
cctatcgctcugctctctctttgua

SEQ ID NO: 75381 - DNA, 22 bp, Artificial Sequence
  Synthetic
acgcagagugaugagaaaaccc

SEQ ID NO: 75382 - DNA, 27 bp, Artificial Sequence
  Synthetic
tgaactcactguctaaggtccuaacaa

SEQ ID NO: 75383 - DNA, 21 bp, Artificial Sequence
  Synthetic
gggcaauttctgccugaaagg

SEQ ID NO: 75384 - DNA, 20 bp, Artificial Sequence
  Synthetic
gccuggcgggcaattctaut

SEQ ID NO: 75385 - DNA, 21 bp, Artificial Sequence
  Synthetic
cggccguaagtcacaggatuc

SEQ ID NO: 75386 - DNA, 19 bp, Artificial Sequence
  Synthetic
gcuaccugggcaacgacac

SEQ ID NO: 75387 - DNA, 18 bp, Artificial Sequence
  Synthetic
gtccccuaaccccaugct

SEQ ID NO: 75388 - DNA, 23 bp, Artificial Sequence
  Synthetic
gagaagcccauttagccatggua

SEQ ID NO: 75389 - DNA, 28 bp, Artificial Sequence
  Synthetic
gcctgtgaucaagtgtgttttaaucaat

SEQ ID NO: 75390 - DNA, 22 bp, Artificial Sequence
  Synthetic
gaggaggagguggagactttug

SEQ ID NO: 75391 - DNA, 23 bp, Artificial Sequence
  Synthetic
aaatguggaaaccagagcaccua

SEQ ID NO: 75392 - DNA, 26 bp, Artificial Sequence
  Synthetic
ttgtaaaaatatcucagcgcguagga

SEQ ID NO: 75393 - DNA, 22 bp, Artificial Sequence
  Synthetic
agacuagatagcgucaccagca

SEQ ID NO: 75394 - DNA, 28 bp, Artificial Sequence
  Synthetic
ttccccactgaugaatcattgttctuat

SEQ ID NO: 75395 - DNA, 28 bp, Artificial Sequence
  Synthetic
gcatgttttcttuttaaggtgtgcaugt

SEQ ID NO: 75396 - DNA, 22 bp, Artificial Sequence
  Synthetic
ccgcacaccuaaggaaaagaug

SEQ ID NO: 75397 - DNA, 23 bp, Artificial Sequence
  Synthetic
tgaaagcacugcactctcttgut

SEQ ID NO: 75398 - DNA, 29 bp, Artificial Sequence
  Synthetic
ctcaacatcacucagacttttatctucct

SEQ ID NO: 75399 - DNA, 22 bp, Artificial Sequence
  Synthetic
gggtccttutcggtctctucaa

SEQ ID NO: 75400 - DNA, 28 bp, Artificial Sequence
  Synthetic
agagagtgacautgttttagctttcugt

SEQ ID NO: 75401 - DNA, 21 bp, Artificial Sequence
  Synthetic
agggcaacaccucuacaagga

SEQ ID NO: 75402 - DNA, 24 bp, Artificial Sequence
  Synthetic
caccgaaagcaaaucatucaacga

SEQ ID NO: 75403 - DNA, 17 bp, Artificial Sequence
  Synthetic
gguggtggcucacccag

SEQ ID NO: 75404 - DNA, 18 bp, Artificial Sequence
  Synthetic
gggccucagccactccua

SEQ ID NO: 75405 - DNA, 18 bp, Artificial Sequence
  Synthetic
aggguacctcugcaccgt

SEQ ID NO: 75406 - DNA, 26 bp, Artificial Sequence
  Synthetic
gcctaagcaauataaatggcugcaga

SEQ ID NO: 75407 - DNA, 23 bp, Artificial Sequence
  Synthetic
gtgtttctcuggcatctgauggt

SEQ ID NO: 75408 - DNA, 25 bp, Artificial Sequence
  Synthetic
aaugagaaagaaucaagggcaaggt

SEQ ID NO: 75409 - DNA, 21 bp, Artificial Sequence
  Synthetic
ccccttctuggttggtagcuc

SEQ ID NO: 75410 - DNA, 24 bp, Artificial Sequence
  Synthetic
gtcattcaaaacaauggctggugt

SEQ ID NO: 75411 - DNA, 21 bp, Artificial Sequence
  Synthetic
tccccgugcttcaugagaaag

SEQ ID NO: 75412 - DNA, 25 bp, Artificial Sequence
  Synthetic
cctagaatugggagctgagagtgua

SEQ ID NO: 75413 - DNA, 24 bp, Artificial Sequence
  Synthetic
gggaaacagaautgagagcaucac

SEQ ID NO: 75414 - DNA, 23 bp, Artificial Sequence
  Synthetic
gactacaaaacucccctucccaa

SEQ ID NO: 75415 - DNA, 21 bp, Artificial Sequence
  Synthetic
catgguggcccaagctaugaa

SEQ ID NO: 75416 - DNA, 28 bp, Artificial Sequence
  Synthetic
tttcatactcacuaggaaagcaacctut

SEQ ID NO: 75417 - DNA, 28 bp, Artificial Sequence
  Synthetic
gctgcaaatatcuagctgtacctactuc

SEQ ID NO: 75418 - DNA, 22 bp, Artificial Sequence
  Synthetic
gatugaagagcccacaggugat

SEQ ID NO: 75419 - DNA, 23 bp, Artificial Sequence
  Synthetic
ccgttgtaccuattgcactccuc

SEQ ID NO: 75420 - DNA, 24 bp, Artificial Sequence
  Synthetic
ccttctattatugccatgcgcuga

SEQ ID NO: 75421 - DNA, 27 bp, Artificial Sequence
  Synthetic
ctgtaaagccacautgtgacaacttut

SEQ ID NO: 75422 - DNA, 26 bp, Artificial Sequence
  Synthetic
agcagtagtaggugatgtttaccugt

SEQ ID NO: 75423 - DNA, 26 bp, Artificial Sequence
  Synthetic
gcagtauacagcaagcccactuaaaa

SEQ ID NO: 75424 - DNA, 29 bp, Artificial Sequence
  Synthetic
agattgcagattcugtttccttcttctut

SEQ ID NO: 75425 - DNA, 24 bp, Artificial Sequence
  Synthetic
ccugtggaagaaauggcaaacaat

SEQ ID NO: 75426 - DNA, 19 bp, Artificial Sequence
  Synthetic
ccatgagcugtcgcugcat

SEQ ID NO: 75427 - DNA, 22 bp, Artificial Sequence
  Synthetic
tttcccatccutcaaggcucag

SEQ ID NO: 75428 - DNA, 23 bp, Artificial Sequence
  Synthetic
agagtagaguggtggauccagac

SEQ ID NO: 75429 - DNA, 26 bp, Artificial Sequence
  Synthetic
tgtttggttuggaagtccagaagaut

SEQ ID NO: 75430 - DNA, 19 bp, Artificial Sequence
  Synthetic
ggagcgagagacgcuagug

SEQ ID NO: 75431 - DNA, 24 bp, Artificial Sequence
  Synthetic
acagcctttuacaggaccuagagt

SEQ ID NO: 75432 - DNA, 26 bp, Artificial Sequence
  Synthetic
tgtgttcaaggutaaagtacugcaga

SEQ ID NO: 75433 - DNA, 25 bp, Artificial Sequence
  Synthetic
ggcccagccauaaatatgttttgut

SEQ ID NO: 75434 - DNA, 22 bp, Artificial Sequence
  Synthetic
ccagatgaagccuccctcugat

SEQ ID NO: 75435 - DNA, 28 bp, Artificial Sequence
  Synthetic
ggacaagcagaugatatcccuaacaaaa

SEQ ID NO: 75436 - DNA, 21 bp, Artificial Sequence
  Synthetic
ctcgttcugggctgatucaga

SEQ ID NO: 75437 - DNA, 23 bp, Artificial Sequence
  Synthetic
ggatacctuggtccagauggaga

SEQ ID NO: 75438 - DNA, 20 bp, Artificial Sequence
  Synthetic
aggagagcagacagcuggua

SEQ ID NO: 75439 - DNA, 20 bp, Artificial Sequence
  Synthetic
gtgttcuccaggctccugaa

SEQ ID NO: 75440 - DNA, 21 bp, Artificial Sequence
  Synthetic
accctccacugtacgtctcut

SEQ ID NO: 75441 - DNA, 20 bp, Artificial Sequence
  Synthetic
cctggcucagctctgtgaug

SEQ ID NO: 75442 - DNA, 21 bp, Artificial Sequence
  Synthetic
ccctgugggacagaacaaucc

SEQ ID NO: 75443 - DNA, 22 bp, Artificial Sequence
  Synthetic
acaaaaggaucaagguggcgaa

SEQ ID NO: 75444 - DNA, 22 bp, Artificial Sequence
  Synthetic
ccacccaugtgttccucacaag

SEQ ID NO: 75445 - DNA, 22 bp, Artificial Sequence
  Synthetic
ccacttcucaccccatcactua

SEQ ID NO: 75446 - DNA, 23 bp, Artificial Sequence
  Synthetic
ggtcatctcaucaccatccauct

SEQ ID NO: 75447 - DNA, 21 bp, Artificial Sequence
  Synthetic
gctttctgccacugtctccug

SEQ ID NO: 75448 - DNA, 17 bp, Artificial Sequence
  Synthetic
gccccugagcgtcauct

SEQ ID NO: 75449 - DNA, 21 bp, Artificial Sequence
  Synthetic
tgtgcgtcacugtacacctug

SEQ ID NO: 75450 - DNA, 19 bp, Artificial Sequence
  Synthetic
gcgacguggagttccacug

SEQ ID NO: 75451 - DNA, 21 bp, Artificial Sequence
  Synthetic
cacctugagcacggtaacgua

SEQ ID NO: 75452 - DNA, 20 bp, Artificial Sequence
  Synthetic
tggaggugaauggcagcaag

SEQ ID NO: 75453 - DNA, 21 bp, Artificial Sequence
  Synthetic
cuccaaccccuagacccaaat

SEQ ID NO: 75454 - DNA, 18 bp, Artificial Sequence
  Synthetic
ccacgtcugcccctcuct

SEQ ID NO: 75455 - DNA, 19 bp, Artificial Sequence
  Synthetic
cagcaggccuggacctuac

SEQ ID NO: 75456 - DNA, 26 bp, Artificial Sequence
  Synthetic
aagcctatctugttttgaagccuaca

SEQ ID NO: 75457 - DNA, 28 bp, Artificial Sequence
  Synthetic
gatcatcgaauacccctttgactuacaa

SEQ ID NO: 75458 - DNA, 19 bp, Artificial Sequence
  Synthetic
agccctaucctggctgugt

SEQ ID NO: 75459 - DNA, 21 bp, Artificial Sequence
  Synthetic
tgaccauccagctgauccaga

SEQ ID NO: 75460 - DNA, 24 bp, Artificial Sequence
  Synthetic
ggtcgtatucgtccacaaaauggt

SEQ ID NO: 75461 - DNA, 20 bp, Artificial Sequence
  Synthetic
ggcaggagacccuguaggag

SEQ ID NO: 75462 - DNA, 23 bp, Artificial Sequence
  Synthetic
ccctucagagaatgtcugcacaa

SEQ ID NO: 75463 - DNA, 22 bp, Artificial Sequence
  Synthetic
gccagaacccaucuacagcaag

SEQ ID NO: 75464 - DNA, 28 bp, Artificial Sequence
  Synthetic
gactcagtuactacctgaaaaugacact

SEQ ID NO: 75465 - DNA, 26 bp, Artificial Sequence
  Synthetic
attctcattgtgucttccctcctcua

SEQ ID NO: 75466 - DNA, 22 bp, Artificial Sequence
  Synthetic
tggagguggaggaaggacaaut

SEQ ID NO: 75467 - DNA, 20 bp, Artificial Sequence
  Synthetic
ttcccgtgucagtggctaug

SEQ ID NO: 75468 - DNA, 22 bp, Artificial Sequence
  Synthetic
caaagcguctgcattugaagga

SEQ ID NO: 75469 - DNA, 21 bp, Artificial Sequence
  Synthetic
actacctgugcaatgcctgug

SEQ ID NO: 75470 - DNA, 22 bp, Artificial Sequence
  Synthetic
tctgccttuggatttccgtcut

SEQ ID NO: 75471 - DNA, 21 bp, Artificial Sequence
  Synthetic
cctgaggutgccuacaaaggg

SEQ ID NO: 75472 - DNA, 23 bp, Artificial Sequence
  Synthetic
tgcccatucatcttgtgguagag

SEQ ID NO: 75473 - DNA, 20 bp, Artificial Sequence
  Synthetic
cccgagaacutgccggtuaa

SEQ ID NO: 75474 - DNA, 24 bp, Artificial Sequence
  Synthetic
gggagtgauaacttgaggtgucat

SEQ ID NO: 75475 - DNA, 21 bp, Artificial Sequence
  Synthetic
tttaagcaggcugauggcagt

SEQ ID NO: 75476 - DNA, 24 bp, Artificial Sequence
  Synthetic
tgtattgcaugcattcccctuaca

SEQ ID NO: 75477 - DNA, 22 bp, Artificial Sequence
  Synthetic
tgcttuccaagtagttguggca

SEQ ID NO: 75478 - DNA, 27 bp, Artificial Sequence
  Synthetic
tggtaattcacaagugattgagcugat

SEQ ID NO: 75479 - DNA, 28 bp, Artificial Sequence
  Synthetic
ccattaataccugattctcugccaacaa

SEQ ID NO: 75480 - DNA, 19 bp, Artificial Sequence
  Synthetic
cauccaggacaugcgcaga

SEQ ID NO: 75481 - DNA, 23 bp, Artificial Sequence
  Synthetic
gccaucaacaacaccaagtctut

SEQ ID NO: 75482 - DNA, 22 bp, Artificial Sequence
  Synthetic
cctgtactgguggatgtccuca

SEQ ID NO: 75483 - DNA, 21 bp, Artificial Sequence
  Synthetic
cggaagcagguggtcatugat

SEQ ID NO: 75484 - DNA, 27 bp, Artificial Sequence
  Synthetic
aaggtcctctttugaaatgtaccacut

SEQ ID NO: 75485 - DNA, 27 bp, Artificial Sequence
  Synthetic
gcggacatagaguttgatgttgttcut

SEQ ID NO: 75486 - DNA, 20 bp, Artificial Sequence
  Synthetic
ccagccucgatctgtaccut

SEQ ID NO: 75487 - DNA, 18 bp, Artificial Sequence
  Synthetic
tcccgcuccgacacatug

SEQ ID NO: 75488 - DNA, 23 bp, Artificial Sequence
  Synthetic
cagcgaagcucttuagaggaaca

SEQ ID NO: 75489 - DNA, 20 bp, Artificial Sequence
  Synthetic
ctctgcucctaaggcugcat

SEQ ID NO: 75490 - DNA, 21 bp, Artificial Sequence
  Synthetic
cggtauccaggatguccaaca

SEQ ID NO: 75491 - DNA, 22 bp, Artificial Sequence
  Synthetic
gcaugagagguaccagggagag

SEQ ID NO: 75492 - DNA, 22 bp, Artificial Sequence
  Synthetic
agtcctggaucagtgagagugt

SEQ ID NO: 75493 - DNA, 20 bp, Artificial Sequence
  Synthetic
ggcaugggacagagtcgtua

SEQ ID NO: 75494 - DNA, 25 bp, Artificial Sequence
  Synthetic
agcatugcaggaagagaaaaguagt

SEQ ID NO: 75495 - DNA, 29 bp, Artificial Sequence
  Synthetic
tgtcttttaccugaatgtttcttctugga

SEQ ID NO: 75496 - DNA, 28 bp, Artificial Sequence
  Synthetic
ccuttgaccttttugagaacaagaagaa

SEQ ID NO: 75497 - DNA, 23 bp, Artificial Sequence
  Synthetic
gcctaaaaccucccaagactuca

SEQ ID NO: 75498 - DNA, 28 bp, Artificial Sequence
  Synthetic
tttctacagagguaaccacagaatcuct

SEQ ID NO: 75499 - DNA, 21 bp, Artificial Sequence
  Synthetic
gaagaaccugggccaucacaa

SEQ ID NO: 75500 - DNA, 19 bp, Artificial Sequence
  Synthetic
cagctgatuccctccccut

SEQ ID NO: 75501 - DNA, 19 bp, Artificial Sequence
  Synthetic
tctgcacagguggcaugag

SEQ ID NO: 75502 - DNA, 24 bp, Artificial Sequence
  Synthetic
accgtggaagauttaacgaauggg

SEQ ID NO: 75503 - DNA, 23 bp, Artificial Sequence
  Synthetic
tgccgccuacaactcttactcua

SEQ ID NO: 75504 - DNA, 18 bp, Artificial Sequence
  Synthetic
caccccuccuaccagcag

SEQ ID NO: 75505 - DNA, 18 bp, Artificial Sequence
  Synthetic
caccccuttccccugcat

SEQ ID NO: 75506 - DNA, 26 bp, Artificial Sequence
  Synthetic
ccuaacagataugccaaaagcagaga

SEQ ID NO: 75507 - DNA, 22 bp, Artificial Sequence
  Synthetic
cgtgcucagaggaugaacacag

SEQ ID NO: 75508 - DNA, 23 bp, Artificial Sequence
  Synthetic
ggcaacccagaaaaacugcaaug

SEQ ID NO: 75509 - DNA, 23 bp, Artificial Sequence
  Synthetic
tttaggatgucagctggcagaug

SEQ ID NO: 75510 - DNA, 21 bp, Artificial Sequence
  Synthetic
tggtguaggaatggcgugaag

SEQ ID NO: 75511 - DNA, 21 bp, Artificial Sequence
  Synthetic
ggagttggcugtgaacgagua

SEQ ID NO: 75512 - DNA, 18 bp, Artificial Sequence
  Synthetic
cccaggguctgccuacca

SEQ ID NO: 75513 - DNA, 21 bp, Artificial Sequence
  Synthetic
cattctgccccauccccauag

SEQ ID NO: 75514 - DNA, 23 bp, Artificial Sequence
  Synthetic
gctgctacauaccgcttcttcug

SEQ ID NO: 75515 - DNA, 29 bp, Artificial Sequence
  Synthetic
tcttcatcttgtuccttgttctattgcut

SEQ ID NO: 75516 - DNA, 19 bp, Artificial Sequence
  Synthetic
cacggccucccttcttgua

SEQ ID NO: 75517 - DNA, 22 bp, Artificial Sequence
  Synthetic
caagaguggaagccauacacac

SEQ ID NO: 75518 - DNA, 22 bp, Artificial Sequence
  Synthetic
cctcatcacugcttctgtguct

SEQ ID NO: 75519 - DNA, 18 bp, Artificial Sequence
  Synthetic
gggutctgugccagagga

SEQ ID NO: 75520 - DNA, 17 bp, Artificial Sequence
  Synthetic
cgccgggcuacgctuac

SEQ ID NO: 75521 - DNA, 21 bp, Artificial Sequence
  Synthetic
gcucccaguagcaagaaggga

SEQ ID NO: 75522 - DNA, 18 bp, Artificial Sequence
  Synthetic
gcccccucctgagugact

SEQ ID NO: 75523 - DNA, 19 bp, Artificial Sequence
  Synthetic
gcccacauggccaaguaca

SEQ ID NO: 75524 - DNA, 18 bp, Artificial Sequence
  Synthetic
gctggugaccacgcacut

SEQ ID NO: 75525 - DNA, 18 bp, Artificial Sequence
  Synthetic
cgaggcuctcacguccct

SEQ ID NO: 75526 - DNA, 22 bp, Artificial Sequence
  Synthetic
cttcgtctucactcaccacugt

SEQ ID NO: 75527 - DNA, 17 bp, Artificial Sequence
  Synthetic
gggaaccgucctcugcg

SEQ ID NO: 75528 - DNA, 17 bp, Artificial Sequence
  Synthetic
gccgccgcgugtacuac

SEQ ID NO: 75529 - DNA, 21 bp, Artificial Sequence
  Synthetic
gaaggctugcacgagaaagut

SEQ ID NO: 75530 - DNA, 19 bp, Artificial Sequence
  Synthetic
ccccagcgcaacutacucc

SEQ ID NO: 75531 - DNA, 20 bp, Artificial Sequence
  Synthetic
gcttcttugcgcatctguct

SEQ ID NO: 75532 - DNA, 20 bp, Artificial Sequence
  Synthetic
cctcccugcccaaagtgtua

SEQ ID NO: 75533 - DNA, 23 bp, Artificial Sequence
  Synthetic
ccctgcacagauttgacactuac

SEQ ID NO: 75534 - DNA, 18 bp, Artificial Sequence
  Synthetic
guaccccuggcggagaag

SEQ ID NO: 75535 - DNA, 17 bp, Artificial Sequence
  Synthetic
gcagaguccgccgcaut

SEQ ID NO: 75536 - DNA, 22 bp, Artificial Sequence
  Synthetic
tttcagggacuacagcugagga

SEQ ID NO: 75537 - DNA, 26 bp, Artificial Sequence
  Synthetic
aacgtggugaagatttgtgatttugg

SEQ ID NO: 75538 - DNA, 26 bp, Artificial Sequence
  Synthetic
ggutcttataaataucccgggcaagg

SEQ ID NO: 75539 - DNA, 28 bp, Artificial Sequence
  Synthetic
agttggttaggutaaggaaatgcatuga

SEQ ID NO: 75540 - DNA, 20 bp, Artificial Sequence
  Synthetic
cacggcugactgatauggca

SEQ ID NO: 75541 - DNA, 23 bp, Artificial Sequence
  Synthetic
tggtggtauacgggaagcuagag

SEQ ID NO: 75542 - DNA, 20 bp, Artificial Sequence
  Synthetic
ccauctuacggagccccaaa

SEQ ID NO: 75543 - DNA, 20 bp, Artificial Sequence
  Synthetic
gggctgtuccccgattucag

SEQ ID NO: 75544 - DNA, 23 bp, Artificial Sequence
  Synthetic
aatgaugggctgacugaaaacct

SEQ ID NO: 75545 - DNA, 17 bp, Artificial Sequence
  Synthetic
gtccgaacaccgugcug

SEQ ID NO: 75546 - DNA, 28 bp, Artificial Sequence
  Synthetic
gcaataatatgucaggacaacgcgauat

SEQ ID NO: 75547 - DNA, 20 bp, Artificial Sequence
  Synthetic
gcctcgccaucattcucgac

SEQ ID NO: 75548 - DNA, 20 bp, Artificial Sequence
  Synthetic
ctgagcagaucccgtcctug

SEQ ID NO: 75549 - DNA, 21 bp, Artificial Sequence
  Synthetic
cttcatgggagugcccttgut

SEQ ID NO: 75550 - DNA, 20 bp, Artificial Sequence
  Synthetic
tcgataccacuggccucaac

SEQ ID NO: 75551 - DNA, 22 bp, Artificial Sequence
  Synthetic
gggtagggucattactuacgct

SEQ ID NO: 75552 - DNA, 18 bp, Artificial Sequence
  Synthetic
caccuggtacguccgcaa

SEQ ID NO: 75553 - DNA, 23 bp, Artificial Sequence
  Synthetic
cccactgacutcctttccatcua

SEQ ID NO: 75554 - DNA, 21 bp, Artificial Sequence
  Synthetic
ctcactuagccacagcgaugt

SEQ ID NO: 75555 - DNA, 23 bp, Artificial Sequence
  Synthetic
tggagcaagutctgatugaccaa

SEQ ID NO: 75556 - DNA, 20 bp, Artificial Sequence
  Synthetic
cccaccaagcagguaagguc

SEQ ID NO: 75557 - DNA, 17 bp, Artificial Sequence
  Synthetic
agaugccggcgtgugaa

SEQ ID NO: 75558 - DNA, 19 bp, Artificial Sequence
  Synthetic
actgaggccuccagugagt

SEQ ID NO: 75559 - DNA, 17 bp, Artificial Sequence
  Synthetic
ggagccagggccucuca

SEQ ID NO: 75560 - DNA, 22 bp, Artificial Sequence
  Synthetic
cctgtggaaaagcugggaacut

SEQ ID NO: 75561 - DNA, 21 bp, Artificial Sequence
  Synthetic
ctgggaucccctccauacagt

SEQ ID NO: 75562 - DNA, 20 bp, Artificial Sequence
  Synthetic
ccagccuaaccagggaagut

SEQ ID NO: 75563 - DNA, 20 bp, Artificial Sequence
  Synthetic
gactggcugacaggagacug

SEQ ID NO: 75564 - DNA, 23 bp, Artificial Sequence
  Synthetic
ctttcaggtguacccattgcuca

SEQ ID NO: 75565 - DNA, 20 bp, Artificial Sequence
  Synthetic
gaagctggugctgcctttuc

SEQ ID NO: 75566 - DNA, 20 bp, Artificial Sequence
  Synthetic
ggccguggaagatctggaug

SEQ ID NO: 75567 - DNA, 22 bp, Artificial Sequence
  Synthetic
cggugggagaaaagaagguact

SEQ ID NO: 75568 - DNA, 22 bp, Artificial Sequence
  Synthetic
aactcatggaugctgatgggut

SEQ ID NO: 75569 - DNA, 18 bp, Artificial Sequence
  Synthetic
cggcacugacctgcttug

SEQ ID NO: 75570 - DNA, 17 bp, Artificial Sequence
  Synthetic
cagcuaccugggcagca

SEQ ID NO: 75571 - DNA, 17 bp, Artificial Sequence
  Synthetic
gccgcccutgagacugt

SEQ ID NO: 75572 - DNA, 17 bp, Artificial Sequence
  Synthetic
cagccgcgacagucuca

SEQ ID NO: 75573 - DNA, 19 bp, Artificial Sequence
  Synthetic
tcagggugacgtcgtcgua

SEQ ID NO: 75574 - DNA, 23 bp, Artificial Sequence
  Synthetic
ccctgtccccaauagtgcttaug

SEQ ID NO: 75575 - DNA, 24 bp, Artificial Sequence
  Synthetic
cacctcaactuccctgtcctttut

SEQ ID NO: 75576 - DNA, 18 bp, Artificial Sequence
  Synthetic
cgctcguacccgcucaac

SEQ ID NO: 75577 - DNA, 21 bp, Artificial Sequence
  Synthetic
gacggtaguttcgctctucca

SEQ ID NO: 75578 - DNA, 20 bp, Artificial Sequence
  Synthetic
gctgcaugaagaccggacuc

SEQ ID NO: 75579 - DNA, 21 bp, Artificial Sequence
  Synthetic
tgctgacuacggagacaccut

SEQ ID NO: 75580 - DNA, 23 bp, Artificial Sequence
  Synthetic
actctagacaucagatcgggcut

SEQ ID NO: 75581 - DNA, 26 bp, Artificial Sequence
  Synthetic
gacaagtctaauctggagctgaucac

SEQ ID NO: 75582 - DNA, 21 bp, Artificial Sequence
  Synthetic
gccacacaggugcatgtuaga

SEQ ID NO: 75583 - DNA, 24 bp, Artificial Sequence
  Synthetic
ccatttagggaaacugagcctcut

SEQ ID NO: 75584 - DNA, 17 bp, Artificial Sequence
  Synthetic
gccccggacgguacuca

SEQ ID NO: 75585 - DNA, 19 bp, Artificial Sequence
  Synthetic
gagtccaucatggcgugct

SEQ ID NO: 75586 - DNA, 19 bp, Artificial Sequence
  Synthetic
gacgguacucaccgagcag

SEQ ID NO: 75587 - DNA, 21 bp, Artificial Sequence
  Synthetic
cggaggcacuttggaagaaug

SEQ ID NO: 75588 - DNA, 18 bp, Artificial Sequence
  Synthetic
ggcaggutgggcatuggt

SEQ ID NO: 75589 - DNA, 18 bp, Artificial Sequence
  Synthetic
gccugaacccuggaccct

SEQ ID NO: 75590 - DNA, 28 bp, Artificial Sequence
  Synthetic
tcatgaaagagucaataggucagagagt

SEQ ID NO: 75591 - DNA, 24 bp, Artificial Sequence
  Synthetic
tctcggauggatacccatuaccat

SEQ ID NO: 75592 - DNA, 19 bp, Artificial Sequence
  Synthetic
gacagccugacctcaccut

SEQ ID NO: 75593 - DNA, 18 bp, Artificial Sequence
  Synthetic
ggtcgtgugtgcagtugg

SEQ ID NO: 75594 - DNA, 21 bp, Artificial Sequence
  Synthetic
ggagctctucaagctgcugaa

SEQ ID NO: 75595 - DNA, 19 bp, Artificial Sequence
  Synthetic
cccgccutatucgggaaca

SEQ ID NO: 75596 - DNA, 23 bp, Artificial Sequence
  Synthetic
tgaacactucttccagguccaag

SEQ ID NO: 75597 - DNA, 23 bp, Artificial Sequence
  Synthetic
ccagtgagcutatttcacacgut

SEQ ID NO: 75598 - DNA, 22 bp, Artificial Sequence
  Synthetic
ttctcagaacccucccctucat

SEQ ID NO: 75599 - DNA, 21 bp, Artificial Sequence
  Synthetic
caaaccagutguagacacgca

SEQ ID NO: 75600 - DNA, 21 bp, Artificial Sequence
  Synthetic
gcuatttcugcagggcggaat

SEQ ID NO: 75601 - DNA, 17 bp, Artificial Sequence
  Synthetic
ggcccgcugtacgtguc

SEQ ID NO: 75602 - DNA, 18 bp, Artificial Sequence
  Synthetic
gcacaagcuggccaugga

SEQ ID NO: 75603 - DNA, 23 bp, Artificial Sequence
  Synthetic
ccttgtccccacauaccactuac

SEQ ID NO: 75604 - DNA, 24 bp, Artificial Sequence
  Synthetic
ggctgtctcuggttataggatgug

SEQ ID NO: 75605 - DNA, 28 bp, Artificial Sequence
  Synthetic
ctgttgctagcuaaagtttccttttcut

SEQ ID NO: 75606 - DNA, 27 bp, Artificial Sequence
  Synthetic
aacccttatggutttcttatggtuggt

SEQ ID NO: 75607 - DNA, 21 bp, Artificial Sequence
  Synthetic
ttgcaggccaagguaaacuca

SEQ ID NO: 75608 - DNA, 24 bp, Artificial Sequence
  Synthetic
cgcttcaaucttattcaggauggt

SEQ ID NO: 75609 - DNA, 23 bp, Artificial Sequence
  Synthetic
aagtacgaguttgtggugaccag

SEQ ID NO: 75610 - DNA, 18 bp, Artificial Sequence
  Synthetic
cctcgguctgcagcuaca

SEQ ID NO: 75611 - DNA, 20 bp, Artificial Sequence
  Synthetic
ccacgggccutgtgttgtua

SEQ ID NO: 75612 - DNA, 20 bp, Artificial Sequence
  Synthetic
gacgugcacaacctcgacua

SEQ ID NO: 75613 - DNA, 20 bp, Artificial Sequence
  Synthetic
ctcggucaaacaaggccuca

SEQ ID NO: 75614 - DNA, 18 bp, Artificial Sequence
  Synthetic
cctucccacacccuccca

SEQ ID NO: 75615 - DNA, 17 bp, Artificial Sequence
  Synthetic
cgccuccaccccugaag

SEQ ID NO: 75616 - DNA, 24 bp, Artificial Sequence
  Synthetic
cagcugcgggataacttuaaacaa

SEQ ID NO: 75617 - DNA, 19 bp, Artificial Sequence
  Synthetic
gttctggucctcggucagg

SEQ ID NO: 75618 - DNA, 21 bp, Artificial Sequence
  Synthetic
caccctuccctctucaggaaa

SEQ ID NO: 75619 - DNA, 26 bp, Artificial Sequence
  Synthetic
gctgacaaagcutcatttagttccuc

SEQ ID NO: 75620 - DNA, 28 bp, Artificial Sequence
  Synthetic
tgtttctaaccagcugaagaaaacuaca

SEQ ID NO: 75621 - DNA, 22 bp, Artificial Sequence
  Synthetic
gaggtggugcacagaacaaauc

SEQ ID NO: 75622 - DNA, 17 bp, Artificial Sequence
  Synthetic
tccacugcagccauggg

SEQ ID NO: 75623 - DNA, 22 bp, Artificial Sequence
  Synthetic
tgatgtgaguggtgctctcuct

SEQ ID NO: 75624 - DNA, 18 bp, Artificial Sequence
  Synthetic
cutgccuggcagcacaaa

SEQ ID NO: 75625 - DNA, 23 bp, Artificial Sequence
  Synthetic
cacctgtugtgcaaattgucaga

SEQ ID NO: 75626 - DNA, 20 bp, Artificial Sequence
  Synthetic
cgccataagguggtggtugt

SEQ ID NO: 75627 - DNA, 20 bp, Artificial Sequence
  Synthetic
cctccttgacugagctggug

SEQ ID NO: 75628 - DNA, 20 bp, Artificial Sequence
  Synthetic
attcucccagaccugaccga

SEQ ID NO: 75629 - DNA, 24 bp, Artificial Sequence
  Synthetic
tctttaggcutgccttttgucact

SEQ ID NO: 75630 - DNA, 25 bp, Artificial Sequence
  Synthetic
gagcagccagagcutcaaatttaut

SEQ ID NO: 75631 - DNA, 29 bp, Artificial Sequence
  Synthetic
cgtatattggaacuttctgtttcactugc

SEQ ID NO: 75632 - DNA, 17 bp, Artificial Sequence
  Synthetic
ggccucaacgcccaugt

SEQ ID NO: 75633 - DNA, 19 bp, Artificial Sequence
  Synthetic
ggagcccaggccuttctug

SEQ ID NO: 75634 - DNA, 23 bp, Artificial Sequence
  Synthetic
gcttcttccugttcatcctggug

SEQ ID NO: 75635 - DNA, 24 bp, Artificial Sequence
  Synthetic
cagctcagaaccuggtatctacut

SEQ ID NO: 75636 - DNA, 26 bp, Artificial Sequence
  Synthetic
agcacccaaaaautatcttacccuga

SEQ ID NO: 75637 - DNA, 23 bp, Artificial Sequence
  Synthetic
cttgcggttucgagtctgaauac

SEQ ID NO: 75638 - DNA, 25 bp, Artificial Sequence
  Synthetic
aagttgaatgaucacctacgcagut

SEQ ID NO: 75639 - DNA, 28 bp, Artificial Sequence
  Synthetic
tcatgaattattugggacggacauaagg

SEQ ID NO: 75640 - DNA, 20 bp, Artificial Sequence
  Synthetic
cacugaccaugcggaaggat

SEQ ID NO: 75641 - DNA, 19 bp, Artificial Sequence
  Synthetic
tccccacaautcccgcuac

SEQ ID NO: 75642 - DNA, 20 bp, Artificial Sequence
  Synthetic
ctggtggcuttatggtggug

SEQ ID NO: 75643 - DNA, 21 bp, Artificial Sequence
  Synthetic
aaggcaugaggtggcuaacag

SEQ ID NO: 75644 - DNA, 21 bp, Artificial Sequence
  Synthetic
cagagtauggcatgggtcuga

SEQ ID NO: 75645 - DNA, 25 bp, Artificial Sequence
  Synthetic
accccagtuattaaagctttuggca

SEQ ID NO: 75646 - DNA, 17 bp, Artificial Sequence
  Synthetic
gccctguggtgctguca

SEQ ID NO: 75647 - DNA, 18 bp, Artificial Sequence
  Synthetic
tcctcuggaggccaugct

SEQ ID NO: 75648 - DNA, 17 bp, Artificial Sequence
  Synthetic
ggccgcucgctucaaga

SEQ ID NO: 75649 - DNA, 28 bp, Artificial Sequence
  Synthetic
gttttatgtauagcttttgcatcugcca

SEQ ID NO: 75650 - DNA, 21 bp, Artificial Sequence
  Synthetic
cagutcatttcuggcacagca

SEQ ID NO: 75651 - DNA, 28 bp, Artificial Sequence
  Synthetic
tgttctcctctugagcattcatttguaa

SEQ ID NO: 75652 - DNA, 20 bp, Artificial Sequence
  Synthetic
cctcggagcugagccaaaug

SEQ ID NO: 75653 - DNA, 24 bp, Artificial Sequence
  Synthetic
ccaagaacaccauacugaaagcct

SEQ ID NO: 75654 - DNA, 19 bp, Artificial Sequence
  Synthetic
tcctugaaacgcccaucgt

SEQ ID NO: 75655 - DNA, 17 bp, Artificial Sequence
  Synthetic
cggcaaucgccaggcua

SEQ ID NO: 75656 - DNA, 22 bp, Artificial Sequence
  Synthetic
tcaccgutctaaagucgggaga

SEQ ID NO: 75657 - DNA, 22 bp, Artificial Sequence
  Synthetic
gcactgaggugaagggatacug

SEQ ID NO: 75658 - DNA, 20 bp, Artificial Sequence
  Synthetic
ggcatcacagccuaccaguc

SEQ ID NO: 75659 - DNA, 19 bp, Artificial Sequence
  Synthetic
gcacccuggtgatgtcgut

SEQ ID NO: 75660 - DNA, 20 bp, Artificial Sequence
  Synthetic
ctgugtctcatcugcagcct

SEQ ID NO: 75661 - DNA, 28 bp, Artificial Sequence
  Synthetic
ggtagagtgagaugcctacaaaatucat

SEQ ID NO: 75662 - DNA, 23 bp, Artificial Sequence
  Synthetic
actactcccacugtctcuacacc

SEQ ID NO: 75663 - DNA, 20 bp, Artificial Sequence
  Synthetic
gcccgtuaggttggcttcuc

SEQ ID NO: 75664 - DNA, 18 bp, Artificial Sequence
  Synthetic
ggctccutgactgugcga

SEQ ID NO: 75665 - DNA, 18 bp, Artificial Sequence
  Synthetic
gtgcgccccaacucttug

SEQ ID NO: 75666 - DNA, 20 bp, Artificial Sequence
  Synthetic
acactgaguggcctcctgua

SEQ ID NO: 75667 - DNA, 22 bp, Artificial Sequence
  Synthetic
ccgaggcaucaagcattcguaa

SEQ ID NO: 75668 - DNA, 20 bp, Artificial Sequence
  Synthetic
gggaagaaugugcggaggat

SEQ ID NO: 75669 - DNA, 28 bp, Artificial Sequence
  Synthetic
ccacagataucacactttagtttuccgt

SEQ ID NO: 75670 - DNA, 23 bp, Artificial Sequence
  Synthetic
ctgcagttuacctgtttcuccca

SEQ ID NO: 75671 - DNA, 28 bp, Artificial Sequence
  Synthetic
gaaaagugccaatgtuaagaaagcagat

SEQ ID NO: 75672 - DNA, 28 bp, Artificial Sequence
  Synthetic
tctgttacttacguggacatttctugac

SEQ ID NO: 75673 - DNA, 23 bp, Artificial Sequence
  Synthetic
tgacagtggagcaugtgttacuc

SEQ ID NO: 75674 - DNA, 28 bp, Artificial Sequence
  Synthetic
aatcagcaaacaaaucaaagctcaugat

SEQ ID NO: 75675 - DNA, 28 bp, Artificial Sequence
  Synthetic
ccatccttaccuctatttctcttucagg

SEQ ID NO: 75676 - DNA, 28 bp, Artificial Sequence
  Synthetic
tgaactagaatgautagcataggccuca

SEQ ID NO: 75677 - DNA, 22 bp, Artificial Sequence
  Synthetic
ctggccuggagcttgaatttut

SEQ ID NO: 75678 - DNA, 22 bp, Artificial Sequence
  Synthetic
agatggacacccugaggucaat

SEQ ID NO: 75679 - DNA, 21 bp, Artificial Sequence
  Synthetic
aggatacagccugtgcacauc

SEQ ID NO: 75680 - DNA, 21 bp, Artificial Sequence
  Synthetic
attcttctuggtggtgcugct

SEQ ID NO: 75681 - DNA, 25 bp, Artificial Sequence
  Synthetic
gggatgggauagcattgaatcucat

SEQ ID NO: 75682 - DNA, 21 bp, Artificial Sequence
  Synthetic
aggacutgtggtuggacgaaa

SEQ ID NO: 75683 - DNA, 28 bp, Artificial Sequence
  Synthetic
ttcgaaagtugctcaacttctaugagaa

SEQ ID NO: 75684 - DNA, 28 bp, Artificial Sequence
  Synthetic
gaugttattaacuggaggagggaaagac

SEQ ID NO: 75685 - DNA, 28 bp, Artificial Sequence
  Synthetic
gtgggacaaaauacctgagtttagagua

SEQ ID NO: 75686 - DNA, 27 bp, Artificial Sequence
  Synthetic
gcaactcttaggutgtgtactaacugt

SEQ ID NO: 75687 - DNA, 25 bp, Artificial Sequence
  Synthetic
ctggtctagagagugaagcaaacuc

SEQ ID NO: 75688 - DNA, 21 bp, Artificial Sequence
  Synthetic
gcccacccagaaaguactuct

SEQ ID NO: 75689 - DNA, 23 bp, Artificial Sequence
  Synthetic
gacgtgctccutttgatctgtut

SEQ ID NO: 75690 - DNA, 20 bp, Artificial Sequence
  Synthetic
catcucaccacccacacgua

SEQ ID NO: 75691 - DNA, 20 bp, Artificial Sequence
  Synthetic
atctgtgtgcuggtgctcuc

SEQ ID NO: 75692 - DNA, 26 bp, Artificial Sequence
  Synthetic
acctcagggugaatacacaagtttut

SEQ ID NO: 75693 - DNA, 20 bp, Artificial Sequence
  Synthetic
gugcctccaaugagcacaag

SEQ ID NO: 75694 - DNA, 22 bp, Artificial Sequence
  Synthetic
gcaatgagcucacagaagucag

SEQ ID NO: 75695 - DNA, 28 bp, Artificial Sequence
  Synthetic
aatgaacaatttcucctttcctctccut

SEQ ID NO: 75696 - DNA, 25 bp, Artificial Sequence
  Synthetic
gttggattguagacaaaggttuggg

SEQ ID NO: 75697 - DNA, 21 bp, Artificial Sequence
  Synthetic
cctgtttuggcagcgttucat

SEQ ID NO: 75698 - DNA, 22 bp, Artificial Sequence
  Synthetic
cagugagugaagcaagggaaga

SEQ ID NO: 75699 - DNA, 25 bp, Artificial Sequence
  Synthetic
ggacattctcaugaacttcctggug

SEQ ID NO: 75700 - DNA, 18 bp, Artificial Sequence
  Synthetic
cauccccagggcacugat

SEQ ID NO: 75701 - DNA, 17 bp, Artificial Sequence
  Synthetic
gggcgucacctggtgua

SEQ ID NO: 75702 - DNA, 27 bp, Artificial Sequence
  Synthetic
tgutttcaaacagaucaaaaggagcac

SEQ ID NO: 75703 - DNA, 25 bp, Artificial Sequence
  Synthetic
atctttcuccaccaccccaaatauc

SEQ ID NO: 75704 - DNA, 19 bp, Artificial Sequence
  Synthetic
ccattctgucgctggcuca

SEQ ID NO: 75705 - DNA, 26 bp, Artificial Sequence
  Synthetic
gttccctcctugccaaaataaatgut

SEQ ID NO: 75706 - DNA, 22 bp, Artificial Sequence
  Synthetic
gttggaggcautcgacttccua

SEQ ID NO: 75707 - DNA, 22 bp, Artificial Sequence
  Synthetic
gaaaaacugagccaggcctuac

SEQ ID NO: 75708 - DNA, 28 bp, Artificial Sequence
  Synthetic
gcagaaatattuaactctccccauggaa

SEQ ID NO: 75709 - DNA, 28 bp, Artificial Sequence
  Synthetic
caaatgtccugaaattctgtcagaugaa

SEQ ID NO: 75710 - DNA, 27 bp, Artificial Sequence
  Synthetic
cttcatcatcugaagactcttcctugt

SEQ ID NO: 75711 - DNA, 23 bp, Artificial Sequence
  Synthetic
gcagccatugccgaaatcuaaaa

SEQ ID NO: 75712 - DNA, 22 bp, Artificial Sequence
  Synthetic
ttccttgccautccagaacugt

SEQ ID NO: 75713 - DNA, 32 bp, Artificial Sequence
  Synthetic
aagaaattgagutgataagtttucaagaagag

SEQ ID NO: 75714 - DNA, 22 bp, Artificial Sequence
  Synthetic
ccauggaatctgucagcaacct

SEQ ID NO: 75715 - DNA, 18 bp, Artificial Sequence
  Synthetic
gtgcgctuccgaacgaug

SEQ ID NO: 75716 - DNA, 24 bp, Artificial Sequence
  Synthetic
tgatcgtugggcaaacacaaatuc

SEQ ID NO: 75717 - DNA, 20 bp, Artificial Sequence
  Synthetic
agtacgctugggagtccuca

SEQ ID NO: 75718 - DNA, 22 bp, Artificial Sequence
  Synthetic
gaggcaautttgucacagcaga

SEQ ID NO: 75719 - DNA, 22 bp, Artificial Sequence
  Synthetic
tgataauggccccctgugaaac

SEQ ID NO: 75720 - DNA, 26 bp, Artificial Sequence
  Synthetic
catttacaaugcaagggtagctgaut

SEQ ID NO: 75721 - DNA, 24 bp, Artificial Sequence
  Synthetic
ccctcctucagtttagtugaggat

SEQ ID NO: 75722 - DNA, 19 bp, Artificial Sequence
  Synthetic
gatcggccucttcaugcga

SEQ ID NO: 75723 - DNA, 20 bp, Artificial Sequence
  Synthetic
aactgctaauggcccgtuct

SEQ ID NO: 75724 - DNA, 23 bp, Artificial Sequence
  Synthetic
acttcaggagcuacagagaugct

SEQ ID NO: 75725 - DNA, 24 bp, Artificial Sequence
  Synthetic
gaaacuaaagacaggctcgacuca

SEQ ID NO: 75726 - DNA, 24 bp, Artificial Sequence
  Synthetic
cttaccttcuggctctaatguggt

SEQ ID NO: 75727 - DNA, 26 bp, Artificial Sequence
  Synthetic
gggattaacguccacatggagataug

SEQ ID NO: 75728 - DNA, 20 bp, Artificial Sequence
  Synthetic
gtgcctaccugtgtctgucc

SEQ ID NO: 75729 - DNA, 21 bp, Artificial Sequence
  Synthetic
tttgcaggcuggtgcagauat

SEQ ID NO: 75730 - DNA, 26 bp, Artificial Sequence
  Synthetic
cggatccgcccautctgtttauaaaa

SEQ ID NO: 75731 - DNA, 26 bp, Artificial Sequence
  Synthetic
aaaagcugagtaccugaagaacaaca

SEQ ID NO: 75732 - DNA, 22 bp, Artificial Sequence
  Synthetic
cctcccatcuccctgcaauaac

SEQ ID NO: 75733 - DNA, 22 bp, Artificial Sequence
  Synthetic
ctgactgucacctgcaactuca

SEQ ID NO: 75734 - DNA, 18 bp, Artificial Sequence
  Synthetic
gaggagcuggcaguggaa

SEQ ID NO: 75735 - DNA, 17 bp, Artificial Sequence
  Synthetic
tggcuaccacgccugag

SEQ ID NO: 75736 - DNA, 27 bp, Artificial Sequence
  Synthetic
acactguaaaactgaatggugagaagt

SEQ ID NO: 75737 - DNA, 24 bp, Artificial Sequence
  Synthetic
gcatcaggcuctttctctgtctuc

SEQ ID NO: 75738 - DNA, 23 bp, Artificial Sequence
  Synthetic
tccaggcuggaatactaguagca

SEQ ID NO: 75739 - DNA, 28 bp, Artificial Sequence
  Synthetic
ggagttgttuccatggtcatttugaaaa

SEQ ID NO: 75740 - DNA, 20 bp, Artificial Sequence
  Synthetic
catcauaagggagccgcuca

SEQ ID NO: 75741 - DNA, 28 bp, Artificial Sequence
  Synthetic
acagtggatgutaacggaatatcuagga

SEQ ID NO: 75742 - DNA, 22 bp, Artificial Sequence
  Synthetic
gccaagcagaggaacugagaut

SEQ ID NO: 75743 - DNA, 25 bp, Artificial Sequence
  Synthetic
aggagctugatttgcatgaugaaga

SEQ ID NO: 75744 - DNA, 24 bp, Artificial Sequence
  Synthetic
aagctgagucaatcagaagugcat

SEQ ID NO: 75745 - DNA, 23 bp, Artificial Sequence
  Synthetic
tcgcatttugggactaactgcut

SEQ ID NO: 75746 - DNA, 20 bp, Artificial Sequence
  Synthetic
gcattcttguccccagcauc

SEQ ID NO: 75747 - DNA, 21 bp, Artificial Sequence
  Synthetic
agccaaggucatugcaggaat

SEQ ID NO: 75748 - DNA, 20 bp, Artificial Sequence
  Synthetic
ccctcaccacugtccctuct

SEQ ID NO: 75749 - DNA, 18 bp, Artificial Sequence
  Synthetic
cccuccacccagctcuga

SEQ ID NO: 75750 - DNA, 21 bp, Artificial Sequence
  Synthetic
ctccagctugggtttctguca

SEQ ID NO: 75751 - DNA, 28 bp, Artificial Sequence
  Synthetic
accaaactgccuttttagtcactaugaa

SEQ ID NO: 75752 - DNA, 28 bp, Artificial Sequence
  Synthetic
gtgcaaggtutacacattttaaucccat

SEQ ID NO: 75753 - DNA, 26 bp, Artificial Sequence
  Synthetic
tgttttgagctugtttgctgaatgut

SEQ ID NO: 75754 - DNA, 23 bp, Artificial Sequence
  Synthetic
cctggttttcutccacagcatuc

SEQ ID NO: 75755 - DNA, 22 bp, Artificial Sequence
  Synthetic
aaacatgguccccttgagtguc

SEQ ID NO: 75756 - DNA, 22 bp, Artificial Sequence
  Synthetic
gggatgagucaaccaugcaaag

SEQ ID NO: 75757 - DNA, 28 bp, Artificial Sequence
  Synthetic
cttttggacagtugatgatgaagagtut

SEQ ID NO: 75758 - DNA, 21 bp, Artificial Sequence
  Synthetic
ccaagctugccctcaggauaa

SEQ ID NO: 75759 - DNA, 28 bp, Artificial Sequence
  Synthetic
ggattttattuggaggatcttccauggg

SEQ ID NO: 75760 - DNA, 29 bp, Artificial Sequence
  Synthetic
aattcctctggaucacatttcccattuaa

SEQ ID NO: 75761 - DNA, 28 bp, Artificial Sequence
  Synthetic
tgttttaatatggcgaugtctctctugt

SEQ ID NO: 75762 - DNA, 22 bp, Artificial Sequence
  Synthetic
tgactgguttcccaugaaagca

SEQ ID NO: 75763 - DNA, 26 bp, Artificial Sequence
  Synthetic
cctcttccacauttgacttcagauga

SEQ ID NO: 75764 - DNA, 27 bp, Artificial Sequence
  Synthetic
cgtgaagucatctccatgugaaaaact

SEQ ID NO: 75765 - DNA, 23 bp, Artificial Sequence
  Synthetic
gattttcactcuccagctccuct

SEQ ID NO: 75766 - DNA, 21 bp, Artificial Sequence
  Synthetic
ctggcagggcutgtgttctua

SEQ ID NO: 75767 - DNA, 22 bp, Artificial Sequence
  Synthetic
ccagggucttttugagcagagg

SEQ ID NO: 75768 - DNA, 28 bp, Artificial Sequence
  Synthetic
tggagagtttugtaaggctttaucaaca

SEQ ID NO: 75769 - DNA, 31 bp, Artificial Sequence
  Synthetic
agaaaggtaattctcuttctctctctctcut

SEQ ID NO: 75770 - DNA, 22 bp, Artificial Sequence
  Synthetic
tcttccuggaacactggtcuct

SEQ ID NO: 75771 - DNA, 29 bp, Artificial Sequence
  Synthetic
gcaaaatctggautgtgttaattctcuct

SEQ ID NO: 75772 - DNA, 22 bp, Artificial Sequence
  Synthetic
gccttctcuggcattgacagua

SEQ ID NO: 75773 - DNA, 22 bp, Artificial Sequence
  Synthetic
cacaatgcauccaatgguccac

SEQ ID NO: 75774 - DNA, 25 bp, Artificial Sequence
  Synthetic
ggttattgaucaagtcagcctuggt

SEQ ID NO: 75775 - DNA, 26 bp, Artificial Sequence
  Synthetic
ttgttaacaggcautggacaaaaucc

SEQ ID NO: 75776 - DNA, 21 bp, Artificial Sequence
  Synthetic
aggactucctcccaucaccaa

SEQ ID NO: 75777 - DNA, 24 bp, Artificial Sequence
  Synthetic
gtagaaggcagggucttcgtaauc

SEQ ID NO: 75778 - DNA, 21 bp, Artificial Sequence
  Synthetic
acgagacucacccaacatgug

SEQ ID NO: 75779 - DNA, 23 bp, Artificial Sequence
  Synthetic
tcactagcaggauccaaggctua

SEQ ID NO: 75780 - DNA, 20 bp, Artificial Sequence
  Synthetic
tgaatauggcggccacgtut

SEQ ID NO: 75781 - DNA, 21 bp, Artificial Sequence
  Synthetic
cctttgcugctgctcctaucc

SEQ ID NO: 75782 - DNA, 21 bp, Artificial Sequence
  Synthetic
cctgcugggaagtagcucaga

SEQ ID NO: 75783 - DNA, 26 bp, Artificial Sequence
  Synthetic
acacactttuacatcttcgtcaucgt

SEQ ID NO: 75784 - DNA, 21 bp, Artificial Sequence
  Synthetic
aaagaccugttggguggacaa

SEQ ID NO: 75785 - DNA, 23 bp, Artificial Sequence
  Synthetic
ctatacacuaccgcttccauggg

SEQ ID NO: 75786 - DNA, 24 bp, Artificial Sequence
  Synthetic
tgggatctgucaagctttcauacc

SEQ ID NO: 75787 - DNA, 28 bp, Artificial Sequence
  Synthetic
gtaagtcactuattaacccagaaucgga

SEQ ID NO: 75788 - DNA, 29 bp, Artificial Sequence
  Synthetic
gtctcattgctgugtaagtaattgttucc

SEQ ID NO: 75789 - DNA, 25 bp, Artificial Sequence
  Synthetic
ggtgagttgcaaugtccgtaattut

SEQ ID NO: 75790 - DNA, 24 bp, Artificial Sequence
  Synthetic
tgctuacagctataaaugcaggct

SEQ ID NO: 75791 - DNA, 24 bp, Artificial Sequence
  Synthetic
ttccttctgcuacagctctgatug

SEQ ID NO: 75792 - DNA, 24 bp, Artificial Sequence
  Synthetic
tctaggttccugatcagtauggca

SEQ ID NO: 75793 - DNA, 28 bp, Artificial Sequence
  Synthetic
tcagttaacggtuaatatcacacagcut

SEQ ID NO: 75794 - DNA, 21 bp, Artificial Sequence
  Synthetic
ggtgcctugcagattagguga

SEQ ID NO: 75795 - DNA, 28 bp, Artificial Sequence
  Synthetic
ctcagtttcccaguatgatcttcatgut

SEQ ID NO: 75796 - DNA, 22 bp, Artificial Sequence
  Synthetic
cacatactcaucctcggcctug

SEQ ID NO: 75797 - DNA, 22 bp, Artificial Sequence
  Synthetic
accugaatccaguggaggagaa

SEQ ID NO: 75798 - DNA, 28 bp, Artificial Sequence
  Synthetic
cctaatcctcaugacaccaaagugaaaa

SEQ ID NO: 75799 - DNA, 22 bp, Artificial Sequence
  Synthetic
aucaggttucccccacagaaag

SEQ ID NO: 75800 - DNA, 24 bp, Artificial Sequence
  Synthetic
ctctgcatguctagtgatgtcugg

SEQ ID NO: 75801 - DNA, 28 bp, Artificial Sequence
  Synthetic
cccctgagtaugaaacttttgcagaaua

SEQ ID NO: 75802 - DNA, 19 bp, Artificial Sequence
  Synthetic
ccgtgguggatgacucgaa

SEQ ID NO: 75803 - DNA, 31 bp, Artificial Sequence
  Synthetic
ccaagtttctcutccataagtttuaaaccaa

SEQ ID NO: 75804 - DNA, 24 bp, Artificial Sequence
  Synthetic
ccctgacguacattcaaaggcaut

SEQ ID NO: 75805 - DNA, 20 bp, Artificial Sequence
  Synthetic
gutgctgtttuccccaccag

SEQ ID NO: 75806 - DNA, 23 bp, Artificial Sequence
  Synthetic
ctaagtugcccagagtgggatut

SEQ ID NO: 75807 - DNA, 26 bp, Artificial Sequence
  Synthetic
ccttgtcttacauaccctgtgtctuc

SEQ ID NO: 75808 - DNA, 25 bp, Artificial Sequence
  Synthetic
acagtataatatcucctggcgcuca

SEQ ID NO: 75809 - DNA, 20 bp, Artificial Sequence
  Synthetic
gctgcacugatccccacaut

SEQ ID NO: 75810 - DNA, 27 bp, Artificial Sequence
  Synthetic
catgcatccutcatgggaattuaaagg

SEQ ID NO: 75811 - DNA, 22 bp, Artificial Sequence
  Synthetic
ttgctgagaaagucactgcuga

SEQ ID NO: 75812 - DNA, 28 bp, Artificial Sequence
  Synthetic
tggttaggtcaaggutgtactttgttut

SEQ ID NO: 75813 - DNA, 26 bp, Artificial Sequence
  Synthetic
agatatcgcaautttgatcagccuca

SEQ ID NO: 75814 - DNA, 24 bp, Artificial Sequence
  Synthetic
cacaugccacaaaaggaacttuct

SEQ ID NO: 75815 - DNA, 21 bp, Artificial Sequence
  Synthetic
gaaggttgcuttgggcaagug

SEQ ID NO: 75816 - DNA, 26 bp, Artificial Sequence
  Synthetic
tctttcagccautaagagagctctug

SEQ ID NO: 75817 - DNA, 28 bp, Artificial Sequence
  Synthetic
cggtattcctttuccatctctcacttua

SEQ ID NO: 75818 - DNA, 24 bp, Artificial Sequence
  Synthetic
actaattgcuggtctcaacugcat

SEQ ID NO: 75819 - DNA, 29 bp, Artificial Sequence
  Synthetic
ctcttctaggtacuctgtctgatcttcut

SEQ ID NO: 75820 - DNA, 27 bp, Artificial Sequence
  Synthetic
gaaaggcagaaaacugatacaatugct

SEQ ID NO: 75821 - DNA, 29 bp, Artificial Sequence
  Synthetic
tgcaggtaucacacaaattacagaagaut

SEQ ID NO: 75822 - DNA, 24 bp, Artificial Sequence
  Synthetic
tgtctttgtcaautcccactgcut

SEQ ID NO: 75823 - DNA, 25 bp, Artificial Sequence
  Synthetic
gttctggaauttccctcacuacacc

SEQ ID NO: 75824 - DNA, 20 bp, Artificial Sequence
  Synthetic
catccaguggcgggacauag

SEQ ID NO: 75825 - DNA, 21 bp, Artificial Sequence
  Synthetic
ctgtagagcugtcccccauag

SEQ ID NO: 75826 - DNA, 26 bp, Artificial Sequence
  Synthetic
gggtaccaaagugatcctccatctua

SEQ ID NO: 75827 - DNA, 26 bp, Artificial Sequence
  Synthetic
acatccugcacgttaagtguaaaaga

SEQ ID NO: 75828 - DNA, 22 bp, Artificial Sequence
  Synthetic
ccgagaacagugaugaaggact

SEQ ID NO: 75829 - DNA, 22 bp, Artificial Sequence
  Synthetic
ccccacgugaacaagtgacaut

SEQ ID NO: 75830 - DNA, 24 bp, Artificial Sequence
  Synthetic
cctgaccaacutttcccagttuct

SEQ ID NO: 75831 - DNA, 28 bp, Artificial Sequence
  Synthetic
actttcttcttcugccaaaattgttgut

SEQ ID NO: 75832 - DNA, 23 bp, Artificial Sequence
  Synthetic
cctcaaaacucaaagcuccacca

SEQ ID NO: 75833 - DNA, 20 bp, Artificial Sequence
  Synthetic
gatgacccaccugcatguga

SEQ ID NO: 75834 - DNA, 21 bp, Artificial Sequence
  Synthetic
cggcttugggttctguagact

SEQ ID NO: 75835 - DNA, 28 bp, Artificial Sequence
  Synthetic
agagccaugcatctttatucagagaaat

SEQ ID NO: 75836 - DNA, 21 bp, Artificial Sequence
  Synthetic
ctcgtagcaucgtcctcaugt

SEQ ID NO: 75837 - DNA, 21 bp, Artificial Sequence
  Synthetic
tggcattugaagggcttcucc

SEQ ID NO: 75838 - DNA, 26 bp, Artificial Sequence
  Synthetic
gtagcttccutatagcacaacugcat

SEQ ID NO: 75839 - DNA, 22 bp, Artificial Sequence
  Synthetic
ctggtucacacgaatgttugct

SEQ ID NO: 75840 - DNA, 23 bp, Artificial Sequence
  Synthetic
acgtcttccutctctctctguca

SEQ ID NO: 75841 - DNA, 21 bp, Artificial Sequence
  Synthetic
ctgaggtucagagccauggac

SEQ ID NO: 75842 - DNA, 25 bp, Artificial Sequence
  Synthetic
aaggaaagaagaaccutggcatcut

SEQ ID NO: 75843 - DNA, 24 bp, Artificial Sequence
  Synthetic
ggatgagagcucctgagtactcua

SEQ ID NO: 75844 - DNA, 20 bp, Artificial Sequence
  Synthetic
cggcacaucaagctgcatuc

SEQ ID NO: 75845 - DNA, 19 bp, Artificial Sequence
  Synthetic
cgggcagaguggaggaauc

SEQ ID NO: 75846 - DNA, 22 bp, Artificial Sequence
  Synthetic
aaggaacaggguctaccuccat

SEQ ID NO: 75847 - DNA, 23 bp, Artificial Sequence
  Synthetic
cgagtgttgcugtcatcaactut

SEQ ID NO: 75848 - DNA, 22 bp, Artificial Sequence
  Synthetic
gcagctgucaattctcatgucc

SEQ ID NO: 75849 - DNA, 24 bp, Artificial Sequence
  Synthetic
tgtgagttugcctgttttctcuct

SEQ ID NO: 75850 - DNA, 18 bp, Artificial Sequence
  Synthetic
cgcgttgcgucggaagua

SEQ ID NO: 75851 - DNA, 27 bp, Artificial Sequence
  Synthetic
acgactctgcugatttggtcataaaut

SEQ ID NO: 75852 - DNA, 22 bp, Artificial Sequence
  Synthetic
ccaagggcucacattucaggag

SEQ ID NO: 75853 - DNA, 27 bp, Artificial Sequence
  Synthetic
ttggtcttttguacccttaagccauaa

SEQ ID NO: 75854 - DNA, 18 bp, Artificial Sequence
  Synthetic
ggtgccugcctcatggut

SEQ ID NO: 75855 - DNA, 17 bp, Artificial Sequence
  Synthetic
accagcccugtgccauc

SEQ ID NO: 75856 - DNA, 18 bp, Artificial Sequence
  Synthetic
gcccacugtctgggucaa

SEQ ID NO: 75857 - DNA, 21 bp, Artificial Sequence
  Synthetic
gcacactgaaguggcacagua

SEQ ID NO: 75858 - DNA, 18 bp, Artificial Sequence
  Synthetic
gcugaatgccucccacga

SEQ ID NO: 75859 - DNA, 21 bp, Artificial Sequence
  Synthetic
gcactcggcucctttctguag

SEQ ID NO: 75860 - DNA, 28 bp, Artificial Sequence
  Synthetic
acttcttgtcaaaaagugaatgcttgut

SEQ ID NO: 75861 - DNA, 26 bp, Artificial Sequence
  Synthetic
tgtgcatcccaacgaucatgttaaua

SEQ ID NO: 75862 - DNA, 22 bp, Artificial Sequence
  Synthetic
gctcacatacugacctggctut

SEQ ID NO: 75863 - DNA, 20 bp, Artificial Sequence
  Synthetic
cctcucgtggtauggcagac

SEQ ID NO: 75864 - DNA, 22 bp, Artificial Sequence
  Synthetic
cctggtcacagauccaatgcut

SEQ ID NO: 75865 - DNA, 28 bp, Artificial Sequence
  Synthetic
ttcttatatcaugaccattctgcaccuc

SEQ ID NO: 75866 - DNA, 20 bp, Artificial Sequence
  Synthetic
gagaagacgcgacuguggaa

SEQ ID NO: 75867 - DNA, 18 bp, Artificial Sequence
  Synthetic
gtgcaccugggtgagucc

SEQ ID NO: 75868 - DNA, 27 bp, Artificial Sequence
  Synthetic
gcatgttcuttttctaaatugcccaca

SEQ ID NO: 75869 - DNA, 25 bp, Artificial Sequence
  Synthetic
ggacatctccutcctgttgttucag

SEQ ID NO: 75870 - DNA, 28 bp, Artificial Sequence
  Synthetic
gagaaggaaaacuatggtaggaaacugg

SEQ ID NO: 75871 - DNA, 22 bp, Artificial Sequence
  Synthetic
agagutatgcuggcacaagcaa

SEQ ID NO: 75872 - DNA, 29 bp, Artificial Sequence
  Synthetic
cattcatatttguctgagttcctgaucca

SEQ ID NO: 75873 - DNA, 26 bp, Artificial Sequence
  Synthetic
tcaaactctguggcataatcagcaut

SEQ ID NO: 75874 - DNA, 19 bp, Artificial Sequence
  Synthetic
cccacauccacctcuggga

SEQ ID NO: 75875 - DNA, 19 bp, Artificial Sequence
  Synthetic
cgtctucagtgcccuggaa

SEQ ID NO: 75876 - DNA, 26 bp, Artificial Sequence
  Synthetic
agagactgtcugtttttcaggtctuc

SEQ ID NO: 75877 - DNA, 22 bp, Artificial Sequence
  Synthetic
aagagaacuccaggtgcttguc

SEQ ID NO: 75878 - DNA, 27 bp, Artificial Sequence
  Synthetic
ggtactcatcucaaagtagttgcccua

SEQ ID NO: 75879 - DNA, 23 bp, Artificial Sequence
  Synthetic
gggctcaccugggaatuagaaaa

SEQ ID NO: 75880 - DNA, 19 bp, Artificial Sequence
  Synthetic
gggcgaguttgcacacuca

SEQ ID NO: 75881 - DNA, 21 bp, Artificial Sequence
  Synthetic
ccctccucacctttcagcauc

SEQ ID NO: 75882 - DNA, 24 bp, Artificial Sequence
  Synthetic
cctattacctccucgagtgcttug

SEQ ID NO: 75883 - DNA, 26 bp, Artificial Sequence
  Synthetic
ctcacttgggaugttttcatctccua

SEQ ID NO: 75884 - DNA, 23 bp, Artificial Sequence
  Synthetic
ccaacuaagggcctgatccuact

SEQ ID NO: 75885 - DNA, 23 bp, Artificial Sequence
  Synthetic
gtaggagaggucaggttucacac

SEQ ID NO: 75886 - DNA, 19 bp, Artificial Sequence
  Synthetic
ctgtcaccguagccgugaa

SEQ ID NO: 75887 - DNA, 21 bp, Artificial Sequence
  Synthetic
ccttgtcaguggcatcgtcug

SEQ ID NO: 75888 - DNA, 19 bp, Artificial Sequence
  Synthetic
tgtcaccguagccgugaag

SEQ ID NO: 75889 - DNA, 20 bp, Artificial Sequence
  Synthetic
atcucagacaccagguccga

SEQ ID NO: 75890 - DNA, 23 bp, Artificial Sequence
  Synthetic
ccactauaaggaccctccctuct

SEQ ID NO: 75891 - DNA, 22 bp, Artificial Sequence
  Synthetic
tgcagaaaagaccgutggacuc

SEQ ID NO: 75892 - DNA, 18 bp, Artificial Sequence
  Synthetic
gccgucccgggagactua

SEQ ID NO: 75893 - DNA, 20 bp, Artificial Sequence
  Synthetic
cactgacccuctccctugac

SEQ ID NO: 75894 - DNA, 18 bp, Artificial Sequence
  Synthetic
ccaagccagccucaccuc

SEQ ID NO: 75895 - DNA, 22 bp, Artificial Sequence
  Synthetic
gcaguacaaggccacagactut

SEQ ID NO: 75896 - DNA, 21 bp, Artificial Sequence
  Synthetic
gatctgauggatggucgggat

SEQ ID NO: 75897 - DNA, 21 bp, Artificial Sequence
  Synthetic
tctccacauggtgcttgcaut

SEQ ID NO: 75898 - DNA, 23 bp, Artificial Sequence
  Synthetic
gttgtacactucccactcctuga

SEQ ID NO: 75899 - DNA, 22 bp, Artificial Sequence
  Synthetic
gcctagccaucctcttgtcuct

SEQ ID NO: 75900 - DNA, 21 bp, Artificial Sequence
  Synthetic
caggcccautgagagagaugt

SEQ ID NO: 75901 - DNA, 18 bp, Artificial Sequence
  Synthetic
cctcccuccctcctcugg

SEQ ID NO: 75902 - DNA, 18 bp, Artificial Sequence
  Synthetic
cctgaccugcacagccut

SEQ ID NO: 75903 - DNA, 20 bp, Artificial Sequence
  Synthetic
cccaccutgatguggaagga

SEQ ID NO: 75904 - DNA, 21 bp, Artificial Sequence
  Synthetic
ggaggcccaaugtttctcugt

SEQ ID NO: 75905 - DNA, 21 bp, Artificial Sequence
  Synthetic
cccccuagagcactgatguct

SEQ ID NO: 75906 - DNA, 22 bp, Artificial Sequence
  Synthetic
cgctttgtcuacacctgcaaug

SEQ ID NO: 75907 - DNA, 25 bp, Artificial Sequence
  Synthetic
ctctataaaauacgtggctgcaugg

SEQ ID NO: 75908 - DNA, 22 bp, Artificial Sequence
  Synthetic
tagatgcatuctgctccucgaa

SEQ ID NO: 75909 - DNA, 28 bp, Artificial Sequence
  Synthetic
tccaagtccttuaggaaaatgtcauagg

SEQ ID NO: 75910 - DNA, 20 bp, Artificial Sequence
  Synthetic
ccaagagccaaguggtcuca

SEQ ID NO: 75911 - DNA, 26 bp, Artificial Sequence
  Synthetic
tcctatgtgtucaccttgtgtuacag

SEQ ID NO: 75912 - DNA, 23 bp, Artificial Sequence
  Synthetic
ttgcaugagaaagggtgtucaga

SEQ ID NO: 75913 - DNA, 24 bp, Artificial Sequence
  Synthetic
ggctggtctucctcctcttttaut

SEQ ID NO: 75914 - DNA, 23 bp, Artificial Sequence
  Synthetic
tcattcaatgcuggtggaaguca

SEQ ID NO: 75915 - DNA, 21 bp, Artificial Sequence
  Synthetic
ggtgtgtuggagctcauggac

SEQ ID NO: 75916 - DNA, 28 bp, Artificial Sequence
  Synthetic
aagagagaagcacugagttaaaaacuga

SEQ ID NO: 75917 - DNA, 22 bp, Artificial Sequence
  Synthetic
ccagaacgaauggctucagaga

SEQ ID NO: 75918 - DNA, 19 bp, Artificial Sequence
  Synthetic
ggtguccctggaguccaac

SEQ ID NO: 75919 - DNA, 17 bp, Artificial Sequence
  Synthetic
gcccucagcaccacuga

SEQ ID NO: 75920 - DNA, 24 bp, Artificial Sequence
  Synthetic
gccaattgttcuttgttccctgut

SEQ ID NO: 75921 - DNA, 23 bp, Artificial Sequence
  Synthetic
aagcctttgagutggtactguga

SEQ ID NO: 75922 - DNA, 22 bp, Artificial Sequence
  Synthetic
aaugggaggucagggagagaaa

SEQ ID NO: 75923 - DNA, 20 bp, Artificial Sequence
  Synthetic
tccuccagcgactauggaca

SEQ ID NO: 75924 - DNA, 27 bp, Artificial Sequence
  Synthetic
ttttgcctttaggaguctgatgactut

SEQ ID NO: 75925 - DNA, 25 bp, Artificial Sequence
  Synthetic
gatgtgtccugaatgttgctgatuc

SEQ ID NO: 75926 - DNA, 28 bp, Artificial Sequence
  Synthetic
tgaaccagcauatagaacatguccaaaa

SEQ ID NO: 75927 - DNA, 23 bp, Artificial Sequence
  Synthetic
tcttcagagaccacuctcctuga

SEQ ID NO: 75928 - DNA, 22 bp, Artificial Sequence
  Synthetic
gggctttcugaaggagguagag

SEQ ID NO: 75929 - DNA, 28 bp, Artificial Sequence
  Synthetic
gggtgctagttuatagaattcagaguca

SEQ ID NO: 75930 - DNA, 23 bp, Artificial Sequence
  Synthetic
aggcatacguaactcaccactug

SEQ ID NO: 75931 - DNA, 28 bp, Artificial Sequence
  Synthetic
ctgatggaccaucgttggtacatatuaa

SEQ ID NO: 75932 - DNA, 24 bp, Artificial Sequence
  Synthetic
aggtgctggauggaaataguaacc

SEQ ID NO: 75933 - DNA, 21 bp, Artificial Sequence
  Synthetic
gcttcctgggcuagtgaccua

SEQ ID NO: 75934 - DNA, 25 bp, Artificial Sequence
  Synthetic
gcgtcttattcuctgggatgaauga

SEQ ID NO: 75935 - DNA, 27 bp, Artificial Sequence
  Synthetic
gttctgatcugactttgcattgtucag

SEQ ID NO: 75936 - DNA, 21 bp, Artificial Sequence
  Synthetic
acacctacugcagggaucaca

SEQ ID NO: 75937 - DNA, 23 bp, Artificial Sequence
  Synthetic
aagaagaggaagguggcatucag

SEQ ID NO: 75938 - DNA, 20 bp, Artificial Sequence
  Synthetic
gcacgcauccgactgtucat

SEQ ID NO: 75939 - DNA, 19 bp, Artificial Sequence
  Synthetic
ctctcugccacttcugcga

SEQ ID NO: 75940 - DNA, 21 bp, Artificial Sequence
  Synthetic
cgtgggcucatcttggaaguc

SEQ ID NO: 75941 - DNA, 29 bp, Artificial Sequence
  Synthetic
gttggagtgtctugaattatgtgtttcut

SEQ ID NO: 75942 - DNA, 24 bp, Artificial Sequence
  Synthetic
ctaacctctucaggctcaaucagt

SEQ ID NO: 75943 - DNA, 21 bp, Artificial Sequence
  Synthetic
gaaugtaucgggaaggaccca

SEQ ID NO: 75944 - DNA, 20 bp, Artificial Sequence
  Synthetic
tgatccucgccgttggtaug

SEQ ID NO: 75945 - DNA, 27 bp, Artificial Sequence
  Synthetic
cccataaagtggutgattgtggttuaa

SEQ ID NO: 75946 - DNA, 20 bp, Artificial Sequence
  Synthetic
accuccgugcagaagagagt

SEQ ID NO: 75947 - DNA, 24 bp, Artificial Sequence
  Synthetic
gggaggttucatggagtcaauagg

SEQ ID NO: 75948 - DNA, 21 bp, Artificial Sequence
  Synthetic
cccacuccttgcttcucagat

SEQ ID NO: 75949 - DNA, 23 bp, Artificial Sequence
  Synthetic
tggtgacagaggacaaugtgaug

SEQ ID NO: 75950 - DNA, 17 bp, Artificial Sequence
  Synthetic
cgucgcugcaagccaaa

SEQ ID NO: 75951 - DNA, 21 bp, Artificial Sequence
  Synthetic
gtttagcggugggcaacuaac

SEQ ID NO: 75952 - DNA, 20 bp, Artificial Sequence
  Synthetic
ccctcuggtgatgucagggt

SEQ ID NO: 75953 - DNA, 19 bp, Artificial Sequence
  Synthetic
ctccgaggagcucaucaca

SEQ ID NO: 75954 - DNA, 25 bp, Artificial Sequence
  Synthetic
gttgaacagaacaaccuctgucact

SEQ ID NO: 75955 - DNA, 26 bp, Artificial Sequence
  Synthetic
catactcaggaugctgttccactuac

SEQ ID NO: 75956 - DNA, 24 bp, Artificial Sequence
  Synthetic
tgcctgcagugtctatctatgtug

SEQ ID NO: 75957 - DNA, 21 bp, Artificial Sequence
  Synthetic
gctctgtgacugtgcctctug

SEQ ID NO: 75958 - DNA, 21 bp, Artificial Sequence
  Synthetic
ttcccugaccgctttgcuaaa

SEQ ID NO: 75959 - DNA, 22 bp, Artificial Sequence
  Synthetic
caaagucaggcacgttcaucac

SEQ ID NO: 75960 - DNA, 22 bp, Artificial Sequence
  Synthetic
cgaggccaaaguctgctatcut

SEQ ID NO: 75961 - DNA, 21 bp, Artificial Sequence
  Synthetic
acaagtcggcuagttgcaugg

SEQ ID NO: 75962 - DNA, 23 bp, Artificial Sequence
  Synthetic
actcctcccutgatccuaacact

SEQ ID NO: 75963 - DNA, 20 bp, Artificial Sequence
  Synthetic
ccaccagccacacutguaac

SEQ ID NO: 75964 - DNA, 25 bp, Artificial Sequence
  Synthetic
actgctggaucatatgcattugagt

SEQ ID NO: 75965 - DNA, 27 bp, Artificial Sequence
  Synthetic
atctgctttcttugattcttcggauaa

SEQ ID NO: 75966 - DNA, 27 bp, Artificial Sequence
  Synthetic
atccgaagaaucaaagaaagcagauaa

SEQ ID NO: 75967 - DNA, 28 bp, Artificial Sequence
  Synthetic
cagtgcucaaaaccaaaatgcctaauat

SEQ ID NO: 75968 - DNA, 18 bp, Artificial Sequence
  Synthetic
cagcggacuggtgtggut

SEQ ID NO: 75969 - DNA, 19 bp, Artificial Sequence
  Synthetic
agcutgagtccugggcaag

SEQ ID NO: 75970 - DNA, 24 bp, Artificial Sequence
  Synthetic
ttcagaguggactacatccugagt

SEQ ID NO: 75971 - DNA, 21 bp, Artificial Sequence
  Synthetic
tgcctgaagugtggttuggat

SEQ ID NO: 75972 - DNA, 20 bp, Artificial Sequence
  Synthetic
cccaatagcaugccacccua

SEQ ID NO: 75973 - DNA, 21 bp, Artificial Sequence
  Synthetic
tctccgcugctctctgaauct

SEQ ID NO: 75974 - DNA, 23 bp, Artificial Sequence
  Synthetic
aggaggtucaccttcctcugaaa

SEQ ID NO: 75975 - DNA, 22 bp, Artificial Sequence
  Synthetic
gcctctaugcttgcguaaccag

SEQ ID NO: 75976 - DNA, 17 bp, Artificial Sequence
  Synthetic
gctgccuccgctcacuc

SEQ ID NO: 75977 - DNA, 18 bp, Artificial Sequence
  Synthetic
gccggaugcugccaaact

SEQ ID NO: 75978 - DNA, 18 bp, Artificial Sequence
  Synthetic
ccggacacagcutggcut

SEQ ID NO: 75979 - DNA, 17 bp, Artificial Sequence
  Synthetic
ccaggcccgauggucat

SEQ ID NO: 75980 - DNA, 18 bp, Artificial Sequence
  Synthetic
ccugcgtcguggagaaca

SEQ ID NO: 75981 - DNA, 18 bp, Artificial Sequence
  Synthetic
gggcagaugacgcucagg

SEQ ID NO: 75982 - DNA, 22 bp, Artificial Sequence
  Synthetic
cggagaaguaggtggtgucact

SEQ ID NO: 75983 - DNA, 21 bp, Artificial Sequence
  Synthetic
acgatgugcagagcaucaact

SEQ ID NO: 75984 - DNA, 24 bp, Artificial Sequence
  Synthetic
tcaaacucctataccugcccaaga

SEQ ID NO: 75985 - DNA, 27 bp, Artificial Sequence
  Synthetic
agtactgtuaccaggactacagaagut

SEQ ID NO: 75986 - DNA, 20 bp, Artificial Sequence
  Synthetic
gcagcaguggaaauggcaat

SEQ ID NO: 75987 - DNA, 19 bp, Artificial Sequence
  Synthetic
aaatgcccacugggaccuc

SEQ ID NO: 75988 - DNA, 19 bp, Artificial Sequence
  Synthetic
ccacctccucccctgugat

SEQ ID NO: 75989 - DNA, 17 bp, Artificial Sequence
  Synthetic
gggagccccuguggaag

SEQ ID NO: 75990 - DNA, 22 bp, Artificial Sequence
  Synthetic
gaacctcatcauggcctcacut

SEQ ID NO: 75991 - DNA, 20 bp, Artificial Sequence
  Synthetic
gctcctggautctgcggtug

SEQ ID NO: 75992 - DNA, 27 bp, Artificial Sequence
  Synthetic
tgttcactaauttgttgccuaccagaa

SEQ ID NO: 75993 - DNA, 28 bp, Artificial Sequence
  Synthetic
tgaagaggaugcagggaattatacaauc

SEQ ID NO: 75994 - DNA, 22 bp, Artificial Sequence
  Synthetic
ccagcucaaagcaagagtguca

SEQ ID NO: 75995 - DNA, 21 bp, Artificial Sequence
  Synthetic
gctccguacgctgagucaaag

SEQ ID NO: 75996 - DNA, 24 bp, Artificial Sequence
  Synthetic
tccaggttttautggcttgcacua

SEQ ID NO: 75997 - DNA, 22 bp, Artificial Sequence
  Synthetic
cctcucggaaccagtugagagt

SEQ ID NO: 75998 - DNA, 21 bp, Artificial Sequence
  Synthetic
ggaccaggaaggacuccacut

SEQ ID NO: 75999 - DNA, 19 bp, Artificial Sequence
  Synthetic
gtguggccagcgtaatucc

SEQ ID NO: 76000 - DNA, 18 bp, Artificial Sequence
  Synthetic
gagaagcucagccuggga

SEQ ID NO: 76001 - DNA, 21 bp, Artificial Sequence
  Synthetic
cacagaugccaaccucaacct

SEQ ID NO: 76002 - DNA, 23 bp, Artificial Sequence
  Synthetic
ggagacugggaggtggaaagtua

SEQ ID NO: 76003 - DNA, 24 bp, Artificial Sequence
  Synthetic
agtcacagaagaggaugaaggugt

SEQ ID NO: 76004 - DNA, 21 bp, Artificial Sequence
  Synthetic
caggaagtacutggccaccug

SEQ ID NO: 76005 - DNA, 20 bp, Artificial Sequence
  Synthetic
ctccccgaaugaccttcugt

SEQ ID NO: 76006 - DNA, 25 bp, Artificial Sequence
  Synthetic
ggattttgcaucaagagcatcaugt

SEQ ID NO: 76007 - DNA, 28 bp, Artificial Sequence
  Synthetic
agaagtttgttttugttgcctctgatut

SEQ ID NO: 76008 - DNA, 18 bp, Artificial Sequence
  Synthetic
gugagcgacgaccagucc

SEQ ID NO: 76009 - DNA, 20 bp, Artificial Sequence
  Synthetic
gcttgacgutgacccucact

SEQ ID NO: 76010 - DNA, 20 bp, Artificial Sequence
  Synthetic
ggagagguggagaggctuca

SEQ ID NO: 76011 - DNA, 23 bp, Artificial Sequence
  Synthetic
ctcacgttggucgtcttcttgua

SEQ ID NO: 76012 - DNA, 22 bp, Artificial Sequence
  Synthetic
gtatgaacccaccucccaugac

SEQ ID NO: 76013 - DNA, 19 bp, Artificial Sequence
  Synthetic
ggccacugacatcauggct

SEQ ID NO: 76014 - DNA, 28 bp, Artificial Sequence
  Synthetic
catatttcttacuctcaactggtuccga

SEQ ID NO: 76015 - DNA, 25 bp, Artificial Sequence
  Synthetic
ggttagtgctuggtgaagacttcua

SEQ ID NO: 76016 - DNA, 22 bp, Artificial Sequence
  Synthetic
acagcaggaguggatcaaucag

SEQ ID NO: 76017 - DNA, 22 bp, Artificial Sequence
  Synthetic
cccatctgcugcaaaaacctua

SEQ ID NO: 76018 - DNA, 22 bp, Artificial Sequence
  Synthetic
cctcutaaacccaaugcccaga

SEQ ID NO: 76019 - DNA, 22 bp, Artificial Sequence
  Synthetic
gtgcccctucttcttcccauag

SEQ ID NO: 76020 - DNA, 27 bp, Artificial Sequence
  Synthetic
cacatttgacugttttatgcucagcaa

SEQ ID NO: 76021 - DNA, 27 bp, Artificial Sequence
  Synthetic
ccgtgtgaaaugacttactgatcaugt

SEQ ID NO: 76022 - DNA, 21 bp, Artificial Sequence
  Synthetic
gcctcagcagcgugtttctua

SEQ ID NO: 76023 - DNA, 21 bp, Artificial Sequence
  Synthetic
ttggtctccugcggttuacag

SEQ ID NO: 76024 - DNA, 26 bp, Artificial Sequence
  Synthetic
aaggcctttagutctgtatgacauct

SEQ ID NO: 76025 - DNA, 24 bp, Artificial Sequence
  Synthetic
acatccuggaggattgttcguact

SEQ ID NO: 76026 - DNA, 26 bp, Artificial Sequence
  Synthetic
gaatggcaatuacctacctgttcugt

SEQ ID NO: 76027 - DNA, 24 bp, Artificial Sequence
  Synthetic
acguttgtttttcuggcgaaagag

SEQ ID NO: 76028 - DNA, 22 bp, Artificial Sequence
  Synthetic
gggcaucaaattccugggacaa

SEQ ID NO: 76029 - DNA, 21 bp, Artificial Sequence
  Synthetic
gcaguaccagcaugacaccag

SEQ ID NO: 76030 - DNA, 28 bp, Artificial Sequence
  Synthetic
agtgaatgcacguaagtatttagctuca

SEQ ID NO: 76031 - DNA, 19 bp, Artificial Sequence
  Synthetic
ctggccagugctaactugg

SEQ ID NO: 76032 - DNA, 28 bp, Artificial Sequence
  Synthetic
tgcaaatctgttucattgtgacttctuc

SEQ ID NO: 76033 - DNA, 28 bp, Artificial Sequence
  Synthetic
aagtgagtcugaggatagttcagaugat

SEQ ID NO: 76034 - DNA, 27 bp, Artificial Sequence
  Synthetic
tctcccagauaagatgaatactguggt

SEQ ID NO: 76035 - DNA, 28 bp, Artificial Sequence
  Synthetic
tcatcctcactgugtgctatgttttaut

SEQ ID NO: 76036 - DNA, 27 bp, Artificial Sequence
  Synthetic
acctagccagaauttttctcatcttut

SEQ ID NO: 76037 - DNA, 20 bp, Artificial Sequence
  Synthetic
gagcugacaggcgatctuga

SEQ ID NO: 76038 - DNA, 25 bp, Artificial Sequence
  Synthetic
tttctgctgcaaguacttctgaugt

SEQ ID NO: 76039 - DNA, 23 bp, Artificial Sequence
  Synthetic
ttcacugaggccacatgatctuc

SEQ ID NO: 76040 - DNA, 22 bp, Artificial Sequence
  Synthetic
tttgaggcgucttgcaatcuct

SEQ ID NO: 76041 - DNA, 32 bp, Artificial Sequence
  Synthetic
aactagttttatattuccagcttcaacttuca

SEQ ID NO: 76042 - DNA, 24 bp, Artificial Sequence
  Synthetic
gtaacctcauagaatcggcagugg

SEQ ID NO: 76043 - DNA, 21 bp, Artificial Sequence
  Synthetic
accctgtcugggtgcuaagat

SEQ ID NO: 76044 - DNA, 27 bp, Artificial Sequence
  Synthetic
cgagtcttgucaagaagcattcatcut

SEQ ID NO: 76045 - DNA, 28 bp, Artificial Sequence
  Synthetic
agatttctcaucactctttccacaugac

SEQ ID NO: 76046 - DNA, 25 bp, Artificial Sequence
  Synthetic
ttggtcaagtcucacatggctuaat

SEQ ID NO: 76047 - DNA, 28 bp, Artificial Sequence
  Synthetic
gcacaagtttuccaactatgaactccua

SEQ ID NO: 76048 - DNA, 25 bp, Artificial Sequence
  Synthetic
gctgttgcctutgatactggtttut

SEQ ID NO: 76049 - DNA, 28 bp, Artificial Sequence
  Synthetic
gtgcaactaagutacagtagatcucaca

SEQ ID NO: 76050 - DNA, 22 bp, Artificial Sequence
  Synthetic
gttggtggcuttgcagtgauag

SEQ ID NO: 76051 - DNA, 25 bp, Artificial Sequence
  Synthetic
catccaggcccacuaatcuaaacat

SEQ ID NO: 76052 - DNA, 23 bp, Artificial Sequence
  Synthetic
gtttttcctcutcccaccctuca

SEQ ID NO: 76053 - DNA, 27 bp, Artificial Sequence
  Synthetic
cgagaaacatacuctgacagagatguc

SEQ ID NO: 76054 - DNA, 23 bp, Artificial Sequence
  Synthetic
tgctgtttgtauttccaggccut

SEQ ID NO: 76055 - DNA, 21 bp, Artificial Sequence
  Synthetic
ccaaagucagggtacgtucct

SEQ ID NO: 76056 - DNA, 22 bp, Artificial Sequence
  Synthetic
caactacaguctgggaugccaa

SEQ ID NO: 76057 - DNA, 20 bp, Artificial Sequence
  Synthetic
accugagaguccgcaaaagg

SEQ ID NO: 76058 - DNA, 21 bp, Artificial Sequence
  Synthetic
gtgtggcgcugagtgtactua

SEQ ID NO: 76059 - DNA, 21 bp, Artificial Sequence
  Synthetic
cacatccauctggtacguggt

SEQ ID NO: 76060 - DNA, 22 bp, Artificial Sequence
  Synthetic
accccagttgugggtaccttua

SEQ ID NO: 76061 - DNA, 21 bp, Artificial Sequence
  Synthetic
ggtcggaggagacguagagut

SEQ ID NO: 76062 - DNA, 21 bp, Artificial Sequence
  Synthetic
cccacucatgctcuacaaccc

SEQ ID NO: 76063 - DNA, 22 bp, Artificial Sequence
  Synthetic
gacaaggaugcctgaccagtua

SEQ ID NO: 76064 - DNA, 18 bp, Artificial Sequence
  Synthetic
cucccagcagggacacuc

SEQ ID NO: 76065 - DNA, 21 bp, Artificial Sequence
  Synthetic
agugtaagccucggcaaacaa

SEQ ID NO: 76066 - DNA, 22 bp, Artificial Sequence
  Synthetic
cctcccaguctggagaugagat

SEQ ID NO: 76067 - DNA, 23 bp, Artificial Sequence
  Synthetic
ccactccuccaaaaaggctucaa

SEQ ID NO: 76068 - DNA, 24 bp, Artificial Sequence
  Synthetic
aaaautgacatcauccccaaccct

SEQ ID NO: 76069 - DNA, 28 bp, Artificial Sequence
  Synthetic
ataagtatgaaugcctacagaacugcaa

SEQ ID NO: 76070 - DNA, 26 bp, Artificial Sequence
  Synthetic
actgtgtcucaacaagcctuacaaaa

SEQ ID NO: 76071 - DNA, 24 bp, Artificial Sequence
  Synthetic
ggattagagutggcatactuggca

SEQ ID NO: 76072 - DNA, 19 bp, Artificial Sequence
  Synthetic
cacaagcuggctgggucat

SEQ ID NO: 76073 - DNA, 22 bp, Artificial Sequence
  Synthetic
catcctgugccgaaugaagaac

SEQ ID NO: 76074 - DNA, 24 bp, Artificial Sequence
  Synthetic
gcatcacugtaaacctugcagaca

SEQ ID NO: 76075 - DNA, 22 bp, Artificial Sequence
  Synthetic
ctttctuccctctcuccaccag

SEQ ID NO: 76076 - DNA, 21 bp, Artificial Sequence
  Synthetic
gaagtcuggcttcttggucgt

SEQ ID NO: 76077 - DNA, 24 bp, Artificial Sequence
  Synthetic
cctcctcctgugatctgcaatcua

SEQ ID NO: 76078 - DNA, 21 bp, Artificial Sequence
  Synthetic
gttggcugcattcaucaagca

SEQ ID NO: 76079 - DNA, 22 bp, Artificial Sequence
  Synthetic
cgcctgcautggattcatgtuc

SEQ ID NO: 76080 - DNA, 24 bp, Artificial Sequence
  Synthetic
agagattaaccgugccgaaugaaa

SEQ ID NO: 76081 - DNA, 20 bp, Artificial Sequence
  Synthetic
ccagaggcaguctgagucac

SEQ ID NO: 76082 - DNA, 25 bp, Artificial Sequence
  Synthetic
ctaaggcaatccugacatttgcauc

SEQ ID NO: 76083 - DNA, 20 bp, Artificial Sequence
  Synthetic
agtgtgacccugacctcugt

SEQ ID NO: 76084 - DNA, 20 bp, Artificial Sequence
  Synthetic
gtccacuccaauccagccat

SEQ ID NO: 76085 - DNA, 23 bp, Artificial Sequence
  Synthetic
aattgtgaaggcauggtgttgug

SEQ ID NO: 76086 - DNA, 29 bp, Artificial Sequence
  Synthetic
agctgtgttaautttatagcagucaacca

SEQ ID NO: 76087 - DNA, 23 bp, Artificial Sequence
  Synthetic
cgtgctuggcgggtaattctaut

SEQ ID NO: 76088 - DNA, 20 bp, Artificial Sequence
  Synthetic
cctcguacccctccaucaac

SEQ ID NO: 76089 - DNA, 26 bp, Artificial Sequence
  Synthetic
gtataacctttcuccttctcccccua

SEQ ID NO: 76090 - DNA, 28 bp, Artificial Sequence
  Synthetic
tgaucaggaagaacuaaacaagaccaag

SEQ ID NO: 76091 - DNA, 22 bp, Artificial Sequence
  Synthetic
caacaugcaaaggcttcucaca

SEQ ID NO: 76092 - DNA, 22 bp, Artificial Sequence
  Synthetic
caggcucagcagatgaacauga

SEQ ID NO: 76093 - DNA, 22 bp, Artificial Sequence
  Synthetic
tgctggaacuggttatggtugg

SEQ ID NO: 76094 - DNA, 21 bp, Artificial Sequence
  Synthetic
tggcagguccuagcagaagat

SEQ ID NO: 76095 - DNA, 23 bp, Artificial Sequence
  Synthetic
cccutgaggactugaggcaaaaa

SEQ ID NO: 76096 - DNA, 24 bp, Artificial Sequence
  Synthetic
ccatgcagagugaaaggatauccc

SEQ ID NO: 76097 - DNA, 24 bp, Artificial Sequence
  Synthetic
gccttttctttugcttcccttgut

SEQ ID NO: 76098 - DNA, 20 bp, Artificial Sequence
  Synthetic
tcagcggcuccacaaguaag

SEQ ID NO: 76099 - DNA, 24 bp, Artificial Sequence
  Synthetic
agaaccuccaaacctctctcugaa

SEQ ID NO: 76100 - DNA, 24 bp, Artificial Sequence
  Synthetic
cctttggtuagaacagcagucaga

SEQ ID NO: 76101 - DNA, 25 bp, Artificial Sequence
  Synthetic
ccaaagcguactgactatucaaggg

SEQ ID NO: 76102 - DNA, 19 bp, Artificial Sequence
  Synthetic
tctggcuctcctgcuccat

SEQ ID NO: 76103 - DNA, 17 bp, Artificial Sequence
  Synthetic
gcctccucgtgctcgug

SEQ ID NO: 76104 - DNA, 20 bp, Artificial Sequence
  Synthetic
cccccgaaucggaatcugac

SEQ ID NO: 76105 - DNA, 19 bp, Artificial Sequence
  Synthetic
tctcaggcucggtcucgaa

SEQ ID NO: 76106 - DNA, 26 bp, Artificial Sequence
  Synthetic
atcagcaagugaatagctcuacaaaa

SEQ ID NO: 76107 - DNA, 25 bp, Artificial Sequence
  Synthetic
ttgtagctcucatttgctgugagaa

SEQ ID NO: 76108 - DNA, 27 bp, Artificial Sequence
  Synthetic
caaacatccutaccaattttgugcagt

SEQ ID NO: 76109 - DNA, 28 bp, Artificial Sequence
  Synthetic
agcgatgtgcauatataatggaaaggut

SEQ ID NO: 76110 - DNA, 27 bp, Artificial Sequence
  Synthetic
tcagaagtcaugggaaatatugcaagt

SEQ ID NO: 76111 - DNA, 24 bp, Artificial Sequence
  Synthetic
acaacgutaagactuacccagcag

SEQ ID NO: 76112 - DNA, 20 bp, Artificial Sequence
  Synthetic
ccgaaaucgaguccgagacc

SEQ ID NO: 76113 - DNA, 18 bp, Artificial Sequence
  Synthetic
gggctucgcaactugaga

SEQ ID NO: 76114 - DNA, 17 bp, Artificial Sequence
  Synthetic
cuccacctucggccagt

SEQ ID NO: 76115 - DNA, 21 bp, Artificial Sequence
  Synthetic
gatctttgucctcgggctuga

SEQ ID NO: 76116 - DNA, 17 bp, Artificial Sequence
  Synthetic
cgacgccuccccaaguc

SEQ ID NO: 76117 - DNA, 17 bp, Artificial Sequence
  Synthetic
ggcgggugggcttctut

SEQ ID NO: 76118 - DNA, 21 bp, Artificial Sequence
  Synthetic
ggtgtccacautcctcacguc

SEQ ID NO: 76119 - DNA, 24 bp, Artificial Sequence
  Synthetic
gttgaggatguaggtgatgauggt

SEQ ID NO: 76120 - DNA, 18 bp, Artificial Sequence
  Synthetic
gctgctgcuctgcctcut

SEQ ID NO: 76121 - DNA, 20 bp, Artificial Sequence
  Synthetic
agcauaggacgggaagugga

SEQ ID NO: 76122 - DNA, 29 bp, Artificial Sequence
  Synthetic
acgggtatttccugcttgtagtaattuag

SEQ ID NO: 76123 - DNA, 22 bp, Artificial Sequence
  Synthetic
tggtaagcuccacgttgaagut

SEQ ID NO: 76124 - DNA, 30 bp, Artificial Sequence
  Synthetic
acaaagactgugaggaaagtttcatuacaa

SEQ ID NO: 76125 - DNA, 25 bp, Artificial Sequence
  Synthetic
acagtgtcacgaacuccagtaguat

SEQ ID NO: 76126 - DNA, 20 bp, Artificial Sequence
  Synthetic
ggaggagagutggugaacgg

SEQ ID NO: 76127 - DNA, 24 bp, Artificial Sequence
  Synthetic
agaacatgcuggtgaacaagauga

SEQ ID NO: 76128 - DNA, 24 bp, Artificial Sequence
  Synthetic
aacaagctgcuctcttgtgatuct

SEQ ID NO: 76129 - DNA, 25 bp, Artificial Sequence
  Synthetic
ccaaactcaccuctgacttctcuct

SEQ ID NO: 76130 - DNA, 28 bp, Artificial Sequence
  Synthetic
tcaatgatcaggaaaugctgtatucaca

SEQ ID NO: 76131 - DNA, 24 bp, Artificial Sequence
  Synthetic
gggaagacuttagtgtcagucacc

SEQ ID NO: 76132 - DNA, 23 bp, Artificial Sequence
  Synthetic
caacacugcaaaccacttucagg

SEQ ID NO: 76133 - DNA, 22 bp, Artificial Sequence
  Synthetic
tgaaatgctuggcgactcctut

SEQ ID NO: 76134 - DNA, 20 bp, Artificial Sequence
  Synthetic
ccttctgtccucgcaggtua

SEQ ID NO: 76135 - DNA, 19 bp, Artificial Sequence
  Synthetic
gctgcauccaagcccucag

SEQ ID NO: 76136 - DNA, 19 bp, Artificial Sequence
  Synthetic
ccagcagcugcccaactua

SEQ ID NO: 76137 - DNA, 25 bp, Artificial Sequence
  Synthetic
tcttatctccuctgggtttuccaca

SEQ ID NO: 76138 - DNA, 21 bp, Artificial Sequence
  Synthetic
gtgtccuccacaccagaauca

SEQ ID NO: 76139 - DNA, 24 bp, Artificial Sequence
  Synthetic
aagacagccacucaatggagtuac

SEQ ID NO: 76140 - DNA, 20 bp, Artificial Sequence
  Synthetic
ccaggccutctttggugact

SEQ ID NO: 76141 - DNA, 21 bp, Artificial Sequence
  Synthetic
cagcctttguggaacgtctuc

SEQ ID NO: 76142 - DNA, 17 bp, Artificial Sequence
  Synthetic
ggcccaagggugacuca

SEQ ID NO: 76143 - DNA, 18 bp, Artificial Sequence
  Synthetic
ggcagaggucuccagcac

SEQ ID NO: 76144 - DNA, 27 bp, Artificial Sequence
  Synthetic
accattaattgcugtaagatctgcuga

SEQ ID NO: 76145 - DNA, 22 bp, Artificial Sequence
  Synthetic
tgctgcacaucaaggtgcuaat

SEQ ID NO: 76146 - DNA, 21 bp, Artificial Sequence
  Synthetic
gtcactctccuggtccatcuc

SEQ ID NO: 76147 - DNA, 22 bp, Artificial Sequence
  Synthetic
accuggaggccaaaatgatucc

SEQ ID NO: 76148 - DNA, 21 bp, Artificial Sequence
  Synthetic
cagcaagaagguggagaucgt

SEQ ID NO: 76149 - DNA, 21 bp, Artificial Sequence
  Synthetic
gaaactcuggccacctgugat

SEQ ID NO: 76150 - DNA, 21 bp, Artificial Sequence
  Synthetic
caggaauaggccctggaaugg

SEQ ID NO: 76151 - DNA, 25 bp, Artificial Sequence
  Synthetic
tgtcccatattuccttgttgcauct

SEQ ID NO: 76152 - DNA, 28 bp, Artificial Sequence
  Synthetic
ggtcatgattttcuagagaggaggtuct

SEQ ID NO: 76153 - DNA, 26 bp, Artificial Sequence
  Synthetic
cctaactuagacttcggguggaaaaa

SEQ ID NO: 76154 - DNA, 24 bp, Artificial Sequence
  Synthetic
cagaauatgcaguacccaaaccca

SEQ ID NO: 76155 - DNA, 20 bp, Artificial Sequence
  Synthetic
ctcacatgcaugccgatugt

SEQ ID NO: 76156 - DNA, 24 bp, Artificial Sequence
  Synthetic
ccatctgtagcuggctttcauacc

SEQ ID NO: 76157 - DNA, 28 bp, Artificial Sequence
  Synthetic
tgtttgtctccucttcattgtcgtttua

SEQ ID NO: 76158 - DNA, 29 bp, Artificial Sequence
  Synthetic
cagtactcatcaaugggctcaatcataua

SEQ ID NO: 76159 - DNA, 27 bp, Artificial Sequence
  Synthetic
gcaagaaaagucagagctagaugaaac

SEQ ID NO: 76160 - DNA, 28 bp, Artificial Sequence
  Synthetic
gctgaagaggagutagaaattgagauga

SEQ ID NO: 76161 - DNA, 22 bp, Artificial Sequence
  Synthetic
aattgctgtugctctcagccua

SEQ ID NO: 76162 - DNA, 20 bp, Artificial Sequence
  Synthetic
ggatgcagcaucacaugcaa

SEQ ID NO: 76163 - DNA, 20 bp, Artificial Sequence
  Synthetic
ctgttgcugaaggagucgct

SEQ ID NO: 76164 - DNA, 26 bp, Artificial Sequence
  Synthetic
agatatgtggugatggcatgcttuaa

SEQ ID NO: 76165 - DNA, 22 bp, Artificial Sequence
  Synthetic
gcaggauggattcugagcagag

SEQ ID NO: 76166 - DNA, 31 bp, Artificial Sequence
  Synthetic
aggattttgggttaucttactatttgcagut

SEQ ID NO: 76167 - DNA, 23 bp, Artificial Sequence
  Synthetic
gcatatgcucattggagtcauca

SEQ ID NO: 76168 - DNA, 24 bp, Artificial Sequence
  Synthetic
gcatatgcttacugtatgggacug

SEQ ID NO: 76169 - DNA, 26 bp, Artificial Sequence
  Synthetic
tctgctttugcgacttacgaauagat

SEQ ID NO: 76170 - DNA, 22 bp, Artificial Sequence
  Synthetic
actctgtccutggcaatgagut

SEQ ID NO: 76171 - DNA, 23 bp, Artificial Sequence
  Synthetic
tgctccccaauaaggttcacauc

SEQ ID NO: 76172 - DNA, 21 bp, Artificial Sequence
  Synthetic
tgccagtcuacaggcctauca

SEQ ID NO: 76173 - DNA, 20 bp, Artificial Sequence
  Synthetic
gagagcgcacutgatuggag

SEQ ID NO: 76174 - DNA, 19 bp, Artificial Sequence
  Synthetic
cggtcccutcctccucact

SEQ ID NO: 76175 - DNA, 19 bp, Artificial Sequence
  Synthetic
tctccuccgcccctcauac

SEQ ID NO: 76176 - DNA, 24 bp, Artificial Sequence
  Synthetic
gttttcttccaacugtccttgcug

SEQ ID NO: 76177 - DNA, 25 bp, Artificial Sequence
  Synthetic
caagccagguagaugaagaacagat

SEQ ID NO: 76178 - DNA, 26 bp, Artificial Sequence
  Synthetic
tgcttgactuccaactgctacttaug

SEQ ID NO: 76179 - DNA, 25 bp, Artificial Sequence
  Synthetic
gcagcaauggacattttgagtugaa

SEQ ID NO: 76180 - DNA, 26 bp, Artificial Sequence
  Synthetic
tucaaggaaaugaggaaagggaacat

SEQ ID NO: 76181 - DNA, 25 bp, Artificial Sequence
  Synthetic
caagaggtccugtcttcagaugaaa

SEQ ID NO: 76182 - DNA, 22 bp, Artificial Sequence
  Synthetic
gccagcagauccctaattcuct

SEQ ID NO: 76183 - DNA, 21 bp, Artificial Sequence
  Synthetic
cagctaccaguccaggatgug

SEQ ID NO: 76184 - DNA, 28 bp, Artificial Sequence
  Synthetic
acagcaaattaaugactttaccctucct

SEQ ID NO: 76185 - DNA, 28 bp, Artificial Sequence
  Synthetic
gaaacaaattaccutgcttctgtucaca

SEQ ID NO: 76186 - DNA, 26 bp, Artificial Sequence
  Synthetic
ttgtacutgtgacaaatuagcagggt

SEQ ID NO: 76187 - DNA, 24 bp, Artificial Sequence
  Synthetic
attctgtttcaucgctgagugaca

SEQ ID NO: 76188 - DNA, 27 bp, Artificial Sequence
  Synthetic
cccaccaacaaautaauaagccaaacc

SEQ ID NO: 76189 - DNA, 29 bp, Artificial Sequence
  Synthetic
gttctcagagcuaagtatcaaggattuca

SEQ ID NO: 76190 - DNA, 23 bp, Artificial Sequence
  Synthetic
ctcatctuaggctgtgctgugaa

SEQ ID NO: 76191 - DNA, 25 bp, Artificial Sequence
  Synthetic
gggtgacctuaaacagatgttacug

SEQ ID NO: 76192 - DNA, 26 bp, Artificial Sequence
  Synthetic
tcttgagatgcutttagagctucagg

SEQ ID NO: 76193 - DNA, 22 bp, Artificial Sequence
  Synthetic
cggtaaagugcctccaaagtug

SEQ ID NO: 76194 - DNA, 22 bp, Artificial Sequence
  Synthetic
agaagaacuacgacaggcacug

SEQ ID NO: 76195 - DNA, 27 bp, Artificial Sequence
  Synthetic
accaccaaatacutacagggattccua

SEQ ID NO: 76196 - DNA, 26 bp, Artificial Sequence
  Synthetic
gagtcctugaggagtacccaauagaa

SEQ ID NO: 76197 - DNA, 28 bp, Artificial Sequence
  Synthetic
agcgatgaatguactctcctgagtaaua

SEQ ID NO: 76198 - DNA, 21 bp, Artificial Sequence
  Synthetic
gttuccccacagacaagtucc

SEQ ID NO: 76199 - DNA, 20 bp, Artificial Sequence
  Synthetic
ttgccatgccuggattgcua

SEQ ID NO: 76200 - DNA, 23 bp, Artificial Sequence
  Synthetic
aggugaaacatagguacccccat

SEQ ID NO: 76201 - DNA, 22 bp, Artificial Sequence
  Synthetic
agagatggcagcugagtcatug

SEQ ID NO: 76202 - DNA, 25 bp, Artificial Sequence
  Synthetic
gcttaccaucattggctugaaaaca

SEQ ID NO: 76203 - DNA, 28 bp, Artificial Sequence
  Synthetic
tctttactctgtcautggtggttttcut

SEQ ID NO: 76204 - DNA, 21 bp, Artificial Sequence
  Synthetic
cagugucccgaaggagaaagg

SEQ ID NO: 76205 - DNA, 25 bp, Artificial Sequence
  Synthetic
aacttgtggcauagactgtttgcua

SEQ ID NO: 76206 - DNA, 28 bp, Artificial Sequence
  Synthetic
ggtagatttgutagcatttccaucaagg

SEQ ID NO: 76207 - DNA, 25 bp, Artificial Sequence
  Synthetic
cagagactttugccaaggaaaucag

SEQ ID NO: 76208 - DNA, 23 bp, Artificial Sequence
  Synthetic
gttcctcctcuaccacacgatuc

SEQ ID NO: 76209 - DNA, 23 bp, Artificial Sequence
  Synthetic
caagaaguagcaagctggcttut

SEQ ID NO: 76210 - DNA, 21 bp, Artificial Sequence
  Synthetic
ctgcctgguactgccctatug

SEQ ID NO: 76211 - DNA, 21 bp, Artificial Sequence
  Synthetic
ggcatggacucaaacgtguct

SEQ ID NO: 76212 - DNA, 28 bp, Artificial Sequence
  Synthetic
gagatgcttaagutcaatagcagttucc

SEQ ID NO: 76213 - DNA, 22 bp, Artificial Sequence
  Synthetic
tcucacagcagagcagttugac

SEQ ID NO: 76214 - DNA, 21 bp, Artificial Sequence
  Synthetic
cgagagccugtgcattucaga

SEQ ID NO: 76215 - DNA, 23 bp, Artificial Sequence
  Synthetic
cctccagtgagucatgcacttut

SEQ ID NO: 76216 - DNA, 22 bp, Artificial Sequence
  Synthetic
accctctgaagcucaggtcaua

SEQ ID NO: 76217 - DNA, 23 bp, Artificial Sequence
  Synthetic
aggaacugtgcaagaugaccaag

SEQ ID NO: 76218 - DNA, 26 bp, Artificial Sequence
  Synthetic
agcatgtcctuaggttttacccatuc

SEQ ID NO: 76219 - DNA, 28 bp, Artificial Sequence
  Synthetic
actgctaacccauatgtcgtcttttuat

SEQ ID NO: 76220 - DNA, 28 bp, Artificial Sequence
  Synthetic
aaatgtctagcaaauccaaaaagugcaa

SEQ ID NO: 76221 - DNA, 19 bp, Artificial Sequence
  Synthetic
ggcugaagggcgagatgug

SEQ ID NO: 76222 - DNA, 20 bp, Artificial Sequence
  Synthetic
gcccuggtcaccuacaacac

SEQ ID NO: 76223 - DNA, 24 bp, Artificial Sequence
  Synthetic
ccuccccaccaaaaugagaaaact

SEQ ID NO: 76224 - DNA, 26 bp, Artificial Sequence
  Synthetic
tcagatttctcuctccttttccucct

SEQ ID NO: 76225 - DNA, 20 bp, Artificial Sequence
  Synthetic
ccattgguggcactctcgut

SEQ ID NO: 76226 - DNA, 21 bp, Artificial Sequence
  Synthetic
ccagacacaugtcctcccuga

SEQ ID NO: 76227 - DNA, 20 bp, Artificial Sequence
  Synthetic
gcaucgagcagggctcuaac

SEQ ID NO: 76228 - DNA, 20 bp, Artificial Sequence
  Synthetic
ccugtccttuggaccacacc

SEQ ID NO: 76229 - DNA, 24 bp, Artificial Sequence
  Synthetic
atcgcgttuaggcttcatgauact

SEQ ID NO: 76230 - DNA, 26 bp, Artificial Sequence
  Synthetic
actggtataaagutgagtgggcuaga

SEQ ID NO: 76231 - DNA, 28 bp, Artificial Sequence
  Synthetic
cctgaaactgtcutcatcctcaatguaa

SEQ ID NO: 76232 - DNA, 24 bp, Artificial Sequence
  Synthetic
agaatttgttaguggcctggaguc

SEQ ID NO: 76233 - DNA, 27 bp, Artificial Sequence
  Synthetic
atgaagtuggcaaaacagactgaatut

SEQ ID NO: 76234 - DNA, 20 bp, Artificial Sequence
  Synthetic
gtgagcctcuggaagtcguc

SEQ ID NO: 76235 - DNA, 21 bp, Artificial Sequence
  Synthetic
aatgtgtucccaccccttuca

SEQ ID NO: 76236 - DNA, 19 bp, Artificial Sequence
  Synthetic
tgtggcccggcuatgacua

SEQ ID NO: 76237 - DNA, 24 bp, Artificial Sequence
  Synthetic
gcctccutaaagaagtuccaccac

SEQ ID NO: 76238 - DNA, 20 bp, Artificial Sequence
  Synthetic
ctgttcccacccuggcatua

SEQ ID NO: 76239 - DNA, 22 bp, Artificial Sequence
  Synthetic
ggctggaauactgcuacaaccc

SEQ ID NO: 76240 - DNA, 17 bp, Artificial Sequence
  Synthetic
gggcgaugggttgaugg

SEQ ID NO: 76241 - DNA, 19 bp, Artificial Sequence
  Synthetic
tgcagcugcggatggauag

SEQ ID NO: 76242 - DNA, 18 bp, Artificial Sequence
  Synthetic
gggcgaugggttgauggg

SEQ ID NO: 76243 - DNA, 17 bp, Artificial Sequence
  Synthetic
cacutgcagcugcggat

SEQ ID NO: 76244 - DNA, 19 bp, Artificial Sequence
  Synthetic
gctgctccuctgggttgug

SEQ ID NO: 76245 - DNA, 19 bp, Artificial Sequence
  Synthetic
cccatggccucttctccug

SEQ ID NO: 76246 - DNA, 19 bp, Artificial Sequence
  Synthetic
cccgctcaguacggagtug

SEQ ID NO: 76247 - DNA, 20 bp, Artificial Sequence
  Synthetic
gcctauccccgggacuaaga

SEQ ID NO: 76248 - DNA, 20 bp, Artificial Sequence
  Synthetic
actcactgucgcctgcttuc

SEQ ID NO: 76249 - DNA, 20 bp, Artificial Sequence
  Synthetic
gatggcgtugttgatggcut

SEQ ID NO: 76250 - DNA, 23 bp, Artificial Sequence
  Synthetic
cgaaatgaugaagtcccacguga

SEQ ID NO: 76251 - DNA, 20 bp, Artificial Sequence
  Synthetic
ggcttgugcagctgguacat

SEQ ID NO: 76252 - DNA, 18 bp, Artificial Sequence
  Synthetic
aggtggucccggtcauca

SEQ ID NO: 76253 - DNA, 19 bp, Artificial Sequence
  Synthetic
agtctuggcagctgtugct

SEQ ID NO: 76254 - DNA, 23 bp, Artificial Sequence
  Synthetic
cctcccctgutcccattactcua

SEQ ID NO: 76255 - DNA, 23 bp, Artificial Sequence
  Synthetic
gaagttcaaaugcccttccagug

SEQ ID NO: 76256 - DNA, 24 bp, Artificial Sequence
  Synthetic
gaggaaaagcugctgtttcatugt

SEQ ID NO: 76257 - DNA, 28 bp, Artificial Sequence
  Synthetic
gatcgaatcttatutcttagcacccugt

SEQ ID NO: 76258 - DNA, 20 bp, Artificial Sequence
  Synthetic
ctcuccaaggccaagtuggt

SEQ ID NO: 76259 - DNA, 17 bp, Artificial Sequence
  Synthetic
tugagcgacagcccgut

SEQ ID NO: 76260 - DNA, 22 bp, Artificial Sequence
  Synthetic
ggtgtttgaccuggtgatgcut

SEQ ID NO: 76261 - DNA, 22 bp, Artificial Sequence
  Synthetic
gaatgtactcuggagcagcugt

SEQ ID NO: 76262 - DNA, 27 bp, Artificial Sequence
  Synthetic
ttccttttccuaagcaagacgttttug

SEQ ID NO: 76263 - DNA, 24 bp, Artificial Sequence
  Synthetic
caacttuagaaggcggaagctcua

SEQ ID NO: 76264 - DNA, 24 bp, Artificial Sequence
  Synthetic
ctcatctaccugaccaaccacauc

SEQ ID NO: 76265 - DNA, 24 bp, Artificial Sequence
  Synthetic
gcacttgtacaccutcatctgcuc

SEQ ID NO: 76266 - DNA, 22 bp, Artificial Sequence
  Synthetic
cattttucaaccagcgcagugt

SEQ ID NO: 76267 - DNA, 21 bp, Artificial Sequence
  Synthetic
tgcctgtcuctcttggcttuc

SEQ ID NO: 76268 - DNA, 24 bp, Artificial Sequence
  Synthetic
catctugtggtatctucaggagga

SEQ ID NO: 76269 - DNA, 28 bp, Artificial Sequence
  Synthetic
tgacgcttaatttucctttccaactcua

SEQ ID NO: 76270 - DNA, 21 bp, Artificial Sequence
  Synthetic
gcugatgtgtugaaggccaca

SEQ ID NO: 76271 - DNA, 23 bp, Artificial Sequence
  Synthetic
tcacattcacgaaguccccttut

SEQ ID NO: 76272 - DNA, 20 bp, Artificial Sequence
  Synthetic
tggtctcccugctcagtgua

SEQ ID NO: 76273 - DNA, 29 bp, Artificial Sequence
  Synthetic
tcttgttctucaggagatgattctgttut

SEQ ID NO: 76274 - DNA, 21 bp, Artificial Sequence
  Synthetic
ttgggcgaaugcagttttucc

SEQ ID NO: 76275 - DNA, 28 bp, Artificial Sequence
  Synthetic
actgatttgtgaauatgcctactgtuca

SEQ ID NO: 76276 - DNA, 22 bp, Artificial Sequence
  Synthetic
gtgaaaugcagcagccacuaaa

SEQ ID NO: 76277 - DNA, 21 bp, Artificial Sequence
  Synthetic
cagtcaaguggatggcuccag

SEQ ID NO: 76278 - DNA, 28 bp, Artificial Sequence
  Synthetic
tgagtgtatactcuatcaaacagggcut

SEQ ID NO: 76279 - DNA, 24 bp, Artificial Sequence
  Synthetic
agccctatugagcctgctaagaua

SEQ ID NO: 76280 - DNA, 19 bp, Artificial Sequence
  Synthetic
cgcccgagacucacactuc

SEQ ID NO: 76281 - DNA, 19 bp, Artificial Sequence
  Synthetic
ccgctggugacccactuac

SEQ ID NO: 76282 - DNA, 20 bp, Artificial Sequence
  Synthetic
catggtucgtaaggcauggg

SEQ ID NO: 76283 - DNA, 27 bp, Artificial Sequence
  Synthetic
tgacccaagaugaaataaaacgtcuct

SEQ ID NO: 76284 - DNA, 26 bp, Artificial Sequence
  Synthetic
ccattcttacugttctagcttgucct

SEQ ID NO: 76285 - DNA, 19 bp, Artificial Sequence
  Synthetic
cacaccuggccaagctuac

SEQ ID NO: 76286 - DNA, 24 bp, Artificial Sequence
  Synthetic
ccctaagtggcutatctgtgctut

SEQ ID NO: 76287 - DNA, 21 bp, Artificial Sequence
  Synthetic
cttcgctugggcttaaugagg

SEQ ID NO: 76288 - DNA, 21 bp, Artificial Sequence
  Synthetic
gccttggtgugcattcttcuc

SEQ ID NO: 76289 - DNA, 24 bp, Artificial Sequence
  Synthetic
cagagagggucatcagtgauacac

SEQ ID NO: 76290 - DNA, 24 bp, Artificial Sequence
  Synthetic
ttaccatagcuccaaacgtcacuc

SEQ ID NO: 76291 - DNA, 23 bp, Artificial Sequence
  Synthetic
gccagcccaaagacucacattua

SEQ ID NO: 76292 - DNA, 20 bp, Artificial Sequence
  Synthetic
agtttctgcugggacaggug

SEQ ID NO: 76293 - DNA, 21 bp, Artificial Sequence
  Synthetic
ctgcgcuctgctatctaucct

SEQ ID NO: 76294 - DNA, 20 bp, Artificial Sequence
  Synthetic
acagacgaugccacugacaa

SEQ ID NO: 76295 - DNA, 17 bp, Artificial Sequence
  Synthetic
gccgcuaccgcaccuac

SEQ ID NO: 76296 - DNA, 26 bp, Artificial Sequence
  Synthetic
cuatcacaaaaugaacggacagaacc

SEQ ID NO: 76297 - DNA, 21 bp, Artificial Sequence
  Synthetic
gctgacacgautggaggcuat

SEQ ID NO: 76298 - DNA, 24 bp, Artificial Sequence
  Synthetic
gcattgucagaagaaaccuggaag

SEQ ID NO: 76299 - DNA, 24 bp, Artificial Sequence
  Synthetic
tgtgaccagutgtguagaaagcaa

SEQ ID NO: 76300 - DNA, 17 bp, Artificial Sequence
  Synthetic
ggcugcccgctauccat

SEQ ID NO: 76301 - DNA, 21 bp, Artificial Sequence
  Synthetic
gggtacucacaggguaacggt

SEQ ID NO: 76302 - DNA, 22 bp, Artificial Sequence
  Synthetic
gaagcagggautcaaccuacct

SEQ ID NO: 76303 - DNA, 25 bp, Artificial Sequence
  Synthetic
tcagagacatuctcctcctacucac

SEQ ID NO: 76304 - DNA, 18 bp, Artificial Sequence
  Synthetic
cggccutctgccuaacgg

SEQ ID NO: 76305 - DNA, 22 bp, Artificial Sequence
  Synthetic
aggcctguccagaaatctcuga

SEQ ID NO: 76306 - DNA, 27 bp, Artificial Sequence
  Synthetic
cccaaacatcauccatctattagcugt

SEQ ID NO: 76307 - DNA, 24 bp, Artificial Sequence
  Synthetic
gagaaggaagaccuggcttgttua

SEQ ID NO: 76308 - DNA, 25 bp, Artificial Sequence
  Synthetic
attgattccuttccccacuaaagca

SEQ ID NO: 76309 - DNA, 18 bp, Artificial Sequence
  Synthetic
cctgacgcugacctgucc

SEQ ID NO: 76310 - DNA, 23 bp, Artificial Sequence
  Synthetic
ccatatggccuctggtagagtug

SEQ ID NO: 76311 - DNA, 22 bp, Artificial Sequence
  Synthetic
cuccagaaggcaggaaugaaga

SEQ ID NO: 76312 - DNA, 26 bp, Artificial Sequence
  Synthetic
agaagtgtugacaatgttttcuccca

SEQ ID NO: 76313 - DNA, 21 bp, Artificial Sequence
  Synthetic
aatggaggugccugacaaagt

SEQ ID NO: 76314 - DNA, 23 bp, Artificial Sequence
  Synthetic
gcttctccucctgcttgtcauag

SEQ ID NO: 76315 - DNA, 26 bp, Artificial Sequence
  Synthetic
tgttttccaacccugcatgtatcaua

SEQ ID NO: 76316 - DNA, 22 bp, Artificial Sequence
  Synthetic
ggtgtgtaggaugtgacacuca

SEQ ID NO: 76317 - DNA, 19 bp, Artificial Sequence
  Synthetic
ggatccaccuctggccuca

SEQ ID NO: 76318 - DNA, 20 bp, Artificial Sequence
  Synthetic
gtgcccaccuttctcccaua

SEQ ID NO: 76319 - DNA, 20 bp, Artificial Sequence
  Synthetic
gggtuccgaaagagctgguc

SEQ ID NO: 76320 - DNA, 25 bp, Artificial Sequence
  Synthetic
acagtaagggaaguatttggctgug

SEQ ID NO: 76321 - DNA, 25 bp, Artificial Sequence
  Synthetic
tctgcagttatutggtgagatgugt

SEQ ID NO: 76322 - DNA, 28 bp, Artificial Sequence
  Synthetic
tgtttggacaacgaguacagttttauct

SEQ ID NO: 76323 - DNA, 29 bp, Artificial Sequence
  Synthetic
gtttagagtcctcautggcacttactaug

SEQ ID NO: 76324 - DNA, 21 bp, Artificial Sequence
  Synthetic
ccataacacccaccuctgcut

SEQ ID NO: 76325 - DNA, 20 bp, Artificial Sequence
  Synthetic
cactgggcuccctgtctuac

SEQ ID NO: 76326 - DNA, 24 bp, Artificial Sequence
  Synthetic
gaaacucttcagctuccagaggaa

SEQ ID NO: 76327 - DNA, 28 bp, Artificial Sequence
  Synthetic
aactgtaccaagaucaatgggaattuga

SEQ ID NO: 76328 - DNA, 26 bp, Artificial Sequence
  Synthetic
ccgaccuagtgcatctttuaaaacaa

SEQ ID NO: 76329 - DNA, 29 bp, Artificial Sequence
  Synthetic
cataggcatucccagtacaaagtauacaa

SEQ ID NO: 76330 - DNA, 27 bp, Artificial Sequence
  Synthetic
acccatgaauaccagtgacuagaaaga

SEQ ID NO: 76331 - DNA, 27 bp, Artificial Sequence
  Synthetic
ccctaactcugagtcttgtttcuacag

SEQ ID NO: 76332 - DNA, 28 bp, Artificial Sequence
  Synthetic
aatgataacggcaucttggtaatctuct

SEQ ID NO: 76333 - DNA, 28 bp, Artificial Sequence
  Synthetic
actccagcactutggatattgacttuaa

SEQ ID NO: 76334 - DNA, 28 bp, Artificial Sequence
  Synthetic
gcttcagacttcucaatatcttccauga

SEQ ID NO: 76335 - DNA, 32 bp, Artificial Sequence
  Synthetic
actctagacacatauacaaacatacagcttug

SEQ ID NO: 76336 - DNA, 24 bp, Artificial Sequence
  Synthetic
acctagcaauggcacagaaatugt

SEQ ID NO: 76337 - DNA, 27 bp, Artificial Sequence
  Synthetic
gaccagtgctuacatttggttttguag

SEQ ID NO: 76338 - DNA, 28 bp, Artificial Sequence
  Synthetic
tcttcctttgtautgcctgtaaacucaa

SEQ ID NO: 76339 - DNA, 21 bp, Artificial Sequence
  Synthetic
ctcactcucatctgctgugct

SEQ ID NO: 76340 - DNA, 29 bp, Artificial Sequence
  Synthetic
caatacaggtttcucttgctttatgtugt

SEQ ID NO: 76341 - DNA, 28 bp, Artificial Sequence
  Synthetic
ctgatggtgautgttgaatacugcaaat

SEQ ID NO: 76342 - DNA, 19 bp, Artificial Sequence
  Synthetic
gcctctcccuccatgcuca

SEQ ID NO: 76343 - DNA, 20 bp, Artificial Sequence
  Synthetic
ggctctugatctcccugcaa

SEQ ID NO: 76344 - DNA, 21 bp, Artificial Sequence
  Synthetic
agtgatguccaccctgtucct

SEQ ID NO: 76345 - DNA, 23 bp, Artificial Sequence
  Synthetic
acctgtgatcucttccagaguct

SEQ ID NO: 76346 - DNA, 21 bp, Artificial Sequence
  Synthetic
tgagtuggcaacgctgaacua

SEQ ID NO: 76347 - DNA, 28 bp, Artificial Sequence
  Synthetic
ccatgccaacauattctacagtgttcut

SEQ ID NO: 76348 - DNA, 21 bp, Artificial Sequence
  Synthetic
cagagcagcuccaagtgttug

SEQ ID NO: 76349 - DNA, 26 bp, Artificial Sequence
  Synthetic
ccatgctgagaugtataggtaaccug

SEQ ID NO: 76350 - DNA, 27 bp, Artificial Sequence
  Synthetic
tcttgaggtagutggagagattuccat

SEQ ID NO: 76351 - DNA, 21 bp, Artificial Sequence
  Synthetic
ggtttcucaggcaggcugaag

SEQ ID NO: 76352 - DNA, 21 bp, Artificial Sequence
  Synthetic
cacagagcautcacacccuca

SEQ ID NO: 76353 - DNA, 20 bp, Artificial Sequence
  Synthetic
gggtaatcucacccctccut

SEQ ID NO: 76354 - DNA, 26 bp, Artificial Sequence
  Synthetic
acttcttaacagguggtttgttcugg

SEQ ID NO: 76355 - DNA, 24 bp, Artificial Sequence
  Synthetic
aattgcagtgaagugctgtgaaug

SEQ ID NO: 76356 - DNA, 26 bp, Artificial Sequence
  Synthetic
agattaagucccaaaatucccaggag

SEQ ID NO: 76357 - DNA, 28 bp, Artificial Sequence
  Synthetic
tgctccaccaacutagaacaatuaacaa

SEQ ID NO: 76358 - DNA, 29 bp, Artificial Sequence
  Synthetic
cctttgtctttgutctgcattttgucaat

SEQ ID NO: 76359 - DNA, 26 bp, Artificial Sequence
  Synthetic
actttaagcaugaacactcactccut

SEQ ID NO: 76360 - DNA, 21 bp, Artificial Sequence
  Synthetic
ccaccccauaugccacacaaa

SEQ ID NO: 76361 - DNA, 28 bp, Artificial Sequence
  Synthetic
tggtctaacacagcutcattcttctcua

SEQ ID NO: 76362 - DNA, 24 bp, Artificial Sequence
  Synthetic
gctaaccccucttaccttgactuc

SEQ ID NO: 76363 - DNA, 28 bp, Artificial Sequence
  Synthetic
gggacaacaatcutggctatgtagtuat

SEQ ID NO: 76364 - DNA, 24 bp, Artificial Sequence
  Synthetic
gtagaagagaugagtcaggtugct

SEQ ID NO: 76365 - DNA, 21 bp, Artificial Sequence
  Synthetic
tggagccuctaaggatcugct

SEQ ID NO: 76366 - DNA, 28 bp, Artificial Sequence
  Synthetic
tccaatatccccauttatagctgaguct

SEQ ID NO: 76367 - DNA, 21 bp, Artificial Sequence
  Synthetic
cgctggugaggauaacaacac

SEQ ID NO: 76368 - DNA, 26 bp, Artificial Sequence
  Synthetic
gcatgcttgcauactaaacggtttut

SEQ ID NO: 76369 - DNA, 28 bp, Artificial Sequence
  Synthetic
gcagaaccaagaautttauaagaacgca

SEQ ID NO: 76370 - DNA, 25 bp, Artificial Sequence
  Synthetic
gtaaatgguggtctaacttcugcgt

SEQ ID NO: 76371 - DNA, 25 bp, Artificial Sequence
  Synthetic
ttgcctcacguagagttgtaatcug

SEQ ID NO: 76372 - DNA, 22 bp, Artificial Sequence
  Synthetic
gaggcaucagaagugggaagag

SEQ ID NO: 76373 - DNA, 25 bp, Artificial Sequence
  Synthetic
ccgcagttuctcattgagguagaat

SEQ ID NO: 76374 - DNA, 25 bp, Artificial Sequence
  Synthetic
gggactccaagutttcagaaguaac

SEQ ID NO: 76375 - DNA, 26 bp, Artificial Sequence
  Synthetic
tctagccaggauagatggagauagga

SEQ ID NO: 76376 - DNA, 21 bp, Artificial Sequence
  Synthetic
acggacaccagcutcctctua

SEQ ID NO: 76377 - DNA, 21 bp, Artificial Sequence
  Synthetic
cgaaccgacutctctccguag

SEQ ID NO: 76378 - DNA, 28 bp, Artificial Sequence
  Synthetic
ttgagatcatctccuaactccctatguc

SEQ ID NO: 76379 - DNA, 28 bp, Artificial Sequence
  Synthetic
gtacatcaggguactttgaacatuccat

SEQ ID NO: 76380 - DNA, 22 bp, Artificial Sequence
  Synthetic
gtctttaggcaggugtgtguga

SEQ ID NO: 76381 - DNA, 22 bp, Artificial Sequence
  Synthetic
guccgaggaggacaatgucaag

SEQ ID NO: 76382 - DNA, 20 bp, Artificial Sequence
  Synthetic
tguctgccgtugaagagagg

SEQ ID NO: 76383 - DNA, 24 bp, Artificial Sequence
  Synthetic
ccttctcagauggagccaggatua

SEQ ID NO: 76384 - DNA, 21 bp, Artificial Sequence
  Synthetic
ggtcaggtgguggcagtagua

SEQ ID NO: 76385 - DNA, 28 bp, Artificial Sequence
  Synthetic
aggaagtatggcucccaaagattauaga

SEQ ID NO: 76386 - DNA, 27 bp, Artificial Sequence
  Synthetic
tcttgttttggtaauctacagcctgut

SEQ ID NO: 76387 - DNA, 21 bp, Artificial Sequence
  Synthetic
cgtgttucggaatgtccucac

SEQ ID NO: 76388 - DNA, 20 bp, Artificial Sequence
  Synthetic
caccaccutgtcccuagacc

SEQ ID NO: 76389 - DNA, 26 bp, Artificial Sequence
  Synthetic
gtagcatctcuaccccaaaactgtut

SEQ ID NO: 76390 - DNA, 23 bp, Artificial Sequence
  Synthetic
ccagtcauccagaactucagcag

SEQ ID NO: 76391 - DNA, 28 bp, Artificial Sequence
  Synthetic
tgtctgagtgttutgttttggttttcut

SEQ ID NO: 76392 - DNA, 24 bp, Artificial Sequence
  Synthetic
ccagccagautatcctttcugagt

SEQ ID NO: 76393 - DNA, 18 bp, Artificial Sequence
  Synthetic
tcaguggcggttctgugg

SEQ ID NO: 76394 - DNA, 23 bp, Artificial Sequence
  Synthetic
tctccutgcatctcuaccacaga

SEQ ID NO: 76395 - DNA, 31 bp, Artificial Sequence
  Synthetic
tgaattgttctttuagtagtcactacgtugt

SEQ ID NO: 76396 - DNA, 20 bp, Artificial Sequence
  Synthetic
ggtcgccugttttgguaggt

SEQ ID NO: 76397 - DNA, 28 bp, Artificial Sequence
  Synthetic
aatttgtaataugggcgcataacatgug

SEQ ID NO: 76398 - DNA, 25 bp, Artificial Sequence
  Synthetic
ttctagaaaacuggtatcugcaggt

SEQ ID NO: 76399 - DNA, 25 bp, Artificial Sequence
  Synthetic
atcatgcatcuccaaactcaacuca

SEQ ID NO: 76400 - DNA, 18 bp, Artificial Sequence
  Synthetic
cgguccgaaagctgcgua

SEQ ID NO: 76401 - DNA, 28 bp, Artificial Sequence
  Synthetic
agcaatttcttacuctctctgcaagtut

SEQ ID NO: 76402 - DNA, 19 bp, Artificial Sequence
  Synthetic
ccggtcagguttcggtgua

SEQ ID NO: 76403 - DNA, 23 bp, Artificial Sequence
  Synthetic
ctcttcttttgucccctggguag

SEQ ID NO: 76404 - DNA, 25 bp, Artificial Sequence
  Synthetic
acaaagtauctcgtgacugggaaga

SEQ ID NO: 76405 - DNA, 28 bp, Artificial Sequence
  Synthetic
cagttcggaaugcactaaattcagttut

SEQ ID NO: 76406 - DNA, 26 bp, Artificial Sequence
  Synthetic
cctgauggtggaataucacaagaaca

SEQ ID NO: 76407 - DNA, 26 bp, Artificial Sequence
  Synthetic
gtgtcgagcaguactctaaacaugag

SEQ ID NO: 76408 - DNA, 22 bp, Artificial Sequence
  Synthetic
caaactagcccucaatcccuga

SEQ ID NO: 76409 - DNA, 18 bp, Artificial Sequence
  Synthetic
cagcaguctccgcaucgt

SEQ ID NO: 76410 - DNA, 25 bp, Artificial Sequence
  Synthetic
aatgagugagaaagcacatctguca

SEQ ID NO: 76411 - DNA, 24 bp, Artificial Sequence
  Synthetic
agagautacatatccugggcaggt

SEQ ID NO: 76412 - DNA, 21 bp, Artificial Sequence
  Synthetic
gcagcagaagauccggaagua

SEQ ID NO: 76413 - DNA, 18 bp, Artificial Sequence
  Synthetic
catcgcuccgctaggugt

SEQ ID NO: 76414 - DNA, 23 bp, Artificial Sequence
  Synthetic
tttgttgctgugacttccccaua

SEQ ID NO: 76415 - DNA, 27 bp, Artificial Sequence
  Synthetic
tcgtcacaaguccacaatgtagaauag

SEQ ID NO: 76416 - DNA, 23 bp, Artificial Sequence
  Synthetic
ccaggaacccutttatggctuca

SEQ ID NO: 76417 - DNA, 27 bp, Artificial Sequence
  Synthetic
atgacagctcaccugtctaaattctut

SEQ ID NO: 76418 - DNA, 27 bp, Artificial Sequence
  Synthetic
acgtggagtaauacacctatgaagugt

SEQ ID NO: 76419 - DNA, 26 bp, Artificial Sequence
  Synthetic
gacttcaucccatacctaguagacca

SEQ ID NO: 76420 - DNA, 23 bp, Artificial Sequence
  Synthetic
agagctggacautgaggtctuct

SEQ ID NO: 76421 - DNA, 25 bp, Artificial Sequence
  Synthetic
tcagtgtcacagugttctttgugaa

SEQ ID NO: 76422 - DNA, 18 bp, Artificial Sequence
  Synthetic
tcccccauccugggacaa

SEQ ID NO: 76423 - DNA, 22 bp, Artificial Sequence
  Synthetic
acctgttgugctcactgctuag

SEQ ID NO: 76424 - DNA, 26 bp, Artificial Sequence
  Synthetic
ccgtatttccggutactgagacttug

SEQ ID NO: 76425 - DNA, 24 bp, Artificial Sequence
  Synthetic
tcctccccacauacaccatgtaut

SEQ ID NO: 76426 - DNA, 25 bp, Artificial Sequence
  Synthetic
ctattacatcacuggtgcgtugact

SEQ ID NO: 76427 - DNA, 21 bp, Artificial Sequence
  Synthetic
gctccacaaaagcugagtugg

SEQ ID NO: 76428 - DNA, 22 bp, Artificial Sequence
  Synthetic
gcgaagcaccagaaaucaugga

SEQ ID NO: 76429 - DNA, 18 bp, Artificial Sequence
  Synthetic
tcuccacacaggccucct

SEQ ID NO: 76430 - DNA, 22 bp, Artificial Sequence
  Synthetic
cctctctuaacccccttcccua

SEQ ID NO: 76431 - DNA, 26 bp, Artificial Sequence
  Synthetic
tgatgaagatgaucgggaagcauaag

SEQ ID NO: 76432 - DNA, 21 bp, Artificial Sequence
  Synthetic
cccacaugcagattcccauct

SEQ ID NO: 76433 - DNA, 24 bp, Artificial Sequence
  Synthetic
cgcatatggtauccctcaaccuac

SEQ ID NO: 76434 - DNA, 28 bp, Artificial Sequence
  Synthetic
catttaatuaccctacaggugagagcaa

SEQ ID NO: 76435 - DNA, 21 bp, Artificial Sequence
  Synthetic
ccctccutggtaacugagacc

SEQ ID NO: 76436 - DNA, 18 bp, Artificial Sequence
  Synthetic
gtcugaggagcccgtguc

SEQ ID NO: 76437 - DNA, 21 bp, Artificial Sequence
  Synthetic
tgcaggtgucgaaggaguagt

SEQ ID NO: 76438 - DNA, 19 bp, Artificial Sequence
  Synthetic
gggtaaccugcgggagtut

SEQ ID NO: 76439 - DNA, 21 bp, Artificial Sequence
  Synthetic
cttcugggaggccaagtacuc

SEQ ID NO: 76440 - DNA, 22 bp, Artificial Sequence
  Synthetic
cccccagcaggutgatgataut

SEQ ID NO: 76441 - DNA, 28 bp, Artificial Sequence
  Synthetic
caagtaaatgaguctcaacgtgttctut

SEQ ID NO: 76442 - DNA, 17 bp, Artificial Sequence
  Synthetic
cctgggagucccccuca

SEQ ID NO: 76443 - DNA, 21 bp, Artificial Sequence
  Synthetic
ctgatcccauccctccttucc

SEQ ID NO: 76444 - DNA, 19 bp, Artificial Sequence
  Synthetic
tggtgtccugtgccuacca

SEQ ID NO: 76445 - DNA, 18 bp, Artificial Sequence
  Synthetic
gcagggcugaagcctcuc

SEQ ID NO: 76446 - DNA, 24 bp, Artificial Sequence
  Synthetic
caaggaauttgaugggaagagcct

SEQ ID NO: 76447 - DNA, 25 bp, Artificial Sequence
  Synthetic
cagaatggctuaccttctcaaccut

SEQ ID NO: 76448 - DNA, 21 bp, Artificial Sequence
  Synthetic
gggugccagaaccacttgaut

SEQ ID NO: 76449 - DNA, 23 bp, Artificial Sequence
  Synthetic
cccgttctucatctccttuccag

SEQ ID NO: 76450 - DNA, 28 bp, Artificial Sequence
  Synthetic
tctgcaagcucatgaaagaaatctuaga

SEQ ID NO: 76451 - DNA, 23 bp, Artificial Sequence
  Synthetic
aggcaagaaggcaugaaacagua

SEQ ID NO: 76452 - DNA, 27 bp, Artificial Sequence
  Synthetic
agcatuaaaacaaggaaagcaaagugg

SEQ ID NO: 76453 - DNA, 27 bp, Artificial Sequence
  Synthetic
acctctuccatcaaatgtucacagaaa

SEQ ID NO: 76454 - DNA, 29 bp, Artificial Sequence
  Synthetic
gagaaaagaaagagacaugcatgaacaut

SEQ ID NO: 76455 - DNA, 21 bp, Artificial Sequence
  Synthetic
gtactuccagaccagggtgut

SEQ ID NO: 76456 - DNA, 17 bp, Artificial Sequence
  Synthetic
ccugcccttugcccaac

SEQ ID NO: 76457 - DNA, 22 bp, Artificial Sequence
  Synthetic
gguagagcacatugggcacaaa

SEQ ID NO: 76458 - DNA, 22 bp, Artificial Sequence
  Synthetic
ggcaggagucaugggagaaaac

SEQ ID NO: 76459 - DNA, 27 bp, Artificial Sequence
  Synthetic
aaatgttctgtuctccttcacttucca

SEQ ID NO: 76460 - DNA, 20 bp, Artificial Sequence
  Synthetic
ccacccgugtccttcttcua

SEQ ID NO: 76461 - DNA, 23 bp, Artificial Sequence
  Synthetic
cctttgtucttccctcuccacag

SEQ ID NO: 76462 - DNA, 22 bp, Artificial Sequence
  Synthetic
acagtcaccccaaucaccuaca

SEQ ID NO: 76463 - DNA, 27 bp, Artificial Sequence
  Synthetic
tgaaagaagaccaaacugagtactugg

SEQ ID NO: 76464 - DNA, 22 bp, Artificial Sequence
  Synthetic
gcacagcagauactgccaatut

SEQ ID NO: 76465 - DNA, 24 bp, Artificial Sequence
  Synthetic
aatcccttggagutgatgtcaguc

SEQ ID NO: 76466 - DNA, 19 bp, Artificial Sequence
  Synthetic
ggagccgggcagutactua

SEQ ID NO: 76467 - DNA, 28 bp, Artificial Sequence
  Synthetic
cacatccauggaatatgttctttugcat

SEQ ID NO: 76468 - DNA, 29 bp, Artificial Sequence
  Synthetic
cttcacaatcucctttattcttcgtucct

SEQ ID NO: 76469 - DNA, 28 bp, Artificial Sequence
  Synthetic
ggcgttgagcacuaaattgaatgtatua

SEQ ID NO: 76470 - DNA, 23 bp, Artificial Sequence
  Synthetic
ggagaggagaagugtagggctua

SEQ ID NO: 76471 - DNA, 26 bp, Artificial Sequence
  Synthetic
ctccaattccacuatttaccccucag

SEQ ID NO: 76472 - DNA, 24 bp, Artificial Sequence
  Synthetic
cgtagtgaaaaucctccagacugt

SEQ ID NO: 76473 - DNA, 27 bp, Artificial Sequence
  Synthetic
gaccatgacagagautacgaagaugaa

SEQ ID NO: 76474 - DNA, 27 bp, Artificial Sequence
  Synthetic
tcugccttgauaaaggaaaccaaagaa

SEQ ID NO: 76475 - DNA, 28 bp, Artificial Sequence
  Synthetic
catcaaaacuactttctggucagagaga

SEQ ID NO: 76476 - DNA, 29 bp, Artificial Sequence
  Synthetic
tccagcattttcauctttcttcatcauct

SEQ ID NO: 76477 - DNA, 25 bp, Artificial Sequence
  Synthetic
acagaagtcagaauctccacgtgua

SEQ ID NO: 76478 - DNA, 24 bp, Artificial Sequence
  Synthetic
gtccaaaagugttaaugcccaagt

SEQ ID NO: 76479 - DNA, 28 bp, Artificial Sequence
  Synthetic
ttcactgtaatcuctggatgttttgugt

SEQ ID NO: 76480 - DNA, 23 bp, Artificial Sequence
  Synthetic
cactccatgucctcgtttacugg

SEQ ID NO: 76481 - DNA, 26 bp, Artificial Sequence
  Synthetic
ccctcactgaaccuctgcatatttut

SEQ ID NO: 76482 - DNA, 21 bp, Artificial Sequence
  Synthetic
cgtgatccugctgaacaugga

SEQ ID NO: 76483 - DNA, 24 bp, Artificial Sequence
  Synthetic
cacatgcgucactttctttttgug

SEQ ID NO: 76484 - DNA, 21 bp, Artificial Sequence
  Synthetic
ccaagacuccaaagcccagua

SEQ ID NO: 76485 - DNA, 21 bp, Artificial Sequence
  Synthetic
gttcagccauccagaaugggt

SEQ ID NO: 76486 - DNA, 24 bp, Artificial Sequence
  Synthetic
cttttggaaacagcuccaggttut

SEQ ID NO: 76487 - DNA, 24 bp, Artificial Sequence
  Synthetic
ctgaataagatugaagcggctcug

SEQ ID NO: 76488 - DNA, 26 bp, Artificial Sequence
  Synthetic
tgatgtgtaatuacgaaacccugacc

SEQ ID NO: 76489 - DNA, 28 bp, Artificial Sequence
  Synthetic
gaatactgttgcuatggtgatcttcuca

SEQ ID NO: 76490 - DNA, 20 bp, Artificial Sequence
  Synthetic
cctacccutcaccaggucca

SEQ ID NO: 76491 - DNA, 19 bp, Artificial Sequence
  Synthetic
cccccacaguagcttucca

SEQ ID NO: 76492 - DNA, 19 bp, Artificial Sequence
  Synthetic
ccaccugaaccgagctcut

SEQ ID NO: 76493 - DNA, 21 bp, Artificial Sequence
  Synthetic
gcgcaggucccaaatttucac

SEQ ID NO: 76494 - DNA, 19 bp, Artificial Sequence
  Synthetic
ggagggaggucagggacua

SEQ ID NO: 76495 - DNA, 21 bp, Artificial Sequence
  Synthetic
actgcccucatctctcuccag

SEQ ID NO: 76496 - DNA, 21 bp, Artificial Sequence
  Synthetic
gccgcacuctagtaagtggut

SEQ ID NO: 76497 - DNA, 25 bp, Artificial Sequence
  Synthetic
aacaactgcttuaacagctgcttut

SEQ ID NO: 76498 - DNA, 22 bp, Artificial Sequence
  Synthetic
ctccttcttgaucctggtggug

SEQ ID NO: 76499 - DNA, 19 bp, Artificial Sequence
  Synthetic
acccagcuggtccucaaag

SEQ ID NO: 76500 - DNA, 21 bp, Artificial Sequence
  Synthetic
cccgugtcctgtucaaacact

SEQ ID NO: 76501 - DNA, 28 bp, Artificial Sequence
  Synthetic
tcatcacacaatcuacatcttctgcaut

SEQ ID NO: 76502 - DNA, 20 bp, Artificial Sequence
  Synthetic
ggctgacggguttcctctuc

SEQ ID NO: 76503 - DNA, 21 bp, Artificial Sequence
  Synthetic
aatggacguggauagcagcaa

SEQ ID NO: 76504 - DNA, 28 bp, Artificial Sequence
  Synthetic
gtccaagtccugtgaaatttttctctut

SEQ ID NO: 76505 - DNA, 28 bp, Artificial Sequence
  Synthetic
tgaaataacagtutgctttgtgtaugcc

SEQ ID NO: 76506 - DNA, 28 bp, Artificial Sequence
  Synthetic
ttgcagttaagugattatatgggaugag

SEQ ID NO: 76507 - DNA, 28 bp, Artificial Sequence
  Synthetic
acctttagccuccaattatctcctacut

SEQ ID NO: 76508 - DNA, 28 bp, Artificial Sequence
  Synthetic
gcagagatccugcatattttgaugaaaa

SEQ ID NO: 76509 - DNA, 24 bp, Artificial Sequence
  Synthetic
cttctaaagcucactggacacauc

SEQ ID NO: 76510 - DNA, 21 bp, Artificial Sequence
  Synthetic
cacagacaggutctggtuggt

SEQ ID NO: 76511 - DNA, 26 bp, Artificial Sequence
  Synthetic
cagagtgtccuttttgtgagaagaug

SEQ ID NO: 76512 - DNA, 27 bp, Artificial Sequence
  Synthetic
gttctaatcuaaaggctgtcuaaccaa

SEQ ID NO: 76513 - DNA, 22 bp, Artificial Sequence
  Synthetic
gacgtgtggucttacggaguat

SEQ ID NO: 76514 - DNA, 24 bp, Artificial Sequence
  Synthetic
cagacaaagcccauttttctucca

SEQ ID NO: 76515 - DNA, 21 bp, Artificial Sequence
  Synthetic
accacaguaggccccaattuc

SEQ ID NO: 76516 - DNA, 18 bp, Artificial Sequence
  Synthetic
ccugcuggagagccaagt

SEQ ID NO: 76517 - DNA, 18 bp, Artificial Sequence
  Synthetic
agctgagacccugccuga

SEQ ID NO: 76518 - DNA, 22 bp, Artificial Sequence
  Synthetic
cacagccuccgtagaucaaaca

SEQ ID NO: 76519 - DNA, 24 bp, Artificial Sequence
  Synthetic
ggagagatgagguctgggatauca

SEQ ID NO: 76520 - DNA, 22 bp, Artificial Sequence
  Synthetic
attttccacugctctugaggct

SEQ ID NO: 76521 - DNA, 20 bp, Artificial Sequence
  Synthetic
ggcgccucagagctatuacc

SEQ ID NO: 76522 - DNA, 21 bp, Artificial Sequence
  Synthetic
ggagucaccaggaaccgttua

SEQ ID NO: 76523 - DNA, 23 bp, Artificial Sequence
  Synthetic
cctctccctutcctctgttcuct

SEQ ID NO: 76524 - DNA, 21 bp, Artificial Sequence
  Synthetic
cgcttcuccaagtccccatug

SEQ ID NO: 76525 - DNA, 28 bp, Artificial Sequence
  Synthetic
accctcctctugtgtatctttctuacat

SEQ ID NO: 76526 - DNA, 22 bp, Artificial Sequence
  Synthetic
accaccugcatucaggaaaagt

SEQ ID NO: 76527 - DNA, 28 bp, Artificial Sequence
  Synthetic
gctgtaaattcuggcttataaggtgtuc

SEQ ID NO: 76528 - DNA, 24 bp, Artificial Sequence
  Synthetic
cuaaggagaagattucccacagca

SEQ ID NO: 76529 - DNA, 23 bp, Artificial Sequence
  Synthetic
gttttcaugcccttctgcucaag

SEQ ID NO: 76530 - DNA, 32 bp, Artificial Sequence; identical to SEQ ID NO: 4488
  Synthetic

SEQ ID NO: 76531 - DNA, 26 bp, Artificial Sequence
  Synthetic
tgacaccucgacatttgaaucagaag

SEQ ID NO: 76532 - DNA, 25 bp, Artificial Sequence
  Synthetic
gttttgattucaccctctcctcuct

SEQ ID NO: 76533 - DNA, 22 bp, Artificial Sequence
  Synthetic
gtaguagagcccacaggcatug

SEQ ID NO: 76534 - DNA, 22 bp, Artificial Sequence
  Synthetic
cactgctuaaaggaagcgctut

SEQ ID NO: 76535 - DNA, 23 bp, Artificial Sequence
  Synthetic
gcccaagaggcugtagtugaaat

SEQ ID NO: 76536 - DNA, 20 bp, Artificial Sequence
  Synthetic
ctgactgcugtgacccacuc

SEQ ID NO: 76537 - DNA, 20 bp, Artificial Sequence
  Synthetic
ttgcacttguccacgcatuc

SEQ ID NO: 76538 - DNA, 23 bp, Artificial Sequence
  Synthetic
atgatccuctctctucccccaat

SEQ ID NO: 76539 - DNA, 25 bp, Artificial Sequence
  Synthetic
ctgagccacauagactacatccauc

SEQ ID NO: 76540 - DNA, 21 bp, Artificial Sequence
  Synthetic
cgtctctugccggaatgucag

SEQ ID NO: 76541 - DNA, 28 bp, Artificial Sequence
  Synthetic
acagaatgccugtaaagctauaacaaca

SEQ ID NO: 76542 - DNA, 22 bp, Artificial Sequence
  Synthetic
ctctggaggaggaaugccaaug

SEQ ID NO: 76543 - DNA, 21 bp, Artificial Sequence
  Synthetic
tttgctggucaccaucaggaa

SEQ ID NO: 76544 - DNA, 21 bp, Artificial Sequence
  Synthetic
ggccgcuagctttucagacat

SEQ ID NO: 76545 - DNA, 21 bp, Artificial Sequence
  Synthetic
gaggctugagcaaaugaggga

SEQ ID NO: 76546 - DNA, 24 bp, Artificial Sequence
  Synthetic
tccatttcugaaacaggcatguca

SEQ ID NO: 76547 - DNA, 24 bp, Artificial Sequence
  Synthetic
tgatgcucatgtctttuccaccag

SEQ ID NO: 76548 - DNA, 26 bp, Artificial Sequence
  Synthetic
cgaaagttgugtaactgtgtttucca

SEQ ID NO: 76549 - DNA, 25 bp, Artificial Sequence
  Synthetic
agtgtaagtgugaacaccacaauct

SEQ ID NO: 76550 - DNA, 21 bp, Artificial Sequence
  Synthetic
cagaaagcaccgaugctcuga

SEQ ID NO: 76551 - DNA, 28 bp, Artificial Sequence
  Synthetic
caaatgcttuggaagaagtctctatuga

SEQ ID NO: 76552 - DNA, 29 bp, Artificial Sequence
  Synthetic
aaggttccaatugctcttttgtttacauc

SEQ ID NO: 76553 - DNA, 28 bp, Artificial Sequence
  Synthetic
aattgtctgagaaggaucgaatgcttua

SEQ ID NO: 76554 - DNA, 24 bp, Artificial Sequence
  Synthetic
tutagaattctcugcagcacccaa

SEQ ID NO: 76555 - DNA, 22 bp, Artificial Sequence
  Synthetic
acagggcccaguaaatctcuca

SEQ ID NO: 76556 - DNA, 28 bp, Artificial Sequence
  Synthetic
caggtaagctgugtgatattaaccgtua

SEQ ID NO: 76557 - DNA, 25 bp, Artificial Sequence
  Synthetic
tgagcacatgucaagagcaaatcut

SEQ ID NO: 76558 - DNA, 27 bp, Artificial Sequence
  Synthetic
gggttctttatcuctctctctttcuca

SEQ ID NO: 76559 - DNA, 26 bp, Artificial Sequence
  Synthetic
ccacacagctauctcataaggtcuca

SEQ ID NO: 76560 - DNA, 27 bp, Artificial Sequence
  Synthetic
tttggagacaaaaccuattcacagcua

SEQ ID NO: 76561 - DNA, 24 bp, Artificial Sequence
  Synthetic
gttccagaacucctcggttatuct

SEQ ID NO: 76562 - DNA, 22 bp, Artificial Sequence
  Synthetic
catgaagccagccucaattguc

SEQ ID NO: 76563 - DNA, 28 bp, Artificial Sequence
  Synthetic
actaggatgatuggagtgttgtgtttut

SEQ ID NO: 76564 - DNA, 19 bp, Artificial Sequence
  Synthetic
tccacacccccucuaggac

SEQ ID NO: 76565 - DNA, 22 bp, Artificial Sequence
  Synthetic
gctgugggaagaugccagaaaa

SEQ ID NO: 76566 - DNA, 24 bp, Artificial Sequence
  Synthetic
gccaccugaatacaggttaucagt

SEQ ID NO: 76567 - DNA, 23 bp, Artificial Sequence
  Synthetic
catctattgcuggcaccatcuga

SEQ ID NO: 76568 - DNA, 27 bp, Artificial Sequence
  Synthetic
cagtacguaccagcgatgaatctttua

SEQ ID NO: 76569 - DNA, 25 bp, Artificial Sequence
  Synthetic
aggaagaagatutctctccccaugt

SEQ ID NO: 76570 - DNA, 27 bp, Artificial Sequence
  Synthetic
ctcacaatgacagucacctgataucaa

SEQ ID NO: 76571 - DNA, 25 bp, Artificial Sequence
  Synthetic
cggtgtgggaguattagattggaug

SEQ ID NO: 76572 - DNA, 21 bp, Artificial Sequence
  Synthetic
gtcttgccacacauccctuca

SEQ ID NO: 76573 - DNA, 28 bp, Artificial Sequence
  Synthetic
gttaataatcacaucctgcttcacucac

SEQ ID NO: 76574 - DNA, 25 bp, Artificial Sequence
  Synthetic
agtcgactagaugggaatacaugat

SEQ ID NO: 76575 - DNA, 24 bp, Artificial Sequence
  Synthetic
ttttuccagaaccgaauggaggaa

SEQ ID NO: 76576 - DNA, 21 bp, Artificial Sequence
  Synthetic
ccagaggcagacuacagcuga

SEQ ID NO: 76577 - DNA, 27 bp, Artificial Sequence
  Synthetic
gtgaccatgaugagaagtcucacaaat

SEQ ID NO: 76578 - DNA, 30 bp, Artificial Sequence
  Synthetic
acatgaacagaaacutgaaacaaaatucca

SEQ ID NO: 76579 - DNA, 24 bp, Artificial Sequence
  Synthetic
gtcttuaagcacagctcccugaat

SEQ ID NO: 76580 - DNA, 28 bp, Artificial Sequence
  Synthetic
gagacacaaatagutggcaaattgaugt

SEQ ID NO: 76581 - DNA, 22 bp, Artificial Sequence
  Synthetic
tttggaaagagggcucagaguc

SEQ ID NO: 76582 - DNA, 28 bp, Artificial Sequence
  Synthetic
ggtattcctccacutacctgttttguaa

SEQ ID NO: 76583 - DNA, 21 bp, Artificial Sequence
  Synthetic
cagggacagugtacgaagcug

SEQ ID NO: 76584 - DNA, 28 bp, Artificial Sequence
  Synthetic
tgaattcatttttcugcacaggatctut

SEQ ID NO: 76585 - DNA, 25 bp, Artificial Sequence
  Synthetic
ttctgtaguctactttguccccagt

SEQ ID NO: 76586 - DNA, 22 bp, Artificial Sequence
  Synthetic
gcagtatggcagutccttggut

SEQ ID NO: 76587 - DNA, 21 bp, Artificial Sequence
  Synthetic
cctgaggugttttuggaggca

SEQ ID NO: 76588 - DNA, 28 bp, Artificial Sequence
  Synthetic
ataatccautgcctgtcuaaagaacact

SEQ ID NO: 76589 - DNA, 22 bp, Artificial Sequence
  Synthetic
ttgcagaauggtcgatguaggg

SEQ ID NO: 76590 - DNA, 20 bp, Artificial Sequence
  Synthetic
ggtggcccaaaguaaagcug

SEQ ID NO: 76591 - DNA, 26 bp, Artificial Sequence
  Synthetic
ttctgcccautcatcttgtgauagag

SEQ ID NO: 76592 - DNA, 24 bp, Artificial Sequence
  Synthetic
aagcagauacatccactuccacag

SEQ ID NO: 76593 - DNA, 26 bp, Artificial Sequence
  Synthetic
ccttagaccugcagttttcatgaaut

SEQ ID NO: 76594 - DNA, 23 bp, Artificial Sequence
  Synthetic
caggtatugcagttctguaggca

SEQ ID NO: 76595 - DNA, 21 bp, Artificial Sequence
  Synthetic
ccacuttctcugccaccaagt

SEQ ID NO: 76596 - DNA, 21 bp, Artificial Sequence
  Synthetic
acaggccacuacctaugcaac

SEQ ID NO: 76597 - DNA, 28 bp, Artificial Sequence
  Synthetic
tcctatataaugggaagatgtggctuct

SEQ ID NO: 76598 - DNA, 20 bp, Artificial Sequence
  Synthetic
ggcccuccccttctccatua

SEQ ID NO: 76599 - DNA, 23 bp, Artificial Sequence
  Synthetic
actcttccutgcttcucacacag

SEQ ID NO: 76600 - DNA, 22 bp, Artificial Sequence
  Synthetic
ccgtctctuccactgaaagugt

SEQ ID NO: 76601 - DNA, 22 bp, Artificial Sequence
  Synthetic
agtttgtuccaggctgttcucc

SEQ ID NO: 76602 - DNA, 20 bp, Artificial Sequence
  Synthetic
cctgccuggatcagtgcuac

SEQ ID NO: 76603 - DNA, 21 bp, Artificial Sequence
  Synthetic
ggtggcucatgccttucaaga

SEQ ID NO: 76604 - DNA, 28 bp, Artificial Sequence
  Synthetic
ttcatatttgttttugatgtccccctug

SEQ ID NO: 76605 - DNA, 25 bp, Artificial Sequence
  Synthetic
acgtcgatcgucctcaattcauaag

SEQ ID NO: 76606 - DNA, 28 bp, Artificial Sequence
  Synthetic
gtgctggagucattaactuagaagagaa

SEQ ID NO: 76607 - DNA, 23 bp, Artificial Sequence
  Synthetic
agacgctgatucagcatactgug

SEQ ID NO: 76608 - DNA, 28 bp, Artificial Sequence
  Synthetic
cattaagagguagaacacagtatgcuga

SEQ ID NO: 76609 - DNA, 28 bp, Artificial Sequence
  Synthetic
aagtctggttucatgttgtctcuacaaa

SEQ ID NO: 76610 - DNA, 21 bp, Artificial Sequence
  Synthetic
gctactguccccauagggaga

SEQ ID NO: 76611 - DNA, 28 bp, Artificial Sequence
  Synthetic
caccacttcagautactcagttcactua

SEQ ID NO: 76612 - DNA, 22 bp, Artificial Sequence
  Synthetic
cttttagcaggguggagagugt

SEQ ID NO: 76613 - DNA, 23 bp, Artificial Sequence
  Synthetic
ctttcccuttgtagagucagcgt

SEQ ID NO: 76614 - DNA, 23 bp, Artificial Sequence
  Synthetic
tggtgtuggcttttattcugcct

SEQ ID NO: 76615 - DNA, 28 bp, Artificial Sequence
  Synthetic
ccaactacctugtaacagaaaagcuaac

SEQ ID NO: 76616 - DNA, 27 bp, Artificial Sequence
  Synthetic
ggtgaagtcutgtaatcaacucaagca

SEQ ID NO: 76617 - DNA, 27 bp, Artificial Sequence
  Synthetic
ccttttgctaagautccacacttucct

SEQ ID NO: 76618 - DNA, 20 bp, Artificial Sequence
  Synthetic
gagaguaccccugcaggaga

SEQ ID NO: 76619 - DNA, 20 bp, Artificial Sequence
  Synthetic
tcccacugggaagcagagua

SEQ ID NO: 76620 - DNA, 20 bp, Artificial Sequence
  Synthetic
acctcuccagagcgtgtgua

SEQ ID NO: 76621 - DNA, 25 bp, Artificial Sequence
  Synthetic
agatcgaggugcctcttctattuct

SEQ ID NO: 76622 - DNA, 25 bp, Artificial Sequence
  Synthetic
gaataagcagtuctcccacactuct

SEQ ID NO: 76623 - DNA, 23 bp, Artificial Sequence
  Synthetic
ttatctcgtugcatggctctuca

SEQ ID NO: 76624 - DNA, 20 bp, Artificial Sequence
  Synthetic
gagcgcuctaggttgcugat

SEQ ID NO: 76625 - DNA, 29 bp, Artificial Sequence
  Synthetic
ctcagttgaaccuccgtatauaagaaagt

SEQ ID NO: 76626 - DNA, 21 bp, Artificial Sequence
  Synthetic
cagaagagcgagauccgagut

SEQ ID NO: 76627 - DNA, 22 bp, Artificial Sequence
  Synthetic
cctcatgaucacagcctcctuc

SEQ ID NO: 76628 - DNA, 23 bp, Artificial Sequence
  Synthetic
agccccgacuccttactttuact

SEQ ID NO: 76629 - DNA, 28 bp, Artificial Sequence
  Synthetic
caaatgacccacucagaaagagtagaut

SEQ ID NO: 76630 - DNA, 23 bp, Artificial Sequence
  Synthetic
gacttugcacacaaaacacugag

SEQ ID NO: 76631 - DNA, 22 bp, Artificial Sequence
  Synthetic
cuaccgcatguaccagaaagga

SEQ ID NO: 76632 - DNA, 28 bp, Artificial Sequence
  Synthetic
ccagatcctaauttcaaaagttguaccc

SEQ ID NO: 76633 - DNA, 23 bp, Artificial Sequence
  Synthetic
tccctgctucctcccatcatuat

SEQ ID NO: 76634 - DNA, 24 bp, Artificial Sequence
  Synthetic
gctttcaugtttcttgucagccat

SEQ ID NO: 76635 - DNA, 21 bp, Artificial Sequence
  Synthetic
ggccagaaaucacccucgaaa

SEQ ID NO: 76636 - DNA, 22 bp, Artificial Sequence
  Synthetic
gagaccttggugagcctcttua

SEQ ID NO: 76637 - DNA, 24 bp, Artificial Sequence
  Synthetic
catgcagcugaaggaaaagagtug

SEQ ID NO: 76638 - DNA, 25 bp, Artificial Sequence
  Synthetic
agttctgtctuaacatgcagggtut

SEQ ID NO: 76639 - DNA, 24 bp, Artificial Sequence
  Synthetic
ccagaggttuccaatgtagtuggg

SEQ ID NO: 76640 - DNA, 28 bp, Artificial Sequence
  Synthetic
gattaacaagugcaaaggaattgcctua

SEQ ID NO: 76641 - DNA, 25 bp, Artificial Sequence
  Synthetic
tcaaaggaaacucaatgccctuaca

SEQ ID NO: 76642 - DNA, 24 bp, Artificial Sequence
  Synthetic
cggccattaautcgagactgttuc

SEQ ID NO: 76643 - DNA, 20 bp, Artificial Sequence
  Synthetic
gagccccutctcctgctuac

SEQ ID NO: 76644 - DNA, 20 bp, Artificial Sequence
  Synthetic
ggattgguggacgtctccug

SEQ ID NO: 76645 - DNA, 24 bp, Artificial Sequence
  Synthetic
caacgcttcaugctccactactua

SEQ ID NO: 76646 - DNA, 19 bp, Artificial Sequence
  Synthetic
catgaccggcugctttguc

SEQ ID NO: 76647 - DNA, 21 bp, Artificial Sequence
  Synthetic
gaaaatgtcgucggccaugaa

SEQ ID NO: 76648 - DNA, 23 bp, Artificial Sequence
  Synthetic
tggctcccauggaaagauaaagg

SEQ ID NO: 76649 - DNA, 21 bp, Artificial Sequence
  Synthetic
acaactcgguggtcctguact

SEQ ID NO: 76650 - DNA, 24 bp, Artificial Sequence
  Synthetic
aggcttcgtgucaaactctagaug

SEQ ID NO: 76651 - DNA, 17 bp, Artificial Sequence
  Synthetic
agctgugggcacgucag

SEQ ID NO: 76652 - DNA, 19 bp, Artificial Sequence
  Synthetic
cagcgtggucgtaggugaa

SEQ ID NO: 76653 - DNA, 29 bp, Artificial Sequence
  Synthetic
tcctttctttctutagcttgagaguaacc

SEQ ID NO: 76654 - DNA, 26 bp, Artificial Sequence
  Synthetic
ttctctttcacutcctacagaugcac

SEQ ID NO: 76655 - DNA, 25 bp, Artificial Sequence
  Synthetic
tcagaaaugcaggaaagcatctuca

SEQ ID NO: 76656 - DNA, 23 bp, Artificial Sequence
  Synthetic
ctacaccugccacatggatguat

SEQ ID NO: 76657 - DNA, 20 bp, Artificial Sequence
  Synthetic
attgagugccacccuaagcc

SEQ ID NO: 76658 - DNA, 23 bp, Artificial Sequence
  Synthetic
caagcccagagaaauagcacuga

SEQ ID NO: 76659 - DNA, 25 bp, Artificial Sequence
  Synthetic
acaagucagggaagaaaacaucagg

SEQ ID NO: 76660 - DNA, 20 bp, Artificial Sequence
  Synthetic
ggtctcugcagtgucgagag

SEQ ID NO: 76661 - DNA, 27 bp, Artificial Sequence
  Synthetic
ctactaucacaaacatgcctucaacaa

SEQ ID NO: 76662 - DNA, 27 bp, Artificial Sequence
  Synthetic
aacagugaagggtatgttugaaaaagt

SEQ ID NO: 76663 - DNA, 27 bp, Artificial Sequence
  Synthetic
tggacaaucaaaacttaactccuggat

SEQ ID NO: 76664 - DNA, 27 bp, Artificial Sequence
  Synthetic
ccttcaaaaagtugggagtcaaaguat

SEQ ID NO: 76665 - DNA, 22 bp, Artificial Sequence
  Synthetic
tccagtgcauccatgaactcug

SEQ ID NO: 76666 - DNA, 19 bp, Artificial Sequence
  Synthetic
gccccacagcauggacaua

SEQ ID NO: 76667 - DNA, 20 bp, Artificial Sequence
  Synthetic
tcctggtgcugaaggactug

SEQ ID NO: 76668 - DNA, 22 bp, Artificial Sequence
  Synthetic
caatgtagcgguccaccugaat

SEQ ID NO: 76669 - DNA, 24 bp, Artificial Sequence
  Synthetic
gggaaaagauaggacttgggccua

SEQ ID NO: 76670 - DNA, 22 bp, Artificial Sequence
  Synthetic
agtccagctuctttagctgcut

SEQ ID NO: 76671 - DNA, 20 bp, Artificial Sequence
  Synthetic
ggttguaaggccctgcaaug

SEQ ID NO: 76672 - DNA, 17 bp, Artificial Sequence
  Synthetic
ggcugctctugcgaggt

SEQ ID NO: 76673 - DNA, 19 bp, Artificial Sequence
  Synthetic
ctcgttcgcuctccagcut

SEQ ID NO: 76674 - DNA, 19 bp, Artificial Sequence
  Synthetic
cgugauggccgaaccagaa

SEQ ID NO: 76675 - DNA, 24 bp, Artificial Sequence
  Synthetic
catcagauacacagacatgugcct

SEQ ID NO: 76676 - DNA, 25 bp, Artificial Sequence
  Synthetic
ggccttgguagaatcgactatggua

SEQ ID NO: 76677 - DNA, 22 bp, Artificial Sequence
  Synthetic
gggaaggcaagugugaagagaa

SEQ ID NO: 76678 - DNA, 25 bp, Artificial Sequence
  Synthetic
aaatacagagcacutcggcttaugt

SEQ ID NO: 76679 - DNA, 25 bp, Artificial Sequence
  Synthetic
aaagaaatagggcutctgacctgug

SEQ ID NO: 76680 - DNA, 22 bp, Artificial Sequence
  Synthetic
gggtgcacuaggtacctuaact

SEQ ID NO: 76681 - DNA, 29 bp, Artificial Sequence
  Synthetic
gccttttcctgucttgataattctttcug

SEQ ID NO: 76682 - DNA, 21 bp, Artificial Sequence
  Synthetic
aacattcagcugactgcucca

SEQ ID NO: 76683 - DNA, 25 bp, Artificial Sequence
  Synthetic
atgggtcaggauactctgaugaaga

SEQ ID NO: 76684 - DNA, 25 bp, Artificial Sequence
  Synthetic
catttttgtgcauctttgttgcugt

SEQ ID NO: 76685 - DNA, 24 bp, Artificial Sequence
  Synthetic
gcacgtacucaccatttgtcttug

SEQ ID NO: 76686 - DNA, 18 bp, Artificial Sequence
  Synthetic
tgtccuacgcggaccuga

SEQ ID NO: 76687 - DNA, 18 bp, Artificial Sequence
  Synthetic
gtggguacgcacctucca

SEQ ID NO: 76688 - DNA, 22 bp, Artificial Sequence
  Synthetic
gcgtgcccuacttcaaggauaa

SEQ ID NO: 76689 - DNA, 18 bp, Artificial Sequence
  Synthetic
agcgcacuccgacgaauc

SEQ ID NO: 76690 - DNA, 23 bp, Artificial Sequence
  Synthetic
gccactagauagtcctcugggat

SEQ ID NO: 76691 - DNA, 26 bp, Artificial Sequence
  Synthetic
cttaccgtccuctctttcctttguag

SEQ ID NO: 76692 - DNA, 22 bp, Artificial Sequence
  Synthetic
ccagagagcutcagccattcut

SEQ ID NO: 76693 - DNA, 22 bp, Artificial Sequence
  Synthetic
cacagaauggauaagccagcca

SEQ ID NO: 76694 - DNA, 22 bp, Artificial Sequence
  Synthetic
ggtguagcacaacagacacuca

SEQ ID NO: 76695 - DNA, 24 bp, Artificial Sequence
  Synthetic
attgtuttcctgtgauccagagca

SEQ ID NO: 76696 - DNA, 26 bp, Artificial Sequence
  Synthetic
gatcttcatcautgtggaacucagga

SEQ ID NO: 76697 - DNA, 21 bp, Artificial Sequence
  Synthetic
gcagctcugactctgacucat

SEQ ID NO: 76698 - DNA, 23 bp, Artificial Sequence
  Synthetic
caaatgcccautgactgttgcut

SEQ ID NO: 76699 - DNA, 26 bp, Artificial Sequence
  Synthetic
gttaatgcaugcctcttcctttucag

SEQ ID NO: 76700 - DNA, 22 bp, Artificial Sequence
  Synthetic
ccttacagutcgttggugcagt

SEQ ID NO: 76701 - DNA, 22 bp, Artificial Sequence
  Synthetic
gccgtgctutctccttttgtug

SEQ ID NO: 76702 - DNA, 21 bp, Artificial Sequence
  Synthetic
agcttggugaagcccctttua

SEQ ID NO: 76703 - DNA, 25 bp, Artificial Sequence
  Synthetic
ggtctgaugagctgctattgtucat

SEQ ID NO: 76704 - DNA, 27 bp, Artificial Sequence
  Synthetic
ggaccttccautcaataatgaguacac

SEQ ID NO: 76705 - DNA, 26 bp, Artificial Sequence
  Synthetic
gaagtacagcccaaugtagaguacaa

SEQ ID NO: 76706 - DNA, 24 bp, Artificial Sequence
  Synthetic
gctcagggaggutttgagugaaag

SEQ ID NO: 76707 - DNA, 24 bp, Artificial Sequence
  Synthetic
accctacttautcacccccugaag

SEQ ID NO: 76708 - DNA, 28 bp, Artificial Sequence
  Synthetic
agtaatgatgacuaaagcaagggatugt

SEQ ID NO: 76709 - DNA, 22 bp, Artificial Sequence
  Synthetic
gggattccgucatatggctugg

SEQ ID NO: 76710 - DNA, 24 bp, Artificial Sequence
  Synthetic
ctctaactgcugtacaaccugcat

SEQ ID NO: 76711 - DNA, 28 bp, Artificial Sequence
  Synthetic
gcctagtttatgcutaaacatcctggua

SEQ ID NO: 76712 - DNA, 20 bp, Artificial Sequence
  Synthetic
gggaaggaacggucaccuac

SEQ ID NO: 76713 - DNA, 22 bp, Artificial Sequence
  Synthetic
tcuctcuggacacacagaacct

SEQ ID NO: 76714 - DNA, 22 bp, Artificial Sequence
  Synthetic
gaagcctccuggacagacuaaa

SEQ ID NO: 76715 - DNA, 22 bp, Artificial Sequence
  Synthetic
caaagccacugtcaaacgtguc

SEQ ID NO: 76716 - DNA, 22 bp, Artificial Sequence
  Synthetic
accttacccucatcctgtgcua

SEQ ID NO: 76717 - DNA, 19 bp, Artificial Sequence
  Synthetic
ggtggcagcugtacaccuc

SEQ ID NO: 76718 - DNA, 24 bp, Artificial Sequence
  Synthetic
tttgggagtugatgaccttuggat

SEQ ID NO: 76719 - DNA, 20 bp, Artificial Sequence
  Synthetic
gacagacccaccagucacuc

SEQ ID NO: 76720 - DNA, 17 bp, Artificial Sequence
  Synthetic
ctggccggccuggauat

SEQ ID NO: 76721 - DNA, 19 bp, Artificial Sequence
  Synthetic
ggtccagggcucgaaagug

SEQ ID NO: 76722 - DNA, 17 bp, Artificial Sequence
  Synthetic
gagcugggacccuggag

SEQ ID NO: 76723 - DNA, 18 bp, Artificial Sequence
  Synthetic
ctugggcacaccgucaga

SEQ ID NO: 76724 - DNA, 21 bp, Artificial Sequence
  Synthetic
cucacggagcuacaagaacca

SEQ ID NO: 76725 - DNA, 22 bp, Artificial Sequence
  Synthetic
gcatcuagcacagtcactgugt

SEQ ID NO: 76726 - DNA, 20 bp, Artificial Sequence
  Synthetic
catacggccuggtgtccaut

SEQ ID NO: 76727 - DNA, 22 bp, Artificial Sequence
  Synthetic
gcatccaagagugggtcctcua

SEQ ID NO: 76728 - DNA, 18 bp, Artificial Sequence
  Synthetic
ccctggaccuggatgcug

SEQ ID NO: 76729 - DNA, 19 bp, Artificial Sequence
  Synthetic
cagtccuccccatcugcaa

SEQ ID NO: 76730 - DNA, 23 bp, Artificial Sequence
  Synthetic
ctcaaccucctcttcctcuggat

SEQ ID NO: 76731 - DNA, 24 bp, Artificial Sequence
  Synthetic
gttaugaaggaacctgcuccaaga

SEQ ID NO: 76732 - DNA, 20 bp, Artificial Sequence
  Synthetic
ccagtggguggtcattccuc

SEQ ID NO: 76733 - DNA, 21 bp, Artificial Sequence
  Synthetic
gctgcaggugtcttcacauca

SEQ ID NO: 76734 - DNA, 18 bp, Artificial Sequence
  Synthetic
agguggctgugcgaagag

SEQ ID NO: 76735 - DNA, 17 bp, Artificial Sequence
  Synthetic
cggagucgtccccugag

SEQ ID NO: 76736 - DNA, 20 bp, Artificial Sequence
  Synthetic
cgccttucgagcagtacucc

SEQ ID NO: 76737 - DNA, 21 bp, Artificial Sequence
  Synthetic
gctagggaccccucacatugt

SEQ ID NO: 76738 - DNA, 22 bp, Artificial Sequence
  Synthetic
tcctcttucaacacctcucgga

SEQ ID NO: 76739 - DNA, 27 bp, Artificial Sequence
  Synthetic
tgtttcagttucagttcctcatgtuca

SEQ ID NO: 76740 - DNA, 26 bp, Artificial Sequence
  Synthetic
acauccttaatccucacaacacgaac

SEQ ID NO: 76741 - DNA, 28 bp, Artificial Sequence
  Synthetic
gggagagaacaaugauaaagaagaagaa

SEQ ID NO: 76742 - DNA, 26 bp, Artificial Sequence
  Synthetic
gaggagctcgaaguttcatctttcut

SEQ ID NO: 76743 - DNA, 23 bp, Artificial Sequence
  Synthetic
cggctucccaataacaguagcag

SEQ ID NO: 76744 - DNA, 20 bp, Artificial Sequence
  Synthetic
tcgggccuctgagaacaauc

SEQ ID NO: 76745 - DNA, 22 bp, Artificial Sequence
  Synthetic
gctgttgauggtctgttuccac

SEQ ID NO: 76746 - DNA, 22 bp, Artificial Sequence
  Synthetic
acacccuaagaccccatcucag

SEQ ID NO: 76747 - DNA, 21 bp, Artificial Sequence
  Synthetic
tgggtccutgagcuaggaaga

SEQ ID NO: 76748 - DNA, 25 bp, Artificial Sequence
  Synthetic
tttgcagcaatuaagtgaggcatut

SEQ ID NO: 76749 - DNA, 20 bp, Artificial Sequence
  Synthetic
ggaccucagagcagccaaug

SEQ ID NO: 76750 - DNA, 26 bp, Artificial Sequence
  Synthetic
tcctttgatuccagcacattaauggt

SEQ ID NO: 76751 - DNA, 27 bp, Artificial Sequence
  Synthetic
ccctgatgtugacatttttcattucgt

SEQ ID NO: 76752 - DNA, 27 bp, Artificial Sequence
  Synthetic
tcacctgaaacauttttagccatucct

SEQ ID NO: 76753 - DNA, 21 bp, Artificial Sequence
  Synthetic
gtaccacugggcttguaccat

SEQ ID NO: 76754 - DNA, 24 bp, Artificial Sequence
  Synthetic
caaaagttgtuggtgttgcugaac

SEQ ID NO: 76755 - DNA, 31 bp, Artificial Sequence
  Synthetic
tgaaatatgccagaucatcattctttguact

SEQ ID NO: 76756 - DNA, 20 bp, Artificial Sequence
  Synthetic
gtggcuagcagccttgttug

SEQ ID NO: 76757 - DNA, 21 bp, Artificial Sequence
  Synthetic
cguggttacugggaggaagag

SEQ ID NO: 76758 - DNA, 22 bp, Artificial Sequence
  Synthetic
agaccutcatcuccacccagat

SEQ ID NO: 76759 - DNA, 19 bp, Artificial Sequence
  Synthetic
ggcacagcuguccaggaag

SEQ ID NO: 76760 - DNA, 19 bp, Artificial Sequence
  Synthetic
gggaggguccagtcguagt

SEQ ID NO: 76761 - DNA, 21 bp, Artificial Sequence
  Synthetic
ccctccaggugagctcctuat

SEQ ID NO: 76762 - DNA, 22 bp, Artificial Sequence
  Synthetic
ctgcactacucctccctaucca

SEQ ID NO: 76763 - DNA, 21 bp, Artificial Sequence
  Synthetic
agtcccuccccaatugcaaag

SEQ ID NO: 76764 - DNA, 19 bp, Artificial Sequence
  Synthetic
cgggtcauggcctucacac

SEQ ID NO: 76765 - DNA, 20 bp, Artificial Sequence
  Synthetic
gaactcccugccgttctuca

SEQ ID NO: 76766 - DNA, 19 bp, Artificial Sequence
  Synthetic
aaccccacuccctccauct

SEQ ID NO: 76767 - DNA, 17 bp, Artificial Sequence
  Synthetic
gugagugagcggaggca

SEQ ID NO: 76768 - DNA, 22 bp, Artificial Sequence
  Synthetic
gcaugaaagcagugggaaccat

SEQ ID NO: 76769 - DNA, 24 bp, Artificial Sequence
  Synthetic
gagactaattucaagccctuggga

SEQ ID NO: 76770 - DNA, 20 bp, Artificial Sequence
  Synthetic
cggaacagtucaccccagua

SEQ ID NO: 76771 - DNA, 29 bp, Artificial Sequence
  Synthetic
ctggacaacaaacuaattagcactttuca

SEQ ID NO: 76772 - DNA, 23 bp, Artificial Sequence
  Synthetic
gggaaggagagaugagtccagua

SEQ ID NO: 76773 - DNA, 20 bp, Artificial Sequence
  Synthetic
cccatgucatcgtccuccag

SEQ ID NO: 76774 - DNA, 17 bp, Artificial Sequence
  Synthetic
tcuccgggcuacagcct

SEQ ID NO: 76775 - DNA, 17 bp, Artificial Sequence
  Synthetic
gcgctgcucagctguct

SEQ ID NO: 76776 - DNA, 17 bp, Artificial Sequence
  Synthetic
accccggugtcccagua

SEQ ID NO: 76777 - DNA, 20 bp, Artificial Sequence
  Synthetic
gaagtggutgtctccuggct

SEQ ID NO: 76778 - DNA, 19 bp, Artificial Sequence
  Synthetic
gcacctuctaccgcucact

SEQ ID NO: 76779 - DNA, 17 bp, Artificial Sequence
  Synthetic
gugugaccgagggcact

SEQ ID NO: 76780 - DNA, 28 bp, Artificial Sequence
  Synthetic
aatagcaaaggucaattucagcaaacat

SEQ ID NO: 76781 - DNA, 25 bp, Artificial Sequence
  Synthetic
tcttcttuccaccttgtucacaaca

SEQ ID NO: 76782 - DNA, 27 bp, Artificial Sequence
  Synthetic
agcattagauacacacctaacgttcug

SEQ ID NO: 76783 - DNA, 25 bp, Artificial Sequence
  Synthetic
agagcagcgcauatcattattuggt

SEQ ID NO: 76784 - DNA, 21 bp, Artificial Sequence
  Synthetic
tcutcagcucacagggaacct

SEQ ID NO: 76785 - DNA, 20 bp, Artificial Sequence
  Synthetic
catctuaccaggcagucgct

SEQ ID NO: 76786 - DNA, 19 bp, Artificial Sequence
  Synthetic
ccagugactgcugccacaa

SEQ ID NO: 76787 - DNA, 21 bp, Artificial Sequence
  Synthetic
cuaattgacagcucccccaca

SEQ ID NO: 76788 - DNA, 20 bp, Artificial Sequence
  Synthetic
ggaccugcaggactuccaac

SEQ ID NO: 76789 - DNA, 21 bp, Artificial Sequence
  Synthetic
gcgatcucgcgatcagtgtut

SEQ ID NO: 76790 - DNA, 19 bp, Artificial Sequence
  Synthetic
guggacacagucagccaga

SEQ ID NO: 76791 - DNA, 19 bp, Artificial Sequence
  Synthetic
catccccuccctctgctut

SEQ ID NO: 76792 - DNA, 20 bp, Artificial Sequence
  Synthetic
tgtaguccccgccttgttuc

SEQ ID NO: 76793 - DNA, 20 bp, Artificial Sequence
  Synthetic
gggactccugctcctctugt

SEQ ID NO: 76794 - DNA, 20 bp, Artificial Sequence
  Synthetic
cggctcctuccgctaaacuc

SEQ ID NO: 76795 - DNA, 28 bp, Artificial Sequence
  Synthetic
gcttggagaccaugatgtccataaauaa

SEQ ID NO: 76796 - DNA, 19 bp, Artificial Sequence
  Synthetic
cucccctctuccacgaagt

SEQ ID NO: 76797 - DNA, 21 bp, Artificial Sequence
  Synthetic
cccaccuacccctcctatgug

SEQ ID NO: 76798 - DNA, 22 bp, Artificial Sequence
  Synthetic
gagautgtatuacgccccagga

SEQ ID NO: 76799 - DNA, 25 bp, Artificial Sequence
  Synthetic
ccuaaaaggcggaaatatucaagca

SEQ ID NO: 76800 - DNA, 20 bp, Artificial Sequence
  Synthetic
tccutcucaagggcgacaag

SEQ ID NO: 76801 - DNA, 23 bp, Artificial Sequence
  Synthetic
ctgtcagguttaaagccuaccca

SEQ ID NO: 76802 - DNA, 21 bp, Artificial Sequence
  Synthetic
gaagagtccgcugctgtaguc

SEQ ID NO: 76803 - DNA, 20 bp, Artificial Sequence
  Synthetic
gugtcacugacggagagcat

SEQ ID NO: 76804 - DNA, 22 bp, Artificial Sequence
  Synthetic
gggactgccacuttccatctuc

SEQ ID NO: 76805 - DNA, 21 bp, Artificial Sequence
  Synthetic
gccacccaaagaagugtcucc

SEQ ID NO: 76806 - DNA, 20 bp, Artificial Sequence
  Synthetic
ggaacucaggagcucggaaa

SEQ ID NO: 76807 - DNA, 19 bp, Artificial Sequence
  Synthetic
ctcguccaccagcaucagg

SEQ ID NO: 76808 - DNA, 19 bp, Artificial Sequence
  Synthetic
cctcccugacaccctgugt

SEQ ID NO: 76809 - DNA, 18 bp, Artificial Sequence
  Synthetic
caggtucggctcccucag

SEQ ID NO: 76810 - DNA, 17 bp, Artificial Sequence
  Synthetic
gtttcgcugcggcacug

SEQ ID NO: 76811 - DNA, 18 bp, Artificial Sequence
  Synthetic
caugagcacggccacaut

SEQ ID NO: 76812 - DNA, 17 bp, Artificial Sequence
  Synthetic
ccgtggugctaggguca

SEQ ID NO: 76813 - DNA, 18 bp, Artificial Sequence
  Synthetic
ccuggaggcccactcuct

SEQ ID NO: 76814 - DNA, 18 bp, Artificial Sequence
  Synthetic
cuccagccagcccaaugt

SEQ ID NO: 76815 - DNA, 26 bp, Artificial Sequence
  Synthetic
ctttctgtatutctccatggucccaa

SEQ ID NO: 76816 - DNA, 18 bp, Artificial Sequence
  Synthetic
gguggacauggccagcaa

SEQ ID NO: 76817 - DNA, 20 bp, Artificial Sequence
  Synthetic
cctctgcugacccccatuac

SEQ ID NO: 76818 - DNA, 22 bp, Artificial Sequence
  Synthetic
cccctcctuccaaatggactua

SEQ ID NO: 76819 - DNA, 25 bp, Artificial Sequence
  Synthetic
ttccattggtuatacaggacauggg

SEQ ID NO: 76820 - DNA, 22 bp, Artificial Sequence
  Synthetic
ggtgttctgtuctctcccgtut

SEQ ID NO: 76821 - DNA, 22 bp, Artificial Sequence
  Synthetic
cattttgaacuccccgttgguc

SEQ ID NO: 76822 - DNA, 21 bp, Artificial Sequence
  Synthetic
ccaagcccucgagcagttaut

SEQ ID NO: 76823 - DNA, 28 bp, Artificial Sequence
  Synthetic
tgcaatgttagttuttccccctttcaua

SEQ ID NO: 76824 - DNA, 20 bp, Artificial Sequence
  Synthetic
caacgccagcugtaucacct

SEQ ID NO: 76825 - DNA, 24 bp, Artificial Sequence
  Synthetic
ccgtgcactutggtcataatgtut

SEQ ID NO: 76826 - DNA, 26 bp, Artificial Sequence
  Synthetic
cgggcccuccgttattactatgauaa

SEQ ID NO: 76827 - DNA, 26 bp, Artificial Sequence
  Synthetic
tgtaggagatgucagaagggtactug

SEQ ID NO: 76828 - DNA, 18 bp, Artificial Sequence
  Synthetic
cctgcuccgcacctucag

SEQ ID NO: 76829 - DNA, 19 bp, Artificial Sequence
  Synthetic
gcgugccctactucaagga

SEQ ID NO: 76830 - DNA, 21 bp, Artificial Sequence
  Synthetic
gagctgttgcugtcaccctua

SEQ ID NO: 76831 - DNA, 17 bp, Artificial Sequence
  Synthetic
cgcaagagcagcucguc

SEQ ID NO: 76832 - DNA, 17 bp, Artificial Sequence
  Synthetic
cuggaaguccccgcaca

SEQ ID NO: 76833 - DNA, 19 bp, Artificial Sequence
  Synthetic
tcagcgccgacutcaugag

SEQ ID NO: 76834 - DNA, 19 bp, Artificial Sequence
  Synthetic
cctccagcaagcucaggut

SEQ ID NO: 76835 - DNA, 19 bp, Artificial Sequence
  Synthetic
ggccggaguttagccaguc

SEQ ID NO: 76836 - DNA, 21 bp, Artificial Sequence
  Synthetic
tctcactgccugtctctggut

SEQ ID NO: 76837 - DNA, 23 bp, Artificial Sequence
  Synthetic
cctgtaugacacctgcatuccac

SEQ ID NO: 76838 - DNA, 21 bp, Artificial Sequence
  Synthetic
gccctgggaucaagaacctuc

SEQ ID NO: 76839 - DNA, 22 bp, Artificial Sequence
  Synthetic
gcattgtgucttggtggaugac

SEQ ID NO: 76840 - DNA, 19 bp, Artificial Sequence
  Synthetic
cgaccgagucgtccatgua

SEQ ID NO: 76841 - DNA, 20 bp, Artificial Sequence
  Synthetic
agtattgtgaugcggcucca

SEQ ID NO: 76842 - DNA, 17 bp, Artificial Sequence
  Synthetic
ccagcgggugcctucag

SEQ ID NO: 76843 - DNA, 17 bp, Artificial Sequence
  Synthetic
ggcctcgugaccacugt

SEQ ID NO: 76844 - DNA, 22 bp, Artificial Sequence
  Synthetic
gccccaggcagautcctttaua

SEQ ID NO: 76845 - DNA, 25 bp, Artificial Sequence
  Synthetic
cagatcagggagutcatttggugat

SEQ ID NO: 76846 - DNA, 22 bp, Artificial Sequence
  Synthetic
ctgtcacttccuccagcttcut

SEQ ID NO: 76847 - DNA, 23 bp, Artificial Sequence
  Synthetic
agctagaaggccacugatgagua

SEQ ID NO: 76848 - DNA, 24 bp, Artificial Sequence
  Synthetic
tcgcttcagcaaugcaatgataug

SEQ ID NO: 76849 - DNA, 28 bp, Artificial Sequence
  Synthetic
aaaaacaggccagcuatgaactatgaua

SEQ ID NO: 76850 - DNA, 22 bp, Artificial Sequence
  Synthetic
agagagaacuggtcagctgcua

SEQ ID NO: 76851 - DNA, 26 bp, Artificial Sequence
  Synthetic
gccttcucagcaaagagacuagagat

SEQ ID NO: 76852 - DNA, 20 bp, Artificial Sequence
  Synthetic
gcggagugaacggctaagut

SEQ ID NO: 76853 - DNA, 28 bp, Artificial Sequence
  Synthetic
ggacatttttgugggtttggaagtaaut

SEQ ID NO: 76854 - DNA, 21 bp, Artificial Sequence
  Synthetic
ccaagaacccgcaucttguca

SEQ ID NO: 76855 - DNA, 21 bp, Artificial Sequence
  Synthetic
cttacgtcugcctctgtgugt

SEQ ID NO: 76856 - DNA, 20 bp, Artificial Sequence
  Synthetic
aguagacuggcccacgaaga

SEQ ID NO: 76857 - DNA, 22 bp, Artificial Sequence
  Synthetic
gtagcaacguggagttcatgug

SEQ ID NO: 76858 - DNA, 21 bp, Artificial Sequence
  Synthetic
actctgcgugtgtctcaccua

SEQ ID NO: 76859 - DNA, 24 bp, Artificial Sequence
  Synthetic
cattttggccuccatcttcactuc

SEQ ID NO: 76860 - DNA, 20 bp, Artificial Sequence
  Synthetic
gcgggtcacugtacacctua

SEQ ID NO: 76861 - DNA, 22 bp, Artificial Sequence
  Synthetic
cctctttagccauggcaagguc

SEQ ID NO: 76862 - DNA, 21 bp, Artificial Sequence
  Synthetic
ttcctttctcucggctgcaut

SEQ ID NO: 76863 - DNA, 24 bp, Artificial Sequence
  Synthetic
ctcttcgaacutgggtaagacugg

SEQ ID NO: 76864 - DNA, 21 bp, Artificial Sequence
  Synthetic
ccattgcugagaagcagccut

SEQ ID NO: 76865 - DNA, 25 bp, Artificial Sequence
  Synthetic
tgggttcctauactgaggtccuaac

SEQ ID NO: 76866 - DNA, 27 bp, Artificial Sequence
  Synthetic
gtgtacttuccagagatgaagcacuac

SEQ ID NO: 76867 - DNA, 29 bp, Artificial Sequence
  Synthetic
ggtttaaatgtguctgaatgtagcaauga

SEQ ID NO: 76868 - DNA, 28 bp, Artificial Sequence
  Synthetic
agtgtcagctugaattaaatgaggtcut

SEQ ID NO: 76869 - DNA, 24 bp, Artificial Sequence
  Synthetic
tttccgaatuccagtagtggaugg

SEQ ID NO: 76870 - DNA, 21 bp, Artificial Sequence
  Synthetic
cctaugccaacagcagcucaa

SEQ ID NO: 76871 - DNA, 27 bp, Artificial Sequence
  Synthetic
atgagacgtguccacaatcttactuac

SEQ ID NO: 76872 - DNA, 27 bp, Artificial Sequence
  Synthetic
aaaaggcattttaugagcaaagcauga

SEQ ID NO: 76873 - DNA, 22 bp, Artificial Sequence
  Synthetic
cccccauagccatcctctcuat

SEQ ID NO: 76874 - DNA, 22 bp, Artificial Sequence
  Synthetic
acutttcugagaagcaggcgat

SEQ ID NO: 76875 - DNA, 27 bp, Artificial Sequence
  Synthetic
agaaacatgcttucctccaaagaacua

SEQ ID NO: 76876 - DNA, 26 bp, Artificial Sequence
  Synthetic
gggagatatuctgtgctatucccaaa

SEQ ID NO: 76877 - DNA, 28 bp, Artificial Sequence
  Synthetic
gctgctcttattuttgctggttttctua

SEQ ID NO: 76878 - DNA, 20 bp, Artificial Sequence
  Synthetic
cggagacugcugcaggaaac

SEQ ID NO: 76879 - DNA, 22 bp, Artificial Sequence
  Synthetic
gtctcttucaggatccgcauct

SEQ ID NO: 76880 - DNA, 18 bp, Artificial Sequence
  Synthetic
tggagccgcugacaccua

SEQ ID NO: 76881 - DNA, 17 bp, Artificial Sequence
  Synthetic
caggaccuggcccugac

SEQ ID NO: 76882 - DNA, 21 bp, Artificial Sequence
  Synthetic
gccacttgcauacaccatguc

SEQ ID NO: 76883 - DNA, 20 bp, Artificial Sequence
  Synthetic
cctcgtcuggtggaatggut

SEQ ID NO: 76884 - DNA, 25 bp, Artificial Sequence
  Synthetic
agtaattccugttcctcuccacagt

SEQ ID NO: 76885 - DNA, 20 bp, Artificial Sequence
  Synthetic
gctgacaucgtagcctugcc

SEQ ID NO: 76886 - DNA, 28 bp, Artificial Sequence
  Synthetic
ggagacagcaaaaaugcuaaaaagaaga

SEQ ID NO: 76887 - DNA, 20 bp, Artificial Sequence
  Synthetic
ctctggguggctgcatctua

SEQ ID NO: 76888 - DNA, 21 bp, Artificial Sequence
  Synthetic
cccgtguccctacuccagaat

SEQ ID NO: 76889 - DNA, 20 bp, Artificial Sequence
  Synthetic
ctcagcccacucactauggg

SEQ ID NO: 76890 - DNA, 24 bp, Artificial Sequence
  Synthetic
aatagcagcuaccatggatgtguc

SEQ ID NO: 76891 - DNA, 27 bp, Artificial Sequence
  Synthetic
tgatgctttagauaccctgcttuacac

SEQ ID NO: 76892 - DNA, 23 bp, Artificial Sequence
  Synthetic
cggcttttcuacgtggactuacc

SEQ ID NO: 76893 - DNA, 22 bp, Artificial Sequence
  Synthetic
gcccaccacacuaaacctcauc

SEQ ID NO: 76894 - DNA, 21 bp, Artificial Sequence
  Synthetic
ttgacaggucaaggcuggaag

SEQ ID NO: 76895 - DNA, 20 bp, Artificial Sequence
  Synthetic
cctgttgaugagcccagtug

SEQ ID NO: 76896 - DNA, 20 bp, Artificial Sequence
  Synthetic
actgtucccaggacgttugt

SEQ ID NO: 76897 - DNA, 25 bp, Artificial Sequence
  Synthetic
gacatcttatggugcactgaaaugg

SEQ ID NO: 76898 - DNA, 21 bp, Artificial Sequence
  Synthetic
gcctcccagcuctgaaacaua

SEQ ID NO: 76899 - DNA, 28 bp, Artificial Sequence
  Synthetic
aggcttgaucacctttauccaaaagaat

SEQ ID NO: 76900 - DNA, 19 bp, Artificial Sequence
  Synthetic
gcacaacccggguacctut

SEQ ID NO: 76901 - DNA, 28 bp, Artificial Sequence
  Synthetic
gcttattcctctuttctcctcttcauct

SEQ ID NO: 76902 - DNA, 20 bp, Artificial Sequence
  Synthetic
ggugacgggactgtuaaggg

SEQ ID NO: 76903 - DNA, 24 bp, Artificial Sequence
  Synthetic
catcagcagutccaccacttuaga

SEQ ID NO: 76904 - DNA, 17 bp, Artificial Sequence
  Synthetic
cucuggcgggaagggat

SEQ ID NO: 76905 - DNA, 18 bp, Artificial Sequence
  Synthetic
acucgtgggucccgaact

SEQ ID NO: 76906 - DNA, 25 bp, Artificial Sequence
  Synthetic
ctaaaagaggccaagguactucact

SEQ ID NO: 76907 - DNA, 25 bp, Artificial Sequence
  Synthetic
cctctaccacaucaaactgtgauga

SEQ ID NO: 76908 - DNA, 21 bp, Artificial Sequence
  Synthetic
gggacaccautagcaugacag

SEQ ID NO: 76909 - DNA, 25 bp, Artificial Sequence
  Synthetic
cgagtaatcacagcuccctttctut

SEQ ID NO: 76910 - DNA, 28 bp, Artificial Sequence
  Synthetic
tgggcaatgaugctaatgctaaatauct

SEQ ID NO: 76911 - DNA, 28 bp, Artificial Sequence
  Synthetic
gagtattcgucaaccaagaggagtttua

SEQ ID NO: 76912 - DNA, 28 bp, Artificial Sequence
  Synthetic
ccagaatcauagggatagggagauacat

SEQ ID NO: 76913 - DNA, 25 bp, Artificial Sequence
  Synthetic
ccuttgtatcugagcaccaaaaaca

SEQ ID NO: 76914 - DNA, 20 bp, Artificial Sequence
  Synthetic
ccgcccuactacggaaacuc

SEQ ID NO: 76915 - DNA, 20 bp, Artificial Sequence
  Synthetic
gggctttcgcutgacctcuc

SEQ ID NO: 76916 - DNA, 28 bp, Artificial Sequence
  Synthetic
acgcccatcatauttcttcagaatagug

SEQ ID NO: 76917 - DNA, 23 bp, Artificial Sequence
  Synthetic
tctcactggcutctcctcuacag

SEQ ID NO: 76918 - DNA, 23 bp, Artificial Sequence
  Synthetic
ggtgtaagggutcaggaggcuat

SEQ ID NO: 76919 - DNA, 23 bp, Artificial Sequence
  Synthetic
gcatttcucgggagatgtucagg

SEQ ID NO: 76920 - DNA, 19 bp, Artificial Sequence
  Synthetic
ccccgacggagucaagtut

SEQ ID NO: 76921 - DNA, 23 bp, Artificial Sequence
  Synthetic
actgagcugagattugcgaagag

SEQ ID NO: 76922 - DNA, 24 bp, Artificial Sequence
  Synthetic
gcagattttauccgtggtgtggut

SEQ ID NO: 76923 - DNA, 26 bp, Artificial Sequence
  Synthetic
cttgtaattcuccttgtcttcugcca

SEQ ID NO: 76924 - DNA, 23 bp, Artificial Sequence
  Synthetic
ccttcaggcugttcccgaauaag

SEQ ID NO: 76925 - DNA, 19 bp, Artificial Sequence
  Synthetic
cggtggacgucacgguaag

SEQ ID NO: 76926 - DNA, 21 bp, Artificial Sequence
  Synthetic
tctcctccugagctcctgaug

SEQ ID NO: 76927 - DNA, 23 bp, Artificial Sequence
  Synthetic
tgtgtugccagagaguacagaag

SEQ ID NO: 76928 - DNA, 21 bp, Artificial Sequence
  Synthetic
ccugagagagaggaggacuct

SEQ ID NO: 76929 - DNA, 28 bp, Artificial Sequence
  Synthetic
gagactgtttgtauctgtaactgtccut

SEQ ID NO: 76930 - DNA, 24 bp, Artificial Sequence
  Synthetic
ccaaagtctucacagagctaugcc

SEQ ID NO: 76931 - DNA, 23 bp, Artificial Sequence
  Synthetic
ggctttucagcagcagctttuac

SEQ ID NO: 76932 - DNA, 23 bp, Artificial Sequence
  Synthetic
agattcttucacatggcggucaa

SEQ ID NO: 76933 - DNA, 20 bp, Artificial Sequence
  Synthetic
aaucgcugagggagggaaac

SEQ ID NO: 76934 - DNA, 21 bp, Artificial Sequence
  Synthetic
gctgctguaactgctgcauct

SEQ ID NO: 76935 - DNA, 28 bp, Artificial Sequence
  Synthetic
ccatacttttaaccutccttgggaagug

SEQ ID NO: 76936 - DNA, 24 bp, Artificial Sequence
  Synthetic
gtaagugctgggtuaaagacacct

SEQ ID NO: 76937 - DNA, 20 bp, Artificial Sequence
  Synthetic
gaccccgugatccgagaaug

SEQ ID NO: 76938 - DNA, 26 bp, Artificial Sequence
  Synthetic
gccatttccutgtaattgttguaccc

SEQ ID NO: 76939 - DNA, 22 bp, Artificial Sequence
  Synthetic
tgacgatcuctcctgtctucca

SEQ ID NO: 76940 - DNA, 24 bp, Artificial Sequence
  Synthetic
tccatcaucacaggacugaaaagg

SEQ ID NO: 76941 - DNA, 22 bp, Artificial Sequence
  Synthetic
ttcactgggcugtgcttactut

SEQ ID NO: 76942 - DNA, 22 bp, Artificial Sequence
  Synthetic
tgaaggaacucacaggaagcug

SEQ ID NO: 76943 - DNA, 28 bp, Artificial Sequence
  Synthetic
cttttcttaccugccttgaactctttug

SEQ ID NO: 76944 - DNA, 27 bp, Artificial Sequence
  Synthetic
tcacaagaatucaagacaggaacacuc

SEQ ID NO: 76945 - DNA, 27 bp, Artificial Sequence
  Synthetic
actgctgttgguacaggtttaaauact

SEQ ID NO: 76946 - DNA, 22 bp, Artificial Sequence
  Synthetic
accacagtgagugcagttgtut

SEQ ID NO: 76947 - DNA, 27 bp, Artificial Sequence
  Synthetic
gctcgagataucatgagtgatuccaac

SEQ ID NO: 76948 - DNA, 23 bp, Artificial Sequence
  Synthetic
ccactttugcagcaacctttuct

SEQ ID NO: 76949 - DNA, 30 bp, Artificial Sequence; identical to SEQ ID NO: 11721
  Synthetic

SEQ ID NO: 76950 - DNA, 28 bp, Artificial Sequence
  Synthetic
ggcagcttttatucttgtcattgcauat

SEQ ID NO: 76951 - DNA, 31 bp, Artificial Sequence
  Synthetic
tgcagttagaguaacttgtaagctatuagga

SEQ ID NO: 76952 - DNA, 21 bp, Artificial Sequence
  Synthetic
ggctcatgautcagaggcuga

SEQ ID NO: 76953 - DNA, 27 bp, Artificial Sequence
  Synthetic
ctcgtccatauagctgttgtagtucat

SEQ ID NO: 76954 - DNA, 23 bp, Artificial Sequence
  Synthetic
gcctccccutcagagtttctuaa

SEQ ID NO: 76955 - DNA, 28 bp, Artificial Sequence
  Synthetic
ccatctaattgaaugagcagtggaauct

SEQ ID NO: 76956 - DNA, 21 bp, Artificial Sequence
  Synthetic
tggttcugcgcaatatcugct

SEQ ID NO: 76957 - DNA, 21 bp, Artificial Sequence
  Synthetic
gcaggcgguacucagacaaat

SEQ ID NO: 76958 - DNA, 21 bp, Artificial Sequence
  Synthetic
cagcgutagcaaaugcagcaa

SEQ ID NO: 76959 - DNA, 21 bp, Artificial Sequence
  Synthetic
ggcagccuggttctcgaatua

SEQ ID NO: 76960 - DNA, 18 bp, Artificial Sequence
  Synthetic
gcctctcuccccacugac

SEQ ID NO: 76961 - DNA, 19 bp, Artificial Sequence
  Synthetic
gtgaggcccggcuactuac

SEQ ID NO: 76962 - DNA, 19 bp, Artificial Sequence
  Synthetic
gacgaaaugggcacgtugt

SEQ ID NO: 76963 - DNA, 20 bp, Artificial Sequence
  Synthetic
caucggaggcttcuccacag

SEQ ID NO: 76964 - DNA, 27 bp, Artificial Sequence
  Synthetic
ggtgttcatgaautaaaactcctgugt

SEQ ID NO: 76965 - DNA, 21 bp, Artificial Sequence
  Synthetic
gcgagggucaaacatttccug

SEQ ID NO: 76966 - DNA, 27 bp, Artificial Sequence
  Synthetic
aatgaagcagttuggtgatttgtgtut

SEQ ID NO: 76967 - DNA, 25 bp, Artificial Sequence
  Synthetic
gttacattcautccctgtgauggga

SEQ ID NO: 76968 - DNA, 24 bp, Artificial Sequence
  Synthetic
cgaagctcccaauacaacaacugt

SEQ ID NO: 76969 - DNA, 24 bp, Artificial Sequence
  Synthetic
ctggagaugactgcctttaugacc

SEQ ID NO: 76970 - DNA, 25 bp, Artificial Sequence
  Synthetic
gaacacctaugctgtaccacatuct

SEQ ID NO: 76971 - DNA, 20 bp, Artificial Sequence
  Synthetic
cgcccagagugctgaauacc

SEQ ID NO: 76972 - DNA, 23 bp, Artificial Sequence
  Synthetic
ccagttccutcctcagacucagt

SEQ ID NO: 76973 - DNA, 28 bp, Artificial Sequence
  Synthetic
gccactctctccuataaaaacctacauc

SEQ ID NO: 76974 - DNA, 23 bp, Artificial Sequence
  Synthetic
gggtcgtuggagtatgagguaag

SEQ ID NO: 76975 - DNA, 22 bp, Artificial Sequence
  Synthetic
cgcatcctcugtgttactccug

SEQ ID NO: 76976 - DNA, 24 bp, Artificial Sequence
  Synthetic
agtccctuggtaccttcucagaaa

SEQ ID NO: 76977 - DNA, 17 bp, Artificial Sequence
  Synthetic
cggaugcccccgtgtuc

SEQ ID NO: 76978 - DNA, 20 bp, Artificial Sequence
  Synthetic
cctgaccuggtgcatcctut

SEQ ID NO: 76979 - DNA, 20 bp, Artificial Sequence
  Synthetic
gcaccugcagctcatagcuc

SEQ ID NO: 76980 - DNA, 19 bp, Artificial Sequence
  Synthetic
ccucacaacgagcccaucc

SEQ ID NO: 76981 - DNA, 19 bp, Artificial Sequence
  Synthetic
ttcagccucgaagggcaut

SEQ ID NO: 76982 - DNA, 28 bp, Artificial Sequence
  Synthetic
atcacatagcauaggaagaaaacagcut

SEQ ID NO: 76983 - DNA, 28 bp, Artificial Sequence
  Synthetic
ctgtgacataccuacctgaaaaaggtut

SEQ ID NO: 76984 - DNA, 23 bp, Artificial Sequence
  Synthetic
ctttctgugaagggctgtgtgua

SEQ ID NO: 76985 - DNA, 21 bp, Artificial Sequence
  Synthetic
catgtcaccuccccaagacut

SEQ ID NO: 76986 - DNA, 19 bp, Artificial Sequence
  Synthetic
ctggcuccagaggaggcua

SEQ ID NO: 76987 - DNA, 17 bp, Artificial Sequence
  Synthetic
ctgctgccgucgactug

SEQ ID NO: 76988 - DNA, 22 bp, Artificial Sequence
  Synthetic
caggaaaugcccagcaagagua

SEQ ID NO: 76989 - DNA, 25 bp, Artificial Sequence
  Synthetic
gcactgacatcuagggcaaaatcut

SEQ ID NO: 76990 - DNA, 19 bp, Artificial Sequence
  Synthetic
gcuacagcccacctccuga

SEQ ID NO: 76991 - DNA, 19 bp, Artificial Sequence
  Synthetic
ctggtcuggcaccacugaa

SEQ ID NO: 76992 - DNA, 22 bp, Artificial Sequence
  Synthetic
agatcttgcccuttccagcauc

SEQ ID NO: 76993 - DNA, 24 bp, Artificial Sequence
  Synthetic
ttgcccaaagacugattaccagut

SEQ ID NO: 76994 - DNA, 21 bp, Artificial Sequence
  Synthetic
tctcagagcutcgaccaugga

SEQ ID NO: 76995 - DNA, 25 bp, Artificial Sequence
  Synthetic
ctggatttgaggaugattcagguga

SEQ ID NO: 76996 - DNA, 22 bp, Artificial Sequence
  Synthetic
ccccttcctutgtctgccttua

SEQ ID NO: 76997 - DNA, 22 bp, Artificial Sequence
  Synthetic
ggttctgagacccugtgtgtug

SEQ ID NO: 76998 - DNA, 20 bp, Artificial Sequence
  Synthetic
ggcttucccgagttaucgca

SEQ ID NO: 76999 - DNA, 20 bp, Artificial Sequence
  Synthetic
ctgcugcccgtgaagtuaga

SEQ ID NO: 77000 - DNA, 24 bp, Artificial Sequence
  Synthetic
ctgcttggcaguctctgacaauat

SEQ ID NO: 77001 - DNA, 24 bp, Artificial Sequence
  Synthetic
cggtttgatacugagctgcattug

SEQ ID NO: 77002 - DNA, 20 bp, Artificial Sequence
  Synthetic
caucccaagaggctgucaga

SEQ ID NO: 77003 - DNA, 17 bp, Artificial Sequence
  Synthetic
ccgucaagcgcgatugg

SEQ ID NO: 77004 - DNA, 20 bp, Artificial Sequence
  Synthetic
cccuggagtuccgcaaagac

SEQ ID NO: 77005 - DNA, 21 bp, Artificial Sequence
  Synthetic
tccatcccagcutcacaccua

SEQ ID NO: 77006 - DNA, 20 bp, Artificial Sequence
  Synthetic
cactcccgucaacauggaca

SEQ ID NO: 77007 - DNA, 20 bp, Artificial Sequence
  Synthetic
ccccggagaggguactttuc

SEQ ID NO: 77008 - DNA, 18 bp, Artificial Sequence
  Synthetic
ctucggcccagcacucat

SEQ ID NO: 77009 - DNA, 21 bp, Artificial Sequence
  Synthetic
agcaaggtcugggacctguaa

SEQ ID NO: 77010 - DNA, 18 bp, Artificial Sequence
  Synthetic
tggaaggagccgcugaug

SEQ ID NO: 77011 - DNA, 18 bp, Artificial Sequence
  Synthetic
tcccggagucgggatcut

SEQ ID NO: 77012 - DNA, 18 bp, Artificial Sequence
  Synthetic
ggcagccucagcggauac

SEQ ID NO: 77013 - DNA, 17 bp, Artificial Sequence
  Synthetic
cgggaucggcugcgaat

SEQ ID NO: 77014 - DNA, 19 bp, Artificial Sequence
  Synthetic
gccagacgcaagauccauc

SEQ ID NO: 77015 - DNA, 17 bp, Artificial Sequence
  Synthetic
gcuggccacccctucat

SEQ ID NO: 77016 - DNA, 27 bp, Artificial Sequence
  Synthetic
tggagggaauggaaaaatucaaagaca

SEQ ID NO: 77017 - DNA, 28 bp, Artificial Sequence
  Synthetic
aggagtattccuggtcctaaagaugaaa

SEQ ID NO: 77018 - DNA, 21 bp, Artificial Sequence
  Synthetic
agaggcugcagtcaacttcuc

SEQ ID NO: 77019 - DNA, 23 bp, Artificial Sequence
  Synthetic
gctcaaatggcauagtctccuca

SEQ ID NO: 77020 - DNA, 20 bp, Artificial Sequence
  Synthetic
agacaaucccugcggacaag

SEQ ID NO: 77021 - DNA, 24 bp, Artificial Sequence
  Synthetic
ccagttaggtcutatcctggccua

SEQ ID NO: 77022 - DNA, 24 bp, Artificial Sequence
  Synthetic
ggcaacaaaacuccacaguaaagg

SEQ ID NO: 77023 - DNA, 28 bp, Artificial Sequence
  Synthetic
ccaataatcttcuccgttctctctcaut

SEQ ID NO: 77024 - DNA, 22 bp, Artificial Sequence
  Synthetic
tcagctctgcauttcacacgua

SEQ ID NO: 77025 - DNA, 23 bp, Artificial Sequence
  Synthetic
caggttctcuggagcaatacuga

SEQ ID NO: 77026 - DNA, 23 bp, Artificial Sequence
  Synthetic
ggtcacuctgaggagucaaaagt

SEQ ID NO: 77027 - DNA, 21 bp, Artificial Sequence
  Synthetic
ccaaaugtauccacggcccaa

SEQ ID NO: 77028 - DNA, 22 bp, Artificial Sequence
  Synthetic
cccatcatcacucactggctut

SEQ ID NO: 77029 - DNA, 22 bp, Artificial Sequence
  Synthetic
agcctagttgutccctccatug

SEQ ID NO: 77030 - DNA, 22 bp, Artificial Sequence
  Synthetic
gggatgguagcccaggttcaua

SEQ ID NO: 77031 - DNA, 23 bp, Artificial Sequence
  Synthetic
ccttgccagaugatgaugacgag

SEQ ID NO: 77032 - DNA, 21 bp, Artificial Sequence
  Synthetic
ccaccaagaucatgcagcuga

SEQ ID NO: 77033 - DNA, 28 bp, Artificial Sequence
  Synthetic
acttagatgaugacagagggtttaucca

SEQ ID NO: 77034 - DNA, 28 bp, Artificial Sequence
  Synthetic
gcagtttcccacagauattctaagucat

SEQ ID NO: 77035 - DNA, 20 bp, Artificial Sequence
  Synthetic
gttcctgccuggtgaccuac

SEQ ID NO: 77036 - DNA, 21 bp, Artificial Sequence
  Synthetic
ccaaccagutttacgccucct

SEQ ID NO: 77037 - DNA, 20 bp, Artificial Sequence
  Synthetic
tgctctugccggaacuacac

SEQ ID NO: 77038 - DNA, 28 bp, Artificial Sequence
  Synthetic
tctgttgttutaaaagccttuggaagac

SEQ ID NO: 77039 - DNA, 28 bp, Artificial Sequence
  Synthetic
tcactctccttautttctgcctcaatut

SEQ ID NO: 77040 - DNA, 27 bp, Artificial Sequence
  Synthetic
gggaggcacugactgaagtatuaaaag

SEQ ID NO: 77041 - DNA, 28 bp, Artificial Sequence
  Synthetic
aggactcauttgatagatttuggaagca

SEQ ID NO: 77042 - DNA, 20 bp, Artificial Sequence
  Synthetic
ggacccagaggugcugagat

SEQ ID NO: 77043 - DNA, 20 bp, Artificial Sequence
  Synthetic
gccactucttggtgtugcag

SEQ ID NO: 77044 - DNA, 24 bp, Artificial Sequence
  Synthetic
cactcttacacutacgcccaagua

SEQ ID NO: 77045 - DNA, 21 bp, Artificial Sequence
  Synthetic
gtcgtggacuggaatggguag

SEQ ID NO: 77046 - DNA, 20 bp, Artificial Sequence
  Synthetic
ggtgcucggtttuggaccat

SEQ ID NO: 77047 - DNA, 18 bp, Artificial Sequence
  Synthetic
gggctttuccgctctucc

SEQ ID NO: 77048 - DNA, 21 bp, Artificial Sequence
  Synthetic
tcaccctccutctctctccug

SEQ ID NO: 77049 - DNA, 20 bp, Artificial Sequence
  Synthetic
cgtggtggauggacgtctug

SEQ ID NO: 77050 - DNA, 21 bp, Artificial Sequence
  Synthetic
ctggaatcucagccccttcuc

SEQ ID NO: 77051 - DNA, 17 bp, Artificial Sequence
  Synthetic
gguggacagcgaugggt

SEQ ID NO: 77052 - DNA, 24 bp, Artificial Sequence
  Synthetic
gtcctgtaaggcuttggtatccug

SEQ ID NO: 77053 - DNA, 21 bp, Artificial Sequence
  Synthetic
aggcugggaagacacttctug

SEQ ID NO: 77054 - DNA, 17 bp, Artificial Sequence
  Synthetic
ccgccgaaggacgucuc

SEQ ID NO: 77055 - DNA, 19 bp, Artificial Sequence
  Synthetic
tgggacgacuccagctuca

SEQ ID NO: 77056 - DNA, 23 bp, Artificial Sequence
  Synthetic
gagaaagagugcctcaaguacca

SEQ ID NO: 77057 - DNA, 19 bp, Artificial Sequence
  Synthetic
ctgtacucgggcacguagg

SEQ ID NO: 77058 - DNA, 19 bp, Artificial Sequence
  Synthetic
ccaccccaucaccaccuac

SEQ ID NO: 77059 - DNA, 19 bp, Artificial Sequence
  Synthetic
agggaagagcuggctccua

SEQ ID NO: 77060 - DNA, 20 bp, Artificial Sequence
  Synthetic
cccaucauggcaagcacaga

SEQ ID NO: 77061 - DNA, 25 bp, Artificial Sequence
  Synthetic
cagtcagcccaucattcagatucat

SEQ ID NO: 77062 - DNA, 27 bp, Artificial Sequence
  Synthetic
caatgctgtuaacaagatttggcctua

SEQ ID NO: 77063 - DNA, 22 bp, Artificial Sequence
  Synthetic
acaucaaaguggacgaacgact

SEQ ID NO: 77064 - DNA, 22 bp, Artificial Sequence
  Synthetic
catgacacaugaggtggctcut

SEQ ID NO: 77065 - DNA, 28 bp, Artificial Sequence
  Synthetic
atctaagtcaautacaggaaacauggct

SEQ ID NO: 77066 - DNA, 21 bp, Artificial Sequence
  Synthetic
ctcctgucaacaccauggagt

SEQ ID NO: 77067 - DNA, 22 bp, Artificial Sequence
  Synthetic
tgcttgttuggcttgtgttcug

SEQ ID NO: 77068 - DNA, 28 bp, Artificial Sequence
  Synthetic
ccccgtctttguaatattctctctcuct

SEQ ID NO: 77069 - DNA, 21 bp, Artificial Sequence
  Synthetic
cttggaaugagggacggtuct

SEQ ID NO: 77070 - DNA, 17 bp, Artificial Sequence
  Synthetic
gacggtuccccggtgut

SEQ ID NO: 77071 - DNA, 17 bp, Artificial Sequence
  Synthetic
gctccggcuctcctucc

SEQ ID NO: 77072 - DNA, 18 bp, Artificial Sequence
  Synthetic
ccagagucaggtgugcga

SEQ ID NO: 77073 - DNA, 17 bp, Artificial Sequence
  Synthetic
ctuggcccggctctugt

SEQ ID NO: 77074 - DNA, 28 bp, Artificial Sequence
  Synthetic
tttgtcttctcuagcaattttgacugga

SEQ ID NO: 77075 - DNA, 26 bp, Artificial Sequence
  Synthetic
ctttctatggagcugggatcaatcug

SEQ ID NO: 77076 - DNA, 28 bp, Artificial Sequence
  Synthetic
accugtagacctagtuaccaaaagacaa

SEQ ID NO: 77077 - DNA, 27 bp, Artificial Sequence
  Synthetic
tgcaacgttcugactacttgaauacat

SEQ ID NO: 77078 - DNA, 28 bp, Artificial Sequence
  Synthetic
cctgagctagtutgatcttcaagtttuc

SEQ ID NO: 77079 - DNA, 28 bp, Artificial Sequence
  Synthetic
atttctaggacttuaccactacctgcua

SEQ ID NO: 77080 - DNA, 22 bp, Artificial Sequence
  Synthetic
agctgcuggagaagagauacga

SEQ ID NO: 77081 - DNA, 22 bp, Artificial Sequence
  Synthetic
ggtcttguagggaggaccugag

SEQ ID NO: 77082 - DNA, 22 bp, Artificial Sequence
  Synthetic
ccccaaccuaagcactgtuagt

SEQ ID NO: 77083 - DNA, 24 bp, Artificial Sequence
  Synthetic
ctgattctgcuggttctttgctug

SEQ ID NO: 77084 - DNA, 21 bp, Artificial Sequence
  Synthetic
tgaacttcgaauggcgaucgt

SEQ ID NO: 77085 - DNA, 22 bp, Artificial Sequence
  Synthetic
catguccaagaggacaguagca

SEQ ID NO: 77086 - DNA, 25 bp, Artificial Sequence
  Synthetic
tcaaguaaatcagaugccgacacaa

SEQ ID NO: 77087 - DNA, 28 bp, Artificial Sequence
  Synthetic
tcatttacugacacaaccaataccaugt

SEQ ID NO: 77088 - DNA, 20 bp, Artificial Sequence
  Synthetic
ggtcagcacugtacctcugg

SEQ ID NO: 77089 - DNA, 20 bp, Artificial Sequence
  Synthetic
aggagtguctgtgcccuaca

SEQ ID NO: 77090 - DNA, 26 bp, Artificial Sequence
  Synthetic
tcttcagcuaatttttctgcauccct

SEQ ID NO: 77091 - DNA, 22 bp, Artificial Sequence
  Synthetic
tcggcaacagcuatcaccttuc

SEQ ID NO: 77092 - DNA, 25 bp, Artificial Sequence
  Synthetic
agttccucaaaagagaaaucacgca

SEQ ID NO: 77093 - DNA, 28 bp, Artificial Sequence
  Synthetic
gctaaggcauaggaattttcgtaguaca

SEQ ID NO: 77094 - DNA, 21 bp, Artificial Sequence
  Synthetic
cactggtgcgaucccacaaua

SEQ ID NO: 77095 - DNA, 29 bp, Artificial Sequence
  Synthetic
tggacagaaggccutataacattagttuc

SEQ ID NO: 77096 - DNA, 23 bp, Artificial Sequence
  Synthetic
cttctggaautgtgctagtuggg

SEQ ID NO: 77097 - DNA, 23 bp, Artificial Sequence
  Synthetic
ctaacaacgccutctcuccacat

SEQ ID NO: 77098 - DNA, 27 bp, Artificial Sequence
  Synthetic
caaccutatgattcaucaggagagcat

SEQ ID NO: 77099 - DNA, 27 bp, Artificial Sequence
  Synthetic
agggttgttaguggagcatatgattut

SEQ ID NO: 77100 - DNA, 21 bp, Artificial Sequence
  Synthetic
gggccttucagtgagauacct

SEQ ID NO: 77101 - DNA, 28 bp, Artificial Sequence
  Synthetic
catatctttgttcuctgctcttagcuct

SEQ ID NO: 77102 - DNA, 22 bp, Artificial Sequence
  Synthetic
cttgcattautggttgguggca

SEQ ID NO: 77103 - DNA, 28 bp, Artificial Sequence
  Synthetic
gctggtcttcuagcatatagctgaguaa

SEQ ID NO: 77104 - DNA, 28 bp, Artificial Sequence
  Synthetic
gaaaacctgcagaucatcagaggaaaua

SEQ ID NO: 77105 - DNA, 23 bp, Artificial Sequence
  Synthetic
ctgctguctgcatttaugaaccc

SEQ ID NO: 77106 - DNA, 23 bp, Artificial Sequence
  Synthetic
tctggaucccacaccttuaccat

SEQ ID NO: 77107 - DNA, 21 bp, Artificial Sequence
  Synthetic
tctgcagagutgttagcggut

SEQ ID NO: 77108 - DNA, 20 bp, Artificial Sequence
  Synthetic
catctccuccgagccugaaa

SEQ ID NO: 77109 - DNA, 29 bp, Artificial Sequence
  Synthetic
gctgttttctcucggatctccaaattuaa

SEQ ID NO: 77110 - DNA, 21 bp, Artificial Sequence
  Synthetic
tggtttccccaauccacccua

SEQ ID NO: 77111 - DNA, 21 bp, Artificial Sequence
  Synthetic
ggtcuccaggagctgaucaca

SEQ ID NO: 77112 - DNA, 20 bp, Artificial Sequence
  Synthetic
cagggacguctccuggagat

SEQ ID NO: 77113 - DNA, 23 bp, Artificial Sequence
  Synthetic
gaactttucaagctgcugaagga

SEQ ID NO: 77114 - DNA, 21 bp, Artificial Sequence
  Synthetic
gcagttacugggcttguccat

SEQ ID NO: 77115 - DNA, 20 bp, Artificial Sequence
  Synthetic
gaggcggagaagcucuaaca

SEQ ID NO: 77116 - DNA, 17 bp, Artificial Sequence
  Synthetic
gagctcuggctcuggca

SEQ ID NO: 77117 - DNA, 21 bp, Artificial Sequence
  Synthetic
agacguccctgacctuacagt

SEQ ID NO: 77118 - DNA, 20 bp, Artificial Sequence
  Synthetic
gcttagugccttgtcugggt

SEQ ID NO: 77119 - DNA, 22 bp, Artificial Sequence
  Synthetic
ccagactcaugccctctctcut

SEQ ID NO: 77120 - DNA, 20 bp, Artificial Sequence
  Synthetic
cagcaugagctcccauccat

SEQ ID NO: 77121 - DNA, 26 bp, Artificial Sequence
  Synthetic
atctggtttcutccttcttcucacag

SEQ ID NO: 77122 - DNA, 27 bp, Artificial Sequence
  Synthetic
agcacactgucactatttcagtaacuc

SEQ ID NO: 77123 - DNA, 28 bp, Artificial Sequence
  Synthetic
agagactggagaaugtatacacacctua

SEQ ID NO: 77124 - DNA, 27 bp, Artificial Sequence
  Synthetic
gcttaattcuaccttgtagccuccaat

SEQ ID NO: 77125 - DNA, 21 bp, Artificial Sequence
  Synthetic
cggccaacacugtcaagttuc

SEQ ID NO: 77126 - DNA, 20 bp, Artificial Sequence
  Synthetic
gcatggtuggcattgggtuc

SEQ ID NO: 77127 - DNA, 23 bp, Artificial Sequence
  Synthetic
gggaagctguccatcagtauaca

SEQ ID NO: 77128 - DNA, 22 bp, Artificial Sequence
  Synthetic
gcacagtggaaguatgcccaua

SEQ ID NO: 77129 - DNA, 28 bp, Artificial Sequence
  Synthetic
cttaagtgtttutccagtgtcugagaac

SEQ ID NO: 77130 - DNA, 24 bp, Artificial Sequence
  Synthetic
actccacctguatgtcccacuaat

SEQ ID NO: 77131 - DNA, 29 bp, Artificial Sequence
  Synthetic
ggaugtaatattttcugaagagccaaaca

SEQ ID NO: 77132 - DNA, 22 bp, Artificial Sequence
  Synthetic
gagtgtgcaaaucccccatcua

SEQ ID NO: 77133 - DNA, 21 bp, Artificial Sequence
  Synthetic
gggtcggucatcgtcuacaag

SEQ ID NO: 77134 - DNA, 23 bp, Artificial Sequence
  Synthetic
cgtcaauggaacaaacccaucac

SEQ ID NO: 77135 - DNA, 17 bp, Artificial Sequence
  Synthetic
tcagccuggaccgguca

SEQ ID NO: 77136 - DNA, 22 bp, Artificial Sequence
  Synthetic
agcatgggugcagacaacatua

SEQ ID NO: 77137 - DNA, 24 bp, Artificial Sequence
  Synthetic
gctcuagacaacaaaccttgugga

SEQ ID NO: 77138 - DNA, 22 bp, Artificial Sequence
  Synthetic
ctatttcagccccacuctgcut

SEQ ID NO: 77139 - DNA, 21 bp, Artificial Sequence
  Synthetic
cgggtcuccattgtcuagcac

SEQ ID NO: 77140 - DNA, 26 bp, Artificial Sequence
  Synthetic
tcactcttctuggtaccactctucat

SEQ ID NO: 77141 - DNA, 21 bp, Artificial Sequence
  Synthetic
ctaacacccugttcgcacuga

SEQ ID NO: 77142 - DNA, 23 bp, Artificial Sequence
  Synthetic
ccctatgcuctgacaaggguact

SEQ ID NO: 77143 - DNA, 28 bp, Artificial Sequence
  Synthetic
gtgcaactgaaagcugtgattctttaua

SEQ ID NO: 77144 - DNA, 22 bp, Artificial Sequence
  Synthetic
ccaaatgcuggtaacactgugg

SEQ ID NO: 77145 - DNA, 28 bp, Artificial Sequence
  Synthetic
agtggaacuggaagagtgaaaaaguaag

SEQ ID NO: 77146 - DNA, 23 bp, Artificial Sequence
  Synthetic
agctcttugaggacaactaugcc

SEQ ID NO: 77147 - DNA, 25 bp, Artificial Sequence
  Synthetic
tggtcagcuctgaauaaccaagaga

SEQ ID NO: 77148 - DNA, 18 bp, Artificial Sequence
  Synthetic
gtcccugcatccucgcat

SEQ ID NO: 77149 - DNA, 17 bp, Artificial Sequence
  Synthetic
gcctgcagutcgctugt

SEQ ID NO: 77150 - DNA, 20 bp, Artificial Sequence
  Synthetic
ggtcgcgguttgtctctcut

SEQ ID NO: 77151 - DNA, 19 bp, Artificial Sequence
  Synthetic
agacuaagcgccucagggt

SEQ ID NO: 77152 - DNA, 28 bp, Artificial Sequence
  Synthetic
ggaaaatctuaggagatacagggaaugg

SEQ ID NO: 77153 - DNA, 20 bp, Artificial Sequence
  Synthetic
tcgutctgtuccagccgaaa

SEQ ID NO: 77154 - DNA, 23 bp, Artificial Sequence
  Synthetic
gcatgcatattutgtcagcggua

SEQ ID NO: 77155 - DNA, 25 bp, Artificial Sequence
  Synthetic
acccttcaucctgaactuaggagaa

SEQ ID NO: 77156 - DNA, 18 bp, Artificial Sequence
  Synthetic
gctcugcacgcgtgtgua

SEQ ID NO: 77157 - DNA, 19 bp, Artificial Sequence
  Synthetic
tccctcacccaugcccuat

SEQ ID NO: 77158 - DNA, 17 bp, Artificial Sequence
  Synthetic
ctugccgggcuggaagt

SEQ ID NO: 77159 - DNA, 19 bp, Artificial Sequence
  Synthetic
cgcaagggcaacuacugga

SEQ ID NO: 77160 - DNA, 18 bp, Artificial Sequence
  Synthetic
gcggccacgagutgtuga

SEQ ID NO: 77161 - DNA, 19 bp, Artificial Sequence
  Synthetic
cgcaugaagaggccctucc

SEQ ID NO: 77162 - DNA, 28 bp, Artificial Sequence
  Synthetic
acagagactccuagttagaccactttut

SEQ ID NO: 77163 - DNA, 25 bp, Artificial Sequence
  Synthetic
gctgtaaaguacgacuaccacaagt

SEQ ID NO: 77164 - DNA, 24 bp, Artificial Sequence
  Synthetic
aaaagaaactccuacgtggtgugt

SEQ ID NO: 77165 - DNA, 22 bp, Artificial Sequence
  Synthetic
ggctttggcugtggtcaactua

SEQ ID NO: 77166 - DNA, 22 bp, Artificial Sequence
  Synthetic
gctatcctgacuctgccccuaa

SEQ ID NO: 77167 - DNA, 22 bp, Artificial Sequence
  Synthetic
cagcaucaaccacacauaccag

SEQ ID NO: 77168 - DNA, 22 bp, Artificial Sequence
  Synthetic
ccttcucgaacatgtctucgca

SEQ ID NO: 77169 - DNA, 20 bp, Artificial Sequence
  Synthetic
tcgcgaagutcccgttcuac

SEQ ID NO: 77170 - DNA, 24 bp, Artificial Sequence
  Synthetic
ttgccagcccutcttattcttcuc

SEQ ID NO: 77171 - DNA, 18 bp, Artificial Sequence
  Synthetic
gcagaagcccccguacuc

SEQ ID NO: 77172 - DNA, 20 bp, Artificial Sequence
  Synthetic
caggtcaguggatccccuct

SEQ ID NO: 77173 - DNA, 24 bp, Artificial Sequence
  Synthetic
caatggaacuatccggaacaucct

SEQ ID NO: 77174 - DNA, 26 bp, Artificial Sequence
  Synthetic
ttgggatguctgattattcugaacgg

SEQ ID NO: 77175 - DNA, 28 bp, Artificial Sequence
  Synthetic
ctccagactctutttgaccaatattgut

SEQ ID NO: 77176 - DNA, 17 bp, Artificial Sequence
  Synthetic
gcgaugagcgccacgua

SEQ ID NO: 77177 - DNA, 17 bp, Artificial Sequence
  Synthetic
cugcuggccccagagac

SEQ ID NO: 77178 - DNA, 28 bp, Artificial Sequence
  Synthetic
ttaaatgcctuagagtgttcctcaaugt

SEQ ID NO: 77179 - DNA, 28 bp, Artificial Sequence
  Synthetic
cagaaaagauggaaactttggactucaa

SEQ ID NO: 77180 - DNA, 21 bp, Artificial Sequence
  Synthetic
gtgggtgggutggatgtauga

SEQ ID NO: 77181 - DNA, 22 bp, Artificial Sequence
  Synthetic
gguggtgaucaaacaggaacag

SEQ ID NO: 77182 - DNA, 29 bp, Artificial Sequence
  Synthetic
ccttacctgucaagttctttaauccaagt

SEQ ID NO: 77183 - DNA, 22 bp, Artificial Sequence
  Synthetic
tcgttaccugcctcuggagaat

SEQ ID NO: 77184 - DNA, 28 bp, Artificial Sequence
  Synthetic
gttttgtagtagcccutctaagccatua

SEQ ID NO: 77185 - DNA, 24 bp, Artificial Sequence
  Synthetic
catgcagaaaaugatgaugcccaa

SEQ ID NO: 77186 - DNA, 26 bp, Artificial Sequence
  Synthetic
tcagcgtgaacautttggtaaatugg

SEQ ID NO: 77187 - DNA, 28 bp, Artificial Sequence
  Synthetic
tgtagcaattgggcuaaatctgtcttua

SEQ ID NO: 77188 - DNA, 24 bp, Artificial Sequence
  Synthetic
cgtgggatguttttgcagatgaug

SEQ ID NO: 77189 - DNA, 23 bp, Artificial Sequence
  Synthetic
ctgcagugggaccactattauct

SEQ ID NO: 77190 - DNA, 23 bp, Artificial Sequence
  Synthetic
cucaggagagacagcttugaagt

SEQ ID NO: 77191 - DNA, 25 bp, Artificial Sequence
  Synthetic
gcgatttuggactacctcauaacca

SEQ ID NO: 77192 - DNA, 25 bp, Artificial Sequence
  Synthetic
gttttgtcccacgaauaatgcguaa

SEQ ID NO: 77193 - DNA, 27 bp, Artificial Sequence
  Synthetic
tcgttttauaacacaggcaactgttug

SEQ ID NO: 77194 - DNA, 21 bp, Artificial Sequence
  Synthetic
cctctuacccacgacauccag

SEQ ID NO: 77195 - DNA, 24 bp, Artificial Sequence
  Synthetic
ccctcaatgtauccctttggcaut

SEQ ID NO: 77196 - DNA, 18 bp, Artificial Sequence
  Synthetic
gtcguaggcgaaguccgt

SEQ ID NO: 77197 - DNA, 17 bp, Artificial Sequence
  Synthetic
gcccugcccaccctauc

SEQ ID NO: 77198 - DNA, 19 bp, Artificial Sequence
  Synthetic
aagccuatgugcggaagca

SEQ ID NO: 77199 - DNA, 23 bp, Artificial Sequence
  Synthetic
cccatcacgutgcctttatccuc

SEQ ID NO: 77200 - DNA, 19 bp, Artificial Sequence
  Synthetic
ctctgctcugctccgugac

SEQ ID NO: 77201 - DNA, 21 bp, Artificial Sequence
  Synthetic
gtaagcacagagcgugtgtuc

SEQ ID NO: 77202 - DNA, 17 bp, Artificial Sequence
  Synthetic
gcccagaaucgcuccct

SEQ ID NO: 77203 - DNA, 19 bp, Artificial Sequence
  Synthetic
agggtcccugggagatgug

SEQ ID NO: 77204 - DNA, 22 bp, Artificial Sequence
  Synthetic
ggtgatggguttgggttgatug

SEQ ID NO: 77205 - DNA, 23 bp, Artificial Sequence
  Synthetic
cagcttcatucccactgcagaua

SEQ ID NO: 77206 - DNA, 25 bp, Artificial Sequence
  Synthetic
ggtattcttgcutaaagctctgcug

SEQ ID NO: 77207 - DNA, 23 bp, Artificial Sequence
  Synthetic
cutccttctccauccaaccacat

SEQ ID NO: 77208 - DNA, 21 bp, Artificial Sequence
  Synthetic
gcgggtcutcataaaggugct

SEQ ID NO: 77209 - DNA, 25 bp, Artificial Sequence
  Synthetic
tgtaaatgcttcugcacaagctuac

SEQ ID NO: 77210 - DNA, 20 bp, Artificial Sequence
  Synthetic
gggtgtgacacugcttccuc

SEQ ID NO: 77211 - DNA, 19 bp, Artificial Sequence
  Synthetic
gggaccagucaaggtgugt

SEQ ID NO: 77212 - DNA, 19 bp, Artificial Sequence
  Synthetic
accutgactgguccccaga

SEQ ID NO: 77213 - DNA, 21 bp, Artificial Sequence
  Synthetic
gccccugacagacacatctua

SEQ ID NO: 77214 - DNA, 23 bp, Artificial Sequence
  Synthetic
cagagatcuggttccacttuggg

SEQ ID NO: 77215 - DNA, 20 bp, Artificial Sequence
  Synthetic
ccauacagcagccaguacga

SEQ ID NO: 77216 - DNA, 29 bp, Artificial Sequence
  Synthetic
ggttgtctaaaguaataactccatuggct

SEQ ID NO: 77217 - DNA, 24 bp, Artificial Sequence
  Synthetic
gagctgaagaggguaaaagtccut

SEQ ID NO: 77218 - DNA, 21 bp, Artificial Sequence
  Synthetic
aggagtccuctgtccctctuc

SEQ ID NO: 77219 - DNA, 24 bp, Artificial Sequence
  Synthetic
gaggutgtattauaggccagcagt

SEQ ID NO: 77220 - DNA, 20 bp, Artificial Sequence
  Synthetic
accgtuccaaaagcaccuga

SEQ ID NO: 77221 - DNA, 24 bp, Artificial Sequence
  Synthetic
agaggacugactatcggacugaaa

SEQ ID NO: 77222 - DNA, 21 bp, Artificial Sequence
  Synthetic
ccaggaagutgcaccgauagg

SEQ ID NO: 77223 - DNA, 22 bp, Artificial Sequence
  Synthetic
ggtttggguagtagagcaugga

SEQ ID NO: 77224 - DNA, 27 bp, Artificial Sequence
  Synthetic
cactgaaacaacuttacaagtguggat

SEQ ID NO: 77225 - DNA, 24 bp, Artificial Sequence
  Synthetic
ctaagagtttaaccugccgcctua

SEQ ID NO: 77226 - DNA, 28 bp, Artificial Sequence
  Synthetic
aaaaagaagcuagaagaccttggtgaut

SEQ ID NO: 77227 - DNA, 28 bp, Artificial Sequence
  Synthetic
tgtctcttgtagguttcaagttgactuc

SEQ ID NO: 77228 - DNA, 28 bp, Artificial Sequence
  Synthetic
gcagaauactgtcagtcuagaggaagag

SEQ ID NO: 77229 - DNA, 30 bp, Artificial Sequence
  Synthetic
ttttggtaagcuacatgtcataacugagag

SEQ ID NO: 77230 - DNA, 22 bp, Artificial Sequence
  Synthetic
gaaggucaaagagguggaagga

SEQ ID NO: 77231 - DNA, 21 bp, Artificial Sequence
  Synthetic
gcaaacatguacacccgcuct

SEQ ID NO: 77232 - DNA, 26 bp, Artificial Sequence
  Synthetic
ctgtttatgtttugcctctcaggtuc

SEQ ID NO: 77233 - DNA, 21 bp, Artificial Sequence
  Synthetic
gcctgtgucatgtctgguaca

SEQ ID NO: 77234 - DNA, 22 bp, Artificial Sequence
  Synthetic
agagtucccaggcaacaaacut

SEQ ID NO: 77235 - DNA, 21 bp, Artificial Sequence
  Synthetic
aagaggtagtuggcctgctuc

SEQ ID NO: 77236 - DNA, 22 bp, Artificial Sequence
  Synthetic
gagaccctaugggcactttguc

SEQ ID NO: 77237 - DNA, 23 bp, Artificial Sequence
  Synthetic
gaagaaucagccucgcaacaaac

SEQ ID NO: 77238 - DNA, 28 bp, Artificial Sequence
  Synthetic
agaggaattgtagaguactgaacaggua

SEQ ID NO: 77239 - DNA, 27 bp, Artificial Sequence
  Synthetic
tggaaacagguattgatgaagaugacc

SEQ ID NO: 77240 - DNA, 21 bp, Artificial Sequence
  Synthetic
gcagcacuggtatcaucagca

SEQ ID NO: 77241 - DNA, 28 bp, Artificial Sequence
  Synthetic
gtcctguaatactgtctugaaagcagat

SEQ ID NO: 77242 - DNA, 27 bp, Artificial Sequence
  Synthetic
cctgttttctgaautctgcttccauct

SEQ ID NO: 77243 - DNA, 28 bp, Artificial Sequence
  Synthetic
cagcaacgttuaacttccaaatgtguat

SEQ ID NO: 77244 - DNA, 23 bp, Artificial Sequence
  Synthetic
gcatcatttccuaaagcgctuga

SEQ ID NO: 77245 - DNA, 21 bp, Artificial Sequence
  Synthetic
ggagactaacaugggctggut

SEQ ID NO: 77246 - DNA, 21 bp, Artificial Sequence
  Synthetic
ggccaggguagctctttucaa

SEQ ID NO: 77247 - DNA, 27 bp, Artificial Sequence
  Synthetic
ggattgtgtgtuctgtcctcattguat

SEQ ID NO: 77248 - DNA, 28 bp, Artificial Sequence
  Synthetic
aatgctgacaugatattacagtgguagg

SEQ ID NO: 77249 - DNA, 24 bp, Artificial Sequence
  Synthetic
tttccgagcauatgcaactaggut

SEQ ID NO: 77250 - DNA, 21 bp, Artificial Sequence
  Synthetic
gggccaccuggaaagatacuc

SEQ ID NO: 77251 - DNA, 27 bp, Artificial Sequence
  Synthetic
tgcacaattagtucgagaagttgaugt

SEQ ID NO: 77252 - DNA, 25 bp, Artificial Sequence
  Synthetic
ggattcucaaaagcagacacctuct

SEQ ID NO: 77253 - DNA, 28 bp, Artificial Sequence
  Synthetic
ccagtataugaaggaaggtgttaccuga

SEQ ID NO: 77254 - DNA, 25 bp, Artificial Sequence
  Synthetic
tgcttuaaaagacagacggauggaa

SEQ ID NO: 77255 - DNA, 28 bp, Artificial Sequence
  Synthetic
ccacaacaggtucaatcttggctatuaa

SEQ ID NO: 77256 - DNA, 26 bp, Artificial Sequence
  Synthetic
tgttttcutctctttaguggcacact

SEQ ID NO: 77257 - DNA, 27 bp, Artificial Sequence
  Synthetic
ttcatcactuacgctgttgatttcuct

SEQ ID NO: 77258 - DNA, 19 bp, Artificial Sequence
  Synthetic
gtcctcgacguccatcugt

SEQ ID NO: 77259 - DNA, 19 bp, Artificial Sequence
  Synthetic
ctggacacauggcaccugt

SEQ ID NO: 77260 - DNA, 19 bp, Artificial Sequence
  Synthetic
caggatgugtccggagugg

SEQ ID NO: 77261 - DNA, 25 bp, Artificial Sequence
  Synthetic
agaugtccaacaaguccaagaagag

SEQ ID NO: 77262 - DNA, 25 bp, Artificial Sequence
  Synthetic
gatcaaaguccacaaatucgagcat

SEQ ID NO: 77263 - DNA, 27 bp, Artificial Sequence
  Synthetic
tcattacaaccatuccctagctctgua

SEQ ID NO: 77264 - DNA, 23 bp, Artificial Sequence
  Synthetic
ccccctcaaaaaugctggtgaua

SEQ ID NO: 77265 - DNA, 26 bp, Artificial Sequence
  Synthetic
acaggtcccucacataatcaaguagt

SEQ ID NO: 77266 - DNA, 21 bp, Artificial Sequence
  Synthetic
gcacttugacagctccucgaa

SEQ ID NO: 77267 - DNA, 22 bp, Artificial Sequence
  Synthetic
ggaaugttgcuggaggaaggaa

SEQ ID NO: 77268 - DNA, 21 bp, Artificial Sequence
  Synthetic
tctggcacugatggttgcaut

SEQ ID NO: 77269 - DNA, 28 bp, Artificial Sequence
  Synthetic
tgggucccaaaaattatauaagcacaga

SEQ ID NO: 77270 - DNA, 28 bp, Artificial Sequence
  Synthetic
aactagtttgtaauctcttgcctcttug

SEQ ID NO: 77271 - DNA, 29 bp, Artificial Sequence
  Synthetic
agtcaagaactucagagaaaggcaaaaua

SEQ ID NO: 77272 - DNA, 22 bp, Artificial Sequence
  Synthetic
cggttgtcatugcagactccua

SEQ ID NO: 77273 - DNA, 29 bp, Artificial Sequence
  Synthetic
ggtatacattacaaugacctgaggagaut

SEQ ID NO: 77274 - DNA, 22 bp, Artificial Sequence
  Synthetic
cctggacctugagggattgtut

SEQ ID NO: 77275 - DNA, 26 bp, Artificial Sequence
  Synthetic
ccacctcacagutattgaacatccuc

SEQ ID NO: 77276 - DNA, 20 bp, Artificial Sequence
  Synthetic
tccttccuttcctccugcga

SEQ ID NO: 77277 - DNA, 17 bp, Artificial Sequence
  Synthetic
tcgucccacggcttcug

SEQ ID NO: 77278 - DNA, 17 bp, Artificial Sequence
  Synthetic
ggatgtccugcgccuca

SEQ ID NO: 77279 - DNA, 17 bp, Artificial Sequence
  Synthetic
cccccggccauctagut

SEQ ID NO: 77280 - DNA, 22 bp, Artificial Sequence
  Synthetic
gatacaccucccctctuggaac

SEQ ID NO: 77281 - DNA, 22 bp, Artificial Sequence
  Synthetic
gcttatcgugacctctgtugct

SEQ ID NO: 77282 - DNA, 26 bp, Artificial Sequence
  Synthetic
tttgaagatcautttctcagccucca

SEQ ID NO: 77283 - DNA, 28 bp, Artificial Sequence
  Synthetic
gcctttcuccacttagattttcuccaat

SEQ ID NO: 77284 - DNA, 22 bp, Artificial Sequence
  Synthetic
gccagaaaucaaacccgtcuga

SEQ ID NO: 77285 - DNA, 21 bp, Artificial Sequence
  Synthetic
ctttgttgcutgaagcggugt

SEQ ID NO: 77286 - DNA, 24 bp, Artificial Sequence
  Synthetic
cacaatgcctugtacgtgaagaug

SEQ ID NO: 77287 - DNA, 28 bp, Artificial Sequence
  Synthetic
tttcaatacggcauggttaagaaccuaa

SEQ ID NO: 77288 - DNA, 25 bp, Artificial Sequence
  Synthetic
ttctaaggagaaugaggaggcagua

SEQ ID NO: 77289 - DNA, 27 bp, Artificial Sequence
  Synthetic
caaagtggtcagutcatcattctgtug

SEQ ID NO: 77290 - DNA, 21 bp, Artificial Sequence
  Synthetic
ccacggcaagacagutatuca

SEQ ID NO: 77291 - DNA, 23 bp, Artificial Sequence
  Synthetic
agacacauccaggcuacaaaacc

SEQ ID NO: 77292 - DNA, 22 bp, Artificial Sequence
  Synthetic
tgtcugaggaacgtctctuggt

SEQ ID NO: 77293 - DNA, 21 bp, Artificial Sequence
  Synthetic
cggtctuaccggctctctaug

SEQ ID NO: 77294 - DNA, 28 bp, Artificial Sequence
  Synthetic
tctgttctgaatugctgtcttgttaugt

SEQ ID NO: 77295 - DNA, 20 bp, Artificial Sequence
  Synthetic
gguacaggcgagggtgaaut

SEQ ID NO: 77296 - DNA, 25 bp, Artificial Sequence
  Synthetic
agccaatggagugactgaattucaa

SEQ ID NO: 77297 - DNA, 27 bp, Artificial Sequence
  Synthetic
tgctgaaauagcagtaacagtaugagg

SEQ ID NO: 77298 - DNA, 28 bp, Artificial Sequence
  Synthetic
gttagaaaaggagauctctgaactucgg

SEQ ID NO: 77299 - DNA, 24 bp, Artificial Sequence
  Synthetic
tttcuaacaccagagccaaacugt

SEQ ID NO: 77300 - DNA, 23 bp, Artificial Sequence
  Synthetic
ttcctcaaccagcucttcaucag

SEQ ID NO: 77301 - DNA, 21 bp, Artificial Sequence
  Synthetic
ggatgtagagccugggacugt

SEQ ID NO: 77302 - DNA, 21 bp, Artificial Sequence
  Synthetic
gtctgtcucctggcaucacat

SEQ ID NO: 77303 - DNA, 22 bp, Artificial Sequence
  Synthetic
aaagucatcagcucccacacag

SEQ ID NO: 77304 - DNA, 17 bp, Artificial Sequence
  Synthetic
cagtcguggcugagcgt

SEQ ID NO: 77305 - DNA, 19 bp, Artificial Sequence
  Synthetic
ccggatugagccggaaguc

SEQ ID NO: 77306 - DNA, 21 bp, Artificial Sequence
  Synthetic
tgttccuacacctccugccat

SEQ ID NO: 77307 - DNA, 20 bp, Artificial Sequence
  Synthetic
aggugcagcaggaagugaag

SEQ ID NO: 77308 - DNA, 22 bp, Artificial Sequence
  Synthetic
gcgagggaaaugccttcactut

SEQ ID NO: 77309 - DNA, 25 bp, Artificial Sequence
  Synthetic
gaggcccuaaggttttgtttaugga

SEQ ID NO: 77310 - DNA, 23 bp, Artificial Sequence
  Synthetic
caacacaactuccccaacaagug

SEQ ID NO: 77311 - DNA, 23 bp, Artificial Sequence
  Synthetic
tctactuactggagtugcaggct

SEQ ID NO: 77312 - DNA, 21 bp, Artificial Sequence
  Synthetic
cagtctcuccctccagcauct

SEQ ID NO: 77313 - DNA, 19 bp, Artificial Sequence
  Synthetic
gagaacgcaccucttugcc

SEQ ID NO: 77314 - DNA, 20 bp, Artificial Sequence
  Synthetic
tgutccuaccccaacagcac

SEQ ID NO: 77315 - DNA, 24 bp, Artificial Sequence
  Synthetic
aaagagaauggaaauggcccagaa

SEQ ID NO: 77316 - DNA, 22 bp, Artificial Sequence
  Synthetic
cctgtctcugccttaggtguga

SEQ ID NO: 77317 - DNA, 20 bp, Artificial Sequence
  Synthetic
ccacgcacauttgaccauga

SEQ ID NO: 77318 - DNA, 22 bp, Artificial Sequence
  Synthetic
gctccacaaugcagaugagaca

SEQ ID NO: 77319 - DNA, 21 bp, Artificial Sequence
  Synthetic
gatgaucgccccttcttcugg

SEQ ID NO: 77320 - DNA, 26 bp, Artificial Sequence
  Synthetic
catctgcaccautgatgtctacauga

SEQ ID NO: 77321 - DNA, 24 bp, Artificial Sequence
  Synthetic
tctacatacatccuggtcccctut

SEQ ID NO: 77322 - DNA, 27 bp, Artificial Sequence
  Synthetic
catttactcuttttgctgauggcacat

SEQ ID NO: 77323 - DNA, 28 bp, Artificial Sequence
  Synthetic
gcactcagattugataaagaagttgcuc

SEQ ID NO: 77324 - DNA, 25 bp, Artificial Sequence
  Synthetic
gcatacccaagaccutgagugaaaa

SEQ ID NO: 77325 - DNA, 26 bp, Artificial Sequence
  Synthetic
gcattgtacauaaaaggcactugcat

SEQ ID NO: 77326 - DNA, 26 bp, Artificial Sequence
  Synthetic
gctcttctcacucatatcctcctcut

SEQ ID NO: 77327 - DNA, 21 bp, Artificial Sequence
  Synthetic
tccttccugtcctccuagcag

SEQ ID NO: 77328 - DNA, 23 bp, Artificial Sequence
  Synthetic
caggaugacagccagttacguat

SEQ ID NO: 77329 - DNA, 26 bp, Artificial Sequence
  Synthetic
atctggaagatgauaaacccttgcuc

SEQ ID NO: 77330 - DNA, 17 bp, Artificial Sequence
  Synthetic
ccggctuctcggtgugt

SEQ ID NO: 77331 - DNA, 18 bp, Artificial Sequence
  Synthetic
cgutggagguggcaaggg

SEQ ID NO: 77332 - DNA, 26 bp, Artificial Sequence
  Synthetic
ccagcaccucgatgtttataaaugct

SEQ ID NO: 77333 - DNA, 28 bp, Artificial Sequence
  Synthetic
acacauttaaagactuaaccccacaaga

SEQ ID NO: 77334 - DNA, 22 bp, Artificial Sequence
  Synthetic
tggccaccacautcucaaagag

SEQ ID NO: 77335 - DNA, 21 bp, Artificial Sequence
  Synthetic
ccacaccacugtcctaugcag

SEQ ID NO: 77336 - DNA, 19 bp, Artificial Sequence
  Synthetic
ctcggcuctcttcggtuga

SEQ ID NO: 77337 - DNA, 18 bp, Artificial Sequence
  Synthetic
ccatggcaauccgucgag

SEQ ID NO: 77338 - DNA, 21 bp, Artificial Sequence
  Synthetic
cggaagagcutccatggaguc

SEQ ID NO: 77339 - DNA, 20 bp, Artificial Sequence
  Synthetic
gcagugcagcuggagaaagt

SEQ ID NO: 77340 - DNA, 17 bp, Artificial Sequence
  Synthetic
cggaccggcucctcuac

SEQ ID NO: 77341 - DNA, 18 bp, Artificial Sequence
  Synthetic
tgtcagaggccucgcauc

SEQ ID NO: 77342 - DNA, 24 bp, Artificial Sequence
  Synthetic
ctgccttcaautcattccacucac

SEQ ID NO: 77343 - DNA, 23 bp, Artificial Sequence
  Synthetic
tccgaagccucaaagctaaucaa

SEQ ID NO: 77344 - DNA, 23 bp, Artificial Sequence
  Synthetic
ggtttcagcuattgggaaccuga

SEQ ID NO: 77345 - DNA, 25 bp, Artificial Sequence
  Synthetic
agagtcacugtggaagtaguaggaa

SEQ ID NO: 77346 - DNA, 21 bp, Artificial Sequence
  Synthetic
gcccagcuctgtucaaaccat

SEQ ID NO: 77347 - DNA, 28 bp, Artificial Sequence
  Synthetic
tgtttctggaaagcugagtcttttcuac

SEQ ID NO: 77348 - DNA, 24 bp, Artificial Sequence
  Synthetic
tccctttctcutaagtctccuggt

SEQ ID NO: 77349 - DNA, 23 bp, Artificial Sequence
  Synthetic
ccctgttcugtgtcctactucag

SEQ ID NO: 77350 - DNA, 26 bp, Artificial Sequence
  Synthetic
tgattatcagcauaggctggaaacug

SEQ ID NO: 77351 - DNA, 22 bp, Artificial Sequence
  Synthetic
ccttgtguccaactggaaggut

SEQ ID NO: 77352 - DNA, 20 bp, Artificial Sequence
  Synthetic
tgtcctcugacccatcugct

SEQ ID NO: 77353 - DNA, 18 bp, Artificial Sequence
  Synthetic
ggacaggcuggcatuggt

SEQ ID NO: 77354 - DNA, 23 bp, Artificial Sequence
  Synthetic
gaaacctggaacucacctaccug

SEQ ID NO: 77355 - DNA, 20 bp, Artificial Sequence
  Synthetic
tcttcugccacccacctgua

SEQ ID NO: 77356 - DNA, 28 bp, Artificial Sequence
  Synthetic
ctgtaactucgaccaacacctttaaaut

SEQ ID NO: 77357 - DNA, 22 bp, Artificial Sequence
  Synthetic
gcctgagagugcacactaaaug

SEQ ID NO: 77358 - DNA, 22 bp, Artificial Sequence
  Synthetic
tccaatttccccugcacaacut

SEQ ID NO: 77359 - DNA, 28 bp, Artificial Sequence
  Synthetic
cagtactactcacuaaagagctgtccua

SEQ ID NO: 77360 - DNA, 25 bp, Artificial Sequence
  Synthetic
aggaagatgtuctgagcttacugga

SEQ ID NO: 77361 - DNA, 23 bp, Artificial Sequence
  Synthetic
gcaacugcagatuaagccaacag

SEQ ID NO: 77362 - DNA, 31 bp, Artificial Sequence
  Synthetic
gtggataggautcattcattaatugccaaat

SEQ ID NO: 77363 - DNA, 21 bp, Artificial Sequence
  Synthetic
ccuacagccaggaagguacca

SEQ ID NO: 77364 - DNA, 26 bp, Artificial Sequence
  Synthetic
cacaaattuaggcacttucaccacaa

SEQ ID NO: 77365 - DNA, 25 bp, Artificial Sequence
  Synthetic
ttctagaaaagaguctcatcgugga

SEQ ID NO: 77366 - DNA, 22 bp, Artificial Sequence
  Synthetic
gctgaagtcucccctgatcuga

SEQ ID NO: 77367 - DNA, 24 bp, Artificial Sequence
  Synthetic
accatgtttcuaggttgaacugct

SEQ ID NO: 77368 - DNA, 26 bp, Artificial Sequence
  Synthetic
ggtattatgauccagagctgctucaa

SEQ ID NO: 77369 - DNA, 32 bp, Artificial Sequence
  Synthetic
ggaggacgatttuagagaatagtgaaattucc

SEQ ID NO: 77370 - DNA, 23 bp, Artificial Sequence
  Synthetic
tttcttttcccucttgcctucca

SEQ ID NO: 77371 - DNA, 28 bp, Artificial Sequence
  Synthetic
tccaaaaccatgcucagaagaagaauaa

SEQ ID NO: 77372 - DNA, 19 bp, Artificial Sequence
  Synthetic
cuccgagaacucgcaggac

SEQ ID NO: 77373 - DNA, 18 bp, Artificial Sequence
  Synthetic
gcugtgguagccgcacat

SEQ ID NO: 77374 - DNA, 22 bp, Artificial Sequence
  Synthetic
ccgtgauccttttgagugcaac

SEQ ID NO: 77375 - DNA, 21 bp, Artificial Sequence
  Synthetic
ggcagtccutgtgctttucct

SEQ ID NO: 77376 - DNA, 22 bp, Artificial Sequence
  Synthetic
aaatgtgatugcctgggtguct

SEQ ID NO: 77377 - DNA, 23 bp, Artificial Sequence
  Synthetic
agggtattugggtaccugaagga

SEQ ID NO: 77378 - DNA, 25 bp, Artificial Sequence
  Synthetic
aaacagaaatugagagaaggcucca

SEQ ID NO: 77379 - DNA, 24 bp, Artificial Sequence
  Synthetic
gacagcagcgutgagataucaaag

SEQ ID NO: 77380 - DNA, 23 bp, Artificial Sequence
  Synthetic
cagccagagacuaccacaacaut

SEQ ID NO: 77381 - DNA, 28 bp, Artificial Sequence
  Synthetic
acattctcatggucttctcctttuacag

SEQ ID NO: 77382 - DNA, 28 bp, Artificial Sequence
  Synthetic
tcatttctuccagtgttctaatugcact

SEQ ID NO: 77383 - DNA, 24 bp, Artificial Sequence
  Synthetic
tggaagcacagacugcaatttgua

SEQ ID NO: 77384 - DNA, 22 bp, Artificial Sequence
  Synthetic
ggcagaaagaggacuccucagt

SEQ ID NO: 77385 - DNA, 21 bp, Artificial Sequence
  Synthetic
cgactgccugtgaagtggaug

SEQ ID NO: 77386 - DNA, 21 bp, Artificial Sequence
  Synthetic
cgtgttgaugctgagcugaat

SEQ ID NO: 77387 - DNA, 24 bp, Artificial Sequence
  Synthetic
ccctaacuagtttcttcctucgca

SEQ ID NO: 77388 - DNA, 22 bp, Artificial Sequence
  Synthetic
ccaggagtutgctttgcauacc

SEQ ID NO: 77389 - DNA, 26 bp, Artificial Sequence
  Synthetic
acatgttgaacaacaggugattcgua

SEQ ID NO: 77390 - DNA, 25 bp, Artificial Sequence
  Synthetic
tgggtgtagauccggtcaaataaug

SEQ ID NO: 77391 - DNA, 24 bp, Artificial Sequence
  Synthetic
tttcatcugagaagcaaggagugg

SEQ ID NO: 77392 - DNA, 24 bp, Artificial Sequence
  Synthetic
aatttctugacaggtgggaucgag

SEQ ID NO: 77393 - DNA, 22 bp, Artificial Sequence
  Synthetic
ccaucauaaggacagccccaaa

SEQ ID NO: 77394 - DNA, 21 bp, Artificial Sequence
  Synthetic
ctcctcaggcaugggttctua

SEQ ID NO: 77395 - DNA, 23 bp, Artificial Sequence
  Synthetic
ctgcctacutctacttccuccca

SEQ ID NO: 77396 - DNA, 22 bp, Artificial Sequence
  Synthetic
actcacttggcugtgtttccut

SEQ ID NO: 77397 - DNA, 29 bp, Artificial Sequence
  Synthetic
agtggccaattucccattctaataaagut

SEQ ID NO: 77398 - DNA, 21 bp, Artificial Sequence
  Synthetic
gcccagguggtagtaggtgut

SEQ ID NO: 77399 - DNA, 21 bp, Artificial Sequence
  Synthetic
ccaggagcacutcctcttuga

SEQ ID NO: 77400 - DNA, 23 bp, Artificial Sequence
  Synthetic
catgtttggguttgctgacgaua

SEQ ID NO: 77401 - DNA, 20 bp, Artificial Sequence
  Synthetic
actcggucgtaggugaggac

SEQ ID NO: 77402 - DNA, 27 bp, Artificial Sequence
  Synthetic
tctgttcagtugaaggaatttcucacc

SEQ ID NO: 77403 - DNA, 28 bp, Artificial Sequence
  Synthetic
gatccutatcagattctuggaccaacaa

SEQ ID NO: 77404 - DNA, 19 bp, Artificial Sequence
  Synthetic
ggattugcaaggcggcuac

SEQ ID NO: 77405 - DNA, 24 bp, Artificial Sequence
  Synthetic
ggaggacautttcggctcugaaat

SEQ ID NO: 77406 - DNA, 19 bp, Artificial Sequence
  Synthetic
gagccgtcugcggaaaauc

SEQ ID NO: 77407 - DNA, 22 bp, Artificial Sequence
  Synthetic
tgtgccagcauactgctcttut

SEQ ID NO: 77408 - DNA, 21 bp, Artificial Sequence
  Synthetic
tgcttgccugtgaaccaguaa

SEQ ID NO: 77409 - DNA, 24 bp, Artificial Sequence
  Synthetic
gcagaaacuccttcaggtcaucag

SEQ ID NO: 77410 - DNA, 24 bp, Artificial Sequence
  Synthetic
tggtaaaccaaaaaugcacttucc

SEQ ID NO: 77411 - DNA, 26 bp, Artificial Sequence
  Synthetic
aaatcucccaagaggaaugacaaaca

SEQ ID NO: 77412 - DNA, 25 bp, Artificial Sequence
  Synthetic
gagagagcaaacaucctctttguca

SEQ ID NO: 77413 - DNA, 24 bp, Artificial Sequence
  Synthetic
aaagagaggcacucatgucagaac

SEQ ID NO: 77414 - DNA, 20 bp, Artificial Sequence
  Synthetic
ctcaagggtucaccgccaua

SEQ ID NO: 77415 - DNA, 24 bp, Artificial Sequence
  Synthetic
gagagaggcacuaaggcttctuac

SEQ ID NO: 77416 - DNA, 24 bp, Artificial Sequence
  Synthetic
ctttctcctugctcttctctucca

SEQ ID NO: 77417 - DNA, 24 bp, Artificial Sequence
  Synthetic
ggaaagaugcgatcgtaagucgag

SEQ ID NO: 77418 - DNA, 27 bp, Artificial Sequence
  Synthetic
acaatgtttaaagguggtagctgtuga

SEQ ID NO: 77419 - DNA, 27 bp, Artificial Sequence
  Synthetic
acucattgatagttgugaaccaacaca

SEQ ID NO: 77420 - DNA, 21 bp, Artificial Sequence
  Synthetic
ccagctgggucatcatctuga

SEQ ID NO: 77421 - DNA, 28 bp, Artificial Sequence
  Synthetic
gcagattgactcugagctgagaaaaaut

SEQ ID NO: 77422 - DNA, 28 bp, Artificial Sequence
  Synthetic
gggttctatcacutgcatcatatgttut

SEQ ID NO: 77423 - DNA, 29 bp, Artificial Sequence
  Synthetic
cctttataagccugtaatttgggacauct

SEQ ID NO: 77424 - DNA, 21 bp, Artificial Sequence
  Synthetic
gcccugagattccaguggaac

SEQ ID NO: 77425 - DNA, 22 bp, Artificial Sequence
  Synthetic
gtgccaucccgactgtaatuga

SEQ ID NO: 77426 - DNA, 26 bp, Artificial Sequence
  Synthetic
aaagaattgtuacctgaagagcuggt

SEQ ID NO: 77427 - DNA, 28 bp, Artificial Sequence
  Synthetic
ctgtgtaguaacgcaaaggattttctug

SEQ ID NO: 77428 - DNA, 25 bp, Artificial Sequence
  Synthetic
ctcactcacaugacagagaaucagg

SEQ ID NO: 77429 - DNA, 21 bp, Artificial Sequence
  Synthetic
ccctctgcgutcctgtcauat

SEQ ID NO: 77430 - DNA, 22 bp, Artificial Sequence
  Synthetic
gagttugcccccatguacaaga

SEQ ID NO: 77431 - DNA, 27 bp, Artificial Sequence
  Synthetic
ccttcttcucctagcctaagucaaaat

SEQ ID NO: 77432 - DNA, 24 bp, Artificial Sequence
  Synthetic
atgugacaagggaggugaaaaagt

SEQ ID NO: 77433 - DNA, 19 bp, Artificial Sequence
  Synthetic
gaguaccacgacccagugt

SEQ ID NO: 77434 - DNA, 24 bp, Artificial Sequence
  Synthetic
aggtcactuaccttgaaccaguct

SEQ ID NO: 77435 - DNA, 27 bp, Artificial Sequence
  Synthetic
tgctgtgactaugtcatggttctuaac

SEQ ID NO: 77436 - DNA, 28 bp, Artificial Sequence
  Synthetic
ttcctttgaaacugtctttgtgaactug

SEQ ID NO: 77437 - DNA, 25 bp, Artificial Sequence
  Synthetic
gctgtccaggautctgagtataugg

SEQ ID NO: 77438 - DNA, 22 bp, Artificial Sequence
  Synthetic
cacctagugaacaaggguccaa

SEQ ID NO: 77439 - DNA, 22 bp, Artificial Sequence
  Synthetic
ttgctgagguttctccctugac

SEQ ID NO: 77440 - DNA, 24 bp, Artificial Sequence
  Synthetic
aacaaccccaauccttatggtuca

SEQ ID NO: 77441 - DNA, 23 bp, Artificial Sequence
  Synthetic
agtactcaccaugttgggcatuc

SEQ ID NO: 77442 - DNA, 24 bp, Artificial Sequence
  Synthetic
cagcatgaccuaccatcatuggaa

SEQ ID NO: 77443 - DNA, 23 bp, Artificial Sequence
  Synthetic
cccaaggaugttatgtucaggct

SEQ ID NO: 77444 - DNA, 24 bp, Artificial Sequence
  Synthetic
caccctgtugtttgtttcagugac

SEQ ID NO: 77445 - DNA, 28 bp, Artificial Sequence
  Synthetic
ggaacaggaaataugtcgaaaagttcuc

SEQ ID NO: 77446 - DNA, 21 bp, Artificial Sequence
  Synthetic
aaaaaggcagutcctggugga

SEQ ID NO: 77447 - DNA, 26 bp, Artificial Sequence
  Synthetic
tcaatttaggcucctagtggguacaa

SEQ ID NO: 77448 - DNA, 22 bp, Artificial Sequence
  Synthetic
gtcactgacaaguccccttgut

SEQ ID NO: 77449 - DNA, 19 bp, Artificial Sequence
  Synthetic
atgtcacggcagucgtuga

SEQ ID NO: 77450 - DNA, 22 bp, Artificial Sequence
  Synthetic
ccaaccauggtgttgtgtucat

SEQ ID NO: 77451 - DNA, 24 bp, Artificial Sequence
  Synthetic
ctgaaccctguaactcctttccuc

SEQ ID NO: 77452 - DNA, 26 bp, Artificial Sequence
  Synthetic
gtgagutacataccauacagggcaag

SEQ ID NO: 77453 - DNA, 18 bp, Artificial Sequence
  Synthetic
ccgcccaccucggaaaut

SEQ ID NO: 77454 - DNA, 23 bp, Artificial Sequence
  Synthetic
ggtcagtttuctcttgcagucgt

SEQ ID NO: 77455 - DNA, 22 bp, Artificial Sequence
  Synthetic
ccggaggucccaaacagtttut

SEQ ID NO: 77456 - DNA, 19 bp, Artificial Sequence
  Synthetic
tgagaacauccgccgtgug

SEQ ID NO: 77457 - DNA, 25 bp, Artificial Sequence
  Synthetic
ctatggtgggugattaactgctugt

SEQ ID NO: 77458 - DNA, 19 bp, Artificial Sequence
  Synthetic
cutggcatcgucggcaaag

SEQ ID NO: 77459 - DNA, 28 bp, Artificial Sequence
  Synthetic
cactaagaaauggaaaaccgtatccgua

SEQ ID NO: 77460 - DNA, 22 bp, Artificial Sequence
  Synthetic
atagcactcuccaagctgctut

SEQ ID NO: 77461 - DNA, 26 bp, Artificial Sequence
  Synthetic
gcttacactccuttcatacgctttuc

SEQ ID NO: 77462 - DNA, 20 bp, Artificial Sequence
  Synthetic
ccatcccagauccgtgagug

SEQ ID NO: 77463 - DNA, 21 bp, Artificial Sequence
  Synthetic
ccattcccaggucaccaucaa

SEQ ID NO: 77464 - DNA, 22 bp, Artificial Sequence
  Synthetic
cacaggaaaccugtcaccauca

SEQ ID NO: 77465 - DNA, 19 bp, Artificial Sequence
  Synthetic
atggcatcguggccttcut

SEQ ID NO: 77466 - DNA, 28 bp, Artificial Sequence
  Synthetic
tcaggaaacaaaaauttgtgctaugcaa

SEQ ID NO: 77467 - DNA, 23 bp, Artificial Sequence
  Synthetic
ggacccatuagaaccaacuccat

SEQ ID NO: 77468 - DNA, 18 bp, Artificial Sequence
  Synthetic
gggctggcuccgatguat

SEQ ID NO: 77469 - DNA, 22 bp, Artificial Sequence
  Synthetic
caacguagccatcagtcucaga

SEQ ID NO: 77470 - DNA, 23 bp, Artificial Sequence
  Synthetic
gcctggagcagaaaugagtacua

SEQ ID NO: 77471 - DNA, 20 bp, Artificial Sequence
  Synthetic
acacagaccucagagcucct

SEQ ID NO: 77472 - DNA, 28 bp, Artificial Sequence
  Synthetic
agcagtcatattuaaaacatcgccuaca

SEQ ID NO: 77473 - DNA, 29 bp, Artificial Sequence
  Synthetic
atgtcagauataaagaacucaccgaacag

SEQ ID NO: 77474 - DNA, 17 bp, Artificial Sequence
  Synthetic
gcctgggagcugctgut

SEQ ID NO: 77475 - DNA, 28 bp, Artificial Sequence
  Synthetic
agccatucctttatgtttuaggcaagat

SEQ ID NO: 77476 - DNA, 22 bp, Artificial Sequence
  Synthetic
tctccatguactggtagcuggt

SEQ ID NO: 77477 - DNA, 28 bp, Artificial Sequence
  Synthetic
ccagaaacucctagttcuaagacagaga

SEQ ID NO: 77478 - DNA, 20 bp, Artificial Sequence
  Synthetic
gtgcctgaucagctgttgug

SEQ ID NO: 77479 - DNA, 22 bp, Artificial Sequence
  Synthetic
ttcctaaccuctcccctgugaa

SEQ ID NO: 77480 - DNA, 21 bp, Artificial Sequence
  Synthetic
tctacagcgguacagugagga

SEQ ID NO: 77481 - DNA, 22 bp, Artificial Sequence
  Synthetic
tgcccatcaguctctctgctua

SEQ ID NO: 77482 - DNA, 19 bp, Artificial Sequence
  Synthetic
ctggcaccuctgcacaauc

SEQ ID NO: 77483 - DNA, 22 bp, Artificial Sequence
  Synthetic
ttggctgccaugttgttcttuc

SEQ ID NO: 77484 - DNA, 21 bp, Artificial Sequence
  Synthetic
catagcgcaacagutgcagut

SEQ ID NO: 77485 - DNA, 27 bp, Artificial Sequence
  Synthetic
tctcttcttgattutctagggacccut

SEQ ID NO: 77486 - DNA, 28 bp, Artificial Sequence
  Synthetic
ctgtaactaaugagcaggatgacaagua

SEQ ID NO: 77487 - DNA, 21 bp, Artificial Sequence
  Synthetic
cttcctcaagucagccaccuc

SEQ ID NO: 77488 - DNA, 24 bp, Artificial Sequence
  Synthetic
ggtctatggcutcaattgcatugt

SEQ ID NO: 77489 - DNA, 27 bp, Artificial Sequence
  Synthetic
gcattgataacaccccuactgctaaut

SEQ ID NO: 77490 - DNA, 22 bp, Artificial Sequence
  Synthetic
tcgutccuggagaaggagaact

SEQ ID NO: 77491 - DNA, 27 bp, Artificial Sequence
  Synthetic
acaggaaacaaacugtccatctatucc

SEQ ID NO: 77492 - DNA, 19 bp, Artificial Sequence
  Synthetic
cccaacauggagggctugg

SEQ ID NO: 77493 - DNA, 22 bp, Artificial Sequence
  Synthetic
cacttctcacaucacccctuct

SEQ ID NO: 77494 - DNA, 27 bp, Artificial Sequence
  Synthetic
ccagttgcuacttgcaatgatauacac

SEQ ID NO: 77495 - DNA, 28 bp, Artificial Sequence
  Synthetic
tgatcacatgctuacagttttgtgguaa

SEQ ID NO: 77496 - DNA, 27 bp, Artificial Sequence
  Synthetic
ttgtcaucagaaccactaactatucgg

SEQ ID NO: 77497 - DNA, 28 bp, Artificial Sequence
  Synthetic
tgccttcattttuctcttcaccagtaut

SEQ ID NO: 77498 - DNA, 21 bp, Artificial Sequence
  Synthetic
gggtgaacutacctgcucact

SEQ ID NO: 77499 - DNA, 25 bp, Artificial Sequence
  Synthetic
gacctcatggauggagatacatugg

SEQ ID NO: 77500 - DNA, 24 bp, Artificial Sequence
  Synthetic
cccttctccaagaucatcctgtuc

SEQ ID NO: 77501 - DNA, 24 bp, Artificial Sequence
  Synthetic
ggctctcacagcaaugatgactut

SEQ ID NO: 77502 - DNA, 23 bp, Artificial Sequence
  Synthetic
gccauaggttgacaugaccgaat

SEQ ID NO: 77503 - DNA, 21 bp, Artificial Sequence
  Synthetic
agtataacugtgcgccuggac

SEQ ID NO: 77504 - DNA, 24 bp, Artificial Sequence
  Synthetic
agggcgaaaugtactccagttauc

SEQ ID NO: 77505 - DNA, 24 bp, Artificial Sequence
  Synthetic
guaaatttgcuaagagccgaagcc

SEQ ID NO: 77506 - DNA, 27 bp, Artificial Sequence
  Synthetic
tgggcaacacautgtcaaagtuaaaat

SEQ ID NO: 77507 - DNA, 21 bp, Artificial Sequence
  Synthetic
aggagaagcucccaagugact

SEQ ID NO: 77508 - DNA, 24 bp, Artificial Sequence
  Synthetic
cagaagucagcaactcctucaaga

SEQ ID NO: 77509 - DNA, 23 bp, Artificial Sequence
  Synthetic
tgaatucacccagcccaaacuac

SEQ ID NO: 77510 - DNA, 24 bp, Artificial Sequence
  Synthetic
actggagagaugctttcttctugg

SEQ ID NO: 77511 - DNA, 22 bp, Artificial Sequence
  Synthetic
tcgugtgcagaaugaaggaact

SEQ ID NO: 77512 - DNA, 21 bp, Artificial Sequence
  Synthetic
gctcaaugaacatgccaucca

SEQ ID NO: 77513 - DNA, 20 bp, Artificial Sequence
  Synthetic
gtaugaaccgccugacccaa

SEQ ID NO: 77514 - DNA, 18 bp, Artificial Sequence
  Synthetic
cuctgcccaucccaccag

SEQ ID NO: 77515 - DNA, 18 bp, Artificial Sequence
  Synthetic
ctgaccccuggcactcut

SEQ ID NO: 77516 - DNA, 24 bp, Artificial Sequence
  Synthetic
gagcauccaccaagaacttttucc

SEQ ID NO: 77517 - DNA, 27 bp, Artificial Sequence
  Synthetic
gaagtttugcaagcagagaagtatugt

SEQ ID NO: 77518 - DNA, 29 bp, Artificial Sequence
  Synthetic
tcatgctggatuggccatatgtatattut

SEQ ID NO: 77519 - DNA, 25 bp, Artificial Sequence
  Synthetic
tcaaccttctcucatcaccaacauc

SEQ ID NO: 77520 - DNA, 22 bp, Artificial Sequence
  Synthetic
ggcacttguacaggtgtctuca

SEQ ID NO: 77521 - DNA, 28 bp, Artificial Sequence
  Synthetic
ccaggcatcucataacaaaatgaugaat

SEQ ID NO: 77522 - DNA, 21 bp, Artificial Sequence
  Synthetic
cuttcctttggugggaggact

SEQ ID NO: 77523 - DNA, 26 bp, Artificial Sequence
  Synthetic
gcagcctttugtaatatccgguaaga

SEQ ID NO: 77524 - DNA, 19 bp, Artificial Sequence
  Synthetic
gaaagcugggtgcccucat

SEQ ID NO: 77525 - DNA, 18 bp, Artificial Sequence
  Synthetic
gaagctgtucccggtgug

SEQ ID NO: 77526 - DNA, 21 bp, Artificial Sequence
  Synthetic
gcccgtuaactgcagatguct

SEQ ID NO: 77527 - DNA, 20 bp, Artificial Sequence
  Synthetic
gaacgtcaugatgggcccua

SEQ ID NO: 77528 - DNA, 21 bp, Artificial Sequence
  Synthetic
ccttggcagugtcactcucat

SEQ ID NO: 77529 - DNA, 22 bp, Artificial Sequence
  Synthetic
accctcacuactcagagtcugg

SEQ ID NO: 77530 - DNA, 24 bp, Artificial Sequence
  Synthetic
gaggactgggucgaaacagtuaat

SEQ ID NO: 77531 - DNA, 24 bp, Artificial Sequence
  Synthetic
cgcaaagauggcctctacttuacc

SEQ ID NO: 77532 - DNA, 23 bp, Artificial Sequence
  Synthetic
agtccttttugcacactcuggat

SEQ ID NO: 77533 - DNA, 23 bp, Artificial Sequence
  Synthetic
gcatgatatcucccccttuggaa

SEQ ID NO: 77534 - DNA, 22 bp, Artificial Sequence
  Synthetic
cactggccautacagcagatuc

SEQ ID NO: 77535 - DNA, 22 bp, Artificial Sequence
  Synthetic
gtcttgugacagggctgcuaat

SEQ ID NO: 77536 - DNA, 25 bp, Artificial Sequence
  Synthetic
aagcaucaagttgtcauggcaaaaa

SEQ ID NO: 77537 - DNA, 25 bp, Artificial Sequence
  Synthetic
catataagcaugactccaccugagt

SEQ ID NO: 77538 - DNA, 21 bp, Artificial Sequence
  Synthetic
tgacaggagggcuacatccut

SEQ ID NO: 77539 - DNA, 24 bp, Artificial Sequence
  Synthetic
ccaacaaacacutcttuagcacga

SEQ ID NO: 77540 - DNA, 21 bp, Artificial Sequence
  Synthetic
gaacauggcagagcagcuagt

SEQ ID NO: 77541 - DNA, 21 bp, Artificial Sequence
  Synthetic
gggtaaccutcccggtaugaa

SEQ ID NO: 77542 - DNA, 28 bp, Artificial Sequence
  Synthetic
ggtattctgttguttcatgtttcctgug

SEQ ID NO: 77543 - DNA, 26 bp, Artificial Sequence
  Synthetic
tctctagguacagaaggcauaacact

SEQ ID NO: 77544 - DNA, 24 bp, Artificial Sequence
  Synthetic
gggautgcttatcucagacagact

SEQ ID NO: 77545 - DNA, 23 bp, Artificial Sequence
  Synthetic
ggagactcucacccattaugacc

SEQ ID NO: 77546 - DNA, 25 bp, Artificial Sequence
  Synthetic
gggaatggagaugttcttacuggag

SEQ ID NO: 77547 - DNA, 28 bp, Artificial Sequence
  Synthetic
tgggacugaaagagtactatgugagaat

SEQ ID NO: 77548 - DNA, 21 bp, Artificial Sequence
  Synthetic
ccaggagcuttcaccaaccug

SEQ ID NO: 77549 - DNA, 24 bp, Artificial Sequence
  Synthetic
ctcatctucaaaccgtctcctgut

SEQ ID NO: 77550 - DNA, 21 bp, Artificial Sequence
  Synthetic
caggtacuctgttgccuccat

SEQ ID NO: 77551 - DNA, 28 bp, Artificial Sequence
  Synthetic
cttccctgttagaguttgctcagtatut

SEQ ID NO: 77552 - DNA, 21 bp, Artificial Sequence
  Synthetic
caccacgutaagaacaucgca

SEQ ID NO: 77553 - DNA, 25 bp, Artificial Sequence
  Synthetic
gggauaagaaaacagccatcacugt

SEQ ID NO: 77554 - DNA, 23 bp, Artificial Sequence
  Synthetic
gggagaacauactgtgugccaat

SEQ ID NO: 77555 - DNA, 29 bp, Artificial Sequence
  Synthetic
ggttgggaaaauaggacatagctttagua

SEQ ID NO: 77556 - DNA, 30 bp, Artificial Sequence; identical to SEQ ID NO: 12464
  Synthetic

SEQ ID NO: 77557 - DNA, 23 bp, Artificial Sequence
  Synthetic
tgtgctugccagtctatctucag

SEQ ID NO: 77558 - DNA, 23 bp, Artificial Sequence
  Synthetic
gaatgacccugcauaaaaaggca

SEQ ID NO: 77559 - DNA, 21 bp, Artificial Sequence
  Synthetic
gtgatugagcggcacaactuc

SEQ ID NO: 77560 - DNA, 24 bp, Artificial Sequence
  Synthetic
atgttagctgcuagcctcattgut

SEQ ID NO: 77561 - DNA, 22 bp, Artificial Sequence
  Synthetic
gctgctggcutcattctgttug

SEQ ID NO: 77562 - DNA, 21 bp, Artificial Sequence
  Synthetic
cccaagcuaagggcatgctua

SEQ ID NO: 77563 - DNA, 20 bp, Artificial Sequence
  Synthetic
gggaagcagguggatgaguc

SEQ ID NO: 77564 - DNA, 21 bp, Artificial Sequence
  Synthetic
ccaccgtcaucaccttcctut

SEQ ID NO: 77565 - DNA, 22 bp, Artificial Sequence
  Synthetic
cccttcgcacutcttacactug

SEQ ID NO: 77566 - DNA, 19 bp, Artificial Sequence
  Synthetic
acagcugacggtggaguct

SEQ ID NO: 77567 - DNA, 17 bp, Artificial Sequence
  Synthetic
ccggagcuctacgugct

SEQ ID NO: 77568 - DNA, 22 bp, Artificial Sequence
  Synthetic
ggcucaugagagaagacggaat

SEQ ID NO: 77569 - DNA, 20 bp, Artificial Sequence
  Synthetic
cttcctcucgcccaucacag

SEQ ID NO: 77570 - DNA, 24 bp, Artificial Sequence
  Synthetic
ccatattcauccactttggugcct

SEQ ID NO: 77571 - DNA, 26 bp, Artificial Sequence
  Synthetic
gggcttacttcugtgttggtatctug

SEQ ID NO: 77572 - DNA, 24 bp, Artificial Sequence
  Synthetic
gacagcuatgagauggaggaagac

SEQ ID NO: 77573 - DNA, 21 bp, Artificial Sequence
  Synthetic
gttccttuggaggtggcauga

SEQ ID NO: 77574 - DNA, 20 bp, Artificial Sequence
  Synthetic
cggagacgagcucatgaguc

SEQ ID NO: 77575 - DNA, 20 bp, Artificial Sequence
  Synthetic
acctcctgcugacgtcttuc

SEQ ID NO: 77576 - DNA, 20 bp, Artificial Sequence
  Synthetic
gcagccaucaggttcugaca

SEQ ID NO: 77577 - DNA, 24 bp, Artificial Sequence
  Synthetic
ggaggucttttugcaaagcagaat

SEQ ID NO: 77578 - DNA, 22 bp, Artificial Sequence
  Synthetic
caaggcucctgctcaugaaagt

SEQ ID NO: 77579 - DNA, 28 bp, Artificial Sequence
  Synthetic
actctttatcugccaattaactcaccuc

SEQ ID NO: 77580 - DNA, 22 bp, Artificial Sequence
  Synthetic
tgaggugaaggcaacccuagaa

SEQ ID NO: 77581 - DNA, 22 bp, Artificial Sequence
  Synthetic
aaggaatggugtgcaaccauct

SEQ ID NO: 77582 - DNA, 24 bp, Artificial Sequence
  Synthetic
aacttacaacaauggaggcucgaa

SEQ ID NO: 77583 - DNA, 28 bp, Artificial Sequence
  Synthetic
tcagcctcagaauttctttttctucaca

SEQ ID NO: 77584 - DNA, 21 bp, Artificial Sequence
  Synthetic
caacagccaucacuggaacac

SEQ ID NO: 77585 - DNA, 27 bp, Artificial Sequence
  Synthetic
gccaccaaagucatttgccatatauct

SEQ ID NO: 77586 - DNA, 21 bp, Artificial Sequence
  Synthetic
ggtgtcuagcccaugggagaa

SEQ ID NO: 77587 - DNA, 23 bp, Artificial Sequence
  Synthetic
cccaucacacaccataacuccac

SEQ ID NO: 77588 - DNA, 27 bp, Artificial Sequence
  Synthetic
cttaccctatucgagtcaattctugct

SEQ ID NO: 77589 - DNA, 28 bp, Artificial Sequence
  Synthetic
gcaagttcttucagaatctcttggauga

SEQ ID NO: 77590 - DNA, 21 bp, Artificial Sequence
  Synthetic
gtucacccaccagagtgaugt

SEQ ID NO: 77591 - DNA, 20 bp, Artificial Sequence
  Synthetic
tccctcccutcacatgcuga

SEQ ID NO: 77592 - DNA, 28 bp, Artificial Sequence
  Synthetic
gaggtugaaccttaagacuaacaacagt

SEQ ID NO: 77593 - DNA, 27 bp, Artificial Sequence
  Synthetic
cctcagaaagtcautcacacgattcuc

SEQ ID NO: 77594 - DNA, 25 bp, Artificial Sequence
  Synthetic
cctgtttggauaactcagcacugaa

SEQ ID NO: 77595 - DNA, 23 bp, Artificial Sequence
  Synthetic
cgtccacucagactcatactucc

SEQ ID NO: 77596 - DNA, 27 bp, Artificial Sequence
  Synthetic
gcatccatcataucttccaaatccuct

SEQ ID NO: 77597 - DNA, 28 bp, Artificial Sequence
  Synthetic
catatttgtgtcugatgggcaatcttuc

SEQ ID NO: 77598 - DNA, 24 bp, Artificial Sequence
  Synthetic
tctaccagactuggcacctttcua

SEQ ID NO: 77599 - DNA, 29 bp, Artificial Sequence
  Synthetic
cgaggagaagaaaagugaaatgacuagat

SEQ ID NO: 77600 - DNA, 26 bp, Artificial Sequence
  Synthetic
tctctgggaccaugagatgaauaagt

SEQ ID NO: 77601 - DNA, 23 bp, Artificial Sequence
  Synthetic
tctctcagtuttgtcacctugcc

SEQ ID NO: 77602 - DNA, 23 bp, Artificial Sequence
  Synthetic
ccagaggcaugaaauggaccaat

SEQ ID NO: 77603 - DNA, 25 bp, Artificial Sequence
  Synthetic
gtcctttttcccutttcgtgttcug

SEQ ID NO: 77604 - DNA, 17 bp, Artificial Sequence
  Synthetic
gcucacccugcagcact

SEQ ID NO: 77605 - DNA, 18 bp, Artificial Sequence
  Synthetic
cagccccagcucatcuct

SEQ ID NO: 77606 - DNA, 21 bp, Artificial Sequence
  Synthetic
cagggaucttgaggcugcaaa

SEQ ID NO: 77607 - DNA, 21 bp, Artificial Sequence
  Synthetic
ctaagtccgcutctggtcucc

SEQ ID NO: 77608 - DNA, 24 bp, Artificial Sequence
  Synthetic
acugtttucagaagaagcgaaggt

SEQ ID NO: 77609 - DNA, 26 bp, Artificial Sequence
  Synthetic
atguattcctttttcauccacaggct

SEQ ID NO: 77610 - DNA, 21 bp, Artificial Sequence
  Synthetic
actgtgcaacautcccaggut

SEQ ID NO: 77611 - DNA, 23 bp, Artificial Sequence
  Synthetic
atgatgaugacgtttucccacca

SEQ ID NO: 77612 - DNA, 23 bp, Artificial Sequence
  Synthetic
acgcggctuaaatgaagtgaaug

SEQ ID NO: 77613 - DNA, 27 bp, Artificial Sequence
  Synthetic
ggcgatacugaggaggattttattgua

SEQ ID NO: 77614 - DNA, 20 bp, Artificial Sequence
  Synthetic
cutaacucaggcccgggaaa

SEQ ID NO: 77615 - DNA, 24 bp, Artificial Sequence
  Synthetic
gtctgaggcugttcactgactuac

SEQ ID NO: 77616 - DNA, 22 bp, Artificial Sequence
  Synthetic
catcgtcaggccucaacacaua

SEQ ID NO: 77617 - DNA, 28 bp, Artificial Sequence
  Synthetic
gcagagaggaugtgttttcatcauaagt

SEQ ID NO: 77618 - DNA, 20 bp, Artificial Sequence
  Synthetic
acctuagcagggccaaccua

SEQ ID NO: 77619 - DNA, 21 bp, Artificial Sequence
  Synthetic
tugacgtcauccaggacaagg

SEQ ID NO: 77620 - DNA, 25 bp, Artificial Sequence
  Synthetic
tgggaagauggagtaagagaaguga

SEQ ID NO: 77621 - DNA, 29 bp, Artificial Sequence
  Synthetic
cctccaatctaauagacgacaacttaucc

SEQ ID NO: 77622 - DNA, 22 bp, Artificial Sequence
  Synthetic
tttaggtucgccagttggugat

SEQ ID NO: 77623 - DNA, 29 bp, Artificial Sequence
  Synthetic
tctaggtgtgaugggatataagagcauac

SEQ ID NO: 77624 - DNA, 22 bp, Artificial Sequence
  Synthetic
cagaaggtcuacatgggtgcut

SEQ ID NO: 77625 - DNA, 26 bp, Artificial Sequence
  Synthetic
agtctgtaatuttgacatggtuggga

SEQ ID NO: 77626 - DNA, 23 bp, Artificial Sequence
  Synthetic
gaacctaaugccatttcctuccc

SEQ ID NO: 77627 - DNA, 26 bp, Artificial Sequence
  Synthetic
tgaacatcauccaggtatcugcaaaa

SEQ ID NO: 77628 - DNA, 21 bp, Artificial Sequence
  Synthetic
ggcaatagaccccugctccua

SEQ ID NO: 77629 - DNA, 23 bp, Artificial Sequence
  Synthetic
cgtcgtccaugtcttcttcaucc

SEQ ID NO: 77630 - DNA, 24 bp, Artificial Sequence
  Synthetic
aatacagtgtgugctgctaaccut

SEQ ID NO: 77631 - DNA, 22 bp, Artificial Sequence
  Synthetic
ctgttcuaggcaggactuccac

SEQ ID NO: 77632 - DNA, 23 bp, Artificial Sequence
  Synthetic
ctggcccgaaugtgattuaacat

SEQ ID NO: 77633 - DNA, 27 bp, Artificial Sequence
  Synthetic
cctcatuaaagaagaatgtgggucagt

SEQ ID NO: 77634 - DNA, 24 bp, Artificial Sequence
  Synthetic
tcaaauggaaagccactgaacuga

SEQ ID NO: 77635 - DNA, 29 bp, Artificial Sequence
  Synthetic
aagatgttgacuttgaattggcttugaat

SEQ ID NO: 77636 - DNA, 20 bp, Artificial Sequence
  Synthetic
cggaacgugctggucaagag

SEQ ID NO: 77637 - DNA, 22 bp, Artificial Sequence
  Synthetic
tgctccttgguccttcaccuaa

SEQ ID NO: 77638 - DNA, 23 bp, Artificial Sequence
  Synthetic
agtgccaucaagtgtcaauacca

SEQ ID NO: 77639 - DNA, 23 bp, Artificial Sequence
  Synthetic
cattcctccutcatcacctugct

SEQ ID NO: 77640 - DNA, 22 bp, Artificial Sequence
  Synthetic
cagggagaaagugctcauggat

SEQ ID NO: 77641 - DNA, 21 bp, Artificial Sequence
  Synthetic
cagtcucaacccagctcucac

SEQ ID NO: 77642 - DNA, 21 bp, Artificial Sequence
  Synthetic
caacttcuaccgtgcccugat

SEQ ID NO: 77643 - DNA, 25 bp, Artificial Sequence
  Synthetic
aguagacacagctugagagagagag

SEQ ID NO: 77644 - DNA, 22 bp, Artificial Sequence
  Synthetic
ggacuccttccttucacacaga

SEQ ID NO: 77645 - DNA, 25 bp, Artificial Sequence
  Synthetic
gagcaaauggacaaggaugaagaag

SEQ ID NO: 77646 - DNA, 28 bp, Artificial Sequence
  Synthetic
caagcaagatugctctcaaaaagauacc

SEQ ID NO: 77647 - DNA, 28 bp, Artificial Sequence
  Synthetic
tcttagtgaaatcuccaaaccatgugaa

SEQ ID NO: 77648 - DNA, 23 bp, Artificial Sequence
  Synthetic
tggctagcccaaaauctgtgaut

SEQ ID NO: 77649 - DNA, 27 bp, Artificial Sequence
  Synthetic
ggaaaaccugggcattaactgaatauc

SEQ ID NO: 77650 - DNA, 27 bp, Artificial Sequence
  Synthetic
caaggcuacagatcatctuacaaacca

SEQ ID NO: 77651 - DNA, 25 bp, Artificial Sequence
  Synthetic
aactcattcagauctcaaggtuggg

SEQ ID NO: 77652 - DNA, 25 bp, Artificial Sequence
  Synthetic
tggatgatacuccatctcccguaaa

SEQ ID NO: 77653 - DNA, 20 bp, Artificial Sequence
  Synthetic
gccagggcucctgatacugt

SEQ ID NO: 77654 - DNA, 28 bp, Artificial Sequence
  Synthetic
tccaagatgcauttacttctaggttuga

SEQ ID NO: 77655 - DNA, 28 bp, Artificial Sequence
  Synthetic
tgutaatcattagtaguccagagagcca

SEQ ID NO: 77656 - DNA, 25 bp, Artificial Sequence
  Synthetic
gacactgtctgugtctcttcttcut

SEQ ID NO: 77657 - DNA, 22 bp, Artificial Sequence
  Synthetic
ttcagcaccuacctctcucaca

SEQ ID NO: 77658 - DNA, 28 bp, Artificial Sequence
  Synthetic
ctaccatuaagaggaagttagacacugg

SEQ ID NO: 77659 - DNA, 26 bp, Artificial Sequence
  Synthetic
catcactgggucaatttcttgtucaa

SEQ ID NO: 77660 - DNA, 27 bp, Artificial Sequence
  Synthetic
aggaaatgttaautgctgcttttgugt

SEQ ID NO: 77661 - DNA, 28 bp, Artificial Sequence
  Synthetic
ggctatcatcugaattttcccaagaaut

SEQ ID NO: 77662 - DNA, 27 bp, Artificial Sequence
  Synthetic
acagtttgccaagugaaataguacact

SEQ ID NO: 77663 - DNA, 27 bp, Artificial Sequence
  Synthetic
gcatacaucagacagcacagaatugat

SEQ ID NO: 77664 - DNA, 24 bp, Artificial Sequence
  Synthetic
ccatcaccagcugaaaagucacat

SEQ ID NO: 77665 - DNA, 28 bp, Artificial Sequence
  Synthetic
acttacttgtcugcagttttggtaacut

SEQ ID NO: 77666 - DNA, 27 bp, Artificial Sequence
  Synthetic
gtcgaaaataccutcaacacccaaaut

SEQ ID NO: 77667 - DNA, 28 bp, Artificial Sequence
  Synthetic
caaaccagacauacataactgtacaugc

SEQ ID NO: 77668 - DNA, 21 bp, Artificial Sequence
  Synthetic
gctccaagcuctctgagguct

SEQ ID NO: 77669 - DNA, 28 bp, Artificial Sequence
  Synthetic
aaagccagaagcaggauattctcttauc

SEQ ID NO: 77670 - DNA, 21 bp, Artificial Sequence
  Synthetic
ttctccucgcctccagtuagt

SEQ ID NO: 77671 - DNA, 28 bp, Artificial Sequence
  Synthetic
ggtgaaggcaatutactcttgaactgua

SEQ ID NO: 77672 - DNA, 21 bp, Artificial Sequence
  Synthetic
ggaccaauagggccuagggaa

SEQ ID NO: 77673 - DNA, 22 bp, Artificial Sequence
  Synthetic
gggactgaguccgcttgttauc

SEQ ID NO: 77674 - DNA, 21 bp, Artificial Sequence
  Synthetic
gagugacctccugcaacagaa

SEQ ID NO: 77675 - DNA, 24 bp, Artificial Sequence
  Synthetic
gtaggtaggugacacttcgttuga

SEQ ID NO: 77676 - DNA, 20 bp, Artificial Sequence
  Synthetic
ggacauttgctuccggcaga

SEQ ID NO: 77677 - DNA, 28 bp, Artificial Sequence
  Synthetic
ccctggtauaaagaggagaaaagaguga

SEQ ID NO: 77678 - DNA, 23 bp, Artificial Sequence
  Synthetic
ggtttgtgtgugcagtgagttut

SEQ ID NO: 77679 - DNA, 25 bp, Artificial Sequence
  Synthetic
cagattguggagttatucgaggcat

SEQ ID NO: 77680 - DNA, 21 bp, Artificial Sequence
  Synthetic
cgtcactgugtaccccucact

SEQ ID NO: 77681 - DNA, 25 bp, Artificial Sequence
  Synthetic
ccaaacagccagauatcactgucat

SEQ ID NO: 77682 - DNA, 26 bp, Artificial Sequence
  Synthetic
tgaaagaaagcugtaatggcuacaca

SEQ ID NO: 77683 - DNA, 28 bp, Artificial Sequence
  Synthetic
ggtgaatgcccutggtcaatataaugat

SEQ ID NO: 77684 - DNA, 21 bp, Artificial Sequence
  Synthetic
agactuccggaaccatcacug

SEQ ID NO: 77685 - DNA, 28 bp, Artificial Sequence
  Synthetic
cccaattgattgugaaagtccacataut

SEQ ID NO: 77686 - DNA, 28 bp, Artificial Sequence
  Synthetic
tcaagtgtcattugccatcctaaauact

SEQ ID NO: 77687 - DNA, 26 bp, Artificial Sequence
  Synthetic
gggtgatataguagattcggtgctug

SEQ ID NO: 77688 - DNA, 25 bp, Artificial Sequence
  Synthetic
cgcggcatguctatagaaactttut

SEQ ID NO: 77689 - DNA, 27 bp, Artificial Sequence
  Synthetic
atgcatcaaacuagttcctuggaaaga

SEQ ID NO: 77690 - DNA, 20 bp, Artificial Sequence
  Synthetic
gcagtgugccaaaccagaug

SEQ ID NO: 77691 - DNA, 22 bp, Artificial Sequence
  Synthetic
gcataaagcgggugttcaggua

SEQ ID NO: 77692 - DNA, 25 bp, Artificial Sequence
  Synthetic
tcttggcuctttaattuggcagaca

SEQ ID NO: 77693 - DNA, 24 bp, Artificial Sequence
  Synthetic
tgctgacauctgttttctgtucct

SEQ ID NO: 77694 - DNA, 26 bp, Artificial Sequence
  Synthetic
ctttcttcaggaucgtctccatcauc

SEQ ID NO: 77695 - DNA, 28 bp, Artificial Sequence
  Synthetic
acttttgacattautgcttctcctgugt

SEQ ID NO: 77696 - DNA, 23 bp, Artificial Sequence
  Synthetic
gccctcaucccaagaaugaagac

SEQ ID NO: 77697 - DNA, 19 bp, Artificial Sequence
  Synthetic
gccuaacaaccggcacauc

SEQ ID NO: 77698 - DNA, 27 bp, Artificial Sequence
  Synthetic
gttctttugcaaacaggatctcaugat

SEQ ID NO: 77699 - DNA, 23 bp, Artificial Sequence
  Synthetic
actttatcgccutcactgcctut

SEQ ID NO: 77700 - DNA, 22 bp, Artificial Sequence
  Synthetic
gaaugcacgctgaugggaaaag

SEQ ID NO: 77701 - DNA, 23 bp, Artificial Sequence
  Synthetic
ccccgtgacaucttccagtttut

SEQ ID NO: 77702 - DNA, 22 bp, Artificial Sequence
  Synthetic
cggatgttuctctggctaugga

SEQ ID NO: 77703 - DNA, 20 bp, Artificial Sequence
  Synthetic
tgacaaccccuccctcaugt

SEQ ID NO: 77704 - DNA, 22 bp, Artificial Sequence
  Synthetic
ggaauguagagaagcgcagcat

SEQ ID NO: 77705 - DNA, 26 bp, Artificial Sequence
  Synthetic
acaccttgatttugttctttgggtug

SEQ ID NO: 77706 - DNA, 25 bp, Artificial Sequence
  Synthetic
agttggtgaatuccagtatgggtut

SEQ ID NO: 77707 - DNA, 23 bp, Artificial Sequence
  Synthetic
tgtacaaguacccctcagaccuc

SEQ ID NO: 77708 - DNA, 21 bp, Artificial Sequence
  Synthetic
ctcttagcucctctgcaguca

SEQ ID NO: 77709 - DNA, 27 bp, Artificial Sequence
  Synthetic
ctgtccatttutccccttactugaaga

SEQ ID NO: 77710 - DNA, 23 bp, Artificial Sequence
  Synthetic
tttgatgtctaucgctgtggcut

SEQ ID NO: 77711 - DNA, 26 bp, Artificial Sequence
  Synthetic
ggttgatgtcaucagtgtagtaguca

SEQ ID NO: 77712 - DNA, 26 bp, Artificial Sequence
  Synthetic
tggctagtttgaaucaagatgcacut

SEQ ID NO: 77713 - DNA, 24 bp, Artificial Sequence
  Synthetic
ccttacaauccgatcgattccuga

SEQ ID NO: 77714 - DNA, 18 bp, Artificial Sequence
  Synthetic
ggacgucacagugaccga

SEQ ID NO: 77715 - DNA, 19 bp, Artificial Sequence
  Synthetic
ctaccugcgccacauccat

SEQ ID NO: 77716 - DNA, 25 bp, Artificial Sequence
  Synthetic
gacattccaaauggctgcaaacuaa

SEQ ID NO: 77717 - DNA, 28 bp, Artificial Sequence
  Synthetic
cacttctttacaucaggtgtcattucct

SEQ ID NO: 77718 - DNA, 18 bp, Artificial Sequence
  Synthetic
cuccagagccgugcgaat

SEQ ID NO: 77719 - DNA, 21 bp, Artificial Sequence
  Synthetic
gatcgctttuccgagcttcug

SEQ ID NO: 77720 - DNA, 28 bp, Artificial Sequence
  Synthetic
aatcacagcaatguttctagtggtcuaa

SEQ ID NO: 77721 - DNA, 23 bp, Artificial Sequence
  Synthetic
gaagcttctcugtcgttttccug

SEQ ID NO: 77722 - DNA, 21 bp, Artificial Sequence
  Synthetic
gctcauggccatcucagacag

SEQ ID NO: 77723 - DNA, 23 bp, Artificial Sequence
  Synthetic
ctgggctgtaugagtgtgagaua

SEQ ID NO: 77724 - DNA, 21 bp, Artificial Sequence
  Synthetic
ggacttagcguccagtgacuc

SEQ ID NO: 77725 - DNA, 25 bp, Artificial Sequence
  Synthetic
aagagaaucgcaggaaaucaagaca

SEQ ID NO: 77726 - DNA, 22 bp, Artificial Sequence
  Synthetic
gacgtagguagtgctugagacc

SEQ ID NO: 77727 - DNA, 23 bp, Artificial Sequence
  Synthetic
aatagcatugcagagaggcguat

SEQ ID NO: 77728 - DNA, 26 bp, Artificial Sequence
  Synthetic
ttttgacttaaugcacacacaaugct

SEQ ID NO: 77729 - DNA, 24 bp, Artificial Sequence
  Synthetic
accaaacatgacugacttcagugt

SEQ ID NO: 77730 - DNA, 21 bp, Artificial Sequence
  Synthetic
gctgugccggaacattcttug

SEQ ID NO: 77731 - DNA, 21 bp, Artificial Sequence
  Synthetic
cttgaagcuggtccagctcut

SEQ ID NO: 77732 - DNA, 25 bp, Artificial Sequence
  Synthetic
accaatggucaccaggtuagaaaaa

SEQ ID NO: 77733 - DNA, 28 bp, Artificial Sequence
  Synthetic
cccaacttucaacacattttcaccauat

SEQ ID NO: 77734 - DNA, 20 bp, Artificial Sequence
  Synthetic
ggagtcgaugcagacgtugt

SEQ ID NO: 77735 - DNA, 20 bp, Artificial Sequence
  Synthetic
cctggtguccaaggaacugg

SEQ ID NO: 77736 - DNA, 18 bp, Artificial Sequence
  Synthetic
gtgggccucgucgaagac

SEQ ID NO: 77737 - DNA, 18 bp, Artificial Sequence
  Synthetic
gccctgguaaccctgcuc

SEQ ID NO: 77738 - DNA, 23 bp, Artificial Sequence
  Synthetic
aggtgaaacugtgcttgtauccc

SEQ ID NO: 77739 - DNA, 23 bp, Artificial Sequence
  Synthetic
tttccagcaguctgtagccatut

SEQ ID NO: 77740 - DNA, 21 bp, Artificial Sequence
  Synthetic
cccuacacacactctugacca

SEQ ID NO: 77741 - DNA, 22 bp, Artificial Sequence
  Synthetic
ttggutggccattugcaagaag

SEQ ID NO: 77742 - DNA, 21 bp, Artificial Sequence
  Synthetic
gaaccucctgcgttuccagaa

SEQ ID NO: 77743 - DNA, 23 bp, Artificial Sequence
  Synthetic
gtcatctgucgcacattggttug

SEQ ID NO: 77744 - DNA, 25 bp, Artificial Sequence
  Synthetic
gccaggctttugaatttctcctgua

SEQ ID NO: 77745 - DNA, 28 bp, Artificial Sequence
  Synthetic
gtgattggtttutcttcacatcttucca

SEQ ID NO: 77746 - DNA, 23 bp, Artificial Sequence
  Synthetic
gcagaugaggatcuagggaaacc

SEQ ID NO: 77747 - DNA, 22 bp, Artificial Sequence
  Synthetic
gccctcugacgtatctctcucc

SEQ ID NO: 77748 - DNA, 25 bp, Artificial Sequence
  Synthetic
agctcttgatgautgcaggatcaut

SEQ ID NO: 77749 - DNA, 21 bp, Artificial Sequence
  Synthetic
cagttcctcutcgccttgtuc

SEQ ID NO: 77750 - DNA, 23 bp, Artificial Sequence
  Synthetic
ctgaaactuccaaacctcccuca

SEQ ID NO: 77751 - DNA, 22 bp, Artificial Sequence
  Synthetic
tgccattcauggagcgaatcut

SEQ ID NO: 77752 - DNA, 21 bp, Artificial Sequence
  Synthetic
gctgcugagcctgaatctuct

SEQ ID NO: 77753 - DNA, 28 bp, Artificial Sequence
  Synthetic
tgaccaaatcugttatagctaatugcct

SEQ ID NO: 77754 - DNA, 25 bp, Artificial Sequence
  Synthetic
accatgtccuctcttttctcttugg

SEQ ID NO: 77755 - DNA, 25 bp, Artificial Sequence
  Synthetic
acatgggcuttcttgatguaaccat

SEQ ID NO: 77756 - DNA, 23 bp, Artificial Sequence
  Synthetic
gccacaggaagcugagaaagaug

SEQ ID NO: 77757 - DNA, 27 bp, Artificial Sequence
  Synthetic
ctcatccaccaacuccttaaaacucaa

SEQ ID NO: 77758 - DNA, 29 bp, Artificial Sequence
  Synthetic
cccaaatuaagaagagcagtguagagaac

SEQ ID NO: 77759 - DNA, 25 bp, Artificial Sequence
  Synthetic
ggcagaauaacatggcttugagact

SEQ ID NO: 77760 - DNA, 22 bp, Artificial Sequence
  Synthetic
ctttcuccaggccaggaaauga

SEQ ID NO: 77761 - DNA, 21 bp, Artificial Sequence
  Synthetic
gcugaaactcugacggcagaa

SEQ ID NO: 77762 - DNA, 24 bp, Artificial Sequence
  Synthetic
agtcatgctuaggatggatcccut

SEQ ID NO: 77763 - DNA, 21 bp, Artificial Sequence
  Synthetic
acagacacgugaaggcaugag

SEQ ID NO: 77764 - DNA, 24 bp, Artificial Sequence
  Synthetic
tgaaggtcauagtgcaaacgtuga

SEQ ID NO: 77765 - DNA, 20 bp, Artificial Sequence
  Synthetic
caagtgcuagtccacuggct

SEQ ID NO: 77766 - DNA, 23 bp, Artificial Sequence
  Synthetic
caaagacutccgaatuccccaga

SEQ ID NO: 77767 - DNA, 18 bp, Artificial Sequence
  Synthetic
ggagcgcutgccucagaa

SEQ ID NO: 77768 - DNA, 26 bp, Artificial Sequence
  Synthetic
ggacacatcagutttcctctcaugat

SEQ ID NO: 77769 - DNA, 28 bp, Artificial Sequence
  Synthetic
gctgtcatttucttcaacttcatuagca

SEQ ID NO: 77770 - DNA, 28 bp, Artificial Sequence
  Synthetic
gctaatgaagutgaagaaaaugacagca

SEQ ID NO: 77771 - DNA, 27 bp, Artificial Sequence
  Synthetic
gaaaacccatgautcagtcctgaacua

SEQ ID NO: 77772 - DNA, 22 bp, Artificial Sequence
  Synthetic
atcaggtccutcccatauccct

SEQ ID NO: 77773 - DNA, 27 bp, Artificial Sequence
  Synthetic
gcacatttaccugttggatgttatcug

SEQ ID NO: 77774 - DNA, 22 bp, Artificial Sequence
  Synthetic
ccgctatcaccutcaggaagut

SEQ ID NO: 77775 - DNA, 26 bp, Artificial Sequence
  Synthetic
gctauagagagaacccaaatcuccag

SEQ ID NO: 77776 - DNA, 23 bp, Artificial Sequence
  Synthetic
ctgggtctucatcagagagucct

SEQ ID NO: 77777 - DNA, 20 bp, Artificial Sequence
  Synthetic
acctggugcagcaactctut

SEQ ID NO: 77778 - DNA, 26 bp, Artificial Sequence
  Synthetic
gtgtctctcaatuctttagcccctut

SEQ ID NO: 77779 - DNA, 27 bp, Artificial Sequence
  Synthetic
gggagatgaagutttagatcaggaugg

SEQ ID NO: 77780 - DNA, 27 bp, Artificial Sequence
  Synthetic
catcctgatcuaaaacttcatcuccca

SEQ ID NO: 77781 - DNA, 26 bp, Artificial Sequence
  Synthetic
gagaactggguaaagacatguacaca

SEQ ID NO: 77782 - DNA, 23 bp, Artificial Sequence
  Synthetic
gctctctuggagtgtctccucat

SEQ ID NO: 77783 - DNA, 21 bp, Artificial Sequence
  Synthetic
ccgggatuagcgaactuccag

SEQ ID NO: 77784 - DNA, 22 bp, Artificial Sequence
  Synthetic
gctcagtgugcaagtcguaaga

SEQ ID NO: 77785 - DNA, 22 bp, Artificial Sequence
  Synthetic
gctcttgggaugcaatgtgcua

SEQ ID NO: 77786 - DNA, 21 bp, Artificial Sequence
  Synthetic
caccgaugaccccatctucaa

SEQ ID NO: 77787 - DNA, 19 bp, Artificial Sequence
  Synthetic
ccggccuctcgctgaauat

SEQ ID NO: 77788 - DNA, 23 bp, Artificial Sequence
  Synthetic
caacagctutgctaggauccaga

SEQ ID NO: 77789 - DNA, 27 bp, Artificial Sequence
  Synthetic
ctctctttctccuttttcaaccacuga

SEQ ID NO: 77790 - DNA, 25 bp, Artificial Sequence
  Synthetic
gggcatttuccattcataugcagaa

SEQ ID NO: 77791 - DNA, 22 bp, Artificial Sequence
  Synthetic
tccgaaggaagaggcugacuat

SEQ ID NO: 77792 - DNA, 22 bp, Artificial Sequence
  Synthetic
gcctaagggugaaagatuggca

SEQ ID NO: 77793 - DNA, 20 bp, Artificial Sequence
  Synthetic
gcuggaggcccaaacuaagg

SEQ ID NO: 77794 - DNA, 28 bp, Artificial Sequence
  Synthetic
cctgatcatacuccaggaaatcatctuc

SEQ ID NO: 77795 - DNA, 21 bp, Artificial Sequence
  Synthetic
gctatgttucccctcctuccc

SEQ ID NO: 77796 - DNA, 22 bp, Artificial Sequence
  Synthetic
ccucaccacagagcatctucat

SEQ ID NO: 77797 - DNA, 28 bp, Artificial Sequence
  Synthetic
tgtcaagttcuaagactctgtactcugg

SEQ ID NO: 77798 - DNA, 18 bp, Artificial Sequence
  Synthetic
gggtccucgggtgacuca

SEQ ID NO: 77799 - DNA, 20 bp, Artificial Sequence
  Synthetic
ccggauactuggaccagcaa

SEQ ID NO: 77800 - DNA, 26 bp, Artificial Sequence
  Synthetic
ctatgtcctatttucccaaccagcut

SEQ ID NO: 77801 - DNA, 21 bp, Artificial Sequence
  Synthetic
ggtattctcucagccgggaug

SEQ ID NO: 77802 - DNA, 20 bp, Artificial Sequence
  Synthetic
ctcacgcugctgaaggtgua

SEQ ID NO: 77803 - DNA, 17 bp, Artificial Sequence
  Synthetic
ccuggacggtgugcgaa

SEQ ID NO: 77804 - DNA, 20 bp, Artificial Sequence
  Synthetic
cagatctgucccacgcuaga

SEQ ID NO: 77805 - DNA, 26 bp, Artificial Sequence
  Synthetic
aggcatttuaaacagcaagtcttugg

SEQ ID NO: 77806 - DNA, 28 bp, Artificial Sequence
  Synthetic
tcaacggtttauctaagttgtguaagca

SEQ ID NO: 77807 - DNA, 27 bp, Artificial Sequence
  Synthetic
tctaggctucagataagtttugccaaa

SEQ ID NO: 77808 - DNA, 21 bp, Artificial Sequence
  Synthetic
cacggatcucagcaggacauc

SEQ ID NO: 77809 - DNA, 28 bp, Artificial Sequence
  Synthetic
cttcacatgttugtctttccttttguct

SEQ ID NO: 77810 - DNA, 21 bp, Artificial Sequence
  Synthetic
agaggacaccutggctgguaa

SEQ ID NO: 77811 - DNA, 29 bp, Artificial Sequence
  Synthetic
gccttatttagaaugacagcacagguaat

SEQ ID NO: 77812 - DNA, 21 bp, Artificial Sequence
  Synthetic
tgcctgtggauccctagcuat

SEQ ID NO: 77813 - DNA, 29 bp, Artificial Sequence
  Synthetic
cgtagcatttauggagagtgagtcttuaa

SEQ ID NO: 77814 - DNA, 21 bp, Artificial Sequence
  Synthetic
ctggaaagguggtucccaaga

SEQ ID NO: 77815 - DNA, 23 bp, Artificial Sequence
  Synthetic
gtgaagggcaaugaaggguacat

SEQ ID NO: 77816 - DNA, 28 bp, Artificial Sequence
  Synthetic
gtgtgtaacggaauaggtattggugaat

SEQ ID NO: 77817 - DNA, 22 bp, Artificial Sequence
  Synthetic
aagcaacugaacctgtgacuca

SEQ ID NO: 77818 - DNA, 20 bp, Artificial Sequence
  Synthetic
acctccaucagtggcgauct

SEQ ID NO: 77819 - DNA, 24 bp, Artificial Sequence
  Synthetic
cagaggaggaguatgtgugaagga

SEQ ID NO: 77820 - DNA, 19 bp, Artificial Sequence
  Synthetic
cuctgcauaaccgggacct

SEQ ID NO: 77821 - DNA, 21 bp, Artificial Sequence
  Synthetic
gctgctggaguacgtgaagug

SEQ ID NO: 77822 - DNA, 19 bp, Artificial Sequence
  Synthetic
ctctccugcaccacaugct

SEQ ID NO: 77823 - DNA, 17 bp, Artificial Sequence
  Synthetic
cgccgcugatagcguct

SEQ ID NO: 77824 - DNA, 19 bp, Artificial Sequence
  Synthetic
ctcccugaggctcagccua

SEQ ID NO: 77825 - DNA, 20 bp, Artificial Sequence
  Synthetic
ccagacaccgutgggaugaa

SEQ ID NO: 77826 - DNA, 20 bp, Artificial Sequence
  Synthetic
cuagagaacgagcgggucag

SEQ ID NO: 77827 - DNA, 23 bp, Artificial Sequence
  Synthetic
aaagtucctaccctucgcagaag

SEQ ID NO: 77828 - DNA, 24 bp, Artificial Sequence
  Synthetic
acgaatacugacagcaatgctgut

SEQ ID NO: 77829 - DNA, 28 bp, Artificial Sequence
  Synthetic
tggagagaucaggtgtaaatagugaact

SEQ ID NO: 77830 - DNA, 20 bp, Artificial Sequence
  Synthetic
cctccatguagctgccguag

SEQ ID NO: 77831 - DNA, 24 bp, Artificial Sequence
  Synthetic
cgatggagacaugctctttgatug

SEQ ID NO: 77832 - DNA, 20 bp, Artificial Sequence
  Synthetic
cacgagcucagaagcaggua

SEQ ID NO: 77833 - DNA, 28 bp, Artificial Sequence
  Synthetic
ctgacttgaaguttttgtctgtttcucc

SEQ ID NO: 77834 - DNA, 29 bp, Artificial Sequence
  Synthetic
ggctttggaugcattaagaaatucaagat

SEQ ID NO: 77835 - DNA, 26 bp, Artificial Sequence
  Synthetic
acaccttggtutcttccattttcugt

SEQ ID NO: 77836 - DNA, 24 bp, Artificial Sequence
  Synthetic
ccttgacuaacataccagcugcaa

SEQ ID NO: 77837 - DNA, 23 bp, Artificial Sequence
  Synthetic
acactgacuctccatgttugacc

SEQ ID NO: 77838 - DNA, 21 bp, Artificial Sequence
  Synthetic
ccaatcugccggcacatgtua

SEQ ID NO: 77839 - DNA, 28 bp, Artificial Sequence
  Synthetic
cccacagaataucgatcctatgtucaat

SEQ ID NO: 77840 - DNA, 22 bp, Artificial Sequence
  Synthetic
ccagggtatguggctacatgut

SEQ ID NO: 77841 - DNA, 21 bp, Artificial Sequence
  Synthetic
acttcucacaccgctgtgtuc

SEQ ID NO: 77842 - DNA, 22 bp, Artificial Sequence
  Synthetic
ggtgccctugctcttccttuag

SEQ ID NO: 77843 - DNA, 28 bp, Artificial Sequence
  Synthetic
acctgcttatugcaacaagtattguaga

SEQ ID NO: 77844 - DNA, 22 bp, Artificial Sequence
  Synthetic
caagaggugacagcagaggaug

SEQ ID NO: 77845 - DNA, 23 bp, Artificial Sequence
  Synthetic
aagagggtcugaggaaggauagg

SEQ ID NO: 77846 - DNA, 28 bp, Artificial Sequence
  Synthetic
tctaggcauaaagatgtcatcaucaacc

SEQ ID NO: 77847 - DNA, 28 bp, Artificial Sequence
  Synthetic
tgaactgataaagugcactggaugaaaa

SEQ ID NO: 77848 - DNA, 26 bp, Artificial Sequence
  Synthetic
ggcattttcucaaaatcttgcccuat

SEQ ID NO: 77849 - DNA, 25 bp, Artificial Sequence
  Synthetic
tggtatttgcauctgttgggugaaa

SEQ ID NO: 77850 - DNA, 27 bp, Artificial Sequence
  Synthetic
ttgcattttgguatatcaacacccuct

SEQ ID NO: 77851 - DNA, 27 bp, Artificial Sequence
  Synthetic
ttcttagaagugcttttcttgguggat

SEQ ID NO: 77852 - DNA, 25 bp, Artificial Sequence
  Synthetic
aaatgaagttgutttggctguggag

SEQ ID NO: 77853 - DNA, 27 bp, Artificial Sequence
  Synthetic
tgattcttaccccaaaaautccctgut

SEQ ID NO: 77854 - DNA, 23 bp, Artificial Sequence
  Synthetic
gagcggcaautcacuaacaagaa

SEQ ID NO: 77855 - DNA, 28 bp, Artificial Sequence
  Synthetic
tgccatgacaacutgatgcttatuaaac

SEQ ID NO: 77856 - DNA, 20 bp, Artificial Sequence
  Synthetic
ggcaggaacuccgatctugt

SEQ ID NO: 77857 - DNA, 28 bp, Artificial Sequence
  Synthetic
aggcttctgaaauggttttctcatauct

SEQ ID NO: 77858 - DNA, 20 bp, Artificial Sequence
  Synthetic
gaggaccuagaagcccucca

SEQ ID NO: 77859 - DNA, 25 bp, Artificial Sequence
  Synthetic
tttgcgagagguaatgaaugacact

SEQ ID NO: 77860 - DNA, 28 bp, Artificial Sequence
  Synthetic
tcagctaaagggaacugctattttugaa

SEQ ID NO: 77861 - DNA, 20 bp, Artificial Sequence
  Synthetic
tuggccaccaggaagtucat

SEQ ID NO: 77862 - DNA, 28 bp, Artificial Sequence
  Synthetic
ggtcagagctguattattctcctcttug

SEQ ID NO: 77863 - DNA, 26 bp, Artificial Sequence
  Synthetic
acatctgtcacuaattgccactcaut

SEQ ID NO: 77864 - DNA, 20 bp, Artificial Sequence
  Synthetic
ccccaugaaggagagccuca

SEQ ID NO: 77865 - DNA, 26 bp, Artificial Sequence
  Synthetic
tgaatggctaguactgatggttucac

SEQ ID NO: 77866 - DNA, 22 bp, Artificial Sequence
  Synthetic
caggtcugcctgtatgcaucat

SEQ ID NO: 77867 - DNA, 27 bp, Artificial Sequence
  Synthetic
gcaagtactaugaaaactgtgaggtug

SEQ ID NO: 77868 - DNA, 23 bp, Artificial Sequence
  Synthetic
tctgttaccuggtggtagtucct

SEQ ID NO: 77869 - DNA, 28 bp, Artificial Sequence
  Synthetic
tggtccttcgtutttcttctagttctut

SEQ ID NO: 77870 - DNA, 27 bp, Artificial Sequence
  Synthetic
actaccacctuctagctgagaaaauct

SEQ ID NO: 77871 - DNA, 17 bp, Artificial Sequence
  Synthetic
ttcctggutgcggcugt

SEQ ID NO: 77872 - DNA, 22 bp, Artificial Sequence
  Synthetic
gttatctccaggutgcccauga

SEQ ID NO: 77873 - DNA, 25 bp, Artificial Sequence
  Synthetic
cacgtgtaucttcttgtcttugcag

SEQ ID NO: 77874 - DNA, 21 bp, Artificial Sequence
  Synthetic
ccagcuaaggagaccacugga

SEQ ID NO: 77875 - DNA, 21 bp, Artificial Sequence
  Synthetic
ctttctggagugtgcguacca

SEQ ID NO: 77876 - DNA, 22 bp, Artificial Sequence
  Synthetic
ctgggagagugagagggtgtua

SEQ ID NO: 77877 - DNA, 22 bp, Artificial Sequence
  Synthetic
actgcagucctcaagcattuag

SEQ ID NO: 77878 - DNA, 18 bp, Artificial Sequence
  Synthetic
gtagccgucgtcgtcgua

SEQ ID NO: 77879 - DNA, 22 bp, Artificial Sequence
  Synthetic
gggtcatgucttcagggctuag

SEQ ID NO: 77880 - DNA, 25 bp, Artificial Sequence
  Synthetic
cctcgatagugttcatttctuccgt

SEQ ID NO: 77881 - DNA, 25 bp, Artificial Sequence
  Synthetic
ctatatcucaccagaatgccaugct

SEQ ID NO: 77882 - DNA, 28 bp, Artificial Sequence
  Synthetic
aggcattcagauctaacattttgcucat

SEQ ID NO: 77883 - DNA, 23 bp, Artificial Sequence
  Synthetic
cgtcaaacuaaccgggtugagag

SEQ ID NO: 77884 - DNA, 21 bp, Artificial Sequence
  Synthetic
catggacagutggcucaacct

SEQ ID NO: 77885 - DNA, 28 bp, Artificial Sequence
  Synthetic
cagaagaactaggagutatggtctgtut

SEQ ID NO: 77886 - DNA, 23 bp, Artificial Sequence
  Synthetic
aggagggcagagcauttttctua

SEQ ID NO: 77887 - DNA, 22 bp, Artificial Sequence
  Synthetic
cucaggaccuaaggacacagac

SEQ ID NO: 77888 - DNA, 24 bp, Artificial Sequence
  Synthetic
ttgacaaugctctucccaggaaat

SEQ ID NO: 77889 - DNA, 22 bp, Artificial Sequence
  Synthetic
ttggatttuccatcctguggca

SEQ ID NO: 77890 - DNA, 24 bp, Artificial Sequence
  Synthetic
acttctgttucccgattttgcuct

SEQ ID NO: 77891 - DNA, 27 bp, Artificial Sequence
  Synthetic
gcctcacacautgctacaggaaauaaa

SEQ ID NO: 77892 - DNA, 22 bp, Artificial Sequence
  Synthetic
gcaccutaccttgtucaggcaa

SEQ ID NO: 77893 - DNA, 20 bp, Artificial Sequence
  Synthetic
aggaggaucgagctcacugt

SEQ ID NO: 77894 - DNA, 22 bp, Artificial Sequence
  Synthetic
gagcatguccaaattgcctgut

SEQ ID NO: 77895 - DNA, 21 bp, Artificial Sequence
  Synthetic
ttccugaggagcagaugacct

SEQ ID NO: 77896 - DNA, 21 bp, Artificial Sequence
  Synthetic
tgaggtgacccutgtctcugt

SEQ ID NO: 77897 - DNA, 28 bp, Artificial Sequence
  Synthetic
ccagcacttugatctttttgaatucagt

SEQ ID NO: 77898 - DNA, 25 bp, Artificial Sequence
  Synthetic
agctctctugaggatctugaaggaa

SEQ ID NO: 77899 - DNA, 26 bp, Artificial Sequence
  Synthetic
ggaaatatacagcutgcaaggacuct

SEQ ID NO: 77900 - DNA, 22 bp, Artificial Sequence
  Synthetic
gggtaucaagaaggccttgguc

SEQ ID NO: 77901 - DNA, 23 bp, Artificial Sequence
  Synthetic
aggacacacaggaaauggctuac

SEQ ID NO: 77902 - DNA, 21 bp, Artificial Sequence
  Synthetic
gacccagcucaagctctucaa

SEQ ID NO: 77903 - DNA, 24 bp, Artificial Sequence
  Synthetic
ggcatcauccttctttctcuccag

SEQ ID NO: 77904 - DNA, 22 bp, Artificial Sequence
  Synthetic
agtgggttuccctgtctcctua

SEQ ID NO: 77905 - DNA, 19 bp, Artificial Sequence
  Synthetic
cttggacagucgccccuac

SEQ ID NO: 77906 - DNA, 21 bp, Artificial Sequence
  Synthetic
tgcaugacaccaagtcctuga

SEQ ID NO: 77907 - DNA, 24 bp, Artificial Sequence
  Synthetic
ggagcttcucttcttccucaacag

SEQ ID NO: 77908 - DNA, 23 bp, Artificial Sequence
  Synthetic
ggatcucaggaaattccgtugct

SEQ ID NO: 77909 - DNA, 23 bp, Artificial Sequence
  Synthetic
ggttcaaagaugctttccagcut

SEQ ID NO: 77910 - DNA, 20 bp, Artificial Sequence
  Synthetic
aatctcugccgcttggtuga

SEQ ID NO: 77911 - DNA, 29 bp, Artificial Sequence
  Synthetic
ttgtcttctttatugccgtttctcattut

SEQ ID NO: 77912 - DNA, 33 bp, Artificial Sequence
  Synthetic
catattttcaataugaaaactgttccaggtuag

SEQ ID NO: 77913 - DNA, 25 bp, Artificial Sequence
  Synthetic
acattggaucacaactgctgctuaa

SEQ ID NO: 77914 - DNA, 25 bp, Artificial Sequence
  Synthetic
cacttaccutagctatcuggacaca

SEQ ID NO: 77915 - DNA, 19 bp, Artificial Sequence
  Synthetic
cacaccuagtccggtugct

SEQ ID NO: 77916 - DNA, 20 bp, Artificial Sequence
  Synthetic
ggatggutgggcucagacac

SEQ ID NO: 77917 - DNA, 28 bp, Artificial Sequence
  Synthetic
aaatcatcagcaccautagtacaaucca

SEQ ID NO: 77918 - DNA, 24 bp, Artificial Sequence
  Synthetic
cctttacttcaucagctcgtcuga

SEQ ID NO: 77919 - DNA, 27 bp, Artificial Sequence
  Synthetic
gcutttagaataatcaugggccagact

SEQ ID NO: 77920 - DNA, 23 bp, Artificial Sequence
  Synthetic
ggtccctuctcagatttctuccc

SEQ ID NO: 77921 - DNA, 26 bp, Artificial Sequence
  Synthetic
gttagtttgcugcggatuaaaacaca

SEQ ID NO: 77922 - DNA, 18 bp, Artificial Sequence
  Synthetic
agaacgcacguccaccut

SEQ ID NO: 77923 - DNA, 26 bp, Artificial Sequence
  Synthetic
tgaaaacutgtaatctuccccaggag

SEQ ID NO: 77924 - DNA, 29 bp, Artificial Sequence
  Synthetic
tttctacttgtttucagaatcactcugct

SEQ ID NO: 77925 - DNA, 25 bp, Artificial Sequence
  Synthetic
ggagaautttggcugaagacaacct

SEQ ID NO: 77926 - DNA, 27 bp, Artificial Sequence
  Synthetic
cttaccctctuctttgcatttctcuct

SEQ ID NO: 77927 - DNA, 26 bp, Artificial Sequence
  Synthetic
ttttcttagtuggcactctatgugct

SEQ ID NO: 77928 - DNA, 24 bp, Artificial Sequence
  Synthetic
ggttccaggaaugaaagcacauag

SEQ ID NO: 77929 - DNA, 33 bp, Artificial Sequence
  Synthetic
tatcaagtatctcaucctgtggagaataatuaa

SEQ ID NO: 77930 - DNA, 21 bp, Artificial Sequence
  Synthetic
ggaaacagccuggttctugga

SEQ ID NO: 77931 - DNA, 26 bp, Artificial Sequence
  Synthetic
aatgactttcutaccttcgaugccat

SEQ ID NO: 77932 - DNA, 25 bp, Artificial Sequence
  Synthetic
agtaagttcuaagggttagccugaa

SEQ ID NO: 77933 - DNA, 22 bp, Artificial Sequence
  Synthetic
ggaccccuactacaucagcaag

SEQ ID NO: 77934 - DNA, 20 bp, Artificial Sequence
  Synthetic
ctctgtcaacutcccgcuca

SEQ ID NO: 77935 - DNA, 28 bp, Artificial Sequence
  Synthetic
gcttcattaggcuctactctccttttua

SEQ ID NO: 77936 - DNA, 19 bp, Artificial Sequence
  Synthetic
gaggccguagtccgtctug

SEQ ID NO: 77937 - DNA, 21 bp, Artificial Sequence
  Synthetic
cccagcttcucatcctccgua

SEQ ID NO: 77938 - DNA, 28 bp, Artificial Sequence
  Synthetic
gaatgaggtcaagutcccatatguaaga

SEQ ID NO: 77939 - DNA, 24 bp, Artificial Sequence
  Synthetic
ggcucatuggaagaaaccaaacat

SEQ ID NO: 77940 - DNA, 17 bp, Artificial Sequence
  Synthetic
gccactcgucccgctug

SEQ ID NO: 77941 - DNA, 20 bp, Artificial Sequence
  Synthetic
cgtcagugcccaccctaaug

SEQ ID NO: 77942 - DNA, 20 bp, Artificial Sequence
  Synthetic
gtggttcugggaagcguact

SEQ ID NO: 77943 - DNA, 24 bp, Artificial Sequence
  Synthetic
tggctagcacuggaattcactuac

SEQ ID NO: 77944 - DNA, 24 bp, Artificial Sequence
  Synthetic
tgagagacugacaaggaaagucct

SEQ ID NO: 77945 - DNA, 22 bp, Artificial Sequence
  Synthetic
gatgcactguctgcttctcugt

SEQ ID NO: 77946 - DNA, 28 bp, Artificial Sequence
  Synthetic
aggaaattgaagutgtgaggaugaagag

SEQ ID NO: 77947 - DNA, 25 bp, Artificial Sequence
  Synthetic
gccgatgaaacaaagugagaagaug

SEQ ID NO: 77948 - DNA, 22 bp, Artificial Sequence
  Synthetic
ggcaacagcaauccccaaaaug

SEQ ID NO: 77949 - DNA, 21 bp, Artificial Sequence
  Synthetic
acacacgcutggcagtguaat

SEQ ID NO: 77950 - DNA, 26 bp, Artificial Sequence
  Synthetic
gccatgggaacucaatagaaaaucct

SEQ ID NO: 77951 - DNA, 30 bp, Artificial Sequence
  Synthetic
aaaactatacgacacutaccaaagtctgut

SEQ ID NO: 77952 - DNA, 23 bp, Artificial Sequence
  Synthetic
ggtgacacagguttgactugact

SEQ ID NO: 77953 - DNA, 22 bp, Artificial Sequence
  Synthetic
gggcagatcuctgttggagaug

SEQ ID NO: 77954 - DNA, 23 bp, Artificial Sequence
  Synthetic
acctctucagaggatctguggaa

SEQ ID NO: 77955 - DNA, 21 bp, Artificial Sequence
  Synthetic
cacagtttgugctgggatugg

SEQ ID NO: 77956 - DNA, 18 bp, Artificial Sequence
  Synthetic
gccaggcuccuagaccca

SEQ ID NO: 77957 - DNA, 26 bp, Artificial Sequence
  Synthetic
ctccagatgutcttcgctaauaacca

SEQ ID NO: 77958 - DNA, 26 bp, Artificial Sequence
  Synthetic
tctttcuaaagggagccaacaauacc

SEQ ID NO: 77959 - DNA, 25 bp, Artificial Sequence
  Synthetic
aggauattgaagtuccaaaggccat

SEQ ID NO: 77960 - DNA, 22 bp, Artificial Sequence
  Synthetic
cagcacucacaaattcctgguc

SEQ ID NO: 77961 - DNA, 21 bp, Artificial Sequence
  Synthetic
agaccccuggaactgcuacat

SEQ ID NO: 77962 - DNA, 24 bp, Artificial Sequence
  Synthetic
ggaagccggaauattggattcuca

SEQ ID NO: 77963 - DNA, 24 bp, Artificial Sequence
  Synthetic
agcagcttcuaagtctaggctuct

SEQ ID NO: 77964 - DNA, 19 bp, Artificial Sequence
  Synthetic
agcccguaggtaccctugt

SEQ ID NO: 77965 - DNA, 22 bp, Artificial Sequence
  Synthetic
ctgagagtcucctctgcucact

SEQ ID NO: 77966 - DNA, 27 bp, Artificial Sequence
  Synthetic
gatcttgctttucatagacatctcuca

SEQ ID NO: 77967 - DNA, 22 bp, Artificial Sequence
  Synthetic
tttaaccgagugagcacctucc

SEQ ID NO: 77968 - DNA, 20 bp, Artificial Sequence
  Synthetic
tgccutcugccaggaaacat

SEQ ID NO: 77969 - DNA, 24 bp, Artificial Sequence
  Synthetic
agtgctttatugcctcactacugg

SEQ ID NO: 77970 - DNA, 24 bp, Artificial Sequence
  Synthetic
ccagcaagcgacucaaaaataucc

SEQ ID NO: 77971 - DNA, 23 bp, Artificial Sequence
  Synthetic
gaaactacauctgtggacugcct

SEQ ID NO: 77972 - DNA, 28 bp, Artificial Sequence
  Synthetic
agttctatgttguccttgtaggtttucc

SEQ ID NO: 77973 - DNA, 27 bp, Artificial Sequence
  Synthetic
gctctcattuccaaggagaactcuagt

SEQ ID NO: 77974 - DNA, 21 bp, Artificial Sequence
  Synthetic
tccagagagcucugggaagac

SEQ ID NO: 77975 - DNA, 21 bp, Artificial Sequence
  Synthetic
gtggctcugaggagtgaccua

SEQ ID NO: 77976 - DNA, 23 bp, Artificial Sequence
  Synthetic
aagaaggtuggtgtggcatuaca

SEQ ID NO: 77977 - DNA, 20 bp, Artificial Sequence
  Synthetic
ggctcugaaagaaggccuga

SEQ ID NO: 77978 - DNA, 28 bp, Artificial Sequence
  Synthetic
tgttatctcucaacctcttgaacauact

SEQ ID NO: 77979 - DNA, 22 bp, Artificial Sequence
  Synthetic
gucccgaagacugaagcaaact

SEQ ID NO: 77980 - DNA, 23 bp, Artificial Sequence
  Synthetic
cccccacuccagaagaatuaagg

SEQ ID NO: 77981 - DNA, 28 bp, Artificial Sequence
  Synthetic
ctgcaagtaguggaacaaatgtagttut

SEQ ID NO: 77982 - DNA, 24 bp, Artificial Sequence
  Synthetic
aaccagattucaggccttcttuca

SEQ ID NO: 77983 - DNA, 26 bp, Artificial Sequence
  Synthetic
ggcccaaaugacatcaagaaaatgut

SEQ ID NO: 77984 - DNA, 27 bp, Artificial Sequence
  Synthetic
gggactttggauttcggaggaataaua

SEQ ID NO: 77985 - DNA, 26 bp, Artificial Sequence
  Synthetic
aacaaaaccuatttuccaagcacacc

SEQ ID NO: 77986 - DNA, 21 bp, Artificial Sequence
  Synthetic
ctcattucccagggcctctua

SEQ ID NO: 77987 - DNA, 22 bp, Artificial Sequence
  Synthetic
ctccctcaucctctccccauag

SEQ ID NO: 77988 - DNA, 23 bp, Artificial Sequence
  Synthetic
ccccctgugcctcatgttataut

SEQ ID NO: 77989 - DNA, 25 bp, Artificial Sequence
  Synthetic
tccgaggtuggagatagagatgtut

SEQ ID NO: 77990 - DNA, 27 bp, Artificial Sequence
  Synthetic
aacggttccaaauatgttatctucggt

SEQ ID NO: 77991 - DNA, 22 bp, Artificial Sequence
  Synthetic
caaactgccccutgatccauct

SEQ ID NO: 77992 - DNA, 27 bp, Artificial Sequence
  Synthetic
tgutccactactugcagaaacagaaat

SEQ ID NO: 77993 - DNA, 28 bp, Artificial Sequence
  Synthetic
tgtaggctcagacauaacattttgtugt

SEQ ID NO: 77994 - DNA, 25 bp, Artificial Sequence
  Synthetic
tttgtatggccaaucagtgctgaua

SEQ ID NO: 77995 - DNA, 28 bp, Artificial Sequence
  Synthetic
ctttctagggauacctgattcucagact

SEQ ID NO: 77996 - DNA, 21 bp, Artificial Sequence
  Synthetic
ccugccaacaaccctcuagac

SEQ ID NO: 77997 - DNA, 20 bp, Artificial Sequence
  Synthetic
agatcaccgaccutgcugac

SEQ ID NO: 77998 - DNA, 22 bp, Artificial Sequence
  Synthetic
gcttctuggatggaggugacaa

SEQ ID NO: 77999 - DNA, 28 bp, Artificial Sequence
  Synthetic
aggcatttaaugaaatcagtgtttugct

SEQ ID NO: 78000 - DNA, 22 bp, Artificial Sequence
  Synthetic
cacaggucagagtgcaucaaca

SEQ ID NO: 78001 - DNA, 21 bp, Artificial Sequence
  Synthetic
gacctccaccaaugacacgut

SEQ ID NO: 78002 - DNA, 21 bp, Artificial Sequence
  Synthetic
ggguggcaaagtuagcaagga

SEQ ID NO: 78003 - DNA, 20 bp, Artificial Sequence
  Synthetic
cctgctcaugcttccgtcug

SEQ ID NO: 78004 - DNA, 22 bp, Artificial Sequence
  Synthetic
ctcttccugtttcaguccccat

SEQ ID NO: 78005 - DNA, 22 bp, Artificial Sequence
  Synthetic
gggacatgtcugtcagaggaua

SEQ ID NO: 78006 - DNA, 21 bp, Artificial Sequence
  Synthetic
ggctgugaagaacatcuccct

SEQ ID NO: 78007 - DNA, 26 bp, Artificial Sequence
  Synthetic
ccagatggaacaacugctcttttuac

SEQ ID NO: 78008 - DNA, 25 bp, Artificial Sequence
  Synthetic
gtcagtccataugtccagttgcaua

SEQ ID NO: 78009 - DNA, 21 bp, Artificial Sequence
  Synthetic
tgcaucccagcaagtctucat

SEQ ID NO: 78010 - DNA, 28 bp, Artificial Sequence
  Synthetic
gaagtcatcauaaagaccactcagauag

SEQ ID NO: 78011 - DNA, 25 bp, Artificial Sequence
  Synthetic
tcctcctccucccagaactuaaaaa

SEQ ID NO: 78012 - DNA, 29 bp, Artificial Sequence
  Synthetic
aaggcatgtttcuaatactgtgtctctut

SEQ ID NO: 78013 - DNA, 25 bp, Artificial Sequence
  Synthetic
gcacaggauaactctttgcaucagt

SEQ ID NO: 78014 - DNA, 20 bp, Artificial Sequence
  Synthetic
gttcaugccgacaagugcag

SEQ ID NO: 78015 - DNA, 22 bp, Artificial Sequence
  Synthetic
cctggaccagcuctggattuag

SEQ ID NO: 78016 - DNA, 21 bp, Artificial Sequence
  Synthetic
gtccacatugacctcagugct

SEQ ID NO: 78017 - DNA, 28 bp, Artificial Sequence
  Synthetic
ggccaaagauaaaatgcttacuggaaaa

SEQ ID NO: 78018 - DNA, 20 bp, Artificial Sequence
  Synthetic
ccacccuagcaguagaccga

SEQ ID NO: 78019 - DNA, 21 bp, Artificial Sequence
  Synthetic
tctctgacucctccccatucc

SEQ ID NO: 78020 - DNA, 24 bp, Artificial Sequence
  Synthetic
gatatgtttgcugcagggcctaua

SEQ ID NO: 78021 - DNA, 29 bp, Artificial Sequence
  Synthetic
ctcttgattcagcutacctctttcauagt

SEQ ID NO: 78022 - DNA, 26 bp, Artificial Sequence
  Synthetic
ctgttggugcacaaaaagacactuat

SEQ ID NO: 78023 - DNA, 21 bp, Artificial Sequence
  Synthetic
tggccaatutctccacauggt

SEQ ID NO: 78024 - DNA, 24 bp, Artificial Sequence
  Synthetic
cccttgtctugcaggtatgacaua

SEQ ID NO: 78025 - DNA, 21 bp, Artificial Sequence
  Synthetic
cacaccuggaacugggagaag

SEQ ID NO: 78026 - DNA, 26 bp, Artificial Sequence
  Synthetic
acctggaggucagactattttaguaa

SEQ ID NO: 78027 - DNA, 26 bp, Artificial Sequence
  Synthetic
ggagatctucagttttcctgaugact

SEQ ID NO: 78028 - DNA, 24 bp, Artificial Sequence
  Synthetic
agagacugagaacacacagcatug

SEQ ID NO: 78029 - DNA, 25 bp, Artificial Sequence
  Synthetic
cttggtttguggaccattttgtuga

SEQ ID NO: 78030 - DNA, 22 bp, Artificial Sequence
  Synthetic
ggacgaggagcutatggttcug

SEQ ID NO: 78031 - DNA, 27 bp, Artificial Sequence
  Synthetic
acagtggtattacugcaccatgaaaut

SEQ ID NO: 78032 - DNA, 22 bp, Artificial Sequence
  Synthetic
ggaactggauacagtgccguaa

SEQ ID NO: 78033 - DNA, 28 bp, Artificial Sequence
  Synthetic
cattgttagctuccaccaaagtttuagt

SEQ ID NO: 78034 - DNA, 22 bp, Artificial Sequence
  Synthetic
tctctctcctuccttcccccua

SEQ ID NO: 78035 - DNA, 27 bp, Artificial Sequence
  Synthetic
cacctctaagggutgccaaaatcauat

SEQ ID NO: 78036 - DNA, 27 bp, Artificial Sequence
  Synthetic
agagcaugagaattttcuggaaaccat

SEQ ID NO: 78037 - DNA, 26 bp, Artificial Sequence
  Synthetic
ccagauttcuacaaaagcacagacac

SEQ ID NO: 78038 - DNA, 27 bp, Artificial Sequence
  Synthetic
gtattcatgaagaccugggactttuct

SEQ ID NO: 78039 - DNA, 26 bp, Artificial Sequence
  Synthetic
ccagattttcuttgttccagugggat

SEQ ID NO: 78040 - DNA, 24 bp, Artificial Sequence
  Synthetic
ggaacuaacagaccaggagaacut

SEQ ID NO: 78041 - DNA, 23 bp, Artificial Sequence
  Synthetic
ccggcatacucaatcaccatcuc

SEQ ID NO: 78042 - DNA, 23 bp, Artificial Sequence
  Synthetic
cagcttcaggucactttcccuat

SEQ ID NO: 78043 - DNA, 20 bp, Artificial Sequence
  Synthetic
tgtgggacuctgtcctucgt

SEQ ID NO: 78044 - DNA, 20 bp, Artificial Sequence
  Synthetic
gttgtugcagccagcagaug

SEQ ID NO: 78045 - DNA, 28 bp, Artificial Sequence
  Synthetic
cttactctcaaugattcctggaaugagg

SEQ ID NO: 78046 - DNA, 19 bp, Artificial Sequence
  Synthetic
accaggccucctcatucca

SEQ ID NO: 78047 - DNA, 32 bp, Artificial Sequence
  Synthetic
tgagatgcatauaaaagtaatgtgtccttuca

SEQ ID NO: 78048 - DNA, 20 bp, Artificial Sequence
  Synthetic
ggaacgguggtttggcugat

SEQ ID NO: 78049 - DNA, 27 bp, Artificial Sequence
  Synthetic
aagtgagugaaagagacacaggaaaut

SEQ ID NO: 78050 - DNA, 24 bp, Artificial Sequence
  Synthetic
gcatctctguatcttccacuggga

SEQ ID NO: 78051 - DNA, 24 bp, Artificial Sequence
  Synthetic
cacctuacagacaccggaatacug

SEQ ID NO: 78052 - DNA, 20 bp, Artificial Sequence
  Synthetic
cggucagcacucaaccagag

SEQ ID NO: 78053 - DNA, 22 bp, Artificial Sequence
  Synthetic
acuctacagtgcuggagacaca

SEQ ID NO: 78054 - DNA, 18 bp, Artificial Sequence
  Synthetic
ccugagcccctgtuccaa

SEQ ID NO: 78055 - DNA, 21 bp, Artificial Sequence
  Synthetic
agaggaaagccagagugtgug

SEQ ID NO: 78056 - DNA, 25 bp, Artificial Sequence
  Synthetic
ccacagacucagtuccaaaagaaca

SEQ ID NO: 78057 - DNA, 20 bp, Artificial Sequence
  Synthetic
cccaggugcgtcactatguc

SEQ ID NO: 78058 - DNA, 23 bp, Artificial Sequence
  Synthetic
aaaccacaacugagctuacacca

SEQ ID NO: 78059 - DNA, 25 bp, Artificial Sequence
  Synthetic
cctgcaggaguacagcacaaaauat

SEQ ID NO: 78060 - DNA, 28 bp, Artificial Sequence
  Synthetic
ggctgagaccugagttgataaaattuct

SEQ ID NO: 78061 - DNA, 30 bp, Artificial Sequence; identical to SEQ ID NO: 14605
  Synthetic

SEQ ID NO: 78062 - DNA, 27 bp, Artificial Sequence
  Synthetic
ttctguaagagaaacattgaugcaggt

SEQ ID NO: 78063 - DNA, 24 bp, Artificial Sequence
  Synthetic
aaaagaactgtgugagtgcaagug

SEQ ID NO: 78064 - DNA, 22 bp, Artificial Sequence
  Synthetic
cctctggagagugcagtggtua

SEQ ID NO: 78065 - DNA, 23 bp, Artificial Sequence
  Synthetic
caaagttcgutctgctgcucaag

SEQ ID NO: 78066 - DNA, 23 bp, Artificial Sequence
  Synthetic
gggattgguaaggatgacagugt

SEQ ID NO: 78067 - DNA, 27 bp, Artificial Sequence
  Synthetic
cgtgtgagagcaaaucctttgactaua

SEQ ID NO: 78068 - DNA, 26 bp, Artificial Sequence
  Synthetic
gagcatttgttacugcaaccactauc

SEQ ID NO: 78069 - DNA, 24 bp, Artificial Sequence
  Synthetic
gtaatgcttuccttccgctttugt

SEQ ID NO: 78070 - DNA, 22 bp, Artificial Sequence
  Synthetic
agccatttugagaggacacgut

SEQ ID NO: 78071 - DNA, 28 bp, Artificial Sequence
  Synthetic
ttgcataatgccuttactgaccaaaaut

SEQ ID NO: 78072 - DNA, 22 bp, Artificial Sequence
  Synthetic
tgatgcuttggctucagcaaga

SEQ ID NO: 78073 - DNA, 26 bp, Artificial Sequence
  Synthetic
gggtcaaccugatttaatccacucac

SEQ ID NO: 78074 - DNA, 23 bp, Artificial Sequence
  Synthetic
gtttgtctgutcagcaaguggac

SEQ ID NO: 78075 - DNA, 23 bp, Artificial Sequence
  Synthetic
gttgccatuagcacctacuccat

SEQ ID NO: 78076 - DNA, 27 bp, Artificial Sequence
  Synthetic
tcaaagaatgaaacacaugctgaagug

SEQ ID NO: 78077 - DNA, 21 bp, Artificial Sequence
  Synthetic
aaacugacagggccaaugact

SEQ ID NO: 78078 - DNA, 27 bp, Artificial Sequence
  Synthetic
ggtggctgttguatttatttctgtcuc

SEQ ID NO: 78079 - DNA, 27 bp, Artificial Sequence
  Synthetic
acccaggguataaatcacgtuaagact

SEQ ID NO: 78080 - DNA, 21 bp, Artificial Sequence
  Synthetic
ccctgaugccccttgtcttua

SEQ ID NO: 78081 - DNA, 20 bp, Artificial Sequence
  Synthetic
caagguggagagggacucac

SEQ ID NO: 78082 - DNA, 28 bp, Artificial Sequence
  Synthetic
caaaatgtaaaccgaautctgcttcuga

SEQ ID NO: 78083 - DNA, 21 bp, Artificial Sequence
  Synthetic
tcagtggtcugctgttctugg

SEQ ID NO: 78084 - DNA, 22 bp, Artificial Sequence
  Synthetic
cctcctcucagagttcctucct

SEQ ID NO: 78085 - DNA, 22 bp, Artificial Sequence
  Synthetic
ctgtcacuccttggaggtucac

SEQ ID NO: 78086 - DNA, 20 bp, Artificial Sequence
  Synthetic
aggaccttutggtggtgugg

SEQ ID NO: 78087 - DNA, 23 bp, Artificial Sequence
  Synthetic
agtggaaagcccagutcaagaug

SEQ ID NO: 78088 - DNA, 24 bp, Artificial Sequence
  Synthetic
gaaatggtttucagagcacacugt

SEQ ID NO: 78089 - DNA, 23 bp, Artificial Sequence
  Synthetic
tcacccgaaugaagaaggactug

SEQ ID NO: 78090 - DNA, 24 bp, Artificial Sequence
  Synthetic
agcatggtcaaguccttcttcaut

SEQ ID NO: 78091 - DNA, 29 bp, Artificial Sequence
  Synthetic
caaagaugttttauacacaccacaaagca

SEQ ID NO: 78092 - DNA, 21 bp, Artificial Sequence
  Synthetic
gatctggcugtcgtcaauggt

SEQ ID NO: 78093 - DNA, 22 bp, Artificial Sequence
  Synthetic
gggtgggatugcactcttgtut

SEQ ID NO: 78094 - DNA, 22 bp, Artificial Sequence
  Synthetic
ccactaugcagaggctgacaua

SEQ ID NO: 78095 - DNA, 23 bp, Artificial Sequence
  Synthetic
tccttcucccagcttctcttuga

SEQ ID NO: 78096 - DNA, 22 bp, Artificial Sequence
  Synthetic
ttcccctaaugggtcacctuct

SEQ ID NO: 78097 - DNA, 21 bp, Artificial Sequence
  Synthetic
acgtcttugacgaccccatuc

SEQ ID NO: 78098 - DNA, 25 bp, Artificial Sequence
  Synthetic
aggaattagccuaacctggagtuga

SEQ ID NO: 78099 - DNA, 23 bp, Artificial Sequence
  Synthetic
ggcaatggcuttaattgacugga

SEQ ID NO: 78100 - DNA, 24 bp, Artificial Sequence
  Synthetic
agttccccaggaaacucctaacut

SEQ ID NO: 78101 - DNA, 28 bp, Artificial Sequence
  Synthetic
gaagggactcttugttctactgatcaut

SEQ ID NO: 78102 - DNA, 21 bp, Artificial Sequence
  Synthetic
caagacuctcuccccagggaa

SEQ ID NO: 78103 - DNA, 19 bp, Artificial Sequence
  Synthetic
gtgggtccuggtcccagua

SEQ ID NO: 78104 - DNA, 21 bp, Artificial Sequence
  Synthetic
ccagcctucgacaacctcuat

SEQ ID NO: 78105 - DNA, 21 bp, Artificial Sequence
  Synthetic
gaggacacaucagggcttcug

SEQ ID NO: 78106 - DNA, 21 bp, Artificial Sequence
  Synthetic
ccctgcguatgtgggatugag

SEQ ID NO: 78107 - DNA, 23 bp, Artificial Sequence
  Synthetic
gctctgatugaccgaatggugaa

SEQ ID NO: 78108 - DNA, 19 bp, Artificial Sequence
  Synthetic
ccagggagcuctgacugga

SEQ ID NO: 78109 - DNA, 28 bp, Artificial Sequence
  Synthetic
ctatgttccctutcctcatttcctugaa

SEQ ID NO: 78110 - DNA, 22 bp, Artificial Sequence
  Synthetic
caaggagccaggcauttttcut

SEQ ID NO: 78111 - DNA, 25 bp, Artificial Sequence
  Synthetic
guatacgctuccagagaacaaggag

SEQ ID NO: 78112 - DNA, 24 bp, Artificial Sequence
  Synthetic
gatgtgcuaaatgcatacauggca

SEQ ID NO: 78113 - DNA, 25 bp, Artificial Sequence
  Synthetic
tgatgcagatuaacacgcgattgua

SEQ ID NO: 78114 - DNA, 23 bp, Artificial Sequence
  Synthetic
caattgttcaugcttggugcaga

SEQ ID NO: 78115 - DNA, 20 bp, Artificial Sequence
  Synthetic
cuggaaagcagcgcaugaag

SEQ ID NO: 78116 - DNA, 33 bp, Artificial Sequence
  Synthetic
tttgagttaagataggutacttagtataccuga

SEQ ID NO: 78117 - DNA, 25 bp, Artificial Sequence
  Synthetic
tgctttctcutccttgttcaucaca

SEQ ID NO: 78118 - DNA, 23 bp, Artificial Sequence
  Synthetic
accccaagacutgctacattugt

SEQ ID NO: 78119 - DNA, 26 bp, Artificial Sequence
  Synthetic
tctgtgcaacaauggaaacatcctua

SEQ ID NO: 78120 - DNA, 20 bp, Artificial Sequence
  Synthetic
ttccgacaacuccugggaag

SEQ ID NO: 78121 - DNA, 23 bp, Artificial Sequence
  Synthetic
cgctcugggaaatctgcuacaat

SEQ ID NO: 78122 - DNA, 31 bp, Artificial Sequence; identical to SEQ ID NO: 64766
  Synthetic

SEQ ID NO: 78123 - DNA, 28 bp, Artificial Sequence
  Synthetic
ccataggtagaaauactggctaaaucct

SEQ ID NO: 78124 - DNA, 28 bp, Artificial Sequence
  Synthetic
ttcactactaguaaactgcagtccttug

SEQ ID NO: 78125 - DNA, 26 bp, Artificial Sequence
  Synthetic
acagacaatgtcaucacaggaggaua

SEQ ID NO: 78126 - DNA, 20 bp, Artificial Sequence
  Synthetic
ccagggaccucggacttcua

SEQ ID NO: 78127 - DNA, 21 bp, Artificial Sequence
  Synthetic
acatcuaccccgagcagtuct

SEQ ID NO: 78128 - DNA, 28 bp, Artificial Sequence
  Synthetic
actttcctttcautctcctgttcttuct

SEQ ID NO: 78129 - DNA, 21 bp, Artificial Sequence
  Synthetic
cagagcccucactcuccagat

SEQ ID NO: 78130 - DNA, 26 bp, Artificial Sequence
  Synthetic
agccacggguaataatttttgtccut

SEQ ID NO: 78131 - DNA, 22 bp, Artificial Sequence
  Synthetic
tccaaagccauccacttcacug

SEQ ID NO: 78132 - DNA, 24 bp, Artificial Sequence
  Synthetic
accccatgauctcattctctucca

SEQ ID NO: 78133 - DNA, 20 bp, Artificial Sequence
  Synthetic
gacctucagagacacugcca

SEQ ID NO: 78134 - DNA, 20 bp, Artificial Sequence
  Synthetic
cgtttgagcucccgcatgua

SEQ ID NO: 78135 - DNA, 19 bp, Artificial Sequence
  Synthetic
cttcuctgggcucgacgac

SEQ ID NO: 78136 - DNA, 27 bp, Artificial Sequence
  Synthetic
gactatatcttucatcccttccuccct

SEQ ID NO: 78137 - DNA, 21 bp, Artificial Sequence
  Synthetic
caccauagaagcccacgaugt

SEQ ID NO: 78138 - DNA, 27 bp, Artificial Sequence
  Synthetic
gttcagtcttcutcattgtacctucct

SEQ ID NO: 78139 - DNA, 22 bp, Artificial Sequence
  Synthetic
ccggucggaagaagguaaacat

SEQ ID NO: 78140 - DNA, 31 bp, Artificial Sequence
  Synthetic
ttatactgtcttgautcaccttgacaauaaa

SEQ ID NO: 78141 - DNA, 24 bp, Artificial Sequence
  Synthetic
atgcagttgcutcagtacccauaa

SEQ ID NO: 78142 - DNA, 25 bp, Artificial Sequence
  Synthetic
gggagaccaagaauacattaugggt

SEQ ID NO: 78143 - DNA, 24 bp, Artificial Sequence
  Synthetic
tgatggcuacagcttaaggttguc

SEQ ID NO: 78144 - DNA, 22 bp, Artificial Sequence
  Synthetic
tcagcgucttgtcttucaaggg

SEQ ID NO: 78145 - DNA, 23 bp, Artificial Sequence
  Synthetic
ctccatcagugtgtctgttguct

SEQ ID NO: 78146 - DNA, 21 bp, Artificial Sequence
  Synthetic
ctgcccaugaggaatcgauct

SEQ ID NO: 78147 - DNA, 25 bp, Artificial Sequence
  Synthetic
aattttctgatugggcctaagcuct

SEQ ID NO: 78148 - DNA, 26 bp, Artificial Sequence
  Synthetic
ttatcgaggaaaggacugtagagcua

SEQ ID NO: 78149 - DNA, 27 bp, Artificial Sequence
  Synthetic
aatgataccaaccauttcacacaguct

SEQ ID NO: 78150 - DNA, 27 bp, Artificial Sequence
  Synthetic
tttctcagagcaugaatgatuggaagt

SEQ ID NO: 78151 - DNA, 24 bp, Artificial Sequence
  Synthetic
agccacaguattggacattaucgg

SEQ ID NO: 78152 - DNA, 23 bp, Artificial Sequence
  Synthetic
aaagaatggucctgcaccaguaa

SEQ ID NO: 78153 - DNA, 27 bp, Artificial Sequence
  Synthetic
aggcctgcugaaaatgactgaatauaa

SEQ ID NO: 78154 - DNA, 21 bp, Artificial Sequence
  Synthetic
ccagcuccaacuaccacaagt

SEQ ID NO: 78155 - DNA, 27 bp, Artificial Sequence
  Synthetic
aggtactgguggagtatttgatagugt

SEQ ID NO: 78156 - DNA, 25 bp, Artificial Sequence
  Synthetic
gtguacacaacaaaacaggugcaaa

SEQ ID NO: 78157 - DNA, 29 bp, Artificial Sequence
  Synthetic
agaggagaaacucagagataaccaauaca

SEQ ID NO: 78158 - DNA, 25 bp, Artificial Sequence
  Synthetic
ggtaatggugccgataatguccaat

SEQ ID NO: 78159 - DNA, 28 bp, Artificial Sequence
  Synthetic
ccaaaaacucaaggaaaaaggaactgut

SEQ ID NO: 78160 - DNA, 20 bp, Artificial Sequence
  Synthetic
cgacactaccugggccauac

SEQ ID NO: 78161 - DNA, 28 bp, Artificial Sequence
  Synthetic
gagcttuccacaagaaatcacttucaat

SEQ ID NO: 78162 - DNA, 22 bp, Artificial Sequence
  Synthetic
cagcaccaucaccacttaccut

SEQ ID NO: 78163 - DNA, 26 bp, Artificial Sequence
  Synthetic
gcatgcaguaccatacaggaactuac

SEQ ID NO: 78164 - DNA, 20 bp, Artificial Sequence
  Synthetic
ctccauccagttggctucgt

SEQ ID NO: 78165 - DNA, 24 bp, Artificial Sequence
  Synthetic
tgaatgcucccattgtttccucag

SEQ ID NO: 78166 - DNA, 28 bp, Artificial Sequence
  Synthetic
gaggcaaacgtuctcctttctctaauaa

SEQ ID NO: 78167 - DNA, 28 bp, Artificial Sequence
  Synthetic
tggtatagtgcuggtttgttcaacauat

SEQ ID NO: 78168 - DNA, 20 bp, Artificial Sequence
  Synthetic
gcatgagugcaactcuccgt

SEQ ID NO: 78169 - DNA, 22 bp, Artificial Sequence
  Synthetic
cccaactcutaaggccatugct

SEQ ID NO: 78170 - DNA, 23 bp, Artificial Sequence
  Synthetic
ggtgctugacaaaaacctgtuct

SEQ ID NO: 78171 - DNA, 25 bp, Artificial Sequence
  Synthetic
gcctcttugagccatttcttctuca

SEQ ID NO: 78172 - DNA, 22 bp, Artificial Sequence
  Synthetic
gggutgggauaacagagcaaca

SEQ ID NO: 78173 - DNA, 26 bp, Artificial Sequence
  Synthetic
ttcagcacaaucaaccagagaauagt

SEQ ID NO: 78174 - DNA, 21 bp, Artificial Sequence
  Synthetic
ccccagcuccagcttctauct

SEQ ID NO: 78175 - DNA, 24 bp, Artificial Sequence
  Synthetic
ccucttttcatccuagaccccaac

SEQ ID NO: 78176 - DNA, 22 bp, Artificial Sequence
  Synthetic
agcttttctgutgtcccggaut

SEQ ID NO: 78177 - DNA, 22 bp, Artificial Sequence
  Synthetic
gaaaucagcgcaggaaacauct

SEQ ID NO: 78178 - DNA, 26 bp, Artificial Sequence
  Synthetic
gtcctttctgacautttgacctcuca

SEQ ID NO: 78179 - DNA, 22 bp, Artificial Sequence
  Synthetic
gacacgtcucctccatguaagt

SEQ ID NO: 78180 - DNA, 28 bp, Artificial Sequence
  Synthetic
tgcatttgtttgtutttcttgtctccut

SEQ ID NO: 78181 - DNA, 27 bp, Artificial Sequence
  Synthetic
gcagaagctgtugatttctccaaaaua

SEQ ID NO: 78182 - DNA, 24 bp, Artificial Sequence
  Synthetic
aaccauggagggtttugaagaagt

SEQ ID NO: 78183 - DNA, 21 bp, Artificial Sequence
  Synthetic
ctggugaagaaggtcuccgat

SEQ ID NO: 78184 - DNA, 27 bp, Artificial Sequence
  Synthetic
attgcataaggguttgtgttagacuga

SEQ ID NO: 78185 - DNA, 25 bp, Artificial Sequence
  Synthetic
ccttttgatcacucccacctucaag

SEQ ID NO: 78186 - DNA, 23 bp, Artificial Sequence
  Synthetic
aggactacaugggtcactauggt

SEQ ID NO: 78187 - DNA, 24 bp, Artificial Sequence
  Synthetic
cccctacctautcttgctctccuc

SEQ ID NO: 78188 - DNA, 25 bp, Artificial Sequence
  Synthetic
tcaggtacauctgtgagugagaaca

SEQ ID NO: 78189 - DNA, 31 bp, Artificial Sequence
  Synthetic
aaccagtaagcuaacttgttgtaaauaacct

SEQ ID NO: 78190 - DNA, 28 bp, Artificial Sequence
  Synthetic
tgtgctctttauctcatcagactttuga

SEQ ID NO: 78191 - DNA, 21 bp, Artificial Sequence
  Synthetic
aaaaugtccugggaagcccaa

SEQ ID NO: 78192 - DNA, 28 bp, Artificial Sequence
  Synthetic
attctgtaagtgaugctgctgatgtuat

SEQ ID NO: 78193 - DNA, 31 bp, Artificial Sequence
  Synthetic
tgataatgcatuttaaagttctacucaccca

SEQ ID NO: 78194 - DNA, 21 bp, Artificial Sequence
  Synthetic
gcaaacaacugaccagcctut

SEQ ID NO: 78195 - DNA, 29 bp, Artificial Sequence
  Synthetic
catttggtcccaaugttattcacattuct

SEQ ID NO: 78196 - DNA, 27 bp, Artificial Sequence
  Synthetic
gtgtcacaagcaugattttattgucct

SEQ ID NO: 78197 - DNA, 24 bp, Artificial Sequence
  Synthetic
acttttggtuggaggctcactuac

SEQ ID NO: 78198 - DNA, 22 bp, Artificial Sequence
  Synthetic
caugggtcaggucacagagaag

SEQ ID NO: 78199 - DNA, 25 bp, Artificial Sequence
  Synthetic
aaaatagttuccaccagcuccaagt

SEQ ID NO: 78200 - DNA, 26 bp, Artificial Sequence
  Synthetic
tgtagaagtctggutagatccagcut

SEQ ID NO: 78201 - DNA, 28 bp, Artificial Sequence
  Synthetic
tccatgatgcucaaaattaactuaccct

SEQ ID NO: 78202 - DNA, 22 bp, Artificial Sequence
  Synthetic
ggctgaggcugttccataugac

SEQ ID NO: 78203 - DNA, 21 bp, Artificial Sequence
  Synthetic
gtggccgaccugtctatcauc

SEQ ID NO: 78204 - DNA, 26 bp, Artificial Sequence
  Synthetic
acacaggttgcugttgtcagtaauat

SEQ ID NO: 78205 - DNA, 24 bp, Artificial Sequence
  Synthetic
gttttctcactuccccctcctuag

SEQ ID NO: 78206 - DNA, 23 bp, Artificial Sequence
  Synthetic
gaggacatucacagggtucagaa

SEQ ID NO: 78207 - DNA, 25 bp, Artificial Sequence
  Synthetic
gttcagaggcugattgtgauagaca

SEQ ID NO: 78208 - DNA, 19 bp, Artificial Sequence
  Synthetic
cggugaagcgggcauagag

SEQ ID NO: 78209 - DNA, 21 bp, Artificial Sequence
  Synthetic
ggcttcguggagcattttcug

SEQ ID NO: 78210 - DNA, 22 bp, Artificial Sequence
  Synthetic
tgtcctguccccactccttuaa

SEQ ID NO: 78211 - DNA, 20 bp, Artificial Sequence
  Synthetic
cccctcttuctcagtgcuca

SEQ ID NO: 78212 - DNA, 29 bp, Artificial Sequence
  Synthetic
agacctttaggacutagctatattcugaa

SEQ ID NO: 78213 - DNA, 24 bp, Artificial Sequence
  Synthetic
gacttagugtcatgacuccagcaa

SEQ ID NO: 78214 - DNA, 23 bp, Artificial Sequence
  Synthetic
ccactattgcuggagtcaugaca

SEQ ID NO: 78215 - DNA, 25 bp, Artificial Sequence
  Synthetic
acgaagcagtugaactttctgtuct

SEQ ID NO: 78216 - DNA, 18 bp, Artificial Sequence
  Synthetic
agggaugacgcggtugac

SEQ ID NO: 78217 - DNA, 19 bp, Artificial Sequence
  Synthetic
gcccagaagacgcugtucc

SEQ ID NO: 78218 - DNA, 18 bp, Artificial Sequence
  Synthetic
caccacgucgtcgaugga

SEQ ID NO: 78219 - DNA, 18 bp, Artificial Sequence
  Synthetic
gggcggguggaacctuag

SEQ ID NO: 78220 - DNA, 20 bp, Artificial Sequence
  Synthetic
gctggctcugtgcagaaucc

SEQ ID NO: 78221 - DNA, 22 bp, Artificial Sequence
  Synthetic
tgtcgaaugtgctgtugacaca

SEQ ID NO: 78222 - DNA, 26 bp, Artificial Sequence
  Synthetic
tcaagaaugacaatguccaagacaca

SEQ ID NO: 78223 - DNA, 26 bp, Artificial Sequence
  Synthetic
ctgcaagaguacaaagattggcttut

SEQ ID NO: 78224 - DNA, 28 bp, Artificial Sequence
  Synthetic
gaaagaaagaagcguatgacacatugat

SEQ ID NO: 78225 - DNA, 28 bp, Artificial Sequence
  Synthetic
ccaagctttggauttcatttctgaagut

SEQ ID NO: 78226 - DNA, 28 bp, Artificial Sequence
  Synthetic
ctcaaggacautactagtgacucagaaa

SEQ ID NO: 78227 - DNA, 24 bp, Artificial Sequence
  Synthetic
ccaagcagtatutacagccagcua

SEQ ID NO: 78228 - DNA, 29 bp, Artificial Sequence
  Synthetic
ccagtgacttcuacacatttgttctauct

SEQ ID NO: 78229 - DNA, 25 bp, Artificial Sequence
  Synthetic
gggtgauaaggaagaggtactguga

SEQ ID NO: 78230 - DNA, 22 bp, Artificial Sequence
  Synthetic
accccgaguatctcaacacugt

SEQ ID NO: 78231 - DNA, 21 bp, Artificial Sequence
  Synthetic
ccatttggcutggcttcctug

SEQ ID NO: 78232 - DNA, 33 bp, Artificial Sequence
  Synthetic
ggttggatatagauatagatatacacacguaca

SEQ ID NO: 78233 - DNA, 28 bp, Artificial Sequence
  Synthetic
ccttcgguataatcactuccaagcaaat

SEQ ID NO: 78234 - DNA, 21 bp, Artificial Sequence
  Synthetic
ccugcccacacacacagauag

SEQ ID NO: 78235 - DNA, 21 bp, Artificial Sequence
  Synthetic
actttgctccugtcctgggua

SEQ ID NO: 78236 - DNA, 27 bp, Artificial Sequence
  Synthetic
ctctttaggatuggaccggaataagut

SEQ ID NO: 78237 - DNA, 22 bp, Artificial Sequence
  Synthetic
catgcccagggaautcatugag

SEQ ID NO: 78238 - DNA, 27 bp, Artificial Sequence
  Synthetic
acaatacagtacautctcctatguggt

SEQ ID NO: 78239 - DNA, 23 bp, Artificial Sequence
  Synthetic
caccagccauaggaccgtattuc

SEQ ID NO: 78240 - DNA, 23 bp, Artificial Sequence
  Synthetic
gttgtguaaccgccatggaaaut

SEQ ID NO: 78241 - DNA, 26 bp, Artificial Sequence
  Synthetic
tcacatgtuacagcatgacagtucat

SEQ ID NO: 78242 - DNA, 27 bp, Artificial Sequence
  Synthetic
gttttgttttuatctccccuccaggat

SEQ ID NO: 78243 - DNA, 28 bp, Artificial Sequence
  Synthetic
ccaccaattgaaaugtgtctagaatucc

SEQ ID NO: 78244 - DNA, 26 bp, Artificial Sequence
  Synthetic
cctaaacagugggaattcuagacaca

SEQ ID NO: 78245 - DNA, 28 bp, Artificial Sequence
  Synthetic
acacacacacaaaacaauctgcttaaut

SEQ ID NO: 78246 - DNA, 21 bp, Artificial Sequence
  Synthetic
acttcgaagcautggcuccag

SEQ ID NO: 78247 - DNA, 27 bp, Artificial Sequence
  Synthetic
actactttggcacutgattcaagauca

SEQ ID NO: 78248 - DNA, 28 bp, Artificial Sequence
  Synthetic
gaagaaaacagcaagaguaaaugcagaa

SEQ ID NO: 78249 - DNA, 28 bp, Artificial Sequence
  Synthetic
gtgggattaattautgccattctcaucc

SEQ ID NO: 78250 - DNA, 26 bp, Artificial Sequence
  Synthetic
gatacttgucaccactccaacaauga

SEQ ID NO: 78251 - DNA, 28 bp, Artificial Sequence
  Synthetic
tctgtacttcacacuaaaaatggcgaut

SEQ ID NO: 78252 - DNA, 25 bp, Artificial Sequence
  Synthetic
gtctcguaacggtttttctcuacca

SEQ ID NO: 78253 - DNA, 28 bp, Artificial Sequence
  Synthetic
ccgcattacuacatccaaatccauaaga

SEQ ID NO: 78254 - DNA, 23 bp, Artificial Sequence
  Synthetic
gacuaccagcaggacttcttucc

SEQ ID NO: 78255 - DNA, 25 bp, Artificial Sequence
  Synthetic
ttttagggcucatactatccuccgt

SEQ ID NO: 78256 - DNA, 27 bp, Artificial Sequence
  Synthetic
agaggcuagtttttgttcuacgaaagg

SEQ ID NO: 78257 - DNA, 27 bp, Artificial Sequence
  Synthetic
tttctccattttguggtcatggtttut

SEQ ID NO: 78258 - DNA, 28 bp, Artificial Sequence
  Synthetic
ggucaacagtggaugaaaaagaacaaaa

SEQ ID NO: 78259 - DNA, 26 bp, Artificial Sequence
  Synthetic
tgccatcttcauttgtcccaatuaga

SEQ ID NO: 78260 - DNA, 22 bp, Artificial Sequence
  Synthetic
gcucctctcttcucccacagaa

SEQ ID NO: 78261 - DNA, 24 bp, Artificial Sequence
  Synthetic
gatgtggucggcttcataguagat

SEQ ID NO: 78262 - DNA, 28 bp, Artificial Sequence
  Synthetic
tgaccttctatuatgaaaaatgccucca

SEQ ID NO: 78263 - DNA, 27 bp, Artificial Sequence
  Synthetic
cgttttcttccuctgttaggcattgua

SEQ ID NO: 78264 - DNA, 26 bp, Artificial Sequence
  Synthetic
aataatgttucctcagtcuccaccac

SEQ ID NO: 78265 - DNA, 27 bp, Artificial Sequence
  Synthetic
gtaaccactgucctttgcaaattugaa

SEQ ID NO: 78266 - DNA, 21 bp, Artificial Sequence
  Synthetic
ccacatctucacctggcagut

SEQ ID NO: 78267 - DNA, 23 bp, Artificial Sequence
  Synthetic
ggaaauccacagagagcactgut

SEQ ID NO: 78268 - DNA, 27 bp, Artificial Sequence
  Synthetic
gacttgtgtaucacctgctauaacact

SEQ ID NO: 78269 - DNA, 21 bp, Artificial Sequence
  Synthetic
agcauggaccagagacuggat

SEQ ID NO: 78270 - DNA, 21 bp, Artificial Sequence
  Synthetic
gttccggtucccatcctucaa

SEQ ID NO: 78271 - DNA, 28 bp, Artificial Sequence
  Synthetic
agaacaagaugaagggcagcatttauat

SEQ ID NO: 78272 - DNA, 25 bp, Artificial Sequence
  Synthetic
ccagaattcaaugctttctcagcut

SEQ ID NO: 78273 - DNA, 25 bp, Artificial Sequence
  Synthetic
tgctcccaaaauactacaaggtguc

SEQ ID NO: 78274 - DNA, 21 bp, Artificial Sequence
  Synthetic
tgtgcucatcgcuggaagaac

SEQ ID NO: 78275 - DNA, 26 bp, Artificial Sequence
  Synthetic
gggatgaggaaaaaucaatccaugct

SEQ ID NO: 78276 - DNA, 27 bp, Artificial Sequence
  Synthetic
cutccctatagatuacacaaccagcat

SEQ ID NO: 78277 - DNA, 22 bp, Artificial Sequence
  Synthetic
ccagagacugagtttguaggca

SEQ ID NO: 78278 - DNA, 20 bp, Artificial Sequence
  Synthetic
gattcucgccgcctgaguat

SEQ ID NO: 78279 - DNA, 22 bp, Artificial Sequence
  Synthetic
cattggtuttccgttugcaacc

SEQ ID NO: 78280 - DNA, 23 bp, Artificial Sequence
  Synthetic
ttuagggcaaaacactuccacct

SEQ ID NO: 78281 - DNA, 23 bp, Artificial Sequence
  Synthetic
gcactttggucttctctccctut

SEQ ID NO: 78282 - DNA, 28 bp, Artificial Sequence
  Synthetic
tggttttgtcauactttgacctttguct

SEQ ID NO: 78283 - DNA, 26 bp, Artificial Sequence
  Synthetic
gccaagacttguctgaagctgatuaa

SEQ ID NO: 78284 - DNA, 20 bp, Artificial Sequence
  Synthetic
gccaacagcugactcaucac

SEQ ID NO: 78285 - DNA, 25 bp, Artificial Sequence
  Synthetic
gutcttgatgtgcuacagggaacat

SEQ ID NO: 78286 - DNA, 18 bp, Artificial Sequence
  Synthetic
agcgggtugtgcagcaua

SEQ ID NO: 78287 - DNA, 18 bp, Artificial Sequence
  Synthetic
tgccggagcutctgctug

SEQ ID NO: 78288 - DNA, 21 bp, Artificial Sequence
  Synthetic
ggtgtccaagagcucctctut

SEQ ID NO: 78289 - DNA, 28 bp, Artificial Sequence
  Synthetic
aaaggagccgautttactaacatucagt

SEQ ID NO: 78290 - DNA, 21 bp, Artificial Sequence
  Synthetic
ggaaacgcacagucaaaguga

SEQ ID NO: 78291 - DNA, 22 bp, Artificial Sequence
  Synthetic
cactggaccauctcctggatut

SEQ ID NO: 78292 - DNA, 19 bp, Artificial Sequence
  Synthetic
cccugaccggagtaaccut

SEQ ID NO: 78293 - DNA, 22 bp, Artificial Sequence
  Synthetic
tgttuccagacaagccacucac

SEQ ID NO: 78294 - DNA, 24 bp, Artificial Sequence
  Synthetic
tgggactaaccaauggtggtgaua

SEQ ID NO: 78295 - DNA, 21 bp, Artificial Sequence
  Synthetic
gggccaccaacucccatatug

SEQ ID NO: 78296 - DNA, 22 bp, Artificial Sequence
  Synthetic
ctttggccaauggaccctttuc

SEQ ID NO: 78297 - DNA, 21 bp, Artificial Sequence
  Synthetic
gtagagugagtgcgttucgct

SEQ ID NO: 78298 - DNA, 21 bp, Artificial Sequence
  Synthetic
ggtgccgutctgccuaaacat

SEQ ID NO: 78299 - DNA, 20 bp, Artificial Sequence
  Synthetic
ccagtuggtgtcgtuggagt

SEQ ID NO: 78300 - DNA, 25 bp, Artificial Sequence
  Synthetic
gggatgacagauttcatgcttucct

SEQ ID NO: 78301 - DNA, 20 bp, Artificial Sequence
  Synthetic
gaggtcuccaggagtgggua

SEQ ID NO: 78302 - DNA, 23 bp, Artificial Sequence
  Synthetic
cgatctgguagttccccuaacct

SEQ ID NO: 78303 - DNA, 22 bp, Artificial Sequence
  Synthetic
catgtugggagaagucaagcct

SEQ ID NO: 78304 - DNA, 23 bp, Artificial Sequence
  Synthetic
acagaaccaauttcagcctcuga

SEQ ID NO: 78305 - DNA, 22 bp, Artificial Sequence
  Synthetic
ggccatcuggaagcattaggut

SEQ ID NO: 78306 - DNA, 24 bp, Artificial Sequence
  Synthetic
tggaagtaauggaaacgtgcctua

SEQ ID NO: 78307 - DNA, 29 bp, Artificial Sequence
  Synthetic
aaaacauttatgugaaaagccaacaagga

SEQ ID NO: 78308 - DNA, 21 bp, Artificial Sequence
  Synthetic
gtcccgucagaagagaugagg

SEQ ID NO: 78309 - DNA, 20 bp, Artificial Sequence
  Synthetic
ctgtggtcugaggcctagug

SEQ ID NO: 78310 - DNA, 26 bp, Artificial Sequence
  Synthetic
atcagaaucttccaguacaggacaga

SEQ ID NO: 78311 - DNA, 27 bp, Artificial Sequence
  Synthetic
accataggatcutactccatagagugg

SEQ ID NO: 78312 - DNA, 21 bp, Artificial Sequence
  Synthetic
aaggcugacucccaaagacac

SEQ ID NO: 78313 - DNA, 23 bp, Artificial Sequence
  Synthetic
gatcagacaccaggaaugcctua

SEQ ID NO: 78314 - DNA, 22 bp, Artificial Sequence
  Synthetic
tggucaaaagcccaaugacaca

SEQ ID NO: 78315 - DNA, 19 bp, Artificial Sequence
  Synthetic
ccaggautcaugcccgcat

SEQ ID NO: 78316 - DNA, 26 bp, Artificial Sequence
  Synthetic
cactttggauctcaaattgugcacat

SEQ ID NO: 78317 - DNA, 26 bp, Artificial Sequence
  Synthetic
agaaaaucgccgaaagtuaccaaaac

SEQ ID NO: 78318 - DNA, 24 bp, Artificial Sequence
  Synthetic
ccgtgcacgutctaacatgtttut

SEQ ID NO: 78319 - DNA, 21 bp, Artificial Sequence
  Synthetic
cttaagtcaucggccccaucc

SEQ ID NO: 78320 - DNA, 26 bp, Artificial Sequence
  Synthetic
ccacaggtattugtagcagagttuca

SEQ ID NO: 78321 - DNA, 27 bp, Artificial Sequence
  Synthetic
ccaatatggtaugaccaacatggctua

SEQ ID NO: 78322 - DNA, 22 bp, Artificial Sequence
  Synthetic
cctccccgutatggacgtgaua

SEQ ID NO: 78323 - DNA, 23 bp, Artificial Sequence
  Synthetic
cuaaggatcaucccaggacagga

SEQ ID NO: 78324 - DNA, 24 bp, Artificial Sequence
  Synthetic
gtgtcgtaucagcaggaaatctuc

SEQ ID NO: 78325 - DNA, 29 bp, Artificial Sequence
  Synthetic
ggctgtcttugcatgtttcatatttugat

SEQ ID NO: 78326 - DNA, 27 bp, Artificial Sequence
  Synthetic
gcagtatcuaaccagaactctctctuc

SEQ ID NO: 78327 - DNA, 19 bp, Artificial Sequence
  Synthetic
gcagggcugucaaccagac

SEQ ID NO: 78328 - DNA, 19 bp, Artificial Sequence
  Synthetic
cctcgauggccgcuagaat

SEQ ID NO: 78329 - DNA, 24 bp, Artificial Sequence
  Synthetic
cagcatcuacaaaggcaagaagug

SEQ ID NO: 78330 - DNA, 23 bp, Artificial Sequence
  Synthetic
tgaactucaaaaaccccctcucc

SEQ ID NO: 78331 - DNA, 20 bp, Artificial Sequence
  Synthetic
ggcactuggcctgacuacac

SEQ ID NO: 78332 - DNA, 23 bp, Artificial Sequence
  Synthetic
catgggaaugaacacagggauga

SEQ ID NO: 78333 - DNA, 22 bp, Artificial Sequence
  Synthetic
tcagtaagtugccagcactucc

SEQ ID NO: 78334 - DNA, 25 bp, Artificial Sequence
  Synthetic
aggtgtgtttutgatgagtcaucca

SEQ ID NO: 78335 - DNA, 28 bp, Artificial Sequence
  Synthetic
ctggctgaatucaaaggtgaaattgtua

SEQ ID NO: 78336 - DNA, 30 bp, Artificial Sequence
  Synthetic
gtatgaaatgtaaauttcatggtgctguga

SEQ ID NO: 78337 - DNA, 21 bp, Artificial Sequence
  Synthetic
tctgcgctuggtgaactctut

SEQ ID NO: 78338 - DNA, 24 bp, Artificial Sequence
  Synthetic
gcaggcttttaugtctgtcgagut

SEQ ID NO: 78339 - DNA, 22 bp, Artificial Sequence
  Synthetic
gggaatccccaucccaacatuc

SEQ ID NO: 78340 - DNA, 26 bp, Artificial Sequence
  Synthetic
agatattgaguctgaggactucagca

SEQ ID NO: 78341 - DNA, 24 bp, Artificial Sequence
  Synthetic
gttgcatattucacctctggcaut

SEQ ID NO: 78342 - DNA, 20 bp, Artificial Sequence
  Synthetic
atgucaaaccccacgtccuc

SEQ ID NO: 78343 - DNA, 22 bp, Artificial Sequence
  Synthetic
agagaccagutgtcaccucagt

SEQ ID NO: 78344 - DNA, 23 bp, Artificial Sequence
  Synthetic
gtgaaaucgaagcaggacuccat

SEQ ID NO: 78345 - DNA, 23 bp, Artificial Sequence
  Synthetic
cccttcgtuccttgggatcaaut

SEQ ID NO: 78346 - DNA, 28 bp, Artificial Sequence
  Synthetic
ggtaccagggauaaagatacatguggat

SEQ ID NO: 78347 - DNA, 25 bp, Artificial Sequence
  Synthetic
gaaaaatguccagatggctuacagg

SEQ ID NO: 78348 - DNA, 27 bp, Artificial Sequence
  Synthetic
gataacuaggaaaggattugagcgaca

SEQ ID NO: 78349 - DNA, 26 bp, Artificial Sequence
  Synthetic
tcactgtggauggagaatgatgttut

SEQ ID NO: 78350 - DNA, 26 bp, Artificial Sequence
  Synthetic
ccccctattctautcctttcctccut

SEQ ID NO: 78351 - DNA, 24 bp, Artificial Sequence
  Synthetic
ttgcctaguacatgtccauccaac

SEQ ID NO: 78352 - DNA, 24 bp, Artificial Sequence
  Synthetic
tgaugctaatttcuccaaccaaca

SEQ ID NO: 78353 - DNA, 28 bp, Artificial Sequence
  Synthetic
cugaaaacttuggaagacagaaccaaat

SEQ ID NO: 78354 - DNA, 21 bp, Artificial Sequence
  Synthetic
cacgctggaaucctcgtttuc

SEQ ID NO: 78355 - DNA, 23 bp, Artificial Sequence
  Synthetic
gttttattucggaggctugcagt

SEQ ID NO: 78356 - DNA, 19 bp, Artificial Sequence
  Synthetic
gggacaccaacccgucuac

SEQ ID NO: 78357 - DNA, 23 bp, Artificial Sequence
  Synthetic
ggcttatgggcutttactccuca

SEQ ID NO: 78358 - DNA, 27 bp, Artificial Sequence
  Synthetic
gcatacttgaaaaugaaactgttugcc

SEQ ID NO: 78359 - DNA, 25 bp, Artificial Sequence
  Synthetic
attccagaggaaaugacaccactut

SEQ ID NO: 78360 - DNA, 27 bp, Artificial Sequence
  Synthetic
ctgagtctuacccaaaagatggagaua

SEQ ID NO: 78361 - DNA, 28 bp, Artificial Sequence
  Synthetic
ctgtgccatcucattgtctctuaaaaag

SEQ ID NO: 78362 - DNA, 21 bp, Artificial Sequence
  Synthetic
gcaccgacutgcttgtagcut

SEQ ID NO: 78363 - DNA, 24 bp, Artificial Sequence
  Synthetic
gttacagcaccaucagtagguaca

SEQ ID NO: 78364 - DNA, 19 bp, Artificial Sequence
  Synthetic
tggctccucgatgcccuaa

SEQ ID NO: 78365 - DNA, 27 bp, Artificial Sequence
  Synthetic
ggaaacttgggugattcttgtgttuat

SEQ ID NO: 78366 - DNA, 24 bp, Artificial Sequence
  Synthetic
gcaaatgtgcaauaccaacatguc

SEQ ID NO: 78367 - DNA, 28 bp, Artificial Sequence
  Synthetic
gccatgcuacaattgaggtauacgaaat

SEQ ID NO: 78368 - DNA, 23 bp, Artificial Sequence
  Synthetic
cauagagagcaaaggucagccaa

SEQ ID NO: 78369 - DNA, 24 bp, Artificial Sequence
  Synthetic
ccatctcacacuatgccatgauga

SEQ ID NO: 78370 - DNA, 22 bp, Artificial Sequence
  Synthetic
ggaguctggauggaaggacaaa

SEQ ID NO: 78371 - DNA, 26 bp, Artificial Sequence
  Synthetic
tgaatccttgtcutctacccctguag

SEQ ID NO: 78372 - DNA, 18 bp, Artificial Sequence
  Synthetic
tggcggugaaggctugag

SEQ ID NO: 78373 - DNA, 18 bp, Artificial Sequence
  Synthetic
cgctcucccggaugagga

SEQ ID NO: 78374 - DNA, 18 bp, Artificial Sequence
  Synthetic
ggaacacucacggcucct

SEQ ID NO: 78375 - DNA, 17 bp, Artificial Sequence
  Synthetic
cgacucaccccgtguct

SEQ ID NO: 78376 - DNA, 22 bp, Artificial Sequence
  Synthetic
cccatctgutggtgcttttuct

SEQ ID NO: 78377 - DNA, 20 bp, Artificial Sequence
  Synthetic
ggtcccguctgtgtccctua

SEQ ID NO: 78378 - DNA, 24 bp, Artificial Sequence
  Synthetic
cctcgcutgtatcuccgaaagaat

SEQ ID NO: 78379 - DNA, 27 bp, Artificial Sequence
  Synthetic
cgagtagaaaagautaaagggaacgug

SEQ ID NO: 78380 - DNA, 27 bp, Artificial Sequence
  Synthetic
aagcttctgtaugtttgggaaaugaga

SEQ ID NO: 78381 - DNA, 22 bp, Artificial Sequence
  Synthetic
gctcttgctucagactctgugg

SEQ ID NO: 78382 - DNA, 23 bp, Artificial Sequence
  Synthetic
cactgcuccagaaaccttctuct

SEQ ID NO: 78383 - DNA, 21 bp, Artificial Sequence
  Synthetic
cccagagcutgttgtcuccac

SEQ ID NO: 78384 - DNA, 22 bp, Artificial Sequence
  Synthetic
acgtgcacagcgugtattttuc

SEQ ID NO: 78385 - DNA, 28 bp, Artificial Sequence
  Synthetic
aactctcctcuacagaatttcuggaaac

SEQ ID NO: 78386 - DNA, 22 bp, Artificial Sequence
  Synthetic
agttctggcaacugcatctuct

SEQ ID NO: 78387 - DNA, 21 bp, Artificial Sequence
  Synthetic
ggtttctcccccutgctccua

SEQ ID NO: 78388 - DNA, 26 bp, Artificial Sequence
  Synthetic
gatcaaggtugagcttgttgattugg

SEQ ID NO: 78389 - DNA, 26 bp, Artificial Sequence
  Synthetic
agctctgtttaguctctggctctuaa

SEQ ID NO: 78390 - DNA, 23 bp, Artificial Sequence
  Synthetic
ccaggtgtucatctctcctcuct

SEQ ID NO: 78391 - DNA, 21 bp, Artificial Sequence
  Synthetic
accacttcutccttcgtucgg

SEQ ID NO: 78392 - DNA, 28 bp, Artificial Sequence
  Synthetic
caacaggagaaagaagaugctaaacgua

SEQ ID NO: 78393 - DNA, 27 bp, Artificial Sequence
  Synthetic
ctgggttttuccttttgccttaucaag

SEQ ID NO: 78394 - DNA, 20 bp, Artificial Sequence
  Synthetic
gtgaccgccagauctgtgut

SEQ ID NO: 78395 - DNA, 27 bp, Artificial Sequence
  Synthetic
cgacaaattcatuacaaatggctguca

SEQ ID NO: 78396 - DNA, 21 bp, Artificial Sequence
  Synthetic
ctgagatgguaacacccguga

SEQ ID NO: 78397 - DNA, 22 bp, Artificial Sequence
  Synthetic
tcgacttcauactggccaagug

SEQ ID NO: 78398 - DNA, 25 bp, Artificial Sequence
  Synthetic
gtagtgugacgacattgagtttugg

SEQ ID NO: 78399 - DNA, 29 bp, Artificial Sequence
  Synthetic
ctaactgctcugatactgactcatucaaa

SEQ ID NO: 78400 - DNA, 24 bp, Artificial Sequence
  Synthetic
ccaccgtgguccagatatauagca

SEQ ID NO: 78401 - DNA, 22 bp, Artificial Sequence
  Synthetic
ctgugcaaccttttucacccat

SEQ ID NO: 78402 - DNA, 28 bp, Artificial Sequence
  Synthetic
agcacaccacagugtaaatattttucag

SEQ ID NO: 78403 - DNA, 23 bp, Artificial Sequence
  Synthetic
tgtgcgagaautgcttgaaaugg

SEQ ID NO: 78404 - DNA, 21 bp, Artificial Sequence
  Synthetic
tgagtgguccctgggagatut

SEQ ID NO: 78405 - DNA, 23 bp, Artificial Sequence
  Synthetic
ctaagcctucattgctcuagcct

SEQ ID NO: 78406 - DNA, 25 bp, Artificial Sequence
  Synthetic
tgccatggagaaagaauttgagcua

SEQ ID NO: 78407 - DNA, 23 bp, Artificial Sequence
  Synthetic
agatgattcugagaggcagguct

SEQ ID NO: 78408 - DNA, 27 bp, Artificial Sequence
  Synthetic
cttacctaaattuggcagtttctggut

SEQ ID NO: 78409 - DNA, 26 bp, Artificial Sequence
  Synthetic
ggtattgtuggctcccttuagaaaga

SEQ ID NO: 78410 - DNA, 25 bp, Artificial Sequence
  Synthetic
accagagcagaggucaaaatuaagg

SEQ ID NO: 78411 - DNA, 25 bp, Artificial Sequence
  Synthetic
tctactagtugtgggtccucacaaa

SEQ ID NO: 78412 - DNA, 24 bp, Artificial Sequence
  Synthetic
gttccattucaagcaattcucgca

SEQ ID NO: 78413 - DNA, 21 bp, Artificial Sequence
  Synthetic
cccatgaugcggccactaaua

SEQ ID NO: 78414 - DNA, 22 bp, Artificial Sequence
  Synthetic
gcccttctacaugtcccactug

SEQ ID NO: 78415 - DNA, 26 bp, Artificial Sequence
  Synthetic
tcttggttgcutgataggtagguact

SEQ ID NO: 78416 - DNA, 21 bp, Artificial Sequence
  Synthetic
cccctgacuccgtccagtaut

SEQ ID NO: 78417 - DNA, 19 bp, Artificial Sequence
  Synthetic
cgagacacgcccutaccut

SEQ ID NO: 78418 - DNA, 24 bp, Artificial Sequence
  Synthetic
gaatacaugcggtggattttuggg

SEQ ID NO: 78419 - DNA, 23 bp, Artificial Sequence
  Synthetic
ttccttcacugagttcugcgaat

SEQ ID NO: 78420 - DNA, 25 bp, Artificial Sequence
  Synthetic
gcaattgcaucaaagcaacaaauac

SEQ ID NO: 78421 - DNA, 27 bp, Artificial Sequence
  Synthetic
ggctcctcuaaccatgtttacaacuat

SEQ ID NO: 78422 - DNA, 29 bp, Artificial Sequence
  Synthetic
gtttcagatacuacagatgacttgtggut

SEQ ID NO: 78423 - DNA, 28 bp, Artificial Sequence
  Synthetic
gcacacaaacagaaucaacatggaatut

SEQ ID NO: 78424 - DNA, 27 bp, Artificial Sequence
  Synthetic
tgtctctcttcucttacccttttucct

SEQ ID NO: 78425 - DNA, 27 bp, Artificial Sequence
  Synthetic
ccctggaaacaccucaagattttcuac

SEQ ID NO: 78426 - DNA, 22 bp, Artificial Sequence
  Synthetic
gagccaaaaaccagugctucag

SEQ ID NO: 78427 - DNA, 27 bp, Artificial Sequence
  Synthetic
cgtcttagttuccttcttttctuccca

SEQ ID NO: 78428 - DNA, 22 bp, Artificial Sequence
  Synthetic
cagcctgtguctgctgaagtua

SEQ ID NO: 78429 - DNA, 28 bp, Artificial Sequence
  Synthetic
ccatgaactccuggagaataatccuaag

SEQ ID NO: 78430 - DNA, 21 bp, Artificial Sequence
  Synthetic
ccgtggatgaucacagggtug

SEQ ID NO: 78431 - DNA, 26 bp, Artificial Sequence
  Synthetic
ccacaggtaguagggaagaatguact

SEQ ID NO: 78432 - DNA, 29 bp, Artificial Sequence
  Synthetic
acactttccttgugctatcaatttacuca

SEQ ID NO: 78433 - DNA, 28 bp, Artificial Sequence
  Synthetic
gttgaggatactuctgcagattcgauat

SEQ ID NO: 78434 - DNA, 25 bp, Artificial Sequence
  Synthetic
acccacuatgaaugagcagaaaacc

SEQ ID NO: 78435 - DNA, 24 bp, Artificial Sequence
  Synthetic
cctgtgtgaggaugagctcttuac

SEQ ID NO: 78436 - DNA, 27 bp, Artificial Sequence
  Synthetic
ccacaggaatgucttcccattttacua

SEQ ID NO: 78437 - DNA, 28 bp, Artificial Sequence
  Synthetic
ctgtattcauacactccccttuagcaat

SEQ ID NO: 78438 - DNA, 26 bp, Artificial Sequence
  Synthetic
ctacagttaccutcccttttctcugg

SEQ ID NO: 78439 - DNA, 23 bp, Artificial Sequence
  Synthetic
acacgtcctguttccttgttcug

SEQ ID NO: 78440 - DNA, 22 bp, Artificial Sequence
  Synthetic
tggacttgugcaaatgccuagt

SEQ ID NO: 78441 - DNA, 28 bp, Artificial Sequence
  Synthetic
ggacatttauccaacaaaatgctacugt

SEQ ID NO: 78442 - DNA, 28 bp, Artificial Sequence
  Synthetic
tttccaggaatcuaggtaaaaatggcut

SEQ ID NO: 78443 - DNA, 28 bp, Artificial Sequence
  Synthetic
acgtaaatactaggugtaggtggatuca

SEQ ID NO: 78444 - DNA, 23 bp, Artificial Sequence
  Synthetic
ggtgcaauttaggauacccccaa

SEQ ID NO: 78445 - DNA, 22 bp, Artificial Sequence
  Synthetic
cgtagcaagaugcgtgatguca

SEQ ID NO: 78446 - DNA, 21 bp, Artificial Sequence
  Synthetic
cuccctugccaaaggacaagt

SEQ ID NO: 78447 - DNA, 27 bp, Artificial Sequence
  Synthetic
aatgtttccuaaagggcatccatguaa

SEQ ID NO: 78448 - DNA, 27 bp, Artificial Sequence
  Synthetic
gatggaacaacugatgtcttacttgug

SEQ ID NO: 78449 - DNA, 24 bp, Artificial Sequence
  Synthetic
aaatatgtgcaccutccctcctut

SEQ ID NO: 78450 - DNA, 26 bp, Artificial Sequence
  Synthetic
gggtcagctuaaggtaagaaactgua

SEQ ID NO: 78451 - DNA, 23 bp, Artificial Sequence
  Synthetic
ctggaggcagautttccaaacug

SEQ ID NO: 78452 - DNA, 26 bp, Artificial Sequence
  Synthetic
tcatagcucagctgtaagaaaugcaa

SEQ ID NO: 78453 - DNA, 20 bp, Artificial Sequence
  Synthetic
ctaccaguacggcaccacuc

SEQ ID NO: 78454 - DNA, 22 bp, Artificial Sequence
  Synthetic
cctccgauaagctcctccagua

SEQ ID NO: 78455 - DNA, 23 bp, Artificial Sequence
  Synthetic
tttatggcuggtgtctgacucac

SEQ ID NO: 78456 - DNA, 28 bp, Artificial Sequence
  Synthetic
gtctggatucacattaactctaugacca

SEQ ID NO: 78457 - DNA, 23 bp, Artificial Sequence
  Synthetic
acttcgcugaattgacccaugaa

SEQ ID NO: 78458 - DNA, 22 bp, Artificial Sequence
  Synthetic
gcuatgaucaaccaggcaacag

SEQ ID NO: 78459 - DNA, 28 bp, Artificial Sequence
  Synthetic
tgcccatctgucttgattcacatauaag

SEQ ID NO: 78460 - DNA, 22 bp, Artificial Sequence
  Synthetic
ccagttcaugcaacagagagug

SEQ ID NO: 78461 - DNA, 27 bp, Artificial Sequence
  Synthetic
acaaaacaccuagcaaatggaaaaugg

SEQ ID NO: 78462 - DNA, 24 bp, Artificial Sequence
  Synthetic
catagaccguacatgtcagcgtut

SEQ ID NO: 78463 - DNA, 28 bp, Artificial Sequence
  Synthetic
agctgactgacaautcaaaagttgttut

SEQ ID NO: 78464 - DNA, 20 bp, Artificial Sequence
  Synthetic
ctttgcagcgcgutgactua

SEQ ID NO: 78465 - DNA, 25 bp, Artificial Sequence
  Synthetic
acagctactcucagaaagcactuac

SEQ ID NO: 78466 - DNA, 32 bp, Artificial Sequence
  Synthetic
atgactgaaactttutaagattagagggtuga

SEQ ID NO: 78467 - DNA, 28 bp, Artificial Sequence
  Synthetic
ggaccaacccaaguattaagagtgtuat

SEQ ID NO: 78468 - DNA, 28 bp, Artificial Sequence
  Synthetic
aggcatctttggucctatattgaatgut

SEQ ID NO: 78469 - DNA, 19 bp, Artificial Sequence
  Synthetic
aagcccaauccgccacaua

SEQ ID NO: 78470 - DNA, 21 bp, Artificial Sequence
  Synthetic
gctgtaugcctggcauccaat

SEQ ID NO: 78471 - DNA, 24 bp, Artificial Sequence
  Synthetic
cttgtactgccaguaggactguag

SEQ ID NO: 78472 - DNA, 25 bp, Artificial Sequence
  Synthetic
accatgaaguaccaagtttcacugt

SEQ ID NO: 78473 - DNA, 19 bp, Artificial Sequence
  Synthetic
tgaaagaugccgccgugat

SEQ ID NO: 78474 - DNA, 25 bp, Artificial Sequence
  Synthetic
atgctccagtautagtgttcgcaut

SEQ ID NO: 78475 - DNA, 20 bp, Artificial Sequence
  Synthetic
catgaccccugcttccucac

SEQ ID NO: 78476 - DNA, 27 bp, Artificial Sequence
  Synthetic
actggtggttugtcttgaaaagauaca

SEQ ID NO: 78477 - DNA, 24 bp, Artificial Sequence
  Synthetic
aggtggacaaaacugagagctuag

SEQ ID NO: 78478 - DNA, 23 bp, Artificial Sequence
  Synthetic
gcaguccaaagaaaggacccaut

SEQ ID NO: 78479 - DNA, 27 bp, Artificial Sequence
  Synthetic
ttttcccttttguagtaagctgtgcua

SEQ ID NO: 78480 - DNA, 26 bp, Artificial Sequence
  Synthetic
aagtgcttcutctaattccaucagca

SEQ ID NO: 78481 - DNA, 28 bp, Artificial Sequence
  Synthetic
actgcagtattgauaccttttgtttcut

SEQ ID NO: 78482 - DNA, 25 bp, Artificial Sequence
  Synthetic
tggatacaagcugattctcccauct

SEQ ID NO: 78483 - DNA, 27 bp, Artificial Sequence
  Synthetic
ggttacttaactugttttcagcagucc

SEQ ID NO: 78484 - DNA, 28 bp, Artificial Sequence
  Synthetic
ggaacacctccacutacaaaagaagaua

SEQ ID NO: 78485 - DNA, 23 bp, Artificial Sequence
  Synthetic
ttttgcccuctgtaagagtugct

SEQ ID NO: 78486 - DNA, 25 bp, Artificial Sequence
  Synthetic
ggacctcatcauggtaggttttugt

SEQ ID NO: 78487 - DNA, 25 bp, Artificial Sequence
  Synthetic
gctgucagaacttgctucagagaaa

SEQ ID NO: 78488 - DNA, 21 bp, Artificial Sequence
  Synthetic
gaattgctgguctcagctguc

SEQ ID NO: 78489 - DNA, 23 bp, Artificial Sequence
  Synthetic
acccatgugcatgaguacaaact

SEQ ID NO: 78490 - DNA, 22 bp, Artificial Sequence
  Synthetic
caccccatccutagtccaacug

SEQ ID NO: 78491 - DNA, 23 bp, Artificial Sequence
  Synthetic
ccatctgtcuccgtcttctcuct

SEQ ID NO: 78492 - DNA, 22 bp, Artificial Sequence
  Synthetic
gccctugaaaaagagcugcaga

SEQ ID NO: 78493 - DNA, 27 bp, Artificial Sequence
  Synthetic
aagactaccuaagaacaagctcucaga

SEQ ID NO: 78494 - DNA, 24 bp, Artificial Sequence
  Synthetic
tccgggtuccattaaaagttguga

SEQ ID NO: 78495 - DNA, 25 bp, Artificial Sequence
  Synthetic
acacactgtguaaaacctcctuacc

SEQ ID NO: 78496 - DNA, 27 bp, Artificial Sequence
  Synthetic
ccaacagagggaaacuaatagttguct

SEQ ID NO: 78497 - DNA, 26 bp, Artificial Sequence
  Synthetic
gcctcaguacaaactcattagcauca

SEQ ID NO: 78498 - DNA, 26 bp, Artificial Sequence
  Synthetic
tttcaggucagaagcctagactuaga

SEQ ID NO: 78499 - DNA, 25 bp, Artificial Sequence
  Synthetic
ctttcactccuggtccatcaacuac

SEQ ID NO: 78500 - DNA, 23 bp, Artificial Sequence
  Synthetic
aaggacagaugcaaccattgcua

SEQ ID NO: 78501 - DNA, 26 bp, Artificial Sequence
  Synthetic
aacaggcatgaugaactgtcgaauat

SEQ ID NO: 78502 - DNA, 17 bp, Artificial Sequence
  Synthetic
gcccgcugctcacctut

SEQ ID NO: 78503 - DNA, 23 bp, Artificial Sequence
  Synthetic
acgauaattcctuccccaaagcc

SEQ ID NO: 78504 - DNA, 24 bp, Artificial Sequence
  Synthetic
tgacgagcugcaatttggttauga

SEQ ID NO: 78505 - DNA, 29 bp, Artificial Sequence
  Synthetic
actctactggaagautttagaaactcuga

SEQ ID NO: 78506 - DNA, 22 bp, Artificial Sequence
  Synthetic
tttagcugctgagaaucacggt

SEQ ID NO: 78507 - DNA, 25 bp, Artificial Sequence
  Synthetic
tctctccacacutcccacatactua

SEQ ID NO: 78508 - DNA, 25 bp, Artificial Sequence
  Synthetic
agaaaggugaagacacaggucaaaa

SEQ ID NO: 78509 - DNA, 28 bp, Artificial Sequence
  Synthetic
gggcaattttaatuggagggtcataauc

SEQ ID NO: 78510 - DNA, 22 bp, Artificial Sequence
  Synthetic
ggctctgacauctagtgtgugt

SEQ ID NO: 78511 - DNA, 25 bp, Artificial Sequence
  Synthetic
ccatcccccauaaaccaagaactua

SEQ ID NO: 78512 - DNA, 23 bp, Artificial Sequence
  Synthetic
ctgcatacaaggaguaggcagut

SEQ ID NO: 78513 - DNA, 28 bp, Artificial Sequence
  Synthetic
gtctgttttguccatttggtatctcuca

SEQ ID NO: 78514 - DNA, 26 bp, Artificial Sequence
  Synthetic
gctttcttgaggutatcttcacugga

SEQ ID NO: 78515 - DNA, 24 bp, Artificial Sequence
  Synthetic
gcugaccacaaagcacaattuaca

SEQ ID NO: 78516 - DNA, 25 bp, Artificial Sequence
  Synthetic
gtggcttttuaacccatagctgtut

SEQ ID NO: 78517 - DNA, 28 bp, Artificial Sequence
  Synthetic
cagttgccataucactctcacactaaut

SEQ ID NO: 78518 - DNA, 31 bp, Artificial Sequence
  Synthetic
ttagacttctaaaaaugcattagaggtgugt

SEQ ID NO: 78519 - DNA, 26 bp, Artificial Sequence
  Synthetic
gctgaaacugctgttgatgaauaagt

SEQ ID NO: 78520 - DNA, 23 bp, Artificial Sequence
  Synthetic
ctcggcgguttatagaggaugag

SEQ ID NO: 78521 - DNA, 26 bp, Artificial Sequence
  Synthetic
gctactagaucgagaggagtcugaag

SEQ ID NO: 78522 - DNA, 23 bp, Artificial Sequence
  Synthetic
acuttcugaccagcaacgacaaa

SEQ ID NO: 78523 - DNA, 25 bp, Artificial Sequence
  Synthetic
cacaaaggagaaauctguacccaca

SEQ ID NO: 78524 - DNA, 21 bp, Artificial Sequence
  Synthetic
tggccaaaaugaguggacaca

SEQ ID NO: 78525 - DNA, 28 bp, Artificial Sequence
  Synthetic
ggaaactgagagggaauctctttcauaa

SEQ ID NO: 78526 - DNA, 25 bp, Artificial Sequence
  Synthetic
gctgaagttguagcaggaactacua

SEQ ID NO: 78527 - DNA, 28 bp, Artificial Sequence
  Synthetic
caagtagaaagauttgaaacagtuggca

SEQ ID NO: 78528 - DNA, 23 bp, Artificial Sequence
  Synthetic
ctacatacauacacctgguggct

SEQ ID NO: 78529 - DNA, 22 bp, Artificial Sequence
  Synthetic
aaagaaccccacaguccatgut

SEQ ID NO: 78530 - DNA, 28 bp, Artificial Sequence
  Synthetic
tttgttaatgtccutgttgtgcattuat

SEQ ID NO: 78531 - DNA, 24 bp, Artificial Sequence
  Synthetic
tcuggaatauacagggcacaaacc

SEQ ID NO: 78532 - DNA, 20 bp, Artificial Sequence
  Synthetic
tgcaggcagagcugattuct

SEQ ID NO: 78533 - DNA, 31 bp, Artificial Sequence
  Synthetic
aacacattaatcuccataattccuacagcat

SEQ ID NO: 78534 - DNA, 18 bp, Artificial Sequence
  Synthetic
gggcccaugtggtttgug

SEQ ID NO: 78535 - DNA, 27 bp, Artificial Sequence
  Synthetic
acaaaaactucctttctactucccagt

SEQ ID NO: 78536 - DNA, 20 bp, Artificial Sequence
  Synthetic
ggagcgauacccctgaagut

SEQ ID NO: 78537 - DNA, 19 bp, Artificial Sequence
  Synthetic
gagacgaggagguctgcug

SEQ ID NO: 78538 - DNA, 28 bp, Artificial Sequence
  Synthetic
cagtctgtgguaagtaactttuaggcat

SEQ ID NO: 78539 - DNA, 25 bp, Artificial Sequence
  Synthetic
gtggatcugggcaaatgaaaatgut

SEQ ID NO: 78540 - DNA, 24 bp, Artificial Sequence
  Synthetic
cttctcagcacucctctcaaaugt

SEQ ID NO: 78541 - DNA, 21 bp, Artificial Sequence
  Synthetic
ggaaatgggcaguggaggaug

SEQ ID NO: 78542 - DNA, 27 bp, Artificial Sequence
  Synthetic
tggatttggaauatcaggguagaaggt

SEQ ID NO: 78543 - DNA, 31 bp, Artificial Sequence
  Synthetic
attttaatctcagaugtgcattaaaggatuc

SEQ ID NO: 78544 - DNA, 26 bp, Artificial Sequence
  Synthetic
aaggcctgauatgttttaagugggaa

SEQ ID NO: 78545 - DNA, 27 bp, Artificial Sequence
  Synthetic
ggatctgaaacaacautcatgtgugaa

SEQ ID NO: 78546 - DNA, 23 bp, Artificial Sequence
  Synthetic
ccaaaagcauctgcugcagaaac

SEQ ID NO: 78547 - DNA, 28 bp, Artificial Sequence
  Synthetic
gcatgaatccaguccagatattucacat

SEQ ID NO: 78548 - DNA, 26 bp, Artificial Sequence
  Synthetic
cctcagtattcuctctcttcctcuca

SEQ ID NO: 78549 - DNA, 17 bp, Artificial Sequence
  Synthetic
gagcugggaccccucac

SEQ ID NO: 78550 - DNA, 24 bp, Artificial Sequence
  Synthetic
aatggttgctguctcatcagcaua

SEQ ID NO: 78551 - DNA, 27 bp, Artificial Sequence
  Synthetic
caggcctauaagacttcaatugggaat

SEQ ID NO: 78552 - DNA, 28 bp, Artificial Sequence
  Synthetic
aaaagaauaaacaagaccacagacucca

SEQ ID NO: 78553 - DNA, 26 bp, Artificial Sequence
  Synthetic
gaagacttggaucgaattctcacuct

SEQ ID NO: 78554 - DNA, 28 bp, Artificial Sequence
  Synthetic
caugatactaaauaagccaacacaccac

SEQ ID NO: 78555 - DNA, 23 bp, Artificial Sequence
  Synthetic
tcctcatguggctgatgtttuca

SEQ ID NO: 78556 - DNA, 28 bp, Artificial Sequence
  Synthetic
agaagutttggatcuagaacgacgaaaa

SEQ ID NO: 78557 - DNA, 21 bp, Artificial Sequence
  Synthetic
gutggaggcauaagccaaggt

SEQ ID NO: 78558 - DNA, 26 bp, Artificial Sequence
  Synthetic
aggaagttctuacctcattggttgug

SEQ ID NO: 78559 - DNA, 27 bp, Artificial Sequence
  Synthetic
ccacgtacccagugcatatgaaatuaa

SEQ ID NO: 78560 - DNA, 27 bp, Artificial Sequence
  Synthetic
ctcattgactgaugaaacttgcttuga

SEQ ID NO: 78561 - DNA, 22 bp, Artificial Sequence
  Synthetic
catgtagauggcggtgatggua

SEQ ID NO: 78562 - DNA, 19 bp, Artificial Sequence
  Synthetic
ctgttgaccugtcccggua

SEQ ID NO: 78563 - DNA, 22 bp, Artificial Sequence
  Synthetic
agaucttctugcagccagcaaa

SEQ ID NO: 78564 - DNA, 22 bp, Artificial Sequence
  Synthetic
cctccaguatctcugaccacac

SEQ ID NO: 78565 - DNA, 23 bp, Artificial Sequence
  Synthetic
gtggctcugacctagaatgctut

SEQ ID NO: 78566 - DNA, 20 bp, Artificial Sequence
  Synthetic
agtacugttgccugggcaaa

SEQ ID NO: 78567 - DNA, 24 bp, Artificial Sequence
  Synthetic
tccagtattcuaccgtgguacaca

SEQ ID NO: 78568 - DNA, 24 bp, Artificial Sequence
  Synthetic
gacactgtcaucttcccacauacc

SEQ ID NO: 78569 - DNA, 27 bp, Artificial Sequence
  Synthetic
ggaagttaaacaugtcaaatgcugact

SEQ ID NO: 78570 - DNA, 22 bp, Artificial Sequence
  Synthetic
ctgactgcaugtgtggctagua

SEQ ID NO: 78571 - DNA, 26 bp, Artificial Sequence
  Synthetic
tttggaatugacaagacagcaactug

SEQ ID NO: 78572 - DNA, 24 bp, Artificial Sequence
  Synthetic
gttaccagugccaatauccaggag

SEQ ID NO: 78573 - DNA, 23 bp, Artificial Sequence
  Synthetic
catctggatccucaggactcugt

SEQ ID NO: 78574 - DNA, 24 bp, Artificial Sequence
  Synthetic
tgutttaatctttuggccccagga

SEQ ID NO: 78575 - DNA, 22 bp, Artificial Sequence
  Synthetic
ctgctccccacucaagactuac

SEQ ID NO: 78576 - DNA, 25 bp, Artificial Sequence
  Synthetic
aaccgacattuaggtggacttctut

SEQ ID NO: 78577 - DNA, 20 bp, Artificial Sequence
  Synthetic
ccaacgtccucgggagtuag

SEQ ID NO: 78578 - DNA, 25 bp, Artificial Sequence
  Synthetic
caacattttgacugctactgtccug

SEQ ID NO: 78579 - DNA, 24 bp, Artificial Sequence
  Synthetic
cttgttgctgutgttgttgacuct

SEQ ID NO: 78580 - DNA, 21 bp, Artificial Sequence
  Synthetic
acttggacugacggaactugg

SEQ ID NO: 78581 - DNA, 22 bp, Artificial Sequence
  Synthetic
aaggacacagcaguggtatugg

SEQ ID NO: 78582 - DNA, 27 bp, Artificial Sequence
  Synthetic
ttttgtgcagtautaatgcttgctgut

SEQ ID NO: 78583 - DNA, 23 bp, Artificial Sequence
  Synthetic
aaagtccauaagcctacctugcc

SEQ ID NO: 78584 - DNA, 22 bp, Artificial Sequence
  Synthetic
tgataattuccgacccccucca

SEQ ID NO: 78585 - DNA, 26 bp, Artificial Sequence
  Synthetic
tgtgcataucaaaccttgtuccagaa

SEQ ID NO: 78586 - DNA, 23 bp, Artificial Sequence
  Synthetic
aatggctugacagagttguggat

SEQ ID NO: 78587 - DNA, 28 bp, Artificial Sequence
  Synthetic
ggaaaaagcuaatggatggauggaaaag

SEQ ID NO: 78588 - DNA, 22 bp, Artificial Sequence
  Synthetic
ggcttcaugccctattugcaag

SEQ ID NO: 78589 - DNA, 28 bp, Artificial Sequence
  Synthetic
ctaagaacattcuctgacaggtuggaaa

SEQ ID NO: 78590 - DNA, 27 bp, Artificial Sequence
  Synthetic
gttaaacagucaaccgtactaguaaca

SEQ ID NO: 78591 - DNA, 22 bp, Artificial Sequence
  Synthetic
gaggtccgcuctttttcttugg

SEQ ID NO: 78592 - DNA, 25 bp, Artificial Sequence
  Synthetic
ctgagacttugcatggtttcttucc

SEQ ID NO: 78593 - DNA, 28 bp, Artificial Sequence
  Synthetic
aaccatgctgacucaagatttgatagut

SEQ ID NO: 78594 - DNA, 24 bp, Artificial Sequence
  Synthetic
ggaggagtucagaggaagacacut

SEQ ID NO: 78595 - DNA, 24 bp, Artificial Sequence
  Synthetic
ggaccctgauggattacaaggaug

SEQ ID NO: 78596 - DNA, 26 bp, Artificial Sequence
  Synthetic
cttcttctctucagaagttcctucgt

SEQ ID NO: 78597 - DNA, 21 bp, Artificial Sequence
  Synthetic
ccagacgguccatcactucag

SEQ ID NO: 78598 - DNA, 25 bp, Artificial Sequence
  Synthetic
cccagagcaguaacctaaaatgcut

SEQ ID NO: 78599 - DNA, 20 bp, Artificial Sequence
  Synthetic
atgaucacaggcuggcagag

SEQ ID NO: 78600 - DNA, 21 bp, Artificial Sequence
  Synthetic
ctgttugcttggaaugggaca

SEQ ID NO: 78601 - DNA, 20 bp, Artificial Sequence
  Synthetic
gtggtgtuggcagaggcuat

SEQ ID NO: 78602 - DNA, 23 bp, Artificial Sequence
  Synthetic
ctagaacacuacgcaugcaggat

SEQ ID NO: 78603 - DNA, 29 bp, Artificial Sequence
  Synthetic
gagaattgcugatcttcaagguaaaacaa

SEQ ID NO: 78604 - DNA, 21 bp, Artificial Sequence
  Synthetic
gggaaagggucctctgaucat

SEQ ID NO: 78605 - DNA, 24 bp, Artificial Sequence
  Synthetic
ggttgttctugtggaagatgucct

SEQ ID NO: 78606 - DNA, 21 bp, Artificial Sequence
  Synthetic
ggttggguttgtccttgucca

SEQ ID NO: 78607 - DNA, 22 bp, Artificial Sequence
  Synthetic
ggtgccuctcaaggttugaact

SEQ ID NO: 78608 - DNA, 20 bp, Artificial Sequence
  Synthetic
tcgcaagaccaggugguaac

SEQ ID NO: 78609 - DNA, 27 bp, Artificial Sequence
  Synthetic
atttgaaacgggutagagattagugct

SEQ ID NO: 78610 - DNA, 23 bp, Artificial Sequence
  Synthetic
ctaccaggacacgautttgugga

SEQ ID NO: 78611 - DNA, 22 bp, Artificial Sequence
  Synthetic
ggtcaggcugtcugagagaaga

SEQ ID NO: 78612 - DNA, 20 bp, Artificial Sequence
  Synthetic
gggauagcgggactgatguc

SEQ ID NO: 78613 - DNA, 20 bp, Artificial Sequence
  Synthetic
gcuctatgccugccaagacc

SEQ ID NO: 78614 - DNA, 20 bp, Artificial Sequence
  Synthetic
tgcgtatucctgagcugcaa

SEQ ID NO: 78615 - DNA, 21 bp, Artificial Sequence
  Synthetic
cggcaggagguttauggcaat

SEQ ID NO: 78616 - DNA, 23 bp, Artificial Sequence
  Synthetic
ttgaggtguctctccucgaagat

SEQ ID NO: 78617 - DNA, 20 bp, Artificial Sequence
  Synthetic
ggaugagaggcgctgctuac

SEQ ID NO: 78618 - DNA, 27 bp, Artificial Sequence
  Synthetic
tcaactcaagagucaaaagaaacugga

SEQ ID NO: 78619 - DNA, 25 bp, Artificial Sequence
  Synthetic
gttctcattcugtgtcttcccugaa

SEQ ID NO: 78620 - DNA, 18 bp, Artificial Sequence
  Synthetic
gcccuagcctcucccact

SEQ ID NO: 78621 - DNA, 18 bp, Artificial Sequence
  Synthetic
tgcccagucctgcugaga

SEQ ID NO: 78622 - DNA, 18 bp, Artificial Sequence
  Synthetic
ggcccggagaguggaaug

SEQ ID NO: 78623 - DNA, 19 bp, Artificial Sequence
  Synthetic
ccaaaagugaccgcucgct

SEQ ID NO: 78624 - DNA, 23 bp, Artificial Sequence
  Synthetic
gcaccacugagaacaagggatut

SEQ ID NO: 78625 - DNA, 21 bp, Artificial Sequence
  Synthetic
gctggtgcuggactttgaugt

SEQ ID NO: 78626 - DNA, 25 bp, Artificial Sequence
  Synthetic
actggaagaauacgacacucaggat

SEQ ID NO: 78627 - DNA, 25 bp, Artificial Sequence
  Synthetic
gtggaatuccccatgaacatucaaa

SEQ ID NO: 78628 - DNA, 27 bp, Artificial Sequence
  Synthetic
catcttttctgcucttcacttcatguc

SEQ ID NO: 78629 - DNA, 24 bp, Artificial Sequence
  Synthetic
cgaaaccuagtcacatuggagagt

SEQ ID NO: 78630 - DNA, 22 bp, Artificial Sequence
  Synthetic
ctggcaggaggguaagaatgug

SEQ ID NO: 78631 - DNA, 20 bp, Artificial Sequence
  Synthetic
gggacttucagcgggagaut

SEQ ID NO: 78632 - DNA, 28 bp, Artificial Sequence
  Synthetic
aatgtctaaattgaaugtgtcctccugt

SEQ ID NO: 78633 - DNA, 26 bp, Artificial Sequence
  Synthetic
ccatccaagacaaugacaacauccat

SEQ ID NO: 78634 - DNA, 28 bp, Artificial Sequence
  Synthetic
tgttcagtgtgucaaacagtattctuga

SEQ ID NO: 78635 - DNA, 26 bp, Artificial Sequence
  Synthetic
catagacaatgggaucttcacgguaa

SEQ ID NO: 78636 - DNA, 20 bp, Artificial Sequence
  Synthetic
gtgtuggccagcgttcatuc

SEQ ID NO: 78637 - DNA, 20 bp, Artificial Sequence
  Synthetic
actccugtgttguggcaacc

SEQ ID NO: 78638 - DNA, 23 bp, Artificial Sequence
  Synthetic
aaccgagagacaagcauctucag

SEQ ID NO: 78639 - DNA, 28 bp, Artificial Sequence
  Synthetic
ccagagataaaacugcaattcctctuga

SEQ ID NO: 78640 - DNA, 27 bp, Artificial Sequence
  Synthetic
tttcttccagtcutactaggagctuct

SEQ ID NO: 78641 - DNA, 23 bp, Artificial Sequence
  Synthetic
ccaaatctccaggucgctgaaua

SEQ ID NO: 78642 - DNA, 27 bp, Artificial Sequence
  Synthetic
tgaagcaaatgtuccagtgtataggut

SEQ ID NO: 78643 - DNA, 25 bp, Artificial Sequence
  Synthetic
cctgtaaguggaccaacatuccaag

SEQ ID NO: 78644 - DNA, 23 bp, Artificial Sequence
  Synthetic
ctattggctggugcaacaacaut

SEQ ID NO: 78645 - DNA, 28 bp, Artificial Sequence
  Synthetic
attctatgcaaggagucattcttctuac

SEQ ID NO: 78646 - DNA, 20 bp, Artificial Sequence
  Synthetic
cuctgauccgccacacaact

SEQ ID NO: 78647 - DNA, 26 bp, Artificial Sequence
  Synthetic
tgtgaccugtttacagtucaacaaga

SEQ ID NO: 78648 - DNA, 21 bp, Artificial Sequence
  Synthetic
tgtgcagugctttgaggauct

SEQ ID NO: 78649 - DNA, 20 bp, Artificial Sequence
  Synthetic
gacatcagucccgctauccc

SEQ ID NO: 78650 - DNA, 28 bp, Artificial Sequence
  Synthetic
ccatcatcugagctggtaatuacaaagt

SEQ ID NO: 78651 - DNA, 33 bp, Artificial Sequence
  Synthetic
aactaactcatagccautatttctaaccaguaa

SEQ ID NO: 78652 - DNA, 22 bp, Artificial Sequence
  Synthetic
ccttctaggcugcccaacauac

SEQ ID NO: 78653 - DNA, 25 bp, Artificial Sequence
  Synthetic
cccagctcauattgccttctctuac

SEQ ID NO: 78654 - DNA, 29 bp, Artificial Sequence
  Synthetic
ctcacgattatttuggtcaacttgaaugt

SEQ ID NO: 78655 - DNA, 22 bp, Artificial Sequence
  Synthetic
gguctucaaaggcaccagaaaa

SEQ ID NO: 78656 - DNA, 31 bp, Artificial Sequence
  Synthetic
aaggtcacaaatuttgcttatattctuaggt

SEQ ID NO: 78657 - DNA, 23 bp, Artificial Sequence
  Synthetic
catatgagauggtgcctgacuga

SEQ ID NO: 78658 - DNA, 22 bp, Artificial Sequence
  Synthetic
tcutctctcagucaggcaccat

SEQ ID NO: 78659 - DNA, 29 bp, Artificial Sequence
  Synthetic
gtaggtgagaguagggttttagagtuagt

SEQ ID NO: 78660 - DNA, 24 bp, Artificial Sequence
  Synthetic
ttgccagttgugctttttgcuaaa

SEQ ID NO: 78661 - DNA, 20 bp, Artificial Sequence
  Synthetic
cagctuggacacggcttuac

SEQ ID NO: 78662 - DNA, 21 bp, Artificial Sequence
  Synthetic
cacagccagugccagaacuaa

SEQ ID NO: 78663 - DNA, 25 bp, Artificial Sequence
  Synthetic
tggtcccgggautatttccagaaua

SEQ ID NO: 78664 - DNA, 26 bp, Artificial Sequence
  Synthetic
aggtcagtcaguactaaagtagucgt

SEQ ID NO: 78665 - DNA, 27 bp, Artificial Sequence
  Synthetic
cctgagaaauggcagagaaacaaauct

SEQ ID NO: 78666 - DNA, 21 bp, Artificial Sequence
  Synthetic
tgccatcccuaatcccguaca

SEQ ID NO: 78667 - DNA, 20 bp, Artificial Sequence
  Synthetic
tcauccccaacctgcugaag

SEQ ID NO: 78668 - DNA, 24 bp, Artificial Sequence
  Synthetic
gcccaccattutcatagtctgcut

SEQ ID NO: 78669 - DNA, 19 bp, Artificial Sequence
  Synthetic
ggtgcaagggucacagugt

SEQ ID NO: 78670 - DNA, 19 bp, Artificial Sequence
  Synthetic
cctttcaccuggcttugct

SEQ ID NO: 78671 - DNA, 20 bp, Artificial Sequence
  Synthetic
acccuacagagaccccacug

SEQ ID NO: 78672 - DNA, 22 bp, Artificial Sequence
  Synthetic
tgctccaguacttgtggacuga

SEQ ID NO: 78673 - DNA, 28 bp, Artificial Sequence
  Synthetic
ctaatgccaggaucactaagtttgauga

SEQ ID NO: 78674 - DNA, 28 bp, Artificial Sequence
  Synthetic
ctgtgacctatuaaaaactgccctguat

SEQ ID NO: 78675 - DNA, 28 bp, Artificial Sequence
  Synthetic
actgttgcttgugatttcatttgtuaca

SEQ ID NO: 78676 - DNA, 26 bp, Artificial Sequence
  Synthetic
cagctgaagauagaaggagtugaaca

SEQ ID NO: 78677 - DNA, 28 bp, Artificial Sequence
  Synthetic
ttctatcagucaagaagucaaccacaag

SEQ ID NO: 78678 - DNA, 24 bp, Artificial Sequence
  Synthetic
acaggaagacaggaaaucctccut

SEQ ID NO: 78679 - DNA, 28 bp, Artificial Sequence
  Synthetic
actgcccaaguaaagcttagtaacatua

SEQ ID NO: 78680 - DNA, 27 bp, Artificial Sequence
  Synthetic
gtaggatacttguggttgacttctuga

SEQ ID NO: 78681 - DNA, 28 bp, Artificial Sequence
  Synthetic
actgaagacagacuattctcuggagaaa

SEQ ID NO: 78682 - DNA, 25 bp, Artificial Sequence
  Synthetic
ctagatcactggugtggaatagcut

SEQ ID NO: 78683 - DNA, 28 bp, Artificial Sequence
  Synthetic
cagtacctcttgcutggagagttaaaut

SEQ ID NO: 78684 - DNA, 21 bp, Artificial Sequence
  Synthetic
cucactgtuggcaaaggcaaa

SEQ ID NO: 78685 - DNA, 21 bp, Artificial Sequence
  Synthetic
aaatuggacacagccctccuc

SEQ ID NO: 78686 - DNA, 28 bp, Artificial Sequence
  Synthetic
attgtgaaatacutactcctgacauggg

SEQ ID NO: 78687 - DNA, 26 bp, Artificial Sequence
  Synthetic
ccatgtggcutttctttttcgttuct

SEQ ID NO: 78688 - DNA, 22 bp, Artificial Sequence
  Synthetic
tggcagugtactgaaugcaaga

SEQ ID NO: 78689 - DNA, 29 bp, Artificial Sequence
  Synthetic
ggacatcatttccutcattttcctttuca

SEQ ID NO: 78690 - DNA, 23 bp, Artificial Sequence
  Synthetic
tggaacctccucacccattuact

SEQ ID NO: 78691 - DNA, 19 bp, Artificial Sequence
  Synthetic
tcacgaaacucgcuggcat

SEQ ID NO: 78692 - DNA, 28 bp, Artificial Sequence
  Synthetic
ggatgcatguagaaaactactcttcugt

SEQ ID NO: 78693 - DNA, 22 bp, Artificial Sequence
  Synthetic
ctccccacuaaagcagtgctua

SEQ ID NO: 78694 - DNA, 21 bp, Artificial Sequence
  Synthetic
tcgaaaacgccaaguctucct

SEQ ID NO: 78695 - DNA, 20 bp, Artificial Sequence
  Synthetic
ggaagugaccaaagcaggug

SEQ ID NO: 78696 - DNA, 23 bp, Artificial Sequence
  Synthetic
tctcccacutcttcctatuccca

SEQ ID NO: 78697 - DNA, 20 bp, Artificial Sequence
  Synthetic
augccctccuagaccagact

SEQ ID NO: 78698 - DNA, 19 bp, Artificial Sequence
  Synthetic
cccgttgcuggactggaut

SEQ ID NO: 78699 - DNA, 24 bp, Artificial Sequence
  Synthetic
caguaaccccaagatccugaaaca

SEQ ID NO: 78700 - DNA, 28 bp, Artificial Sequence
  Synthetic
ctgctctcacautttcagtagtttugac

SEQ ID NO: 78701 - DNA, 23 bp, Artificial Sequence
  Synthetic
gaaatcuctgcactuacccccat

SEQ ID NO: 78702 - DNA, 24 bp, Artificial Sequence
  Synthetic
cacgtctgauatcactgccauacc

SEQ ID NO: 78703 - DNA, 24 bp, Artificial Sequence
  Synthetic
ctgtgagccaaauccaagaatucc

SEQ ID NO: 78704 - DNA, 22 bp, Artificial Sequence
  Synthetic
gaagccuccagaacuggaagag

SEQ ID NO: 78705 - DNA, 21 bp, Artificial Sequence
  Synthetic
ctagctcguccctcacaccua

SEQ ID NO: 78706 - DNA, 20 bp, Artificial Sequence
  Synthetic
ccaggtucagggtcatgcuc

SEQ ID NO: 78707 - DNA, 21 bp, Artificial Sequence
  Synthetic
acgtgaagugacggactgtuc

SEQ ID NO: 78708 - DNA, 21 bp, Artificial Sequence
  Synthetic
gaggutauagcaagggcccat

SEQ ID NO: 78709 - DNA, 23 bp, Artificial Sequence
  Synthetic
ccttccagccaguctccatauag

SEQ ID NO: 78710 - DNA, 24 bp, Artificial Sequence
  Synthetic
gcatcaggcagguactttgatcut

SEQ ID NO: 78711 - DNA, 21 bp, Artificial Sequence
  Synthetic
gggtaucagggacctcucaga

SEQ ID NO: 78712 - DNA, 26 bp, Artificial Sequence
  Synthetic
gtgagagtcacuttatcagctcugaa

SEQ ID NO: 78713 - DNA, 28 bp, Artificial Sequence
  Synthetic
tcctttgcctauactttgcagtguaaat

SEQ ID NO: 78714 - DNA, 24 bp, Artificial Sequence
  Synthetic
gtcataggagguatgcaacaggut

SEQ ID NO: 78715 - DNA, 24 bp, Artificial Sequence
  Synthetic
cagtcccctutccctctatacuga

SEQ ID NO: 78716 - DNA, 26 bp, Artificial Sequence
  Synthetic
tcttgttcctacutcgttctccauct

SEQ ID NO: 78717 - DNA, 23 bp, Artificial Sequence
  Synthetic
gcagttgaccguagtctccuact

SEQ ID NO: 78718 - DNA, 20 bp, Artificial Sequence
  Synthetic
ggtaatuccccggugggaaa

SEQ ID NO: 78719 - DNA, 21 bp, Artificial Sequence
  Synthetic
cccgagaggutcgttguagag

SEQ ID NO: 78720 - DNA, 21 bp, Artificial Sequence
  Synthetic
cccaagcaggccaaucauagg

SEQ ID NO: 78721 - DNA, 22 bp, Artificial Sequence
  Synthetic
ctacctcgaguctgatgagcug

SEQ ID NO: 78722 - DNA, 28 bp, Artificial Sequence
  Synthetic
caaagattuttaaaggcguacgaagaga

SEQ ID NO: 78723 - DNA, 28 bp, Artificial Sequence
  Synthetic
cataugagagcacatcttuaaacagcat

SEQ ID NO: 78724 - DNA, 24 bp, Artificial Sequence
  Synthetic
actttttgauccctgcaacucagt

SEQ ID NO: 78725 - DNA, 27 bp, Artificial Sequence
  Synthetic
tttctcacauaagctacatggctucaa

SEQ ID NO: 78726 - DNA, 27 bp, Artificial Sequence
  Synthetic
gggtaccuaggaaaggatcataatuca

SEQ ID NO: 78727 - DNA, 22 bp, Artificial Sequence
  Synthetic
ggctcataacuctctcctucgg

SEQ ID NO: 78728 - DNA, 21 bp, Artificial Sequence
  Synthetic
gggtctcucggacttgaguct

SEQ ID NO: 78729 - DNA, 23 bp, Artificial Sequence
  Synthetic
gcctatacucgagaggcttaugg

SEQ ID NO: 78730 - DNA, 22 bp, Artificial Sequence
  Synthetic
cttggaagguctccucaaagca

SEQ ID NO: 78731 - DNA, 20 bp, Artificial Sequence
  Synthetic
ttagcagtauccgccgucac

SEQ ID NO: 78732 - DNA, 24 bp, Artificial Sequence
  Synthetic
cgtcctccucatctgaatctucct

SEQ ID NO: 78733 - DNA, 21 bp, Artificial Sequence
  Synthetic
cuatggcccucaacaggagaa

SEQ ID NO: 78734 - DNA, 18 bp, Artificial Sequence
  Synthetic
cctggcauaggctuccct

SEQ ID NO: 78735 - DNA, 21 bp, Artificial Sequence
  Synthetic
acggcuagtgaccauccagaa

SEQ ID NO: 78736 - DNA, 20 bp, Artificial Sequence
  Synthetic
cccagugaccttgctctucc

SEQ ID NO: 78737 - DNA, 24 bp, Artificial Sequence
  Synthetic
agacaggcuccagatguaagacat

SEQ ID NO: 78738 - DNA, 21 bp, Artificial Sequence
  Synthetic
ccccuccaaagaaacuaggca

SEQ ID NO: 78739 - DNA, 22 bp, Artificial Sequence
  Synthetic
gggaguacccgugaacaaacag

SEQ ID NO: 78740 - DNA, 21 bp, Artificial Sequence
  Synthetic
catcatcuggcaaggccauct

SEQ ID NO: 78741 - DNA, 25 bp, Artificial Sequence
  Synthetic
gctttgattcautgacaggttgugg

SEQ ID NO: 78742 - DNA, 23 bp, Artificial Sequence
  Synthetic
aaacttcucagccacagcttuct

SEQ ID NO: 78743 - DNA, 21 bp, Artificial Sequence
  Synthetic
catggcccugaagatgttguc

SEQ ID NO: 78744 - DNA, 24 bp, Artificial Sequence
  Synthetic
ggcttctttgcutacttggtguct

SEQ ID NO: 78745 - DNA, 22 bp, Artificial Sequence
  Synthetic
cacgaaggaguggttaugcaac

SEQ ID NO: 78746 - DNA, 26 bp, Artificial Sequence
  Synthetic
ccatgtcctgutctgctattatguca

SEQ ID NO: 78747 - DNA, 20 bp, Artificial Sequence
  Synthetic
ccuagaggagccccauagcc

SEQ ID NO: 78748 - DNA, 23 bp, Artificial Sequence
  Synthetic
ccttgttctuggctccttttuct

SEQ ID NO: 78749 - DNA, 21 bp, Artificial Sequence
  Synthetic
gctggacguacctcagttguc

SEQ ID NO: 78750 - DNA, 23 bp, Artificial Sequence
  Synthetic
acatggaggautgccagaatcuc

SEQ ID NO: 78751 - DNA, 25 bp, Artificial Sequence
  Synthetic
accagctgaauctctttctugcaaa

SEQ ID NO: 78752 - DNA, 22 bp, Artificial Sequence
  Synthetic
tgcagaacggaacucagcaaut

SEQ ID NO: 78753 - DNA, 24 bp, Artificial Sequence
  Synthetic
tccgggaagaguggaacaatttut

SEQ ID NO: 78754 - DNA, 28 bp, Artificial Sequence
  Synthetic
tctttggagcaautcatactttcagugt

SEQ ID NO: 78755 - DNA, 28 bp, Artificial Sequence
  Synthetic
ttctgattttgugaaacaccatttggut

SEQ ID NO: 78756 - DNA, 26 bp, Artificial Sequence
  Synthetic
cagaggccuactcataugaaccaaat

SEQ ID NO: 78757 - DNA, 32 bp, Artificial Sequence
  Synthetic
tgtcacatgaatguaaatcaagaaaacagaug

SEQ ID NO: 78758 - DNA, 21 bp, Artificial Sequence
  Synthetic
ggagaagccagutcctucact

SEQ ID NO: 78759 - DNA, 24 bp, Artificial Sequence
  Synthetic
gtggcaagaaggguatctgtacuc

SEQ ID NO: 78760 - DNA, 27 bp, Artificial Sequence
  Synthetic
tccctucattttataacauggccagag

SEQ ID NO: 78761 - DNA, 24 bp, Artificial Sequence
  Synthetic
aaacccatuttccttccuggacat

SEQ ID NO: 78762 - DNA, 22 bp, Artificial Sequence
  Synthetic
gutttgcagttcuccgggagat

SEQ ID NO: 78763 - DNA, 26 bp, Artificial Sequence
  Synthetic
cttgttcacacacucagctgattuac

SEQ ID NO: 78764 - DNA, 24 bp, Artificial Sequence
  Synthetic
ctactaccttcucccctgtttcug

SEQ ID NO: 78765 - DNA, 22 bp, Artificial Sequence
  Synthetic
agaaccttcuccaccagcuact

SEQ ID NO: 78766 - DNA, 27 bp, Artificial Sequence
  Synthetic
caactcaagcugcgaaaacataauaga

SEQ ID NO: 78767 - DNA, 25 bp, Artificial Sequence
  Synthetic
ttgttccugaaaatgauaggcccaa

SEQ ID NO: 78768 - DNA, 28 bp, Artificial Sequence
  Synthetic
acaatgtgagtgauttcagggaaguaag

SEQ ID NO: 78769 - DNA, 28 bp, Artificial Sequence
  Synthetic
gcaacttaacccugtcccttttatguat

SEQ ID NO: 78770 - DNA, 18 bp, Artificial Sequence
  Synthetic
gccatgggutgggccuat

SEQ ID NO: 78771 - DNA, 29 bp, Artificial Sequence
  Synthetic
ggagaaaagccuttttattgctactuaaa

SEQ ID NO: 78772 - DNA, 21 bp, Artificial Sequence
  Synthetic
ctctccugcactccttuagca

SEQ ID NO: 78773 - DNA, 22 bp, Artificial Sequence
  Synthetic
ggtccaaacgucatgggacaut

SEQ ID NO: 78774 - DNA, 27 bp, Artificial Sequence
  Synthetic
tttctggatcttuacaggccatttuct

SEQ ID NO: 78775 - DNA, 17 bp, Artificial Sequence
  Synthetic
gctcagccccucaggug

SEQ ID NO: 78776 - DNA, 19 bp, Artificial Sequence
  Synthetic
cacccggaaaucccguacc

SEQ ID NO: 78777 - DNA, 28 bp, Artificial Sequence
  Synthetic
ggccacattagcaautagctcttctaut

SEQ ID NO: 78778 - DNA, 22 bp, Artificial Sequence
  Synthetic
cctccttcaacucctggtcuct

SEQ ID NO: 78779 - DNA, 28 bp, Artificial Sequence
  Synthetic
gctcgtattguaagcattttcctttcug

SEQ ID NO: 78780 - DNA, 22 bp, Artificial Sequence
  Synthetic
caccugagcaggtgataauggt

SEQ ID NO: 78781 - DNA, 26 bp, Artificial Sequence
  Synthetic
acactttgcaatutgttccattcgua

SEQ ID NO: 78782 - DNA, 24 bp, Artificial Sequence
  Synthetic
cagtataaautggcaguggaacgg

SEQ ID NO: 78783 - DNA, 27 bp, Artificial Sequence
  Synthetic
agagggacuacagcagtttuagaaaag

SEQ ID NO: 78784 - DNA, 25 bp, Artificial Sequence
  Synthetic
tgctggtauctacaactcuggagaa

SEQ ID NO: 78785 - DNA, 21 bp, Artificial Sequence
  Synthetic
ctgaggccaauaccccaauct

SEQ ID NO: 78786 - DNA, 28 bp, Artificial Sequence
  Synthetic
acattttgaaaccugagaagaaggaugt

SEQ ID NO: 78787 - DNA, 28 bp, Artificial Sequence
  Synthetic
tgagttaaccugcaactgattttgttut

SEQ ID NO: 78788 - DNA, 24 bp, Artificial Sequence
  Synthetic
ttgtctttccucatccttugcagt

SEQ ID NO: 78789 - DNA, 28 bp, Artificial Sequence
  Synthetic
cgcccagaacuccattaaattatctgua

SEQ ID NO: 78790 - DNA, 28 bp, Artificial Sequence
  Synthetic
gatggtactcaagutatcactccacaut

SEQ ID NO: 78791 - DNA, 23 bp, Artificial Sequence
  Synthetic
catccactucacaggtagucgag

SEQ ID NO: 78792 - DNA, 27 bp, Artificial Sequence
  Synthetic
ttgactctgtugtgcttctatuacagg

SEQ ID NO: 78793 - DNA, 25 bp, Artificial Sequence
  Synthetic
tgaagttgtcuttggcaaggaucat

SEQ ID NO: 78794 - DNA, 28 bp, Artificial Sequence
  Synthetic
cttactggctuctgttgttaaatgtugt

SEQ ID NO: 78795 - DNA, 26 bp, Artificial Sequence
  Synthetic
cttgttgctcuggacaagttaaaucc

SEQ ID NO: 78796 - DNA, 20 bp, Artificial Sequence
  Synthetic
cutccuccagaaaggcccat

SEQ ID NO: 78797 - DNA, 22 bp, Artificial Sequence
  Synthetic
gccagugtatcaagugcaagac

SEQ ID NO: 78798 - DNA, 28 bp, Artificial Sequence
  Synthetic
cagaaagtttcaguagaacaacgaaucc

SEQ ID NO: 78799 - DNA, 26 bp, Artificial Sequence
  Synthetic
tttgttttccaauagcggaatgucac

SEQ ID NO: 78800 - DNA, 22 bp, Artificial Sequence
  Synthetic
ctgctgtcguacagtcttucca

SEQ ID NO: 78801 - DNA, 21 bp, Artificial Sequence
  Synthetic
ggaggctcucctcatctguca

SEQ ID NO: 78802 - DNA, 21 bp, Artificial Sequence
  Synthetic
ctcaccccucaggacagttut

SEQ ID NO: 78803 - DNA, 25 bp, Artificial Sequence
  Synthetic
gttgaggagtutggtgctacatuac

SEQ ID NO: 78804 - DNA, 20 bp, Artificial Sequence
  Synthetic
gggcugacaggaaacacgua

SEQ ID NO: 78805 - DNA, 28 bp, Artificial Sequence
  Synthetic
ggattttgctaccuggttctggttauat

SEQ ID NO: 78806 - DNA, 21 bp, Artificial Sequence
  Synthetic
agatgtctucccttcggguga

SEQ ID NO: 78807 - DNA, 23 bp, Artificial Sequence
  Synthetic
gcctccgcuccaagagtgataua

SEQ ID NO: 78808 - DNA, 22 bp, Artificial Sequence
  Synthetic
gatttccugaggttcacgucca

SEQ ID NO: 78809 - DNA, 26 bp, Artificial Sequence
  Synthetic
tgcatggctcutagatttgagtgaut

SEQ ID NO: 78810 - DNA, 22 bp, Artificial Sequence
  Synthetic
aacatgtucccagcugagagac

SEQ ID NO: 78811 - DNA, 25 bp, Artificial Sequence
  Synthetic
gggtctttaggucttttgtgagaut

SEQ ID NO: 78812 - DNA, 20 bp, Artificial Sequence
  Synthetic
gctgtgtugactgaccccua

SEQ ID NO: 78813 - DNA, 23 bp, Artificial Sequence
  Synthetic
gtagatgggcuggcttacugaag

SEQ ID NO: 78814 - DNA, 22 bp, Artificial Sequence
  Synthetic
gcaacccaguccaacttggaua

SEQ ID NO: 78815 - DNA, 21 bp, Artificial Sequence
  Synthetic
gcuaacgcagcagtugcaaac

SEQ ID NO: 78816 - DNA, 21 bp, Artificial Sequence
  Synthetic
gctgtccctugggactgtcua

SEQ ID NO: 78817 - DNA, 21 bp, Artificial Sequence
  Synthetic
caugcgggagaatucagacac

SEQ ID NO: 78818 - DNA, 23 bp, Artificial Sequence
  Synthetic
acccaaaccuccagagaagagua

SEQ ID NO: 78819 - DNA, 24 bp, Artificial Sequence
  Synthetic
gttgtttatggccugggatttgut

SEQ ID NO: 78820 - DNA, 29 bp, Artificial Sequence
  Synthetic
gaaggaagacagutcaaagagaatuagga

SEQ ID NO: 78821 - DNA, 25 bp, Artificial Sequence
  Synthetic
cttcctcttccagutcttcaggtut

SEQ ID NO: 78822 - DNA, 24 bp, Artificial Sequence
  Synthetic
ttgcaacaaugaaacgtgatguga

SEQ ID NO: 78823 - DNA, 21 bp, Artificial Sequence
  Synthetic
acccccaauttccuccacaag

SEQ ID NO: 78824 - DNA, 20 bp, Artificial Sequence
  Synthetic
ggccaagatuccgggagtug

SEQ ID NO: 78825 - DNA, 24 bp, Artificial Sequence
  Synthetic
ggcatactggacucatctctccut

SEQ ID NO: 78826 - DNA, 28 bp, Artificial Sequence
  Synthetic
gaagttgaccutaactcaaatgguagga

SEQ ID NO: 78827 - DNA, 28 bp, Artificial Sequence
  Synthetic
cagcatccgaugacaaatttacaucaaa

SEQ ID NO: 78828 - DNA, 22 bp, Artificial Sequence
  Synthetic
cccgacgguctctctucaaaat

SEQ ID NO: 78829 - DNA, 23 bp, Artificial Sequence
  Synthetic
gcuggaggaaaaagugaaaacct

SEQ ID NO: 78830 - DNA, 21 bp, Artificial Sequence
  Synthetic
gctccgagutctgagcttuca

SEQ ID NO: 78831 - DNA, 19 bp, Artificial Sequence
  Synthetic
agucccaggagcggaucaa

SEQ ID NO: 78832 - DNA, 21 bp, Artificial Sequence
  Synthetic
cgaaggacaaggutgccctut

SEQ ID NO: 78833 - DNA, 25 bp, Artificial Sequence
  Synthetic
ccaacagugaaaccactttgaaguc

SEQ ID NO: 78834 - DNA, 25 bp, Artificial Sequence
  Synthetic
cccggaagaaautaagcaugaagaa

SEQ ID NO: 78835 - DNA, 23 bp, Artificial Sequence
  Synthetic
cgtatcttggcuccacttcaugt

SEQ ID NO: 78836 - DNA, 18 bp, Artificial Sequence
  Synthetic
ccuccugcgagggacaag

SEQ ID NO: 78837 - DNA, 22 bp, Artificial Sequence
  Synthetic
tggucactgtuaccaggacaga

SEQ ID NO: 78838 - DNA, 23 bp, Artificial Sequence
  Synthetic
aaagctccttuggtggatgtgua

SEQ ID NO: 78839 - DNA, 26 bp, Artificial Sequence
  Synthetic
aaggaguaaaaactcauccacagcat

SEQ ID NO: 78840 - DNA, 22 bp, Artificial Sequence
  Synthetic
agatgcgtaaugctgtggauga

SEQ ID NO: 78841 - DNA, 28 bp, Artificial Sequence
  Synthetic
actcttccatucaacaacatgttuacct

SEQ ID NO: 78842 - DNA, 33 bp, Artificial Sequence
  Synthetic
atcctagagtaggauataggttttatcugaaaa

SEQ ID NO: 78843 - DNA, 25 bp, Artificial Sequence
  Synthetic
ggcagaccutggtttccauaaagat

SEQ ID NO: 78844 - DNA, 23 bp, Artificial Sequence
  Synthetic
ctgcacccacuaaaatctggtug

SEQ ID NO: 78845 - DNA, 20 bp, Artificial Sequence
  Synthetic
cttcggtacuccccctccut

SEQ ID NO: 78846 - DNA, 22 bp, Artificial Sequence
  Synthetic
cctgtcucgggaaacttgatug

SEQ ID NO: 78847 - DNA, 26 bp, Artificial Sequence
  Synthetic
agaaatctgcaguaagaggcacatut

SEQ ID NO: 78848 - DNA, 25 bp, Artificial Sequence
  Synthetic
gtgtttgaccagauagtggttcuga

SEQ ID NO: 78849 - DNA, 28 bp, Artificial Sequence
  Synthetic
gcatcagtttcugtgctggatttaaaut

SEQ ID NO: 78850 - DNA, 19 bp, Artificial Sequence
  Synthetic
ggttccucatgcgctucct

SEQ ID NO: 78851 - DNA, 17 bp, Artificial Sequence
  Synthetic
accugccccagcagaug

SEQ ID NO: 78852 - DNA, 17 bp, Artificial Sequence
  Synthetic
gcugggcagcgtgtuct

SEQ ID NO: 78853 - DNA, 17 bp, Artificial Sequence
  Synthetic
gagcuggagcgccugat

SEQ ID NO: 78854 - DNA, 27 bp, Artificial Sequence
  Synthetic
atgaggttgacuctttttgtgatgcua

SEQ ID NO: 78855 - DNA, 27 bp, Artificial Sequence
  Synthetic
ctctgggaaugcagattctacagtuaa

SEQ ID NO: 78856 - DNA, 28 bp, Artificial Sequence
  Synthetic
gaggttctctugttccatagttucagaa

SEQ ID NO: 78857 - DNA, 28 bp, Artificial Sequence
  Synthetic
tttgatggctuacctctttaacagugaa

SEQ ID NO: 78858 - DNA, 26 bp, Artificial Sequence
  Synthetic
tcttcttctagcauttggaacagcuc

SEQ ID NO: 78859 - DNA, 28 bp, Artificial Sequence
  Synthetic
agggaaaaataugctatacacactuggt

SEQ ID NO: 78860 - DNA, 27 bp, Artificial Sequence
  Synthetic
ggaaagtcaguttgtcttaaugcaaca

SEQ ID NO: 78861 - DNA, 33 bp, Artificial Sequence
  Synthetic
tctgtcaaataccaguagaaagtaaaaaugaac

SEQ ID NO: 78862 - DNA, 29 bp, Artificial Sequence
  Synthetic
acccactuagagtcaaatuacaaaccaat

SEQ ID NO: 78863 - DNA, 26 bp, Artificial Sequence
  Synthetic
cttcgggaagccutaaggaatatcut

SEQ ID NO: 78864 - DNA, 21 bp, Artificial Sequence
  Synthetic
cgagggcacutacuccacaaa

SEQ ID NO: 78865 - DNA, 22 bp, Artificial Sequence
  Synthetic
gaucagaaaaacuggcccgaga

SEQ ID NO: 78866 - DNA, 21 bp, Artificial Sequence
  Synthetic
gagaaacuggccuggaggaag

SEQ ID NO: 78867 - DNA, 27 bp, Artificial Sequence
  Synthetic
tgtacaccaugaaccccaacaaattua

SEQ ID NO: 78868 - DNA, 27 bp, Artificial Sequence
  Synthetic
cactgtcctgtuttgatatcccagaut

SEQ ID NO: 78869 - DNA, 25 bp, Artificial Sequence
  Synthetic
cttgatacaucaatccgtgttuggg

SEQ ID NO: 78870 - DNA, 27 bp, Artificial Sequence
  Synthetic
agagaatcttaccugctcttgtacuga

SEQ ID NO: 78871 - DNA, 28 bp, Artificial Sequence
  Synthetic
cagtttatccccauactcctacttcaut

SEQ ID NO: 78872 - DNA, 22 bp, Artificial Sequence
  Synthetic
gctccacaguggttccacauat

SEQ ID NO: 78873 - DNA, 23 bp, Artificial Sequence
  Synthetic
ctaatgagccccaucccttucag

SEQ ID NO: 78874 - DNA, 22 bp, Artificial Sequence
  Synthetic
ggttctaccacucctgcctcua

SEQ ID NO: 78875 - DNA, 22 bp, Artificial Sequence
  Synthetic
gatgcagggagutgggttttuc

SEQ ID NO: 78876 - DNA, 28 bp, Artificial Sequence
  Synthetic
acagctgttgaautaatatccttcacut

SEQ ID NO: 78877 - DNA, 22 bp, Artificial Sequence
  Synthetic
tcagcactaaugatgcctcgut

SEQ ID NO: 78878 - DNA, 26 bp, Artificial Sequence
  Synthetic
gaaccttacctguagattcagtggug

SEQ ID NO: 78879 - DNA, 27 bp, Artificial Sequence
  Synthetic
acagcatggaaacaagautgtgtctua

SEQ ID NO: 78880 - DNA, 29 bp, Artificial Sequence
  Synthetic
gctgctgttugaggtttattttgttctua

SEQ ID NO: 78881 - DNA, 21 bp, Artificial Sequence
  Synthetic
ctctcccauggttccctcaut

SEQ ID NO: 78882 - DNA, 23 bp, Artificial Sequence
  Synthetic
aatgcaatuccctgtcuccacat

SEQ ID NO: 78883 - DNA, 28 bp, Artificial Sequence
  Synthetic
ccctttcctacuaggattaaggtcagua

SEQ ID NO: 78884 - DNA, 20 bp, Artificial Sequence
  Synthetic
tcaatgtuccggcacttcug

SEQ ID NO: 78885 - DNA, 27 bp, Artificial Sequence
  Synthetic
cccaaggucaaggagattattgaugag

SEQ ID NO: 78886 - DNA, 23 bp, Artificial Sequence
  Synthetic
ttgagtucgcagctcttuaagga

SEQ ID NO: 78887 - DNA, 28 bp, Artificial Sequence
  Synthetic
ttttaatttgcctuctcttctgtccuga

SEQ ID NO: 78888 - DNA, 27 bp, Artificial Sequence
  Synthetic
tcttttcacauttcaggtcaucaggaa

SEQ ID NO: 78889 - DNA, 28 bp, Artificial Sequence
  Synthetic
ttggaaacctacutttcacagaagucat

SEQ ID NO: 78890 - DNA, 23 bp, Artificial Sequence
  Synthetic
gagaagggaaacugctcttucca

SEQ ID NO: 78891 - DNA, 26 bp, Artificial Sequence
  Synthetic
accccaaccacuaaacaaatcctuac

SEQ ID NO: 78892 - DNA, 23 bp, Artificial Sequence
  Synthetic
cttgatcagaaacuggcaagcuc

SEQ ID NO: 78893 - DNA, 28 bp, Artificial Sequence
  Synthetic
aaacttgtaaaaugacccctggttctua

SEQ ID NO: 78894 - DNA, 20 bp, Artificial Sequence
  Synthetic
gcaggccaacuacctctugt

SEQ ID NO: 78895 - DNA, 23 bp, Artificial Sequence
  Synthetic
ctccuccagaagagaagaauccc

SEQ ID NO: 78896 - DNA, 25 bp, Artificial Sequence
  Synthetic
gtttgttgttccugaaggttacugg

SEQ ID NO: 78897 - DNA, 24 bp, Artificial Sequence
  Synthetic
ttcttcgcugaatggtaagugaat

SEQ ID NO: 78898 - DNA, 24 bp, Artificial Sequence
  Synthetic
ggagtagtaaaugatgcctggugt

SEQ ID NO: 78899 - DNA, 22 bp, Artificial Sequence
  Synthetic
gaautactcagcugcggaggat

SEQ ID NO: 78900 - DNA, 27 bp, Artificial Sequence
  Synthetic
ggttgttattgtutttggattgccuca

SEQ ID NO: 78901 - DNA, 21 bp, Artificial Sequence
  Synthetic
gtgggcaugtcaucaggaaac

SEQ ID NO: 78902 - DNA, 26 bp, Artificial Sequence
  Synthetic
cacatgtccgugtacacttctttgua

SEQ ID NO: 78903 - DNA, 21 bp, Artificial Sequence
  Synthetic
gaggugggaacaagtuggaga

SEQ ID NO: 78904 - DNA, 23 bp, Artificial Sequence
  Synthetic
ggcctttctucctggaacatuct

SEQ ID NO: 78905 - DNA, 28 bp, Artificial Sequence
  Synthetic
cagccagaaaugttttgguaacagaaaa

SEQ ID NO: 78906 - DNA, 21 bp, Artificial Sequence
  Synthetic
ccccaucaggagggtcttuca

SEQ ID NO: 78907 - DNA, 23 bp, Artificial Sequence
  Synthetic
ggacaccccuttgtgactcauac

SEQ ID NO: 78908 - DNA, 28 bp, Artificial Sequence
  Synthetic
aaaaugactctcuaaaaggagaccaacc

SEQ ID NO: 78909 - DNA, 21 bp, Artificial Sequence
  Synthetic
ggcccatucatcaagcucagt

SEQ ID NO: 78910 - DNA, 25 bp, Artificial Sequence
  Synthetic
aggtcagttccugtttttacgtugt

SEQ ID NO: 78911 - DNA, 21 bp, Artificial Sequence
  Synthetic
cgaaggguaaggcgttgucat

SEQ ID NO: 78912 - DNA, 23 bp, Artificial Sequence
  Synthetic
tgaattcggaugcagagcttcut

SEQ ID NO: 78913 - DNA, 26 bp, Artificial Sequence
  Synthetic
ccaaaatctgtgaucttgacatgcug

SEQ ID NO: 78914 - DNA, 22 bp, Artificial Sequence
  Synthetic
ggctctgacucacccttgttut

SEQ ID NO: 78915 - DNA, 25 bp, Artificial Sequence
  Synthetic
tcccccaguaagtcccttcaaatua

SEQ ID NO: 78916 - DNA, 19 bp, Artificial Sequence
  Synthetic
ctuggccgaaaacgagcug

SEQ ID NO: 78917 - DNA, 25 bp, Artificial Sequence
  Synthetic
aatcaaaagtcugttccgacuccaa

SEQ ID NO: 78918 - DNA, 29 bp, Artificial Sequence
  Synthetic
gtccaaagtctgcuattttcatcacatug

SEQ ID NO: 78919 - DNA, 24 bp, Artificial Sequence
  Synthetic
tttgttcuggcggtgtttugaaat

SEQ ID NO: 78920 - DNA, 19 bp, Artificial Sequence
  Synthetic
gacccgcagaugtccauga

SEQ ID NO: 78921 - DNA, 23 bp, Artificial Sequence
  Synthetic
catagcaaauggcaagttcugct

SEQ ID NO: 78922 - DNA, 27 bp, Artificial Sequence
  Synthetic
acgtattttggcuttgaaatggaacug

SEQ ID NO: 78923 - DNA, 22 bp, Artificial Sequence
  Synthetic
ctcuccacccaaacccttguag

SEQ ID NO: 78924 - DNA, 21 bp, Artificial Sequence
  Synthetic
ccuagacagcaccgtaauggg

SEQ ID NO: 78925 - DNA, 22 bp, Artificial Sequence
  Synthetic
aaggagcagcutggctaaacut

SEQ ID NO: 78926 - DNA, 22 bp, Artificial Sequence
  Synthetic
agtggttttgauacgggctuca

SEQ ID NO: 78927 - DNA, 24 bp, Artificial Sequence
  Synthetic
agctgtttccuatatgagggcuct

SEQ ID NO: 78928 - DNA, 26 bp, Artificial Sequence
  Synthetic
tcaacuaacacaagtcgugaaaggag

SEQ ID NO: 78929 - DNA, 27 bp, Artificial Sequence
  Synthetic
cgtgttcgaccautcataaatcaggua

SEQ ID NO: 78930 - DNA, 20 bp, Artificial Sequence
  Synthetic
tgccaggcaacagcuctuac

SEQ ID NO: 78931 - DNA, 29 bp, Artificial Sequence
  Synthetic
agatgacugacagagaagaacaaaugaat

SEQ ID NO: 78932 - DNA, 19 bp, Artificial Sequence
  Synthetic
ccactccucagcctucacc

SEQ ID NO: 78933 - DNA, 17 bp, Artificial Sequence
  Synthetic
tgctugcgcgactucct

SEQ ID NO: 78934 - DNA, 24 bp, Artificial Sequence
  Synthetic
agatcugcgaggaauagagaagga

SEQ ID NO: 78935 - DNA, 21 bp, Artificial Sequence
  Synthetic
tgacagaucctgccttcucca

SEQ ID NO: 78936 - DNA, 22 bp, Artificial Sequence
  Synthetic
cactgggcccaauatgacauca

SEQ ID NO: 78937 - DNA, 19 bp, Artificial Sequence
  Synthetic
gcctaugagccgguccaga

SEQ ID NO: 78938 - DNA, 23 bp, Artificial Sequence
  Synthetic
acaccaaaggcaacugauaaggt

SEQ ID NO: 78939 - DNA, 22 bp, Artificial Sequence
  Synthetic
tccctgguagatggctactucc

SEQ ID NO: 78940 - DNA, 23 bp, Artificial Sequence
  Synthetic
caggaacguactggugaaaacac

SEQ ID NO: 78941 - DNA, 22 bp, Artificial Sequence
  Synthetic
caggaaaatgcuggctgaccua

SEQ ID NO: 78942 - DNA, 19 bp, Artificial Sequence
  Synthetic
gaaugacggcucggaagga

SEQ ID NO: 78943 - DNA, 22 bp, Artificial Sequence
  Synthetic
ggattaccgacugctcctcuca

SEQ ID NO: 78944 - DNA, 19 bp, Artificial Sequence
  Synthetic
cgcgcugccagatttgtuc

SEQ ID NO: 78945 - DNA, 17 bp, Artificial Sequence
  Synthetic
tguagcgggucccccaa

SEQ ID NO: 78946 - DNA, 17 bp, Artificial Sequence
  Synthetic
gagggccaugtcgcugt

SEQ ID NO: 78947 - DNA, 19 bp, Artificial Sequence
  Synthetic
tgatccaggagcucgcuga

SEQ ID NO: 78948 - DNA, 17 bp, Artificial Sequence
  Synthetic
agggccaugtcgctgut

SEQ ID NO: 78949 - DNA, 17 bp, Artificial Sequence
  Synthetic
ggcgccugauccaggag

SEQ ID NO: 78950 - DNA, 28 bp, Artificial Sequence
  Synthetic
agaatccaacatcugaatacaccacaut

SEQ ID NO: 78951 - DNA, 25 bp, Artificial Sequence
  Synthetic
gaacattgugaacgactgccttaug

SEQ ID NO: 78952 - DNA, 21 bp, Artificial Sequence
  Synthetic
cagaucccuggaccaacacaa

SEQ ID NO: 78953 - DNA, 28 bp, Artificial Sequence
  Synthetic
gctactttcugacttgcattatcuccat

SEQ ID NO: 78954 - DNA, 28 bp, Artificial Sequence
  Synthetic
cacaaagutagtttaugggaaggaacct

SEQ ID NO: 78955 - DNA, 28 bp, Artificial Sequence
  Synthetic
accattcatttugaaggctagggtttua

SEQ ID NO: 78956 - DNA, 28 bp, Artificial Sequence
  Synthetic
gagaactgauagaaattggatgugagga

SEQ ID NO: 78957 - DNA, 28 bp, Artificial Sequence
  Synthetic
tggatttcccaugtggttcttttuaact

SEQ ID NO: 78958 - DNA, 22 bp, Artificial Sequence
  Synthetic
accaacccauttctcaccaucc

SEQ ID NO: 78959 - DNA, 27 bp, Artificial Sequence
  Synthetic
ggctggaaaaugatcatctccgatuaa

SEQ ID NO: 78960 - DNA, 27 bp, Artificial Sequence
  Synthetic
gaacacttaccagaauactgagcagut

SEQ ID NO: 78961 - DNA, 28 bp, Artificial Sequence
  Synthetic
gggaatgaugcaacataatatgcttuca

SEQ ID NO: 78962 - DNA, 21 bp, Artificial Sequence
  Synthetic
ggaatucccatttgcuggcat

SEQ ID NO: 78963 - DNA, 28 bp, Artificial Sequence
  Synthetic
gtttatgacuggaaggattgatgcttuc

SEQ ID NO: 78964 - DNA, 28 bp, Artificial Sequence
  Synthetic
tagatctagaaugaatccttaccugcaa

SEQ ID NO: 78965 - DNA, 24 bp, Artificial Sequence
  Synthetic
ggtctaacucagtggcaacuacat

SEQ ID NO: 78966 - DNA, 23 bp, Artificial Sequence
  Synthetic
gtaatgatgggcauctgctguga

SEQ ID NO: 78967 - DNA, 20 bp, Artificial Sequence
  Synthetic
tctcactgugcacctcccua

SEQ ID NO: 78968 - DNA, 27 bp, Artificial Sequence
  Synthetic
tgcagttcaauagtcatgacaaaguct

SEQ ID NO: 78969 - DNA, 21 bp, Artificial Sequence
  Synthetic
agaacagcauccagtgucacc

SEQ ID NO: 78970 - DNA, 27 bp, Artificial Sequence
  Synthetic
ctgtgtgctautggtgtttattugcat

SEQ ID NO: 78971 - DNA, 29 bp, Artificial Sequence
  Synthetic
caataatctgcagugtggatagaguaaca

SEQ ID NO: 78972 - DNA, 24 bp, Artificial Sequence
  Synthetic
accugatgaaaauccccaaacaca

SEQ ID NO: 78973 - DNA, 22 bp, Artificial Sequence
  Synthetic
ctggtcatugtgggtcugacat

SEQ ID NO: 78974 - DNA, 26 bp, Artificial Sequence
  Synthetic
gcctcttatcaucagaaaaccuacca

SEQ ID NO: 78975 - DNA, 29 bp, Artificial Sequence
  Synthetic
ctccggtggttugtaaactatacttguat

SEQ ID NO: 78976 - DNA, 21 bp, Artificial Sequence
  Synthetic
ctcucaaggcccagccatuat

SEQ ID NO: 78977 - DNA, 22 bp, Artificial Sequence
  Synthetic
caugagctattuccaccaccct

SEQ ID NO: 78978 - DNA, 24 bp, Artificial Sequence
  Synthetic
tcctttgccautgttagcatucct

SEQ ID NO: 78979 - DNA, 28 bp, Artificial Sequence
  Synthetic
cataaaacggctucagaatgtaagtgua

SEQ ID NO: 78980 - DNA, 25 bp, Artificial Sequence
  Synthetic
cagctgagtuttccaatgtcaugat

SEQ ID NO: 78981 - DNA, 33 bp, Artificial Sequence
  Synthetic
tcactgtattttaaauaaaagaagagacucaca

SEQ ID NO: 78982 - DNA, 20 bp, Artificial Sequence
  Synthetic
gcaaaaacgcccugctugac

SEQ ID NO: 78983 - DNA, 23 bp, Artificial Sequence
  Synthetic
tgaagacagacauggaacgucac

SEQ ID NO: 78984 - DNA, 21 bp, Artificial Sequence
  Synthetic
ccacgtcagagugtgggatuc

SEQ ID NO: 78985 - DNA, 27 bp, Artificial Sequence
  Synthetic
actgagcttaacutctttcctgcttut

SEQ ID NO: 78986 - DNA, 27 bp, Artificial Sequence
  Synthetic
tgctctuccttctaacauaaacagcaa

SEQ ID NO: 78987 - DNA, 28 bp, Artificial Sequence
  Synthetic
cttcctctgtcutctctctcttcauact

SEQ ID NO: 78988 - DNA, 20 bp, Artificial Sequence
  Synthetic
tgaaggtggaucctgcccua

SEQ ID NO: 78989 - DNA, 24 bp, Artificial Sequence
  Synthetic
gactgtctugaccctcaaatucca

SEQ ID NO: 78990 - DNA, 28 bp, Artificial Sequence
  Synthetic
ctgaagcagtuaaaggtgaagtgtuaaa

SEQ ID NO: 78991 - DNA, 25 bp, Artificial Sequence
  Synthetic
acatcatgagaggaaugcaggaauc

SEQ ID NO: 78992 - DNA, 22 bp, Artificial Sequence
  Synthetic
ggtaccaggucagtactuccca

SEQ ID NO: 78993 - DNA, 23 bp, Artificial Sequence
  Synthetic
ctcttugccctgtaugacgagaa

SEQ ID NO: 78994 - DNA, 24 bp, Artificial Sequence
  Synthetic
agcauaactcattcaucgccacat

SEQ ID NO: 78995 - DNA, 23 bp, Artificial Sequence
  Synthetic
tggcaagauattgtucggaaccc

SEQ ID NO: 78996 - DNA, 28 bp, Artificial Sequence
  Synthetic
gtagtttacttgaauagtgacaggugga

SEQ ID NO: 78997 - DNA, 24 bp, Artificial Sequence
  Synthetic
ggtccagtggguacttgaacaaug

SEQ ID NO: 78998 - DNA, 27 bp, Artificial Sequence
  Synthetic
tccaacttguggtttaaaatguagcct

SEQ ID NO: 78999 - DNA, 28 bp, Artificial Sequence
  Synthetic
caggaggatggcaauggaagatataauc

SEQ ID NO: 79000 - DNA, 22 bp, Artificial Sequence
  Synthetic
aagagucaagtuggaaggccat

SEQ ID NO: 79001 - DNA, 27 bp, Artificial Sequence
  Synthetic
ccttttcaucaacaagcagttugacaa

SEQ ID NO: 79002 - DNA, 28 bp, Artificial Sequence
  Synthetic
catttcattttucaacagcttgctaugg

SEQ ID NO: 79003 - DNA, 24 bp, Artificial Sequence
  Synthetic
acaacaggagugcagttcctaaut

SEQ ID NO: 79004 - DNA, 21 bp, Artificial Sequence
  Synthetic
cactgtgucctcctcgtugat

SEQ ID NO: 79005 - DNA, 27 bp, Artificial Sequence
  Synthetic
gaggatgggttuttctcttccatgtua

SEQ ID NO: 79006 - DNA, 21 bp, Artificial Sequence
  Synthetic
ggagcauaccagagcttggug

SEQ ID NO: 79007 - DNA, 28 bp, Artificial Sequence
  Synthetic
tctttgtggaugagagagttccttauct

SEQ ID NO: 79008 - DNA, 21 bp, Artificial Sequence
  Synthetic
tguccaccaagugagggagat

SEQ ID NO: 79009 - DNA, 20 bp, Artificial Sequence
  Synthetic
gcccctaugtcccaacugac

SEQ ID NO: 79010 - DNA, 27 bp, Artificial Sequence
  Synthetic
autcatttatatguacacagggcagca

SEQ ID NO: 79011 - DNA, 21 bp, Artificial Sequence
  Synthetic
tgucagugaggaggacacagt

SEQ ID NO: 79012 - DNA, 21 bp, Artificial Sequence
  Synthetic
gtgcaguccgtcguagaagaa

SEQ ID NO: 79013 - DNA, 20 bp, Artificial Sequence
  Synthetic
caacgcggcgutaaggauac

SEQ ID NO: 79014 - DNA, 21 bp, Artificial Sequence
  Synthetic
tcauccaagugggacaaaggg

SEQ ID NO: 79015 - DNA, 22 bp, Artificial Sequence
  Synthetic
ccagaccttcuctctccccaua

SEQ ID NO: 79016 - DNA, 27 bp, Artificial Sequence
  Synthetic
ctttcggtgaugaggaaaagaaaaugg

SEQ ID NO: 79017 - DNA, 17 bp, Artificial Sequence
  Synthetic
cgggagagcggcuacug

SEQ ID NO: 79018 - DNA, 24 bp, Artificial Sequence
  Synthetic
ctagataccccuctggaagctcut

SEQ ID NO: 79019 - DNA, 21 bp, Artificial Sequence
  Synthetic
cgatcgcacacauttgtcgug

SEQ ID NO: 79020 - DNA, 28 bp, Artificial Sequence
  Synthetic
aaagtaagcugtacacattugaggagaa

SEQ ID NO: 79021 - DNA, 24 bp, Artificial Sequence
  Synthetic
agauagcttgcttuggacacagac

SEQ ID NO: 79022 - DNA, 21 bp, Artificial Sequence
  Synthetic
cctttgtucagtgtggcuggt

SEQ ID NO: 79023 - DNA, 26 bp, Artificial Sequence
  Synthetic
aaaacatgtaugccagctgtuagaga

SEQ ID NO: 79024 - DNA, 21 bp, Artificial Sequence
  Synthetic
cttcaaagcugtgcctgtugt

SEQ ID NO: 79025 - DNA, 26 bp, Artificial Sequence
  Synthetic
atgagaagaaugaagcgattcacuca

SEQ ID NO: 79026 - DNA, 23 bp, Artificial Sequence
  Synthetic
gtgtatgggcutcagcaagttuc

SEQ ID NO: 79027 - DNA, 22 bp, Artificial Sequence
  Synthetic
ctcacccugaacagcacaatuc

SEQ ID NO: 79028 - DNA, 21 bp, Artificial Sequence
  Synthetic
cccaggcuctgagagatuggt

SEQ ID NO: 79029 - DNA, 21 bp, Artificial Sequence
  Synthetic
ggcccacaccutctttagugt

SEQ ID NO: 79030 - DNA, 20 bp, Artificial Sequence
  Synthetic
gctgctcguctgtctcttug

SEQ ID NO: 79031 - DNA, 19 bp, Artificial Sequence
  Synthetic
accuggagacccugcagaa

SEQ ID NO: 79032 - DNA, 17 bp, Artificial Sequence
  Synthetic
ccaccugagcaccguct

SEQ ID NO: 79033 - DNA, 18 bp, Artificial Sequence
  Synthetic
gccagccccuctgaguga

SEQ ID NO: 79034 - DNA, 25 bp, Artificial Sequence
  Synthetic
tcctggaacuaatcctttccuccat

SEQ ID NO: 79035 - DNA, 25 bp, Artificial Sequence
  Synthetic
gtcctatgctuctgcctacacuaac

SEQ ID NO: 79036 - DNA, 21 bp, Artificial Sequence
  Synthetic
caagccuggaaatgcatgcuc

SEQ ID NO: 79037 - DNA, 25 bp, Artificial Sequence
  Synthetic
gtaactctaucggactctcccauca

SEQ ID NO: 79038 - DNA, 18 bp, Artificial Sequence
  Synthetic
gctcctccucgccctcut

SEQ ID NO: 79039 - DNA, 20 bp, Artificial Sequence
  Synthetic
tcgggauaggagagctcguc

SEQ ID NO: 79040 - DNA, 21 bp, Artificial Sequence
  Synthetic
cctggaaggugaggacacuga

SEQ ID NO: 79041 - DNA, 21 bp, Artificial Sequence
  Synthetic
gcacutcttcugcaaggaggt

SEQ ID NO: 79042 - DNA, 23 bp, Artificial Sequence
  Synthetic
tguttattgttucagcggagggt

SEQ ID NO: 79043 - DNA, 27 bp, Artificial Sequence
  Synthetic
cctgattctttugggcaatcttttguc

SEQ ID NO: 79044 - DNA, 23 bp, Artificial Sequence
  Synthetic
accattctucctctttgcuccag

SEQ ID NO: 79045 - DNA, 23 bp, Artificial Sequence
  Synthetic
caattggcttuaccagggcttut

SEQ ID NO: 79046 - DNA, 18 bp, Artificial Sequence
  Synthetic
ggccacutccuccagcag

SEQ ID NO: 79047 - DNA, 18 bp, Artificial Sequence
  Synthetic
ctgggcuctgacgctugt

SEQ ID NO: 79048 - DNA, 21 bp, Artificial Sequence
  Synthetic
agaacggucaaccaugcagag

SEQ ID NO: 79049 - DNA, 26 bp, Artificial Sequence
  Synthetic
ccattttgctuccgttgtctcttcua

SEQ ID NO: 79050 - DNA, 25 bp, Artificial Sequence
  Synthetic
caacctgauccaacatgaaaagcug

SEQ ID NO: 79051 - DNA, 28 bp, Artificial Sequence
  Synthetic
ctattttcacacugcaacagaaagacut

SEQ ID NO: 79052 - DNA, 23 bp, Artificial Sequence
  Synthetic
gcagatauggcagctgagcaaua

SEQ ID NO: 79053 - DNA, 20 bp, Artificial Sequence
  Synthetic
gtgatcuccagccttguggt

SEQ ID NO: 79054 - DNA, 25 bp, Artificial Sequence
  Synthetic
gtccagagtucacaatccaguagaa

SEQ ID NO: 79055 - DNA, 22 bp, Artificial Sequence
  Synthetic
acaccagugtgtctcttugcag

SEQ ID NO: 79056 - DNA, 22 bp, Artificial Sequence
  Synthetic
ccaaccccauggaaagatguga

SEQ ID NO: 79057 - DNA, 25 bp, Artificial Sequence
  Synthetic
guggaatuggcaaaagaagaagaca

SEQ ID NO: 79058 - DNA, 23 bp, Artificial Sequence
  Synthetic
gtcttcgtttugcaggagaaugg

SEQ ID NO: 79059 - DNA, 21 bp, Artificial Sequence
  Synthetic
cttggctuccatgacaccuga

SEQ ID NO: 79060 - DNA, 21 bp, Artificial Sequence
  Synthetic
cagutctccgcuggaaaaagg

SEQ ID NO: 79061 - DNA, 27 bp, Artificial Sequence
  Synthetic
tctctcaactttugggccattattuct

SEQ ID NO: 79062 - DNA, 25 bp, Artificial Sequence
  Synthetic
ctacaggauccagatctaactuggg

SEQ ID NO: 79063 - DNA, 28 bp, Artificial Sequence
  Synthetic
agaatgaggcaaauctttgtgaacuact

SEQ ID NO: 79064 - DNA, 24 bp, Artificial Sequence
  Synthetic
aatutttggttttaguggcggcat

SEQ ID NO: 79065 - DNA, 28 bp, Artificial Sequence
  Synthetic
gtttgatcgtttuctttggctattcuca

SEQ ID NO: 79066 - DNA, 25 bp, Artificial Sequence
  Synthetic
cttgggauggcagtgttagatauga

SEQ ID NO: 79067 - DNA, 25 bp, Artificial Sequence
  Synthetic
tcaaaaggcauggguaaacacagaa

SEQ ID NO: 79068 - DNA, 21 bp, Artificial Sequence
  Synthetic
gagcacttaucagggtggcua

SEQ ID NO: 79069 - DNA, 27 bp, Artificial Sequence
  Synthetic
gtacaaggagaaauacgagaagtuggt

SEQ ID NO: 79070 - DNA, 18 bp, Artificial Sequence
  Synthetic
cugcagaagcuccagcga

SEQ ID NO: 79071 - DNA, 23 bp, Artificial Sequence
  Synthetic
ggtgggccaucatgagacauaat

SEQ ID NO: 79072 - DNA, 20 bp, Artificial Sequence
  Synthetic
ctcgagccgutttcucggaa

SEQ ID NO: 79073 - DNA, 21 bp, Artificial Sequence
  Synthetic
gucctggagucggagaagaac

SEQ ID NO: 79074 - DNA, 24 bp, Artificial Sequence
  Synthetic
tcttcaggagagaauaccaugggt

SEQ ID NO: 79075 - DNA, 25 bp, Artificial Sequence
  Synthetic
gagaatccagagcacutagaggtut

SEQ ID NO: 79076 - DNA, 20 bp, Artificial Sequence
  Synthetic
tgcttgagguggtcgactug

SEQ ID NO: 79077 - DNA, 20 bp, Artificial Sequence
  Synthetic
gtgauccggcugaagcagaa

SEQ ID NO: 79078 - DNA, 22 bp, Artificial Sequence
  Synthetic
ggaaauctgcaguggaggagat

SEQ ID NO: 79079 - DNA, 28 bp, Artificial Sequence
  Synthetic
atgccacaccaaccutctttttaaaaut

SEQ ID NO: 79080 - DNA, 23 bp, Artificial Sequence
  Synthetic
gatctttctcutggtggccugaa

SEQ ID NO: 79081 - DNA, 26 bp, Artificial Sequence
  Synthetic
gacttttugacactgaaccauggaaa

SEQ ID NO: 79082 - DNA, 18 bp, Artificial Sequence
  Synthetic
ggcauagccgcggtttut

SEQ ID NO: 79083 - DNA, 17 bp, Artificial Sequence
  Synthetic
gccugcactucgacgac

SEQ ID NO: 79084 - DNA, 21 bp, Artificial Sequence
  Synthetic
ccgaccucatccucacaggaa

SEQ ID NO: 79085 - DNA, 28 bp, Artificial Sequence
  Synthetic
tgtctgccaaatuaaagagccaagauat

SEQ ID NO: 79086 - DNA, 27 bp, Artificial Sequence
  Synthetic
ctgaaacttaugggagaaacaggacut

SEQ ID NO: 79087 - DNA, 23 bp, Artificial Sequence
  Synthetic
ccatcaaucacacgtaccaccug

SEQ ID NO: 79088 - DNA, 28 bp, Artificial Sequence
  Synthetic
tgttttcttttagcaaauggaacgtgut

SEQ ID NO: 79089 - DNA, 24 bp, Artificial Sequence
  Synthetic
tcagatttcuagccgaugaggaga

SEQ ID NO: 79090 - DNA, 26 bp, Artificial Sequence
  Synthetic
agguaaaatgatcctugccaaagaca

SEQ ID NO: 79091 - DNA, 27 bp, Artificial Sequence
  Synthetic
gccttccttgaucatcttgtagaacut

SEQ ID NO: 79092 - DNA, 22 bp, Artificial Sequence
  Synthetic
tccccgaacutccaccagaaua

SEQ ID NO: 79093 - DNA, 22 bp, Artificial Sequence
  Synthetic
cttatcugcaagatggcugcct

SEQ ID NO: 79094 - DNA, 22 bp, Artificial Sequence
  Synthetic
tgagagttcutccccagugaca

SEQ ID NO: 79095 - DNA, 23 bp, Artificial Sequence
  Synthetic
cgatggaucagagatggaagcuc

SEQ ID NO: 79096 - DNA, 25 bp, Artificial Sequence
  Synthetic
gagttgtacagutctgtagcctuga

SEQ ID NO: 79097 - DNA, 28 bp, Artificial Sequence
  Synthetic
ggagggcaagaguattaagaacaaagua

SEQ ID NO: 79098 - DNA, 21 bp, Artificial Sequence
  Synthetic
ggcaaacucacccacaacauc

SEQ ID NO: 79099 - DNA, 23 bp, Artificial Sequence
  Synthetic
ccgccttugctttgatctttuca

SEQ ID NO: 79100 - DNA, 22 bp, Artificial Sequence
  Synthetic
tuaaccaagcagagggauggac

SEQ ID NO: 79101 - DNA, 23 bp, Artificial Sequence
  Synthetic
ggtctttuggagtcactcugcat

SEQ ID NO: 79102 - DNA, 24 bp, Artificial Sequence
  Synthetic
tcattttgcagugagtttgccaut

SEQ ID NO: 79103 - DNA, 27 bp, Artificial Sequence
  Synthetic
actgtgtaaattuccaggttggaugat

SEQ ID NO: 79104 - DNA, 23 bp, Artificial Sequence
  Synthetic
ctccctgutctcatgugaaagga

SEQ ID NO: 79105 - DNA, 27 bp, Artificial Sequence
  Synthetic
tctgaggaugatgatgaggaugaagaa

SEQ ID NO: 79106 - DNA, 29 bp, Artificial Sequence
  Synthetic
ccttaaatttagguctactgtcagcauca

SEQ ID NO: 79107 - DNA, 28 bp, Artificial Sequence
  Synthetic
gcttgctttcuttctcagatcatuacga

SEQ ID NO: 79108 - DNA, 27 bp, Artificial Sequence
  Synthetic
agttcutcttattaatguggcacccat

SEQ ID NO: 79109 - DNA, 25 bp, Artificial Sequence
  Synthetic
cagtagtatctuccaagcgctucaa

SEQ ID NO: 79110 - DNA, 23 bp, Artificial Sequence
  Synthetic
caggttcagguctagcttctcug

SEQ ID NO: 79111 - DNA, 20 bp, Artificial Sequence
  Synthetic
ttggccacacucaacctuga

SEQ ID NO: 79112 - DNA, 23 bp, Artificial Sequence
  Synthetic
gggtgactgutggatctgtaugg

SEQ ID NO: 79113 - DNA, 26 bp, Artificial Sequence
  Synthetic
agaccaggtacutactgctaaaguga

SEQ ID NO: 79114 - DNA, 20 bp, Artificial Sequence
  Synthetic
ctggaaugccggtcgatuct

SEQ ID NO: 79115 - DNA, 28 bp, Artificial Sequence
  Synthetic
tcaacatctggguttctgtctcuaaaaa

SEQ ID NO: 79116 - DNA, 23 bp, Artificial Sequence
  Synthetic
gggaaugcttatugaagggacaa

SEQ ID NO: 79117 - DNA, 21 bp, Artificial Sequence
  Synthetic
gccuaagaccttccuggagag

SEQ ID NO: 79118 - DNA, 28 bp, Artificial Sequence
  Synthetic
gaactcatgtcuacctcgtttgauaagt

SEQ ID NO: 79119 - DNA, 23 bp, Artificial Sequence
  Synthetic
gcattcaaaacuccagcagcauc

SEQ ID NO: 79120 - DNA, 24 bp, Artificial Sequence
  Synthetic
tgaatcacaguaagtcagcagcuc

SEQ ID NO: 79121 - DNA, 27 bp, Artificial Sequence
  Synthetic
gaagttttgtgutctgcttccttucaa

SEQ ID NO: 79122 - DNA, 25 bp, Artificial Sequence
  Synthetic
tgtggataugcgtgaattucgaagt

SEQ ID NO: 79123 - DNA, 25 bp, Artificial Sequence
  Synthetic
cggccgttatutaaagagccgatua

SEQ ID NO: 79124 - DNA, 28 bp, Artificial Sequence
  Synthetic
cactagcaacaacuctatatctggauca

SEQ ID NO: 79125 - DNA, 24 bp, Artificial Sequence
  Synthetic
agctgtgagcugaagatttctucc

SEQ ID NO: 79126 - DNA, 27 bp, Artificial Sequence
  Synthetic
tgtctctggcutctctttttctucaat

SEQ ID NO: 79127 - DNA, 27 bp, Artificial Sequence
  Synthetic
caaactgctcgaaaucttacgcaaaua

SEQ ID NO: 79128 - DNA, 24 bp, Artificial Sequence
  Synthetic
aactgctgucgctcatatggttua

SEQ ID NO: 79129 - DNA, 26 bp, Artificial Sequence
  Synthetic
ggagcugcacaggaaatttttatugt

SEQ ID NO: 79130 - DNA, 21 bp, Artificial Sequence
  Synthetic
ctgtgacucagctcctcctug

SEQ ID NO: 79131 - DNA, 26 bp, Artificial Sequence
  Synthetic
ccctaagtgtccuagacctgtgttua

SEQ ID NO: 79132 - DNA, 23 bp, Artificial Sequence
  Synthetic
ggagcgcaagaguatcagtgaut

SEQ ID NO: 79133 - DNA, 21 bp, Artificial Sequence
  Synthetic
gagaaaggcutgctaggguca

SEQ ID NO: 79134 - DNA, 24 bp, Artificial Sequence
  Synthetic
gttcttctcccutcttctgcaugt

SEQ ID NO: 79135 - DNA, 25 bp, Artificial Sequence
  Synthetic
acaatgtgctuctgcccatcaauat

SEQ ID NO: 79136 - DNA, 21 bp, Artificial Sequence
  Synthetic
cuagagggucagagggcaaag

SEQ ID NO: 79137 - DNA, 28 bp, Artificial Sequence
  Synthetic
aacaucactaatacctugaggaaaaggg

SEQ ID NO: 79138 - DNA, 22 bp, Artificial Sequence
  Synthetic
ggaacaactgugtcagcagcua

SEQ ID NO: 79139 - DNA, 33 bp, Artificial Sequence
  Synthetic
acatccautagttataagtucaaaaacaaacca

SEQ ID NO: 79140 - DNA, 18 bp, Artificial Sequence
  Synthetic
cccgggaugggugaagag

SEQ ID NO: 79141 - DNA, 19 bp, Artificial Sequence
  Synthetic
ctgggugagccttctcgug

SEQ ID NO: 79142 - DNA, 20 bp, Artificial Sequence
  Synthetic
ccaccugactgagaaucgct

SEQ ID NO: 79143 - DNA, 23 bp, Artificial Sequence
  Synthetic
gggatatgccauttggacatgua

SEQ ID NO: 79144 - DNA, 28 bp, Artificial Sequence
  Synthetic
gctcttcacauagtgcatgtatttucct

SEQ ID NO: 79145 - DNA, 20 bp, Artificial Sequence
  Synthetic
agactgtcgugccgtatugg

SEQ ID NO: 79146 - DNA, 22 bp, Artificial Sequence
  Synthetic
gtcccgtgcutctgattgagut

SEQ ID NO: 79147 - DNA, 20 bp, Artificial Sequence
  Synthetic
gggcaccagagaauccguag

SEQ ID NO: 79148 - DNA, 28 bp, Artificial Sequence
  Synthetic
aatgacgctcauaatcttctctaaucgg

SEQ ID NO: 79149 - DNA, 28 bp, Artificial Sequence
  Synthetic
ctgctctcttcuctttatagtgctacut

SEQ ID NO: 79150 - DNA, 20 bp, Artificial Sequence
  Synthetic
acaccagggucccagaacua

SEQ ID NO: 79151 - DNA, 26 bp, Artificial Sequence
  Synthetic
gagccattugagaacaactgaaaucc

SEQ ID NO: 79152 - DNA, 21 bp, Artificial Sequence
  Synthetic
gactttcccacuccttcccut

SEQ ID NO: 79153 - DNA, 19 bp, Artificial Sequence
  Synthetic
gggugaccacagcguagag

SEQ ID NO: 79154 - DNA, 27 bp, Artificial Sequence
  Synthetic
taggaatccgcaaaguattctaagcua

SEQ ID NO: 79155 - DNA, 23 bp, Artificial Sequence
  Synthetic
gtcaccatcucaatgtggucaac

SEQ ID NO: 79156 - DNA, 21 bp, Artificial Sequence
  Synthetic
gtggtcucccataccctcuca

SEQ ID NO: 79157 - DNA, 21 bp, Artificial Sequence
  Synthetic
gtcuaagaggcagccauaggg

SEQ ID NO: 79158 - DNA, 24 bp, Artificial Sequence
  Synthetic
ctaactgctatuctcgggtcauca

SEQ ID NO: 79159 - DNA, 20 bp, Artificial Sequence
  Synthetic
gttgctggcaucctcaaugg

SEQ ID NO: 79160 - DNA, 20 bp, Artificial Sequence
  Synthetic
gaggccaaccucaugaagca

SEQ ID NO: 79161 - DNA, 21 bp, Artificial Sequence
  Synthetic
ggagagcaguatcccctggua

SEQ ID NO: 79162 - DNA, 27 bp, Artificial Sequence
  Synthetic
attctgtcttggugaaatctgguagag

SEQ ID NO: 79163 - DNA, 21 bp, Artificial Sequence
  Synthetic
tgggatcaggcutccacttug

SEQ ID NO: 79164 - DNA, 25 bp, Artificial Sequence
  Synthetic
tcttctuacacttcactuccccaga

SEQ ID NO: 79165 - DNA, 21 bp, Artificial Sequence
  Synthetic
tctctgacucgggaagggtut

SEQ ID NO: 79166 - DNA, 23 bp, Artificial Sequence
  Synthetic
ccctguccataccuaaccaccat

SEQ ID NO: 79167 - DNA, 26 bp, Artificial Sequence
  Synthetic
caaatgatcgcuatctagcaacccua

SEQ ID NO: 79168 - DNA, 21 bp, Artificial Sequence
  Synthetic
cagctggugacacagcttaug

SEQ ID NO: 79169 - DNA, 21 bp, Artificial Sequence
  Synthetic
cctagccccutgtggacauag

SEQ ID NO: 79170 - DNA, 22 bp, Artificial Sequence
  Synthetic
gcttgguacaggcaccuagaag

SEQ ID NO: 79171 - DNA, 29 bp, Artificial Sequence
  Synthetic
tgtccatacctaugatttccctctttgua

SEQ ID NO: 79172 - DNA, 28 bp, Artificial Sequence
  Synthetic
ctaccttctgucttcttgtctattucct

SEQ ID NO: 79173 - DNA, 27 bp, Artificial Sequence
  Synthetic
ttccaaagtcagcuatcttgattgugt

SEQ ID NO: 79174 - DNA, 28 bp, Artificial Sequence
  Synthetic
aggagaggaacucacttacgactauaag

SEQ ID NO: 79175 - DNA, 20 bp, Artificial Sequence
  Synthetic
ccttcagcgutgcttuggat

SEQ ID NO: 79176 - DNA, 24 bp, Artificial Sequence
  Synthetic
ttguacaagagctucaggaagaga

SEQ ID NO: 79177 - DNA, 27 bp, Artificial Sequence
  Synthetic
aaagctgtgugaatgcgtcaaauaaat

SEQ ID NO: 79178 - DNA, 28 bp, Artificial Sequence
  Synthetic
ctgatttgccaacaagauttcttacugt

SEQ ID NO: 79179 - DNA, 22 bp, Artificial Sequence
  Synthetic
gacatugcctcctttugaagcc

SEQ ID NO: 79180 - DNA, 21 bp, Artificial Sequence
  Synthetic
acaggtgtcutgctgggttuc

SEQ ID NO: 79181 - DNA, 25 bp, Artificial Sequence
  Synthetic
gacatcaccutttcgcttttuccaa

SEQ ID NO: 79182 - DNA, 18 bp, Artificial Sequence
  Synthetic
tctcaggucgacggcuga

SEQ ID NO: 79183 - DNA, 18 bp, Artificial Sequence
  Synthetic
cgacggguccccactuac

SEQ ID NO: 79184 - DNA, 27 bp, Artificial Sequence
  Synthetic
aaautatctcacttgucaaggcacaga

SEQ ID NO: 79185 - DNA, 25 bp, Artificial Sequence
  Synthetic
actatagatggugtaacccggagug

SEQ ID NO: 79186 - DNA, 22 bp, Artificial Sequence
  Synthetic
cctcttcugggtctccacucaa

SEQ ID NO: 79187 - DNA, 22 bp, Artificial Sequence
  Synthetic
cctagcccugctgtggauaaag

SEQ ID NO: 79188 - DNA, 26 bp, Artificial Sequence
  Synthetic
acgaaactguttagtggguaagaact

SEQ ID NO: 79189 - DNA, 27 bp, Artificial Sequence
  Synthetic
acagggctttaaaaugctgagaactua

SEQ ID NO: 79190 - DNA, 27 bp, Artificial Sequence
  Synthetic
gcaacaaaatugcttcgtcaucaaaat

SEQ ID NO: 79191 - DNA, 27 bp, Artificial Sequence
  Synthetic
tggacaataaaagaaugaggactgcut

SEQ ID NO: 79192 - DNA, 22 bp, Artificial Sequence
  Synthetic
gcacaggugtacaatcctuggt

SEQ ID NO: 79193 - DNA, 27 bp, Artificial Sequence
  Synthetic
gctttggaagtucagtcaactctttut

SEQ ID NO: 79194 - DNA, 22 bp, Artificial Sequence
  Synthetic
gttcagcaauggtcagcagtuc

SEQ ID NO: 79195 - DNA, 21 bp, Artificial Sequence
  Synthetic
ggaugaggugaaacgcacact

SEQ ID NO: 79196 - DNA, 18 bp, Artificial Sequence
  Synthetic
cgcaugacagccaaggug

SEQ ID NO: 79197 - DNA, 19 bp, Artificial Sequence
  Synthetic
cctccaguccagggcuact

SEQ ID NO: 79198 - DNA, 23 bp, Artificial Sequence
  Synthetic
acctcgaaaugcaaggagaugat

SEQ ID NO: 79199 - DNA, 22 bp, Artificial Sequence
  Synthetic
gtaccactcccuctttgctcug

SEQ ID NO: 79200 - DNA, 19 bp, Artificial Sequence
  Synthetic
ccccucuccaacagggact

SEQ ID NO: 79201 - DNA, 19 bp, Artificial Sequence
  Synthetic
gcccagcugaggagttugt

SEQ ID NO: 79202 - DNA, 28 bp, Artificial Sequence
  Synthetic
aatgttgauaacagccactggaaattug

SEQ ID NO: 79203 - DNA, 24 bp, Artificial Sequence
  Synthetic
cctaacctaggacugactgcatug

SEQ ID NO: 79204 - DNA, 21 bp, Artificial Sequence
  Synthetic
catccuccacggagaagaugt

SEQ ID NO: 79205 - DNA, 20 bp, Artificial Sequence
  Synthetic
tgatgcuggcactccugaag

SEQ ID NO: 79206 - DNA, 23 bp, Artificial Sequence
  Synthetic
tcctagaguaagccagggcttut

SEQ ID NO: 79207 - DNA, 28 bp, Artificial Sequence
  Synthetic
ccattgtgcttgaaugcactagaatcua

SEQ ID NO: 79208 - DNA, 25 bp, Artificial Sequence
  Synthetic
tgttttctttuccctccatggcuat

SEQ ID NO: 79209 - DNA, 21 bp, Artificial Sequence
  Synthetic
gtttggacauggcaagcucag

SEQ ID NO: 79210 - DNA, 21 bp, Artificial Sequence
  Synthetic
cugccctcaauaaggccagat

SEQ ID NO: 79211 - DNA, 22 bp, Artificial Sequence
  Synthetic
gtgtgauggctgtgaugacaac

SEQ ID NO: 79212 - DNA, 20 bp, Artificial Sequence
  Synthetic
ctcaucagcacuccaagcgt

SEQ ID NO: 79213 - DNA, 24 bp, Artificial Sequence
  Synthetic
gagtttggaccugaaaccucacat

SEQ ID NO: 79214 - DNA, 25 bp, Artificial Sequence
  Synthetic
agcaaataaacaugccaaccaaguc

SEQ ID NO: 79215 - DNA, 26 bp, Artificial Sequence
  Synthetic
agaggagaggagacaugaattaccuc

SEQ ID NO: 79216 - DNA, 26 bp, Artificial Sequence
  Synthetic
tggaaagctaguggttcagagttcua

SEQ ID NO: 79217 - DNA, 27 bp, Artificial Sequence
  Synthetic
agcctaaacauccccttaaattggaut

SEQ ID NO: 79218 - DNA, 27 bp, Artificial Sequence
  Synthetic
cttacgctuaactccaactgugaaaaa

SEQ ID NO: 79219 - DNA, 27 bp, Artificial Sequence
  Synthetic
ggacaaactagaguccacagttaagug

SEQ ID NO: 79220 - DNA, 21 bp, Artificial Sequence
  Synthetic
cagcaggcagaagaugtggua

SEQ ID NO: 79221 - DNA, 27 bp, Artificial Sequence
  Synthetic
gatttccaauggagaacttttgctcut

SEQ ID NO: 79222 - DNA, 25 bp, Artificial Sequence
  Synthetic
catagtcattuggcctcctcuaacc

SEQ ID NO: 79223 - DNA, 24 bp, Artificial Sequence
  Synthetic
gtgtcaaacaccaugaatgagcut

SEQ ID NO: 79224 - DNA, 21 bp, Artificial Sequence
  Synthetic
gtcgagccucatctgagagug

SEQ ID NO: 79225 - DNA, 24 bp, Artificial Sequence
  Synthetic
ctcacctugcacttctctcaucat

SEQ ID NO: 79226 - DNA, 24 bp, Artificial Sequence
  Synthetic
cgttgttacuttggatcugaagga

SEQ ID NO: 79227 - DNA, 27 bp, Artificial Sequence
  Synthetic
actcaccagaagcuctttatacttugg

SEQ ID NO: 79228 - DNA, 25 bp, Artificial Sequence
  Synthetic
cctuacgaaggatgaauccaaaagg

SEQ ID NO: 79229 - DNA, 22 bp, Artificial Sequence
  Synthetic
ccactgcutgcttagugaacca

SEQ ID NO: 79230 - DNA, 21 bp, Artificial Sequence
  Synthetic
cctataagcugcctgcaguct

SEQ ID NO: 79231 - DNA, 24 bp, Artificial Sequence
  Synthetic
tccaautatauagggcaggccaac

SEQ ID NO: 79232 - DNA, 29 bp, Artificial Sequence
  Synthetic
ggctatgtattucttttgtgtgttugaga

SEQ ID NO: 79233 - DNA, 27 bp, Artificial Sequence
  Synthetic
aacctttgtgauaaacgaaccacuaga

SEQ ID NO: 79234 - DNA, 27 bp, Artificial Sequence
  Synthetic
ccacagctgtauagaaaattctgggut

SEQ ID NO: 79235 - DNA, 25 bp, Artificial Sequence
  Synthetic
ctaacctttuacccacccacauacc

SEQ ID NO: 79236 - DNA, 26 bp, Artificial Sequence
  Synthetic
gccatctgacaucttttcccagtuat

SEQ ID NO: 79237 - DNA, 27 bp, Artificial Sequence
  Synthetic
tttctgttagauccaccagatacucct

SEQ ID NO: 79238 - DNA, 21 bp, Artificial Sequence
  Synthetic
ctgtttuggcaggacagugag

SEQ ID NO: 79239 - DNA, 27 bp, Artificial Sequence
  Synthetic
ccgttatattgtuctcctgtgtctgut

SEQ ID NO: 79240 - DNA, 20 bp, Artificial Sequence
  Synthetic
cttgacccccaucccttcut

SEQ ID NO: 79241 - DNA, 19 bp, Artificial Sequence
  Synthetic
ttggctacaugccgcugat

SEQ ID NO: 79242 - DNA, 19 bp, Artificial Sequence
  Synthetic
ccccaaacacaugcagugg

SEQ ID NO: 79243 - DNA, 19 bp, Artificial Sequence
  Synthetic
tcggaggaugggcugagat

SEQ ID NO: 79244 - DNA, 20 bp, Artificial Sequence
  Synthetic
gggtuccccaccagaaaaug

SEQ ID NO: 79245 - DNA, 19 bp, Artificial Sequence
  Synthetic
acaucctcguggagagcga

SEQ ID NO: 79246 - DNA, 20 bp, Artificial Sequence
  Synthetic
gccgaagucagcgatctuga

SEQ ID NO: 79247 - DNA, 21 bp, Artificial Sequence
  Synthetic
gggtaccugccggattaucct

SEQ ID NO: 79248 - DNA, 17 bp, Artificial Sequence
  Synthetic
tcucugggaccgggcat

SEQ ID NO: 79249 - DNA, 20 bp, Artificial Sequence
  Synthetic
cgagacguccggctttctuc

SEQ ID NO: 79250 - DNA, 21 bp, Artificial Sequence
  Synthetic
cctcagccacugttaggguct

SEQ ID NO: 79251 - DNA, 26 bp, Artificial Sequence
  Synthetic
gcagcctgaatuatgatcctttccua

SEQ ID NO: 79252 - DNA, 28 bp, Artificial Sequence
  Synthetic
tcttaagatgctuttgtgtgactcuaaa

SEQ ID NO: 79253 - DNA, 28 bp, Artificial Sequence
  Synthetic
ccatgaagtgaucggaatacatguagaa

SEQ ID NO: 79254 - DNA, 17 bp, Artificial Sequence
  Synthetic
agggcugcggagaucct

SEQ ID NO: 79255 - DNA, 21 bp, Artificial Sequence
  Synthetic
gcagctacutccagagctuca

SEQ ID NO: 79256 - DNA, 21 bp, Artificial Sequence
  Synthetic
gggctccugttcctctguagt

SEQ ID NO: 79257 - DNA, 26 bp, Artificial Sequence
  Synthetic
tctggaagaaagutcccttcattcuc

SEQ ID NO: 79258 - DNA, 23 bp, Artificial Sequence
  Synthetic
cgacatcaguaattgctcugcca

SEQ ID NO: 79259 - DNA, 27 bp, Artificial Sequence
  Synthetic
acccaaaggaagaagaauttaggtugt

SEQ ID NO: 79260 - DNA, 21 bp, Artificial Sequence
  Synthetic
gtctgguccacattgctcuca

SEQ ID NO: 79261 - DNA, 20 bp, Artificial Sequence
  Synthetic
gctgtccccucaccatucag

SEQ ID NO: 79262 - DNA, 22 bp, Artificial Sequence
  Synthetic
gggtagguggttctccaugact

SEQ ID NO: 79263 - DNA, 21 bp, Artificial Sequence
  Synthetic
catttuggaagccccagcauc

SEQ ID NO: 79264 - DNA, 28 bp, Artificial Sequence
  Synthetic
tcattttgugaacacactggtaaguaca

SEQ ID NO: 79265 - DNA, 20 bp, Artificial Sequence
  Synthetic
cccttuacgctgcgttugat

SEQ ID NO: 79266 - DNA, 21 bp, Artificial Sequence
  Synthetic
agaggccagaggacutcucat

SEQ ID NO: 79267 - DNA, 24 bp, Artificial Sequence
  Synthetic
guatcttccauccccaccagaaac

SEQ ID NO: 79268 - DNA, 21 bp, Artificial Sequence
  Synthetic
gttaccggcacugcguaaaat

SEQ ID NO: 79269 - DNA, 28 bp, Artificial Sequence
  Synthetic
cgttccttttuggcagtcaagttttuaa

SEQ ID NO: 79270 - DNA, 18 bp, Artificial Sequence
  Synthetic
ccgggucugaaccccaaa

SEQ ID NO: 79271 - DNA, 18 bp, Artificial Sequence
  Synthetic
ggacgtgcuccccatgug

SEQ ID NO: 79272 - DNA, 22 bp, Artificial Sequence
  Synthetic
gatctggagcucctggaagaug

SEQ ID NO: 79273 - DNA, 21 bp, Artificial Sequence
  Synthetic
cgagccuggagtttgcaugaa

SEQ ID NO: 79274 - DNA, 21 bp, Artificial Sequence
  Synthetic
gtgauaggagcccatguacgg

SEQ ID NO: 79275 - DNA, 23 bp, Artificial Sequence
  Synthetic
cgcccuccgttactactaugaca

SEQ ID NO: 79276 - DNA, 27 bp, Artificial Sequence
  Synthetic
ttacuaggaaatcatcucagcagagaa

SEQ ID NO: 79277 - DNA, 21 bp, Artificial Sequence
  Synthetic
gauccacagctctuacagcga

SEQ ID NO: 79278 - DNA, 28 bp, Artificial Sequence
  Synthetic
agtugaaaaccgaagatuagaggaacaa

SEQ ID NO: 79279 - DNA, 23 bp, Artificial Sequence
  Synthetic
cacacttaccaguctgtgcugaa

SEQ ID NO: 79280 - DNA, 29 bp, Artificial Sequence
  Synthetic
cttcttttctagauctgtaccaagtgugt

SEQ ID NO: 79281 - DNA, 21 bp, Artificial Sequence
  Synthetic
ctccgaaagcuggcaaaacug

SEQ ID NO: 79282 - DNA, 28 bp, Artificial Sequence
  Synthetic
ctagtccgtcucatcaaatacacacaut

SEQ ID NO: 79283 - DNA, 31 bp, Artificial Sequence
  Synthetic
aaacaacctatagtuccttttctacatctuc

SEQ ID NO: 79284 - DNA, 24 bp, Artificial Sequence
  Synthetic
catggacctuggtcatgatgtuct

SEQ ID NO: 79285 - DNA, 20 bp, Artificial Sequence
  Synthetic
tccaacuccagctgcaucac

SEQ ID NO: 79286 - DNA, 22 bp, Artificial Sequence
  Synthetic
caggagcugaggtcugaacaat

SEQ ID NO: 79287 - DNA, 21 bp, Artificial Sequence
  Synthetic
tgaccaucaagcctgcttcut

SEQ ID NO: 79288 - DNA, 27 bp, Artificial Sequence
  Synthetic
gggtgtgtaugtgtgaatatttucaga

SEQ ID NO: 79289 - DNA, 23 bp, Artificial Sequence
  Synthetic
cccaacatucacttcctgctugt

SEQ ID NO: 79290 - DNA, 27 bp, Artificial Sequence
  Synthetic
actcaggatuggaagatactguagagg

SEQ ID NO: 79291 - DNA, 28 bp, Artificial Sequence
  Synthetic
tctgguaaggaccattagacauaagaca

SEQ ID NO: 79292 - DNA, 17 bp, Artificial Sequence
  Synthetic
cggcgacgcutggugat

SEQ ID NO: 79293 - DNA, 18 bp, Artificial Sequence
  Synthetic
cagccgcugcaaagctuc

SEQ ID NO: 79294 - DNA, 22 bp, Artificial Sequence
  Synthetic
gcaggcutgatggucagaaaga

SEQ ID NO: 79295 - DNA, 21 bp, Artificial Sequence
  Synthetic
ccctttcuccactctgacucc

SEQ ID NO: 79296 - DNA, 20 bp, Artificial Sequence
  Synthetic
ccactgucacaactgtugct

SEQ ID NO: 79297 - DNA, 18 bp, Artificial Sequence
  Synthetic
cacccauccccaccacug

SEQ ID NO: 79298 - DNA, 17 bp, Artificial Sequence
  Synthetic
ccgcgaaagcugucgaa

SEQ ID NO: 79299 - DNA, 22 bp, Artificial Sequence
  Synthetic
ctcgaggauctgtactggaugg

SEQ ID NO: 79300 - DNA, 21 bp, Artificial Sequence
  Synthetic
cggttccaagccautctggut

SEQ ID NO: 79301 - DNA, 22 bp, Artificial Sequence
  Synthetic
ggagcuagagccaaagagggua

SEQ ID NO: 79302 - DNA, 22 bp, Artificial Sequence
  Synthetic
ggttcatcugctggtagtugct

SEQ ID NO: 79303 - DNA, 17 bp, Artificial Sequence
  Synthetic
ggctcggugtccuccac

SEQ ID NO: 79304 - DNA, 17 bp, Artificial Sequence
  Synthetic
tggcccugagctccgua

SEQ ID NO: 79305 - DNA, 25 bp, Artificial Sequence
  Synthetic
tgtctttcugcctgtctgtaaucac

SEQ ID NO: 79306 - DNA, 28 bp, Artificial Sequence
  Synthetic
ccagaatucacgagaggatagtaucagt

SEQ ID NO: 79307 - DNA, 24 bp, Artificial Sequence
  Synthetic
gataccaaguagctgccagttuct

SEQ ID NO: 79308 - DNA, 26 bp, Artificial Sequence
  Synthetic
atttcacttttcutctcctcguggat

SEQ ID NO: 79309 - DNA, 22 bp, Artificial Sequence
  Synthetic
ggctttggutcggtauggaaag

SEQ ID NO: 79310 - DNA, 20 bp, Artificial Sequence
  Synthetic
gagcuacacggagtgcugag

SEQ ID NO: 79311 - DNA, 17 bp, Artificial Sequence
  Synthetic
ccgcuggccatggagua

SEQ ID NO: 79312 - DNA, 24 bp, Artificial Sequence
  Synthetic
tgcaaauaaaggcacaccugaaga

SEQ ID NO: 79313 - DNA, 29 bp, Artificial Sequence
  Synthetic
gtctatgccaaaauaagtttccagttuca

SEQ ID NO: 79314 - DNA, 22 bp, Artificial Sequence
  Synthetic
ccatagcaugcaggaagcacua

SEQ ID NO: 79315 - DNA, 22 bp, Artificial Sequence
  Synthetic
aatcccugtggatcugaaacgg

SEQ ID NO: 79316 - DNA, 23 bp, Artificial Sequence
  Synthetic
caggtcgaagucgttgacauact

SEQ ID NO: 79317 - DNA, 19 bp, Artificial Sequence
  Synthetic
gctcttcuccgctctuccc

SEQ ID NO: 79318 - DNA, 24 bp, Artificial Sequence
  Synthetic
gtcgaagucgttgacatacuccat

SEQ ID NO: 79319 - DNA, 18 bp, Artificial Sequence
  Synthetic
ccagctcutctccgcuct

SEQ ID NO: 79320 - DNA, 21 bp, Artificial Sequence
  Synthetic
tcatcttgaacuccccgtugg

SEQ ID NO: 79321 - DNA, 22 bp, Artificial Sequence
  Synthetic
aacctgtgcucactggagttut

SEQ ID NO: 79322 - DNA, 21 bp, Artificial Sequence
  Synthetic
cgagacgcaagutaggucact

SEQ ID NO: 79323 - DNA, 23 bp, Artificial Sequence
  Synthetic
agaacauccagaggaacaagcug

SEQ ID NO: 79324 - DNA, 25 bp, Artificial Sequence
  Synthetic
cacgagtacuataacgttgcaucct

SEQ ID NO: 79325 - DNA, 26 bp, Artificial Sequence
  Synthetic
ggaggaaagttuccagagatagaugg

SEQ ID NO: 79326 - DNA, 25 bp, Artificial Sequence
  Synthetic
gggaaggaagacutgcttucaaact

SEQ ID NO: 79327 - DNA, 25 bp, Artificial Sequence
  Synthetic
gacagctatcugctggtgtaacaut

SEQ ID NO: 79328 - DNA, 26 bp, Artificial Sequence
  Synthetic
ttgttgcagacaaaaugaacactugt

SEQ ID NO: 79329 - DNA, 27 bp, Artificial Sequence
  Synthetic
gggaagaccuttttaacaacacuacct

SEQ ID NO: 79330 - DNA, 23 bp, Artificial Sequence
  Synthetic
tggcucaccgaaaagtaaauccc

SEQ ID NO: 79331 - DNA, 27 bp, Artificial Sequence
  Synthetic
gcttcctccuggttatgtagtaaauca

SEQ ID NO: 79332 - DNA, 25 bp, Artificial Sequence
  Synthetic
caccatccugggtctcaauaaagag

SEQ ID NO: 79333 - DNA, 24 bp, Artificial Sequence
  Synthetic
cccagaagagutggatguaaccag

SEQ ID NO: 79334 - DNA, 23 bp, Artificial Sequence
  Synthetic
ctctagatgatuccagtgcccut

SEQ ID NO: 79335 - DNA, 27 bp, Artificial Sequence
  Synthetic
tccctaggauggcttataaacaugact

SEQ ID NO: 79336 - DNA, 22 bp, Artificial Sequence
  Synthetic
cctaccugcagaagcaagcuaa

SEQ ID NO: 79337 - DNA, 28 bp, Artificial Sequence
  Synthetic
aatctactcccugagaaagagttguact

SEQ ID NO: 79338 - DNA, 25 bp, Artificial Sequence
  Synthetic
actgtgatguccattgtgactaucc

SEQ ID NO: 79339 - DNA, 25 bp, Artificial Sequence
  Synthetic
agactgctgaagutcttctttgucc

SEQ ID NO: 79340 - DNA, 27 bp, Artificial Sequence
  Synthetic
tcccatttatcugtgttgcttttguct

SEQ ID NO: 79341 - DNA, 27 bp, Artificial Sequence
  Synthetic
actgtaatcugtatcgcctuggaaaaa

SEQ ID NO: 79342 - DNA, 24 bp, Artificial Sequence
  Synthetic
gggaucaaatatugacaccaccat

SEQ ID NO: 79343 - DNA, 24 bp, Artificial Sequence
  Synthetic
gccttgaatgaautccagcaguga

SEQ ID NO: 79344 - DNA, 25 bp, Artificial Sequence
  Synthetic
ccattcacaucctggtaauccaagt

SEQ ID NO: 79345 - DNA, 29 bp, Artificial Sequence
  Synthetic
tgtctctacuggcacattacttctacuaa

SEQ ID NO: 79346 - DNA, 24 bp, Artificial Sequence
  Synthetic
ggacaaagaagaacutcagcaguc

SEQ ID NO: 79347 - DNA, 28 bp, Artificial Sequence
  Synthetic
gccacataaacaauccatgaccaguaat

SEQ ID NO: 79348 - DNA, 22 bp, Artificial Sequence
  Synthetic
gctcaccaugcttcatgtcaut

SEQ ID NO: 79349 - DNA, 26 bp, Artificial Sequence
  Synthetic
gtgcagtactatutcacaggcatcua

SEQ ID NO: 79350 - DNA, 23 bp, Artificial Sequence
  Synthetic
gacagtggagagauggcagaauc

SEQ ID NO: 79351 - DNA, 24 bp, Artificial Sequence
  Synthetic
gctagccacugtgagctagtcaua

SEQ ID NO: 79352 - DNA, 20 bp, Artificial Sequence
  Synthetic
gcttcggucctcagcccuat

SEQ ID NO: 79353 - DNA, 28 bp, Artificial Sequence
  Synthetic
atttgctgtttacucctcttctcttuct

SEQ ID NO: 79354 - DNA, 26 bp, Artificial Sequence
  Synthetic
aagcaccacaauactaacaagugaca

SEQ ID NO: 79355 - DNA, 24 bp, Artificial Sequence
  Synthetic
aattccagcuctttcacatgguga

SEQ ID NO: 79356 - DNA, 28 bp, Artificial Sequence
  Synthetic
ggatttatcctgutggtctagttctugt

SEQ ID NO: 79357 - DNA, 20 bp, Artificial Sequence
  Synthetic
ctgtccgucgtgacacugag

SEQ ID NO: 79358 - DNA, 26 bp, Artificial Sequence
  Synthetic
cctgatctgtcuctctctgtctctuc

SEQ ID NO: 79359 - DNA, 27 bp, Artificial Sequence
  Synthetic
gggagtacuagaaaaggaaaggctuac

SEQ ID NO: 79360 - DNA, 28 bp, Artificial Sequence
  Synthetic
cctctggttcugttttatactgtuagct

SEQ ID NO: 79361 - DNA, 24 bp, Artificial Sequence
  Synthetic
tctatggcctucagaatgctcuct

SEQ ID NO: 79362 - DNA, 22 bp, Artificial Sequence
  Synthetic
gcaguatctaccuggagcacac

SEQ ID NO: 79363 - DNA, 25 bp, Artificial Sequence
  Synthetic
agggaaaaacuggaggaaagaacuc

SEQ ID NO: 79364 - DNA, 20 bp, Artificial Sequence
  Synthetic
gggctucacaaaggucagag

SEQ ID NO: 79365 - DNA, 23 bp, Artificial Sequence
  Synthetic
ccccctgtgutactgaattgcua

SEQ ID NO: 79366 - DNA, 28 bp, Artificial Sequence
  Synthetic
tggacaacagucaaacaacaattcttug

SEQ ID NO: 79367 - DNA, 28 bp, Artificial Sequence
  Synthetic
aggcattagaaagccugtagttttacut

SEQ ID NO: 79368 - DNA, 22 bp, Artificial Sequence
  Synthetic
ggtgucaaggagcagaagctut

SEQ ID NO: 79369 - DNA, 28 bp, Artificial Sequence
  Synthetic
tgctctccttttuctgagtacttttcuc

SEQ ID NO: 79370 - DNA, 20 bp, Artificial Sequence
  Synthetic
gcagctgcuagaggccttut

SEQ ID NO: 79371 - DNA, 22 bp, Artificial Sequence
  Synthetic
ttcctttccuccctgtauggga

SEQ ID NO: 79372 - DNA, 22 bp, Artificial Sequence
  Synthetic
cgcatgctttucccgtcttcua

SEQ ID NO: 79373 - DNA, 28 bp, Artificial Sequence
  Synthetic
gtaatccaaaguccacttcttgaaguga

SEQ ID NO: 79374 - DNA, 21 bp, Artificial Sequence
  Synthetic
cgggcuccatcaacaucacag

SEQ ID NO: 79375 - DNA, 20 bp, Artificial Sequence
  Synthetic
ccactagcccacuccagcua

SEQ ID NO: 79376 - DNA, 22 bp, Artificial Sequence
  Synthetic
cagaaucagaacggacauccca

SEQ ID NO: 79377 - DNA, 24 bp, Artificial Sequence
  Synthetic
gcaccgucaatatgtttccugaag

SEQ ID NO: 79378 - DNA, 27 bp, Artificial Sequence
  Synthetic
tctccuagaggacagtaatcttugcat

SEQ ID NO: 79379 - DNA, 22 bp, Artificial Sequence
  Synthetic
cutgcucaagacaggaagacca

SEQ ID NO: 79380 - DNA, 24 bp, Artificial Sequence
  Synthetic
tcaaaggauttgctcucacacgaa

SEQ ID NO: 79381 - DNA, 28 bp, Artificial Sequence
  Synthetic
agaaaaacctuttgttgctttuggaagt

SEQ ID NO: 79382 - DNA, 22 bp, Artificial Sequence
  Synthetic
ctgaccacgcaaugtctttuct

SEQ ID NO: 79383 - DNA, 27 bp, Artificial Sequence
  Synthetic
gaaattgaaugccaccatgttctcuaa

SEQ ID NO: 79384 - DNA, 21 bp, Artificial Sequence
  Synthetic
ttccaccagagautccaugcc

SEQ ID NO: 79385 - DNA, 21 bp, Artificial Sequence
  Synthetic
tgcagctacucagacccucaa

SEQ ID NO: 79386 - DNA, 18 bp, Artificial Sequence
  Synthetic
catgcagagguccucggt

SEQ ID NO: 79387 - DNA, 25 bp, Artificial Sequence
  Synthetic
ggatcaguactccagugagaagaca

SEQ ID NO: 79388 - DNA, 26 bp, Artificial Sequence
  Synthetic
tgtttgttgtttugcttttcgtgtug

SEQ ID NO: 79389 - DNA, 28 bp, Artificial Sequence
  Synthetic
caggtttgtgcugttctaaaaatgagut

SEQ ID NO: 79390 - DNA, 26 bp, Artificial Sequence
  Synthetic
ggcautacctuaaccaaagagagcaa

SEQ ID NO: 79391 - DNA, 25 bp, Artificial Sequence
  Synthetic
acttagaatcuccatggcuaggact

SEQ ID NO: 79392 - DNA, 24 bp, Artificial Sequence
  Synthetic
tccaggcugtaaacttuggaaagg

SEQ ID NO: 79393 - DNA, 21 bp, Artificial Sequence
  Synthetic
cagctguggcaatttctggug

SEQ ID NO: 79394 - DNA, 22 bp, Artificial Sequence
  Synthetic
cccagtctuacgtgttgcctut

SEQ ID NO: 79395 - DNA, 22 bp, Artificial Sequence
  Synthetic
accatgccutatggacuggaga

SEQ ID NO: 79396 - DNA, 23 bp, Artificial Sequence
  Synthetic
tcagtgctgtutgagggaactut

SEQ ID NO: 79397 - DNA, 28 bp, Artificial Sequence
  Synthetic
ctcaaaatagaacaagutgttgggaugg

SEQ ID NO: 79398 - DNA, 23 bp, Artificial Sequence
  Synthetic
catttgutgggtcauccagcaag

SEQ ID NO: 79399 - DNA, 23 bp, Artificial Sequence
  Synthetic
cacaaaccccacaccucctatut

SEQ ID NO: 79400 - DNA, 28 bp, Artificial Sequence
  Synthetic
ctccatgatcaaaaugtcatttgtgcua

SEQ ID NO: 79401 - DNA, 25 bp, Artificial Sequence
  Synthetic
gcagacagauctacgttugagaacc

SEQ ID NO: 79402 - DNA, 27 bp, Artificial Sequence
  Synthetic
tgtctctttaggutccatgtagcagua

SEQ ID NO: 79403 - DNA, 28 bp, Artificial Sequence
  Synthetic
ggcattttagtucctttagacatgcaut

SEQ ID NO: 79404 - DNA, 27 bp, Artificial Sequence
  Synthetic
atgcttgctauacagactgctatacug

SEQ ID NO: 79405 - DNA, 28 bp, Artificial Sequence
  Synthetic
ccttgtcaaaaggutttccaatagcaut

SEQ ID NO: 79406 - DNA, 27 bp, Artificial Sequence
  Synthetic
ttcaaagaagugagtttggactuacga

SEQ ID NO: 79407 - DNA, 24 bp, Artificial Sequence
  Synthetic
agggaactuagcagagagcaaaug

SEQ ID NO: 79408 - DNA, 27 bp, Artificial Sequence
  Synthetic
acgagcttgttuaaggtatgccttuat

SEQ ID NO: 79409 - DNA, 28 bp, Artificial Sequence
  Synthetic
tgcttaatctgcuattcttgcttuaggg

SEQ ID NO: 79410 - DNA, 29 bp, Artificial Sequence
  Synthetic
tcactgtccacaauttcattcaaguagaa

SEQ ID NO: 79411 - DNA, 28 bp, Artificial Sequence
  Synthetic
gcaatgtactaugtaggtctttcgugaa

SEQ ID NO: 79412 - DNA, 21 bp, Artificial Sequence
  Synthetic
ggccaagcutgtaccatguga

SEQ ID NO: 79413 - DNA, 28 bp, Artificial Sequence
  Synthetic
accattcaataacuatggcctcttcaut

SEQ ID NO: 79414 - DNA, 21 bp, Artificial Sequence
  Synthetic
gatgacggcagaugctgttug

SEQ ID NO: 79415 - DNA, 22 bp, Artificial Sequence
  Synthetic
acaggttccaguacccacatug

SEQ ID NO: 79416 - DNA, 28 bp, Artificial Sequence
  Synthetic
tgatctgctutttgtcactaaugagagt

SEQ ID NO: 79417 - DNA, 25 bp, Artificial Sequence
  Synthetic
caggtcctccautttgtactgtuct

SEQ ID NO: 79418 - DNA, 25 bp, Artificial Sequence
  Synthetic
gaaacttggaaaacuttgtggugct

SEQ ID NO: 79419 - DNA, 23 bp, Artificial Sequence
  Synthetic
gcaaacacugctgcttcauaacc

SEQ ID NO: 79420 - DNA, 21 bp, Artificial Sequence
  Synthetic
aagcagcacgggugtaactua

SEQ ID NO: 79421 - DNA, 29 bp, Artificial Sequence
  Synthetic
cctttcactctgutttcttttctcttcug

SEQ ID NO: 79422 - DNA, 24 bp, Artificial Sequence
  Synthetic
tgggtcaacagguttgttcaguag

SEQ ID NO: 79423 - DNA, 26 bp, Artificial Sequence
  Synthetic
cagcaatcacugttgaatcagcaaut

SEQ ID NO: 79424 - DNA, 20 bp, Artificial Sequence
  Synthetic
tgtcgcuacctcagttugcc

SEQ ID NO: 79425 - DNA, 24 bp, Artificial Sequence
  Synthetic
ggtatttggttucccagtccacua

SEQ ID NO: 79426 - DNA, 26 bp, Artificial Sequence
  Synthetic
ccagaaggauaaacagcatacgcuat

SEQ ID NO: 79427 - DNA, 25 bp, Artificial Sequence
  Synthetic
ggtggaaacgutctctacuacgaag

SEQ ID NO: 79428 - DNA, 22 bp, Artificial Sequence
  Synthetic
agaggttggguctgccagatua

SEQ ID NO: 79429 - DNA, 23 bp, Artificial Sequence
  Synthetic
cacaucagcaaaaccatctuggt

SEQ ID NO: 79430 - DNA, 23 bp, Artificial Sequence
  Synthetic
gcaactggacauccttttgtuca

SEQ ID NO: 79431 - DNA, 28 bp, Artificial Sequence
  Synthetic
acctagcaatguctatcagactctttua

SEQ ID NO: 79432 - DNA, 22 bp, Artificial Sequence
  Synthetic
gctcatgtuggagacgtcagua

SEQ ID NO: 79433 - DNA, 21 bp, Artificial Sequence
  Synthetic
ggtcctgcugtgtggtuagac

SEQ ID NO: 79434 - DNA, 21 bp, Artificial Sequence
  Synthetic
tggtgagccagaauggaacug

SEQ ID NO: 79435 - DNA, 28 bp, Artificial Sequence
  Synthetic
aatgtatgcattuatgctctgagguagg

SEQ ID NO: 79436 - DNA, 25 bp, Artificial Sequence
  Synthetic
ggacacacgaaggcauatattuggt

SEQ ID NO: 79437 - DNA, 24 bp, Artificial Sequence
  Synthetic
gctcttcguagtggtgcattuagg

SEQ ID NO: 79438 - DNA, 20 bp, Artificial Sequence
  Synthetic
acugacagaucggacggaca

SEQ ID NO: 79439 - DNA, 22 bp, Artificial Sequence
  Synthetic
ccaauacagccccttcttucca

SEQ ID NO: 79440 - DNA, 25 bp, Artificial Sequence
  Synthetic
ctgtagagtcugcttctttcccauc

SEQ ID NO: 79441 - DNA, 24 bp, Artificial Sequence
  Synthetic
gcttttcctuccccctttctctuc

SEQ ID NO: 79442 - DNA, 25 bp, Artificial Sequence
  Synthetic
ccttgttgaugggaaaagccaauaa

SEQ ID NO: 79443 - DNA, 21 bp, Artificial Sequence
  Synthetic
gtggttguctgctcaguggat

SEQ ID NO: 79444 - DNA, 23 bp, Artificial Sequence
  Synthetic
cagaagacgauatccccacacug

SEQ ID NO: 79445 - DNA, 28 bp, Artificial Sequence
  Synthetic
agaaattgtgacauatccctctccuact

SEQ ID NO: 79446 - DNA, 23 bp, Artificial Sequence
  Synthetic
attgcaugacaggaaauggaggt

SEQ ID NO: 79447 - DNA, 25 bp, Artificial Sequence
  Synthetic
ccagaugagagtcgatuagggaaag

SEQ ID NO: 79448 - DNA, 20 bp, Artificial Sequence
  Synthetic
ccccagcagaggutcuagac

SEQ ID NO: 79449 - DNA, 25 bp, Artificial Sequence
  Synthetic
gttacagtctcucttctgcctccua

SEQ ID NO: 79450 - DNA, 22 bp, Artificial Sequence
  Synthetic
atgggagcucttcctgatcuga

SEQ ID NO: 79451 - DNA, 25 bp, Artificial Sequence
  Synthetic
cctgctttattugggtactccugac

SEQ ID NO: 79452 - DNA, 22 bp, Artificial Sequence
  Synthetic
ccaagatucccagtcaccauca

SEQ ID NO: 79453 - DNA, 24 bp, Artificial Sequence
  Synthetic
ggtgaaatacutggctacctugga

SEQ ID NO: 79454 - DNA, 24 bp, Artificial Sequence
  Synthetic
gctgagacccaaaacutgtcttut

SEQ ID NO: 79455 - DNA, 22 bp, Artificial Sequence
  Synthetic
gcccctccaccuctgaaagaua

SEQ ID NO: 79456 - DNA, 24 bp, Artificial Sequence
  Synthetic
gggaattcaggcutcatttggaug

SEQ ID NO: 79457 - DNA, 27 bp, Artificial Sequence
  Synthetic
actcaacaatgtautcagcaagtccut

SEQ ID NO: 79458 - DNA, 20 bp, Artificial Sequence
  Synthetic
ggtcgcugggatcaccaaut

SEQ ID NO: 79459 - DNA, 21 bp, Artificial Sequence
  Synthetic
ccagcaguccattcauccagt

SEQ ID NO: 79460 - DNA, 26 bp, Artificial Sequence
  Synthetic
cagcaccgtaaugttttgtcaaagut

SEQ ID NO: 79461 - DNA, 23 bp, Artificial Sequence
  Synthetic
gtccaucagacagaggaacctuc

SEQ ID NO: 79462 - DNA, 21 bp, Artificial Sequence
  Synthetic
cagggtcauctgtcagcauct

SEQ ID NO: 79463 - DNA, 24 bp, Artificial Sequence
  Synthetic
tggctcaaagcugaaagcaauagt

SEQ ID NO: 79464 - DNA, 26 bp, Artificial Sequence
  Synthetic
aacattatttauccgcatcctgguga

SEQ ID NO: 79465 - DNA, 28 bp, Artificial Sequence
  Synthetic
acatgtggattcauggacttagattugt

SEQ ID NO: 79466 - DNA, 29 bp, Artificial Sequence
  Synthetic
gctaataaugagaggaatggaaagaugct

SEQ ID NO: 79467 - DNA, 23 bp, Artificial Sequence
  Synthetic
ggauttgtagctucccgcagaaa

SEQ ID NO: 79468 - DNA, 28 bp, Artificial Sequence
  Synthetic
agctgcagautatgaaattuaacagggt

SEQ ID NO: 79469 - DNA, 25 bp, Artificial Sequence
  Synthetic
gggaauagggctgttctugacaaaa

SEQ ID NO: 79470 - DNA, 22 bp, Artificial Sequence
  Synthetic
gtctccagggcagutagaacut

SEQ ID NO: 79471 - DNA, 24 bp, Artificial Sequence
  Synthetic
tctatcugggtctgcuaacagact

SEQ ID NO: 79472 - DNA, 23 bp, Artificial Sequence
  Synthetic
gacagaggaagauggucccaaag

SEQ ID NO: 79473 - DNA, 28 bp, Artificial Sequence
  Synthetic
caacagaagtauaagaatggctgucaca

SEQ ID NO: 79474 - DNA, 21 bp, Artificial Sequence
  Synthetic
agacatgaggutcaccgcauc

SEQ ID NO: 79475 - DNA, 22 bp, Artificial Sequence
  Synthetic
gcagttacugccctctcctuac

SEQ ID NO: 79476 - DNA, 23 bp, Artificial Sequence
  Synthetic
tggatttcctcugcctggaatug

SEQ ID NO: 79477 - DNA, 27 bp, Artificial Sequence
  Synthetic
ctgttaggcaagaaautcctggtttut

SEQ ID NO: 79478 - DNA, 22 bp, Artificial Sequence
  Synthetic
cataatcaguaccacggccugt

SEQ ID NO: 79479 - DNA, 28 bp, Artificial Sequence
  Synthetic
tgcagttgactuattcagcatattcugt

SEQ ID NO: 79480 - DNA, 25 bp, Artificial Sequence
  Synthetic
ggttactttgugggagacttucacc

SEQ ID NO: 79481 - DNA, 26 bp, Artificial Sequence
  Synthetic
atccattcauccccaacagttctuac

SEQ ID NO: 79482 - DNA, 26 bp, Artificial Sequence
  Synthetic
ttctgacttttcutctcaggactgug

SEQ ID NO: 79483 - DNA, 22 bp, Artificial Sequence
  Synthetic
aagtgcggtucattagggctua

SEQ ID NO: 79484 - DNA, 26 bp, Artificial Sequence
  Synthetic
tgcauagatcactttuacaaggccaa

SEQ ID NO: 79485 - DNA, 25 bp, Artificial Sequence
  Synthetic
cttaccttcuccaggctttuacaca

SEQ ID NO: 79486 - DNA, 27 bp, Artificial Sequence
  Synthetic
cttccuaaggagaaagagcttatuggt

SEQ ID NO: 79487 - DNA, 24 bp, Artificial Sequence
  Synthetic
agtgaattcugctgtgcuaagagg

SEQ ID NO: 79488 - DNA, 23 bp, Artificial Sequence
  Synthetic
gagutggaaactcuggagagcaa

SEQ ID NO: 79489 - DNA, 25 bp, Artificial Sequence
  Synthetic
tctgaagaaggugguaaaggaaacc

SEQ ID NO: 79490 - DNA, 19 bp, Artificial Sequence
  Synthetic
ccacacugacgtgcctcuc

SEQ ID NO: 79491 - DNA, 23 bp, Artificial Sequence
  Synthetic
gtctttgtgtucccggacauagt

SEQ ID NO: 79492 - DNA, 24 bp, Artificial Sequence
  Synthetic
agatagcugatttccccucaacct

SEQ ID NO: 79493 - DNA, 25 bp, Artificial Sequence
  Synthetic
ggaaatactgauctccatcctccug

SEQ ID NO: 79494 - DNA, 23 bp, Artificial Sequence
  Synthetic
gaacaucactccucaacccaagt

SEQ ID NO: 79495 - DNA, 21 bp, Artificial Sequence
  Synthetic
actuaccaacacacggccauc

SEQ ID NO: 79496 - DNA, 26 bp, Artificial Sequence
  Synthetic
tgatagtautgtagtgguaggaggca

SEQ ID NO: 79497 - DNA, 28 bp, Artificial Sequence
  Synthetic
tgtttgaagatuccaccaagatgtaugt

SEQ ID NO: 79498 - DNA, 19 bp, Artificial Sequence
  Synthetic
agctcaucacgcagcucat

SEQ ID NO: 79499 - DNA, 22 bp, Artificial Sequence
  Synthetic
atgtgaggaucctggctcctua

SEQ ID NO: 79500 - DNA, 22 bp, Artificial Sequence
  Synthetic
caacagccugaccaccttctua

SEQ ID NO: 79501 - DNA, 24 bp, Artificial Sequence
  Synthetic
cggaatgatuctgtcaacccugat

SEQ ID NO: 79502 - DNA, 20 bp, Artificial Sequence
  Synthetic
ccgcgaugatgagtggaugg

SEQ ID NO: 79503 - DNA, 27 bp, Artificial Sequence
  Synthetic
cagccttccuaacagatcattcatuct

SEQ ID NO: 79504 - DNA, 22 bp, Artificial Sequence
  Synthetic
gagcccucaacattatgccuct

SEQ ID NO: 79505 - DNA, 20 bp, Artificial Sequence
  Synthetic
ccaccgucagggactugaac

SEQ ID NO: 79506 - DNA, 28 bp, Artificial Sequence
  Synthetic
agtgttttatcugcatctggatgaucaa

SEQ ID NO: 79507 - DNA, 24 bp, Artificial Sequence
  Synthetic
ccctacucgggagaattucaacag

SEQ ID NO: 79508 - DNA, 21 bp, Artificial Sequence
  Synthetic
actgcagccaaacucccaaua

SEQ ID NO: 79509 - DNA, 25 bp, Artificial Sequence
  Synthetic
ttgatgagtgucatcttgcaaucct

SEQ ID NO: 79510 - DNA, 24 bp, Artificial Sequence
  Synthetic
tgtgggcttuaggtcaatgtugat

SEQ ID NO: 79511 - DNA, 28 bp, Artificial Sequence
  Synthetic
gcacagtaacaagautttaaaaccccut

SEQ ID NO: 79512 - DNA, 21 bp, Artificial Sequence
  Synthetic
gggtgguctaggatugcaaga

SEQ ID NO: 79513 - DNA, 28 bp, Artificial Sequence
  Synthetic
gcagtgaatgcuatgtttgtttacugat

SEQ ID NO: 79514 - DNA, 24 bp, Artificial Sequence
  Synthetic
ctatccacutgttccauaggccaa

SEQ ID NO: 79515 - DNA, 28 bp, Artificial Sequence
  Synthetic
cccatcatcatuattttcacagctcuca

SEQ ID NO: 79516 - DNA, 28 bp, Artificial Sequence
  Synthetic
tttgcaggtaaaaucaagagtccacaua

SEQ ID NO: 79517 - DNA, 21 bp, Artificial Sequence
  Synthetic
cuccaaacatcugaggccaca

SEQ ID NO: 79518 - DNA, 24 bp, Artificial Sequence
  Synthetic
gtatgcuccagaatcacugacaga

SEQ ID NO: 79519 - DNA, 17 bp, Artificial Sequence
  Synthetic
cacugaccgctggugga

SEQ ID NO: 79520 - DNA, 32 bp, Artificial Sequence
  Synthetic
agcaataccaaautttattcttgtttuagaca

SEQ ID NO: 79521 - DNA, 28 bp, Artificial Sequence
  Synthetic
ctgcagcaaagutcgtaatatctucaaa

SEQ ID NO: 79522 - DNA, 25 bp, Artificial Sequence
  Synthetic
cagctcacugaaaggttcttttgut

SEQ ID NO: 79523 - DNA, 23 bp, Artificial Sequence
  Synthetic
tcagcttttccuctgttcacugg

SEQ ID NO: 79524 - DNA, 27 bp, Artificial Sequence
  Synthetic
cttggagccaagacuaaatccttagut

SEQ ID NO: 79525 - DNA, 24 bp, Artificial Sequence
  Synthetic
tcccaccugaattcugaccaaaag

SEQ ID NO: 79526 - DNA, 25 bp, Artificial Sequence
  Synthetic
ggaauctcugagagcaacggaaaaa

SEQ ID NO: 79527 - DNA, 22 bp, Artificial Sequence
  Synthetic
gcactttucacacctgatuccc

SEQ ID NO: 79528 - DNA, 26 bp, Artificial Sequence
  Synthetic
gtaagagcttautgagatggcugact

SEQ ID NO: 79529 - DNA, 24 bp, Artificial Sequence
  Synthetic
tcatttggaaguccatgctccaut

SEQ ID NO: 79530 - DNA, 25 bp, Artificial Sequence
  Synthetic
aggtgcuggtacaatguaagacaag

SEQ ID NO: 79531 - DNA, 24 bp, Artificial Sequence
  Synthetic
acctgacaaugatgagcagttugt

SEQ ID NO: 79532 - DNA, 20 bp, Artificial Sequence
  Synthetic
cactaccucagccctccauc

SEQ ID NO: 79533 - DNA, 24 bp, Artificial Sequence
  Synthetic
tgacatgttcucctttgggttuca

SEQ ID NO: 79534 - DNA, 20 bp, Artificial Sequence
  Synthetic
tcuctcagggucaacagcca

SEQ ID NO: 79535 - DNA, 24 bp, Artificial Sequence
  Synthetic
gugagcaugcaaaaggagaacaag

SEQ ID NO: 79536 - DNA, 24 bp, Artificial Sequence
  Synthetic
tttaatuaccgggagcacctucag

SEQ ID NO: 79537 - DNA, 20 bp, Artificial Sequence
  Synthetic
acacgggaaagcaguccaut

SEQ ID NO: 79538 - DNA, 24 bp, Artificial Sequence
  Synthetic
caactttcagccugatagtcuggt

SEQ ID NO: 79539 - DNA, 23 bp, Artificial Sequence
  Synthetic
agguttgatcucagcccaagaag

SEQ ID NO: 79540 - DNA, 33 bp, Artificial Sequence
  Synthetic
aatgagactaaaactutgaagtagtcattttug

SEQ ID NO: 79541 - DNA, 21 bp, Artificial Sequence
  Synthetic
ccgaccgcgcauaaacattut

SEQ ID NO: 79542 - DNA, 25 bp, Artificial Sequence
  Synthetic
tcttctaccuctaggcagttuccaa

SEQ ID NO: 79543 - DNA, 24 bp, Artificial Sequence
  Synthetic
ctgaaagtgtgucagaggaggaug

SEQ ID NO: 79544 - DNA, 27 bp, Artificial Sequence
  Synthetic
tgucttgtgttucaacagaaggagaat

SEQ ID NO: 79545 - DNA, 26 bp, Artificial Sequence
  Synthetic
tgaatttgcugtcatgguagagaagg

SEQ ID NO: 79546 - DNA, 20 bp, Artificial Sequence
  Synthetic
cagagaagcgcaagcucauc

SEQ ID NO: 79547 - DNA, 26 bp, Artificial Sequence
  Synthetic
agtgtgtcatguggtttaggacatuc

SEQ ID NO: 79548 - DNA, 28 bp, Artificial Sequence
  Synthetic
gcatttaggaagauttagtggactugct

SEQ ID NO: 79549 - DNA, 19 bp, Artificial Sequence
  Synthetic
cgggaatuggtaggcucca

SEQ ID NO: 79550 - DNA, 26 bp, Artificial Sequence
  Synthetic
ggaggaatcaaaaautgtcgggaaut

SEQ ID NO: 79551 - DNA, 28 bp, Artificial Sequence
  Synthetic
aagatatagcugcagaagaggactuaga

SEQ ID NO: 79552 - DNA, 21 bp, Artificial Sequence
  Synthetic
cagauggcagcaagacaucct

SEQ ID NO: 79553 - DNA, 25 bp, Artificial Sequence
  Synthetic
agctgggtttcugttaatctcacug

SEQ ID NO: 79554 - DNA, 22 bp, Artificial Sequence
  Synthetic
cctagtatugaggaggcgugga

SEQ ID NO: 79555 - DNA, 28 bp, Artificial Sequence
  Synthetic
gcttgaccacuagagaatugaaaagaac

SEQ ID NO: 79556 - DNA, 29 bp, Artificial Sequence
  Synthetic
acgactacagugtcaaataaactcucaaa

SEQ ID NO: 79557 - DNA, 19 bp, Artificial Sequence
  Synthetic
cccaccucatgcactgtug

SEQ ID NO: 79558 - DNA, 26 bp, Artificial Sequence
  Synthetic
tctctgggaacuctgtatttggagua

SEQ ID NO: 79559 - DNA, 20 bp, Artificial Sequence
  Synthetic
tgcccaauctcuaccaagcc

SEQ ID NO: 79560 - DNA, 28 bp, Artificial Sequence
  Synthetic
cagtagaataaucaacagtgcaugaggt

SEQ ID NO: 79561 - DNA, 28 bp, Artificial Sequence
  Synthetic
ctaggtctcaucaaactctttgcaagua

SEQ ID NO: 79562 - DNA, 20 bp, Artificial Sequence
  Synthetic
ccccacugtcgcacaaugaa

SEQ ID NO: 79563 - DNA, 26 bp, Artificial Sequence
  Synthetic
cttcttctcccuggctgtaaaaatug

SEQ ID NO: 79564 - DNA, 20 bp, Artificial Sequence
  Synthetic
gcaagucgagggccguaaaa

SEQ ID NO: 79565 - DNA, 29 bp, Artificial Sequence
  Synthetic
cacattgcatcaucttactctcataguca

SEQ ID NO: 79566 - DNA, 23 bp, Artificial Sequence
  Synthetic
gaggtctguaacccgcagtttua

SEQ ID NO: 79567 - DNA, 23 bp, Artificial Sequence
  Synthetic
guatcagccucaagcaaaaccag

SEQ ID NO: 79568 - DNA, 21 bp, Artificial Sequence
  Synthetic
cgtgtttuggtcgatcugggt

SEQ ID NO: 79569 - DNA, 19 bp, Artificial Sequence
  Synthetic
ccagctugggagaccucat

SEQ ID NO: 79570 - DNA, 21 bp, Artificial Sequence
  Synthetic
gggtggtuggaaactgaugga

SEQ ID NO: 79571 - DNA, 24 bp, Artificial Sequence
  Synthetic
gggatgaacacauctaccccuaca

SEQ ID NO: 79572 - DNA, 19 bp, Artificial Sequence
  Synthetic
tgguagccagccagguaca

SEQ ID NO: 79573 - DNA, 20 bp, Artificial Sequence
  Synthetic
gatcttcctguggcccctuc

SEQ ID NO: 79574 - DNA, 28 bp, Artificial Sequence
  Synthetic
ccctctctgugacaaatgttatgaugat

SEQ ID NO: 79575 - DNA, 29 bp, Artificial Sequence
  Synthetic
actgaaataaaaagacuccaaccttcugt

SEQ ID NO: 79576 - DNA, 21 bp, Artificial Sequence
  Synthetic
gatctgcutcttgagguggct

SEQ ID NO: 79577 - DNA, 28 bp, Artificial Sequence
  Synthetic
acatgtaattuctggtcattucccgaat

SEQ ID NO: 79578 - DNA, 23 bp, Artificial Sequence
  Synthetic
tgttacgcagugctaaccaagut

SEQ ID NO: 79579 - DNA, 27 bp, Artificial Sequence
  Synthetic
gcaaaccacaaaaguatactccauggt

SEQ ID NO: 79580 - DNA, 26 bp, Artificial Sequence
  Synthetic
ttacttgggaaguctcatttgctuct

SEQ ID NO: 79581 - DNA, 27 bp, Artificial Sequence
  Synthetic
agctgtgtttugactctcttttgauga

SEQ ID NO: 79582 - DNA, 22 bp, Artificial Sequence
  Synthetic
ttgctgtugggtgtagtguagg

SEQ ID NO: 79583 - DNA, 23 bp, Artificial Sequence
  Synthetic
cctcaggatcucagtcgaagtut

SEQ ID NO: 79584 - DNA, 28 bp, Artificial Sequence
  Synthetic
agaguttttatttccugccacagaaagt

SEQ ID NO: 79585 - DNA, 26 bp, Artificial Sequence
  Synthetic
catgataauaacaggagccagaggut

SEQ ID NO: 79586 - DNA, 26 bp, Artificial Sequence
  Synthetic
tttccattttcucctccatcctgtut

SEQ ID NO: 79587 - DNA, 23 bp, Artificial Sequence
  Synthetic
ccatcattguccagatcguccag

SEQ ID NO: 79588 - DNA, 23 bp, Artificial Sequence
  Synthetic
aacagagugaaaggcagtcgaut

SEQ ID NO: 79589 - DNA, 20 bp, Artificial Sequence
  Synthetic
ccgcugcatgaactaugacc

SEQ ID NO: 79590 - DNA, 20 bp, Artificial Sequence
  Synthetic
agggaggguacgtgugagat

SEQ ID NO: 79591 - DNA, 24 bp, Artificial Sequence
  Synthetic
gtgaatgucccgtagttaauggct

SEQ ID NO: 79592 - DNA, 21 bp, Artificial Sequence
  Synthetic
gcgcacttuggagagagcaut

SEQ ID NO: 79593 - DNA, 21 bp, Artificial Sequence
  Synthetic
caggagcaugccacuagagat

SEQ ID NO: 79594 - DNA, 21 bp, Artificial Sequence
  Synthetic
agaccgaccucctcatucaca

SEQ ID NO: 79595 - DNA, 26 bp, Artificial Sequence
  Synthetic
ggctgatctucttaggtcaaguaggt

SEQ ID NO: 79596 - DNA, 23 bp, Artificial Sequence
  Synthetic
gggucagaguacagaagaaaggg

SEQ ID NO: 79597 - DNA, 21 bp, Artificial Sequence
  Synthetic
cttcctgccaugctgcauaag

SEQ ID NO: 79598 - DNA, 21 bp, Artificial Sequence
  Synthetic
catttcccutgtcaccuggct

SEQ ID NO: 79599 - DNA, 22 bp, Artificial Sequence
  Synthetic
cgggaaaatugagctcctcugt

SEQ ID NO: 79600 - DNA, 20 bp, Artificial Sequence
  Synthetic
ccaggugaccccatgcuaaa

SEQ ID NO: 79601 - DNA, 21 bp, Artificial Sequence
  Synthetic
cgtcctguacgagctctucac

SEQ ID NO: 79602 - DNA, 21 bp, Artificial Sequence
  Synthetic
cautaaguggacagcgccaga

SEQ ID NO: 79603 - DNA, 22 bp, Artificial Sequence
  Synthetic
ccttcccaucaccctttcagut

SEQ ID NO: 79604 - DNA, 22 bp, Artificial Sequence
  Synthetic
acagacugggaaactgaggcua

SEQ ID NO: 79605 - DNA, 18 bp, Artificial Sequence
  Synthetic
ccacatgcgcucctccut

SEQ ID NO: 79606 - DNA, 22 bp, Artificial Sequence
  Synthetic
ctcagtuccggagaagauggag

SEQ ID NO: 79607 - DNA, 23 bp, Artificial Sequence
  Synthetic
caacagccugaactcagatguca

SEQ ID NO: 79608 - DNA, 21 bp, Artificial Sequence
  Synthetic
ctgcagctuttgtcgcaguag

SEQ ID NO: 79609 - DNA, 22 bp, Artificial Sequence
  Synthetic
tctacacccucgcatcucaaga

SEQ ID NO: 79610 - DNA, 20 bp, Artificial Sequence
  Synthetic
gacucagcccgaacctucag

SEQ ID NO: 79611 - DNA, 20 bp, Artificial Sequence
  Synthetic
catgggccuttcuggaggaa

SEQ ID NO: 79612 - DNA, 22 bp, Artificial Sequence
  Synthetic
cggaagaaaggccuctgatugg

SEQ ID NO: 79613 - DNA, 22 bp, Artificial Sequence
  Synthetic
gtttcttccaugtgcccctcut

SEQ ID NO: 79614 - DNA, 28 bp, Artificial Sequence
  Synthetic
aagtctcttggcautatttctagtuggt

SEQ ID NO: 79615 - DNA, 24 bp, Artificial Sequence
  Synthetic
caatgagagcutccctcaatguct

SEQ ID NO: 79616 - DNA, 28 bp, Artificial Sequence
  Synthetic
tgtcttctaagaacuctgaagcaatguc

SEQ ID NO: 79617 - DNA, 27 bp, Artificial Sequence
  Synthetic
agggaagaggcuttataaaacaacugt

SEQ ID NO: 79618 - DNA, 21 bp, Artificial Sequence
  Synthetic
cutctaggucagcagcaacaa

SEQ ID NO: 79619 - DNA, 25 bp, Artificial Sequence
  Synthetic
caccttccaaaauagcgagtaugga

SEQ ID NO: 79620 - DNA, 23 bp, Artificial Sequence
  Synthetic
gcactcgtucagtttggcatuaa

SEQ ID NO: 79621 - DNA, 21 bp, Artificial Sequence
  Synthetic
ggcattggcagauccatgcua

SEQ ID NO: 79622 - DNA, 20 bp, Artificial Sequence
  Synthetic
gagctgucagaggatucgct

SEQ ID NO: 79623 - DNA, 21 bp, Artificial Sequence
  Synthetic
ccaggaagauctguggaccaa

SEQ ID NO: 79624 - DNA, 27 bp, Artificial Sequence
  Synthetic
guatgtcttatctctuaggagggcaac

SEQ ID NO: 79625 - DNA, 26 bp, Artificial Sequence
  Synthetic
agcatttgguctgctttgatttugaa

SEQ ID NO: 79626 - DNA, 27 bp, Artificial Sequence
  Synthetic
cacattaatauagccagaaagggccua

SEQ ID NO: 79627 - DNA, 26 bp, Artificial Sequence
  Synthetic
gacttcggttuaaccaaagcaatuga

SEQ ID NO: 79628 - DNA, 26 bp, Artificial Sequence
  Synthetic
tgacggtgtaauactccttatcggut

SEQ ID NO: 79629 - DNA, 27 bp, Artificial Sequence
  Synthetic
gtgcttgacttutacttctctctcuca

SEQ ID NO: 79630 - DNA, 25 bp, Artificial Sequence
  Synthetic
tctcaagcacucaccatttggaaut

SEQ ID NO: 79631 - DNA, 23 bp, Artificial Sequence
  Synthetic
gaggaaacacaguccctttcuga

SEQ ID NO: 79632 - DNA, 24 bp, Artificial Sequence
  Synthetic
tttttcucccgagccagaatgaut

SEQ ID NO: 79633 - DNA, 23 bp, Artificial Sequence
  Synthetic
cgtgccttcuctggttcatttug

SEQ ID NO: 79634 - DNA, 22 bp, Artificial Sequence
  Synthetic
ggaccatgcugtttcctgtuga

SEQ ID NO: 79635 - DNA, 23 bp, Artificial Sequence
  Synthetic
ggcttguggaaacggaatttgua

SEQ ID NO: 79636 - DNA, 21 bp, Artificial Sequence
  Synthetic
gaagcacuaatcggctugcat

SEQ ID NO: 79637 - DNA, 25 bp, Artificial Sequence
  Synthetic
cagcctccaaucatctccttcauac

SEQ ID NO: 79638 - DNA, 23 bp, Artificial Sequence
  Synthetic
ctttgtgcugaggatcagggaut

SEQ ID NO: 79639 - DNA, 28 bp, Artificial Sequence
  Synthetic
tcacgtttugcagggttttataacaaut

SEQ ID NO: 79640 - DNA, 24 bp, Artificial Sequence
  Synthetic
gatgaaacatcuaggctggaccut

SEQ ID NO: 79641 - DNA, 28 bp, Artificial Sequence
  Synthetic
tgtctgtaaatcagutgagccattacut

SEQ ID NO: 79642 - DNA, 27 bp, Artificial Sequence
  Synthetic
cttggtggtutttaggaaactugagaa

SEQ ID NO: 79643 - DNA, 26 bp, Artificial Sequence
  Synthetic
gtgtggtcaagaguaaccaagaaugt

SEQ ID NO: 79644 - DNA, 18 bp, Artificial Sequence
  Synthetic
gccccacauccccuacca

SEQ ID NO: 79645 - DNA, 17 bp, Artificial Sequence
  Synthetic
cccutgguggccacgac

SEQ ID NO: 79646 - DNA, 19 bp, Artificial Sequence
  Synthetic
cctcctgutctcccugggt

SEQ ID NO: 79647 - DNA, 17 bp, Artificial Sequence
  Synthetic
gaccggcacucgcucat

SEQ ID NO: 79648 - DNA, 21 bp, Artificial Sequence
  Synthetic
gctccagguccatgatguact

SEQ ID NO: 79649 - DNA, 20 bp, Artificial Sequence
  Synthetic
cagcuacaaggcctgccuac

SEQ ID NO: 79650 - DNA, 18 bp, Artificial Sequence
  Synthetic
gaatacgccuccgcguca

SEQ ID NO: 79651 - DNA, 21 bp, Artificial Sequence
  Synthetic
ggctaaagccugggtttgugt

SEQ ID NO: 79652 - DNA, 20 bp, Artificial Sequence
  Synthetic
ggaggacgagguctcccaua

SEQ ID NO: 79653 - DNA, 19 bp, Artificial Sequence
  Synthetic
ggcggtugggtgttuacct

SEQ ID NO: 79654 - DNA, 20 bp, Artificial Sequence
  Synthetic
gugccaagcactgucgaaat

SEQ ID NO: 79655 - DNA, 24 bp, Artificial Sequence
  Synthetic
aacugcugacagaaaagaagggaa

SEQ ID NO: 79656 - DNA, 29 bp, Artificial Sequence
  Synthetic
ctcactatagacagaugatgttgttgugt

SEQ ID NO: 79657 - DNA, 22 bp, Artificial Sequence
  Synthetic
gcaggatccuctcttgctgaug

SEQ ID NO: 79658 - DNA, 26 bp, Artificial Sequence
  Synthetic
tgtttccaaagaacagutacccauga

SEQ ID NO: 79659 - DNA, 26 bp, Artificial Sequence
  Synthetic
accacuggcaaagcaaaauagaaaac

SEQ ID NO: 79660 - DNA, 25 bp, Artificial Sequence
  Synthetic
actggatcucaaggtattgauggga

SEQ ID NO: 79661 - DNA, 23 bp, Artificial Sequence
  Synthetic
ggccctgtgutgcaaagtactua

SEQ ID NO: 79662 - DNA, 26 bp, Artificial Sequence
  Synthetic
agtttgctgguggagataaggttaug

SEQ ID NO: 79663 - DNA, 22 bp, Artificial Sequence
  Synthetic
agcauttccaaagauggagcga

SEQ ID NO: 79664 - DNA, 25 bp, Artificial Sequence
  Synthetic
gtggtggactcuagtcagaaaccua

SEQ ID NO: 79665 - DNA, 21 bp, Artificial Sequence
  Synthetic
tggtggccugtttggatucag

SEQ ID NO: 79666 - DNA, 23 bp, Artificial Sequence
  Synthetic
aatgccucaaccgtggacaauat

SEQ ID NO: 79667 - DNA, 30 bp, Artificial Sequence; identical to SEQ ID NO: 52837
  Synthetic

SEQ ID NO: 79668 - DNA, 26 bp, Artificial Sequence
  Synthetic
ggaaaagagugaagaagggaatguct

SEQ ID NO: 79669 - DNA, 27 bp, Artificial Sequence
  Synthetic
gagtggtttugggaacttcttttctug

SEQ ID NO: 79670 - DNA, 25 bp, Artificial Sequence
  Synthetic
tggaaagaaccuctcaacattguca

SEQ ID NO: 79671 - DNA, 27 bp, Artificial Sequence
  Synthetic
gagtagaaccatugctcaaaggactua

SEQ ID NO: 79672 - DNA, 21 bp, Artificial Sequence
  Synthetic
ctcagccaccuacuacaggac

SEQ ID NO: 79673 - DNA, 23 bp, Artificial Sequence
  Synthetic
tgctgttugagacatcagtgcut

SEQ ID NO: 79674 - DNA, 28 bp, Artificial Sequence
  Synthetic
accauccttccatuaaagagagagagat

SEQ ID NO: 79675 - DNA, 23 bp, Artificial Sequence
  Synthetic
gctgtctcagugacaaacccaua

SEQ ID NO: 79676 - DNA, 24 bp, Artificial Sequence
  Synthetic
acactuctccattctucacaaggg

SEQ ID NO: 79677 - DNA, 25 bp, Artificial Sequence
  Synthetic
aggctgcgtuggaagttatttcuaa

SEQ ID NO: 79678 - DNA, 24 bp, Artificial Sequence
  Synthetic
accccttugaaagagaacacacut

SEQ ID NO: 79679 - DNA, 22 bp, Artificial Sequence
  Synthetic
gctggccugagacattcctaug

SEQ ID NO: 79680 - DNA, 26 bp, Artificial Sequence
  Synthetic
cacagaagauggaactcagtatugga

SEQ ID NO: 79681 - DNA, 22 bp, Artificial Sequence
  Synthetic
ccacgcggacuattaagtcuga

SEQ ID NO: 79682 - DNA, 22 bp, Artificial Sequence
  Synthetic
acaaaagccaguctgggaagut

SEQ ID NO: 79683 - DNA, 20 bp, Artificial Sequence
  Synthetic
gggccugatactuggagaga

SEQ ID NO: 79684 - DNA, 23 bp, Artificial Sequence
  Synthetic
tccatcagaacuccactctcucc

SEQ ID NO: 79685 - DNA, 28 bp, Artificial Sequence
  Synthetic
aactgcttcacgutttattgagaatucc

SEQ ID NO: 79686 - DNA, 23 bp, Artificial Sequence
  Synthetic
caccauccatccauccaggaaaa

SEQ ID NO: 79687 - DNA, 29 bp, Artificial Sequence
  Synthetic
cgtgatccatucattctgcttattcucat

SEQ ID NO: 79688 - DNA, 32 bp, Artificial Sequence
  Synthetic
actgagaatataaccugataatgtaggauagt

SEQ ID NO: 79689 - DNA, 27 bp, Artificial Sequence
  Synthetic
ctacttcgaatcuctagagcctgttug

SEQ ID NO: 79690 - DNA, 23 bp, Artificial Sequence
  Synthetic
aagugtcacctuaccaaaggcaa

SEQ ID NO: 79691 - DNA, 25 bp, Artificial Sequence
  Synthetic
tgtagatuccgcacaagagatucag

SEQ ID NO: 79692 - DNA, 28 bp, Artificial Sequence
  Synthetic
acaggctctagagautcgaagtagttua

SEQ ID NO: 79693 - DNA, 24 bp, Artificial Sequence
  Synthetic
aaaatgggctutaccgtaccauga

SEQ ID NO: 79694 - DNA, 27 bp, Artificial Sequence
  Synthetic
tctttttccctucctttacagaaugct

SEQ ID NO: 79695 - DNA, 28 bp, Artificial Sequence
  Synthetic
acaagcaaacaagccauttacugaaaat

SEQ ID NO: 79696 - DNA, 28 bp, Artificial Sequence
  Synthetic
tgaggcactatugtttgtatttggagut

SEQ ID NO: 79697 - DNA, 29 bp, Artificial Sequence
  Synthetic
cctccctcttuaacaatcacttgaauact

SEQ ID NO: 79698 - DNA, 26 bp, Artificial Sequence
  Synthetic
gacttttgagaucctggaugaaacga

SEQ ID NO: 79699 - DNA, 22 bp, Artificial Sequence
  Synthetic
cacugcagaaagccaagcatut

SEQ ID NO: 79700 - DNA, 23 bp, Artificial Sequence
  Synthetic
aaagttcugcaacccaagaguga

SEQ ID NO: 79701 - DNA, 25 bp, Artificial Sequence
  Synthetic
tggagaaucagacgacaagtatugg

SEQ ID NO: 79702 - DNA, 24 bp, Artificial Sequence
  Synthetic
gccagttuagatgcaaaauccaca

SEQ ID NO: 79703 - DNA, 28 bp, Artificial Sequence
  Synthetic
aacatcctgctacuttgaggttttacut

SEQ ID NO: 79704 - DNA, 27 bp, Artificial Sequence
  Synthetic
aatccautctgaacaucaacaggaagt

SEQ ID NO: 79705 - DNA, 28 bp, Artificial Sequence
  Synthetic
tcagttagcaaaugtgttcactctgtua

SEQ ID NO: 79706 - DNA, 26 bp, Artificial Sequence
  Synthetic
tggagugtattcucacagaaaagaga

SEQ ID NO: 79707 - DNA, 23 bp, Artificial Sequence
  Synthetic
acaccccgaaaagaaugtcauca

SEQ ID NO: 79708 - DNA, 22 bp, Artificial Sequence
  Synthetic
gcatgagacutcgatgcttucc

SEQ ID NO: 79709 - DNA, 27 bp, Artificial Sequence
  Synthetic
gctgataccagaaccauttcaaaagut

SEQ ID NO: 79710 - DNA, 22 bp, Artificial Sequence
  Synthetic
gacaaauaggagccagccugaa

SEQ ID NO: 79711 - DNA, 26 bp, Artificial Sequence
  Synthetic
gctggagacauctcacattgttttug

SEQ ID NO: 79712 - DNA, 20 bp, Artificial Sequence
  Synthetic
ggcccatgauagccgtctut

SEQ ID NO: 79713 - DNA, 22 bp, Artificial Sequence
  Synthetic
cttcgggcacutacaagccuat

SEQ ID NO: 79714 - DNA, 25 bp, Artificial Sequence
  Synthetic
acgacttctucaacaagatcgucaa

SEQ ID NO: 79715 - DNA, 28 bp, Artificial Sequence
  Synthetic
gccctggatatuctttttgagactgaua

SEQ ID NO: 79716 - DNA, 25 bp, Artificial Sequence
  Synthetic
gcaagaguacacactcctcattugg

SEQ ID NO: 79717 - DNA, 28 bp, Artificial Sequence
  Synthetic
tcacaacccacugaggtatatgtauagg

SEQ ID NO: 79718 - DNA, 29 bp, Artificial Sequence
  Synthetic
ccttcttcacuctatgttgttatcuccaa

SEQ ID NO: 79719 - DNA, 22 bp, Artificial Sequence
  Synthetic
ctatgctggcauggtcttcugt

SEQ ID NO: 79720 - DNA, 20 bp, Artificial Sequence
  Synthetic
tcctccaccuccaggaacut

SEQ ID NO: 79721 - DNA, 19 bp, Artificial Sequence
  Synthetic
ctgtgtcuggccccctuag

SEQ ID NO: 79722 - DNA, 28 bp, Artificial Sequence
  Synthetic
gagttaggaaacagauacagaggucaag

SEQ ID NO: 79723 - DNA, 28 bp, Artificial Sequence
  Synthetic
cttctgagucgagagattcaactucaaa

SEQ ID NO: 79724 - DNA, 28 bp, Artificial Sequence
  Synthetic
tcctcttaccuacaacgacaactatgua

SEQ ID NO: 79725 - DNA, 27 bp, Artificial Sequence
  Synthetic
acccagaaaagagauttgttcctgaug

SEQ ID NO: 79726 - DNA, 24 bp, Artificial Sequence
  Synthetic
tgctgucccaggaaattctgtuac

SEQ ID NO: 79727 - DNA, 28 bp, Artificial Sequence
  Synthetic
agtgatcattguacatggctctcattut

SEQ ID NO: 79728 - DNA, 26 bp, Artificial Sequence
  Synthetic
attggttggaucaggattcagttuca

SEQ ID NO: 79729 - DNA, 29 bp, Artificial Sequence
  Synthetic
actacctcatcaucttcatctgagagtuc

SEQ ID NO: 79730 - DNA, 28 bp, Artificial Sequence
  Synthetic
tccccttgggautagtatctatctcuct

SEQ ID NO: 79731 - DNA, 28 bp, Artificial Sequence
  Synthetic
aagcttcaacaatutactctcccatgua

SEQ ID NO: 79732 - DNA, 23 bp, Artificial Sequence
  Synthetic
gtctgtgutatggctgugaccat

SEQ ID NO: 79733 - DNA, 23 bp, Artificial Sequence
  Synthetic
ccacautctcctcaugccaagac

SEQ ID NO: 79734 - DNA, 22 bp, Artificial Sequence
  Synthetic
agaccagugacgtgaagacauc

SEQ ID NO: 79735 - DNA, 20 bp, Artificial Sequence
  Synthetic
gcaatcutgcagcucagggt

SEQ ID NO: 79736 - DNA, 25 bp, Artificial Sequence
  Synthetic
acgtaaccaugaatcatccacucac

SEQ ID NO: 79737 - DNA, 28 bp, Artificial Sequence
  Synthetic
ggtaaatagcautgaggaagatgugact

SEQ ID NO: 79738 - DNA, 24 bp, Artificial Sequence
  Synthetic
gcaaacuctacccucacaaaaggt

SEQ ID NO: 79739 - DNA, 20 bp, Artificial Sequence
  Synthetic
gcaccugctgaacaguagca

SEQ ID NO: 79740 - DNA, 28 bp, Artificial Sequence
  Synthetic
catggagttgacuttctaaaaggtgcua

SEQ ID NO: 79741 - DNA, 28 bp, Artificial Sequence
  Synthetic
ggtaatgatgugcatctgcagttaauct

SEQ ID NO: 79742 - DNA, 25 bp, Artificial Sequence
  Synthetic
aatggatgucagctccatacucaac

SEQ ID NO: 79743 - DNA, 24 bp, Artificial Sequence
  Synthetic
gccatagtcauctgctacctguct

SEQ ID NO: 79744 - DNA, 29 bp, Artificial Sequence
  Synthetic
ctttgtctttcgugtcattaattgaugga

SEQ ID NO: 79745 - DNA, 22 bp, Artificial Sequence
  Synthetic
cgaaattgggccaugacagtug

SEQ ID NO: 79746 - DNA, 24 bp, Artificial Sequence
  Synthetic
cctccagccgugcttgaaaataua

SEQ ID NO: 79747 - DNA, 31 bp, Artificial Sequence
  Synthetic
tacatgtatcacuctgttaaatcttcttugt

SEQ ID NO: 79748 - DNA, 21 bp, Artificial Sequence
  Synthetic
gctgccaacautctggtguct

SEQ ID NO: 79749 - DNA, 22 bp, Artificial Sequence
  Synthetic
gcccagaccacccutaaatcuc

SEQ ID NO: 79750 - DNA, 21 bp, Artificial Sequence
  Synthetic
ttggtgtgtutgccagcttuc

SEQ ID NO: 79751 - DNA, 23 bp, Artificial Sequence
  Synthetic
acctgagctgugaaggacgauat

SEQ ID NO: 79752 - DNA, 22 bp, Artificial Sequence
  Synthetic
gctgcaaggugctttctcttuc

SEQ ID NO: 79753 - DNA, 19 bp, Artificial Sequence
  Synthetic
gcucagucaccccgagagt

SEQ ID NO: 79754 - DNA, 19 bp, Artificial Sequence
  Synthetic
gcgcuccacgatagcacug

SEQ ID NO: 79755 - DNA, 21 bp, Artificial Sequence
  Synthetic
caucccagaggcagcaaucat

SEQ ID NO: 79756 - DNA, 21 bp, Artificial Sequence
  Synthetic
ctgccataugctgtggttcuc

SEQ ID NO: 79757 - DNA, 21 bp, Artificial Sequence
  Synthetic
gcttgttccugcaacctccua

SEQ ID NO: 79758 - DNA, 21 bp, Artificial Sequence
  Synthetic
tcaaaucttcuggccaccaca

SEQ ID NO: 79759 - DNA, 22 bp, Artificial Sequence
  Synthetic
tcgtgcaggaagugaactucat

SEQ ID NO: 79760 - DNA, 28 bp, Artificial Sequence
  Synthetic
aaaattaaaggcaauagcaccaauagcc

SEQ ID NO: 79761 - DNA, 24 bp, Artificial Sequence
  Synthetic
ggagaacacuggacagctgaauaa

SEQ ID NO: 79762 - DNA, 23 bp, Artificial Sequence
  Synthetic
gaugttaatgugcaccccacaaa

SEQ ID NO: 79763 - DNA, 21 bp, Artificial Sequence
  Synthetic
gccccagagaaguagcuggat

SEQ ID NO: 79764 - DNA, 25 bp, Artificial Sequence
  Synthetic
gtgtgtctgcauacatctgatcuca

SEQ ID NO: 79765 - DNA, 23 bp, Artificial Sequence
  Synthetic
ccatcaugggactctccaucagt

SEQ ID NO: 79766 - DNA, 20 bp, Artificial Sequence
  Synthetic
ccaggctacuggtggttguc

SEQ ID NO: 79767 - DNA, 24 bp, Artificial Sequence
  Synthetic
actcttccagauccagggtgaaut

SEQ ID NO: 79768 - DNA, 22 bp, Artificial Sequence
  Synthetic
gactcccaggagagugctgaua

SEQ ID NO: 79769 - DNA, 26 bp, Artificial Sequence
  Synthetic
ctcaccttttuacctgatgctugaaa

SEQ ID NO: 79770 - DNA, 24 bp, Artificial Sequence
  Synthetic
gaccgaagaucaggcaccttaaut

SEQ ID NO: 79771 - DNA, 23 bp, Artificial Sequence
  Synthetic
gacagcacugccatauaaacaca

SEQ ID NO: 79772 - DNA, 22 bp, Artificial Sequence
  Synthetic
cagggtcugacccaatcttcug

SEQ ID NO: 79773 - DNA, 20 bp, Artificial Sequence
  Synthetic
cttgtcttucaggcccugct

SEQ ID NO: 79774 - DNA, 27 bp, Artificial Sequence
  Synthetic
ctagcttcttucttagtactgcuccat

SEQ ID NO: 79775 - DNA, 24 bp, Artificial Sequence
  Synthetic
gtggauttaaccatcuccccagag

SEQ ID NO: 79776 - DNA, 28 bp, Artificial Sequence
  Synthetic
ttaatacagacttugctaccaggactug

SEQ ID NO: 79777 - DNA, 21 bp, Artificial Sequence
  Synthetic
ccgggaauctguacgaaccat

SEQ ID NO: 79778 - DNA, 23 bp, Artificial Sequence
  Synthetic
gugataaggtctaugcccaccag

SEQ ID NO: 79779 - DNA, 25 bp, Artificial Sequence
  Synthetic
ccctgccacuagaaatatctgtcut

SEQ ID NO: 79780 - DNA, 19 bp, Artificial Sequence
  Synthetic
cgutgctcacucccaagca

SEQ ID NO: 79781 - DNA, 19 bp, Artificial Sequence
  Synthetic
cgtgggccucagtcucaag

SEQ ID NO: 79782 - DNA, 32 bp, Artificial Sequence
  Synthetic
tgaaagttaatauggagaagttaattgcugct

SEQ ID NO: 79783 - DNA, 27 bp, Artificial Sequence
  Synthetic
caccgtgaugccagctattatattuct

SEQ ID NO: 79784 - DNA, 21 bp, Artificial Sequence
  Synthetic
tcaatacgaggccugcccuat

SEQ ID NO: 79785 - DNA, 18 bp, Artificial Sequence
  Synthetic
cuccaccagctucagcgt

SEQ ID NO: 79786 - DNA, 27 bp, Artificial Sequence
  Synthetic
ccttttcugaaaccagcagacuaaact

SEQ ID NO: 79787 - DNA, 28 bp, Artificial Sequence
  Synthetic
gttgtgacattugctgatccaaaaguat

SEQ ID NO: 79788 - DNA, 20 bp, Artificial Sequence
  Synthetic
ctgagacacucaccctgcuc

SEQ ID NO: 79789 - DNA, 24 bp, Artificial Sequence
  Synthetic
aggttaacaacagggcutgaagut

SEQ ID NO: 79790 - DNA, 22 bp, Artificial Sequence
  Synthetic
gggtgtggugggaatcttgtua

SEQ ID NO: 79791 - DNA, 27 bp, Artificial Sequence
  Synthetic
catgaaatcagcaugcaaatguacact

SEQ ID NO: 79792 - DNA, 26 bp, Artificial Sequence
  Synthetic
tggagtgttcaugtgttatgccaaua

SEQ ID NO: 79793 - DNA, 32 bp, Artificial Sequence
  Synthetic
actgtctaataattucttctttcactacugcc

SEQ ID NO: 79794 - DNA, 19 bp, Artificial Sequence
  Synthetic
gaggacgagugggaggtuc

SEQ ID NO: 79795 - DNA, 20 bp, Artificial Sequence
  Synthetic
agctgtccugggactcucat

SEQ ID NO: 79796 - DNA, 21 bp, Artificial Sequence
  Synthetic
caggccautgucacagaggat

SEQ ID NO: 79797 - DNA, 21 bp, Artificial Sequence
  Synthetic
gttgtatcccccuccaagcuc

SEQ ID NO: 79798 - DNA, 22 bp, Artificial Sequence
  Synthetic
ctgaagtggcugccaaaaauca

SEQ ID NO: 79799 - DNA, 25 bp, Artificial Sequence
  Synthetic
gaggtaggcugtactttucccaaaa

SEQ ID NO: 79800 - DNA, 20 bp, Artificial Sequence
  Synthetic
cctctccccuctgacccuac

SEQ ID NO: 79801 - DNA, 24 bp, Artificial Sequence
  Synthetic
gggtatgaguctgaggucagaact

SEQ ID NO: 79802 - DNA, 26 bp, Artificial Sequence
  Synthetic
ctttcctaagugacctttctctcucc

SEQ ID NO: 79803 - DNA, 24 bp, Artificial Sequence
  Synthetic
gtacaaagaagcaggaugcctuac

SEQ ID NO: 79804 - DNA, 27 bp, Artificial Sequence
  Synthetic
tggtgagttugggattcttgtaatuct

SEQ ID NO: 79805 - DNA, 23 bp, Artificial Sequence
  Synthetic
acacagcuacaactggagcatut

SEQ ID NO: 79806 - DNA, 27 bp, Artificial Sequence
  Synthetic
catctgtaaauccagcagtaaatgcuc

SEQ ID NO: 79807 - DNA, 23 bp, Artificial Sequence
  Synthetic
gccacaaugtacaggaugcaact

SEQ ID NO: 79808 - DNA, 23 bp, Artificial Sequence
  Synthetic
gacutagtgcaaugcaagacagg

SEQ ID NO: 79809 - DNA, 28 bp, Artificial Sequence
  Synthetic
ttgacacccccauaatattttuccagaa

SEQ ID NO: 79810 - DNA, 21 bp, Artificial Sequence
  Synthetic
gggaaactgucttccccugat

SEQ ID NO: 79811 - DNA, 28 bp, Artificial Sequence
  Synthetic
gagtcagagaaugggagaagtaaugaag

SEQ ID NO: 79812 - DNA, 30 bp, Artificial Sequence; identical to SEQ ID NO: 13230
  Synthetic

SEQ ID NO: 79813 - DNA, 26 bp, Artificial Sequence
  Synthetic
acacagattugcaacttggatucaga

SEQ ID NO: 79814 - DNA, 24 bp, Artificial Sequence
  Synthetic
tttaaggaagugttgatggcguct

SEQ ID NO: 79815 - DNA, 23 bp, Artificial Sequence
  Synthetic
ggtagtgaggaauagggctucca

SEQ ID NO: 79816 - DNA, 25 bp, Artificial Sequence
  Synthetic
cattggtttuacagtgtgttgcugt

SEQ ID NO: 79817 - DNA, 27 bp, Artificial Sequence
  Synthetic
ccaaaagaccccaaaaucaacttccua

SEQ ID NO: 79818 - DNA, 28 bp, Artificial Sequence
  Synthetic
cttacagguctcgcttatuaaagcagaa

SEQ ID NO: 79819 - DNA, 26 bp, Artificial Sequence
  Synthetic
tgtcaacautatttcccaucacacct

SEQ ID NO: 79820 - DNA, 28 bp, Artificial Sequence
  Synthetic
ttgttcttatatuctgtgaatggcucct

SEQ ID NO: 79821 - DNA, 20 bp, Artificial Sequence
  Synthetic
tggaagcacugcgtttggua

SEQ ID NO: 79822 - DNA, 28 bp, Artificial Sequence
  Synthetic
gaatcaattatttucagcagtgggaugt

SEQ ID NO: 79823 - DNA, 25 bp, Artificial Sequence
  Synthetic
tgggagcuggaatgattttctucat

SEQ ID NO: 79824 - DNA, 27 bp, Artificial Sequence
  Synthetic
gacttttcgtuctcttcattcttuccc

SEQ ID NO: 79825 - DNA, 23 bp, Artificial Sequence
  Synthetic
gctcaaccagutcctcaaaguca

SEQ ID NO: 79826 - DNA, 21 bp, Artificial Sequence
  Synthetic
cacacugagcagcctccttua

SEQ ID NO: 79827 - DNA, 23 bp, Artificial Sequence
  Synthetic
cgactctccutttggtggctuac

SEQ ID NO: 79828 - DNA, 27 bp, Artificial Sequence
  Synthetic
ccatagggtauggagtatcttgguaca

SEQ ID NO: 79829 - DNA, 26 bp, Artificial Sequence
  Synthetic
gggacttucaccaggttcttttacut

SEQ ID NO: 79830 - DNA, 24 bp, Artificial Sequence
  Synthetic
ctgttttccuccattttcaucgca

SEQ ID NO: 79831 - DNA, 28 bp, Artificial Sequence
  Synthetic
gtttcttctgucggttttcaagttctut

SEQ ID NO: 79832 - DNA, 28 bp, Artificial Sequence
  Synthetic
cgagaaauatattgguggagaacgagaa

SEQ ID NO: 79833 - DNA, 25 bp, Artificial Sequence
  Synthetic
ctcaccagaauatgggacttucacc

SEQ ID NO: 79834 - DNA, 21 bp, Artificial Sequence
  Synthetic
gugcgcttugaacaagagcaa

SEQ ID NO: 79835 - DNA, 25 bp, Artificial Sequence
  Synthetic
gttaggugacccaaatucaggagag

SEQ ID NO: 79836 - DNA, 26 bp, Artificial Sequence
  Synthetic
cuatatccgaaagtugcaacgagaac

SEQ ID NO: 79837 - DNA, 26 bp, Artificial Sequence
  Synthetic
tgtcttgaagucggtaaaaagcagua

SEQ ID NO: 79838 - DNA, 22 bp, Artificial Sequence
  Synthetic
atggtctcttucttgtgggcut

SEQ ID NO: 79839 - DNA, 25 bp, Artificial Sequence
  Synthetic
gccactatgguaggagtgtaacuga

SEQ ID NO: 79840 - DNA, 22 bp, Artificial Sequence
  Synthetic
gcaagttcucttgcctttuggt

SEQ ID NO: 79841 - DNA, 28 bp, Artificial Sequence
  Synthetic
cttgctgtagatutgaaaggtggattug

SEQ ID NO: 79842 - DNA, 22 bp, Artificial Sequence
  Synthetic
cccaaagtgcuacaacctgugt

SEQ ID NO: 79843 - DNA, 29 bp, Artificial Sequence
  Synthetic
cctgtgaaattcugatctggttgaacuat

SEQ ID NO: 79844 - DNA, 25 bp, Artificial Sequence
  Synthetic
cgcaaagcacugaagttgaatttug

SEQ ID NO: 79845 - DNA, 27 bp, Artificial Sequence
  Synthetic
tctttgcttgagutgagcctttgatua

SEQ ID NO: 79846 - DNA, 26 bp, Artificial Sequence
  Synthetic
tttcttcaaccguccttggaaaagua

SEQ ID NO: 79847 - DNA, 24 bp, Artificial Sequence
  Synthetic
cuttctcttttucagccacaggaa

SEQ ID NO: 79848 - DNA, 28 bp, Artificial Sequence
  Synthetic
aacagcactgttautactacttgggtut

SEQ ID NO: 79849 - DNA, 28 bp, Artificial Sequence
  Synthetic
cacaagaaucgacgacaatcttaaacug

SEQ ID NO: 79850 - DNA, 23 bp, Artificial Sequence
  Synthetic
cgttaagagacgcugtaggucaa

SEQ ID NO: 79851 - DNA, 22 bp, Artificial Sequence
  Synthetic
ggaggagcugagacagcuagag

SEQ ID NO: 79852 - DNA, 23 bp, Artificial Sequence
  Synthetic
ggttgccttugtgtgaatgcuaa

SEQ ID NO: 79853 - DNA, 20 bp, Artificial Sequence
  Synthetic
caggagagauccugcaagca

SEQ ID NO: 79854 - DNA, 21 bp, Artificial Sequence
  Synthetic
gtgcgctgucagtacctguag

SEQ ID NO: 79855 - DNA, 21 bp, Artificial Sequence
  Synthetic
tggcaagtugaactgagcugt

SEQ ID NO: 79856 - DNA, 23 bp, Artificial Sequence
  Synthetic
tgtttgcccugtgcttactuaca

SEQ ID NO: 79857 - DNA, 22 bp, Artificial Sequence
  Synthetic
agaagggucaggcatcttcuca

SEQ ID NO: 79858 - DNA, 21 bp, Artificial Sequence
  Synthetic
gggccagggaaccuaggauaa

SEQ ID NO: 79859 - DNA, 25 bp, Artificial Sequence
  Synthetic
ggcactccacuatcttgcatgtaua

SEQ ID NO: 79860 - DNA, 24 bp, Artificial Sequence
  Synthetic
gccttcuaatgaggcuccaaaact

SEQ ID NO: 79861 - DNA, 28 bp, Artificial Sequence
  Synthetic
gcctgtgagugtaaaaacattugaagat

SEQ ID NO: 79862 - DNA, 28 bp, Artificial Sequence
  Synthetic
cttttacttcuggttcttcuaacgggat

SEQ ID NO: 79863 - DNA, 26 bp, Artificial Sequence
  Synthetic
ggtagccgauctgcagtcaaatauac

SEQ ID NO: 79864 - DNA, 28 bp, Artificial Sequence
  Synthetic
aatggttttctttuctcctccaaccuaa

SEQ ID NO: 79865 - DNA, 28 bp, Artificial Sequence
  Synthetic
ggtactcacgtutcctttaaccacauaa

SEQ ID NO: 79866 - DNA, 18 bp, Artificial Sequence
  Synthetic
gctcgcaagcgcugtgua

SEQ ID NO: 79867 - DNA, 28 bp, Artificial Sequence
  Synthetic
tcaagtcccaucttgattcaagacuaac

SEQ ID NO: 79868 - DNA, 25 bp, Artificial Sequence
  Synthetic
agtgctagagaugggagaagaaugt

SEQ ID NO: 79869 - DNA, 25 bp, Artificial Sequence
  Synthetic
acttagagtccuccaggtcatcaut

SEQ ID NO: 79870 - DNA, 24 bp, Artificial Sequence
  Synthetic
ttcacaggugattgaagugggaaa

SEQ ID NO: 79871 - DNA, 24 bp, Artificial Sequence
  Synthetic
cagcactcutcaacacaagugaac

SEQ ID NO: 79872 - DNA, 24 bp, Artificial Sequence
  Synthetic
gttcctgaaguagaggacccucat

SEQ ID NO: 79873 - DNA, 21 bp, Artificial Sequence
  Synthetic
actcatgccutcactgcucac

SEQ ID NO: 79874 - DNA, 24 bp, Artificial Sequence
  Synthetic
tgtatggtcacauctctcaccuca

SEQ ID NO: 79875 - DNA, 27 bp, Artificial Sequence
  Synthetic
tctccctugcaacaagtaaacagtuat

SEQ ID NO: 79876 - DNA, 27 bp, Artificial Sequence
  Synthetic
ccttatccugacgtaaacaccttugat

SEQ ID NO: 79877 - DNA, 28 bp, Artificial Sequence
  Synthetic
ggcaggcauttctgtaaaaguaaagaac

SEQ ID NO: 79878 - DNA, 20 bp, Artificial Sequence
  Synthetic
ccgggctcugttctcactut

SEQ ID NO: 79879 - DNA, 19 bp, Artificial Sequence
  Synthetic
cccagcugtcaccacucac

SEQ ID NO: 79880 - DNA, 28 bp, Artificial Sequence
  Synthetic
aagaaccccagucagttttcattaauca

SEQ ID NO: 79881 - DNA, 26 bp, Artificial Sequence
  Synthetic
caggaaaagacgaacutggaaaucat

SEQ ID NO: 79882 - DNA, 21 bp, Artificial Sequence
  Synthetic
accgccgugcctactagaaua

SEQ ID NO: 79883 - DNA, 25 bp, Artificial Sequence
  Synthetic
gcttgggattutgctttagtgcuaa

SEQ ID NO: 79884 - DNA, 17 bp, Artificial Sequence
  Synthetic
cgtccgcuggtgtgcut

SEQ ID NO: 79885 - DNA, 17 bp, Artificial Sequence
  Synthetic
ccucgccagggaaggug

SEQ ID NO: 79886 - DNA, 21 bp, Artificial Sequence
  Synthetic
cctttcacccaucaacccgua

SEQ ID NO: 79887 - DNA, 20 bp, Artificial Sequence
  Synthetic
ctgcgcagguagucaaaggt

SEQ ID NO: 79888 - DNA, 21 bp, Artificial Sequence
  Synthetic
gcagaacaugggctcagagut

SEQ ID NO: 79889 - DNA, 22 bp, Artificial Sequence
  Synthetic
gaaagtguccacccctagugac

SEQ ID NO: 79890 - DNA, 20 bp, Artificial Sequence
  Synthetic
tccugggcccaaacttccua

SEQ ID NO: 79891 - DNA, 26 bp, Artificial Sequence
  Synthetic
gttctattucaccaattggcauggaa

SEQ ID NO: 79892 - DNA, 23 bp, Artificial Sequence
  Synthetic
cgctugaggaaagacagagtgua

SEQ ID NO: 79893 - DNA, 21 bp, Artificial Sequence
  Synthetic
ccagugctcacttuccagagt

SEQ ID NO: 79894 - DNA, 20 bp, Artificial Sequence
  Synthetic
ccaactcaugaggctgugct

SEQ ID NO: 79895 - DNA, 22 bp, Artificial Sequence
  Synthetic
caagucaggcuggagagaaagg

SEQ ID NO: 79896 - DNA, 22 bp, Artificial Sequence
  Synthetic
acactgacugctcattgtcgut

SEQ ID NO: 79897 - DNA, 21 bp, Artificial Sequence
  Synthetic
ggttgtcugcctgcttcucag

SEQ ID NO: 79898 - DNA, 28 bp, Artificial Sequence
  Synthetic
ggagaaggactugataatctgtggaaut

SEQ ID NO: 79899 - DNA, 29 bp, Artificial Sequence
  Synthetic
acaggtttatcaacutatgaggaaaugct

SEQ ID NO: 79900 - DNA, 32 bp, Artificial Sequence
  Synthetic
aaaatcatcatgaauccaaagatgtactttut

SEQ ID NO: 79901 - DNA, 22 bp, Artificial Sequence
  Synthetic
cacagaugaaggugggaaggat

SEQ ID NO: 79902 - DNA, 27 bp, Artificial Sequence
  Synthetic
gggtaguaaaagtgaattcuggaccat

SEQ ID NO: 79903 - DNA, 27 bp, Artificial Sequence
  Synthetic
gcautgaatagttgaaugaagcacagt

SEQ ID NO: 79904 - DNA, 28 bp, Artificial Sequence
  Synthetic
aactgtgctgutggtaaatataatugga

SEQ ID NO: 79905 - DNA, 26 bp, Artificial Sequence
  Synthetic
tttctcctcguggctatgttguaaaa

SEQ ID NO: 79906 - DNA, 21 bp, Artificial Sequence
  Synthetic
tctgttcagguggaggaccut

SEQ ID NO: 79907 - DNA, 23 bp, Artificial Sequence
  Synthetic
ccactcccagautttggactgua

SEQ ID NO: 79908 - DNA, 24 bp, Artificial Sequence
  Synthetic
ctgttgctuccatttgcctatucc

SEQ ID NO: 79909 - DNA, 27 bp, Artificial Sequence
  Synthetic
ggcaaggttgaaucagcataaacauac

SEQ ID NO: 79910 - DNA, 21 bp, Artificial Sequence
  Synthetic
agtggtugccaccttgtuacc

SEQ ID NO: 79911 - DNA, 28 bp, Artificial Sequence
  Synthetic
gggagauccgacaatacagatugaaaaa

SEQ ID NO: 79912 - DNA, 19 bp, Artificial Sequence
  Synthetic
cggagtuggaagcgcgtua

SEQ ID NO: 79913 - DNA, 18 bp, Artificial Sequence
  Synthetic
cgcccgccccauactuac

SEQ ID NO: 79914 - DNA, 27 bp, Artificial Sequence
  Synthetic
ccaggagtcttutcttctttgctgaut

SEQ ID NO: 79915 - DNA, 28 bp, Artificial Sequence
  Synthetic
ccaatgcaacagacuttaaagaagtugt

SEQ ID NO: 79916 - DNA, 19 bp, Artificial Sequence
  Synthetic
gcugaagggcagctctuct

SEQ ID NO: 79917 - DNA, 17 bp, Artificial Sequence
  Synthetic
gccacuggcggagctuc

SEQ ID NO: 79918 - DNA, 18 bp, Artificial Sequence
  Synthetic
gcggagagutcggcauga

SEQ ID NO: 79919 - DNA, 22 bp, Artificial Sequence
  Synthetic
ggaagatgcucttctcctcgut

SEQ ID NO: 79920 - DNA, 20 bp, Artificial Sequence
  Synthetic
caguggctgaucgaccagat

SEQ ID NO: 79921 - DNA, 17 bp, Artificial Sequence
  Synthetic
cgtcctccucgcggtug

SEQ ID NO: 79922 - DNA, 23 bp, Artificial Sequence
  Synthetic
gtctgtgtggaaugctgatccut

SEQ ID NO: 79923 - DNA, 24 bp, Artificial Sequence
  Synthetic
ccaaagucacagagcttgatcucc

SEQ ID NO: 79924 - DNA, 21 bp, Artificial Sequence
  Synthetic
agactcacugcgttcttucgt

SEQ ID NO: 79925 - DNA, 20 bp, Artificial Sequence
  Synthetic
gccgggaaaagugatucgag

SEQ ID NO: 79926 - DNA, 21 bp, Artificial Sequence
  Synthetic
cccacaagcccugctaatcug

SEQ ID NO: 79927 - DNA, 25 bp, Artificial Sequence
  Synthetic
agtccaggagaaaautcacaugagg

SEQ ID NO: 79928 - DNA, 21 bp, Artificial Sequence
  Synthetic
aacggtggcutctacatcucc

SEQ ID NO: 79929 - DNA, 23 bp, Artificial Sequence
  Synthetic
gggaatggaguagggcatugaaa

SEQ ID NO: 79930 - DNA, 23 bp, Artificial Sequence
  Synthetic
tttctcgaucaggaccaucaacc

SEQ ID NO: 79931 - DNA, 26 bp, Artificial Sequence
  Synthetic
tgggaaaaaccacguctatggaaaut

SEQ ID NO: 79932 - DNA, 23 bp, Artificial Sequence
  Synthetic
cctccaacaucctagtcaacucc

SEQ ID NO: 79933 - DNA, 21 bp, Artificial Sequence
  Synthetic
accguacaagaagcucaagca

SEQ ID NO: 79934 - DNA, 33 bp, Artificial Sequence
  Synthetic
gccaatttaatttcuttacctataatggucaca

SEQ ID NO: 79935 - DNA, 28 bp, Artificial Sequence
  Synthetic
ccaaatttuacaaactccugaaccagaa

SEQ ID NO: 79936 - DNA, 28 bp, Artificial Sequence
  Synthetic
tctggttcaggaguttgtaaaattugga

SEQ ID NO: 79937 - DNA, 25 bp, Artificial Sequence
  Synthetic
acttacuagaaaatgcauggcccat

SEQ ID NO: 79938 - DNA, 25 bp, Artificial Sequence
  Synthetic
cttgaagtugctaaacagtuggcat

SEQ ID NO: 79939 - DNA, 28 bp, Artificial Sequence
  Synthetic
cagactatttuacatgaattggcaucca

SEQ ID NO: 79940 - DNA, 21 bp, Artificial Sequence
  Synthetic
gatccacuagggatgcacuca

SEQ ID NO: 79941 - DNA, 19 bp, Artificial Sequence
  Synthetic
tcccucagcgttcaugcag

SEQ ID NO: 79942 - DNA, 23 bp, Artificial Sequence
  Synthetic
gggtccaagutaggttaggugat

SEQ ID NO: 79943 - DNA, 22 bp, Artificial Sequence
  Synthetic
atctggaggagggaugggauac

SEQ ID NO: 79944 - DNA, 22 bp, Artificial Sequence
  Synthetic
aaatgttctucacagggcucca

SEQ ID NO: 79945 - DNA, 27 bp, Artificial Sequence
  Synthetic
acaactctgaauggcaaagatacacut

SEQ ID NO: 79946 - DNA, 19 bp, Artificial Sequence
  Synthetic
cagccuccguggacaagag

SEQ ID NO: 79947 - DNA, 21 bp, Artificial Sequence
  Synthetic
ctcccugctcagaaguccaat

SEQ ID NO: 79948 - DNA, 20 bp, Artificial Sequence
  Synthetic
ggcauatcugaggcccaact

SEQ ID NO: 79949 - DNA, 27 bp, Artificial Sequence
  Synthetic
ggaaagcaaaacauattgctactugga

SEQ ID NO: 79950 - DNA, 22 bp, Artificial Sequence
  Synthetic
gcatgggacugtctctgguaga

SEQ ID NO: 79951 - DNA, 20 bp, Artificial Sequence
  Synthetic
ggacacaccaggcuacucac

SEQ ID NO: 79952 - DNA, 25 bp, Artificial Sequence
  Synthetic
tgttaacatguctgtgttgctucca

SEQ ID NO: 79953 - DNA, 22 bp, Artificial Sequence
  Synthetic
agatgattgugggctgcacuaa

SEQ ID NO: 79954 - DNA, 20 bp, Artificial Sequence
  Synthetic
gccaggacaccagugtaugt

SEQ ID NO: 79955 - DNA, 27 bp, Artificial Sequence
  Synthetic
gcaaggctttauagacaatgtgtucca

SEQ ID NO: 79956 - DNA, 22 bp, Artificial Sequence
  Synthetic
ccaaactccuggaagtggacug

SEQ ID NO: 79957 - DNA, 28 bp, Artificial Sequence
  Synthetic
acatcccacagugcataaataaccauat

SEQ ID NO: 79958 - DNA, 27 bp, Artificial Sequence
  Synthetic
cataattgtgugctgtacttactugcc

SEQ ID NO: 79959 - DNA, 23 bp, Artificial Sequence
  Synthetic
gcactcagggugatagctgttuc

SEQ ID NO: 79960 - DNA, 21 bp, Artificial Sequence
  Synthetic
cagccucaggaaggttguagg

SEQ ID NO: 79961 - DNA, 25 bp, Artificial Sequence
  Synthetic
ctgtcgtaagucaggatttctggut

SEQ ID NO: 79962 - DNA, 18 bp, Artificial Sequence
  Synthetic
gacaggutgugggccagt

SEQ ID NO: 79963 - DNA, 19 bp, Artificial Sequence
  Synthetic
gctcgaggugacccuggat

SEQ ID NO: 79964 - DNA, 24 bp, Artificial Sequence
  Synthetic
gcagctgcuggagtgtaataagug

SEQ ID NO: 79965 - DNA, 26 bp, Artificial Sequence
  Synthetic
cataagtccaauagtcacatgguggt

SEQ ID NO: 79966 - DNA, 24 bp, Artificial Sequence
  Synthetic
acggcaaaccacugatatctucat

SEQ ID NO: 79967 - DNA, 27 bp, Artificial Sequence
  Synthetic
tcaaagctgugatacagacugaagaaa

SEQ ID NO: 79968 - DNA, 24 bp, Artificial Sequence
  Synthetic
ggaugagtctauagaggagacggt

SEQ ID NO: 79969 - DNA, 20 bp, Artificial Sequence
  Synthetic
ggcucgggaacacaugaagt

SEQ ID NO: 79970 - DNA, 28 bp, Artificial Sequence
  Synthetic
aaaacttaagagacgautggaggagaug

SEQ ID NO: 79971 - DNA, 27 bp, Artificial Sequence
  Synthetic
ggagtcgugtacattacugagaacaaa

SEQ ID NO: 79972 - DNA, 21 bp, Artificial Sequence
  Synthetic
acatccugcaccagcaacuat

SEQ ID NO: 79973 - DNA, 23 bp, Artificial Sequence
  Synthetic
ctaaagctctcucacttcgccut

SEQ ID NO: 79974 - DNA, 24 bp, Artificial Sequence
  Synthetic
gccatttcugttttcctguagcaa

SEQ ID NO: 79975 - DNA, 28 bp, Artificial Sequence
  Synthetic
ctctgcattauaagcagtgccaaaaaua

SEQ ID NO: 79976 - DNA, 25 bp, Artificial Sequence
  Synthetic
gacatggaaucaccacagttttgut

SEQ ID NO: 79977 - DNA, 28 bp, Artificial Sequence
  Synthetic
agtttaggaaccugaaaaaugaccaact

SEQ ID NO: 79978 - DNA, 25 bp, Artificial Sequence
  Synthetic
tcttaggtgaucgaatggaggcuat

SEQ ID NO: 79979 - DNA, 28 bp, Artificial Sequence
  Synthetic
aaagaaatcagacuccacttttcctuca

SEQ ID NO: 79980 - DNA, 29 bp, Artificial Sequence
  Synthetic
gtggagtctgauttcttttgtcaatuagg

SEQ ID NO: 79981 - DNA, 28 bp, Artificial Sequence
  Synthetic
tttgctcatgcacutacaatttctuagg

SEQ ID NO: 79982 - DNA, 20 bp, Artificial Sequence
  Synthetic
cttgacggcugcccttctua

SEQ ID NO: 79983 - DNA, 24 bp, Artificial Sequence
  Synthetic
gcatgcaggagauttggttucaaa

SEQ ID NO: 79984 - DNA, 22 bp, Artificial Sequence
  Synthetic
atgcagaggacuacacgggaua

SEQ ID NO: 79985 - DNA, 28 bp, Artificial Sequence
  Synthetic
acccacctctgugaataattttcaagut

SEQ ID NO: 79986 - DNA, 28 bp, Artificial Sequence
  Synthetic
agactgtgaaagcacuaaaccactuaaa

SEQ ID NO: 79987 - DNA, 29 bp, Artificial Sequence
  Synthetic
acagtgacacugtaattttcaauaaccgt

SEQ ID NO: 79988 - DNA, 23 bp, Artificial Sequence
  Synthetic
gtgactgtggucttttcctguga

SEQ ID NO: 79989 - DNA, 28 bp, Artificial Sequence
  Synthetic
ctcatgtgcctutaaagaaaaacagcut

SEQ ID NO: 79990 - DNA, 28 bp, Artificial Sequence
  Synthetic
gggagagtgauacagattcattugaaga

SEQ ID NO: 79991 - DNA, 32 bp, Artificial Sequence
  Synthetic
ataaaaatcagttcauttcagaaagaagcuag

SEQ ID NO: 79992 - DNA, 28 bp, Artificial Sequence
  Synthetic
tggcagagtaaaacautatttccaccut

SEQ ID NO: 79993 - DNA, 28 bp, Artificial Sequence
  Synthetic
gttaccttgcauatctgagatgtguact

SEQ ID NO: 79994 - DNA, 28 bp, Artificial Sequence
  Synthetic
acataaaacttcugcagtacacatcuca

SEQ ID NO: 79995 - DNA, 33 bp, Artificial Sequence
  Synthetic
tggtcttaacccuatatattccctttattauct

SEQ ID NO: 79996 - DNA, 29 bp, Artificial Sequence
  Synthetic
ttttggtttgtttuctgcttcgtattcut

SEQ ID NO: 79997 - DNA, 24 bp, Artificial Sequence
  Synthetic
agctttcctuggtggctttatcuc

SEQ ID NO: 79998 - DNA, 27 bp, Artificial Sequence
  Synthetic
tcatttactguaggttggatgcaucac

SEQ ID NO: 79999 - DNA, 22 bp, Artificial Sequence
  Synthetic
caggacuggccagaatuaggat

SEQ ID NO: 80000 - DNA, 28 bp, Artificial Sequence
  Synthetic
ggaaagctaugctattcagtatcuccaa

SEQ ID NO: 80001 - DNA, 31 bp, Artificial Sequence
  Synthetic
atctcttagcuggaatagacaaaaucaaaca

SEQ ID NO: 80002 - DNA, 23 bp, Artificial Sequence
  Synthetic
tgtcatugccactgtctttucct

SEQ ID NO: 80003 - DNA, 23 bp, Artificial Sequence
  Synthetic
acctgguaagaaaagcucagcaa

SEQ ID NO: 80004 - DNA, 24 bp, Artificial Sequence
  Synthetic
gagttggcccuagactuagaagac

SEQ ID NO: 80005 - DNA, 27 bp, Artificial Sequence
  Synthetic
ggctctaaaaugctctgttcucaaaaa

SEQ ID NO: 80006 - DNA, 23 bp, Artificial Sequence
  Synthetic
gctgaggucctttttgtguggaa

SEQ ID NO: 80007 - DNA, 23 bp, Artificial Sequence
  Synthetic
caacaaaagaagucaccgtgugg

SEQ ID NO: 80008 - DNA, 21 bp, Artificial Sequence
  Synthetic
tgaatuccgtgctugggaact

SEQ ID NO: 80009 - DNA, 26 bp, Artificial Sequence
  Synthetic
cctgcaagaaggutgtttatggguat

SEQ ID NO: 80010 - DNA, 26 bp, Artificial Sequence
  Synthetic
attcttcagcacutctaactcagcut

SEQ ID NO: 80011 - DNA, 22 bp, Artificial Sequence
  Synthetic
atcaggtcaugtgactggtgug

SEQ ID NO: 80012 - DNA, 26 bp, Artificial Sequence
  Synthetic
cagaagcatttuctcttaccctugga

SEQ ID NO: 80013 - DNA, 28 bp, Artificial Sequence
  Synthetic
gtgtggttttacauaggccatttttcut

SEQ ID NO: 80014 - DNA, 32 bp, Artificial Sequence
  Synthetic
cagatctgtattuatttcagtgttactuacct

SEQ ID NO: 80015 - DNA, 27 bp, Artificial Sequence
  Synthetic
gactctgaagatguacctatggtccua

SEQ ID NO: 80016 - DNA, 25 bp, Artificial Sequence
  Synthetic
agctcagacacuctatcaucaccaa

SEQ ID NO: 80017 - DNA, 19 bp, Artificial Sequence
  Synthetic
cagccgguggauggagaag

SEQ ID NO: 80018 - DNA, 28 bp, Artificial Sequence
  Synthetic
gtctactgttcuagaaggcaaaucacat

SEQ ID NO: 80019 - DNA, 28 bp, Artificial Sequence
  Synthetic
gtggacaggtuttgaaagatatttgugt

SEQ ID NO: 80020 - DNA, 23 bp, Artificial Sequence
  Synthetic
tcagatttguacaaccccagcuc

SEQ ID NO: 80021 - DNA, 22 bp, Artificial Sequence
  Synthetic
gatguaagggaagcccagucat

SEQ ID NO: 80022 - DNA, 22 bp, Artificial Sequence
  Synthetic
gccaguggactacuaaaaccca

SEQ ID NO: 80023 - DNA, 24 bp, Artificial Sequence
  Synthetic
gcgctcgutctcctcuaaacaaaa

SEQ ID NO: 80024 - DNA, 23 bp, Artificial Sequence
  Synthetic
ggaggcctugaatagaaagcuca

SEQ ID NO: 80025 - DNA, 21 bp, Artificial Sequence
  Synthetic
gutgcaggtctugcagaggat

SEQ ID NO: 80026 - DNA, 21 bp, Artificial Sequence
  Synthetic
tgttgugagccctuccacaag

SEQ ID NO: 80027 - DNA, 28 bp, Artificial Sequence
  Synthetic
ccagctgtagtuctattaccaagtttug

SEQ ID NO: 80028 - DNA, 22 bp, Artificial Sequence
  Synthetic
gagauaaccaaggctgcuaccc

SEQ ID NO: 80029 - DNA, 28 bp, Artificial Sequence
  Synthetic
tctttttcttgugttcgttcttcucagt

SEQ ID NO: 80030 - DNA, 23 bp, Artificial Sequence
  Synthetic
caaaauggaagcagcagtucaga

SEQ ID NO: 80031 - DNA, 27 bp, Artificial Sequence
  Synthetic
tccatcagcugttttcgttgtaauagt

SEQ ID NO: 80032 - DNA, 21 bp, Artificial Sequence
  Synthetic
tggatgtcaguctgccctuct

SEQ ID NO: 80033 - DNA, 24 bp, Artificial Sequence
  Synthetic
acttagctuggaagctgacaagug

SEQ ID NO: 80034 - DNA, 22 bp, Artificial Sequence
  Synthetic
cataagccaugtggctcatgut

SEQ ID NO: 80035 - DNA, 25 bp, Artificial Sequence
  Synthetic
tggtgtugagacaggattactcuga

SEQ ID NO: 80036 - DNA, 22 bp, Artificial Sequence
  Synthetic
tggtgacgccacuaaacactuc

SEQ ID NO: 80037 - DNA, 21 bp, Artificial Sequence
  Synthetic
agtggatcccugatcccacut

SEQ ID NO: 80038 - DNA, 25 bp, Artificial Sequence
  Synthetic
ggagtacttcuttgggttgactuct

SEQ ID NO: 80039 - DNA, 21 bp, Artificial Sequence
  Synthetic
tcagttcucccaccttcugct

SEQ ID NO: 80040 - DNA, 27 bp, Artificial Sequence
  Synthetic
gagttattucccctaactucacaagca

SEQ ID NO: 80041 - DNA, 28 bp, Artificial Sequence
  Synthetic
ttcctgaauagcagaaaaggtctcatut

SEQ ID NO: 80042 - DNA, 20 bp, Artificial Sequence
  Synthetic
gctgctgucaccacctguag

SEQ ID NO: 80043 - DNA, 20 bp, Artificial Sequence
  Synthetic
cacctgcugcgattcuacga

SEQ ID NO: 80044 - DNA, 20 bp, Artificial Sequence
  Synthetic
tcctcccauttgcagaugcc

SEQ ID NO: 80045 - DNA, 23 bp, Artificial Sequence
  Synthetic
gggtgaguaagagactgatcugt

SEQ ID NO: 80046 - DNA, 22 bp, Artificial Sequence
  Synthetic
cttgaggccuttctuacccaga

SEQ ID NO: 80047 - DNA, 28 bp, Artificial Sequence
  Synthetic
caattacctgtuaatcaaggcaaacuca

SEQ ID NO: 80048 - DNA, 21 bp, Artificial Sequence
  Synthetic
cctgtttugcactggccttua

SEQ ID NO: 80049 - DNA, 27 bp, Artificial Sequence
  Synthetic
gaggtaaccacauagctgatcugaaaa

SEQ ID NO: 80050 - DNA, 24 bp, Artificial Sequence
  Synthetic
gttcactgauaccacctuaaggct

SEQ ID NO: 80051 - DNA, 28 bp, Artificial Sequence
  Synthetic
accgctcaaatgutatctgggaaatuaa

SEQ ID NO: 80052 - DNA, 21 bp, Artificial Sequence
  Synthetic
agggcaaggccccautatauc

SEQ ID NO: 80053 - DNA, 25 bp, Artificial Sequence
  Synthetic
gataatggcagutctcacacacauc

SEQ ID NO: 80054 - DNA, 27 bp, Artificial Sequence
  Synthetic
agctccatacuctctttacguagaact

SEQ ID NO: 80055 - DNA, 28 bp, Artificial Sequence
  Synthetic
aatttgtctgctgauttctcaacctcua

SEQ ID NO: 80056 - DNA, 25 bp, Artificial Sequence
  Synthetic
gataacattugagcggtguggaaaa

SEQ ID NO: 80057 - DNA, 31 bp, Artificial Sequence
  Synthetic
gtttcctctttutaaagccttaatuccagat

SEQ ID NO: 80058 - DNA, 27 bp, Artificial Sequence
  Synthetic
agaggttcctuaagatctcgattucct

SEQ ID NO: 80059 - DNA, 21 bp, Artificial Sequence
  Synthetic
acagcacaugcatcttuccct

SEQ ID NO: 80060 - DNA, 25 bp, Artificial Sequence
  Synthetic
ggaagatgacuggatggaaaacauc

SEQ ID NO: 80061 - DNA, 23 bp, Artificial Sequence
  Synthetic
gcattctcuacccaactcccuca

SEQ ID NO: 80062 - DNA, 22 bp, Artificial Sequence
  Synthetic
ccactgtgutgtaaggccuact

SEQ ID NO: 80063 - DNA, 28 bp, Artificial Sequence
  Synthetic
gatagtcttggauctttgctcgaauaca

SEQ ID NO: 80064 - DNA, 28 bp, Artificial Sequence
  Synthetic
ccaaagtttgtgautccacatttctcut

SEQ ID NO: 80065 - DNA, 28 bp, Artificial Sequence
  Synthetic
cactcuggagagagaacaaataaauggt

SEQ ID NO: 80066 - DNA, 28 bp, Artificial Sequence
  Synthetic
ccctagcuacaagacattctuaccaaaa

SEQ ID NO: 80067 - DNA, 26 bp, Artificial Sequence
  Synthetic
cttaagtttcaaguttctggcagugg

SEQ ID NO: 80068 - DNA, 27 bp, Artificial Sequence
  Synthetic
gacttgaccacutatgttgtcuaaggt

SEQ ID NO: 80069 - DNA, 28 bp, Artificial Sequence
  Synthetic
aagtcacagagcutaatatttccactuc

SEQ ID NO: 80070 - DNA, 23 bp, Artificial Sequence
  Synthetic
aaaggaatuggccactgtguact

SEQ ID NO: 80071 - DNA, 24 bp, Artificial Sequence
  Synthetic
gctcugaaggaaacaccgacauac

SEQ ID NO: 80072 - DNA, 27 bp, Artificial Sequence
  Synthetic
tgtcttgcagauatcaaacctuccaat

SEQ ID NO: 80073 - DNA, 22 bp, Artificial Sequence
  Synthetic
ctaucaagcaagaaggccugga

SEQ ID NO: 80074 - DNA, 28 bp, Artificial Sequence
  Synthetic
gcagatttatucagcaattcagccaaug

SEQ ID NO: 80075 - DNA, 26 bp, Artificial Sequence
  Synthetic
accacttccaggutcttttactucaa

SEQ ID NO: 80076 - DNA, 25 bp, Artificial Sequence
  Synthetic
caguctgccttcuacacagagaaat

SEQ ID NO: 80077 - DNA, 28 bp, Artificial Sequence
  Synthetic
ctgttctgtcagugtctcactttcttua

SEQ ID NO: 80078 - DNA, 25 bp, Artificial Sequence
  Synthetic
gaautcagtggucaagagggaaaca

SEQ ID NO: 80079 - DNA, 25 bp, Artificial Sequence
  Synthetic
tcaaaugggagaagtgcaauaccat

SEQ ID NO: 80080 - DNA, 22 bp, Artificial Sequence
  Synthetic
cttgcacttcucagagggctua

SEQ ID NO: 80081 - DNA, 22 bp, Artificial Sequence
  Synthetic
cagtcagacagacugcctctug

SEQ ID NO: 80082 - DNA, 21 bp, Artificial Sequence
  Synthetic
cactgacutgattcccuggct

SEQ ID NO: 80083 - DNA, 24 bp, Artificial Sequence
  Synthetic
cagtctgtacugtgccacaucaat

SEQ ID NO: 80084 - DNA, 22 bp, Artificial Sequence
  Synthetic
acacaggtccugaagctctcua

SEQ ID NO: 80085 - DNA, 23 bp, Artificial Sequence
  Synthetic
ctcttaucggagaagaacguggt

SEQ ID NO: 80086 - DNA, 22 bp, Artificial Sequence
  Synthetic
gtgtggtucagagggactguag

SEQ ID NO: 80087 - DNA, 22 bp, Artificial Sequence
  Synthetic
gtctagugaggaaggcaugcaa

SEQ ID NO: 80088 - DNA, 22 bp, Artificial Sequence
  Synthetic
ggcaccttcaugccagagauat

SEQ ID NO: 80089 - DNA, 25 bp, Artificial Sequence
  Synthetic
tctcagttccutagcataacccuca

SEQ ID NO: 80090 - DNA, 24 bp, Artificial Sequence
  Synthetic
gccaagccaaagucacagatttua

SEQ ID NO: 80091 - DNA, 27 bp, Artificial Sequence
  Synthetic
ggtcacaacagaugtgaaagagaucag

SEQ ID NO: 80092 - DNA, 21 bp, Artificial Sequence
  Synthetic
agatttguttggcgugccaag

SEQ ID NO: 80093 - DNA, 27 bp, Artificial Sequence
  Synthetic
tctctgacaaaagugaatgaggguaga

SEQ ID NO: 80094 - DNA, 28 bp, Artificial Sequence
  Synthetic
ggaggaaggcaaauttgtgatgatgaua

SEQ ID NO: 80095 - DNA, 26 bp, Artificial Sequence
  Synthetic
gatcttgtgctuctccctcagataug

SEQ ID NO: 80096 - DNA, 27 bp, Artificial Sequence
  Synthetic
ctttcctctagguaataaaaggccuga

SEQ ID NO: 80097 - DNA, 28 bp, Artificial Sequence
  Synthetic
ggaagcaacagccuttggattatatcua

SEQ ID NO: 80098 - DNA, 22 bp, Artificial Sequence
  Synthetic
ggcaggcagacugagatuaaga

SEQ ID NO: 80099 - DNA, 22 bp, Artificial Sequence
  Synthetic
gaataggcgugggtgatgtuca

SEQ ID NO: 80100 - DNA, 24 bp, Artificial Sequence
  Synthetic
ctggtaaagagacgugggaaauga

SEQ ID NO: 80101 - DNA, 25 bp, Artificial Sequence
  Synthetic
gcctcttcugtaagacacucacaat

SEQ ID NO: 80102 - DNA, 25 bp, Artificial Sequence
  Synthetic
ggtttgaatucagtactccctugga

SEQ ID NO: 80103 - DNA, 19 bp, Artificial Sequence
  Synthetic
gcctcgaucgacgtcctut

SEQ ID NO: 80104 - DNA, 20 bp, Artificial Sequence
  Synthetic
tgctcccccuttaaccugga

SEQ ID NO: 80105 - DNA, 23 bp, Artificial Sequence
  Synthetic
cctccccttugttagcactacug

SEQ ID NO: 80106 - DNA, 23 bp, Artificial Sequence
  Synthetic
ggagtaactauttcccccauccc

SEQ ID NO: 80107 - DNA, 22 bp, Artificial Sequence
  Synthetic
gaaccaaguactcagcctucct

SEQ ID NO: 80108 - DNA, 25 bp, Artificial Sequence
  Synthetic
agtgtcattuccgatcactttugga

SEQ ID NO: 80109 - DNA, 28 bp, Artificial Sequence
  Synthetic
ggcacttcatautaatacctcccugaaa

SEQ ID NO: 80110 - DNA, 21 bp, Artificial Sequence
  Synthetic
ccccaggaaccuccaguaaag

SEQ ID NO: 80111 - DNA, 25 bp, Artificial Sequence
  Synthetic
catctcagagugaaacacccactua

SEQ ID NO: 80112 - DNA, 25 bp, Artificial Sequence
  Synthetic
tgattcttccuctcactcucaggat

SEQ ID NO: 80113 - DNA, 32 bp, Artificial Sequence
  Synthetic
ccaaaatgtttctauatttcaatgtctccaut

SEQ ID NO: 80114 - DNA, 24 bp, Artificial Sequence
  Synthetic
gttcccugagcgttaacgaguaaa

SEQ ID NO: 80115 - DNA, 19 bp, Artificial Sequence
  Synthetic
cgacucgcagctgcctuac

SEQ ID NO: 80116 - DNA, 29 bp, Artificial Sequence
  Synthetic
aggaagtgatttutgacagaagtattugt

SEQ ID NO: 80117 - DNA, 22 bp, Artificial Sequence
  Synthetic
tctggctgcutcttgtgttuct

SEQ ID NO: 80118 - DNA, 20 bp, Artificial Sequence
  Synthetic
gccagaaccaucaccugcat

SEQ ID NO: 80119 - DNA, 25 bp, Artificial Sequence
  Synthetic
ggttgaaaagcugggaaaagtuagg

SEQ ID NO: 80120 - DNA, 28 bp, Artificial Sequence
  Synthetic
gttggcagtaatutttgctttctttcut

SEQ ID NO: 80121 - DNA, 25 bp, Artificial Sequence
  Synthetic
aggctgtggtutcaatgtagactuc

SEQ ID NO: 80122 - DNA, 20 bp, Artificial Sequence
  Synthetic
cccccucuaacagcaaccaa

SEQ ID NO: 80123 - DNA, 24 bp, Artificial Sequence
  Synthetic
ctgactucacctgcacatuaaagg

SEQ ID NO: 80124 - DNA, 23 bp, Artificial Sequence
  Synthetic
ccaaccagggacgcuattaugaa

SEQ ID NO: 80125 - DNA, 22 bp, Artificial Sequence
  Synthetic
ggatacaucccaggagggtuct

SEQ ID NO: 80126 - DNA, 20 bp, Artificial Sequence
  Synthetic
accaggguacactcctccug

SEQ ID NO: 80127 - DNA, 24 bp, Artificial Sequence
  Synthetic
acccctgtatuctcctccttaugt

SEQ ID NO: 80128 - DNA, 28 bp, Artificial Sequence
  Synthetic
ttttctctttatuccccactgtcttcuc

SEQ ID NO: 80129 - DNA, 20 bp, Artificial Sequence
  Synthetic
cgtctuccagtgccatucgt

SEQ ID NO: 80130 - DNA, 21 bp, Artificial Sequence
  Synthetic
cctccactucttcaaggccua

SEQ ID NO: 80131 - DNA, 21 bp, Artificial Sequence
  Synthetic
gtgtugaaggagguggacact

SEQ ID NO: 80132 - DNA, 21 bp, Artificial Sequence
  Synthetic
ctgugaccagccatuccaact

SEQ ID NO: 80133 - DNA, 23 bp, Artificial Sequence
  Synthetic
cacccctugagggaataatuggt

SEQ ID NO: 80134 - DNA, 22 bp, Artificial Sequence
  Synthetic
tctgtgcuatggctugaaggag

SEQ ID NO: 80135 - DNA, 21 bp, Artificial Sequence
  Synthetic
cgcccccacuagggatgtaut

SEQ ID NO: 80136 - DNA, 24 bp, Artificial Sequence
  Synthetic
ctataacacucagccagttccugt

SEQ ID NO: 80137 - DNA, 20 bp, Artificial Sequence
  Synthetic
ctggcccugctgcataguag

SEQ ID NO: 80138 - DNA, 21 bp, Artificial Sequence
  Synthetic
cctcucacagacccagaagug

SEQ ID NO: 80139 - DNA, 22 bp, Artificial Sequence
  Synthetic
cctcctgguccacagaacaaug

SEQ ID NO: 80140 - DNA, 20 bp, Artificial Sequence
  Synthetic
gcctaccaucggctctguct

SEQ ID NO: 80141 - DNA, 26 bp, Artificial Sequence
  Synthetic
acuaaggtggaucaacgagaagagaa

SEQ ID NO: 80142 - DNA, 22 bp, Artificial Sequence
  Synthetic
agattuccccaaacacagccut

SEQ ID NO: 80143 - DNA, 21 bp, Artificial Sequence
  Synthetic
gctgagttucgatcggaucct

SEQ ID NO: 80144 - DNA, 19 bp, Artificial Sequence
  Synthetic
accagagcucggaucccat

SEQ ID NO: 80145 - DNA, 19 bp, Artificial Sequence
  Synthetic
caggctucgccgagtaguc

SEQ ID NO: 80146 - DNA, 21 bp, Artificial Sequence
  Synthetic
cacctgcaccagauccttcut

SEQ ID NO: 80147 - DNA, 21 bp, Artificial Sequence
  Synthetic
gtctgagagcucggatctugg

SEQ ID NO: 80148 - DNA, 28 bp, Artificial Sequence
  Synthetic
tgatatataguccatccttucagccgat

SEQ ID NO: 80149 - DNA, 24 bp, Artificial Sequence
  Synthetic
aggcatccugaactttcccaauac

SEQ ID NO: 80150 - DNA, 23 bp, Artificial Sequence
  Synthetic
ccttcccttcucaggtgctatuc

SEQ ID NO: 80151 - DNA, 25 bp, Artificial Sequence
  Synthetic
acaaaggcutaccctatugaacacc

SEQ ID NO: 80152 - DNA, 28 bp, Artificial Sequence
  Synthetic
aggcaguctattgataaaucagaagcaa

SEQ ID NO: 80153 - DNA, 31 bp, Artificial Sequence
  Synthetic
ctatgaagtactataugtgatgcaaccauct

SEQ ID NO: 80154 - DNA, 26 bp, Artificial Sequence
  Synthetic
tgtgtctgugacaaatttgactgcua

SEQ ID NO: 80155 - DNA, 22 bp, Artificial Sequence
  Synthetic
ggtaagugagagcuggagacag

SEQ ID NO: 80156 - DNA, 24 bp, Artificial Sequence
  Synthetic
ttctcttugccagtccatctucaa

SEQ ID NO: 80157 - DNA, 30 bp, Artificial Sequence
  Synthetic
tgagtcagaataaauctcacctgataguga

SEQ ID NO: 80158 - DNA, 25 bp, Artificial Sequence
  Synthetic
gtgccaccuaaaacattgttaugct

SEQ ID NO: 80159 - DNA, 33 bp, Artificial Sequence
  Synthetic
aaacagtatgtctautacaataacaaaaagugg

SEQ ID NO: 80160 - DNA, 23 bp, Artificial Sequence
  Synthetic
atctggcucgggatctagtacuc

SEQ ID NO: 80161 - DNA, 26 bp, Artificial Sequence
  Synthetic
acccacctatuacctgtcacatgaua

SEQ ID NO: 80162 - DNA, 21 bp, Artificial Sequence
  Synthetic
ctggcccuctccaagugaaat

SEQ ID NO: 80163 - DNA, 28 bp, Artificial Sequence
  Synthetic
cacacctcttcuatttttgcttttccut

SEQ ID NO: 80164 - DNA, 27 bp, Artificial Sequence
  Synthetic
gcttttctaacuctctttgacugcaga

SEQ ID NO: 80165 - DNA, 26 bp, Artificial Sequence
  Synthetic
ggattguggcacagagattctgauac

SEQ ID NO: 80166 - DNA, 27 bp, Artificial Sequence
  Synthetic
acaaccuaaccagaaaattcctuggat

SEQ ID NO: 80167 - DNA, 28 bp, Artificial Sequence
  Synthetic
cttccttaccacauaggagaatgtacug

SEQ ID NO: 80168 - DNA, 21 bp, Artificial Sequence
  Synthetic
gtggctugggctactacagua

SEQ ID NO: 80169 - DNA, 21 bp, Artificial Sequence
  Synthetic
tcatgccugggtagtgttugg

SEQ ID NO: 80170 - DNA, 19 bp, Artificial Sequence
  Synthetic
agctgtcugctccccatug

SEQ ID NO: 80171 - DNA, 24 bp, Artificial Sequence
  Synthetic
acagaggacccuctttcatuacct

SEQ ID NO: 80172 - DNA, 17 bp, Artificial Sequence
  Synthetic
ctcagcagccuccucgt

SEQ ID NO: 80173 - DNA, 17 bp, Artificial Sequence
  Synthetic
gccgcucuccccaaaca

SEQ ID NO: 80174 - DNA, 21 bp, Artificial Sequence
  Synthetic
tcatcgtccucagcctctuca

SEQ ID NO: 80175 - DNA, 18 bp, Artificial Sequence
  Synthetic
gggttccucgccccctua

SEQ ID NO: 80176 - DNA, 26 bp, Artificial Sequence
  Synthetic
tgtgaggaattuctcctttgttguga

SEQ ID NO: 80177 - DNA, 23 bp, Artificial Sequence
  Synthetic
gttcagcacuttgatggtuccag

SEQ ID NO: 80178 - DNA, 21 bp, Artificial Sequence
  Synthetic
agccacagccgaaagutauca

SEQ ID NO: 80179 - DNA, 26 bp, Artificial Sequence
  Synthetic
gttcaggaattcutccagctttctuc

SEQ ID NO: 80180 - DNA, 20 bp, Artificial Sequence
  Synthetic
caagccagugtcctgacuga

SEQ ID NO: 80181 - DNA, 23 bp, Artificial Sequence
  Synthetic
ccctttgccuacttctccctcua

SEQ ID NO: 80182 - DNA, 23 bp, Artificial Sequence
  Synthetic
ggaggttcuctggatcaagucct

SEQ ID NO: 80183 - DNA, 28 bp, Artificial Sequence
  Synthetic
catcttcctcucttgtccatttctuacc

SEQ ID NO: 80184 - DNA, 19 bp, Artificial Sequence
  Synthetic
cccagccugttaggcctua

SEQ ID NO: 80185 - DNA, 28 bp, Artificial Sequence
  Synthetic
tcttgattcattuccttctttcctucca

SEQ ID NO: 80186 - DNA, 23 bp, Artificial Sequence
  Synthetic
tgctccagggucattttatuggg

SEQ ID NO: 80187 - DNA, 25 bp, Artificial Sequence
  Synthetic
tttcttacctgutctctcccugagt

SEQ ID NO: 80188 - DNA, 32 bp, Artificial Sequence
  Synthetic
tctttctttagcaaacuaacttaccttaccuc

SEQ ID NO: 80189 - DNA, 27 bp, Artificial Sequence
  Synthetic
gttgcttcaccautatgtactgaccua

SEQ ID NO: 80190 - DNA, 33 bp, Artificial Sequence
  Synthetic
ttctcattatttauacccttttaagaatgcuct

SEQ ID NO: 80191 - DNA, 26 bp, Artificial Sequence
  Synthetic
ggtgacttttagugcatccaagatug

SEQ ID NO: 80192 - DNA, 30 bp, Artificial Sequence
  Synthetic
agcatttttcatuaaagcatttcaccacut

SEQ ID NO: 80193 - DNA, 19 bp, Artificial Sequence
  Synthetic
cacaauccgctgggucgat

SEQ ID NO: 80194 - DNA, 28 bp, Artificial Sequence
  Synthetic
actaaaattgutgattgtgaucgaccca

SEQ ID NO: 80195 - DNA, 28 bp, Artificial Sequence
  Synthetic
gttagacttaaaagagcugaagcaccua

SEQ ID NO: 80196 - DNA, 23 bp, Artificial Sequence
  Synthetic
ttccatgcaggucatgcactaut

SEQ ID NO: 80197 - DNA, 22 bp, Artificial Sequence
  Synthetic
cgcaagcccucactgttttuac

SEQ ID NO: 80198 - DNA, 28 bp, Artificial Sequence
  Synthetic
ggtgcttcagcucttttaagtcuaacat

SEQ ID NO: 80199 - DNA, 33 bp, Artificial Sequence
  Synthetic
ttatacaaattaagtatuacgaatttgcccgut

SEQ ID NO: 80200 - DNA, 23 bp, Artificial Sequence
  Synthetic
aaattggaagucgttucaacgga

SEQ ID NO: 80201 - DNA, 24 bp, Artificial Sequence
  Synthetic
cctguatcacagacuggcaacaag

SEQ ID NO: 80202 - DNA, 20 bp, Artificial Sequence
  Synthetic
gcgatgcacgguaccatcut

SEQ ID NO: 80203 - DNA, 27 bp, Artificial Sequence
  Synthetic
accctgtaauggatcttaaagcatucc

SEQ ID NO: 80204 - DNA, 25 bp, Artificial Sequence
  Synthetic
cattccacccaaagcaugttatcut

SEQ ID NO: 80205 - DNA, 32 bp, Artificial Sequence
  Synthetic
cacatgttttggaaaugactgtaaaataugga

SEQ ID NO: 80206 - DNA, 20 bp, Artificial Sequence
  Synthetic
aactugggccagcaactcut

SEQ ID NO: 80207 - DNA, 21 bp, Artificial Sequence
  Synthetic
ttcacgtcacuggtctgtucc

SEQ ID NO: 80208 - DNA, 21 bp, Artificial Sequence
  Synthetic
ccaccaccagcucctagtcut

SEQ ID NO: 80209 - DNA, 22 bp, Artificial Sequence
  Synthetic
tttcccctcuctaccctcucag

SEQ ID NO: 80210 - DNA, 26 bp, Artificial Sequence
  Synthetic
cccattgacuggaggaaatugagaaa

SEQ ID NO: 80211 - DNA, 25 bp, Artificial Sequence
  Synthetic
gaacacgatcauctgtccttgttug

SEQ ID NO: 80212 - DNA, 27 bp, Artificial Sequence
  Synthetic
ggaatttatgcguatgattggcaauga

SEQ ID NO: 80213 - DNA, 28 bp, Artificial Sequence
  Synthetic
agaaaatgcatgacuaccctggatuaaa

SEQ ID NO: 80214 - DNA, 27 bp, Artificial Sequence
  Synthetic
gactctgtttuccttcaggatacauca

SEQ ID NO: 80215 - DNA, 19 bp, Artificial Sequence
  Synthetic
gcagugtugggagcaaggg

SEQ ID NO: 80216 - DNA, 23 bp, Artificial Sequence
  Synthetic
gaaaguctuccaggcaaggagaa

SEQ ID NO: 80217 - DNA, 29 bp, Artificial Sequence
  Synthetic
gattgatgaagaautttgtaggcgatuga

SEQ ID NO: 80218 - DNA, 28 bp, Artificial Sequence
  Synthetic
atcacaaacuaagaagcaatgaggcuat

SEQ ID NO: 80219 - DNA, 25 bp, Artificial Sequence
  Synthetic
aggaagatgguaagggatacuggag

SEQ ID NO: 80220 - DNA, 21 bp, Artificial Sequence
  Synthetic
ccaccaucccaccacattcua

SEQ ID NO: 80221 - DNA, 23 bp, Artificial Sequence
  Synthetic
ccatggccutttgtgttctucag

SEQ ID NO: 80222 - DNA, 23 bp, Artificial Sequence
  Synthetic
gggccctcautctagttcctuct

SEQ ID NO: 80223 - DNA, 26 bp, Artificial Sequence
  Synthetic
gatacataggugatgaggatgugcaa

SEQ ID NO: 80224 - DNA, 22 bp, Artificial Sequence
  Synthetic
ctggtttctggugggaccatua

SEQ ID NO: 80225 - DNA, 20 bp, Artificial Sequence
  Synthetic
caugcaccggaaaagcgaug

SEQ ID NO: 80226 - DNA, 23 bp, Artificial Sequence
  Synthetic
cacttgcttcutcactccaguca

SEQ ID NO: 80227 - DNA, 25 bp, Artificial Sequence
  Synthetic
aggttttctgtugtttggtttgcut

SEQ ID NO: 80228 - DNA, 20 bp, Artificial Sequence
  Synthetic
tgcgtcggacuctctgtcua

SEQ ID NO: 80229 - DNA, 20 bp, Artificial Sequence
  Synthetic
caaacccugcactcaccuga

SEQ ID NO: 80230 - DNA, 21 bp, Artificial Sequence
  Synthetic
cataaggtcugccgaagccut

SEQ ID NO: 80231 - DNA, 24 bp, Artificial Sequence
  Synthetic
gggagcaaagcaagugtcuaaagt

SEQ ID NO: 80232 - DNA, 26 bp, Artificial Sequence
  Synthetic
tttgaatttccauggtgtgguaagga

SEQ ID NO: 80233 - DNA, 27 bp, Artificial Sequence
  Synthetic
caggttccagacauggctatttttaug

SEQ ID NO: 80234 - DNA, 25 bp, Artificial Sequence
  Synthetic
ttgtaaagatgccugtcatgcagua

SEQ ID NO: 80235 - DNA, 21 bp, Artificial Sequence
  Synthetic
tcacgcaggugaaacagugag

SEQ ID NO: 80236 - DNA, 20 bp, Artificial Sequence
  Synthetic
caccgggaaggccuatcauc

SEQ ID NO: 80237 - DNA, 21 bp, Artificial Sequence
  Synthetic
gtgacgagagaguaggtugcc

SEQ ID NO: 80238 - DNA, 22 bp, Artificial Sequence
  Synthetic
cctactcuggaccccatctuct

SEQ ID NO: 80239 - DNA, 23 bp, Artificial Sequence
  Synthetic
acagccccauctttcttaagcug

SEQ ID NO: 80240 - DNA, 22 bp, Artificial Sequence
  Synthetic
tcgaggaaaagucatcgcctuc

SEQ ID NO: 80241 - DNA, 22 bp, Artificial Sequence
  Synthetic
ggcctctcucttacccactuca

SEQ ID NO: 80242 - DNA, 20 bp, Artificial Sequence
  Synthetic
cctccagagugggctcctua

SEQ ID NO: 80243 - DNA, 20 bp, Artificial Sequence
  Synthetic
tcccgagtuctgggcattuc

SEQ ID NO: 80244 - DNA, 21 bp, Artificial Sequence
  Synthetic
gaatgccugctgaugccaaat

SEQ ID NO: 80245 - DNA, 28 bp, Artificial Sequence
  Synthetic
ctggtcccauaaatctctcatcttugaa

SEQ ID NO: 80246 - DNA, 27 bp, Artificial Sequence
  Synthetic
gatcttctgaacuagtgtgttggugaa

SEQ ID NO: 80247 - DNA, 24 bp, Artificial Sequence
  Synthetic
gaucttctatctgucggacaggga

SEQ ID NO: 80248 - DNA, 22 bp, Artificial Sequence
  Synthetic
cctctgcugtgtactcuccact

SEQ ID NO: 80249 - DNA, 24 bp, Artificial Sequence
  Synthetic
gccatggctutctgtgctaaaaug

SEQ ID NO: 80250 - DNA, 22 bp, Artificial Sequence
  Synthetic
cctcagtcutcttggagcucct

SEQ ID NO: 80251 - DNA, 28 bp, Artificial Sequence
  Synthetic
acactccctttugccataagaactttua

SEQ ID NO: 80252 - DNA, 28 bp, Artificial Sequence
  Synthetic
ccaagttatagacugtttttgcttgugt

SEQ ID NO: 80253 - DNA, 22 bp, Artificial Sequence
  Synthetic
caggctgccaagucattcagua

SEQ ID NO: 80254 - DNA, 28 bp, Artificial Sequence
  Synthetic
tgttttctctuacaggcaaatgttcuga

SEQ ID NO: 80255 - DNA, 28 bp, Artificial Sequence
  Synthetic
gtaaagatacaccugaagaactggauct

SEQ ID NO: 80256 - DNA, 26 bp, Artificial Sequence
  Synthetic
tccaggagagcaaauaaagtaaugcc

SEQ ID NO: 80257 - DNA, 23 bp, Artificial Sequence
  Synthetic
ggccacagaacugaaacatctuc

SEQ ID NO: 80258 - DNA, 28 bp, Artificial Sequence
  Synthetic
agaggtttgagutcttcttcuagacact

SEQ ID NO: 80259 - DNA, 27 bp, Artificial Sequence
  Synthetic
agtgacatugagaacagagagaauggt

SEQ ID NO: 80260 - DNA, 28 bp, Artificial Sequence
  Synthetic
ctggaaaugccaattctaugaagcaaat

SEQ ID NO: 80261 - DNA, 25 bp, Artificial Sequence
  Synthetic
ccacaagcttuagaagcagcaauac

SEQ ID NO: 80262 - DNA, 24 bp, Artificial Sequence
  Synthetic
gggagtatgutgcagaagaaauct

SEQ ID NO: 80263 - DNA, 22 bp, Artificial Sequence
  Synthetic
acgccagccauacaagcatuaa

SEQ ID NO: 80264 - DNA, 17 bp, Artificial Sequence
  Synthetic
cgcgcguagccaucgaa

SEQ ID NO: 80265 - DNA, 21 bp, Artificial Sequence
  Synthetic
gcgcaccuggaagactacuac

SEQ ID NO: 80266 - DNA, 17 bp, Artificial Sequence
  Synthetic
ggguagccggtcaucca

SEQ ID NO: 80267 - DNA, 18 bp, Artificial Sequence
  Synthetic
cuccacccccaugagcac

SEQ ID NO: 80268 - DNA, 17 bp, Artificial Sequence
  Synthetic
tccaggugcgccttcug

SEQ ID NO: 80269 - DNA, 22 bp, Artificial Sequence
  Synthetic
agugaaaaaggaaccgguggag

SEQ ID NO: 80270 - DNA, 18 bp, Artificial Sequence
  Synthetic
gctgaugatgcggucggt

SEQ ID NO: 80271 - DNA, 22 bp, Artificial Sequence
  Synthetic
tcagaacuggcaaugagcaact

SEQ ID NO: 80272 - DNA, 28 bp, Artificial Sequence
  Synthetic
ggttccttttucacttcaaacttcauca

SEQ ID NO: 80273 - DNA, 18 bp, Artificial Sequence
  Synthetic
ctctccugcagcccauct

SEQ ID NO: 80274 - DNA, 25 bp, Artificial Sequence
  Synthetic
aactttgggcuttacgttactguct

SEQ ID NO: 80275 - DNA, 27 bp, Artificial Sequence
  Synthetic
aatgtccacugttttgtugagcaaaat

SEQ ID NO: 80276 - DNA, 26 bp, Artificial Sequence
  Synthetic
acctctgcuagccagacaactataut

SEQ ID NO: 80277 - DNA, 27 bp, Artificial Sequence
  Synthetic
attcttgaauagaggaatggcggauag

SEQ ID NO: 80278 - DNA, 28 bp, Artificial Sequence
  Synthetic
ccaagccautaaaauagaagaggaagca

SEQ ID NO: 80279 - DNA, 28 bp, Artificial Sequence
  Synthetic
cttgctatcttgacugtctcgatcatua

SEQ ID NO: 80280 - DNA, 27 bp, Artificial Sequence
  Synthetic
ccaaggaaccuactggtgtcatgtaua

SEQ ID NO: 80281 - DNA, 28 bp, Artificial Sequence
  Synthetic
tcctttgcttaatuaaacgttgcagtut

SEQ ID NO: 80282 - DNA, 22 bp, Artificial Sequence
  Synthetic
gcaagagaucagcugaaggaca

SEQ ID NO: 80283 - DNA, 27 bp, Artificial Sequence
  Synthetic
gaaataaattatgggaugccagtcgut

SEQ ID NO: 80284 - DNA, 23 bp, Artificial Sequence
  Synthetic
caaguacccccuccgacaaaaat

SEQ ID NO: 80285 - DNA, 28 bp, Artificial Sequence
  Synthetic
ctgcatggauggagtattctttaguaca

SEQ ID NO: 80286 - DNA, 24 bp, Artificial Sequence
  Synthetic
cagtgatutcttcagguggagagg

SEQ ID NO: 80287 - DNA, 27 bp, Artificial Sequence
  Synthetic
ctagtatcactcuctgtcccatcauca

SEQ ID NO: 80288 - DNA, 28 bp, Artificial Sequence
  Synthetic
cacaggttcauaacacaacatcuagaga

SEQ ID NO: 80289 - DNA, 23 bp, Artificial Sequence
  Synthetic
tgtgtgttgguctcgatcatucc

SEQ ID NO: 80290 - DNA, 25 bp, Artificial Sequence
  Synthetic
caaaaatctcacagutggatggugt

SEQ ID NO: 80291 - DNA, 28 bp, Artificial Sequence
  Synthetic
ccagcatctucaggtctatcaatcttua

SEQ ID NO: 80292 - DNA, 24 bp, Artificial Sequence
  Synthetic
cctgcctucagacattatggacut

SEQ ID NO: 80293 - DNA, 26 bp, Artificial Sequence
  Synthetic
cccatgtctttutcacgattactguc

SEQ ID NO: 80294 - DNA, 22 bp, Artificial Sequence
  Synthetic
caccuccattugagagggcaaa

SEQ ID NO: 80295 - DNA, 28 bp, Artificial Sequence
  Synthetic
tctcctatctcuggaactagatcccaua

SEQ ID NO: 80296 - DNA, 28 bp, Artificial Sequence
  Synthetic
gccagatuccaaaaagaaatgguaaaga

SEQ ID NO: 80297 - DNA, 24 bp, Artificial Sequence
  Synthetic
ttgtccctgugttttaactcugct

SEQ ID NO: 80298 - DNA, 27 bp, Artificial Sequence
  Synthetic
ccaaagatggauaactgccattctgua

SEQ ID NO: 80299 - DNA, 28 bp, Artificial Sequence
  Synthetic
ggagctcagtatuataggtgtccaguaa

SEQ ID NO: 80300 - DNA, 25 bp, Artificial Sequence
  Synthetic
gaatcttggugaaggattgggtcut

SEQ ID NO: 80301 - DNA, 24 bp, Artificial Sequence
  Synthetic
gatcagauggtagctcuagaggca

SEQ ID NO: 80302 - DNA, 27 bp, Artificial Sequence
  Synthetic
caacagaucatccattaucaacgaaca

SEQ ID NO: 80303 - DNA, 24 bp, Artificial Sequence
  Synthetic
gcttcaaguttccttccucaccag

SEQ ID NO: 80304 - DNA, 23 bp, Artificial Sequence
  Synthetic
catggaugcagaccacatctcua

SEQ ID NO: 80305 - DNA, 22 bp, Artificial Sequence
  Synthetic
cgggccaggacuatcaguagaa

SEQ ID NO: 80306 - DNA, 20 bp, Artificial Sequence
  Synthetic
ggaaccuggtcaggugacaa

SEQ ID NO: 80307 - DNA, 28 bp, Artificial Sequence
  Synthetic
ggcctttaucaccaatcttaucagaaga

SEQ ID NO: 80308 - DNA, 23 bp, Artificial Sequence
  Synthetic
cucagcagaggaacagttugagt

SEQ ID NO: 80309 - DNA, 24 bp, Artificial Sequence
  Synthetic
tcacttucagaggaggcuacagat

SEQ ID NO: 80310 - DNA, 23 bp, Artificial Sequence
  Synthetic
gccaacgaccaugtaacaatgut

SEQ ID NO: 80311 - DNA, 28 bp, Artificial Sequence
  Synthetic
ctcattttccauttttagaggtgucagt

SEQ ID NO: 80312 - DNA, 23 bp, Artificial Sequence
  Synthetic
cagaaccagaaguatgugcccaa

SEQ ID NO: 80313 - DNA, 22 bp, Artificial Sequence
  Synthetic
gggtcacuccattuggaagagt

SEQ ID NO: 80314 - DNA, 27 bp, Artificial Sequence
  Synthetic
ggagaagagaguaaccaucacagaaaa

SEQ ID NO: 80315 - DNA, 23 bp, Artificial Sequence
  Synthetic
tugctctacugaaccacaaggag

SEQ ID NO: 80316 - DNA, 23 bp, Artificial Sequence
  Synthetic
gcacaucaacaauaagccaggat

SEQ ID NO: 80317 - DNA, 20 bp, Artificial Sequence
  Synthetic
gtcctggaacugacgcacua

SEQ ID NO: 80318 - DNA, 23 bp, Artificial Sequence
  Synthetic
atgcagccacuttatgttcucca

SEQ ID NO: 80319 - DNA, 23 bp, Artificial Sequence
  Synthetic
gagaagtuggcaagcttggatut

SEQ ID NO: 80320 - DNA, 22 bp, Artificial Sequence
  Synthetic
ggccccagguatccaacttuac

SEQ ID NO: 80321 - DNA, 24 bp, Artificial Sequence
  Synthetic
agaagauggagaggauggagaacc

SEQ ID NO: 80322 - DNA, 24 bp, Artificial Sequence
  Synthetic
gcaaacuaccacaaccccuacaag

SEQ ID NO: 80323 - DNA, 28 bp, Artificial Sequence
  Synthetic
ctgctggctagcuttgattaaaagatug

SEQ ID NO: 80324 - DNA, 21 bp, Artificial Sequence
  Synthetic
ccttcccugcagctacucaaa

SEQ ID NO: 80325 - DNA, 23 bp, Artificial Sequence
  Synthetic
ttcttgaguccagaggauggagt

SEQ ID NO: 80326 - DNA, 22 bp, Artificial Sequence
  Synthetic
ggctttaucctcagctgugcaa

SEQ ID NO: 80327 - DNA, 23 bp, Artificial Sequence
  Synthetic
aactttgtgcutcttgccatucc

SEQ ID NO: 80328 - DNA, 26 bp, Artificial Sequence
  Synthetic
ggtaccccagauattggctcaauaag

SEQ ID NO: 80329 - DNA, 21 bp, Artificial Sequence
  Synthetic
tctgtgatguccccagttgug

SEQ ID NO: 80330 - DNA, 21 bp, Artificial Sequence
  Synthetic
tcucaccctuaccacaggact

SEQ ID NO: 80331 - DNA, 23 bp, Artificial Sequence
  Synthetic
gctgatgttuggtgggaaacuac

SEQ ID NO: 80332 - DNA, 22 bp, Artificial Sequence
  Synthetic
agacctcaguaccacaguagcc

SEQ ID NO: 80333 - DNA, 27 bp, Artificial Sequence
  Synthetic
ggagggtgugaagttaatcaatgucat

SEQ ID NO: 80334 - DNA, 22 bp, Artificial Sequence
  Synthetic
gggcuaggagacaagaatcuga

SEQ ID NO: 80335 - DNA, 20 bp, Artificial Sequence
  Synthetic
acggcuacaggctgaaccua

SEQ ID NO: 80336 - DNA, 22 bp, Artificial Sequence
  Synthetic
ccgccaagutcaggaatgttuc

SEQ ID NO: 80337 - DNA, 22 bp, Artificial Sequence
  Synthetic
tgatagtgtucgtctgctuccc

SEQ ID NO: 80338 - DNA, 24 bp, Artificial Sequence
  Synthetic
ggtttcagcugcctcuagacaaag

SEQ ID NO: 80339 - DNA, 26 bp, Artificial Sequence
  Synthetic
agcctagctaguatttggatctcuca

SEQ ID NO: 80340 - DNA, 22 bp, Artificial Sequence
  Synthetic
gtagtuaggaggctccucaggt

SEQ ID NO: 80341 - DNA, 20 bp, Artificial Sequence
  Synthetic
cucacagagagggccaucag

SEQ ID NO: 80342 - DNA, 25 bp, Artificial Sequence
  Synthetic
ccaaaagagcagucacatctucaga

SEQ ID NO: 80343 - DNA, 20 bp, Artificial Sequence
  Synthetic
catcctggcacugctgguag

SEQ ID NO: 80344 - DNA, 17 bp, Artificial Sequence
  Synthetic
ccgcacaggcagucuct

SEQ ID NO: 80345 - DNA, 18 bp, Artificial Sequence
  Synthetic
gcctccucagctcuccga

SEQ ID NO: 80346 - DNA, 24 bp, Artificial Sequence
  Synthetic
gccccttcugatgtggtttcuaat

SEQ ID NO: 80347 - DNA, 28 bp, Artificial Sequence
  Synthetic
ccggttcaaaauacatgatgctagatut

SEQ ID NO: 80348 - DNA, 19 bp, Artificial Sequence
  Synthetic
gggatgaggugggatuggg

SEQ ID NO: 80349 - DNA, 18 bp, Artificial Sequence
  Synthetic
agcacggccucctcuaca

SEQ ID NO: 80350 - DNA, 21 bp, Artificial Sequence
  Synthetic
gcataacagccgcutcaccut

SEQ ID NO: 80351 - DNA, 23 bp, Artificial Sequence
  Synthetic
ctattaggagcguctaccgtcug

SEQ ID NO: 80352 - DNA, 28 bp, Artificial Sequence
  Synthetic
cgaactguccccaacatcauaaaaagat

SEQ ID NO: 80353 - DNA, 21 bp, Artificial Sequence
  Synthetic
ccctgatgugaggtggcuagt

SEQ ID NO: 80354 - DNA, 19 bp, Artificial Sequence
  Synthetic
aaatgcaggcucgagcuca

SEQ ID NO: 80355 - DNA, 22 bp, Artificial Sequence
  Synthetic
ccgtgagaucgagagttgtugt

SEQ ID NO: 80356 - DNA, 22 bp, Artificial Sequence
  Synthetic
gcatcaugcagacctaaccugt

SEQ ID NO: 80357 - DNA, 22 bp, Artificial Sequence
  Synthetic
gagaaagggugtcgtccaucag

SEQ ID NO: 80358 - DNA, 25 bp, Artificial Sequence
  Synthetic
cttagacaaggucttccttccacut

SEQ ID NO: 80359 - DNA, 24 bp, Artificial Sequence
  Synthetic
ctacctcaccugtttcctgtaugg

SEQ ID NO: 80360 - DNA, 24 bp, Artificial Sequence
  Synthetic
atgggatccaaacuggaagacauc

SEQ ID NO: 80361 - DNA, 20 bp, Artificial Sequence
  Synthetic
aatgcagugcagggaggaut

SEQ ID NO: 80362 - DNA, 25 bp, Artificial Sequence
  Synthetic
tgttgcaaatgugaaggcaaauagg

SEQ ID NO: 80363 - DNA, 26 bp, Artificial Sequence
  Synthetic
tgcttagaacuattgccatuggagag

SEQ ID NO: 80364 - DNA, 23 bp, Artificial Sequence
  Synthetic
gcacttugaacatccucagcact

SEQ ID NO: 80365 - DNA, 28 bp, Artificial Sequence
  Synthetic
caacacctttgguagtagcattttctut

SEQ ID NO: 80366 - DNA, 22 bp, Artificial Sequence
  Synthetic
gggtcacauacttcctccucct

SEQ ID NO: 80367 - DNA, 26 bp, Artificial Sequence
  Synthetic
aactgaagccauaacaacagtctuct

SEQ ID NO: 80368 - DNA, 25 bp, Artificial Sequence
  Synthetic
gcagtctgtaugttcagagtgcaut

SEQ ID NO: 80369 - DNA, 27 bp, Artificial Sequence
  Synthetic
tcagacctatauggatttggagcauca

SEQ ID NO: 80370 - DNA, 26 bp, Artificial Sequence
  Synthetic
cgttgatgcuccaaatccatauaggt

SEQ ID NO: 80371 - DNA, 28 bp, Artificial Sequence
  Synthetic
tgtcatggucgatatttaacuccaacaa

SEQ ID NO: 80372 - DNA, 28 bp, Artificial Sequence
  Synthetic
gattgttgaauatgaagcatuccccaaa

SEQ ID NO: 80373 - DNA, 23 bp, Artificial Sequence
  Synthetic
ccagggcaagguccatttctuac

SEQ ID NO: 80374 - DNA, 28 bp, Artificial Sequence
  Synthetic
tttccatcagtuagttgtgatctugaca

SEQ ID NO: 80375 - DNA, 25 bp, Artificial Sequence
  Synthetic
gctgcagttugctaagttggaguaa

SEQ ID NO: 80376 - DNA, 25 bp, Artificial Sequence
  Synthetic
gactatgggcutgttttcuccagat

SEQ ID NO: 80377 - DNA, 22 bp, Artificial Sequence
  Synthetic
ggtgacccaaacacugattcug

SEQ ID NO: 80378 - DNA, 20 bp, Artificial Sequence
  Synthetic
gcattgtccucaggcacgua

SEQ ID NO: 80379 - DNA, 20 bp, Artificial Sequence
  Synthetic
tgcttgtccugtgctctcuc

SEQ ID NO: 80380 - DNA, 21 bp, Artificial Sequence
  Synthetic
cccaaccccutgcctcataut

SEQ ID NO: 80381 - DNA, 27 bp, Artificial Sequence
  Synthetic
aguaaattccaaggugaaggaaaccag

SEQ ID NO: 80382 - DNA, 23 bp, Artificial Sequence
  Synthetic
tcagtacaaaauggccagtgcua

SEQ ID NO: 80383 - DNA, 22 bp, Artificial Sequence
  Synthetic
tcagagccacutctaggtcucc

SEQ ID NO: 80384 - DNA, 28 bp, Artificial Sequence
  Synthetic
cacagtuaaaactagtccucgaaaacct

SEQ ID NO: 80385 - DNA, 28 bp, Artificial Sequence
  Synthetic
tgatcttatcuccagatttggtctcuga

SEQ ID NO: 80386 - DNA, 21 bp, Artificial Sequence
  Synthetic
ccaaggaagcagacuagugct

SEQ ID NO: 80387 - DNA, 21 bp, Artificial Sequence
  Synthetic
cgctcttgucagcatcucgat

SEQ ID NO: 80388 - DNA, 28 bp, Artificial Sequence
  Synthetic
gatccatctgtgutttcccctctaaaua

SEQ ID NO: 80389 - DNA, 26 bp, Artificial Sequence
  Synthetic
actctgaaatgucctttccatgtgut

SEQ ID NO: 80390 - DNA, 20 bp, Artificial Sequence
  Synthetic
cgattgttutcgccacucca

SEQ ID NO: 80391 - DNA, 25 bp, Artificial Sequence
  Synthetic
ccugaagaagatgtuccagcagaag

SEQ ID NO: 80392 - DNA, 28 bp, Artificial Sequence
  Synthetic
ccaccttcccuggagtaaaaaucaaaat

SEQ ID NO: 80393 - DNA, 24 bp, Artificial Sequence
  Synthetic
ttgagaggagagaguttaccugct

SEQ ID NO: 80394 - DNA, 17 bp, Artificial Sequence
  Synthetic
tuggaccucggcccaac

SEQ ID NO: 80395 - DNA, 19 bp, Artificial Sequence
  Synthetic
gctggcaacccucttguca

SEQ ID NO: 80396 - DNA, 23 bp, Artificial Sequence
  Synthetic
cgttucagcaagccacaaagaut

SEQ ID NO: 80397 - DNA, 27 bp, Artificial Sequence
  Synthetic
gggtctttaucctttctgttgauggag

SEQ ID NO: 80398 - DNA, 24 bp, Artificial Sequence
  Synthetic
acaaautguacgacggagaggaag

SEQ ID NO: 80399 - DNA, 20 bp, Artificial Sequence
  Synthetic
ccttcgagggcuttgtcuga

SEQ ID NO: 80400 - DNA, 26 bp, Artificial Sequence
  Synthetic
gtctgtaaccutgcctagtaaucgaa

SEQ ID NO: 80401 - DNA, 23 bp, Artificial Sequence
  Synthetic
ccttccactucttgtcctcaugg

SEQ ID NO: 80402 - DNA, 19 bp, Artificial Sequence
  Synthetic
cccgaggagcuguccaaag

SEQ ID NO: 80403 - DNA, 28 bp, Artificial Sequence
  Synthetic
caggauacaaagcagaactactcugaat

SEQ ID NO: 80404 - DNA, 20 bp, Artificial Sequence
  Synthetic
cgagaugcugacaagagcgt

SEQ ID NO: 80405 - DNA, 24 bp, Artificial Sequence
  Synthetic
ttcaccaacaaccutctcttugga

SEQ ID NO: 80406 - DNA, 25 bp, Artificial Sequence
  Synthetic
tctgaaccaagauctccttcucact

SEQ ID NO: 80407 - DNA, 21 bp, Artificial Sequence
  Synthetic
gcactaguggcaagaggacua

SEQ ID NO: 80408 - DNA, 21 bp, Artificial Sequence
  Synthetic
aggcagacaagcutccaauga

SEQ ID NO: 80409 - DNA, 29 bp, Artificial Sequence
  Synthetic
actgttagtttuaataggcaagguggaaa

SEQ ID NO: 80410 - DNA, 23 bp, Artificial Sequence
  Synthetic
ctttgtatccugtgggtagggut

SEQ ID NO: 80411 - DNA, 28 bp, Artificial Sequence
  Synthetic
tgtatccccaagagucacagaagtaaua

SEQ ID NO: 80412 - DNA, 26 bp, Artificial Sequence
  Synthetic
gtctcttccucgttaagcatttcugt

SEQ ID NO: 80413 - DNA, 26 bp, Artificial Sequence
  Synthetic
aggactacttgaugaaaatggctcug

SEQ ID NO: 80414 - DNA, 25 bp, Artificial Sequence
  Synthetic
cttcatcacaugattctgggacuga

SEQ ID NO: 80415 - DNA, 23 bp, Artificial Sequence
  Synthetic
ggttttctccutctccagggaug

SEQ ID NO: 80416 - DNA, 23 bp, Artificial Sequence
  Synthetic
ggcctagaagaugacatgcauga

SEQ ID NO: 80417 - DNA, 27 bp, Artificial Sequence
  Synthetic
atggcaatttcacugatgtaagtgtug

SEQ ID NO: 80418 - DNA, 28 bp, Artificial Sequence
  Synthetic
ggctttttgtcauttgcttctattucca

SEQ ID NO: 80419 - DNA, 26 bp, Artificial Sequence
  Synthetic
ctctgtggcuttaactaatactugcc

SEQ ID NO: 80420 - DNA, 23 bp, Artificial Sequence
  Synthetic
ttttaacaccacgucctctcgut

SEQ ID NO: 80421 - DNA, 23 bp, Artificial Sequence
  Synthetic
gcuctttgttgctucccaaacac

SEQ ID NO: 80422 - DNA, 21 bp, Artificial Sequence
  Synthetic
cccgtggtugggtgaatacut

SEQ ID NO: 80423 - DNA, 21 bp, Artificial Sequence
  Synthetic
cccaggagacutcacugaagg

SEQ ID NO: 80424 - DNA, 25 bp, Artificial Sequence
  Synthetic
caccaaaggcagautccaaauacag

SEQ ID NO: 80425 - DNA, 27 bp, Artificial Sequence
  Synthetic
aagaagagcaagguataaggguacaga

SEQ ID NO: 80426 - DNA, 23 bp, Artificial Sequence
  Synthetic
actttggctutagcaggacugaa

SEQ ID NO: 80427 - DNA, 26 bp, Artificial Sequence
  Synthetic
cagatgaugcaggtaaaacaauccac

SEQ ID NO: 80428 - DNA, 21 bp, Artificial Sequence
  Synthetic
gccatggaucaggtctuccac

SEQ ID NO: 80429 - DNA, 26 bp, Artificial Sequence
  Synthetic
gcttgaggaacaaauctggaactuac

SEQ ID NO: 80430 - DNA, 22 bp, Artificial Sequence
  Synthetic
gctggctaucctactgctucat

SEQ ID NO: 80431 - DNA, 20 bp, Artificial Sequence
  Synthetic
gagtuccgagaccctctugg

SEQ ID NO: 80432 - DNA, 21 bp, Artificial Sequence
  Synthetic
gggcctgautttcgcgatgua

SEQ ID NO: 80433 - DNA, 19 bp, Artificial Sequence
  Synthetic
agtcctuaagggcggucca

SEQ ID NO: 80434 - DNA, 20 bp, Artificial Sequence
  Synthetic
cttggctcugtggagtcgut

SEQ ID NO: 80435 - DNA, 21 bp, Artificial Sequence
  Synthetic
gctcctucacgaggattuccc

SEQ ID NO: 80436 - DNA, 21 bp, Artificial Sequence
  Synthetic
gctgcacauctgcctgtacua

SEQ ID NO: 80437 - DNA, 25 bp, Artificial Sequence
  Synthetic
cagcttctcaaugtttttcctcugg

SEQ ID NO: 80438 - DNA, 21 bp, Artificial Sequence
  Synthetic
tuccccuacccagaggacaat

SEQ ID NO: 80439 - DNA, 21 bp, Artificial Sequence
  Synthetic
agtagaucctgctcuggcaca

SEQ ID NO: 80440 - DNA, 27 bp, Artificial Sequence
  Synthetic
gaagttaatgtcuccaccactggatut

SEQ ID NO: 80441 - DNA, 21 bp, Artificial Sequence
  Synthetic
cttcactucgcaggcagatuc

SEQ ID NO: 80442 - DNA, 21 bp, Artificial Sequence
  Synthetic
acgggcuctaugcgaaaagac

SEQ ID NO: 80443 - DNA, 27 bp, Artificial Sequence
  Synthetic
attctaacagauaacgaggtgcctuac

SEQ ID NO: 80444 - DNA, 20 bp, Artificial Sequence
  Synthetic
ccaatgtccuctcgctccug

SEQ ID NO: 80445 - DNA, 22 bp, Artificial Sequence
  Synthetic
atggctggcutacagctagtut

SEQ ID NO: 80446 - DNA, 23 bp, Artificial Sequence
  Synthetic
tgtctcctcugggcatttcttug

SEQ ID NO: 80447 - DNA, 22 bp, Artificial Sequence
  Synthetic
accatgcacutaattggccgua

SEQ ID NO: 80448 - DNA, 22 bp, Artificial Sequence
  Synthetic
gcaccttaugtgtgcccuaact

SEQ ID NO: 80449 - DNA, 25 bp, Artificial Sequence
  Synthetic
gaggtttcctaauagtgagctgcug

SEQ ID NO: 80450 - DNA, 20 bp, Artificial Sequence
  Synthetic
ttgcatgccagucctcaugt

SEQ ID NO: 80451 - DNA, 22 bp, Artificial Sequence
  Synthetic
aattgguttgggcuggagaagt

SEQ ID NO: 80452 - DNA, 24 bp, Artificial Sequence
  Synthetic
actcaggcagutctttagttgcug

SEQ ID NO: 80453 - DNA, 28 bp, Artificial Sequence
  Synthetic
ctctattcaatacugcctactcttugct

SEQ ID NO: 80454 - DNA, 20 bp, Artificial Sequence
  Synthetic
aaauccttgcguagcccgaa

SEQ ID NO: 80455 - DNA, 20 bp, Artificial Sequence
  Synthetic
gcccccaccauaatgucact

SEQ ID NO: 80456 - DNA, 22 bp, Artificial Sequence
  Synthetic
ggaagaacagccuagactuggg

SEQ ID NO: 80457 - DNA, 22 bp, Artificial Sequence
  Synthetic
atcttctctcccutcccaccut

SEQ ID NO: 80458 - DNA, 27 bp, Artificial Sequence
  Synthetic
tcattaagagcaagugtggaaatcugt

SEQ ID NO: 80459 - DNA, 24 bp, Artificial Sequence
  Synthetic
ccucaactauccaccaggcaaaaa

SEQ ID NO: 80460 - DNA, 21 bp, Artificial Sequence
  Synthetic
gagcguagcaaggagccaaua

SEQ ID NO: 80461 - DNA, 28 bp, Artificial Sequence
  Synthetic
cacatccatgtcutttcctacttgttut

SEQ ID NO: 80462 - DNA, 22 bp, Artificial Sequence
  Synthetic
gctacgcagutctggagcatut

SEQ ID NO: 80463 - DNA, 21 bp, Artificial Sequence
  Synthetic
gacatttaaaucgcccccucg

SEQ ID NO: 80464 - DNA, 25 bp, Artificial Sequence
  Synthetic
cacctcaaagcuctaagtucgaaga

SEQ ID NO: 80465 - DNA, 28 bp, Artificial Sequence
  Synthetic
gtgtaacacacguccatttgataaugag

SEQ ID NO: 80466 - DNA, 23 bp, Artificial Sequence
  Synthetic
gggagccuggagttctatgtuct

SEQ ID NO: 80467 - DNA, 26 bp, Artificial Sequence
  Synthetic
caggatttuacaaacatagcaugcga

SEQ ID NO: 80468 - DNA, 19 bp, Artificial Sequence
  Synthetic
gaagaacgugccgtugagg

SEQ ID NO: 80469 - DNA, 28 bp, Artificial Sequence
  Synthetic
acactgtgauacgggatgaaaattctut

SEQ ID NO: 80470 - DNA, 24 bp, Artificial Sequence
  Synthetic
gggtttgtatuccttgtccttcuc

SEQ ID NO: 80471 - DNA, 26 bp, Artificial Sequence
  Synthetic
gagggtagagggaagutattgcttut

SEQ ID NO: 80472 - DNA, 17 bp, Artificial Sequence
  Synthetic
ggtgucggcgtuggagt

SEQ ID NO: 80473 - DNA, 17 bp, Artificial Sequence
  Synthetic
ctcgccgcucgctttuc

SEQ ID NO: 80474 - DNA, 24 bp, Artificial Sequence
  Synthetic
gaattcagaccuattccgcuccat

SEQ ID NO: 80475 - DNA, 28 bp, Artificial Sequence
  Synthetic
cctgtaaacugaggtactttggttauca

SEQ ID NO: 80476 - DNA, 21 bp, Artificial Sequence
  Synthetic
agaagttgcutgctccuccaa

SEQ ID NO: 80477 - DNA, 23 bp, Artificial Sequence
  Synthetic
ggtacaagcugcagtcattucct

SEQ ID NO: 80478 - DNA, 23 bp, Artificial Sequence
  Synthetic
ccctucccttcttttucaaccgt

SEQ ID NO: 80479 - DNA, 25 bp, Artificial Sequence
  Synthetic
cccagctatuccacagatgtttcuc

SEQ ID NO: 80480 - DNA, 24 bp, Artificial Sequence
  Synthetic
aaatgguggaagatgatucccgaa

SEQ ID NO: 80481 - DNA, 20 bp, Artificial Sequence
  Synthetic
cttggcagutgaggcccuat

SEQ ID NO: 80482 - DNA, 28 bp, Artificial Sequence
  Synthetic
cagtgtttcttuttcattgcagatucca

SEQ ID NO: 80483 - DNA, 23 bp, Artificial Sequence
  Synthetic
ctttttggguggctgttgtguag

SEQ ID NO: 80484 - DNA, 21 bp, Artificial Sequence
  Synthetic
ggaaccccagcauttcagugt

SEQ ID NO: 80485 - DNA, 25 bp, Artificial Sequence
  Synthetic
ccaaguaaccaactctgaaauccca

SEQ ID NO: 80486 - DNA, 25 bp, Artificial Sequence
  Synthetic
actctttaccucagatgagctgcua

SEQ ID NO: 80487 - DNA, 28 bp, Artificial Sequence
  Synthetic
agaattacaagaaucccaaacucaccag

SEQ ID NO: 80488 - DNA, 28 bp, Artificial Sequence
  Synthetic
tgtaaaacttaaaugtgagcatccuggt

SEQ ID NO: 80489 - DNA, 28 bp, Artificial Sequence
  Synthetic
gctggattuacagatgattttgaaugga

SEQ ID NO: 80490 - DNA, 24 bp, Artificial Sequence
  Synthetic
agataagtcugagagctacuggca

SEQ ID NO: 80491 - DNA, 27 bp, Artificial Sequence
  Synthetic
gggaggactttcuagacccttattcua

SEQ ID NO: 80492 - DNA, 26 bp, Artificial Sequence
  Synthetic
aggcatagattuccaggtagaaacug

SEQ ID NO: 80493 - DNA, 25 bp, Artificial Sequence
  Synthetic
attgacgtcagaautggacacuagg

SEQ ID NO: 80494 - DNA, 22 bp, Artificial Sequence
  Synthetic
ccgaaggaggcacutacacaut

SEQ ID NO: 80495 - DNA, 23 bp, Artificial Sequence
  Synthetic
cutgcagctgtuacaaacacgag

SEQ ID NO: 80496 - DNA, 28 bp, Artificial Sequence
  Synthetic
actatttctgtcucatccatgttucagg

SEQ ID NO: 80497 - DNA, 27 bp, Artificial Sequence
  Synthetic
tgagaacaccaaaautggcaaaaucat

SEQ ID NO: 80498 - DNA, 28 bp, Artificial Sequence
  Synthetic
agtgaagaactgutctaccagatacuca

SEQ ID NO: 80499 - DNA, 27 bp, Artificial Sequence
  Synthetic
gtggagagcuactatttucagaaacga

SEQ ID NO: 80500 - DNA, 18 bp, Artificial Sequence
  Synthetic
gaaagcccuccccagucc

SEQ ID NO: 80501 - DNA, 27 bp, Artificial Sequence
  Synthetic
tgcactgtaataauccagactgtgtut

SEQ ID NO: 80502 - DNA, 25 bp, Artificial Sequence
  Synthetic
aagtgaagtttguctccaagtgugt

SEQ ID NO: 80503 - DNA, 28 bp, Artificial Sequence
  Synthetic
ctaattaatcccutttagtgccuccaga

SEQ ID NO: 80504 - DNA, 22 bp, Artificial Sequence
  Synthetic
caccagcccauccatctatcug

SEQ ID NO: 80505 - DNA, 28 bp, Artificial Sequence
  Synthetic
cttgactttugtattctgacuccaaggt

SEQ ID NO: 80506 - DNA, 27 bp, Artificial Sequence
  Synthetic
agtgaaacagaaggaugctttugagat

SEQ ID NO: 80507 - DNA, 28 bp, Artificial Sequence
  Synthetic
gaaaactucaaatccattcucaggaacc

SEQ ID NO: 80508 - DNA, 28 bp, Artificial Sequence
  Synthetic
cgttcacaaugcaactcaaattttuagg

SEQ ID NO: 80509 - DNA, 24 bp, Artificial Sequence
  Synthetic
tttagatcgcaaaugccttgggua

SEQ ID NO: 80510 - DNA, 21 bp, Artificial Sequence
  Synthetic
gccaaagaggccccuatcuct

SEQ ID NO: 80511 - DNA, 28 bp, Artificial Sequence
  Synthetic
gcutgtcttaaattguacagcaagaact

SEQ ID NO: 80512 - DNA, 27 bp, Artificial Sequence
  Synthetic
gttgaagtcaauccccacatttagtuc

SEQ ID NO: 80513 - DNA, 28 bp, Artificial Sequence
  Synthetic
gcttatttgctcuctcatgttctgttut

SEQ ID NO: 80514 - DNA, 28 bp, Artificial Sequence
  Synthetic
aacagctaccaugggttttattuaaggt

SEQ ID NO: 80515 - DNA, 24 bp, Artificial Sequence
  Synthetic
cccaataaccaaggcuaggtcaua

SEQ ID NO: 80516 - DNA, 23 bp, Artificial Sequence
  Synthetic
gccacgacucacagaaagaacuc

SEQ ID NO: 80517 - DNA, 21 bp, Artificial Sequence
  Synthetic
gcagctuaagcaggaggtguc

SEQ ID NO: 80518 - DNA, 22 bp, Artificial Sequence
  Synthetic
cttgaccttguaggcgtctcuc

SEQ ID NO: 80519 - DNA, 22 bp, Artificial Sequence
  Synthetic
gguataaacgcguccagcagaa

SEQ ID NO: 80520 - DNA, 22 bp, Artificial Sequence
  Synthetic
gtcttctcautctccagguggt

SEQ ID NO: 80521 - DNA, 19 bp, Artificial Sequence
  Synthetic
accagctcgugtccatguc

SEQ ID NO: 80522 - DNA, 18 bp, Artificial Sequence
  Synthetic
gcggaucacctcgtccut

SEQ ID NO: 80523 - DNA, 17 bp, Artificial Sequence
  Synthetic
cagcugcccacuagcca

SEQ ID NO: 80524 - DNA, 18 bp, Artificial Sequence
  Synthetic
gagcuggtcgucggagaa

SEQ ID NO: 80525 - DNA, 18 bp, Artificial Sequence
  Synthetic
acccgcaccaucaccauc

SEQ ID NO: 80526 - DNA, 22 bp, Artificial Sequence
  Synthetic
tcgctcaagucaaacaggucaa

SEQ ID NO: 80527 - DNA, 17 bp, Artificial Sequence
  Synthetic
ccccucctcucccgagt

SEQ ID NO: 80528 - DNA, 25 bp, Artificial Sequence
  Synthetic
agacagtctgcuaattccagcuact

SEQ ID NO: 80529 - DNA, 19 bp, Artificial Sequence
  Synthetic
agagggucauaccggcaca

SEQ ID NO: 80530 - DNA, 23 bp, Artificial Sequence
  Synthetic
gggtaatttugggagtguggaga

SEQ ID NO: 80531 - DNA, 27 bp, Artificial Sequence
  Synthetic
tgctgtagggauttcaggatttcaaut

SEQ ID NO: 80532 - DNA, 24 bp, Artificial Sequence
  Synthetic
gcaccuaagagacttugaaaggga

SEQ ID NO: 80533 - DNA, 23 bp, Artificial Sequence
  Synthetic
acaggaugccaaacacataccut

SEQ ID NO: 80534 - DNA, 28 bp, Artificial Sequence
  Synthetic
accacattttatcucagtcacagttuca

SEQ ID NO: 80535 - DNA, 28 bp, Artificial Sequence
  Synthetic
agcaggataggcaauttctagatgttuc

SEQ ID NO: 80536 - DNA, 28 bp, Artificial Sequence
  Synthetic
tgtatttgaacuatttggaagcugacca

SEQ ID NO: 80537 - DNA, 27 bp, Artificial Sequence
  Synthetic
gcaaagagguaagacatgacaaaguca

SEQ ID NO: 80538 - DNA, 22 bp, Artificial Sequence
  Synthetic
gtgctgaagcucctcttctuga

SEQ ID NO: 80539 - DNA, 28 bp, Artificial Sequence
  Synthetic
agacagaactgcaautttcccatatgua

SEQ ID NO: 80540 - DNA, 30 bp, Artificial Sequence
  Synthetic
gacttttgattgutttagatgacactuggt

SEQ ID NO: 80541 - DNA, 25 bp, Artificial Sequence
  Synthetic
ccagtctgatuacctgctttctuca

SEQ ID NO: 80542 - DNA, 28 bp, Artificial Sequence
  Synthetic
tctttaccttuaggatggatttugccat

SEQ ID NO: 80543 - DNA, 24 bp, Artificial Sequence
  Synthetic
gtgacauactaaccucgacagcaa

SEQ ID NO: 80544 - DNA, 22 bp, Artificial Sequence
  Synthetic
accaccaucacaaaggacauca

SEQ ID NO: 80545 - DNA, 24 bp, Artificial Sequence
  Synthetic
gatgaagaagcugacaccugaact

SEQ ID NO: 80546 - DNA, 27 bp, Artificial Sequence
  Synthetic
acagaagtutcaatgtacuaccaagca

SEQ ID NO: 80547 - DNA, 25 bp, Artificial Sequence
  Synthetic
aaaagcugggatcaacauaaagcac

SEQ ID NO: 80548 - DNA, 24 bp, Artificial Sequence
  Synthetic
acactgaatgcuttgttgcaacuc

SEQ ID NO: 80549 - DNA, 27 bp, Artificial Sequence
  Synthetic
atttcctctgtugatgtagacagugac

SEQ ID NO: 80550 - DNA, 25 bp, Artificial Sequence
  Synthetic
cagggcaautaaagcattucaggag

SEQ ID NO: 80551 - DNA, 28 bp, Artificial Sequence
  Synthetic
ccaacaaccuacctttaaactagacuca

SEQ ID NO: 80552 - DNA, 28 bp, Artificial Sequence
  Synthetic
catttacgactugggcttatgtucaaag

SEQ ID NO: 80553 - DNA, 33 bp, Artificial Sequence
  Synthetic
ttcttttaaagtgccaauataaattccaacaut

SEQ ID NO: 80554 - DNA, 23 bp, Artificial Sequence
  Synthetic
tcaacagcaacaccutcuccaaa

SEQ ID NO: 80555 - DNA, 25 bp, Artificial Sequence
  Synthetic
gatctgtggacuaggtttgtggtua

SEQ ID NO: 80556 - DNA, 23 bp, Artificial Sequence
  Synthetic
acccagcacaucccagtgtauat

SEQ ID NO: 80557 - DNA, 21 bp, Artificial Sequence
  Synthetic
gcggaaaacauccctgtucac

SEQ ID NO: 80558 - DNA, 22 bp, Artificial Sequence
  Synthetic
tgagaucagggaugagggacag

SEQ ID NO: 80559 - DNA, 28 bp, Artificial Sequence
  Synthetic
atattttcatctccuctgggtaacatug

SEQ ID NO: 80560 - DNA, 21 bp, Artificial Sequence
  Synthetic
agactucagccacagcatgut

SEQ ID NO: 80561 - DNA, 29 bp, Artificial Sequence
  Synthetic
tctggatcacuggcaatagttctaattuc

SEQ ID NO: 80562 - DNA, 22 bp, Artificial Sequence
  Synthetic
gaggtcaggcuggctaucaaat

SEQ ID NO: 80563 - DNA, 21 bp, Artificial Sequence
  Synthetic
gtcccttutccacttgugcag

SEQ ID NO: 80564 - DNA, 21 bp, Artificial Sequence
  Synthetic
ccttgagagccuggatgtugg

SEQ ID NO: 80565 - DNA, 22 bp, Artificial Sequence
  Synthetic
ccacatcagacugagcgttcut

SEQ ID NO: 80566 - DNA, 28 bp, Artificial Sequence
  Synthetic
gggtggtaaautataaagttgctaugga

SEQ ID NO: 80567 - DNA, 22 bp, Artificial Sequence
  Synthetic
cagggaaggagugguacaacag

SEQ ID NO: 80568 - DNA, 25 bp, Artificial Sequence
  Synthetic
ccatgaaaacagauctgcttcuggt

SEQ ID NO: 80569 - DNA, 25 bp, Artificial Sequence
  Synthetic
tcactutgatgaacttucccacact

SEQ ID NO: 80570 - DNA, 28 bp, Artificial Sequence
  Synthetic
catgtcaacaucgctctaatucagagat

SEQ ID NO: 80571 - DNA, 28 bp, Artificial Sequence
  Synthetic
gcttttcaaaaggcutaaacacaggaut

SEQ ID NO: 80572 - DNA, 28 bp, Artificial Sequence
  Synthetic
ttttcatgttagaugggatccttuccaa

SEQ ID NO: 80573 - DNA, 28 bp, Artificial Sequence
  Synthetic
agtttgagctgaugatttaagacagugt

SEQ ID NO: 80574 - DNA, 22 bp, Artificial Sequence
  Synthetic
agatcccagcuctttccugaga

SEQ ID NO: 80575 - DNA, 26 bp, Artificial Sequence
  Synthetic
gtccatttcuccagagtaatccucac

SEQ ID NO: 80576 - DNA, 17 bp, Artificial Sequence
  Synthetic
gccgcucggctctucac

SEQ ID NO: 80577 - DNA, 17 bp, Artificial Sequence
  Synthetic
ggccgcgutcctuaccc

SEQ ID NO: 80578 - DNA, 22 bp, Artificial Sequence
  Synthetic
gactgcctuggttgatggtcua

SEQ ID NO: 80579 - DNA, 25 bp, Artificial Sequence
  Synthetic
caggtggatuttccatgtcauacag

SEQ ID NO: 80580 - DNA, 24 bp, Artificial Sequence
  Synthetic
cttgagcaccugaccaaaaagaug

SEQ ID NO: 80581 - DNA, 25 bp, Artificial Sequence
  Synthetic
ccagtggagcugataatagtuccaa

SEQ ID NO: 80582 - DNA, 29 bp, Artificial Sequence
  Synthetic
tgtacaaatagguactcaaaacagcucaa

SEQ ID NO: 80583 - DNA, 22 bp, Artificial Sequence
  Synthetic
acagagccaggcuttcaucaaa

SEQ ID NO: 80584 - DNA, 28 bp, Artificial Sequence
  Synthetic
agaugaattatctggugaacgacaaaga

SEQ ID NO: 80585 - DNA, 24 bp, Artificial Sequence
  Synthetic
tgagaacatuaccggattcgaugg

SEQ ID NO: 80586 - DNA, 28 bp, Artificial Sequence
  Synthetic
cctacagggtcautttcttgttcttcut

SEQ ID NO: 80587 - DNA, 22 bp, Artificial Sequence
  Synthetic
cctgaaaaccaugtggttgugt

SEQ ID NO: 80588 - DNA, 24 bp, Artificial Sequence
  Synthetic
gcaguagcagtgaatcuacaggga

SEQ ID NO: 80589 - DNA, 28 bp, Artificial Sequence
  Synthetic
gcactgtgtttuctatcaatctcguaag

SEQ ID NO: 80590 - DNA, 24 bp, Artificial Sequence
  Synthetic
cctcaatgaugggtggacaauagg

SEQ ID NO: 80591 - DNA, 29 bp, Artificial Sequence
  Synthetic
tggaaatgaatccutgtaccccaaauaat

SEQ ID NO: 80592 - DNA, 24 bp, Artificial Sequence
  Synthetic
tgatcgagtutccagaaccucaac

SEQ ID NO: 80593 - DNA, 27 bp, Artificial Sequence
  Synthetic
attgcaatggcauttagtgctatttut

SEQ ID NO: 80594 - DNA, 21 bp, Artificial Sequence
  Synthetic
cccgtccucgactgatucaac

SEQ ID NO: 80595 - DNA, 23 bp, Artificial Sequence
  Synthetic
tgcaaaugagacccaugaaccaa

SEQ ID NO: 80596 - DNA, 27 bp, Artificial Sequence
  Synthetic
gttatcttcaugtagtccaccugaaca

SEQ ID NO: 80597 - DNA, 27 bp, Artificial Sequence
  Synthetic
ctggtaatgaugactggaugaaagaca

SEQ ID NO: 80598 - DNA, 27 bp, Artificial Sequence
  Synthetic
tgttccccaagauttcatcaagatuga

SEQ ID NO: 80599 - DNA, 22 bp, Artificial Sequence
  Synthetic
accacagcagugacttagctut

SEQ ID NO: 80600 - DNA, 23 bp, Artificial Sequence
  Synthetic
tgcccattuagtgtttggcucat

SEQ ID NO: 80601 - DNA, 21 bp, Artificial Sequence
  Synthetic
gtacaccugcagcctauaccc

SEQ ID NO: 80602 - DNA, 26 bp, Artificial Sequence
  Synthetic
ttgctaacaatugctttgggtttcuc

SEQ ID NO: 80603 - DNA, 22 bp, Artificial Sequence
  Synthetic
ccaattccagccucctgtcuac

SEQ ID NO: 80604 - DNA, 24 bp, Artificial Sequence
  Synthetic
tcattttgtuggctgaggaaguca

SEQ ID NO: 80605 - DNA, 27 bp, Artificial Sequence
  Synthetic
gccuaatttgaatcagucaggaacagg

SEQ ID NO: 80606 - DNA, 22 bp, Artificial Sequence
  Synthetic
gcctgttgcagugactgattug

SEQ ID NO: 80607 - DNA, 26 bp, Artificial Sequence
  Synthetic
caccacagagaacaucaaacgtaaug

SEQ ID NO: 80608 - DNA, 21 bp, Artificial Sequence
  Synthetic
ggcattcutgtcccgugagaa

SEQ ID NO: 80609 - DNA, 28 bp, Artificial Sequence
  Synthetic
ggagataacatgcugctacgaactaaua

SEQ ID NO: 80610 - DNA, 22 bp, Artificial Sequence
  Synthetic
gtgcagttgugttggatgugat

SEQ ID NO: 80611 - DNA, 28 bp, Artificial Sequence
  Synthetic
gggccaaguaataataacaatguagcca

SEQ ID NO: 80612 - DNA, 23 bp, Artificial Sequence
  Synthetic
accaacagauccagcuccaaaag

SEQ ID NO: 80613 - DNA, 26 bp, Artificial Sequence
  Synthetic
tcaggaaugaatcaatugacccaaca

SEQ ID NO: 80614 - DNA, 20 bp, Artificial Sequence
  Synthetic
cctggctcugagggacugaa

SEQ ID NO: 80615 - DNA, 27 bp, Artificial Sequence
  Synthetic
cctccttacccauggagaaaataguga

SEQ ID NO: 80616 - DNA, 27 bp, Artificial Sequence
  Synthetic
tttacatggacaccutggttttagugt

SEQ ID NO: 80617 - DNA, 24 bp, Artificial Sequence
  Synthetic
catcctgttugctgacctcaguaa

SEQ ID NO: 80618 - DNA, 21 bp, Artificial Sequence
  Synthetic
gctgggugcgggttgttaaua

SEQ ID NO: 80619 - DNA, 21 bp, Artificial Sequence
  Synthetic
ggccagucgaaagtaauggct

SEQ ID NO: 80620 - DNA, 24 bp, Artificial Sequence
  Synthetic
gagagattcuccccaacacgaaut

SEQ ID NO: 80621 - DNA, 25 bp, Artificial Sequence
  Synthetic
ctccagggutcctugaaaagaaaac

SEQ ID NO: 80622 - DNA, 25 bp, Artificial Sequence
  Synthetic
ctgttggcaggagauaggttaacua

SEQ ID NO: 80623 - DNA, 30 bp, Artificial Sequence
  Synthetic
cacatcactttttaugagaagcatcatugg

SEQ ID NO: 80624 - DNA, 22 bp, Artificial Sequence
  Synthetic
gaaggaccugatccaccagtuc

SEQ ID NO: 80625 - DNA, 28 bp, Artificial Sequence
  Synthetic
attctgatggcucactgtagaaacauac

SEQ ID NO: 80626 - DNA, 23 bp, Artificial Sequence
  Synthetic
gcccggugagtattcactttuga

SEQ ID NO: 80627 - DNA, 22 bp, Artificial Sequence
  Synthetic
ccaacatauctgtgccucccat

SEQ ID NO: 80628 - DNA, 21 bp, Artificial Sequence
  Synthetic
gccggccutgtacatgtagut

SEQ ID NO: 80629 - DNA, 21 bp, Artificial Sequence
  Synthetic
cctcttcugctggaccaucac

SEQ ID NO: 80630 - DNA, 24 bp, Artificial Sequence
  Synthetic
aaccaagcagutcttctgagtuga

SEQ ID NO: 80631 - DNA, 26 bp, Artificial Sequence
  Synthetic
catggtccaatugtacagcacaaaua

SEQ ID NO: 80632 - DNA, 23 bp, Artificial Sequence
  Synthetic
gattttctccugcccaaauggac

SEQ ID NO: 80633 - DNA, 21 bp, Artificial Sequence
  Synthetic
gcccagcagcucaaacagaua

SEQ ID NO: 80634 - DNA, 22 bp, Artificial Sequence
  Synthetic
ccatggatgcuttacaggccua

SEQ ID NO: 80635 - DNA, 26 bp, Artificial Sequence
  Synthetic
gcaagugcagaggtattacuacaact

SEQ ID NO: 80636 - DNA, 20 bp, Artificial Sequence
  Synthetic
gggcatgcugctgacgatua

SEQ ID NO: 80637 - DNA, 22 bp, Artificial Sequence
  Synthetic
ctctccactucgtctccaaucc

SEQ ID NO: 80638 - DNA, 23 bp, Artificial Sequence
  Synthetic
caautcctctuccacccagagaa

SEQ ID NO: 80639 - DNA, 26 bp, Artificial Sequence
  Synthetic
catagacatgtauctgcgaaaacgug

SEQ ID NO: 80640 - DNA, 28 bp, Artificial Sequence
  Synthetic
cctcaggatgccautaaatgctactuaa

SEQ ID NO: 80641 - DNA, 21 bp, Artificial Sequence
  Synthetic
cctccttcugcctgagtgtuc

SEQ ID NO: 80642 - DNA, 24 bp, Artificial Sequence
  Synthetic
catgttcuccagttcaaggucact

SEQ ID NO: 80643 - DNA, 23 bp, Artificial Sequence
  Synthetic
tctgtctugcagtaagcacaugg

SEQ ID NO: 80644 - DNA, 20 bp, Artificial Sequence
  Synthetic
tgtttgaccaccugcagcut

SEQ ID NO: 80645 - DNA, 21 bp, Artificial Sequence
  Synthetic
tgtuggcagaacctccucaac

SEQ ID NO: 80646 - DNA, 28 bp, Artificial Sequence
  Synthetic
gattatatcatguctgctgcttauggga

SEQ ID NO: 80647 - DNA, 24 bp, Artificial Sequence
  Synthetic
tgcactgaacutccagaagaugac

SEQ ID NO: 80648 - DNA, 22 bp, Artificial Sequence
  Synthetic
caggaacuccaggcagtguaaa

SEQ ID NO: 80649 - DNA, 27 bp, Artificial Sequence
  Synthetic
tcctttatgtacauctttggttgcuga

SEQ ID NO: 80650 - DNA, 23 bp, Artificial Sequence
  Synthetic
attctctugggtcattuggccat

SEQ ID NO: 80651 - DNA, 21 bp, Artificial Sequence
  Synthetic
gcaccccugcgaaagacuaac

SEQ ID NO: 80652 - DNA, 24 bp, Artificial Sequence
  Synthetic
gcttcaccaacaucatctguagca

SEQ ID NO: 80653 - DNA, 28 bp, Artificial Sequence
  Synthetic
gtggtgggagugaaggagaaaaataaua

SEQ ID NO: 80654 - DNA, 22 bp, Artificial Sequence
  Synthetic
cctugaacctgtttuggcagat

SEQ ID NO: 80655 - DNA, 28 bp, Artificial Sequence
  Synthetic
agttgggaagcugatacttcatatucac

SEQ ID NO: 80656 - DNA, 23 bp, Artificial Sequence
  Synthetic
gaatgugtatgggauggcagagt

SEQ ID NO: 80657 - DNA, 28 bp, Artificial Sequence
  Synthetic
gctttgtggacaacucatttcttgauat

SEQ ID NO: 80658 - DNA, 24 bp, Artificial Sequence
  Synthetic
agttactctcacucccaacaguca

SEQ ID NO: 80659 - DNA, 28 bp, Artificial Sequence
  Synthetic
ctccaggtgaautttcaaagctttuagg

SEQ ID NO: 80660 - DNA, 23 bp, Artificial Sequence
  Synthetic
cgacatgtcuttccccacaauca

SEQ ID NO: 80661 - DNA, 25 bp, Artificial Sequence
  Synthetic
gttgaugaaccggtccttuacagat

SEQ ID NO: 80662 - DNA, 28 bp, Artificial Sequence
  Synthetic
agtagtctttctguacctcttacgtuct

SEQ ID NO: 80663 - DNA, 22 bp, Artificial Sequence
  Synthetic
tgatauccgggacaccagtuca

SEQ ID NO: 80664 - DNA, 25 bp, Artificial Sequence
  Synthetic
cttcaaccucagctgttactucaca

SEQ ID NO: 80665 - DNA, 25 bp, Artificial Sequence
  Synthetic
caggcccaugcttactttgtttaut

SEQ ID NO: 80666 - DNA, 24 bp, Artificial Sequence
  Synthetic
gcactagcaaaguccgagaugaat

SEQ ID NO: 80667 - DNA, 26 bp, Artificial Sequence
  Synthetic
caaccttctgaaggucttcctcatut

SEQ ID NO: 80668 - DNA, 21 bp, Artificial Sequence
  Synthetic
cctgggagccaaaguccttuc

SEQ ID NO: 80669 - DNA, 25 bp, Artificial Sequence
  Synthetic
cgtttccttuagccttctcacugat

SEQ ID NO: 80670 - DNA, 21 bp, Artificial Sequence
  Synthetic
cgaaaugcgcccatcctttuc

SEQ ID NO: 80671 - DNA, 24 bp, Artificial Sequence
  Synthetic
aggauacggagcgacacatttuac

SEQ ID NO: 80672 - DNA, 29 bp, Artificial Sequence
  Synthetic
cttggtgccacuaactacatttatgttut

SEQ ID NO: 80673 - DNA, 28 bp, Artificial Sequence
  Synthetic
gagccatgtugatgttatcttuccaaac

SEQ ID NO: 80674 - DNA, 28 bp, Artificial Sequence
  Synthetic
ctggcauagaagaagaaactguaaagga

SEQ ID NO: 80675 - DNA, 22 bp, Artificial Sequence
  Synthetic
ttgttatgctucctgcagcuga

SEQ ID NO: 80676 - DNA, 24 bp, Artificial Sequence
  Synthetic
cccagatcauccattgcatucgat

SEQ ID NO: 80677 - DNA, 25 bp, Artificial Sequence
  Synthetic
tgctttcaaaggcauggacatacut

SEQ ID NO: 80678 - DNA, 24 bp, Artificial Sequence
  Synthetic
agcaaagccaauttaucaggaggt

SEQ ID NO: 80679 - DNA, 23 bp, Artificial Sequence
  Synthetic
cctccgactguatgtcagcagua

SEQ ID NO: 80680 - DNA, 25 bp, Artificial Sequence
  Synthetic
ccatgtgaacgcuacttatgugaac

SEQ ID NO: 80681 - DNA, 27 bp, Artificial Sequence
  Synthetic
gactgttgctutgacatagtacuagca

SEQ ID NO: 80682 - DNA, 26 bp, Artificial Sequence
  Synthetic
ctgagttcagagautcttaccccaut

SEQ ID NO: 80683 - DNA, 28 bp, Artificial Sequence
  Synthetic
ggaacagaaccugattattcttgtguga

SEQ ID NO: 80684 - DNA, 26 bp, Artificial Sequence
  Synthetic
agggaaactcuagatgctcagactut

SEQ ID NO: 80685 - DNA, 28 bp, Artificial Sequence
  Synthetic
acacttccttctutgtggatctctttut

SEQ ID NO: 80686 - DNA, 27 bp, Artificial Sequence
  Synthetic
tgcacatcattgguattaagaagggut

SEQ ID NO: 80687 - DNA, 24 bp, Artificial Sequence
  Synthetic
tggaataacaccuccagccatuac

SEQ ID NO: 80688 - DNA, 29 bp, Artificial Sequence
  Synthetic
tcctttctctgcutcttttctaggtauca

SEQ ID NO: 80689 - DNA, 27 bp, Artificial Sequence
  Synthetic
gcctggtugactcatctatauggaaga

SEQ ID NO: 80690 - DNA, 24 bp, Artificial Sequence
  Synthetic
agaaaggauctggtauccacccaa

SEQ ID NO: 80691 - DNA, 28 bp, Artificial Sequence
  Synthetic
ccattttgccutttagcattaagugagt

SEQ ID NO: 80692 - DNA, 27 bp, Artificial Sequence
  Synthetic
tgacagcattatutcttgttccctugt

SEQ ID NO: 80693 - DNA, 28 bp, Artificial Sequence
  Synthetic
aaatgcttagtauctgcttgatcacuga

SEQ ID NO: 80694 - DNA, 22 bp, Artificial Sequence
  Synthetic
gaaaaggacagggaguggtgut

SEQ ID NO: 80695 - DNA, 21 bp, Artificial Sequence
  Synthetic
ttcacgagcucatgaagcugt

SEQ ID NO: 80696 - DNA, 19 bp, Artificial Sequence
  Synthetic
gaatgauggccggtccugt

SEQ ID NO: 80697 - DNA, 24 bp, Artificial Sequence
  Synthetic
caaatacgcugaatgggagttgug

SEQ ID NO: 80698 - DNA, 26 bp, Artificial Sequence
  Synthetic
ggacttaatguccagtggacttagut

SEQ ID NO: 80699 - DNA, 21 bp, Artificial Sequence
  Synthetic
gccattgaccugctgaacucc

SEQ ID NO: 80700 - DNA, 24 bp, Artificial Sequence
  Synthetic
ccccacagaaacccaugtaugaag

SEQ ID NO: 80701 - DNA, 23 bp, Artificial Sequence
  Synthetic
tggaaagccccugtttcatacug

SEQ ID NO: 80702 - DNA, 21 bp, Artificial Sequence
  Synthetic
caacaaggcucaggagugagt

SEQ ID NO: 80703 - DNA, 25 bp, Artificial Sequence
  Synthetic
caatgccattaautgccagttggut

SEQ ID NO: 80704 - DNA, 29 bp, Artificial Sequence
  Synthetic
agaggaaauatcattcugcaaaagaagct

SEQ ID NO: 80705 - DNA, 21 bp, Artificial Sequence
  Synthetic
tgccacacucgacauggaaaa

SEQ ID NO: 80706 - DNA, 28 bp, Artificial Sequence
  Synthetic
aacactataacaugattcactggcucaa

SEQ ID NO: 80707 - DNA, 26 bp, Artificial Sequence
  Synthetic
gtttgtattacucaccaggaugacca

SEQ ID NO: 80708 - DNA, 24 bp, Artificial Sequence
  Synthetic
ggaataautggagcttugccaggt

SEQ ID NO: 80709 - DNA, 21 bp, Artificial Sequence
  Synthetic
ctggcatuggatgtgtugcat

SEQ ID NO: 80710 - DNA, 24 bp, Artificial Sequence
  Synthetic
ctccttcaugcccttcatcttcuc

SEQ ID NO: 80711 - DNA, 17 bp, Artificial Sequence
  Synthetic
ggccagggugcagtguc

SEQ ID NO: 80712 - DNA, 17 bp, Artificial Sequence
  Synthetic
cccaggcccutguccag

SEQ ID NO: 80713 - DNA, 18 bp, Artificial Sequence
  Synthetic
cggcagaaggugcgcaua

SEQ ID NO: 80714 - DNA, 17 bp, Artificial Sequence
  Synthetic
cctucccgggcttccuc

SEQ ID NO: 80715 - DNA, 19 bp, Artificial Sequence
  Synthetic
gagcagggucctggagtuc

SEQ ID NO: 80716 - DNA, 20 bp, Artificial Sequence
  Synthetic
ccacacaaccguaccaccua

SEQ ID NO: 80717 - DNA, 24 bp, Artificial Sequence
  Synthetic
ccccaauctaaggcauagacaaca

SEQ ID NO: 80718 - DNA, 27 bp, Artificial Sequence
  Synthetic
tgcaccccaucataatatcttcagtut

SEQ ID NO: 80719 - DNA, 23 bp, Artificial Sequence
  Synthetic
aaccatgcuggagtttgguacat

SEQ ID NO: 80720 - DNA, 27 bp, Artificial Sequence
  Synthetic
ctctgtttucctgagatcuaaccacat

SEQ ID NO: 80721 - DNA, 23 bp, Artificial Sequence
  Synthetic
cagcaaggccacguattactgua

SEQ ID NO: 80722 - DNA, 24 bp, Artificial Sequence
  Synthetic
catctagacgtutccttggctcut

SEQ ID NO: 80723 - DNA, 18 bp, Artificial Sequence
  Synthetic
ggctcgacuccctccgua

SEQ ID NO: 80724 - DNA, 23 bp, Artificial Sequence
  Synthetic
tgtacaaauccgaacaacccugt

SEQ ID NO: 80725 - DNA, 23 bp, Artificial Sequence
  Synthetic
tctgccagugctggaaaagtuaa

SEQ ID NO: 80726 - DNA, 30 bp, Artificial Sequence
  Synthetic
gccaatttataattuctcatgttgcctuga

SEQ ID NO: 80727 - DNA, 28 bp, Artificial Sequence
  Synthetic
atcctatagatgaguttcgaccagguat

SEQ ID NO: 80728 - DNA, 26 bp, Artificial Sequence
  Synthetic
ccttgattuctgcatccauacaggaa

SEQ ID NO: 80729 - DNA, 33 bp, Artificial Sequence
  Synthetic
ttagctttggaaautttagagtatgttaugaac

SEQ ID NO: 80730 - DNA, 26 bp, Artificial Sequence
  Synthetic
aatggctctguaaattctacccgtut

SEQ ID NO: 80731 - DNA, 26 bp, Artificial Sequence
  Synthetic
gcttatggatagutacaactcggcut

SEQ ID NO: 80732 - DNA, 23 bp, Artificial Sequence
  Synthetic
ctctcatgtgaugtccaggagut

SEQ ID NO: 80733 - DNA, 20 bp, Artificial Sequence
  Synthetic
gacaccaccgugtacuccag

SEQ ID NO: 80734 - DNA, 21 bp, Artificial Sequence
  Synthetic
gtcccagaucagccactcaut

SEQ ID NO: 80735 - DNA, 20 bp, Artificial Sequence
  Synthetic
cccacagcaguctucgagag

SEQ ID NO: 80736 - DNA, 18 bp, Artificial Sequence
  Synthetic
caucccagcaggtugcca

SEQ ID NO: 80737 - DNA, 19 bp, Artificial Sequence
  Synthetic
tgtcgcucagtcccacuca

SEQ ID NO: 80738 - DNA, 27 bp, Artificial Sequence
  Synthetic
tggctttatgccauttatctcagtugt

SEQ ID NO: 80739 - DNA, 28 bp, Artificial Sequence
  Synthetic
caggatagacugaagactagtactuggt

SEQ ID NO: 80740 - DNA, 26 bp, Artificial Sequence
  Synthetic
tcagctttaaaagutctgcttccuca

SEQ ID NO: 80741 - DNA, 26 bp, Artificial Sequence
  Synthetic
ccaactccttugtttgccatttctuc

SEQ ID NO: 80742 - DNA, 21 bp, Artificial Sequence
  Synthetic
gttttcacugttgcgtugcct

SEQ ID NO: 80743 - DNA, 21 bp, Artificial Sequence
  Synthetic
gacctgcaaucaccagacuca

SEQ ID NO: 80744 - DNA, 17 bp, Artificial Sequence
  Synthetic
ggcccacccuggtcaut

SEQ ID NO: 80745 - DNA, 28 bp, Artificial Sequence
  Synthetic
tgcagaagattcutataaagtgcagcut

SEQ ID NO: 80746 - DNA, 24 bp, Artificial Sequence
  Synthetic
gtucaaagcaggaagatcaugcag

SEQ ID NO: 80747 - DNA, 24 bp, Artificial Sequence
  Synthetic
tcagccttgautgcaaaccctuat

SEQ ID NO: 80748 - DNA, 26 bp, Artificial Sequence
  Synthetic
acagtttuaacgcctaaagtaucaca

SEQ ID NO: 80749 - DNA, 28 bp, Artificial Sequence
  Synthetic
ctttactgaggcuttcaaaacattccut

SEQ ID NO: 80750 - DNA, 22 bp, Artificial Sequence
  Synthetic
ccaggugaatugggacgaagaa

SEQ ID NO: 80751 - DNA, 21 bp, Artificial Sequence
  Synthetic
ccagtgtgcaucaccactgua

SEQ ID NO: 80752 - DNA, 30 bp, Artificial Sequence; identical to SEQ ID NO: 63500
  Synthetic

SEQ ID NO: 80753 - DNA, 26 bp, Artificial Sequence
  Synthetic
cctgtacacaugaagccatcgtauat

SEQ ID NO: 80754 - DNA, 24 bp, Artificial Sequence
  Synthetic
tccaccaatuaaaagatggcccut

SEQ ID NO: 80755 - DNA, 27 bp, Artificial Sequence
  Synthetic
catccagccaugttatcccttattuga

SEQ ID NO: 80756 - DNA, 22 bp, Artificial Sequence
  Synthetic
gggatctagcucttcgagugga

SEQ ID NO: 80757 - DNA, 27 bp, Artificial Sequence
  Synthetic
tctttgctggcuagcatcatgattuat

SEQ ID NO: 80758 - DNA, 21 bp, Artificial Sequence
  Synthetic
aggaataagcccugcccagua

SEQ ID NO: 80759 - DNA, 28 bp, Artificial Sequence
  Synthetic
gtgaattgaggcautttctcacttugat

SEQ ID NO: 80760 - DNA, 24 bp, Artificial Sequence
  Synthetic
gggttacagaaacugactgtgugt

SEQ ID NO: 80761 - DNA, 23 bp, Artificial Sequence
  Synthetic
ggctttcucagagatttccccut

SEQ ID NO: 80762 - DNA, 25 bp, Artificial Sequence
  Synthetic
ggcutcctgaagauaaagggaaaga

SEQ ID NO: 80763 - DNA, 28 bp, Artificial Sequence
  Synthetic
cacatgactctcuggaatcattcacuat

SEQ ID NO: 80764 - DNA, 27 bp, Artificial Sequence
  Synthetic
gggctttgaugttcctgattguaaaaa

SEQ ID NO: 80765 - DNA, 27 bp, Artificial Sequence
  Synthetic
ctctttcacatcutcttggctgctaua

SEQ ID NO: 80766 - DNA, 29 bp, Artificial Sequence
  Synthetic
ctcagccatcaacutctagtagcattaut

SEQ ID NO: 80767 - DNA, 23 bp, Artificial Sequence
  Synthetic
ggtcgaccutgacaaaucacaca

SEQ ID NO: 80768 - DNA, 22 bp, Artificial Sequence
  Synthetic
gcccctuaatgccatugaacct

SEQ ID NO: 80769 - DNA, 28 bp, Artificial Sequence
  Synthetic
gcacaatcattugaattggttgtcuaca

SEQ ID NO: 80770 - DNA, 22 bp, Artificial Sequence
  Synthetic
tctcagccuggaagcctttuag

SEQ ID NO: 80771 - DNA, 22 bp, Artificial Sequence
  Synthetic
ctgtgcttcugatttgccctug

SEQ ID NO: 80772 - DNA, 21 bp, Artificial Sequence
  Synthetic
atttguctgcccugaccacat

SEQ ID NO: 80773 - DNA, 24 bp, Artificial Sequence
  Synthetic
tttacaccaaaagcucccactuga

SEQ ID NO: 80774 - DNA, 23 bp, Artificial Sequence
  Synthetic
aggtggccuacttaactacacut

SEQ ID NO: 80775 - DNA, 20 bp, Artificial Sequence
  Synthetic
gcaagcuccatcaugccgat

SEQ ID NO: 80776 - DNA, 22 bp, Artificial Sequence
  Synthetic
atggugtcagtacugcagaagg

SEQ ID NO: 80777 - DNA, 24 bp, Artificial Sequence
  Synthetic
tcttaccagcccacauctatucca

SEQ ID NO: 80778 - DNA, 28 bp, Artificial Sequence
  Synthetic
gggtcaagtgaguggataaaaatatugt

SEQ ID NO: 80779 - DNA, 25 bp, Artificial Sequence
  Synthetic
ttcagctcugaaacatcacacauct

SEQ ID NO: 80780 - DNA, 22 bp, Artificial Sequence
  Synthetic
aacttccagcugctttgaugga

SEQ ID NO: 80781 - DNA, 19 bp, Artificial Sequence
  Synthetic
cgctcgagugcccattuga

SEQ ID NO: 80782 - DNA, 18 bp, Artificial Sequence
  Synthetic
cacaccutccgccugaca

SEQ ID NO: 80783 - DNA, 19 bp, Artificial Sequence
  Synthetic
cccugacccctuccaacac

SEQ ID NO: 80784 - DNA, 20 bp, Artificial Sequence
  Synthetic
ggagcuctagcugggagacc

SEQ ID NO: 80785 - DNA, 20 bp, Artificial Sequence
  Synthetic
gccaauaaggcggagagugt

SEQ ID NO: 80786 - DNA, 25 bp, Artificial Sequence
  Synthetic
cacaagtucatgtgtcugacaaggt

SEQ ID NO: 80787 - DNA, 28 bp, Artificial Sequence
  Synthetic
gctccacaaaaucttcatcatgagugat

SEQ ID NO: 80788 - DNA, 25 bp, Artificial Sequence
  Synthetic
gttacacaggtutttcaagggacug

SEQ ID NO: 80789 - DNA, 26 bp, Artificial Sequence
  Synthetic
cctgttcaacaagcagutctgattut

SEQ ID NO: 80790 - DNA, 28 bp, Artificial Sequence
  Synthetic
ctgaaataagtaucaacctcaccccaut

SEQ ID NO: 80791 - DNA, 20 bp, Artificial Sequence
  Synthetic
agaggucgacauccacacct

SEQ ID NO: 80792 - DNA, 21 bp, Artificial Sequence
  Synthetic
cgacagccuccgatcttucag

SEQ ID NO: 80793 - DNA, 28 bp, Artificial Sequence
  Synthetic
agttaaaagacugggaaggatgcaatua

SEQ ID NO: 80794 - DNA, 27 bp, Artificial Sequence
  Synthetic
ggaagtagtcgcutactcatttctcut

SEQ ID NO: 80795 - DNA, 28 bp, Artificial Sequence
  Synthetic
ggtttgagagagcutgaagaaatgttut

SEQ ID NO: 80796 - DNA, 21 bp, Artificial Sequence
  Synthetic
tgtgacaucctcugcaaccac

SEQ ID NO: 80797 - DNA, 25 bp, Artificial Sequence
  Synthetic
tgaaaaactagtcutgccagcacut

SEQ ID NO: 80798 - DNA, 22 bp, Artificial Sequence
  Synthetic
tggagcugaagctacacugact

SEQ ID NO: 80799 - DNA, 22 bp, Artificial Sequence
  Synthetic
tggtaacuggcaccatctcuct

SEQ ID NO: 80800 - DNA, 21 bp, Artificial Sequence
  Synthetic
ggtctggugagtcgagaggut

SEQ ID NO: 80801 - DNA, 19 bp, Artificial Sequence
  Synthetic
ggtcggcutgttggaucgt

SEQ ID NO: 80802 - DNA, 25 bp, Artificial Sequence
  Synthetic
aaucaccagagaacaguaagggaga

SEQ ID NO: 80803 - DNA, 22 bp, Artificial Sequence
  Synthetic
gtccuaccctgtucaacaagca

SEQ ID NO: 80804 - DNA, 23 bp, Artificial Sequence
  Synthetic
cttgactctucctcggtacctug

SEQ ID NO: 80805 - DNA, 18 bp, Artificial Sequence
  Synthetic
caaccgccgugcaagaug

SEQ ID NO: 80806 - DNA, 20 bp, Artificial Sequence
  Synthetic
ggcataggccuctggguagt

SEQ ID NO: 80807 - DNA, 22 bp, Artificial Sequence
  Synthetic
gggtaccaggugatcaggauag

SEQ ID NO: 80808 - DNA, 19 bp, Artificial Sequence
  Synthetic
cccagcutgcttccuccat

SEQ ID NO: 80809 - DNA, 29 bp, Artificial Sequence
  Synthetic
cagtaagaagccuctaatctgtttuagca

SEQ ID NO: 80810 - DNA, 22 bp, Artificial Sequence
  Synthetic
gcgtaactuccagcttctggua

SEQ ID NO: 80811 - DNA, 26 bp, Artificial Sequence
  Synthetic
gctaacactgcauttcacaatctcug

SEQ ID NO: 80812 - DNA, 24 bp, Artificial Sequence
  Synthetic
catcagttttggugggacatcuct

SEQ ID NO: 80813 - DNA, 23 bp, Artificial Sequence
  Synthetic
aactcaggaggcuaccaaaugac

SEQ ID NO: 80814 - DNA, 28 bp, Artificial Sequence
  Synthetic
agtattggctuacgcttcagtatttgut

SEQ ID NO: 80815 - DNA, 28 bp, Artificial Sequence
  Synthetic
ccaaaatacatguttgtctccttucact

SEQ ID NO: 80816 - DNA, 28 bp, Artificial Sequence
  Synthetic
aggattaaaaagaacaucgatcagugct

SEQ ID NO: 80817 - DNA, 28 bp, Artificial Sequence
  Synthetic
cactttctgaggaccuacatttctaugg

SEQ ID NO: 80818 - DNA, 24 bp, Artificial Sequence
  Synthetic
tgctctgtgagucaatgcttaguc

SEQ ID NO: 80819 - DNA, 21 bp, Artificial Sequence
  Synthetic
gtgagucagcttggagucagt

SEQ ID NO: 80820 - DNA, 21 bp, Artificial Sequence
  Synthetic
ggtgctgaccaugtggacaut

SEQ ID NO: 80821 - DNA, 29 bp, Artificial Sequence
  Synthetic
ccaatcatggaatuttctttctcctccua

SEQ ID NO: 80822 - DNA, 24 bp, Artificial Sequence
  Synthetic
ccttccaacaucattccccacaut

SEQ ID NO: 80823 - DNA, 21 bp, Artificial Sequence
  Synthetic
ctcactgucacctggcttcuc

SEQ ID NO: 80824 - DNA, 19 bp, Artificial Sequence
  Synthetic
cccacacccugtgctctua

SEQ ID NO: 80825 - DNA, 23 bp, Artificial Sequence
  Synthetic
ctgtaacaccugcttctctuccc

SEQ ID NO: 80826 - DNA, 22 bp, Artificial Sequence
  Synthetic
agaggccacutcatcagcttug

SEQ ID NO: 80827 - DNA, 22 bp, Artificial Sequence
  Synthetic
ctgggcaagaacaggutcttut

SEQ ID NO: 80828 - DNA, 21 bp, Artificial Sequence
  Synthetic
cggaccaauccatgggtcaua

SEQ ID NO: 80829 - DNA, 21 bp, Artificial Sequence
  Synthetic
agaaacccccucagguacaga

SEQ ID NO: 80830 - DNA, 24 bp, Artificial Sequence
  Synthetic
tccgcaaactuctgactctgtuaa

SEQ ID NO: 80831 - DNA, 20 bp, Artificial Sequence
  Synthetic
aggaggaagcaggugguact

SEQ ID NO: 80832 - DNA, 27 bp, Artificial Sequence
  Synthetic
gctatgcugaaaggaatttgactucca

SEQ ID NO: 80833 - DNA, 21 bp, Artificial Sequence
  Synthetic
cttcugggagcagtacaucgg

SEQ ID NO: 80834 - DNA, 21 bp, Artificial Sequence
  Synthetic
accaagcagagcutctugcat

SEQ ID NO: 80835 - DNA, 26 bp, Artificial Sequence
  Synthetic
actgctttagugcaaagtactgacut

SEQ ID NO: 80836 - DNA, 27 bp, Artificial Sequence
  Synthetic
cactcacaugacttaccttcucaaagt

SEQ ID NO: 80837 - DNA, 21 bp, Artificial Sequence
  Synthetic
actaaagaucgaggcccucca

SEQ ID NO: 80838 - DNA, 29 bp, Artificial Sequence
  Synthetic
cagactataaaugcactacatgacactug

SEQ ID NO: 80839 - DNA, 21 bp, Artificial Sequence
  Synthetic
aggatgcugcaggaccttcua

SEQ ID NO: 80840 - DNA, 24 bp, Artificial Sequence
  Synthetic
agtcatccacgutttccctgttut

SEQ ID NO: 80841 - DNA, 19 bp, Artificial Sequence
  Synthetic
ccuccacggagcgaaacug

SEQ ID NO: 80842 - DNA, 23 bp, Artificial Sequence
  Synthetic
cttctccagauctgtgacugcac

SEQ ID NO: 80843 - DNA, 25 bp, Artificial Sequence
  Synthetic
ggaatgtgccagutagaatgaucct

SEQ ID NO: 80844 - DNA, 20 bp, Artificial Sequence
  Synthetic
ccaacaccacgcugaugaac

SEQ ID NO: 80845 - DNA, 23 bp, Artificial Sequence
  Synthetic
tcagactttguggaggcaatuga

SEQ ID NO: 80846 - DNA, 20 bp, Artificial Sequence
  Synthetic
tggccauccgcatcttucag

SEQ ID NO: 80847 - DNA, 21 bp, Artificial Sequence
  Synthetic
caaggaggccagcautgtgua

SEQ ID NO: 80848 - DNA, 23 bp, Artificial Sequence
  Synthetic
tgctgcagauggtccttacttut

SEQ ID NO: 80849 - DNA, 22 bp, Artificial Sequence
  Synthetic
ctaacctgugcccttctctguc

SEQ ID NO: 80850 - DNA, 27 bp, Artificial Sequence
  Synthetic
catgttccagcacutgtttattucgat

SEQ ID NO: 80851 - DNA, 22 bp, Artificial Sequence
  Synthetic
cctccagaagcutacagtgucc

SEQ ID NO: 80852 - DNA, 27 bp, Artificial Sequence
  Synthetic
ctcaaatatggaguccacgagatcaut

SEQ ID NO: 80853 - DNA, 24 bp, Artificial Sequence
  Synthetic
caaacttgggcuccataaagucac

SEQ ID NO: 80854 - DNA, 20 bp, Artificial Sequence
  Synthetic
gagccugcgaaagcctttug

SEQ ID NO: 80855 - DNA, 26 bp, Artificial Sequence
  Synthetic
tcatcccacccuctttcauagaagat

SEQ ID NO: 80856 - DNA, 27 bp, Artificial Sequence
  Synthetic
ctcttttgccttugaatttctgaggut

SEQ ID NO: 80857 - DNA, 23 bp, Artificial Sequence
  Synthetic
cagggaagtuccctacctttguc

SEQ ID NO: 80858 - DNA, 20 bp, Artificial Sequence
  Synthetic
ccaaugcccaggaacaucct

SEQ ID NO: 80859 - DNA, 20 bp, Artificial Sequence
  Synthetic
augtcaagcugggaagccat

SEQ ID NO: 80860 - DNA, 22 bp, Artificial Sequence
  Synthetic
cccagtggcucaacaactttut

SEQ ID NO: 80861 - DNA, 22 bp, Artificial Sequence
  Synthetic
cagaggcacutggactugagag

SEQ ID NO: 80862 - DNA, 27 bp, Artificial Sequence
  Synthetic
gaaacccgcuataatcacuagagcaat

SEQ ID NO: 80863 - DNA, 21 bp, Artificial Sequence
  Synthetic
gcatccgugtaagtugcacca

SEQ ID NO: 80864 - DNA, 21 bp, Artificial Sequence
  Synthetic
ggactctgucagaggcuccat

SEQ ID NO: 80865 - DNA, 22 bp, Artificial Sequence
  Synthetic
tgttggcugcaaggtuacaaga

SEQ ID NO: 80866 - DNA, 25 bp, Artificial Sequence
  Synthetic
aggttguggctttatgctuagaaca

SEQ ID NO: 80867 - DNA, 25 bp, Artificial Sequence
  Synthetic
accatattcacuggacatcaugcac

SEQ ID NO: 80868 - DNA, 21 bp, Artificial Sequence
  Synthetic
gcctctgagagugctacccut

SEQ ID NO: 80869 - DNA, 28 bp, Artificial Sequence
  Synthetic
gcatagccattcautcgttgattcatuc

SEQ ID NO: 80870 - DNA, 24 bp, Artificial Sequence
  Synthetic
agctgtgauaacctcacactcuct

SEQ ID NO: 80871 - DNA, 25 bp, Artificial Sequence
  Synthetic
caaggaaatcugcttagggttcuca

SEQ ID NO: 80872 - DNA, 23 bp, Artificial Sequence
  Synthetic
tcgttttccutgtccaagcugat

SEQ ID NO: 80873 - DNA, 27 bp, Artificial Sequence
  Synthetic
tgttgtaactugagctgtgtaatucct

SEQ ID NO: 80874 - DNA, 33 bp, Artificial Sequence
  Synthetic
tgtacagttaaataauagtaagttctgagtguc

SEQ ID NO: 80875 - DNA, 23 bp, Artificial Sequence
  Synthetic
aggatggucactctucaggaagt

SEQ ID NO: 80876 - DNA, 25 bp, Artificial Sequence
  Synthetic
aaattcaccuggacttccugaagag

SEQ ID NO: 80877 - DNA, 18 bp, Artificial Sequence
  Synthetic
ccactgucagcgcucagt

SEQ ID NO: 80878 - DNA, 19 bp, Artificial Sequence
  Synthetic
ggtgguctggaugagcaga

SEQ ID NO: 80879 - DNA, 21 bp, Artificial Sequence
  Synthetic
gtcctctccutcagggccuat

SEQ ID NO: 80880 - DNA, 31 bp, Artificial Sequence
  Synthetic
ctgttaagtttguatgcaacatttcuaaagt

SEQ ID NO: 80881 - DNA, 28 bp, Artificial Sequence
  Synthetic
tgggttatggucttcaaaaggatatugt

SEQ ID NO: 80882 - DNA, 27 bp, Artificial Sequence
  Synthetic
gaggttatctutttaccacagtugcac

SEQ ID NO: 80883 - DNA, 25 bp, Artificial Sequence
  Synthetic
gtgaattgcugcaacatgattguca

SEQ ID NO: 80884 - DNA, 28 bp, Artificial Sequence
  Synthetic
agctagaacttaucaaacccttttguga

SEQ ID NO: 80885 - DNA, 26 bp, Artificial Sequence
  Synthetic
tgccccgaugtaataaataugcacat

SEQ ID NO: 80886 - DNA, 25 bp, Artificial Sequence
  Synthetic
gaaagggacgaacuggtgtaaugat

SEQ ID NO: 80887 - DNA, 29 bp, Artificial Sequence
  Synthetic
caauaaattctcagauccaggaagaggaa

SEQ ID NO: 80888 - DNA, 28 bp, Artificial Sequence
  Synthetic
acacacaagacccautaaaacctatucc

SEQ ID NO: 80889 - DNA, 25 bp, Artificial Sequence
  Synthetic
gtttttccautggattcctucgcaa

SEQ ID NO: 80890 - DNA, 19 bp, Artificial Sequence
  Synthetic
cccacaucggcctgtguat

SEQ ID NO: 80891 - DNA, 28 bp, Artificial Sequence
  Synthetic
gggagattgauaactggtgtgtttaugt

SEQ ID NO: 80892 - DNA, 24 bp, Artificial Sequence
  Synthetic
acaaagatcacuccttgccucaac

SEQ ID NO: 80893 - DNA, 19 bp, Artificial Sequence
  Synthetic
gcagtuggtggacuggcat

SEQ ID NO: 80894 - DNA, 33 bp, Artificial Sequence
  Synthetic
aaaattccatcattuaattgtaaacgtgtuact

SEQ ID NO: 80895 - DNA, 21 bp, Artificial Sequence
  Synthetic
gccgccttugcactgaattug

SEQ ID NO: 80896 - DNA, 26 bp, Artificial Sequence
  Synthetic
ccagggaauatagctgaaatuagggt

SEQ ID NO: 80897 - DNA, 25 bp, Artificial Sequence
  Synthetic
aatgggucagagaagccatattucc

SEQ ID NO: 80898 - DNA, 22 bp, Artificial Sequence
  Synthetic
ggatgaaggaguctgctuggag

SEQ ID NO: 80899 - DNA, 26 bp, Artificial Sequence
  Synthetic
tgtttgacgaaguccataaaccctua

SEQ ID NO: 80900 - DNA, 26 bp, Artificial Sequence
  Synthetic
ttctctgacccautaaccttcagtuc

SEQ ID NO: 80901 - DNA, 28 bp, Artificial Sequence
  Synthetic
ggatcttgtcuaaacatcgtaacuggat

SEQ ID NO: 80902 - DNA, 27 bp, Artificial Sequence
  Synthetic
gtggtgcgaaautctcacactattaug

SEQ ID NO: 80903 - DNA, 27 bp, Artificial Sequence
  Synthetic
actcacatttcucctttgttcttguct

SEQ ID NO: 80904 - DNA, 23 bp, Artificial Sequence
  Synthetic
cacacactacaucagtggcucaa

SEQ ID NO: 80905 - DNA, 28 bp, Artificial Sequence
  Synthetic
ttctaacucagaggaauacacaaacacc

SEQ ID NO: 80906 - DNA, 26 bp, Artificial Sequence
  Synthetic
cctatttctgttugtttgcctctgut

SEQ ID NO: 80907 - DNA, 20 bp, Artificial Sequence
  Synthetic
cctcuccgaacacttugcct

SEQ ID NO: 80908 - DNA, 20 bp, Artificial Sequence
  Synthetic
ccagccttuacaagcccuct

SEQ ID NO: 80909 - DNA, 27 bp, Artificial Sequence
  Synthetic
ggucaaatttctttucagagcaagagt

SEQ ID NO: 80910 - DNA, 20 bp, Artificial Sequence
  Synthetic
tgtcccggaguttgcacauc

SEQ ID NO: 80911 - DNA, 24 bp, Artificial Sequence
  Synthetic
tttccctgtccautccatcaaguc

SEQ ID NO: 80912 - DNA, 23 bp, Artificial Sequence
  Synthetic
accagaggcugctttctctctua

SEQ ID NO: 80913 - DNA, 22 bp, Artificial Sequence
  Synthetic
caaggtgguggagaagatuggg

SEQ ID NO: 80914 - DNA, 27 bp, Artificial Sequence
  Synthetic
tcttgaaaggaacugaaatacgacgut

SEQ ID NO: 80915 - DNA, 22 bp, Artificial Sequence
  Synthetic
gcttgagctutccaatctgcuc

SEQ ID NO: 80916 - DNA, 20 bp, Artificial Sequence
  Synthetic
ctcccgcaaaaugtgccuac

SEQ ID NO: 80917 - DNA, 25 bp, Artificial Sequence
  Synthetic
gagcataacauccgcaaugacaaat

SEQ ID NO: 80918 - DNA, 27 bp, Artificial Sequence
  Synthetic
ttcatcctgtcautcctcttcctcuat

SEQ ID NO: 80919 - DNA, 25 bp, Artificial Sequence
  Synthetic
cgggaaggacuttatgtatgaguca

SEQ ID NO: 80920 - DNA, 21 bp, Artificial Sequence
  Synthetic
ggcccuggcaaaacatttgua

SEQ ID NO: 80921 - DNA, 19 bp, Artificial Sequence
  Synthetic
cgccucccccaaugaagac

SEQ ID NO: 80922 - DNA, 21 bp, Artificial Sequence
  Synthetic
agggttcuggcgtttgtaguc

SEQ ID NO: 80923 - DNA, 29 bp, Artificial Sequence
  Synthetic
gcttattgggtaautctttgggattcuct

SEQ ID NO: 80924 - DNA, 24 bp, Artificial Sequence
  Synthetic
ctatcautccctctucaccagcat

SEQ ID NO: 80925 - DNA, 21 bp, Artificial Sequence
  Synthetic
gutcttgaagcucgagagcca

SEQ ID NO: 80926 - DNA, 22 bp, Artificial Sequence
  Synthetic
ctcauggagcactcaagugaca

SEQ ID NO: 80927 - DNA, 22 bp, Artificial Sequence
  Synthetic
gagggttcuggctgtgtgauag

SEQ ID NO: 80928 - DNA, 28 bp, Artificial Sequence
  Synthetic
gaaatattaatgcauggagcctgggaua

SEQ ID NO: 80929 - DNA, 24 bp, Artificial Sequence
  Synthetic
aggagcuaaaggctcaaatugagg

SEQ ID NO: 80930 - DNA, 28 bp, Artificial Sequence
  Synthetic
cataaataggucacaaagtcttcugcct

SEQ ID NO: 80931 - DNA, 22 bp, Artificial Sequence
  Synthetic
cccttttcuacctcccccucaa

SEQ ID NO: 80932 - DNA, 23 bp, Artificial Sequence
  Synthetic
ggugaaagcagacatcucgaagt

SEQ ID NO: 80933 - DNA, 25 bp, Artificial Sequence
  Synthetic
cttcagaauacctctgacagugaca

SEQ ID NO: 80934 - DNA, 23 bp, Artificial Sequence
  Synthetic
ccagagaggcaucagaccatcua

SEQ ID NO: 80935 - DNA, 20 bp, Artificial Sequence
  Synthetic
ccuggcaattgugacccagt

SEQ ID NO: 80936 - DNA, 22 bp, Artificial Sequence
  Synthetic
gacactgaggagaaucctgcut

SEQ ID NO: 80937 - DNA, 22 bp, Artificial Sequence
  Synthetic
gggacaguaacaggtgtctuca

SEQ ID NO: 80938 - DNA, 22 bp, Artificial Sequence
  Synthetic
catgcaggugtttguagaggct

SEQ ID NO: 80939 - DNA, 21 bp, Artificial Sequence
  Synthetic
agtagaccuccctgagcacut

SEQ ID NO: 80940 - DNA, 21 bp, Artificial Sequence
  Synthetic
cctccacggcuactttccuct

SEQ ID NO: 80941 - DNA, 27 bp, Artificial Sequence
  Synthetic
caggaaagugagattctaagucaacct

SEQ ID NO: 80942 - DNA, 22 bp, Artificial Sequence
  Synthetic
cctcagguggagcatttctucc

SEQ ID NO: 80943 - DNA, 28 bp, Artificial Sequence
  Synthetic
gcctaacttctucaaaccatgatttuct

SEQ ID NO: 80944 - DNA, 23 bp, Artificial Sequence
  Synthetic
gttgcttccaggcuaagactcut

SEQ ID NO: 80945 - DNA, 28 bp, Artificial Sequence
  Synthetic
acttaccagcaaaugaaaaccaaaacut

SEQ ID NO: 80946 - DNA, 28 bp, Artificial Sequence
  Synthetic
caagagtgtcacugggagatttuaaaga

SEQ ID NO: 80947 - DNA, 28 bp, Artificial Sequence
  Synthetic
gcccacaagutctaattuagaggcaaat

SEQ ID NO: 80948 - DNA, 28 bp, Artificial Sequence
  Synthetic
gctggtaagttautgtaggtgagtucat

SEQ ID NO: 80949 - DNA, 28 bp, Artificial Sequence
  Synthetic
gactgtctctacagauaacctccttgua

SEQ ID NO: 80950 - DNA, 27 bp, Artificial Sequence
  Synthetic
cagttggccacutttacttatagctut

SEQ ID NO: 80951 - DNA, 25 bp, Artificial Sequence
  Synthetic
gtagcagugaacttactacucacga

SEQ ID NO: 80952 - DNA, 28 bp, Artificial Sequence
  Synthetic
cctccaaactuacaggtgaagtaaauct

SEQ ID NO: 80953 - DNA, 23 bp, Artificial Sequence
  Synthetic
cctaattucaccagggcgacuac

SEQ ID NO: 80954 - DNA, 23 bp, Artificial Sequence
  Synthetic
ctccactucaaccttcagcucaa

SEQ ID NO: 80955 - DNA, 20 bp, Artificial Sequence
  Synthetic
tgagaggcuguggaccaagg

SEQ ID NO: 80956 - DNA, 28 bp, Artificial Sequence
  Synthetic
ccgctatcugatagagtctguaaaggaa

SEQ ID NO: 80957 - DNA, 28 bp, Artificial Sequence
  Synthetic
cagattcuccagaaccagtuacagaaat

SEQ ID NO: 80958 - DNA, 19 bp, Artificial Sequence
  Synthetic
tcccgagcuccacguaaac

SEQ ID NO: 80959 - DNA, 24 bp, Artificial Sequence
  Synthetic
tuggaaggagtucaacagacagac

SEQ ID NO: 80960 - DNA, 28 bp, Artificial Sequence
  Synthetic
gattcgttcccucattcactttaactug

SEQ ID NO: 80961 - DNA, 28 bp, Artificial Sequence
  Synthetic
ctaacttaccgggagauaattggcaaua

SEQ ID NO: 80962 - DNA, 20 bp, Artificial Sequence
  Synthetic
ccagcgagggagacuaugag

SEQ ID NO: 80963 - DNA, 25 bp, Artificial Sequence
  Synthetic
cgtggtggaugacatagactatcug

SEQ ID NO: 80964 - DNA, 24 bp, Artificial Sequence
  Synthetic
aaatgcaugagactccacucacat

SEQ ID NO: 80965 - DNA, 21 bp, Artificial Sequence
  Synthetic
ctcttguctctgcuccccaac

SEQ ID NO: 80966 - DNA, 19 bp, Artificial Sequence
  Synthetic
ccagagccacgcgucauac

SEQ ID NO: 80967 - DNA, 23 bp, Artificial Sequence
  Synthetic
gacctggutgttgattuggacaa

SEQ ID NO: 80968 - DNA, 21 bp, Artificial Sequence
  Synthetic
ccagtggugagtgtgagtugg

SEQ ID NO: 80969 - DNA, 22 bp, Artificial Sequence
  Synthetic
cctgtggcuactgaggtagtug

SEQ ID NO: 80970 - DNA, 28 bp, Artificial Sequence
  Synthetic
ataggaaactcagutgtagaaaacucct

SEQ ID NO: 80971 - DNA, 21 bp, Artificial Sequence
  Synthetic
gagaacaggcucacggagaug

SEQ ID NO: 80972 - DNA, 24 bp, Artificial Sequence
  Synthetic
ggacttgggugttcaattcuccag

SEQ ID NO: 80973 - DNA, 23 bp, Artificial Sequence
  Synthetic
caagaatauggacccgctgaaug

SEQ ID NO: 80974 - DNA, 26 bp, Artificial Sequence
  Synthetic
agacagacctuggtctcagtaauaca

SEQ ID NO: 80975 - DNA, 24 bp, Artificial Sequence
  Synthetic
gattctcaccutctttagcgcuct

SEQ ID NO: 80976 - DNA, 24 bp, Artificial Sequence
  Synthetic
acuggtugaaagcggaaaaagaga

SEQ ID NO: 80977 - DNA, 21 bp, Artificial Sequence
  Synthetic
tgatggccutgttagcauggg

SEQ ID NO: 80978 - DNA, 26 bp, Artificial Sequence
  Synthetic
cagaauggaacagatgacuggaaagt

SEQ ID NO: 80979 - DNA, 26 bp, Artificial Sequence
  Synthetic
ggtagggcattuctcccacttctuaa

SEQ ID NO: 80980 - DNA, 21 bp, Artificial Sequence
  Synthetic
agcacccuccaatccttccua

SEQ ID NO: 80981 - DNA, 24 bp, Artificial Sequence
  Synthetic
gtaugcaacaggacatugagcaag

SEQ ID NO: 80982 - DNA, 21 bp, Artificial Sequence
  Synthetic
gggcagaccagugtcatugag

SEQ ID NO: 80983 - DNA, 20 bp, Artificial Sequence
  Synthetic
gagacccacutgcctuccaa

SEQ ID NO: 80984 - DNA, 28 bp, Artificial Sequence
  Synthetic
ctcgttttgattcutcacaacaggatut

SEQ ID NO: 80985 - DNA, 24 bp, Artificial Sequence
  Synthetic
accagaccauatttgtuggacaca

SEQ ID NO: 80986 - DNA, 19 bp, Artificial Sequence
  Synthetic
cagggugaagtggcugcat

SEQ ID NO: 80987 - DNA, 25 bp, Artificial Sequence
  Synthetic
gggttggttgutattacttagcuca

SEQ ID NO: 80988 - DNA, 21 bp, Artificial Sequence
  Synthetic
cagcccucccaacacattuct

SEQ ID NO: 80989 - DNA, 20 bp, Artificial Sequence
  Synthetic
gaagccuccgtgcuacacaa

SEQ ID NO: 80990 - DNA, 20 bp, Artificial Sequence
  Synthetic
acugacacccaccugagact

SEQ ID NO: 80991 - DNA, 25 bp, Artificial Sequence
  Synthetic
gcatgtctcuacctctatctccuct

SEQ ID NO: 80992 - DNA, 23 bp, Artificial Sequence
  Synthetic
ccgccggutgauaaagaaaaact

SEQ ID NO: 80993 - DNA, 26 bp, Artificial Sequence
  Synthetic
tctaatcccttucactctggaaucct

SEQ ID NO: 80994 - DNA, 26 bp, Artificial Sequence
  Synthetic
tcaccgguacaagttcttttcttugt

SEQ ID NO: 80995 - DNA, 20 bp, Artificial Sequence
  Synthetic
actcttgugcgtgccttcuc

SEQ ID NO: 80996 - DNA, 18 bp, Artificial Sequence
  Synthetic
cactgaguccccgtgcut

SEQ ID NO: 80997 - DNA, 18 bp, Artificial Sequence
  Synthetic
gutgucggagacgcggat

SEQ ID NO: 80998 - DNA, 21 bp, Artificial Sequence
  Synthetic
ggaaggaaaggccgauacuca

SEQ ID NO: 80999 - DNA, 22 bp, Artificial Sequence
  Synthetic
cacttcuccccagttgtcuact

SEQ ID NO: 81000 - DNA, 26 bp, Artificial Sequence
  Synthetic
aggaatggauaatagctccucccaaa

SEQ ID NO: 81001 - DNA, 26 bp, Artificial Sequence
  Synthetic
cccagtctucattgctactaaucagg

SEQ ID NO: 81002 - DNA, 20 bp, Artificial Sequence
  Synthetic
cttcggcucggtctacucag

SEQ ID NO: 81003 - DNA, 19 bp, Artificial Sequence
  Synthetic
ccagggtcuccgtcaggut

SEQ ID NO: 81004 - DNA, 20 bp, Artificial Sequence
  Synthetic
tccaggtuggacacgagtug

SEQ ID NO: 81005 - DNA, 23 bp, Artificial Sequence
  Synthetic
aggtuccagaaggagaucgagaa

SEQ ID NO: 81006 - DNA, 21 bp, Artificial Sequence
  Synthetic
ccaaaggcutcgtaugcaggt

SEQ ID NO: 81007 - DNA, 21 bp, Artificial Sequence
  Synthetic
ccccttacagugcagccauag

SEQ ID NO: 81008 - DNA, 19 bp, Artificial Sequence
  Synthetic
ggaacgcucgagtctgcut

SEQ ID NO: 81009 - DNA, 27 bp, Artificial Sequence
  Synthetic
tcctctctcuactttgcaacauaaacc

SEQ ID NO: 81010 - DNA, 28 bp, Artificial Sequence
  Synthetic
tgggtgtatcuggtgttgaaaattcuaa

SEQ ID NO: 81011 - DNA, 25 bp, Artificial Sequence
  Synthetic
cccaattttcucctgattgtuccag

SEQ ID NO: 81012 - DNA, 25 bp, Artificial Sequence
  Synthetic
gtgctatatgucaaagtgcuaggct

SEQ ID NO: 81013 - DNA, 24 bp, Artificial Sequence
  Synthetic
gggaactcauggtgtacccctaut

SEQ ID NO: 81014 - DNA, 20 bp, Artificial Sequence
  Synthetic
gagcagggaagucacgtugt

SEQ ID NO: 81015 - DNA, 27 bp, Artificial Sequence
  Synthetic
gccttggtttcuaagtttctagttucc

SEQ ID NO: 81016 - DNA, 25 bp, Artificial Sequence
  Synthetic
atgtgcttgcuttacatcgtcuact

SEQ ID NO: 81017 - DNA, 28 bp, Artificial Sequence
  Synthetic
ccaagaagaugcaaagtaaaaagcacua

SEQ ID NO: 81018 - DNA, 29 bp, Artificial Sequence
  Synthetic
tggcaaacaauaccaaatttacttcaugt

SEQ ID NO: 81019 - DNA, 18 bp, Artificial Sequence
  Synthetic
cggtgcuctgcguaccaa

SEQ ID NO: 81020 - DNA, 28 bp, Artificial Sequence
  Synthetic
cctcaaaagcautaagaaaatguggact

SEQ ID NO: 81021 - DNA, 26 bp, Artificial Sequence
  Synthetic
tgaaaatgacaagcuggttgagacua

SEQ ID NO: 81022 - DNA, 30 bp, Artificial Sequence; identical to SEQ ID NO: 68284
  Synthetic

SEQ ID NO: 81023 - DNA, 21 bp, Artificial Sequence
  Synthetic
tcagctgccuacttccuccat

SEQ ID NO: 81024 - DNA, 21 bp, Artificial Sequence
  Synthetic
ggcutctggactuggaaccat

SEQ ID NO: 81025 - DNA, 27 bp, Artificial Sequence
  Synthetic
agagataagccugaagataatgugggt

SEQ ID NO: 81026 - DNA, 26 bp, Artificial Sequence
  Synthetic
ggaaatgugggaggagagaattacug

SEQ ID NO: 81027 - DNA, 24 bp, Artificial Sequence
  Synthetic
caagcatgtccuagttttgcagut

SEQ ID NO: 81028 - DNA, 24 bp, Artificial Sequence
  Synthetic
tggacagtcuacgaaaagctctug

SEQ ID NO: 81029 - DNA, 27 bp, Artificial Sequence
  Synthetic
ggactgaacaaguaggaaaaugacaga

SEQ ID NO: 81030 - DNA, 28 bp, Artificial Sequence
  Synthetic
ctattacgttacgauttccccctugaat

SEQ ID NO: 81031 - DNA, 23 bp, Artificial Sequence
  Synthetic
cgaagttccugatggagctguaa

SEQ ID NO: 81032 - DNA, 22 bp, Artificial Sequence
  Synthetic
ggtagtttguttgtggguggct

SEQ ID NO: 81033 - DNA, 28 bp, Artificial Sequence
  Synthetic
ccttttggatgtugtgctcttgtttaut

SEQ ID NO: 81034 - DNA, 20 bp, Artificial Sequence
  Synthetic
tgagaaguaccgctcccuca

SEQ ID NO: 81035 - DNA, 21 bp, Artificial Sequence
  Synthetic
gttguggagctgguggagaat

SEQ ID NO: 81036 - DNA, 22 bp, Artificial Sequence
  Synthetic
gctgacagaaagugctgcaaut

SEQ ID NO: 81037 - DNA, 26 bp, Artificial Sequence
  Synthetic
gcatgutaccttaagaucaaccacca

SEQ ID NO: 81038 - DNA, 27 bp, Artificial Sequence
  Synthetic
tgtcattttccuacttgttcaguccat

SEQ ID NO: 81039 - DNA, 28 bp, Artificial Sequence
  Synthetic
caagtccuatgaacttaucaacgaagag

SEQ ID NO: 81040 - DNA, 19 bp, Artificial Sequence
  Synthetic
tcctcgtacugctggguga

SEQ ID NO: 81041 - DNA, 20 bp, Artificial Sequence
  Synthetic
cctggacgcugtccttguag

SEQ ID NO: 81042 - DNA, 22 bp, Artificial Sequence
  Synthetic
aaaaggtcguctacagcugcaa

SEQ ID NO: 81043 - DNA, 21 bp, Artificial Sequence
  Synthetic
tttcacugaatgguccacgct

SEQ ID NO: 81044 - DNA, 26 bp, Artificial Sequence
  Synthetic
gcattatcggcaguttgatctugaga

SEQ ID NO: 81045 - DNA, 28 bp, Artificial Sequence
  Synthetic
gccaaagaaaaugctaaaatgtuggaat

SEQ ID NO: 81046 - DNA, 27 bp, Artificial Sequence
  Synthetic
cttttgatgacatugctcatgctagug

SEQ ID NO: 81047 - DNA, 23 bp, Artificial Sequence
  Synthetic
ctcugggagctacuaacaggagt

SEQ ID NO: 81048 - DNA, 27 bp, Artificial Sequence
  Synthetic
cttagaggutagtttctttuccaccct

SEQ ID NO: 81049 - DNA, 23 bp, Artificial Sequence
  Synthetic
tgaaagauccagaccctgaucca

SEQ ID NO: 81050 - DNA, 22 bp, Artificial Sequence
  Synthetic
ctttcccaaccgugaccttcut

SEQ ID NO: 81051 - DNA, 24 bp, Artificial Sequence
  Synthetic
aaaaacttcaucaacagcccagug

SEQ ID NO: 81052 - DNA, 24 bp, Artificial Sequence
  Synthetic
caacagaagtutcaggtgacugag

SEQ ID NO: 81053 - DNA, 26 bp, Artificial Sequence
  Synthetic
cctgttgguggaagactcataaauca

SEQ ID NO: 81054 - DNA, 25 bp, Artificial Sequence
  Synthetic
ggacattattgaucacacctgggut

SEQ ID NO: 81055 - DNA, 28 bp, Artificial Sequence
  Synthetic
gagatggtctctugggtgaattttacut

SEQ ID NO: 81056 - DNA, 23 bp, Artificial Sequence
  Synthetic
ggcaacacagcuagaattggaug

SEQ ID NO: 81057 - DNA, 24 bp, Artificial Sequence
  Synthetic
ccatcagttggutggcagttttug

SEQ ID NO: 81058 - DNA, 27 bp, Artificial Sequence
  Synthetic
cacaaacutgugagagagagacaagaa

SEQ ID NO: 81059 - DNA, 21 bp, Artificial Sequence
  Synthetic
tgccaaaauggaguccaacca

SEQ ID NO: 81060 - DNA, 17 bp, Artificial Sequence
  Synthetic
gtggcccccuctuggat

SEQ ID NO: 81061 - DNA, 17 bp, Artificial Sequence
  Synthetic
gcacucccagccucgaa

SEQ ID NO: 81062 - DNA, 23 bp, Artificial Sequence
  Synthetic
catagcagcugacttcucaccat

SEQ ID NO: 81063 - DNA, 26 bp, Artificial Sequence
  Synthetic
aaggtacccuggttattgtggtatug

SEQ ID NO: 81064 - DNA, 17 bp, Artificial Sequence
  Synthetic
gctucgaggcugggagt

SEQ ID NO: 81065 - DNA, 20 bp, Artificial Sequence
  Synthetic
caggaacuacgcctccauca

SEQ ID NO: 81066 - DNA, 22 bp, Artificial Sequence
  Synthetic
gtttactgcugcagctaccuct

SEQ ID NO: 81067 - DNA, 21 bp, Artificial Sequence
  Synthetic
tgagggcaagacugaggacut

SEQ ID NO: 81068 - DNA, 18 bp, Artificial Sequence
  Synthetic
gttccugccccagcctut

SEQ ID NO: 81069 - DNA, 21 bp, Artificial Sequence
  Synthetic
gaaattcgagcuggtgccauc

SEQ ID NO: 81070 - DNA, 18 bp, Artificial Sequence
  Synthetic
cgggatuccgcttcguct

SEQ ID NO: 81071 - DNA, 19 bp, Artificial Sequence
  Synthetic
ccagcgaggacaucuggaa

SEQ ID NO: 81072 - DNA, 20 bp, Artificial Sequence
  Synthetic
gggacccagacgaguctcut

SEQ ID NO: 81073 - DNA, 22 bp, Artificial Sequence
  Synthetic
gtggtctgatuctgaccctgut

SEQ ID NO: 81074 - DNA, 32 bp, Artificial Sequence
  Synthetic
gaaagacattgagaautatattcaagauggga

SEQ ID NO: 81075 - DNA, 28 bp, Artificial Sequence
  Synthetic
tcgcattcactuagttgagctattacut

SEQ ID NO: 81076 - DNA, 29 bp, Artificial Sequence
  Synthetic
agatgggaaagacgacuataagaagguaa

SEQ ID NO: 81077 - DNA, 27 bp, Artificial Sequence
  Synthetic
tcttttctttgugtttctcgcatucac

SEQ ID NO: 81078 - DNA, 20 bp, Artificial Sequence
  Synthetic
cgatggcaccagcucgaaut

SEQ ID NO: 81079 - DNA, 19 bp, Artificial Sequence
  Synthetic
agggagcggacauggacua

SEQ ID NO: 81080 - DNA, 20 bp, Artificial Sequence
  Synthetic
ccccaugacgccctugaaaa

SEQ ID NO: 81081 - DNA, 24 bp, Artificial Sequence
  Synthetic
ctctctgttuctggttccucacag

SEQ ID NO: 81082 - DNA, 28 bp, Artificial Sequence
  Synthetic
agtcatagtcguagaaatagtgctggua

SEQ ID NO: 81083 - DNA, 17 bp, Artificial Sequence
  Synthetic
cgacugugccgagggac

SEQ ID NO: 81084 - DNA, 30 bp, Artificial Sequence
  Synthetic
agaaaaagauacaaccgtattcagaauact

SEQ ID NO: 81085 - DNA, 28 bp, Artificial Sequence
  Synthetic
ttagctgagtaaugaactgggaguaaac

SEQ ID NO: 81086 - DNA, 21 bp, Artificial Sequence
  Synthetic
aaaatagccaugctggcugga

SEQ ID NO: 81087 - DNA, 25 bp, Artificial Sequence
  Synthetic
acttcttgtaacucagcctctguct

SEQ ID NO: 81088 - DNA, 21 bp, Artificial Sequence
  Synthetic
ccacctagtuccgtgccatug

SEQ ID NO: 81089 - DNA, 28 bp, Artificial Sequence
  Synthetic
tgtccaactatgtuagctacgactctua

SEQ ID NO: 81090 - DNA, 20 bp, Artificial Sequence
  Synthetic
agcagtugttcagguggcat

SEQ ID NO: 81091 - DNA, 25 bp, Artificial Sequence
  Synthetic
tgacaaatactgugcagaccactuc

SEQ ID NO: 81092 - DNA, 27 bp, Artificial Sequence
  Synthetic
tgtgaaagaacaacaugaacccauagt

SEQ ID NO: 81093 - DNA, 21 bp, Artificial Sequence
  Synthetic
caaaatcuccagggtggcuct

SEQ ID NO: 81094 - DNA, 23 bp, Artificial Sequence
  Synthetic
ggatttggcugaaacaaagcugt

SEQ ID NO: 81095 - DNA, 23 bp, Artificial Sequence
  Synthetic
cagaatggctuttcccgaactut

SEQ ID NO: 81096 - DNA, 25 bp, Artificial Sequence
  Synthetic
aggcacaatcaugaagtaagccaua

SEQ ID NO: 81097 - DNA, 23 bp, Artificial Sequence
  Synthetic
acgtgaacucaaggaagacucac

SEQ ID NO: 81098 - DNA, 26 bp, Artificial Sequence
  Synthetic
ctgggagautcctttactugaaccat

SEQ ID NO: 81099 - DNA, 23 bp, Artificial Sequence
  Synthetic
cctcttccuctgttggttgauga

SEQ ID NO: 81100 - DNA, 25 bp, Artificial Sequence
  Synthetic
caaaagtaataccaucccccgacut

SEQ ID NO: 81101 - DNA, 28 bp, Artificial Sequence
  Synthetic
tcaaacagaugaaatccctgtatugaca

SEQ ID NO: 81102 - DNA, 26 bp, Artificial Sequence
  Synthetic
tgtatacattuggataccagtgucct

SEQ ID NO: 81103 - DNA, 25 bp, Artificial Sequence
  Synthetic
attcgagctcugcattcttctucat

SEQ ID NO: 81104 - DNA, 19 bp, Artificial Sequence
  Synthetic
gcctcucaggacugaccca

SEQ ID NO: 81105 - DNA, 20 bp, Artificial Sequence
  Synthetic
cuccagaagccacgtuacga

SEQ ID NO: 81106 - DNA, 28 bp, Artificial Sequence
  Synthetic
aacatgguagttttcttguacgagagag

SEQ ID NO: 81107 - DNA, 24 bp, Artificial Sequence
  Synthetic
acatctugccagacccattttuca

SEQ ID NO: 81108 - DNA, 22 bp, Artificial Sequence
  Synthetic
agaaccccagguacatggtcua

SEQ ID NO: 81109 - DNA, 21 bp, Artificial Sequence
  Synthetic
cgacacugtggtcatuggcat

SEQ ID NO: 81110 - DNA, 24 bp, Artificial Sequence
  Synthetic
cgggaaaagccautctgcatttut

SEQ ID NO: 81111 - DNA, 27 bp, Artificial Sequence
  Synthetic
tctgagaagtgaaugtactgagtggua

SEQ ID NO: 81112 - DNA, 22 bp, Artificial Sequence
  Synthetic
cgctcuccacccatctcactua

SEQ ID NO: 81113 - DNA, 23 bp, Artificial Sequence
  Synthetic
agcucagagaggttucaacacac

SEQ ID NO: 81114 - DNA, 23 bp, Artificial Sequence
  Synthetic
agctcacagacucaatcacctuc

SEQ ID NO: 81115 - DNA, 20 bp, Artificial Sequence
  Synthetic
tguccuagacggacgaacct

SEQ ID NO: 81116 - DNA, 23 bp, Artificial Sequence
  Synthetic
gccccgttugtcagagagtttut

SEQ ID NO: 81117 - DNA, 22 bp, Artificial Sequence
  Synthetic
catcacgccgcutttcctttut

SEQ ID NO: 81118 - DNA, 21 bp, Artificial Sequence
  Synthetic
cccuagccaacaaucgggaaa

SEQ ID NO: 81119 - DNA, 25 bp, Artificial Sequence
  Synthetic
tttattgagugcaagtcctcuccac

SEQ ID NO: 81120 - DNA, 23 bp, Artificial Sequence
  Synthetic
cattgtgccuctctctcttguca

SEQ ID NO: 81121 - DNA, 25 bp, Artificial Sequence
  Synthetic
gcttgttcucattggctucaaagat

SEQ ID NO: 81122 - DNA, 28 bp, Artificial Sequence
  Synthetic
gtgaatgagtatgugggtgagcttauag

SEQ ID NO: 81123 - DNA, 27 bp, Artificial Sequence
  Synthetic
cagtgaaaacagcauttcccattacut

SEQ ID NO: 81124 - DNA, 22 bp, Artificial Sequence
  Synthetic
gttctcaaugacagggaugcga

SEQ ID NO: 81125 - DNA, 20 bp, Artificial Sequence
  Synthetic
caggtccugcgtctctctug

SEQ ID NO: 81126 - DNA, 22 bp, Artificial Sequence
  Synthetic
cctggtcacaguggttgtctut

SEQ ID NO: 81127 - DNA, 28 bp, Artificial Sequence
  Synthetic
ggtaggaaaauccacagtagtuccaaat

SEQ ID NO: 81128 - DNA, 23 bp, Artificial Sequence
  Synthetic
cactcatcacgauttcaggccua

SEQ ID NO: 81129 - DNA, 25 bp, Artificial Sequence
  Synthetic
gtaccugggaacaacctacttugag

SEQ ID NO: 81130 - DNA, 23 bp, Artificial Sequence
  Synthetic
gccagcuaggaagagccuagaat

SEQ ID NO: 81131 - DNA, 19 bp, Artificial Sequence
  Synthetic
cctcaagcugcgcatcuac

SEQ ID NO: 81132 - DNA, 24 bp, Artificial Sequence
  Synthetic
gtgcaactcuctggcttaaucact

SEQ ID NO: 81133 - DNA, 29 bp, Artificial Sequence
  Synthetic
tcacaggtattautctcactaaggtuggt

SEQ ID NO: 81134 - DNA, 25 bp, Artificial Sequence
  Synthetic
gccagtgggauagtttttctggaut

SEQ ID NO: 81135 - DNA, 27 bp, Artificial Sequence
  Synthetic
cgacaaggtauaatggcagaatcauca

SEQ ID NO: 81136 - DNA, 29 bp, Artificial Sequence
  Synthetic
aaactcaagucaacagaatcagagcuaaa

SEQ ID NO: 81137 - DNA, 24 bp, Artificial Sequence
  Synthetic
aggcatgagaugggtacctttuac

SEQ ID NO: 81138 - DNA, 28 bp, Artificial Sequence
  Synthetic
ttttccatuacagcaaacacaaatucca

SEQ ID NO: 81139 - DNA, 22 bp, Artificial Sequence
  Synthetic
gatactaagcuggctcugcagt

SEQ ID NO: 81140 - DNA, 20 bp, Artificial Sequence
  Synthetic
gcagagagacauggcacuca

SEQ ID NO: 81141 - DNA, 23 bp, Artificial Sequence
  Synthetic
agtaucgagaaccgagugagagg

SEQ ID NO: 81142 - DNA, 18 bp, Artificial Sequence
  Synthetic
catgcgcuccuccaggaa

SEQ ID NO: 81143 - DNA, 17 bp, Artificial Sequence
  Synthetic
aatcgggcacgcuccuc

SEQ ID NO: 81144 - DNA, 21 bp, Artificial Sequence
  Synthetic
cctggttcugcagagtcacut

SEQ ID NO: 81145 - DNA, 22 bp, Artificial Sequence
  Synthetic
ccgacucggagtatagtuccca

SEQ ID NO: 81146 - DNA, 26 bp, Artificial Sequence
  Synthetic
acggattatutagtcatcguggagga

SEQ ID NO: 81147 - DNA, 19 bp, Artificial Sequence
  Synthetic
agggcccuacagugaaggt

SEQ ID NO: 81148 - DNA, 25 bp, Artificial Sequence
  Synthetic
catgtgtggcutaatcttgcctcua

SEQ ID NO: 81149 - DNA, 23 bp, Artificial Sequence
  Synthetic
gctacagtauggaccctgucaca

SEQ ID NO: 81150 - DNA, 27 bp, Artificial Sequence
  Synthetic
tcattacctgttcutttgtctgagcut

SEQ ID NO: 81151 - DNA, 26 bp, Artificial Sequence
  Synthetic
tcacgatgttucttttctccauccag

SEQ ID NO: 81152 - DNA, 18 bp, Artificial Sequence
  Synthetic
gaggccugacactgucgt

SEQ ID NO: 81153 - DNA, 26 bp, Artificial Sequence
  Synthetic
catggaatccccutaaataggtguct

SEQ ID NO: 81154 - DNA, 19 bp, Artificial Sequence
  Synthetic
ggcgacauggcccctatug

SEQ ID NO: 81155 - DNA, 22 bp, Artificial Sequence
  Synthetic
cgggtuacaccacttgtgtcug

SEQ ID NO: 81156 - DNA, 23 bp, Artificial Sequence
  Synthetic
gcaggaacaaautctccaggtug

SEQ ID NO: 81157 - DNA, 21 bp, Artificial Sequence
  Synthetic
cagaccccugtgatgctgtua

SEQ ID NO: 81158 - DNA, 25 bp, Artificial Sequence
  Synthetic
gcatttcacaucacagtaggagcut

SEQ ID NO: 81159 - DNA, 25 bp, Artificial Sequence
  Synthetic
caaacaagagauggcaatgtttucc

SEQ ID NO: 81160 - DNA, 17 bp, Artificial Sequence
  Synthetic
aggcggtucaagccgut

SEQ ID NO: 81161 - DNA, 23 bp, Artificial Sequence
  Synthetic
ggaacagaggccccugaaaaaua

SEQ ID NO: 81162 - DNA, 26 bp, Artificial Sequence
  Synthetic
gccctaggatuaactttttcccguaa

SEQ ID NO: 81163 - DNA, 25 bp, Artificial Sequence
  Synthetic
acgaggaucagacaggtaagtugat

SEQ ID NO: 81164 - DNA, 22 bp, Artificial Sequence
  Synthetic
acagcagacagggcuttaaugg

SEQ ID NO: 81165 - DNA, 23 bp, Artificial Sequence
  Synthetic
cgcaccttaugattttgcctgut

SEQ ID NO: 81166 - DNA, 21 bp, Artificial Sequence
  Synthetic
ccacatctccutaccctccug

SEQ ID NO: 81167 - DNA, 26 bp, Artificial Sequence
  Synthetic
caagggaattccuaatgttggtguct

SEQ ID NO: 81168 - DNA, 21 bp, Artificial Sequence
  Synthetic
agggcaauattgtgcctuggt

SEQ ID NO: 81169 - DNA, 28 bp, Artificial Sequence
  Synthetic
agtaatgctacucaacacagagtctgua

SEQ ID NO: 81170 - DNA, 25 bp, Artificial Sequence
  Synthetic
tctggcutcttactttugggaacaa

SEQ ID NO: 81171 - DNA, 27 bp, Artificial Sequence
  Synthetic
tgacaaaagccutcacctacugaaaaa

SEQ ID NO: 81172 - DNA, 25 bp, Artificial Sequence
  Synthetic
ctttgtccauactgcccatatuggt

SEQ ID NO: 81173 - DNA, 20 bp, Artificial Sequence
  Synthetic
gaaccuaccaccacggtguc

SEQ ID NO: 81174 - DNA, 19 bp, Artificial Sequence
  Synthetic
ggtgggcacacacuacguc

SEQ ID NO: 81175 - DNA, 23 bp, Artificial Sequence
  Synthetic
agaaccugcccatctactcugaa

SEQ ID NO: 81176 - DNA, 24 bp, Artificial Sequence
  Synthetic
agcagaugaccaaagatacagugg

SEQ ID NO: 81177 - DNA, 27 bp, Artificial Sequence
  Synthetic
tgaaacccaaaugtaactctuggaaca

SEQ ID NO: 81178 - DNA, 26 bp, Artificial Sequence
  Synthetic
cttcgagatauaaggtgctgagtugt

SEQ ID NO: 81179 - DNA, 28 bp, Artificial Sequence
  Synthetic
ctcagaatugcagaaaaagaaaacugga

SEQ ID NO: 81180 - DNA, 20 bp, Artificial Sequence
  Synthetic
aaucagccugcaagccagat

SEQ ID NO: 81181 - DNA, 22 bp, Artificial Sequence
  Synthetic
gtgcattgugatcgggaaugag

SEQ ID NO: 81182 - DNA, 21 bp, Artificial Sequence
  Synthetic
ctccctgtcucctttcgctut

SEQ ID NO: 81183 - DNA, 21 bp, Artificial Sequence
  Synthetic
gctccgtgcuttctaggtcut

SEQ ID NO: 81184 - DNA, 28 bp, Artificial Sequence
  Synthetic
tgaaggcttttgucattttctcctttut

SEQ ID NO: 81185 - DNA, 28 bp, Artificial Sequence
  Synthetic
cttgcattaatucgggatatacguagga

SEQ ID NO: 81186 - DNA, 26 bp, Artificial Sequence
  Synthetic
ctgaaggugaggcttaauagacaaga

SEQ ID NO: 81187 - DNA, 25 bp, Artificial Sequence
  Synthetic
tgaccagcttuccttttctgttuca

SEQ ID NO: 81188 - DNA, 28 bp, Artificial Sequence
  Synthetic
gctcttcatatgguctagtctctgacug

SEQ ID NO: 81189 - DNA, 23 bp, Artificial Sequence
  Synthetic
cctcttcccaauctggctgttut

SEQ ID NO: 81190 - DNA, 24 bp, Artificial Sequence
  Synthetic
tgagcagccacuttattctuaccc

SEQ ID NO: 81191 - DNA, 28 bp, Artificial Sequence
  Synthetic
tctccataucccattccctguagaaaaa

SEQ ID NO: 81192 - DNA, 21 bp, Artificial Sequence
  Synthetic
tgtccacucgaagtugaccac

SEQ ID NO: 81193 - DNA, 25 bp, Artificial Sequence
  Synthetic
gacctaagccaauctctctcuacca

SEQ ID NO: 81194 - DNA, 21 bp, Artificial Sequence
  Synthetic
tgatggcgugatccccaaaut

SEQ ID NO: 81195 - DNA, 24 bp, Artificial Sequence
  Synthetic
acaggttgccutactggttaccua

SEQ ID NO: 81196 - DNA, 22 bp, Artificial Sequence
  Synthetic
ctccactcautgccatgacuct

SEQ ID NO: 81197 - DNA, 21 bp, Artificial Sequence
  Synthetic
cctccacgguactcctgtcuc

SEQ ID NO: 81198 - DNA, 23 bp, Artificial Sequence
  Synthetic
tgggatctttuctctgagaggut

SEQ ID NO: 81199 - DNA, 24 bp, Artificial Sequence
  Synthetic
tgaaccgagcauagtttccttugg

SEQ ID NO: 81200 - DNA, 24 bp, Artificial Sequence
  Synthetic
gcccttgtacauttccacaatcuc

SEQ ID NO: 81201 - DNA, 28 bp, Artificial Sequence
  Synthetic
gagaatcaaactucctaacctgttccua

SEQ ID NO: 81202 - DNA, 21 bp, Artificial Sequence
  Synthetic
cccugggaaaagcctcaucac

SEQ ID NO: 81203 - DNA, 25 bp, Artificial Sequence
  Synthetic
ctggaagtgtautttgctctggtut

SEQ ID NO: 81204 - DNA, 23 bp, Artificial Sequence
  Synthetic
ccggttgaucttcgguagagagt

SEQ ID NO: 81205 - DNA, 22 bp, Artificial Sequence
  Synthetic
gacccaggucctctacaagaug

SEQ ID NO: 81206 - DNA, 22 bp, Artificial Sequence
  Synthetic
tgtctggccaugaggaaatguc

SEQ ID NO: 81207 - DNA, 20 bp, Artificial Sequence
  Synthetic
gccuaaccccgtatgugacc

SEQ ID NO: 81208 - DNA, 24 bp, Artificial Sequence
  Synthetic
tcaaacatcaucacggagauccac

SEQ ID NO: 81209 - DNA, 23 bp, Artificial Sequence
  Synthetic
tgtcctgacugttgaggaacuca

SEQ ID NO: 81210 - DNA, 21 bp, Artificial Sequence
  Synthetic
accgaatcautgatgctgguc

SEQ ID NO: 81211 - DNA, 23 bp, Artificial Sequence
  Synthetic
tgtcagcugcagaatccugaaat

SEQ ID NO: 81212 - DNA, 22 bp, Artificial Sequence
  Synthetic
guctctuggaagagggcaagac

SEQ ID NO: 81213 - DNA, 22 bp, Artificial Sequence
  Synthetic
ggcagctugtttgttcatguga

SEQ ID NO: 81214 - DNA, 23 bp, Artificial Sequence
  Synthetic
gccccucccagatctctuaaagt

SEQ ID NO: 81215 - DNA, 24 bp, Artificial Sequence
  Synthetic
gctttatgagaugctgagugacca

SEQ ID NO: 81216 - DNA, 21 bp, Artificial Sequence
  Synthetic
gtgatcacagutgacgagcut

SEQ ID NO: 81217 - DNA, 21 bp, Artificial Sequence
  Synthetic
gagaagaaccuggucccagag

SEQ ID NO: 81218 - DNA, 26 bp, Artificial Sequence
  Synthetic
ttgaagucaacaacagggaggtuaat

SEQ ID NO: 81219 - DNA, 25 bp, Artificial Sequence
  Synthetic
cacaccagagaaagaautgcctgua

SEQ ID NO: 81220 - DNA, 22 bp, Artificial Sequence
  Synthetic
atcaucaaaggagcggaucgag

SEQ ID NO: 81221 - DNA, 23 bp, Artificial Sequence
  Synthetic
cutggagcttuccacaggagaaa

SEQ ID NO: 81222 - DNA, 21 bp, Artificial Sequence
  Synthetic
cccatcugagacccggatcut

SEQ ID NO: 81223 - DNA, 25 bp, Artificial Sequence
  Synthetic
ctctctgtugaaagtccctaaugct

SEQ ID NO: 81224 - DNA, 22 bp, Artificial Sequence
  Synthetic
gggagaggutaatgggccuagt

SEQ ID NO: 81225 - DNA, 21 bp, Artificial Sequence
  Synthetic
tgcccgccugttctctuaaag

SEQ ID NO: 81226 - DNA, 22 bp, Artificial Sequence
  Synthetic
ggaaaagtgaggugtggagcut

SEQ ID NO: 81227 - DNA, 20 bp, Artificial Sequence
  Synthetic
ggguacagctcucaccaagg

SEQ ID NO: 81228 - DNA, 24 bp, Artificial Sequence
  Synthetic
ccaacguacatgtgattgugaaag

SEQ ID NO: 81229 - DNA, 21 bp, Artificial Sequence
  Synthetic
aacccatcugggccatuacag

SEQ ID NO: 81230 - DNA, 25 bp, Artificial Sequence
  Synthetic
ctctatccttcaauttccccgtcut

SEQ ID NO: 81231 - DNA, 28 bp, Artificial Sequence
  Synthetic
cctgtagtatcutgcttggtcauaaagg

SEQ ID NO: 81232 - DNA, 25 bp, Artificial Sequence
  Synthetic
cctcattcacaggcuggcttatuag

SEQ ID NO: 81233 - DNA, 29 bp, Artificial Sequence
  Synthetic
actgaaugagaacttaagugggaaacaaa

SEQ ID NO: 81234 - DNA, 25 bp, Artificial Sequence
  Synthetic
cctccagcuattacgggtguagaat

SEQ ID NO: 81235 - DNA, 29 bp, Artificial Sequence
  Synthetic
gcaaagccuaaatctcauagaacagaaag

SEQ ID NO: 81236 - DNA, 22 bp, Artificial Sequence
  Synthetic
caaacuccacattccuggcaag

SEQ ID NO: 81237 - DNA, 24 bp, Artificial Sequence
  Synthetic
cgacauguacaagggcaagaagag

SEQ ID NO: 81238 - DNA, 20 bp, Artificial Sequence
  Synthetic
gcggctgugtctcctctcua

SEQ ID NO: 81239 - DNA, 23 bp, Artificial Sequence
  Synthetic
cctcacaggcaucactgaaguat

SEQ ID NO: 81240 - DNA, 21 bp, Artificial Sequence
  Synthetic
ggaggucccaaatcccaugag

SEQ ID NO: 81241 - DNA, 20 bp, Artificial Sequence
  Synthetic
agcagcugguacacgacaag

SEQ ID NO: 81242 - DNA, 23 bp, Artificial Sequence
  Synthetic
gtctacatgugttgcagctcuct

SEQ ID NO: 81243 - DNA, 17 bp, Artificial Sequence
  Synthetic
tgggugggaagccucct

SEQ ID NO: 81244 - DNA, 20 bp, Artificial Sequence
  Synthetic
ctcuggagaggaggguagca

SEQ ID NO: 81245 - DNA, 17 bp, Artificial Sequence
  Synthetic
gucucgcccccgaaaca

SEQ ID NO: 81246 - DNA, 19 bp, Artificial Sequence
  Synthetic
cggcgtucaaccacctuct

SEQ ID NO: 81247 - DNA, 18 bp, Artificial Sequence
  Synthetic
ggcaccacugagauggca

SEQ ID NO: 81248 - DNA, 21 bp, Artificial Sequence
  Synthetic
ccacaucaucgagaacccaca

SEQ ID NO: 81249 - DNA, 22 bp, Artificial Sequence
  Synthetic
gagaaagggagggaucgtucag

SEQ ID NO: 81250 - DNA, 22 bp, Artificial Sequence
  Synthetic
ggtcagggaccaaaucccaauc

SEQ ID NO: 81251 - DNA, 20 bp, Artificial Sequence
  Synthetic
tgactgagggugaggagcut

SEQ ID NO: 81252 - DNA, 21 bp, Artificial Sequence
  Synthetic
gacaaacccuctccagugacc

SEQ ID NO: 81253 - DNA, 23 bp, Artificial Sequence
  Synthetic
ggaactgaggutttctccaguga

SEQ ID NO: 81254 - DNA, 28 bp, Artificial Sequence
  Synthetic
aaaaacgagatccuagttacccaactut

SEQ ID NO: 81255 - DNA, 25 bp, Artificial Sequence
  Synthetic
acaaagaggaggcuagttaguagca

SEQ ID NO: 81256 - DNA, 20 bp, Artificial Sequence
  Synthetic
cgtagatgugaggcggcauc

SEQ ID NO: 81257 - DNA, 22 bp, Artificial Sequence
  Synthetic
gtctggaaguaagctgggtuct

SEQ ID NO: 81258 - DNA, 24 bp, Artificial Sequence
  Synthetic
gaagcccaugagatctttgcagua

SEQ ID NO: 81259 - DNA, 28 bp, Artificial Sequence
  Synthetic
ccagtttgaaugccagtcataaguaaag

SEQ ID NO: 81260 - DNA, 20 bp, Artificial Sequence
  Synthetic
caagaaagggcacuggcauc

SEQ ID NO: 81261 - DNA, 22 bp, Artificial Sequence
  Synthetic
gtgcuaggcagcaaaggtatuc

SEQ ID NO: 81262 - DNA, 21 bp, Artificial Sequence
  Synthetic
acucatuggagagccccagat

SEQ ID NO: 81263 - DNA, 22 bp, Artificial Sequence
  Synthetic
caagatccugtgcagguaccag

SEQ ID NO: 81264 - DNA, 23 bp, Artificial Sequence
  Synthetic
ggataaatccauaggtgcugcca

SEQ ID NO: 81265 - DNA, 21 bp, Artificial Sequence
  Synthetic
tgggaguctcugggacaaaga

SEQ ID NO: 81266 - DNA, 20 bp, Artificial Sequence
  Synthetic
aggacgtauggagccaguct

SEQ ID NO: 81267 - DNA, 21 bp, Artificial Sequence
  Synthetic
cggcggugtttttaucaacgg

SEQ ID NO: 81268 - DNA, 21 bp, Artificial Sequence
  Synthetic
ccatcccuccaaauccccaac

SEQ ID NO: 81269 - DNA, 26 bp, Artificial Sequence
  Synthetic
gaatauaaacgccaaaaucccaccat

SEQ ID NO: 81270 - DNA, 21 bp, Artificial Sequence
  Synthetic
gccuaggagcaguaagggagt

SEQ ID NO: 81271 - DNA, 22 bp, Artificial Sequence
  Synthetic
aggacutgcagauggacaaagg

SEQ ID NO: 81272 - DNA, 18 bp, Artificial Sequence
  Synthetic
tgctgcuccgaagcucat

SEQ ID NO: 81273 - DNA, 25 bp, Artificial Sequence
  Synthetic
ttcuatgcctcacucacaaaggaag

SEQ ID NO: 81274 - DNA, 23 bp, Artificial Sequence
  Synthetic
cttgttgaucagaaaggguccca

SEQ ID NO: 81275 - DNA, 23 bp, Artificial Sequence
  Synthetic
gttactccucacatcaccccaut

SEQ ID NO: 81276 - DNA, 20 bp, Artificial Sequence
  Synthetic
atcttguggcggatgtggut

SEQ ID NO: 81277 - DNA, 22 bp, Artificial Sequence
  Synthetic
gcgaaattacgugctgctgtuc

SEQ ID NO: 81278 - DNA, 21 bp, Artificial Sequence
  Synthetic
cctacugacaaaccccaugcc

SEQ ID NO: 81279 - DNA, 25 bp, Artificial Sequence
  Synthetic
gatccaucaccaaagcagctctaut

SEQ ID NO: 81280 - DNA, 20 bp, Artificial Sequence
  Synthetic
tcccugatcucccaggcaaa

SEQ ID NO: 81281 - DNA, 22 bp, Artificial Sequence
  Synthetic
ggttcctcauggctaagctuct

SEQ ID NO: 81282 - DNA, 28 bp, Artificial Sequence
  Synthetic
gcagagatatgugcttgtttaaagucaa

SEQ ID NO: 81283 - DNA, 32 bp, Artificial Sequence
  Synthetic
tttccatgtgtatautagctacagaagucaag

SEQ ID NO: 81284 - DNA, 22 bp, Artificial Sequence
  Synthetic
gggcgaagguaatgaaugaaga

SEQ ID NO: 81285 - DNA, 17 bp, Artificial Sequence
  Synthetic
cggcgcgcucgatcuac

SEQ ID NO: 81286 - DNA, 22 bp, Artificial Sequence
  Synthetic
ccacttgctuaggacctctcut

SEQ ID NO: 81287 - DNA, 22 bp, Artificial Sequence
  Synthetic
tcagagtagcuggagaagcugt

SEQ ID NO: 81288 - DNA, 18 bp, Artificial Sequence
  Synthetic
accagcuctgccuacgga

SEQ ID NO: 81289 - DNA, 19 bp, Artificial Sequence
  Synthetic
gctgggcugagaccaccua

SEQ ID NO: 81290 - DNA, 28 bp, Artificial Sequence
  Synthetic
agcacctgagcutataaaacaaatcuct

SEQ ID NO: 81291 - DNA, 28 bp, Artificial Sequence
  Synthetic
ggaaatgatacguttgtaacactcgaug

SEQ ID NO: 81292 - DNA, 23 bp, Artificial Sequence
  Synthetic
ggaagacaagacguggagaggua

SEQ ID NO: 81293 - DNA, 23 bp, Artificial Sequence
  Synthetic
atttggaggauctggugcaagag

SEQ ID NO: 81294 - DNA, 26 bp, Artificial Sequence
  Synthetic
acaaaccacacucacttcatttucct

SEQ ID NO: 81295 - DNA, 32 bp, Artificial Sequence
  Synthetic
aaaatattagtugcaacagatattcatctugg

SEQ ID NO: 81296 - DNA, 24 bp, Artificial Sequence
  Synthetic
tgaagctctgccuaaaagtcccua

SEQ ID NO: 81297 - DNA, 23 bp, Artificial Sequence
  Synthetic
ctggaggaauccatctgcaucaa

SEQ ID NO: 81298 - DNA, 28 bp, Artificial Sequence
  Synthetic
aaagtagaagcaauctgatgaacuccaa

SEQ ID NO: 81299 - DNA, 22 bp, Artificial Sequence
  Synthetic
cctgtacgaaguggacactcuc

SEQ ID NO: 81300 - DNA, 22 bp, Artificial Sequence
  Synthetic
cacacattctcuccctgctcuc

SEQ ID NO: 81301 - DNA, 23 bp, Artificial Sequence
  Synthetic
acaatgggcagugtgtggauaaa

SEQ ID NO: 81302 - DNA, 21 bp, Artificial Sequence
  Synthetic
cctuccacgagcaguagaggt

SEQ ID NO: 81303 - DNA, 22 bp, Artificial Sequence
  Synthetic
ctctcttcatgucctggtggut

SEQ ID NO: 81304 - DNA, 23 bp, Artificial Sequence
  Synthetic
gctgagtgaaugggaaggaaguc

SEQ ID NO: 81305 - DNA, 25 bp, Artificial Sequence
  Synthetic
agatcaatgaaugcagctctcaucc

SEQ ID NO: 81306 - DNA, 24 bp, Artificial Sequence
  Synthetic
agcauagtgcttcucagcaaaaga

SEQ ID NO: 81307 - DNA, 20 bp, Artificial Sequence
  Synthetic
gugacacaggacacccucag

SEQ ID NO: 81308 - DNA, 26 bp, Artificial Sequence
  Synthetic
ctgtggaccagaauactcagucaaaa

SEQ ID NO: 81309 - DNA, 22 bp, Artificial Sequence
  Synthetic
acttgacuccaacactggcauc

SEQ ID NO: 81310 - DNA, 18 bp, Artificial Sequence
  Synthetic
gtgctctcugggctcugg

SEQ ID NO: 81311 - DNA, 19 bp, Artificial Sequence
  Synthetic
ccacagcuttgcccaugaa

SEQ ID NO: 81312 - DNA, 24 bp, Artificial Sequence
  Synthetic
gtgaacgttgutggactctacugt

SEQ ID NO: 81313 - DNA, 22 bp, Artificial Sequence
  Synthetic
acccuccagcgaatttcauacc

SEQ ID NO: 81314 - DNA, 23 bp, Artificial Sequence
  Synthetic
gggaagugagaggaaaacgagug

SEQ ID NO: 81315 - DNA, 21 bp, Artificial Sequence
  Synthetic
attgaccuggactcgctgaug

SEQ ID NO: 81316 - DNA, 21 bp, Artificial Sequence
  Synthetic
caggcacuggaaacgatugac

SEQ ID NO: 81317 - DNA, 26 bp, Artificial Sequence
  Synthetic
cacctttctctcuctttaagccacut

SEQ ID NO: 81318 - DNA, 21 bp, Artificial Sequence
  Synthetic
cacaccacaggcugaugagaa

SEQ ID NO: 81319 - DNA, 23 bp, Artificial Sequence
  Synthetic
gcttucccagatgtcugaagagg

SEQ ID NO: 81320 - DNA, 21 bp, Artificial Sequence
  Synthetic
cacgtuccctcatucaggcat

SEQ ID NO: 81321 - DNA, 26 bp, Artificial Sequence
  Synthetic
ctgatgttgcuctgtttgcttctuag

SEQ ID NO: 81322 - DNA, 21 bp, Artificial Sequence
  Synthetic
ggactgcauggtaatcugcgt

SEQ ID NO: 81323 - DNA, 23 bp, Artificial Sequence
  Synthetic
caacatgttucccctccttucag

SEQ ID NO: 81324 - DNA, 19 bp, Artificial Sequence
  Synthetic
ccttgucagcgggcatgua

SEQ ID NO: 81325 - DNA, 20 bp, Artificial Sequence
  Synthetic
ggtggcaagaagggugagug

SEQ ID NO: 81326 - DNA, 26 bp, Artificial Sequence
  Synthetic
tcaatugtagttctctugccagcaat

SEQ ID NO: 81327 - DNA, 25 bp, Artificial Sequence
  Synthetic
gcaaagccucattccttttgtucag

SEQ ID NO: 81328 - DNA, 22 bp, Artificial Sequence
  Synthetic
cttcacacacggagucacuagg

SEQ ID NO: 81329 - DNA, 27 bp, Artificial Sequence
  Synthetic
tttttgcgcttguaatgtcaatagcut

SEQ ID NO: 81330 - DNA, 18 bp, Artificial Sequence
  Synthetic
gctcgcugtcgccatuct

SEQ ID NO: 81331 - DNA, 20 bp, Artificial Sequence
  Synthetic
gagauccacccccuggagat

SEQ ID NO: 81332 - DNA, 28 bp, Artificial Sequence
  Synthetic
tggagaagttagacaugtcaacctttug

SEQ ID NO: 81333 - DNA, 28 bp, Artificial Sequence
  Synthetic
atttacctgggcuacttcatctcuagaa

SEQ ID NO: 81334 - DNA, 21 bp, Artificial Sequence
  Synthetic
gtttgcacagugccttucaga

SEQ ID NO: 81335 - DNA, 26 bp, Artificial Sequence
  Synthetic
tgtttcagcucattgtgatuaaccct

SEQ ID NO: 81336 - DNA, 26 bp, Artificial Sequence
  Synthetic
ctgtccuggtcatttauagaaaccga

SEQ ID NO: 81337 - DNA, 23 bp, Artificial Sequence
  Synthetic
ggaggtuaccccatggaactuac

SEQ ID NO: 81338 - DNA, 28 bp, Artificial Sequence
  Synthetic
ccaaattgctuctgtctgttaaauggaa

SEQ ID NO: 81339 - DNA, 31 bp, Artificial Sequence
  Synthetic
tggactttcugagagaaaacaatttaaguga

SEQ ID NO: 81340 - DNA, 18 bp, Artificial Sequence
  Synthetic
gctggauctgcgccugaa

SEQ ID NO: 81341 - DNA, 25 bp, Artificial Sequence
  Synthetic
gcatcatgtcuaactctaccucgac

SEQ ID NO: 81342 - DNA, 17 bp, Artificial Sequence
  Synthetic
ccgccguagctgucagg

SEQ ID NO: 81343 - DNA, 19 bp, Artificial Sequence
  Synthetic
caacccccaggcacuagut

SEQ ID NO: 81344 - DNA, 28 bp, Artificial Sequence
  Synthetic
acagcaccaaauaatacagagcagtuat

SEQ ID NO: 81345 - DNA, 23 bp, Artificial Sequence
  Synthetic
accacaatctuctgcccatctuc

SEQ ID NO: 81346 - DNA, 21 bp, Artificial Sequence
  Synthetic
cuacacccaccccaaaguaga

SEQ ID NO: 81347 - DNA, 20 bp, Artificial Sequence
  Synthetic
gtcctcaugccaacccctut

SEQ ID NO: 81348 - DNA, 21 bp, Artificial Sequence
  Synthetic
gcattggaaccagugcagtut

SEQ ID NO: 81349 - DNA, 27 bp, Artificial Sequence
  Synthetic
tttccctctuagagcgtacaactttut

SEQ ID NO: 81350 - DNA, 20 bp, Artificial Sequence
  Synthetic
ctacccuacgccaagcauga

SEQ ID NO: 81351 - DNA, 22 bp, Artificial Sequence
  Synthetic
ccagagaguatcccagcuggag

SEQ ID NO: 81352 - DNA, 19 bp, Artificial Sequence
  Synthetic
ccacgcugagagtcgtcut

SEQ ID NO: 81353 - DNA, 28 bp, Artificial Sequence
  Synthetic
cctgacatactcutgacagtctattugg

SEQ ID NO: 81354 - DNA, 28 bp, Artificial Sequence
  Synthetic
gacctttgaacuctttgttttcatguct

SEQ ID NO: 81355 - DNA, 27 bp, Artificial Sequence
  Synthetic
tgataaatcugaggaacatggcactuc

SEQ ID NO: 81356 - DNA, 23 bp, Artificial Sequence
  Synthetic
agccagctuctcttctaguccat

SEQ ID NO: 81357 - DNA, 22 bp, Artificial Sequence
  Synthetic
gggtctucacctcatagtgucc

SEQ ID NO: 81358 - DNA, 21 bp, Artificial Sequence
  Synthetic
cagaacagcaucggtgcagua

SEQ ID NO: 81359 - DNA, 25 bp, Artificial Sequence
  Synthetic
ctttgacattaacutcaagccccut

SEQ ID NO: 81360 - DNA, 24 bp, Artificial Sequence
  Synthetic
aaaaagccaccaccuagaaucgaa

SEQ ID NO: 81361 - DNA, 28 bp, Artificial Sequence
  Synthetic
caaaagcacauaactgaaaaccauaggg

SEQ ID NO: 81362 - DNA, 23 bp, Artificial Sequence
  Synthetic
ctgaagcccuggagaguagaaag

SEQ ID NO: 81363 - DNA, 27 bp, Artificial Sequence
  Synthetic
ccctctcagutacaagtgattatucgt

SEQ ID NO: 81364 - DNA, 22 bp, Artificial Sequence
  Synthetic
cctcagcacutggctcaaacut

SEQ ID NO: 81365 - DNA, 27 bp, Artificial Sequence
  Synthetic
tgtaatgtccatutcaggatccatucc

SEQ ID NO: 81366 - DNA, 22 bp, Artificial Sequence
  Synthetic
catccaggtugatctcgcagut

SEQ ID NO: 81367 - DNA, 19 bp, Artificial Sequence
  Synthetic
gcgacaacgccuacctcug

SEQ ID NO: 81368 - DNA, 19 bp, Artificial Sequence
  Synthetic
tggucccctucaggcagaa

SEQ ID NO: 81369 - DNA, 18 bp, Artificial Sequence
  Synthetic
ccacctucacctgccuct

SEQ ID NO: 81370 - DNA, 17 bp, Artificial Sequence
  Synthetic
cagtgguggcccgtgua

SEQ ID NO: 81371 - DNA, 20 bp, Artificial Sequence
  Synthetic
ccgccagucctaagtctucc

SEQ ID NO: 81372 - DNA, 23 bp, Artificial Sequence
  Synthetic
gtctgaagcugagguagagaagg

SEQ ID NO: 81373 - DNA, 24 bp, Artificial Sequence
  Synthetic
acctttgcuggaaaagaagaucca

SEQ ID NO: 81374 - DNA, 22 bp, Artificial Sequence
  Synthetic
cctctuggccacgttcatguag

SEQ ID NO: 81375 - DNA, 22 bp, Artificial Sequence
  Synthetic
cgcaatucgagtatcccaucca

SEQ ID NO: 81376 - DNA, 29 bp, Artificial Sequence
  Synthetic
catactcaguagacaacataaagccucat

SEQ ID NO: 81377 - DNA, 26 bp, Artificial Sequence
  Synthetic
gaagtcccagcutggtagaaaauact

SEQ ID NO: 81378 - DNA, 28 bp, Artificial Sequence
  Synthetic
aggcaucaggtacaugaaaaagaagaat

SEQ ID NO: 81379 - DNA, 27 bp, Artificial Sequence
  Synthetic
catagtatttcutacctccgugcaaca

SEQ ID NO: 81380 - DNA, 18 bp, Artificial Sequence
  Synthetic
gtgcatgcuccggttcuc

SEQ ID NO: 81381 - DNA, 18 bp, Artificial Sequence
  Synthetic
ccacccgggcutctaguc

SEQ ID NO: 81382 - DNA, 20 bp, Artificial Sequence
  Synthetic
ctctcagctuccagggtcut

SEQ ID NO: 81383 - DNA, 29 bp, Artificial Sequence
  Synthetic
cgggtatatggaaagucagaaaacatcut

SEQ ID NO: 81384 - DNA, 22 bp, Artificial Sequence
  Synthetic
gacttccaaagcugggaaucct

SEQ ID NO: 81385 - DNA, 28 bp, Artificial Sequence
  Synthetic
ggaaaaaccaaacutgccatctctcuat

SEQ ID NO: 81386 - DNA, 19 bp, Artificial Sequence
  Synthetic
ggcgggcacgaautttguc

SEQ ID NO: 81387 - DNA, 18 bp, Artificial Sequence
  Synthetic
gggtcuggagcccucagt

SEQ ID NO: 81388 - DNA, 24 bp, Artificial Sequence
  Synthetic
cttgcccaaaguaccaggtaatug

SEQ ID NO: 81389 - DNA, 24 bp, Artificial Sequence
  Synthetic
ccaagaagtutctcagttgugcct

SEQ ID NO: 81390 - DNA, 19 bp, Artificial Sequence
  Synthetic
gcatuaacgggtgccugga

SEQ ID NO: 81391 - DNA, 21 bp, Artificial Sequence
  Synthetic
catggugggcttguccaaaat

SEQ ID NO: 81392 - DNA, 19 bp, Artificial Sequence
  Synthetic
tttcuggccccacugaacc

SEQ ID NO: 81393 - DNA, 17 bp, Artificial Sequence
  Synthetic
ggcatggugggcttguc

SEQ ID NO: 81394 - DNA, 19 bp, Artificial Sequence
  Synthetic
ccuggccccagaggacaua

SEQ ID NO: 81395 - DNA, 25 bp, Artificial Sequence
  Synthetic
gtgtcccatcucttgggtatcaaug

SEQ ID NO: 81396 - DNA, 25 bp, Artificial Sequence
  Synthetic
ctcggcaaauttagcttcuagcaac

SEQ ID NO: 81397 - DNA, 23 bp, Artificial Sequence
  Synthetic
gaacactgctutccggcttatuc

SEQ ID NO: 81398 - DNA, 18 bp, Artificial Sequence
  Synthetic
ggctgggcgugcatttug

SEQ ID NO: 81399 - DNA, 17 bp, Artificial Sequence
  Synthetic
tcgcccuctgacuccga

SEQ ID NO: 81400 - DNA, 23 bp, Artificial Sequence
  Synthetic
gattcctcuggtgaaatcgguca

SEQ ID NO: 81401 - DNA, 21 bp, Artificial Sequence
  Synthetic
cctctcugctcccaagucaag

SEQ ID NO: 81402 - DNA, 20 bp, Artificial Sequence
  Synthetic
aggcatgaguggtcgaggua

SEQ ID NO: 81403 - DNA, 23 bp, Artificial Sequence
  Synthetic
catctucaacagcctcuacacca

SEQ ID NO: 81404 - DNA, 26 bp, Artificial Sequence
  Synthetic
acttgtgcccaguttctaaatcauct

SEQ ID NO: 81405 - DNA, 17 bp, Artificial Sequence
  Synthetic
gccaagguccccctuct

SEQ ID NO: 81406 - DNA, 27 bp, Artificial Sequence
  Synthetic
ccttcagatcttugatgtcctttcgua

SEQ ID NO: 81407 - DNA, 18 bp, Artificial Sequence
  Synthetic
cugtgctcugagcaggga

SEQ ID NO: 81408 - DNA, 23 bp, Artificial Sequence
  Synthetic
cccuggatttaugcccaagaagg

SEQ ID NO: 81409 - DNA, 25 bp, Artificial Sequence
  Synthetic
actgcugacacacacactaattuct

SEQ ID NO: 81410 - DNA, 22 bp, Artificial Sequence
  Synthetic
ctcacgctuccccaaatttcut

SEQ ID NO: 81411 - DNA, 28 bp, Artificial Sequence
  Synthetic
gcgattctccaauatactgaaactccuc

SEQ ID NO: 81412 - DNA, 21 bp, Artificial Sequence
  Synthetic
gccaaacugtcccccaugaaa

SEQ ID NO: 81413 - DNA, 22 bp, Artificial Sequence
  Synthetic
ccccaccacacccuatcacuat

SEQ ID NO: 81414 - DNA, 22 bp, Artificial Sequence
  Synthetic
cuccaggacactcuggaacaac

SEQ ID NO: 81415 - DNA, 27 bp, Artificial Sequence
  Synthetic
gaaaaggaagcuctgagtgaggaatua

SEQ ID NO: 81416 - DNA, 22 bp, Artificial Sequence
  Synthetic
tgaagaucucccagagcaggat

SEQ ID NO: 81417 - DNA, 21 bp, Artificial Sequence
  Synthetic
ctgaggtccutccttgcacuc

SEQ ID NO: 81418 - DNA, 24 bp, Artificial Sequence
  Synthetic
gctaaacagaaagcccuggaacut

SEQ ID NO: 81419 - DNA, 29 bp, Artificial Sequence
  Synthetic
actatgaaaacaaacugacaaacctcuct

SEQ ID NO: 81420 - DNA, 29 bp, Artificial Sequence
  Synthetic
acttctactacctuatcgacacagctaut

SEQ ID NO: 81421 - DNA, 28 bp, Artificial Sequence
  Synthetic
ggagggctcauttgtttatctctuacag

SEQ ID NO: 81422 - DNA, 22 bp, Artificial Sequence
  Synthetic
cagaggacugacttctcuccct

SEQ ID NO: 81423 - DNA, 18 bp, Artificial Sequence
  Synthetic
tcagccgggaugcgatug

SEQ ID NO: 81424 - DNA, 28 bp, Artificial Sequence
  Synthetic
ccatacacaaguaatcactcacucaagt

SEQ ID NO: 81425 - DNA, 28 bp, Artificial Sequence
  Synthetic
aaaacattacataccugcctcgagtuat

SEQ ID NO: 81426 - DNA, 28 bp, Artificial Sequence
  Synthetic
ggccgatcacccauacaatattttctua

SEQ ID NO: 81427 - DNA, 24 bp, Artificial Sequence
  Synthetic
cacctttttcugttgatcaggugg

SEQ ID NO: 81428 - DNA, 28 bp, Artificial Sequence
  Synthetic
agtactagcauccttacagtcttcuaaa

SEQ ID NO: 81429 - DNA, 24 bp, Artificial Sequence
  Synthetic
gaaagaccagutcttccctcauca

SEQ ID NO: 81430 - DNA, 27 bp, Artificial Sequence
  Synthetic
tgaatatcugcaacaagcaagtcauct

SEQ ID NO: 81431 - DNA, 28 bp, Artificial Sequence
  Synthetic
agtgaagaaacgucttttcatgaugagt

SEQ ID NO: 81432 - DNA, 21 bp, Artificial Sequence
  Synthetic
ccccaaccutaagugcaccag

SEQ ID NO: 81433 - DNA, 22 bp, Artificial Sequence
  Synthetic
ttccctcucaccccagttttug

SEQ ID NO: 81434 - DNA, 20 bp, Artificial Sequence
  Synthetic
gtgccccagguagcttcaut

SEQ ID NO: 81435 - DNA, 22 bp, Artificial Sequence
  Synthetic
gtgagaggcutgacucaggaac

SEQ ID NO: 81436 - DNA, 26 bp, Artificial Sequence
  Synthetic
agatcctggcgaguagtaaaacttuc

SEQ ID NO: 81437 - DNA, 27 bp, Artificial Sequence
  Synthetic
gctgtcataaauacacttgggtttgut

SEQ ID NO: 81438 - DNA, 28 bp, Artificial Sequence
  Synthetic
tgggtuagaagaagaaaagugaaaagca

SEQ ID NO: 81439 - DNA, 24 bp, Artificial Sequence
  Synthetic
cctgcctuccaaagcagatactuc

SEQ ID NO: 81440 - DNA, 27 bp, Artificial Sequence
  Synthetic
ctatttcttctcggucatcctgaagug

SEQ ID NO: 81441 - DNA, 25 bp, Artificial Sequence
  Synthetic
cctattccucaaaccccagaaagug

SEQ ID NO: 81442 - DNA, 21 bp, Artificial Sequence
  Synthetic
ggaagccuggtcaggtaugag

SEQ ID NO: 81443 - DNA, 18 bp, Artificial Sequence
  Synthetic
ccctgugtggaggugcag

SEQ ID NO: 81444 - DNA, 25 bp, Artificial Sequence
  Synthetic
gagtcugggagaacagatttctuga

SEQ ID NO: 81445 - DNA, 27 bp, Artificial Sequence
  Synthetic
cttttgattcugggaagcacattcaut

SEQ ID NO: 81446 - DNA, 18 bp, Artificial Sequence
  Synthetic
ctgcacgutgcggttgut

SEQ ID NO: 81447 - DNA, 21 bp, Artificial Sequence
  Synthetic
ggttcccugaccattgcugag

SEQ ID NO: 81448 - DNA, 19 bp, Artificial Sequence
  Synthetic
tcttgcacucggcgaucat

SEQ ID NO: 81449 - DNA, 20 bp, Artificial Sequence
  Synthetic
gggtugaagggcgugagaaa

SEQ ID NO: 81450 - DNA, 21 bp, Artificial Sequence
  Synthetic
gctcctggugaaactgctcua

SEQ ID NO: 81451 - DNA, 23 bp, Artificial Sequence
  Synthetic
gcaacaugagatggagcucaagg

SEQ ID NO: 81452 - DNA, 19 bp, Artificial Sequence
  Synthetic
cacaaguccctggcaguca

SEQ ID NO: 81453 - DNA, 20 bp, Artificial Sequence
  Synthetic
tcccctccucagactccauc

SEQ ID NO: 81454 - DNA, 25 bp, Artificial Sequence
  Synthetic
gttgctgtugctgtgtttattucca

SEQ ID NO: 81455 - DNA, 27 bp, Artificial Sequence
  Synthetic
tcctttgcagauttagtttccuaagca

SEQ ID NO: 81456 - DNA, 21 bp, Artificial Sequence
  Synthetic
gcttgagccugtgtcagtcua

SEQ ID NO: 81457 - DNA, 22 bp, Artificial Sequence
  Synthetic
gcucaaggaggcacatcaugag

SEQ ID NO: 81458 - DNA, 28 bp, Artificial Sequence
  Synthetic
actggaacagtguttctgtctttttgua

SEQ ID NO: 81459 - DNA, 27 bp, Artificial Sequence
  Synthetic
gttcattacugaccctgauggagaaaa

SEQ ID NO: 81460 - DNA, 19 bp, Artificial Sequence
  Synthetic
gccccaggaaggucaucaa

SEQ ID NO: 81461 - DNA, 20 bp, Artificial Sequence
  Synthetic
ctgtugggcaggaagaccuc

SEQ ID NO: 81462 - DNA, 22 bp, Artificial Sequence
  Synthetic
gcagtucagcaagcctttcuca

SEQ ID NO: 81463 - DNA, 28 bp, Artificial Sequence
  Synthetic
ggtaagaactcugggttcatacacatut

SEQ ID NO: 81464 - DNA, 25 bp, Artificial Sequence
  Synthetic
tcaagcttcacutgcagttgtttut

SEQ ID NO: 81465 - DNA, 24 bp, Artificial Sequence
  Synthetic
agaacaugaagcaaaggcaugaga

SEQ ID NO: 81466 - DNA, 20 bp, Artificial Sequence
  Synthetic
ggagccccgucauaggaagt

SEQ ID NO: 81467 - DNA, 20 bp, Artificial Sequence
  Synthetic
tggcttugggctttcuggat

SEQ ID NO: 81468 - DNA, 25 bp, Artificial Sequence
  Synthetic
cgctttctaaaaugtcagttgucca

SEQ ID NO: 81469 - DNA, 24 bp, Artificial Sequence
  Synthetic
ccgcacctcuacaacaaaatgtut

SEQ ID NO: 81470 - DNA, 20 bp, Artificial Sequence
  Synthetic
ctactcucccaccuccacct

SEQ ID NO: 81471 - DNA, 18 bp, Artificial Sequence
  Synthetic
ggctcagcugccttcuca

SEQ ID NO: 81472 - DNA, 18 bp, Artificial Sequence
  Synthetic
gctgccugctguggagac

SEQ ID NO: 81473 - DNA, 22 bp, Artificial Sequence
  Synthetic
gctcacccugtgatttgtugct

SEQ ID NO: 81474 - DNA, 24 bp, Artificial Sequence
  Synthetic
gtttttctaaggugtgcgttucgt

SEQ ID NO: 81475 - DNA, 22 bp, Artificial Sequence
  Synthetic
atcttgtgguggtgtcactcug

SEQ ID NO: 81476 - DNA, 28 bp, Artificial Sequence
  Synthetic
cctttgctggaautaatatggtgttcuc

SEQ ID NO: 81477 - DNA, 25 bp, Artificial Sequence
  Synthetic
tgaaacacacugcagtcagaacaua

SEQ ID NO: 81478 - DNA, 23 bp, Artificial Sequence
  Synthetic
tutatgacuggacagggcaaaca

SEQ ID NO: 81479 - DNA, 19 bp, Artificial Sequence
  Synthetic
tccguaggacaccaucgct

SEQ ID NO: 81480 - DNA, 17 bp, Artificial Sequence
  Synthetic
cctgcgugcaacuccga

SEQ ID NO: 81481 - DNA, 24 bp, Artificial Sequence
  Synthetic
tgagcaugaacacccacttuaagg

SEQ ID NO: 81482 - DNA, 21 bp, Artificial Sequence
  Synthetic
gctgtcaaccugcatgaaguc

SEQ ID NO: 81483 - DNA, 27 bp, Artificial Sequence
  Synthetic
gcatactugggcagagagtttcttuac

SEQ ID NO: 81484 - DNA, 21 bp, Artificial Sequence
  Synthetic
cgctcauagcaggauccacag

SEQ ID NO: 81485 - DNA, 23 bp, Artificial Sequence
  Synthetic
aagtatguttgggcuggaccaat

SEQ ID NO: 81486 - DNA, 33 bp, Artificial Sequence
  Synthetic
gaatgccttctcttutgtctatatctgataaut

SEQ ID NO: 81487 - DNA, 27 bp, Artificial Sequence
  Synthetic
ctctccttgccaucattacttcaacua

SEQ ID NO: 81488 - DNA, 19 bp, Artificial Sequence
  Synthetic
ggcuctgcccucgacaaag

SEQ ID NO: 81489 - DNA, 23 bp, Artificial Sequence
  Synthetic
tgagactgaccuctcttctccug

SEQ ID NO: 81490 - DNA, 19 bp, Artificial Sequence
  Synthetic
cugcaagggugaccacact

SEQ ID NO: 81491 - DNA, 21 bp, Artificial Sequence
  Synthetic
gcugaaaaagcuggaggagga

SEQ ID NO: 81492 - DNA, 23 bp, Artificial Sequence
  Synthetic
tccggtcucgttaaagttccuct

SEQ ID NO: 81493 - DNA, 19 bp, Artificial Sequence
  Synthetic
tcctgggcuggaacgagua

SEQ ID NO: 81494 - DNA, 26 bp, Artificial Sequence
  Synthetic
agutgaagtaatgauggcaaggagag

SEQ ID NO: 81495 - DNA, 28 bp, Artificial Sequence
  Synthetic
ctcctttctaccaauaaccgcatatcua

SEQ ID NO: 81496 - DNA, 22 bp, Artificial Sequence
  Synthetic
ttctggtccuccaggatgauct

SEQ ID NO: 81497 - DNA, 21 bp, Artificial Sequence
  Synthetic
tgctgtccutaccgtgtcuct

SEQ ID NO: 81498 - DNA, 22 bp, Artificial Sequence
  Synthetic
tctaacacauccacctccugct

SEQ ID NO: 81499 - DNA, 24 bp, Artificial Sequence
  Synthetic
agggagcatugttttcaccttuca

SEQ ID NO: 81500 - DNA, 22 bp, Artificial Sequence
  Synthetic
atttcacuccatcccacugaga

SEQ ID NO: 81501 - DNA, 20 bp, Artificial Sequence
  Synthetic
gguggaggaagcugacaaca

SEQ ID NO: 81502 - DNA, 24 bp, Artificial Sequence
  Synthetic
gagaacaccuagaagacagugcat

SEQ ID NO: 81503 - DNA, 20 bp, Artificial Sequence
  Synthetic
caccggcacucagctauacc

SEQ ID NO: 81504 - DNA, 26 bp, Artificial Sequence
  Synthetic
gcaaatgtttugtggtatagcugagt

SEQ ID NO: 81505 - DNA, 28 bp, Artificial Sequence
  Synthetic
cagcttgtatgucaatggatactctuga

SEQ ID NO: 81506 - DNA, 26 bp, Artificial Sequence
  Synthetic
cttcagaguttgtgcttttucaccat

SEQ ID NO: 81507 - DNA, 26 bp, Artificial Sequence
  Synthetic
ggtgaattagcaucctgcagtuaaag

SEQ ID NO: 81508 - DNA, 24 bp, Artificial Sequence
  Synthetic
agccctactuccttagcactguat

SEQ ID NO: 81509 - DNA, 24 bp, Artificial Sequence
  Synthetic
catccagatugatacctggcuaca

SEQ ID NO: 81510 - DNA, 24 bp, Artificial Sequence
  Synthetic
caagctggcuaaagctccttctua

SEQ ID NO: 81511 - DNA, 19 bp, Artificial Sequence
  Synthetic
ccagcacgucacgttctuc

SEQ ID NO: 81512 - DNA, 22 bp, Artificial Sequence
  Synthetic
agtgcaaagaugccctugagag

SEQ ID NO: 81513 - DNA, 20 bp, Artificial Sequence
  Synthetic
cctggacucgggtcguaaga

SEQ ID NO: 81514 - DNA, 28 bp, Artificial Sequence
  Synthetic
aaatccttcctcaugtcctgaaaguaac

SEQ ID NO: 81515 - DNA, 19 bp, Artificial Sequence
  Synthetic
tuggaacaccauccgccaa

SEQ ID NO: 81516 - DNA, 29 bp, Artificial Sequence
  Synthetic
agtaaatctttugctcatgtgcatuaacc

SEQ ID NO: 81517 - DNA, 21 bp, Artificial Sequence
  Synthetic
gcgugcagcagttatttucca

SEQ ID NO: 81518 - DNA, 23 bp, Artificial Sequence
  Synthetic
gcaacacgacgaaauagccauac

SEQ ID NO: 81519 - DNA, 23 bp, Artificial Sequence
  Synthetic
gattttggcugtgacacagugaa

SEQ ID NO: 81520 - DNA, 22 bp, Artificial Sequence
  Synthetic
tgatgttgaugatctgcguggt

SEQ ID NO: 81521 - DNA, 23 bp, Artificial Sequence
  Synthetic
ccaagguagaatcccuggagagt

SEQ ID NO: 81522 - DNA, 23 bp, Artificial Sequence
  Synthetic
cacaatgcuactatgccctugga

SEQ ID NO: 81523 - DNA, 19 bp, Artificial Sequence
  Synthetic
gcatgcugtccactuagcc

SEQ ID NO: 81524 - DNA, 22 bp, Artificial Sequence
  Synthetic
atgtcaccagugaccucaacag

SEQ ID NO: 81525 - DNA, 24 bp, Artificial Sequence
  Synthetic
tgagggaagaagagaugaguaggg

SEQ ID NO: 81526 - DNA, 21 bp, Artificial Sequence
  Synthetic
ccttauggcgcacaggtagug

SEQ ID NO: 81527 - DNA, 21 bp, Artificial Sequence
  Synthetic
cgaaggtuggaactcgacuga

SEQ ID NO: 81528 - DNA, 22 bp, Artificial Sequence
  Synthetic
gcaactagcuggcagtctcuat

SEQ ID NO: 81529 - DNA, 23 bp, Artificial Sequence
  Synthetic
tccagcaaaaucatgucccagag

SEQ ID NO: 81530 - DNA, 24 bp, Artificial Sequence
  Synthetic
cagcgttaugaagtaatgcagugt

SEQ ID NO: 81531 - DNA, 28 bp, Artificial Sequence
  Synthetic
cctctctuttccttaaagucacagaaga

SEQ ID NO: 81532 - DNA, 27 bp, Artificial Sequence
  Synthetic
tcaaaatcaaccccuttcgatactuga

SEQ ID NO: 81533 - DNA, 27 bp, Artificial Sequence
  Synthetic
cagaaaggcacacutgatgaattaugt

SEQ ID NO: 81534 - DNA, 23 bp, Artificial Sequence
  Synthetic
ctgcaaaacacggugaatgacut

SEQ ID NO: 81535 - DNA, 27 bp, Artificial Sequence
  Synthetic
ggccaatctgacaugtctgatacttua

SEQ ID NO: 81536 - DNA, 26 bp, Artificial Sequence
  Synthetic
gagcccagtuttcattgaaatcaugt

SEQ ID NO: 81537 - DNA, 25 bp, Artificial Sequence
  Synthetic
agcagcuacaagaagaatugcagaa

SEQ ID NO: 81538 - DNA, 22 bp, Artificial Sequence
  Synthetic
cagggaugggagtgaaguagag

SEQ ID NO: 81539 - DNA, 24 bp, Artificial Sequence
  Synthetic
cctcagcagguttcctttccauag

SEQ ID NO: 81540 - DNA, 24 bp, Artificial Sequence
  Synthetic
cacctguaaccaagtatccucacc

SEQ ID NO: 81541 - DNA, 23 bp, Artificial Sequence
  Synthetic
gcaggcaaaaacugggaaacuaa

SEQ ID NO: 81542 - DNA, 26 bp, Artificial Sequence
  Synthetic
cacccttaccucctgaagatttucat

SEQ ID NO: 81543 - DNA, 25 bp, Artificial Sequence
  Synthetic
ctcactttgcutctcttttgacugg

SEQ ID NO: 81544 - DNA, 21 bp, Artificial Sequence
  Synthetic
gtcactctccuccccatcuga

SEQ ID NO: 81545 - DNA, 23 bp, Artificial Sequence
  Synthetic
aatttgucaaaaacctgcugcca

SEQ ID NO: 81546 - DNA, 22 bp, Artificial Sequence
  Synthetic
cctcaataggugccatcagugt

SEQ ID NO: 81547 - DNA, 20 bp, Artificial Sequence
  Synthetic
ggatctgaccucggtgcuct

SEQ ID NO: 81548 - DNA, 28 bp, Artificial Sequence
  Synthetic
ggttttctggauaattttcccattguga

SEQ ID NO: 81549 - DNA, 19 bp, Artificial Sequence
  Synthetic
agugcccaacatcaugggt

SEQ ID NO: 81550 - DNA, 21 bp, Artificial Sequence
  Synthetic
ccgaaagaccuatcccacugt

SEQ ID NO: 81551 - DNA, 20 bp, Artificial Sequence
  Synthetic
ccagguccacctcgatctug

SEQ ID NO: 81552 - DNA, 28 bp, Artificial Sequence
  Synthetic
gagggtucactaaatgtttuaacagcaa

SEQ ID NO: 81553 - DNA, 24 bp, Artificial Sequence
  Synthetic
tgctacuccatagaaugggagaca

SEQ ID NO: 81554 - DNA, 27 bp, Artificial Sequence
  Synthetic
acccagcagacauttacctatagacut

SEQ ID NO: 81555 - DNA, 22 bp, Artificial Sequence
  Synthetic
tguagtgaaccuggaaggcaac

SEQ ID NO: 81556 - DNA, 21 bp, Artificial Sequence
  Synthetic
gcacgaagcugttggctctua

SEQ ID NO: 81557 - DNA, 29 bp, Artificial Sequence
  Synthetic
gcctctgtauctaataaccatgugacaat

SEQ ID NO: 81558 - DNA, 28 bp, Artificial Sequence
  Synthetic
ggcaaagcauaattgattugaaggagaa

SEQ ID NO: 81559 - DNA, 25 bp, Artificial Sequence
  Synthetic
caggcattatugtacccaagagugt

SEQ ID NO: 81560 - DNA, 22 bp, Artificial Sequence
  Synthetic
acaggtctutctgtgcatucct

SEQ ID NO: 81561 - DNA, 25 bp, Artificial Sequence
  Synthetic
tgttcacatggguctcatttacucc

SEQ ID NO: 81562 - DNA, 22 bp, Artificial Sequence
  Synthetic
ggcattgcucctgttctttuga

SEQ ID NO: 81563 - DNA, 28 bp, Artificial Sequence
  Synthetic
tggcagaauatgagaatcugacaaacaa

SEQ ID NO: 81564 - DNA, 28 bp, Artificial Sequence
  Synthetic
atgtggatugtgcaaaatuaaaacgact

SEQ ID NO: 81565 - DNA, 28 bp, Artificial Sequence
  Synthetic
agtttggtgttcuagttcagcacaatua

SEQ ID NO: 81566 - DNA, 25 bp, Artificial Sequence
  Synthetic
ttcatggcguagtaaggtttucact

SEQ ID NO: 81567 - DNA, 25 bp, Artificial Sequence
  Synthetic
ccactggtuaacaagtctttgucct

SEQ ID NO: 81568 - DNA, 29 bp, Artificial Sequence
  Synthetic
gccuaaagaacgacauagaagaacaagaa

SEQ ID NO: 81569 - DNA, 25 bp, Artificial Sequence
  Synthetic
caagccaccauggaacaagtttuat

SEQ ID NO: 81570 - DNA, 26 bp, Artificial Sequence
  Synthetic
ttgctgaataagugtaaaaccccuca

SEQ ID NO: 81571 - DNA, 28 bp, Artificial Sequence
  Synthetic
gtataatcatgtggguaactgcaggtua

SEQ ID NO: 81572 - DNA, 28 bp, Artificial Sequence
  Synthetic
caggtttaccttutctgctaacacatut

SEQ ID NO: 81573 - DNA, 29 bp, Artificial Sequence
  Synthetic
accacatttaattuccccatacttgtuca

SEQ ID NO: 81574 - DNA, 26 bp, Artificial Sequence
  Synthetic
acatttgagcaaagaccugaagguat

SEQ ID NO: 81575 - DNA, 29 bp, Artificial Sequence
  Synthetic
agagccaagcaucattgagaaaagattua

SEQ ID NO: 81576 - DNA, 21 bp, Artificial Sequence
  Synthetic
ccttcctggugtcaaccacut

SEQ ID NO: 81577 - DNA, 22 bp, Artificial Sequence
  Synthetic
ctgctccuccatcttuccacag

SEQ ID NO: 81578 - DNA, 26 bp, Artificial Sequence
  Synthetic
gucacattctcugacacaaacacaac

SEQ ID NO: 81579 - DNA, 27 bp, Artificial Sequence
  Synthetic
ggatcattcccutcttaacaatugcat

SEQ ID NO: 81580 - DNA, 21 bp, Artificial Sequence
  Synthetic
catggctcaguctgcttcuct

SEQ ID NO: 81581 - DNA, 19 bp, Artificial Sequence
  Synthetic
tccaguaccaggcagggut

SEQ ID NO: 81582 - DNA, 25 bp, Artificial Sequence
  Synthetic
cactgagucctagagaagucacaga

SEQ ID NO: 81583 - DNA, 27 bp, Artificial Sequence
  Synthetic
catggcctcutctttttaacttugaca

SEQ ID NO: 81584 - DNA, 22 bp, Artificial Sequence
  Synthetic
tgtcttcauccgaagggugact

SEQ ID NO: 81585 - DNA, 25 bp, Artificial Sequence
  Synthetic
cattacaaugacatgtggcugaagg

SEQ ID NO: 81586 - DNA, 20 bp, Artificial Sequence
  Synthetic
agggcuccaaggactacuca

SEQ ID NO: 81587 - DNA, 24 bp, Artificial Sequence
  Synthetic
gctaatggaucatctcugcaccag

SEQ ID NO: 81588 - DNA, 22 bp, Artificial Sequence
  Synthetic
agcagtccuggcaaatggttua

SEQ ID NO: 81589 - DNA, 28 bp, Artificial Sequence
  Synthetic
gtgctgaauaaatctcttgcugaacaaa

SEQ ID NO: 81590 - DNA, 22 bp, Artificial Sequence
  Synthetic
cgacagcaugccaatctctuca

SEQ ID NO: 81591 - DNA, 25 bp, Artificial Sequence
  Synthetic
tgaaatacuccaaagcctcttgcuc

SEQ ID NO: 81592 - DNA, 21 bp, Artificial Sequence
  Synthetic
cagtaccugggaacctgcauc

SEQ ID NO: 81593 - DNA, 27 bp, Artificial Sequence
  Synthetic
gtcaactugaagtgttcugaaaaccat

SEQ ID NO: 81594 - DNA, 21 bp, Artificial Sequence
  Synthetic
gggaagggaugatgcactaug

SEQ ID NO: 81595 - DNA, 26 bp, Artificial Sequence
  Synthetic
aactcaaagcutccaatgtagucagt

SEQ ID NO: 81596 - DNA, 22 bp, Artificial Sequence
  Synthetic
gcgaucccaaagagtuagagga

SEQ ID NO: 81597 - DNA, 18 bp, Artificial Sequence
  Synthetic
gccggaccgggacuauct

SEQ ID NO: 81598 - DNA, 22 bp, Artificial Sequence
  Synthetic
cctcgtctccuctaggtccuat

SEQ ID NO: 81599 - DNA, 21 bp, Artificial Sequence
  Synthetic
ccagtgaccacacuctctgug

SEQ ID NO: 81600 - DNA, 25 bp, Artificial Sequence
  Synthetic
agtctgaaaugcaccttggaaauct

SEQ ID NO: 81601 - DNA, 17 bp, Artificial Sequence
  Synthetic
gcagcggcugtaucggt

SEQ ID NO: 81602 - DNA, 18 bp, Artificial Sequence
  Synthetic
ggccggugcagatagucc

SEQ ID NO: 81603 - DNA, 18 bp, Artificial Sequence
  Synthetic
atggccucggctgguaac

SEQ ID NO: 81604 - DNA, 21 bp, Artificial Sequence
  Synthetic
ccactctuccgtttagccuca

SEQ ID NO: 81605 - DNA, 22 bp, Artificial Sequence
  Synthetic
cttccaaagggutgcgtgttua

SEQ ID NO: 81606 - DNA, 22 bp, Artificial Sequence
  Synthetic
ttgaugaagacacagucgccaa

SEQ ID NO: 81607 - DNA, 28 bp, Artificial Sequence
  Synthetic
tttcttcagccagutttcttuacaacag

SEQ ID NO: 81608 - DNA, 21 bp, Artificial Sequence
  Synthetic
acaguccttgtacuccccact

SEQ ID NO: 81609 - DNA, 25 bp, Artificial Sequence
  Synthetic
ttgcactgacugccaactaatttug

SEQ ID NO: 81610 - DNA, 19 bp, Artificial Sequence
  Synthetic
ctgccccugtgacacctua

SEQ ID NO: 81611 - DNA, 22 bp, Artificial Sequence
  Synthetic
gtatgcagaggcugaggagaug

SEQ ID NO: 81612 - DNA, 23 bp, Artificial Sequence
  Synthetic
ccaactggcutaacacaggucaa

SEQ ID NO: 81613 - DNA, 20 bp, Artificial Sequence
  Synthetic
gcugtataugccccgaggga

SEQ ID NO: 81614 - DNA, 21 bp, Artificial Sequence
  Synthetic
ctgcagacccaggutagctua

SEQ ID NO: 81615 - DNA, 28 bp, Artificial Sequence
  Synthetic
aagagatttaccugatcactttgucgag

SEQ ID NO: 81616 - DNA, 22 bp, Artificial Sequence
  Synthetic
agtcctaacccuctagctgcut

SEQ ID NO: 81617 - DNA, 28 bp, Artificial Sequence
  Synthetic
tgtctactcctauggcatcgtattguat

SEQ ID NO: 81618 - DNA, 24 bp, Artificial Sequence
  Synthetic
ctccatctcaugcagtatctccuc

SEQ ID NO: 81619 - DNA, 23 bp, Artificial Sequence
  Synthetic
aggagaagaaccugcuacaggaa

SEQ ID NO: 81620 - DNA, 23 bp, Artificial Sequence
  Synthetic
cctctgcauacagctctgtcuct

SEQ ID NO: 81621 - DNA, 21 bp, Artificial Sequence
  Synthetic
gaacagaagcacucgcaggua

SEQ ID NO: 81622 - DNA, 28 bp, Artificial Sequence
  Synthetic
acataaacccaaacugaaccactctauc

SEQ ID NO: 81623 - DNA, 28 bp, Artificial Sequence
  Synthetic
gcaccagtguattactgctaugaaagaa

SEQ ID NO: 81624 - DNA, 24 bp, Artificial Sequence
  Synthetic
agaagcacucatgtggcttuaaca

SEQ ID NO: 81625 - DNA, 24 bp, Artificial Sequence
  Synthetic
ggatgggagaaaauacctcugacc

SEQ ID NO: 81626 - DNA, 28 bp, Artificial Sequence
  Synthetic
tcgaaagacccuagccttagauaaaact

SEQ ID NO: 81627 - DNA, 28 bp, Artificial Sequence
  Synthetic
ccagagtgagcuttcattttctcagtua

SEQ ID NO: 81628 - DNA, 25 bp, Artificial Sequence
  Synthetic
gttttattcgctucctcatgctguc

SEQ ID NO: 81629 - DNA, 24 bp, Artificial Sequence
  Synthetic
tgttttctcagauacggcgatuca

SEQ ID NO: 81630 - DNA, 22 bp, Artificial Sequence
  Synthetic
ctttcttguctctgcccuggag

SEQ ID NO: 81631 - DNA, 25 bp, Artificial Sequence
  Synthetic
cagacacttcaucatcagctctcut

SEQ ID NO: 81632 - DNA, 27 bp, Artificial Sequence
  Synthetic
actgacctctagugacttgctttcaua

SEQ ID NO: 81633 - DNA, 28 bp, Artificial Sequence
  Synthetic
agagagtaggaaugtaaaactuggacct

SEQ ID NO: 81634 - DNA, 26 bp, Artificial Sequence
  Synthetic
aatgagtctagaauccagacctguca

SEQ ID NO: 81635 - DNA, 22 bp, Artificial Sequence
  Synthetic
gcactguagcaccaaaguacct

SEQ ID NO: 81636 - DNA, 21 bp, Artificial Sequence
  Synthetic
ggcattcgutcacctgugagt

SEQ ID NO: 81637 - DNA, 22 bp, Artificial Sequence
  Synthetic
tgactaacacugtccccctuct

SEQ ID NO: 81638 - DNA, 22 bp, Artificial Sequence
  Synthetic
ggcttacuacaggaggctcuga

SEQ ID NO: 81639 - DNA, 21 bp, Artificial Sequence
  Synthetic
tccguccacatttgtugagca

SEQ ID NO: 81640 - DNA, 19 bp, Artificial Sequence
  Synthetic
gctcccccgucatcagtuc

SEQ ID NO: 81641 - DNA, 28 bp, Artificial Sequence
  Synthetic
ggtgataaaugcacttttgtcatauggt

SEQ ID NO: 81642 - DNA, 28 bp, Artificial Sequence
  Synthetic
cttcttgatcauctccttcttctucaga

SEQ ID NO: 81643 - DNA, 26 bp, Artificial Sequence
  Synthetic
acctaaaaagcagccuaagaaggaug

SEQ ID NO: 81644 - DNA, 22 bp, Artificial Sequence
  Synthetic
ggaggttgaaguaacccctgut

SEQ ID NO: 81645 - DNA, 28 bp, Artificial Sequence
  Synthetic
ggaaaaacaaccuaaaaagcagccuaag

SEQ ID NO: 81646 - DNA, 21 bp, Artificial Sequence
  Synthetic
tcctttcuacgctgctcctug

SEQ ID NO: 81647 - DNA, 23 bp, Artificial Sequence
  Synthetic
agucaggaagagccaguaggaaa

SEQ ID NO: 81648 - DNA, 19 bp, Artificial Sequence
  Synthetic
gagggccaucctatugcga

SEQ ID NO: 81649 - DNA, 23 bp, Artificial Sequence
  Synthetic
accactugactctgaugcagaag

SEQ ID NO: 81650 - DNA, 27 bp, Artificial Sequence
  Synthetic
gutgaaagaaaaatugcacaacaagca

SEQ ID NO: 81651 - DNA, 27 bp, Artificial Sequence
  Synthetic
guctctatgaguacagaaggacacaga

SEQ ID NO: 81652 - DNA, 25 bp, Artificial Sequence
  Synthetic
catggaggtaaguaagggtctgtut

SEQ ID NO: 81653 - DNA, 22 bp, Artificial Sequence
  Synthetic
cttuggccaacagaaucagcag

SEQ ID NO: 81654 - DNA, 25 bp, Artificial Sequence
  Synthetic
tgttactccaguccacacacauagt

SEQ ID NO: 81655 - DNA, 28 bp, Artificial Sequence
  Synthetic
gcataatttacaccugtgttcttgtugt

SEQ ID NO: 81656 - DNA, 21 bp, Artificial Sequence
  Synthetic
caggagcucagtagggtcuca

SEQ ID NO: 81657 - DNA, 20 bp, Artificial Sequence
  Synthetic
agtcuccaagccaggaguca

SEQ ID NO: 81658 - DNA, 22 bp, Artificial Sequence
  Synthetic
gctccacacucatgauccagat

SEQ ID NO: 81659 - DNA, 22 bp, Artificial Sequence
  Synthetic
gagtttccugaagtgacgguga

SEQ ID NO: 81660 - DNA, 20 bp, Artificial Sequence
  Synthetic
cccaggugccaucgaagaac

SEQ ID NO: 81661 - DNA, 24 bp, Artificial Sequence
  Synthetic
gcaagauccaaacttucacaccat

SEQ ID NO: 81662 - DNA, 28 bp, Artificial Sequence
  Synthetic
augtagaacatguaggaaacacaaggaa

SEQ ID NO: 81663 - DNA, 19 bp, Artificial Sequence
  Synthetic
gugaccaccguaccaccag

SEQ ID NO: 81664 - DNA, 22 bp, Artificial Sequence
  Synthetic
gtttgcugaagaggctgguagt

SEQ ID NO: 81665 - DNA, 27 bp, Artificial Sequence
  Synthetic
caacaactggauaatggaaggtttugt

SEQ ID NO: 81666 - DNA, 20 bp, Artificial Sequence
  Synthetic
gcatgcucaaacaccuccac

SEQ ID NO: 81667 - DNA, 25 bp, Artificial Sequence
  Synthetic
gtttcttccuggacccaaacuacat

SEQ ID NO: 81668 - DNA, 26 bp, Artificial Sequence
  Synthetic
cagcagcagaagcauacttaaucaga

SEQ ID NO: 81669 - DNA, 18 bp, Artificial Sequence
  Synthetic
gcutcucagcagcagcag

SEQ ID NO: 81670 - DNA, 23 bp, Artificial Sequence
  Synthetic
ggaccccaguatcattuaagcca

SEQ ID NO: 81671 - DNA, 22 bp, Artificial Sequence
  Synthetic
gagcucttcatuagggcaccaa

SEQ ID NO: 81672 - DNA, 21 bp, Artificial Sequence
  Synthetic
cccacccccauttagatcuga

SEQ ID NO: 81673 - DNA, 23 bp, Artificial Sequence
  Synthetic
catgactcacugggttguagcaa

SEQ ID NO: 81674 - DNA, 19 bp, Artificial Sequence
  Synthetic
gctctcugggtgcuaggct

SEQ ID NO: 81675 - DNA, 24 bp, Artificial Sequence
  Synthetic
agaaatctctgccucactcctcua

SEQ ID NO: 81676 - DNA, 27 bp, Artificial Sequence
  Synthetic
ctgaaagtagtutctgatggagtuggt

SEQ ID NO: 81677 - DNA, 28 bp, Artificial Sequence
  Synthetic
ggagtccugcaaaacaagctctaauaat

SEQ ID NO: 81678 - DNA, 22 bp, Artificial Sequence
  Synthetic
ccuagcccagagacauggagag

SEQ ID NO: 81679 - DNA, 23 bp, Artificial Sequence
  Synthetic
atctgcgagcauacaggtguaag

SEQ ID NO: 81680 - DNA, 20 bp, Artificial Sequence
  Synthetic
cagctgcggugtgaaatucc

SEQ ID NO: 81681 - DNA, 22 bp, Artificial Sequence
  Synthetic
atccacaggccuattugaaccc

SEQ ID NO: 81682 - DNA, 22 bp, Artificial Sequence
  Synthetic
cctgacatugtgagtagguggt

SEQ ID NO: 81683 - DNA, 23 bp, Artificial Sequence
  Synthetic
cctcaggugacctatgccuacat

SEQ ID NO: 81684 - DNA, 22 bp, Artificial Sequence
  Synthetic
ccactgaccucagtctgttuct

SEQ ID NO: 81685 - DNA, 22 bp, Artificial Sequence
  Synthetic
ggucccaaaaccagaagtcugt

SEQ ID NO: 81686 - DNA, 22 bp, Artificial Sequence
  Synthetic
gcttcttcauccagtggcucaa

SEQ ID NO: 81687 - DNA, 24 bp, Artificial Sequence
  Synthetic
cctcaactctugtctcctctcuca

SEQ ID NO: 81688 - DNA, 28 bp, Artificial Sequence
  Synthetic
gtttgggattcucatcttagccaaagua

SEQ ID NO: 81689 - DNA, 25 bp, Artificial Sequence
  Synthetic
ggccaaaagaaaucaaagtcuccaa

SEQ ID NO: 81690 - DNA, 27 bp, Artificial Sequence
  Synthetic
gtgcatcttgugaaagcattctgaaut

SEQ ID NO: 81691 - DNA, 31 bp, Artificial Sequence
  Synthetic
acgatctttgtttcuctattaaagttgcugt

SEQ ID NO: 81692 - DNA, 20 bp, Artificial Sequence
  Synthetic
gcttcgaacucacctucgct

SEQ ID NO: 81693 - DNA, 26 bp, Artificial Sequence
  Synthetic
tctacactggcuttctgttcacttut

SEQ ID NO: 81694 - DNA, 21 bp, Artificial Sequence
  Synthetic
cactttcggaucactguccca

SEQ ID NO: 81695 - DNA, 22 bp, Artificial Sequence
  Synthetic
aagagggacccautttgctugt

SEQ ID NO: 81696 - DNA, 20 bp, Artificial Sequence
  Synthetic
gcataacuaggccgctgucc

SEQ ID NO: 81697 - DNA, 25 bp, Artificial Sequence
  Synthetic
agcagtagauccagaacagttcuca

SEQ ID NO: 81698 - DNA, 20 bp, Artificial Sequence
  Synthetic
caggccuaaaacccugggaa

SEQ ID NO: 81699 - DNA, 21 bp, Artificial Sequence
  Synthetic
cggctgcucttttcgttcugt

SEQ ID NO: 81700 - DNA, 22 bp, Artificial Sequence
  Synthetic
agaaaggccccugtttgtgaut

SEQ ID NO: 81701 - DNA, 23 bp, Artificial Sequence
  Synthetic
ggaggagcgagauttgaagauca

SEQ ID NO: 81702 - DNA, 25 bp, Artificial Sequence
  Synthetic
gaagtctgacccuttttgtctccua

SEQ ID NO: 81703 - DNA, 18 bp, Artificial Sequence
  Synthetic
cttcggcuccacctgguc

SEQ ID NO: 81704 - DNA, 23 bp, Artificial Sequence
  Synthetic
aaggaaccugttgaagcugaaca

SEQ ID NO: 81705 - DNA, 28 bp, Artificial Sequence
  Synthetic
cttactttacgaccuacacaggagttuc

SEQ ID NO: 81706 - DNA, 30 bp, Artificial Sequence
  Synthetic
aagaaatctatgacutttccacttcaggut

SEQ ID NO: 81707 - DNA, 22 bp, Artificial Sequence
  Synthetic
tctgtcgcccuaatgccaaaut

SEQ ID NO: 81708 - DNA, 20 bp, Artificial Sequence
  Synthetic
caaccctauaggaggcguga

SEQ ID NO: 81709 - DNA, 24 bp, Artificial Sequence
  Synthetic
gtggaaacucactagagcatucct

SEQ ID NO: 81710 - DNA, 28 bp, Artificial Sequence
  Synthetic
catcagaagtuggaagagaacauagaca

SEQ ID NO: 81711 - DNA, 27 bp, Artificial Sequence
  Synthetic
cgaaattgtggtuctcgaagttcttuc

SEQ ID NO: 81712 - DNA, 27 bp, Artificial Sequence
  Synthetic
ggcgacagaaaggutaugaagaagaaa

SEQ ID NO: 81713 - DNA, 28 bp, Artificial Sequence
  Synthetic
cacaagttctgtugtcctcataacaauc

SEQ ID NO: 81714 - DNA, 28 bp, Artificial Sequence
  Synthetic
gggatgcugaggaaaagtauagagaaat

SEQ ID NO: 81715 - DNA, 29 bp, Artificial Sequence
  Synthetic
attaactgcaauaagaaaatccccaguct

SEQ ID NO: 81716 - DNA, 24 bp, Artificial Sequence
  Synthetic
cagcatgaugttggaatccugact

SEQ ID NO: 81717 - DNA, 28 bp, Artificial Sequence
  Synthetic
gagaaaacagccutatattgactcugct

SEQ ID NO: 81718 - DNA, 27 bp, Artificial Sequence
  Synthetic
tcactttacttuggttttgagtcugct

SEQ ID NO: 81719 - DNA, 28 bp, Artificial Sequence
  Synthetic
agaagaagauagtgaggtcatugaacct

SEQ ID NO: 81720 - DNA, 21 bp, Artificial Sequence
  Synthetic
ccaggccacauccaagtucag

SEQ ID NO: 81721 - DNA, 20 bp, Artificial Sequence
  Synthetic
gtctcugcagtgcuggaagt

SEQ ID NO: 81722 - DNA, 23 bp, Artificial Sequence
  Synthetic
gggcactctuccacatgttttuc

SEQ ID NO: 81723 - DNA, 27 bp, Artificial Sequence
  Synthetic
gtccagttctguctataacccagttuc

SEQ ID NO: 81724 - DNA, 19 bp, Artificial Sequence
  Synthetic
ttgcacuggctgucacagt

SEQ ID NO: 81725 - DNA, 17 bp, Artificial Sequence
  Synthetic
gcgggcaacaaggucug

SEQ ID NO: 81726 - DNA, 23 bp, Artificial Sequence
  Synthetic
ttttgagtcugaaacccccauga

SEQ ID NO: 81727 - DNA, 20 bp, Artificial Sequence
  Synthetic
ttctugcccaccagaugacc

SEQ ID NO: 81728 - DNA, 22 bp, Artificial Sequence
  Synthetic
cccagttguggtttcaguagga

SEQ ID NO: 81729 - DNA, 29 bp, Artificial Sequence
  Synthetic
cgggagttaatcugatgtcttctttgtut

SEQ ID NO: 81730 - DNA, 18 bp, Artificial Sequence
  Synthetic
ctggcggcugggtcttua

SEQ ID NO: 81731 - DNA, 17 bp, Artificial Sequence
  Synthetic
ccagcugugccagccaa

SEQ ID NO: 81732 - DNA, 17 bp, Artificial Sequence
  Synthetic
cctgcuggcttggcuga

SEQ ID NO: 81733 - DNA, 22 bp, Artificial Sequence
  Synthetic
tcacagcucagtcaggttcuct

SEQ ID NO: 81734 - DNA, 18 bp, Artificial Sequence
  Synthetic
cgcgtggutgttgcacug

SEQ ID NO: 81735 - DNA, 22 bp, Artificial Sequence
  Synthetic
ccaaatucaacgggctcttgug

SEQ ID NO: 81736 - DNA, 19 bp, Artificial Sequence
  Synthetic
tggauagccuccaccacct

SEQ ID NO: 81737 - DNA, 19 bp, Artificial Sequence
  Synthetic
gucctgccugaccagcaaa

SEQ ID NO: 81738 - DNA, 21 bp, Artificial Sequence
  Synthetic
cgaagctguagtccaggaugt

SEQ ID NO: 81739 - DNA, 18 bp, Artificial Sequence
  Synthetic
ccccgaaugccagtuccc

SEQ ID NO: 81740 - DNA, 21 bp, Artificial Sequence
  Synthetic
ggaaggccaugatgacaucgg

SEQ ID NO: 81741 - DNA, 23 bp, Artificial Sequence
  Synthetic
aggagctctucctttccttccut

SEQ ID NO: 81742 - DNA, 19 bp, Artificial Sequence
  Synthetic
aggtccccuggttguagca

SEQ ID NO: 81743 - DNA, 21 bp, Artificial Sequence
  Synthetic
gtgagaaugacgctcguacct

SEQ ID NO: 81744 - DNA, 19 bp, Artificial Sequence
  Synthetic
gggacugatcctccugcac

SEQ ID NO: 81745 - DNA, 20 bp, Artificial Sequence
  Synthetic
gcccatuagcagcccaaguc

SEQ ID NO: 81746 - DNA, 27 bp, Artificial Sequence
  Synthetic
ttccaacatgacauacttcacgtuact

SEQ ID NO: 81747 - DNA, 21 bp, Artificial Sequence
  Synthetic
cggacautgtaccucgggaaa

SEQ ID NO: 81748 - DNA, 32 bp, Artificial Sequence; identical to SEQ ID NO: 61856
  Synthetic

SEQ ID NO: 81749 - DNA, 27 bp, Artificial Sequence
  Synthetic
ctgtgatcagaautcctcctcttugaa

SEQ ID NO: 81750 - DNA, 28 bp, Artificial Sequence
  Synthetic
attcaaagaggaggaautctgaucacag

SEQ ID NO: 81751 - DNA, 25 bp, Artificial Sequence
  Synthetic
tccatttcuggcaatacagcacuat

SEQ ID NO: 81752 - DNA, 26 bp, Artificial Sequence
  Synthetic
caaagaggaggaautctgaucacaga

SEQ ID NO: 81753 - DNA, 24 bp, Artificial Sequence
  Synthetic
gtacctgatuctccatttcuggca

SEQ ID NO: 81754 - DNA, 23 bp, Artificial Sequence
  Synthetic
agtgctgtautgccagaaaugga

SEQ ID NO: 81755 - DNA, 32 bp, Artificial Sequence; identical to SEQ ID NO: 51197
  Synthetic

SEQ ID NO: 81756 - DNA, 20 bp, Artificial Sequence
  Synthetic
acaccgacccuctgtgauga

SEQ ID NO: 81757 - DNA, 18 bp, Artificial Sequence
  Synthetic
gcuggagcggcucaacaa

SEQ ID NO: 81758 - DNA, 22 bp, Artificial Sequence
  Synthetic
tcataaggucctccatcuccgt

SEQ ID NO: 81759 - DNA, 25 bp, Artificial Sequence
  Synthetic
gagaagaccauctctgccaagtaug

SEQ ID NO: 81760 - DNA, 21 bp, Artificial Sequence
  Synthetic
acagagccutggtctcctuct

SEQ ID NO: 81761 - DNA, 21 bp, Artificial Sequence
  Synthetic
gtagctcugagcctcatggug

SEQ ID NO: 81762 - DNA, 19 bp, Artificial Sequence
  Synthetic
gggcacggacaggucttua

SEQ ID NO: 81763 - DNA, 20 bp, Artificial Sequence
  Synthetic
tcgcucatttgtuggcgact

SEQ ID NO: 81764 - DNA, 27 bp, Artificial Sequence
  Synthetic
gtgcagcaauaaagtcatattctcugg

SEQ ID NO: 81765 - DNA, 22 bp, Artificial Sequence
  Synthetic
ctgaccttgugcctcttctgut

SEQ ID NO: 81766 - DNA, 20 bp, Artificial Sequence
  Synthetic
accacccucttgtcccucaa

SEQ ID NO: 81767 - DNA, 19 bp, Artificial Sequence
  Synthetic
ggcaacauggaggccauga

SEQ ID NO: 81768 - DNA, 18 bp, Artificial Sequence
  Synthetic
cctccaugttgcccugct

SEQ ID NO: 81769 - DNA, 19 bp, Artificial Sequence
  Synthetic
cccugaggcatgacuccaa

SEQ ID NO: 81770 - DNA, 33 bp, Artificial Sequence
  Synthetic
aataaagattccutcacaaatcctauaagaaca

SEQ ID NO: 81771 - DNA, 27 bp, Artificial Sequence
  Synthetic
gatcgggtagcuaatccaaaagacaut

SEQ ID NO: 81772 - DNA, 27 bp, Artificial Sequence
  Synthetic
tttccttttgtuctctatgccugaaaa

SEQ ID NO: 81773 - DNA, 25 bp, Artificial Sequence
  Synthetic
gcaaattgttguttcctagcgtuca

SEQ ID NO: 81774 - DNA, 27 bp, Artificial Sequence
  Synthetic
aaatctcttgguagctggtttacctuc

SEQ ID NO: 81775 - DNA, 28 bp, Artificial Sequence
  Synthetic
ggagaggautagtgactuaacgacaaat

SEQ ID NO: 81776 - DNA, 22 bp, Artificial Sequence
  Synthetic
cgcgattacuttaggcccucaa

SEQ ID NO: 81777 - DNA, 25 bp, Artificial Sequence
  Synthetic
cgccttagugaagagcagtatgtuc

SEQ ID NO: 81778 - DNA, 27 bp, Artificial Sequence
  Synthetic
tggtttacctuccagttctgaaaucat

SEQ ID NO: 81779 - DNA, 24 bp, Artificial Sequence
  Synthetic
tuctcttuccccaaaaaggaacga

SEQ ID NO: 81780 - DNA, 27 bp, Artificial Sequence
  Synthetic
cgttaagtcacuaatcctctccucaag

SEQ ID NO: 81781 - DNA, 31 bp, Artificial Sequence; identical to SEQ ID NO: 60789
  Synthetic

SEQ ID NO: 81782 - DNA, 19 bp, Artificial Sequence
  Synthetic
gccgcaggautccagauca

SEQ ID NO: 81783 - DNA, 17 bp, Artificial Sequence
  Synthetic
ggccccaucaccuccat

SEQ ID NO: 81784 - DNA, 23 bp, Artificial Sequence
  Synthetic
ggaaagaaugctcacagcucact

SEQ ID NO: 81785 - DNA, 17 bp, Artificial Sequence
  Synthetic
ccagaucgcggagcuca

SEQ ID NO: 81786 - DNA, 27 bp, Artificial Sequence
  Synthetic
tcctctgtaaauggtgttgtttucact

SEQ ID NO: 81787 - DNA, 28 bp, Artificial Sequence
  Synthetic
caaagcacttcaaacutactactgcaut

SEQ ID NO: 81788 - DNA, 19 bp, Artificial Sequence
  Synthetic
ttctuggccagctgcauct

SEQ ID NO: 81789 - DNA, 17 bp, Artificial Sequence
  Synthetic
gggcuccccctgcatug

SEQ ID NO: 81790 - DNA, 25 bp, Artificial Sequence
  Synthetic
atcccctgaacacuaagaatggaut

SEQ ID NO: 81791 - DNA, 22 bp, Artificial Sequence
  Synthetic
aggcacctguattgaccttgug

SEQ ID NO: 81792 - DNA, 27 bp, Artificial Sequence
  Synthetic
tttgggtgaccacuaattaaagtguga

SEQ ID NO: 81793 - DNA, 28 bp, Artificial Sequence
  Synthetic
catgauaaccaggaagctcaucagaaat

SEQ ID NO: 81794 - DNA, 22 bp, Artificial Sequence
  Synthetic
aatgccaaaggcuttcgttugt

SEQ ID NO: 81795 - DNA, 23 bp, Artificial Sequence
  Synthetic
caatggtctcgucctctctctug

SEQ ID NO: 81796 - DNA, 22 bp, Artificial Sequence
  Synthetic
ccaggagcuttgcatacucacc

SEQ ID NO: 81797 - DNA, 22 bp, Artificial Sequence
  Synthetic
gccctatctuctgcagagacut

SEQ ID NO: 81798 - DNA, 28 bp, Artificial Sequence
  Synthetic
ttcgttgtcagugattgttttcattgut

SEQ ID NO: 81799 - DNA, 23 bp, Artificial Sequence
  Synthetic
cagcacaugaacgtguaaacagg

SEQ ID NO: 81800 - DNA, 25 bp, Artificial Sequence
  Synthetic
tcccctgaacuccaggtaaaaguaa

SEQ ID NO: 81801 - DNA, 27 bp, Artificial Sequence
  Synthetic
tctgagtttccucaaagatctcctcua

SEQ ID NO: 81802 - DNA, 22 bp, Artificial Sequence
  Synthetic
ggcaagagcacutgaaatggut

SEQ ID NO: 81803 - DNA, 27 bp, Artificial Sequence
  Synthetic
ggtctgtttccaguaatggtccaauat

SEQ ID NO: 81804 - DNA, 21 bp, Artificial Sequence
  Synthetic
ttgccaatguccgcttcaaug

SEQ ID NO: 81805 - DNA, 24 bp, Artificial Sequence
  Synthetic
ggtcaaagautaaggugcccacaa

SEQ ID NO: 81806 - DNA, 22 bp, Artificial Sequence
  Synthetic
gcgaagcacugcatagttucat

SEQ ID NO: 81807 - DNA, 24 bp, Artificial Sequence
  Synthetic
ctggattactuttgccttgcucag

SEQ ID NO: 81808 - DNA, 21 bp, Artificial Sequence
  Synthetic
ggcaaacagugccaauccaaa

SEQ ID NO: 81809 - DNA, 22 bp, Artificial Sequence
  Synthetic
ggactatgccauggacgaacug

SEQ ID NO: 81810 - DNA, 28 bp, Artificial Sequence
  Synthetic
ttctttgtagataugatgcagccatuga

SEQ ID NO: 81811 - DNA, 26 bp, Artificial Sequence
  Synthetic
agagaaaaccautacttgtccaucgt

SEQ ID NO: 81812 - DNA, 25 bp, Artificial Sequence
  Synthetic
aaaacaacuaauaggcccaagggaa

SEQ ID NO: 81813 - DNA, 22 bp, Artificial Sequence
  Synthetic
gacctuccgacgcattguagaa

SEQ ID NO: 81814 - DNA, 22 bp, Artificial Sequence
  Synthetic
gttccagcagutccacctucat

SEQ ID NO: 81815 - DNA, 20 bp, Artificial Sequence
  Synthetic
ggaaggaaccccucgaaucc

SEQ ID NO: 81816 - DNA, 25 bp, Artificial Sequence
  Synthetic
ccacctaaagcutatcagaguggat

SEQ ID NO: 81817 - DNA, 17 bp, Artificial Sequence
  Synthetic
ggtggcacagguggcut

SEQ ID NO: 81818 - DNA, 28 bp, Artificial Sequence
  Synthetic
agtaaagtgcacaaauatgagtguaccc

SEQ ID NO: 81819 - DNA, 22 bp, Artificial Sequence
  Synthetic
aagugacugaacagcgacagaa

SEQ ID NO: 81820 - DNA, 21 bp, Artificial Sequence
  Synthetic
ccagcctcucggtttgtgtua

SEQ ID NO: 81821 - DNA, 27 bp, Artificial Sequence
  Synthetic
gaacatatgagccuttcttcccuacag

SEQ ID NO: 81822 - DNA, 22 bp, Artificial Sequence
  Synthetic
gtgcttcuggatgtacugacca

SEQ ID NO: 81823 - DNA, 26 bp, Artificial Sequence
  Synthetic
actgtccttacutttcctttgctuca

SEQ ID NO: 81824 - DNA, 28 bp, Artificial Sequence
  Synthetic
ctgataatgctaucaagaaccacuggaa

SEQ ID NO: 81825 - DNA, 20 bp, Artificial Sequence
  Synthetic
ggcagggagutgagctguag

SEQ ID NO: 81826 - DNA, 17 bp, Artificial Sequence
  Synthetic
ccugugccacccccaaa

SEQ ID NO: 81827 - DNA, 28 bp, Artificial Sequence
  Synthetic
cgaataggccuaagtttgtggaatgaua

SEQ ID NO: 81828 - DNA, 22 bp, Artificial Sequence
  Synthetic
gcagauaggactggguaaggct

SEQ ID NO: 81829 - DNA, 21 bp, Artificial Sequence
  Synthetic
tggtgctgaguctgcatcauc

SEQ ID NO: 81830 - DNA, 23 bp, Artificial Sequence
  Synthetic
gccagucacagaggatgagagua

SEQ ID NO: 81831 - DNA, 22 bp, Artificial Sequence
  Synthetic
gctaatggcaagaauggcgaut

SEQ ID NO: 81832 - DNA, 26 bp, Artificial Sequence
  Synthetic
tttgtaacacacuctcacaguaccac

SEQ ID NO: 81833 - DNA, 27 bp, Artificial Sequence
  Synthetic
tggtaaatcttacauccgtctctccut

SEQ ID NO: 81834 - DNA, 24 bp, Artificial Sequence
  Synthetic
tgugattgaucaaggagagacgga

SEQ ID NO: 81835 - DNA, 28 bp, Artificial Sequence
  Synthetic
gggatgtaaugacccttcaaaatcacua

SEQ ID NO: 81836 - DNA, 24 bp, Artificial Sequence
  Synthetic
gtcatttgaugggttttgcucagg

SEQ ID NO: 81837 - DNA, 24 bp, Artificial Sequence
  Synthetic
cctggagcuaaactaaccgtcuct

SEQ ID NO: 81838 - DNA, 25 bp, Artificial Sequence
  Synthetic
cagagaaagaggagaugaagctuct

SEQ ID NO: 81839 - DNA, 23 bp, Artificial Sequence
  Synthetic
ccatcaucaaccagtgcatcuca

SEQ ID NO: 81840 - DNA, 27 bp, Artificial Sequence
  Synthetic
gctaggauagtgattatuccccaggat

SEQ ID NO: 81841 - DNA, 29 bp, Artificial Sequence
  Synthetic
cagaaaauaaggaaaagtauggcaaacca

SEQ ID NO: 81842 - DNA, 23 bp, Artificial Sequence
  Synthetic
tgagucggaggttctaucaggag

SEQ ID NO: 81843 - DNA, 24 bp, Artificial Sequence
  Synthetic
tgattatuacaccccacccucagt

SEQ ID NO: 81844 - DNA, 23 bp, Artificial Sequence
  Synthetic
gcaccctggguaagatttctcut

SEQ ID NO: 81845 - DNA, 28 bp, Artificial Sequence
  Synthetic
ctggatgtcggaauatttagaaaccuct

SEQ ID NO: 81846 - DNA, 26 bp, Artificial Sequence
  Synthetic
atgctaucacacacattcactugagt

SEQ ID NO: 81847 - DNA, 17 bp, Artificial Sequence
  Synthetic
acctggugcaggctguc

SEQ ID NO: 81848 - DNA, 26 bp, Artificial Sequence
  Synthetic
atctcaacugaatggaaugaacgaca

SEQ ID NO: 81849 - DNA, 28 bp, Artificial Sequence
  Synthetic
aagctgtgttacutcaaaggaggttuat

SEQ ID NO: 81850 - DNA, 26 bp, Artificial Sequence
  Synthetic
cgttgagtcutatttccagtcugacc

SEQ ID NO: 81851 - DNA, 24 bp, Artificial Sequence
  Synthetic
gcacttagaggcccuttgcttaut

SEQ ID NO: 81852 - DNA, 21 bp, Artificial Sequence
  Synthetic
tgctgttggautcggcctuag

SEQ ID NO: 81853 - DNA, 22 bp, Artificial Sequence
  Synthetic
cugggtaaacauaaggccagga

SEQ ID NO: 81854 - DNA, 27 bp, Artificial Sequence
  Synthetic
cgtgaagaugaaacaagaattguccat

SEQ ID NO: 81855 - DNA, 27 bp, Artificial Sequence
  Synthetic
cttacctcttuttcccttccugaaaca

SEQ ID NO: 81856 - DNA, 20 bp, Artificial Sequence
  Synthetic
gagtagacacggugcaguca

SEQ ID NO: 81857 - DNA, 25 bp, Artificial Sequence
  Synthetic
tgtttgtguctcctagugaaaaggg

SEQ ID NO: 81858 - DNA, 21 bp, Artificial Sequence
  Synthetic
tcctgccuggguaggaaaaga

SEQ ID NO: 81859 - DNA, 21 bp, Artificial Sequence
  Synthetic
ggcaagugggatgtgaugagg

SEQ ID NO: 81860 - DNA, 27 bp, Artificial Sequence
  Synthetic
aggaggtaattttucttctctgctgut

SEQ ID NO: 81861 - DNA, 27 bp, Artificial Sequence
  Synthetic
agtcaagatgttuctggttctgttuct

SEQ ID NO: 81862 - DNA, 22 bp, Artificial Sequence
  Synthetic
ggatccatguggacacctcauc

SEQ ID NO: 81863 - DNA, 25 bp, Artificial Sequence
  Synthetic
atggaguccattgugagaacaacat

SEQ ID NO: 81864 - DNA, 25 bp, Artificial Sequence
  Synthetic
agtatguccccatgcuagaaaggaa

SEQ ID NO: 81865 - DNA, 28 bp, Artificial Sequence
  Synthetic
cacccagagugagtatagacactttuac

SEQ ID NO: 81866 - DNA, 25 bp, Artificial Sequence
  Synthetic
ctgacttgtttuatgcggtgtacut

SEQ ID NO: 81867 - DNA, 21 bp, Artificial Sequence
  Synthetic
tgcggtugatgcatucagagt

SEQ ID NO: 81868 - DNA, 23 bp, Artificial Sequence
  Synthetic
gcaaugaaaaagcagcccttcuc

SEQ ID NO: 81869 - DNA, 28 bp, Artificial Sequence
  Synthetic
gatgaagttccagguaattctagcaugt

SEQ ID NO: 81870 - DNA, 21 bp, Artificial Sequence
  Synthetic
ggaaaaggcugcaagacccut

SEQ ID NO: 81871 - DNA, 19 bp, Artificial Sequence
  Synthetic
gactgggccugtgctcaut

SEQ ID NO: 81872 - DNA, 28 bp, Artificial Sequence
  Synthetic
agagataaagacautagtcccagagugt

SEQ ID NO: 81873 - DNA, 21 bp, Artificial Sequence
  Synthetic
acaaactcucagagcccaucc

SEQ ID NO: 81874 - DNA, 20 bp, Artificial Sequence
  Synthetic
ggttccagugctcagcctua

SEQ ID NO: 81875 - DNA, 28 bp, Artificial Sequence
  Synthetic
aatcttgggcuaaagagactttcctuac

SEQ ID NO: 81876 - DNA, 28 bp, Artificial Sequence
  Synthetic
ccagattccaguaccagtacatuaggaa

SEQ ID NO: 81877 - DNA, 28 bp, Artificial Sequence
  Synthetic
caagtttcccttuaagtggcctgtauat

SEQ ID NO: 81878 - DNA, 21 bp, Artificial Sequence
  Synthetic
gctgtaggcaauggaacugct

SEQ ID NO: 81879 - DNA, 23 bp, Artificial Sequence
  Synthetic
cagcaagaggugtgtatggaugt

SEQ ID NO: 81880 - DNA, 22 bp, Artificial Sequence
  Synthetic
tccccagauacactcccttuct

SEQ ID NO: 81881 - DNA, 21 bp, Artificial Sequence
  Synthetic
tggaagccgacucttccuact

SEQ ID NO: 81882 - DNA, 23 bp, Artificial Sequence
  Synthetic
tgatgagaaccccugtgggauag

SEQ ID NO: 81883 - DNA, 21 bp, Artificial Sequence
  Synthetic
acctctggauattggcgctug

SEQ ID NO: 81884 - DNA, 22 bp, Artificial Sequence
  Synthetic
tcacctctcagugcactcatug

SEQ ID NO: 81885 - DNA, 25 bp, Artificial Sequence
  Synthetic
ggataagugccagacagacaugaat

SEQ ID NO: 81886 - DNA, 23 bp, Artificial Sequence
  Synthetic
gcagcgutaaaggaaatuccgat

SEQ ID NO: 81887 - DNA, 20 bp, Artificial Sequence
  Synthetic
gttctgugcccccattgtuc

SEQ ID NO: 81888 - DNA, 20 bp, Artificial Sequence
  Synthetic
cagguacacggagcttcugg

SEQ ID NO: 81889 - DNA, 28 bp, Artificial Sequence
  Synthetic
ctccatgaaugaggatgggatttatuct

SEQ ID NO: 81890 - DNA, 23 bp, Artificial Sequence
  Synthetic
cgctgucaaaaccagtgctttuc

SEQ ID NO: 81891 - DNA, 28 bp, Artificial Sequence
  Synthetic
aagcaacugcaaagaggagaaagtauat

SEQ ID NO: 81892 - DNA, 19 bp, Artificial Sequence
  Synthetic
ggccagaccutgggactua

SEQ ID NO: 81893 - DNA, 21 bp, Artificial Sequence
  Synthetic
ccactgcccuctttgacctut

SEQ ID NO: 81894 - DNA, 21 bp, Artificial Sequence
  Synthetic
gttctatggugcccctuggag

SEQ ID NO: 81895 - DNA, 25 bp, Artificial Sequence
  Synthetic
ctgacaccccauttgcttcttacua

SEQ ID NO: 81896 - DNA, 24 bp, Artificial Sequence
  Synthetic
cttacagggtucactcagacacuc

SEQ ID NO: 81897 - DNA, 28 bp, Artificial Sequence
  Synthetic
tgatgctactctucagaggtctaatuct

SEQ ID NO: 81898 - DNA, 20 bp, Artificial Sequence
  Synthetic
gggacauccccgtgtcacua

SEQ ID NO: 81899 - DNA, 23 bp, Artificial Sequence
  Synthetic
tgttcccgttucctcttgatcuc

SEQ ID NO: 81900 - DNA, 27 bp, Artificial Sequence
  Synthetic
cttctaggaaagaucataggccaauct

SEQ ID NO: 81901 - DNA, 28 bp, Artificial Sequence
  Synthetic
gtttaacttatugagcatgcctggttut

SEQ ID NO: 81902 - DNA, 22 bp, Artificial Sequence
  Synthetic
gcccaucucagacaaccaagac

SEQ ID NO: 81903 - DNA, 22 bp, Artificial Sequence
  Synthetic
gcaacataugagcgcctttucc

SEQ ID NO: 81904 - DNA, 25 bp, Artificial Sequence
  Synthetic
aaagctactgugtgaacctcaucaa

SEQ ID NO: 81905 - DNA, 26 bp, Artificial Sequence
  Synthetic
ttttaaaaggugtccaaccaaugcaa

SEQ ID NO: 81906 - DNA, 21 bp, Artificial Sequence
  Synthetic
gcctccctutccaatggacua

SEQ ID NO: 81907 - DNA, 27 bp, Artificial Sequence
  Synthetic
atgttccatgtaauactggaccaacuc

SEQ ID NO: 81908 - DNA, 23 bp, Artificial Sequence
  Synthetic
ctttgcattggutggacacctut

SEQ ID NO: 81909 - DNA, 30 bp, Artificial Sequence; identical to SEQ ID NO: 65239
  Synthetic

SEQ ID NO: 81910 - DNA, 21 bp, Artificial Sequence
  Synthetic
gtcctgguagtgtctugcagt

SEQ ID NO: 81911 - DNA, 28 bp, Artificial Sequence
  Synthetic
ggtctggcacugttcttcaaatatttut

SEQ ID NO: 81912 - DNA, 27 bp, Artificial Sequence
  Synthetic
atgacttugcagaaaaagagactcuga

SEQ ID NO: 81913 - DNA, 28 bp, Artificial Sequence
  Synthetic
tccaactgcugtaattcatactucacat

SEQ ID NO: 81914 - DNA, 29 bp, Artificial Sequence
  Synthetic
ggacagctautgaagcatttaaugaaacc

SEQ ID NO: 81915 - DNA, 28 bp, Artificial Sequence
  Synthetic
gaggatttuggttatctcuagcacaaga

SEQ ID NO: 81916 - DNA, 28 bp, Artificial Sequence
  Synthetic
cctaaguaagaagcagaatgagcugaaa

SEQ ID NO: 81917 - DNA, 33 bp, Artificial Sequence
  Synthetic
tattcaaacaataucttacagcttttaugagct

SEQ ID NO: 81918 - DNA, 19 bp, Artificial Sequence
  Synthetic
ttcacgcgggugagtaucc

SEQ ID NO: 81919 - DNA, 23 bp, Artificial Sequence
  Synthetic
accagccuggcttatgugaaaat

SEQ ID NO: 81920 - DNA, 20 bp, Artificial Sequence
  Synthetic
cagctcgutcccgataucca

SEQ ID NO: 81921 - DNA, 28 bp, Artificial Sequence
  Synthetic
ctggctccagguaaagaaaataaacaut

SEQ ID NO: 81922 - DNA, 30 bp, Artificial Sequence
  Synthetic
gtgtaagcauagatacttgaucagagaagg

SEQ ID NO: 81923 - DNA, 23 bp, Artificial Sequence
  Synthetic
tggcagacaguaactcagcuagt

SEQ ID NO: 81924 - DNA, 24 bp, Artificial Sequence
  Synthetic
cuttgtguaacagcacggaaaaga

SEQ ID NO: 81925 - DNA, 27 bp, Artificial Sequence
  Synthetic
ttgcatttgtcuggttttacacucaag

SEQ ID NO: 81926 - DNA, 22 bp, Artificial Sequence
  Synthetic
tgagagggcacutctcttgcua

SEQ ID NO: 81927 - DNA, 28 bp, Artificial Sequence
  Synthetic
gcttttaggacaagcucccttaaugaat

SEQ ID NO: 81928 - DNA, 20 bp, Artificial Sequence
  Synthetic
agaagaggccaugcgtuagg

SEQ ID NO: 81929 - DNA, 28 bp, Artificial Sequence
  Synthetic
ctgcttttcatuttattaggcaguggaa

SEQ ID NO: 81930 - DNA, 24 bp, Artificial Sequence
  Synthetic
tgccaacautagtgacatugacag

SEQ ID NO: 81931 - DNA, 23 bp, Artificial Sequence
  Synthetic
cacacagccaugggttttcttut

SEQ ID NO: 81932 - DNA, 21 bp, Artificial Sequence
  Synthetic
ggccugcaaggattcccauag

SEQ ID NO: 81933 - DNA, 20 bp, Artificial Sequence
  Synthetic
ctgaacttcugggccacuca

SEQ ID NO: 81934 - DNA, 21 bp, Artificial Sequence
  Synthetic
ggccttggcuattgcatcauc

SEQ ID NO: 81935 - DNA, 20 bp, Artificial Sequence
  Synthetic
aaagtgggcuccagtcucac

SEQ ID NO: 81936 - DNA, 28 bp, Artificial Sequence
  Synthetic
gccaggagacuattacgttcctctauaa

SEQ ID NO: 81937 - DNA, 28 bp, Artificial Sequence
  Synthetic
tctcttgctttuctatgtccctttugaa

SEQ ID NO: 81938 - DNA, 25 bp, Artificial Sequence
  Synthetic
cttgctaatcucccagaggaagtua

SEQ ID NO: 81939 - DNA, 25 bp, Artificial Sequence
  Synthetic
catcatccctuccccttttactgut

SEQ ID NO: 81940 - DNA, 21 bp, Artificial Sequence
  Synthetic
aattccuggagcccaguagga

SEQ ID NO: 81941 - DNA, 23 bp, Artificial Sequence
  Synthetic
cgagaagaagcugaagagcaugg

SEQ ID NO: 81942 - DNA, 28 bp, Artificial Sequence
  Synthetic
caaatacagcaugaaggtgtactauggt

SEQ ID NO: 81943 - DNA, 26 bp, Artificial Sequence
  Synthetic
gcttattgtagagcugagtcttcuca

SEQ ID NO: 81944 - DNA, 22 bp, Artificial Sequence
  Synthetic
cctcctgcaacuggatcatcuc

SEQ ID NO: 81945 - DNA, 18 bp, Artificial Sequence
  Synthetic
gggugccaagcctctguc

SEQ ID NO: 81946 - DNA, 30 bp, Artificial Sequence
  Synthetic
tctttcacttgtguttctttctaagtguga

SEQ ID NO: 81947 - DNA, 22 bp, Artificial Sequence
  Synthetic
gccttgauaccctccccgtuat

SEQ ID NO: 81948 - DNA, 29 bp, Artificial Sequence
  Synthetic
actatggattugataaaattgaggugcga

SEQ ID NO: 81949 - DNA, 26 bp, Artificial Sequence
  Synthetic
ccacgaaaaccguaagttgtcaaaut

SEQ ID NO: 81950 - DNA, 26 bp, Artificial Sequence
  Synthetic
gcacctgtaauggcaatgaagtacua

SEQ ID NO: 81951 - DNA, 29 bp, Artificial Sequence
  Synthetic
accttacctcagcuatacaacaaatugac

SEQ ID NO: 81952 - DNA, 21 bp, Artificial Sequence
  Synthetic
ggttttcguggagaagcctug

SEQ ID NO: 81953 - DNA, 27 bp, Artificial Sequence
  Synthetic
ccatacttcaccaaauactgggtuagt

SEQ ID NO: 81954 - DNA, 23 bp, Artificial Sequence
  Synthetic
ggaagacucagaugccgaaaact

SEQ ID NO: 81955 - DNA, 19 bp, Artificial Sequence
  Synthetic
tgtccucagcacagctugg

SEQ ID NO: 81956 - DNA, 18 bp, Artificial Sequence
  Synthetic
gggtccuctgtccacuca

SEQ ID NO: 81957 - DNA, 18 bp, Artificial Sequence
  Synthetic
gacgaguggcauggaggt

SEQ ID NO: 81958 - DNA, 29 bp, Artificial Sequence
  Synthetic
aaagtcaacttgacutttgactcaattug

SEQ ID NO: 81959 - DNA, 28 bp, Artificial Sequence
  Synthetic
tccagtgtttaguattcatggcaaucat

SEQ ID NO: 81960 - DNA, 25 bp, Artificial Sequence
  Synthetic
agcctgcatcuccaccttattatuc

SEQ ID NO: 81961 - DNA, 21 bp, Artificial Sequence
  Synthetic
accutgcatcctucacaagca

SEQ ID NO: 81962 - DNA, 25 bp, Artificial Sequence
  Synthetic
atgacaaaaggcuacagagcauagg

SEQ ID NO: 81963 - DNA, 23 bp, Artificial Sequence
  Synthetic
cagcatcaccacucggtagtuat

SEQ ID NO: 81964 - DNA, 20 bp, Artificial Sequence
  Synthetic
gguaagaacggucccaccaa

SEQ ID NO: 81965 - DNA, 24 bp, Artificial Sequence
  Synthetic
gtgacttcugctctgtgttucaag

SEQ ID NO: 81966 - DNA, 24 bp, Artificial Sequence
  Synthetic
gtgtguatatgtgtgugccagagt

SEQ ID NO: 81967 - DNA, 21 bp, Artificial Sequence
  Synthetic
gactucggcatguccagagat

SEQ ID NO: 81968 - DNA, 21 bp, Artificial Sequence
  Synthetic
cccatacugagccaccaggua

SEQ ID NO: 81969 - DNA, 24 bp, Artificial Sequence
  Synthetic
gcctgttacutggagttccugaag

SEQ ID NO: 81970 - DNA, 19 bp, Artificial Sequence
  Synthetic
ggguagctgauggcccaag

SEQ ID NO: 81971 - DNA, 23 bp, Artificial Sequence
  Synthetic
tgtttctctcuccacccaccaua

SEQ ID NO: 81972 - DNA, 25 bp, Artificial Sequence
  Synthetic
caataattaccccugtgggatcguc

SEQ ID NO: 81973 - DNA, 25 bp, Artificial Sequence
  Synthetic
acagcttttgucccgtatggaaaut

SEQ ID NO: 81974 - DNA, 20 bp, Artificial Sequence
  Synthetic
gctcgcccccutaatctcut

SEQ ID NO: 81975 - DNA, 28 bp, Artificial Sequence
  Synthetic
ggaataagatggcautgtaaaacagucc

SEQ ID NO: 81976 - DNA, 25 bp, Artificial Sequence
  Synthetic
tcagcttctgauaaaaggcggaaut

SEQ ID NO: 81977 - DNA, 22 bp, Artificial Sequence
  Synthetic
gctccccaggcutttgagauac

SEQ ID NO: 81978 - DNA, 28 bp, Artificial Sequence
  Synthetic
tttctttgagtccucagtgaaagctuaa

SEQ ID NO: 81979 - DNA, 26 bp, Artificial Sequence
  Synthetic
ccttttaggagccuttgtgtctgaua

SEQ ID NO: 81980 - DNA, 22 bp, Artificial Sequence
  Synthetic
ggaactcctucagctcctccut

SEQ ID NO: 81981 - DNA, 22 bp, Artificial Sequence
  Synthetic
ctgttctcugcctgcctgauac

SEQ ID NO: 81982 - DNA, 26 bp, Artificial Sequence
  Synthetic
gaaagcctutattctcaacugccaat

SEQ ID NO: 81983 - DNA, 28 bp, Artificial Sequence
  Synthetic
attcacgtaggtugcacaaagaatttut

SEQ ID NO: 81984 - DNA, 28 bp, Artificial Sequence
  Synthetic
ggaacaaggaaaagutttgatcactuga

SEQ ID NO: 81985 - DNA, 28 bp, Artificial Sequence
  Synthetic
acccatttcataaucagtttctgcuact

SEQ ID NO: 81986 - DNA, 23 bp, Artificial Sequence
  Synthetic
atggaaucagggaucacaacacc

SEQ ID NO: 81987 - DNA, 25 bp, Artificial Sequence
  Synthetic
tgactttcatguactctcccaccut

SEQ ID NO: 81988 - DNA, 28 bp, Artificial Sequence
  Synthetic
cctttgggttauaaatagtgcacucaga

SEQ ID NO: 81989 - DNA, 28 bp, Artificial Sequence
  Synthetic
aggtcaacagautactgtatagugcaag

SEQ ID NO: 81990 - DNA, 25 bp, Artificial Sequence
  Synthetic
ccctgtaataauccgtgctguagac

SEQ ID NO: 81991 - DNA, 21 bp, Artificial Sequence
  Synthetic
gctccacautgccagucagat

SEQ ID NO: 81992 - DNA, 29 bp, Artificial Sequence
  Synthetic
acagagtaacagacuagctagagacaaug

SEQ ID NO: 81993 - DNA, 25 bp, Artificial Sequence
  Synthetic
agcacttaccugtgactccauagaa

SEQ ID NO: 81994 - DNA, 26 bp, Artificial Sequence
  Synthetic
cgagatcctcuctctgaaatcacuga

SEQ ID NO: 81995 - DNA, 27 bp, Artificial Sequence
  Synthetic
gtaaaaacaugctgagaucagccaaat

SEQ ID NO: 81996 - DNA, 20 bp, Artificial Sequence
  Synthetic
ccagcuccaccaggauacat

SEQ ID NO: 81997 - DNA, 26 bp, Artificial Sequence
  Synthetic
cagaagucctuaaaacagcaggaaag

SEQ ID NO: 81998 - DNA, 18 bp, Artificial Sequence
  Synthetic
ctggaccacgcuttccug

SEQ ID NO: 81999 - DNA, 28 bp, Artificial Sequence
  Synthetic
agaaaatggaggaagucactgaaacaut

SEQ ID NO: 82000 - DNA, 20 bp, Artificial Sequence
  Synthetic
gggaggccagguacaccaua

SEQ ID NO: 82001 - DNA, 22 bp, Artificial Sequence
  Synthetic
ctctcttcuccccatgctctug

SEQ ID NO: 82002 - DNA, 22 bp, Artificial Sequence
  Synthetic
gaggctgcugatgtcactctua

SEQ ID NO: 82003 - DNA, 21 bp, Artificial Sequence
  Synthetic
agaaggcccuggaugaagaga

SEQ ID NO: 82004 - DNA, 28 bp, Artificial Sequence
  Synthetic
agaggcccaatauatccagaaaattgug

SEQ ID NO: 82005 - DNA, 24 bp, Artificial Sequence
  Synthetic
ttttgtgaaauggtcggguacaga

SEQ ID NO: 82006 - DNA, 21 bp, Artificial Sequence
  Synthetic
tguccagccagcaaaugagag

SEQ ID NO: 82007 - DNA, 25 bp, Artificial Sequence
  Synthetic
cagcaatcutgacttcuggaacaat

SEQ ID NO: 82008 - DNA, 23 bp, Artificial Sequence
  Synthetic
cgtaactctuttccaggcugagg

SEQ ID NO: 82009 - DNA, 24 bp, Artificial Sequence
  Synthetic
cgagaaaaugactgcctucaggaa

SEQ ID NO: 82010 - DNA, 22 bp, Artificial Sequence
  Synthetic
gtttctgccucatctccuggac

SEQ ID NO: 82011 - DNA, 22 bp, Artificial Sequence
  Synthetic
aactgccautcactgtgtucct

SEQ ID NO: 82012 - DNA, 23 bp, Artificial Sequence
  Synthetic
cgagaaguaagtcccaaauggca

SEQ ID NO: 82013 - DNA, 25 bp, Artificial Sequence
  Synthetic
gttttgggaacauggttttgaccut

SEQ ID NO: 82014 - DNA, 22 bp, Artificial Sequence
  Synthetic
ctatcactgucccaggucagga

SEQ ID NO: 82015 - DNA, 23 bp, Artificial Sequence
  Synthetic
cttcagaccucaaacccatcuca

SEQ ID NO: 82016 - DNA, 25 bp, Artificial Sequence
  Synthetic
cagtgtgaatuacagcaaaccccua

SEQ ID NO: 82017 - DNA, 27 bp, Artificial Sequence
  Synthetic
aatagccgtatcuggaaggaacttuac

SEQ ID NO: 82018 - DNA, 21 bp, Artificial Sequence
  Synthetic
ggctgaugcacgatttgctut

SEQ ID NO: 82019 - DNA, 20 bp, Artificial Sequence
  Synthetic
gagcuggaggcccuaaagac

SEQ ID NO: 82020 - DNA, 23 bp, Artificial Sequence
  Synthetic
gaagaagaccucagcagatgcut

SEQ ID NO: 82021 - DNA, 28 bp, Artificial Sequence
  Synthetic
cacaatttcugtgtttgtuaaccagagt

SEQ ID NO: 82022 - DNA, 17 bp, Artificial Sequence
  Synthetic
cactccucgccagucca

SEQ ID NO: 82023 - DNA, 18 bp, Artificial Sequence
  Synthetic
cgctgugaggcucagcat

SEQ ID NO: 82024 - DNA, 18 bp, Artificial Sequence
  Synthetic
cctgcccugtggcacaua

SEQ ID NO: 82025 - DNA, 18 bp, Artificial Sequence
  Synthetic
cgaaggcggauggctcuc

SEQ ID NO: 82026 - DNA, 23 bp, Artificial Sequence
  Synthetic
ggcatcctucacctgctattgut

SEQ ID NO: 82027 - DNA, 19 bp, Artificial Sequence
  Synthetic
cugctaaguaggccacgct

SEQ ID NO: 82028 - DNA, 18 bp, Artificial Sequence
  Synthetic
cacagagcguggccuact

SEQ ID NO: 82029 - DNA, 21 bp, Artificial Sequence
  Synthetic
tgtgaactutctgctcugcca

SEQ ID NO: 82030 - DNA, 26 bp, Artificial Sequence
  Synthetic
ccaaaccaguggttagaugagaaact

SEQ ID NO: 82031 - DNA, 22 bp, Artificial Sequence
  Synthetic
caagaautgauacgcccagacc

SEQ ID NO: 82032 - DNA, 27 bp, Artificial Sequence
  Synthetic
ggagaaaggacauttgtgauaggagaa

SEQ ID NO: 82033 - DNA, 24 bp, Artificial Sequence
  Synthetic
gauttctgtaccatugagggcact

SEQ ID NO: 82034 - DNA, 21 bp, Artificial Sequence
  Synthetic
ctgtgctguccagtgtgtcut

SEQ ID NO: 82035 - DNA, 25 bp, Artificial Sequence
  Synthetic
agaagaacaaugcccugaagaagat

SEQ ID NO: 82036 - DNA, 25 bp, Artificial Sequence
  Synthetic
acttcttttucaagcaggacgauct

SEQ ID NO: 82037 - DNA, 28 bp, Artificial Sequence
  Synthetic
cacaaacatugcaagctgaattuaaaca

SEQ ID NO: 82038 - DNA, 23 bp, Artificial Sequence
  Synthetic
cgtgtctccaucattctcagcuc

SEQ ID NO: 82039 - DNA, 28 bp, Artificial Sequence
  Synthetic
ggacctacttttugatgtttctgtgcua

SEQ ID NO: 82040 - DNA, 20 bp, Artificial Sequence
  Synthetic
gtgacattcgugccttgcut

SEQ ID NO: 82041 - DNA, 17 bp, Artificial Sequence
  Synthetic
gcuggaggacgccacug

SEQ ID NO: 82042 - DNA, 25 bp, Artificial Sequence
  Synthetic
cactctatgcautcatcttcacgut

SEQ ID NO: 82043 - DNA, 29 bp, Artificial Sequence
  Synthetic
ctcataaatagaucatggttcccgauaca

SEQ ID NO: 82044 - DNA, 21 bp, Artificial Sequence
  Synthetic
tgaaugagacgucccaccaag

SEQ ID NO: 82045 - DNA, 27 bp, Artificial Sequence
  Synthetic
cagagcaucaaccgaaacaagtuaaaa

SEQ ID NO: 82046 - DNA, 23 bp, Artificial Sequence
  Synthetic
acagctttgtutgcactgttgut

SEQ ID NO: 82047 - DNA, 24 bp, Artificial Sequence
  Synthetic
cccacgtguaaatgtagccactua

SEQ ID NO: 82048 - DNA, 23 bp, Artificial Sequence
  Synthetic
aaagtcaagcugtgtcactucct

SEQ ID NO: 82049 - DNA, 28 bp, Artificial Sequence
  Synthetic
tacaatccacucattcttttgtctucct

SEQ ID NO: 82050 - DNA, 17 bp, Artificial Sequence
  Synthetic
catggcaucggccguct

SEQ ID NO: 82051 - DNA, 18 bp, Artificial Sequence
  Synthetic
gggccacacguccatcuc

SEQ ID NO: 82052 - DNA, 22 bp, Artificial Sequence
  Synthetic
agctctgutcagaaauggcagt

SEQ ID NO: 82053 - DNA, 27 bp, Artificial Sequence
  Synthetic
tgctatgtcttccugaaaagggaatut

SEQ ID NO: 82054 - DNA, 22 bp, Artificial Sequence
  Synthetic
ccucacacaggaaaaugggagt

SEQ ID NO: 82055 - DNA, 21 bp, Artificial Sequence
  Synthetic
accuccccaacaccuacaagt

SEQ ID NO: 82056 - DNA, 21 bp, Artificial Sequence
  Synthetic
ctcctggagguctgagatgug

SEQ ID NO: 82057 - DNA, 24 bp, Artificial Sequence
  Synthetic
actgtctggucccagaaaagttut

SEQ ID NO: 82058 - DNA, 18 bp, Artificial Sequence
  Synthetic
cggccctuaccctgagug

SEQ ID NO: 82059 - DNA, 17 bp, Artificial Sequence
  Synthetic
agggccccucgttcugt

SEQ ID NO: 82060 - DNA, 25 bp, Artificial Sequence
  Synthetic
gccgctcatautcatttctcatcug

SEQ ID NO: 82061 - DNA, 20 bp, Artificial Sequence
  Synthetic
tugggucaaagaagggcact

SEQ ID NO: 82062 - DNA, 27 bp, Artificial Sequence
  Synthetic
ggattctcucaagcatcttcagttuct

SEQ ID NO: 82063 - DNA, 23 bp, Artificial Sequence
  Synthetic
tcctgggagcugaagaaucagat

SEQ ID NO: 82064 - DNA, 20 bp, Artificial Sequence
  Synthetic
ccacttcccauagccacgut

SEQ ID NO: 82065 - DNA, 21 bp, Artificial Sequence
  Synthetic
ggaggaacucaccgaccttug

SEQ ID NO: 82066 - DNA, 25 bp, Artificial Sequence
  Synthetic
cattagctgtucctgaagctgacua

SEQ ID NO: 82067 - DNA, 21 bp, Artificial Sequence
  Synthetic
ggaaguacagggacgagcuct

SEQ ID NO: 82068 - DNA, 21 bp, Artificial Sequence
  Synthetic
tggccacagautctccagcua

SEQ ID NO: 82069 - DNA, 26 bp, Artificial Sequence
  Synthetic
catcagtuaaaacaaggttgtgcuca

SEQ ID NO: 82070 - DNA, 26 bp, Artificial Sequence
  Synthetic
aaataatgaagtgugaggctgcctua

SEQ ID NO: 82071 - DNA, 28 bp, Artificial Sequence
  Synthetic
aatgatgcacataucctggagaagtuac

SEQ ID NO: 82072 - DNA, 21 bp, Artificial Sequence
  Synthetic
tcctccaagcucaacatgugg

SEQ ID NO: 82073 - DNA, 22 bp, Artificial Sequence
  Synthetic
cttacacacaggugagcacugt

SEQ ID NO: 82074 - DNA, 17 bp, Artificial Sequence
  Synthetic
ccagtggcugcacguct

SEQ ID NO: 82075 - DNA, 22 bp, Artificial Sequence
  Synthetic
acutacagaugcagcagcagaa

SEQ ID NO: 82076 - DNA, 21 bp, Artificial Sequence
  Synthetic
ctttgctgcugctggatgtut

SEQ ID NO: 82077 - DNA, 19 bp, Artificial Sequence
  Synthetic
gctgcacaguagcctugct

SEQ ID NO: 82078 - DNA, 23 bp, Artificial Sequence
  Synthetic
tctgtcuagaaacacgggacuga

SEQ ID NO: 82079 - DNA, 20 bp, Artificial Sequence
  Synthetic
gcacgautcctuccaaccca

SEQ ID NO: 82080 - DNA, 21 bp, Artificial Sequence
  Synthetic
ggttcaacggcutctcacuca

SEQ ID NO: 82081 - DNA, 22 bp, Artificial Sequence
  Synthetic
gctgagggcucttaacuacacc

SEQ ID NO: 82082 - DNA, 26 bp, Artificial Sequence
  Synthetic
accutccttgauccaaacagaaagat

SEQ ID NO: 82083 - DNA, 28 bp, Artificial Sequence
  Synthetic
ccagagtcacgauttctttcattttgut

SEQ ID NO: 82084 - DNA, 22 bp, Artificial Sequence
  Synthetic
tggtagcucatcatcugggaca

SEQ ID NO: 82085 - DNA, 17 bp, Artificial Sequence
  Synthetic
gcauggugccgaaccaa

SEQ ID NO: 82086 - DNA, 17 bp, Artificial Sequence
  Synthetic
ccccgcagagggutgua

SEQ ID NO: 82087 - DNA, 18 bp, Artificial Sequence
  Synthetic
tctcucccacctgccugt

SEQ ID NO: 82088 - DNA, 27 bp, Artificial Sequence
  Synthetic
agttgcaaatataugtcttccacccut

SEQ ID NO: 82089 - DNA, 20 bp, Artificial Sequence
  Synthetic
gcttcagugtcagggtucca

SEQ ID NO: 82090 - DNA, 20 bp, Artificial Sequence
  Synthetic
cuggtgtugaggaagccaga

SEQ ID NO: 82091 - DNA, 26 bp, Artificial Sequence
  Synthetic
aggtagcaatugttacatgagctugt

SEQ ID NO: 82092 - DNA, 20 bp, Artificial Sequence
  Synthetic
ctgagcacagugctggagua

SEQ ID NO: 82093 - DNA, 22 bp, Artificial Sequence
  Synthetic
agcatgcagccaauccagauag

SEQ ID NO: 82094 - DNA, 20 bp, Artificial Sequence
  Synthetic
cagtaggcagagcugctguc

SEQ ID NO: 82095 - DNA, 25 bp, Artificial Sequence
  Synthetic
aactttctcugctggccuaaaagaa

SEQ ID NO: 82096 - DNA, 17 bp, Artificial Sequence
  Synthetic
gctgccggguggtgaug

SEQ ID NO: 82097 - DNA, 23 bp, Artificial Sequence
  Synthetic
tccatacagcuatggtccacuga

SEQ ID NO: 82098 - DNA, 22 bp, Artificial Sequence
  Synthetic
agtggcccugtacatgtttcug

SEQ ID NO: 82099 - DNA, 26 bp, Artificial Sequence
  Synthetic
agaggcaaacuccatgaatgtgtuat

SEQ ID NO: 82100 - DNA, 26 bp, Artificial Sequence
  Synthetic
tgtgtgttugcatggtctuagaaagt

SEQ ID NO: 82101 - DNA, 25 bp, Artificial Sequence
  Synthetic
cgagtgacaauacacagcatcaauc

SEQ ID NO: 82102 - DNA, 22 bp, Artificial Sequence
  Synthetic
cagtcugcctctggtuaccaat

SEQ ID NO: 82103 - DNA, 21 bp, Artificial Sequence
  Synthetic
gaugactgcccuaaccacagg

SEQ ID NO: 82104 - DNA, 25 bp, Artificial Sequence
  Synthetic
ctgagatggguaatgatgtctucca

SEQ ID NO: 82105 - DNA, 24 bp, Artificial Sequence
  Synthetic
gccaaccctutatccttcctcuct

SEQ ID NO: 82106 - DNA, 21 bp, Artificial Sequence
  Synthetic
cttcacacugcgcugagagat

SEQ ID NO: 82107 - DNA, 22 bp, Artificial Sequence
  Synthetic
cgtctccuggctgtgtatgtug

SEQ ID NO: 82108 - DNA, 26 bp, Artificial Sequence
  Synthetic
ggcagtcaaaccutctctcttatgua

SEQ ID NO: 82109 - DNA, 28 bp, Artificial Sequence
  Synthetic
ctcttcaaucactgacatatcugggaac

SEQ ID NO: 82110 - DNA, 24 bp, Artificial Sequence
  Synthetic
gaagccaaagggaaaugcacaaut

SEQ ID NO: 82111 - DNA, 22 bp, Artificial Sequence
  Synthetic
tggaggcugtattcagcuacct

SEQ ID NO: 82112 - DNA, 22 bp, Artificial Sequence
  Synthetic
gcaggcagaaaccaugtaaucc

SEQ ID NO: 82113 - DNA, 25 bp, Artificial Sequence
  Synthetic
ggtuccaagagaagaagagcuacct

SEQ ID NO: 82114 - DNA, 22 bp, Artificial Sequence
  Synthetic
actggtucagcagtgtgguaaa

SEQ ID NO: 82115 - DNA, 24 bp, Artificial Sequence
  Synthetic
actcagtgattugccttaccaguc

SEQ ID NO: 82116 - DNA, 25 bp, Artificial Sequence
  Synthetic
cccgagaagcaggauttagctatuc

SEQ ID NO: 82117 - DNA, 28 bp, Artificial Sequence
  Synthetic
ggtcctagagutcatagtatctaugcca

SEQ ID NO: 82118 - DNA, 23 bp, Artificial Sequence
  Synthetic
ctcagaaccaacacuggtgctua

SEQ ID NO: 82119 - DNA, 28 bp, Artificial Sequence
  Synthetic
tttgcttttcugagtacacaccauagat

SEQ ID NO: 82120 - DNA, 25 bp, Artificial Sequence
  Synthetic
tgaagtgtcagugcataacctctug

SEQ ID NO: 82121 - DNA, 21 bp, Artificial Sequence
  Synthetic
ccaugtgcttugaggcagact

SEQ ID NO: 82122 - DNA, 21 bp, Artificial Sequence
  Synthetic
cgcattggautggtggccuaa

SEQ ID NO: 82123 - DNA, 27 bp, Artificial Sequence
  Synthetic
aaggaggtgagautcaaaattcgugat

SEQ ID NO: 82124 - DNA, 27 bp, Artificial Sequence
  Synthetic
caatggagaacutatagctgugcaaag

SEQ ID NO: 82125 - DNA, 28 bp, Artificial Sequence
  Synthetic
ccatcaactuacagacctaaaagacuga

SEQ ID NO: 82126 - DNA, 22 bp, Artificial Sequence
  Synthetic
cacaaaccccuccattcugaca

SEQ ID NO: 82127 - DNA, 27 bp, Artificial Sequence
  Synthetic
caggtcgtttcutctgtatgagattuc

SEQ ID NO: 82128 - DNA, 21 bp, Artificial Sequence
  Synthetic
catcatcaaaguccccgcuga

SEQ ID NO: 82129 - DNA, 21 bp, Artificial Sequence
  Synthetic
gtagcaggugtccagcugaag

SEQ ID NO: 82130 - DNA, 22 bp, Artificial Sequence
  Synthetic
ctcactgauccttttgcctgug

SEQ ID NO: 82131 - DNA, 23 bp, Artificial Sequence
  Synthetic
ccagctaaaugaaccccgugaat

SEQ ID NO: 82132 - DNA, 19 bp, Artificial Sequence
  Synthetic
gaagcccaccccacucuac

SEQ ID NO: 82133 - DNA, 23 bp, Artificial Sequence
  Synthetic
tcccuagcaaauaccaaaggcaa

SEQ ID NO: 82134 - DNA, 24 bp, Artificial Sequence
  Synthetic
gttatactugcctctgcugagcat

SEQ ID NO: 82135 - DNA, 21 bp, Artificial Sequence
  Synthetic
ctgcctgucccctatgaucac

SEQ ID NO: 82136 - DNA, 25 bp, Artificial Sequence
  Synthetic
ggctcacugaaccatatccctttua

SEQ ID NO: 82137 - DNA, 23 bp, Artificial Sequence
  Synthetic
gggauctgaaaatucccaacggt

SEQ ID NO: 82138 - DNA, 23 bp, Artificial Sequence
  Synthetic
gagactcugcacatgttcugaga

SEQ ID NO: 82139 - DNA, 28 bp, Artificial Sequence
  Synthetic
ctaactgtgccautgcattctgaatuat

SEQ ID NO: 82140 - DNA, 26 bp, Artificial Sequence
  Synthetic
tcttcttcgcuccagaatttgaaugt

SEQ ID NO: 82141 - DNA, 28 bp, Artificial Sequence
  Synthetic
tgaagttgttguaagactttgtctcgua

SEQ ID NO: 82142 - DNA, 24 bp, Artificial Sequence
  Synthetic
gugcttactagtuccaaaggcagt

SEQ ID NO: 82143 - DNA, 22 bp, Artificial Sequence
  Synthetic
ggtaccacaacuggcttgttug

SEQ ID NO: 82144 - DNA, 27 bp, Artificial Sequence
  Synthetic
gcctgctgcauttcctttattttacuc

SEQ ID NO: 82145 - DNA, 27 bp, Artificial Sequence
  Synthetic
tggaaagacuagaaatggaacaugacc

SEQ ID NO: 82146 - DNA, 21 bp, Artificial Sequence
  Synthetic
ctggaaguggcuggagaagac

SEQ ID NO: 82147 - DNA, 26 bp, Artificial Sequence
  Synthetic
aatatgtttuccctccctucaggaac

SEQ ID NO: 82148 - DNA, 25 bp, Artificial Sequence
  Synthetic
tcaaagauaccagaaaagccacgut

SEQ ID NO: 82149 - DNA, 25 bp, Artificial Sequence
  Synthetic
ctcacggaaauaactgagaucacca

SEQ ID NO: 82150 - DNA, 21 bp, Artificial Sequence
  Synthetic
gtccauccaaggcauccgaat

SEQ ID NO: 82151 - DNA, 25 bp, Artificial Sequence
  Synthetic
ggcccttgaaaaugaacttttggut

SEQ ID NO: 82152 - DNA, 22 bp, Artificial Sequence
  Synthetic
ctcttgttucagcccacgtcua

SEQ ID NO: 82153 - DNA, 21 bp, Artificial Sequence
  Synthetic
aagtgacgcuttccagactug

SEQ ID NO: 82154 - DNA, 23 bp, Artificial Sequence
  Synthetic
ggacatcatutcctgccttucct

SEQ ID NO: 82155 - DNA, 25 bp, Artificial Sequence
  Synthetic
cagatacttgagcugaagagcaguc

SEQ ID NO: 82156 - DNA, 21 bp, Artificial Sequence
  Synthetic
ggtctgtuactcggcauggaa

SEQ ID NO: 82157 - DNA, 24 bp, Artificial Sequence
  Synthetic
cctgatttatucacggctccacuc

SEQ ID NO: 82158 - DNA, 22 bp, Artificial Sequence
  Synthetic
tggcttatuggcaatgcctcut

SEQ ID NO: 82159 - DNA, 21 bp, Artificial Sequence
  Synthetic
gcgtaagcauggctctctcug

SEQ ID NO: 82160 - DNA, 28 bp, Artificial Sequence
  Synthetic
agctttagaagcugtttgtacactguat

SEQ ID NO: 82161 - DNA, 27 bp, Artificial Sequence
  Synthetic
tgttggcagttutaaagacctcttuga

SEQ ID NO: 82162 - DNA, 22 bp, Artificial Sequence
  Synthetic
atgactatgaugggctgctucc

SEQ ID NO: 82163 - DNA, 28 bp, Artificial Sequence
  Synthetic
gcttgagcaccugtagtttagtugaaat

SEQ ID NO: 82164 - DNA, 21 bp, Artificial Sequence
  Synthetic
gctcccucagttccctttugt

SEQ ID NO: 82165 - DNA, 25 bp, Artificial Sequence
  Synthetic
gagagagagaugcuggagaaaacat

SEQ ID NO: 82166 - DNA, 22 bp, Artificial Sequence
  Synthetic
cctggtgaaugctgttctuggt

SEQ ID NO: 82167 - DNA, 27 bp, Artificial Sequence
  Synthetic
tgaatttacgccutgctctgatttcua

SEQ ID NO: 82168 - DNA, 27 bp, Artificial Sequence
  Synthetic
gagguttgaaatgugaaaagacaggaa

SEQ ID NO: 82169 - DNA, 23 bp, Artificial Sequence
  Synthetic
gccaccacuctgatactccuacc

SEQ ID NO: 82170 - DNA, 22 bp, Artificial Sequence
  Synthetic
cgaagagugaaacctucaggca

SEQ ID NO: 82171 - DNA, 22 bp, Artificial Sequence
  Synthetic
ccctgtcuctgtggacttucag

SEQ ID NO: 82172 - DNA, 22 bp, Artificial Sequence
  Synthetic
cctccctauccttccctgtugt

SEQ ID NO: 82173 - DNA, 25 bp, Artificial Sequence
  Synthetic
cgttgagatugaattctgtgtgugg

SEQ ID NO: 82174 - DNA, 23 bp, Artificial Sequence
  Synthetic
gtgattucaacccccttacugga

SEQ ID NO: 82175 - DNA, 25 bp, Artificial Sequence
  Synthetic
gttgaguacgttgtuggaaggaaaa

SEQ ID NO: 82176 - DNA, 26 bp, Artificial Sequence
  Synthetic
gaccatgctgutcaaatgttcttugt

SEQ ID NO: 82177 - DNA, 21 bp, Artificial Sequence
  Synthetic
gcgtgaggagaaaucccagug

SEQ ID NO: 82178 - DNA, 23 bp, Artificial Sequence
  Synthetic
ccttcaagauagccatugggcaa

SEQ ID NO: 82179 - DNA, 22 bp, Artificial Sequence
  Synthetic
gtaaaggcagccutggugaaga

SEQ ID NO: 82180 - DNA, 27 bp, Artificial Sequence
  Synthetic
gatcattutcaatcagaauggcacagt

SEQ ID NO: 82181 - DNA, 28 bp, Artificial Sequence
  Synthetic
tgttcgtgtacaugtgtatgtgtctauc

SEQ ID NO: 82182 - DNA, 23 bp, Artificial Sequence
  Synthetic
gctgaaacutgactucacaccaa

SEQ ID NO: 82183 - DNA, 21 bp, Artificial Sequence
  Synthetic
cagtgaagugatgctguccac

SEQ ID NO: 82184 - DNA, 23 bp, Artificial Sequence
  Synthetic
tgagctcguccttctcaaatucc

SEQ ID NO: 82185 - DNA, 23 bp, Artificial Sequence
  Synthetic
gcccagttucagtctgattguca

SEQ ID NO: 82186 - DNA, 25 bp, Artificial Sequence
  Synthetic
actcactttctgutcaacctcgaut

SEQ ID NO: 82187 - DNA, 22 bp, Artificial Sequence
  Synthetic
cgttacactgugtctgggtcug

SEQ ID NO: 82188 - DNA, 21 bp, Artificial Sequence
  Synthetic
gatcucacccaggaactgguc

SEQ ID NO: 82189 - DNA, 21 bp, Artificial Sequence
  Synthetic
tgtctgccuctccctcttcut

SEQ ID NO: 82190 - DNA, 27 bp, Artificial Sequence
  Synthetic
cggtaatacttgcuagtgggatttcuc

SEQ ID NO: 82191 - DNA, 29 bp, Artificial Sequence
  Synthetic
gcactctaattucagctaccaagtttcua

SEQ ID NO: 82192 - DNA, 25 bp, Artificial Sequence
  Synthetic
gagcactcucctcactactttucaa

SEQ ID NO: 82193 - DNA, 24 bp, Artificial Sequence
  Synthetic
gguaattcucaccagccagagaag

SEQ ID NO: 82194 - DNA, 25 bp, Artificial Sequence
  Synthetic
ttaaccatgcagaucctcagttugt

SEQ ID NO: 82195 - DNA, 25 bp, Artificial Sequence
  Synthetic
agcatcttgutctgtttguggaaga

SEQ ID NO: 82196 - DNA, 19 bp, Artificial Sequence
  Synthetic
agagccugacccaauccga

SEQ ID NO: 82197 - DNA, 26 bp, Artificial Sequence
  Synthetic
ggttgatccttugatgccctcatuat

SEQ ID NO: 82198 - DNA, 23 bp, Artificial Sequence
  Synthetic
cttacucgcagtcguacaagagg

SEQ ID NO: 82199 - DNA, 27 bp, Artificial Sequence
  Synthetic
tgctattcagccaagutaaactcagut

SEQ ID NO: 82200 - DNA, 28 bp, Artificial Sequence
  Synthetic
gtggtgataucaaagtagagttctucca

SEQ ID NO: 82201 - DNA, 29 bp, Artificial Sequence
  Synthetic
agcaaaacaccugcagatctaauagaaaa

SEQ ID NO: 82202 - DNA, 24 bp, Artificial Sequence
  Synthetic
aacaattttggccugtggactcua

SEQ ID NO: 82203 - DNA, 22 bp, Artificial Sequence
  Synthetic
aaagaattcucgtccaccugct

SEQ ID NO: 82204 - DNA, 25 bp, Artificial Sequence
  Synthetic
ttgagggatgautcaaaggtggtut

SEQ ID NO: 82205 - DNA, 23 bp, Artificial Sequence
  Synthetic
tgcatcacuacaccucaaaaggg

SEQ ID NO: 82206 - DNA, 24 bp, Artificial Sequence
  Synthetic
ggagtattuccagcatcccugaac

SEQ ID NO: 82207 - DNA, 28 bp, Artificial Sequence
  Synthetic
ctcccttaatcautgttccctatgtuct

SEQ ID NO: 82208 - DNA, 24 bp, Artificial Sequence
  Synthetic
ccatuacaaagaaagccggacuct

SEQ ID NO: 82209 - DNA, 29 bp, Artificial Sequence
  Synthetic
cctggtggguccatttctatauaaaacat

SEQ ID NO: 82210 - DNA, 28 bp, Artificial Sequence
  Synthetic
gacagatataaatugtggcacagactug

SEQ ID NO: 82211 - DNA, 29 bp, Artificial Sequence
  Synthetic
caaaaaggatctuttacagtagcttucga

SEQ ID NO: 82212 - DNA, 23 bp, Artificial Sequence
  Synthetic
aggtcgauctagtgcucagaaca

SEQ ID NO: 82213 - DNA, 21 bp, Artificial Sequence
  Synthetic
gcaactcagcaugtccaccuc

SEQ ID NO: 82214 - DNA, 17 bp, Artificial Sequence
  Synthetic
cucccagggccacguaa

SEQ ID NO: 82215 - DNA, 19 bp, Artificial Sequence
  Synthetic
cgcagaugccaacauccag

SEQ ID NO: 82216 - DNA, 17 bp, Artificial Sequence
  Synthetic
gtgcggcccaugttguc

SEQ ID NO: 82217 - DNA, 24 bp, Artificial Sequence
  Synthetic
cgtcatcuccgacttcatcuacca

SEQ ID NO: 82218 - DNA, 19 bp, Artificial Sequence
  Synthetic
gtgcgguctgtctggtugt

SEQ ID NO: 82219 - DNA, 18 bp, Artificial Sequence
  Synthetic
cagacugagcacccguct

SEQ ID NO: 82220 - DNA, 24 bp, Artificial Sequence
  Synthetic
gtggcagcuccagtaauagagaac

SEQ ID NO: 82221 - DNA, 24 bp, Artificial Sequence
  Synthetic
gucaagaguccagacaacagaaga

SEQ ID NO: 82222 - DNA, 25 bp, Artificial Sequence
  Synthetic
ccattcacaccaugcacatatgaut

SEQ ID NO: 82223 - DNA, 23 bp, Artificial Sequence
  Synthetic
cctgttugcgcactttcatctuc

SEQ ID NO: 82224 - DNA, 21 bp, Artificial Sequence
  Synthetic
tgttttcttucctgccgucct

SEQ ID NO: 82225 - DNA, 28 bp, Artificial Sequence
  Synthetic
tgtcagatagtcacuccgtttacaatut

SEQ ID NO: 82226 - DNA, 21 bp, Artificial Sequence
  Synthetic
cccttggcucagtcagaacut

SEQ ID NO: 82227 - DNA, 23 bp, Artificial Sequence
  Synthetic
tgcucaaatacugagaccccaac

SEQ ID NO: 82228 - DNA, 20 bp, Artificial Sequence
  Synthetic
caggtugtactcguccagca

SEQ ID NO: 82229 - DNA, 21 bp, Artificial Sequence
  Synthetic
ggaggagacaccccugttuct

SEQ ID NO: 82230 - DNA, 23 bp, Artificial Sequence
  Synthetic
cctgaagcaguccaggacttaug

SEQ ID NO: 82231 - DNA, 28 bp, Artificial Sequence
  Synthetic
agaaatgtatggucagaaaacactguga

SEQ ID NO: 82232 - DNA, 18 bp, Artificial Sequence
  Synthetic
cacctuggcggtctcgua

SEQ ID NO: 82233 - DNA, 23 bp, Artificial Sequence
  Synthetic
cttcctctggugatggaacctug

SEQ ID NO: 82234 - DNA, 24 bp, Artificial Sequence
  Synthetic
tgacucaagggtucaacacaaact

SEQ ID NO: 82235 - DNA, 22 bp, Artificial Sequence
  Synthetic
caatttguagaggcugcagcac

SEQ ID NO: 82236 - DNA, 25 bp, Artificial Sequence
  Synthetic
cagcaacacuttaaatggacuggaa

SEQ ID NO: 82237 - DNA, 24 bp, Artificial Sequence
  Synthetic
gacaacagcaacagcauctgtuaa

SEQ ID NO: 82238 - DNA, 20 bp, Artificial Sequence
  Synthetic
acctgggucccctccctaua

SEQ ID NO: 82239 - DNA, 21 bp, Artificial Sequence
  Synthetic
gaagaggcuggtagctgacug

SEQ ID NO: 82240 - DNA, 28 bp, Artificial Sequence
  Synthetic
tcgtcctctttuaggactcactttuaga

SEQ ID NO: 82241 - DNA, 28 bp, Artificial Sequence
  Synthetic
ccatcgaattaaacuttgagtgccuact

SEQ ID NO: 82242 - DNA, 28 bp, Artificial Sequence
  Synthetic
gatttgttgcaggutttggttttaaugg

SEQ ID NO: 82243 - DNA, 28 bp, Artificial Sequence
  Synthetic
tgtgtgttctuaaagcaggcatacuaat

SEQ ID NO: 82244 - DNA, 24 bp, Artificial Sequence
  Synthetic
gutcaaaaucaaaggaagcccaga

SEQ ID NO: 82245 - DNA, 25 bp, Artificial Sequence
  Synthetic
caaactgccaautcaagcctctuaa

SEQ ID NO: 82246 - DNA, 21 bp, Artificial Sequence
  Synthetic
ggcacatgugtaccccttgut

SEQ ID NO: 82247 - DNA, 22 bp, Artificial Sequence
  Synthetic
gaatgacaacaucgccacacug

SEQ ID NO: 82248 - DNA, 25 bp, Artificial Sequence
  Synthetic
ccttttgaatgacugcagtgaagut

SEQ ID NO: 82249 - DNA, 24 bp, Artificial Sequence
  Synthetic
cactgtctacgutggcattgagua

SEQ ID NO: 82250 - DNA, 21 bp, Artificial Sequence
  Synthetic
gccacaacccutacccuagga

SEQ ID NO: 82251 - DNA, 21 bp, Artificial Sequence
  Synthetic
ctacacaggcagcuactguga

SEQ ID NO: 82252 - DNA, 18 bp, Artificial Sequence
  Synthetic
gtgagcacucguccacca

SEQ ID NO: 82253 - DNA, 19 bp, Artificial Sequence
  Synthetic
ctgggccucacctgtcuac

SEQ ID NO: 82254 - DNA, 28 bp, Artificial Sequence
  Synthetic
ccttgttcatgaucagtggatgtaauct

SEQ ID NO: 82255 - DNA, 25 bp, Artificial Sequence
  Synthetic
gccatcatugggttcatgttcugaa

SEQ ID NO: 82256 - DNA, 23 bp, Artificial Sequence
  Synthetic
ctctttctgcugttcactcucgt

SEQ ID NO: 82257 - DNA, 25 bp, Artificial Sequence
  Synthetic
gctttattcugcagccaactugaaa

SEQ ID NO: 82258 - DNA, 22 bp, Artificial Sequence
  Synthetic
cagcuccgagacaaacttguca

SEQ ID NO: 82259 - DNA, 20 bp, Artificial Sequence
  Synthetic
gagacccugugagcacacat

SEQ ID NO: 82260 - DNA, 22 bp, Artificial Sequence
  Synthetic
agaccggtuggctaaatcaugg

SEQ ID NO: 82261 - DNA, 24 bp, Artificial Sequence
  Synthetic
agatgatgtucccgtgtcttucag

SEQ ID NO: 82262 - DNA, 29 bp, Artificial Sequence
  Synthetic
tgcagaugaagccttaaauaaagacaaga

SEQ ID NO: 82263 - DNA, 28 bp, Artificial Sequence
  Synthetic
ccccaucaccctaacataaauaacaact

SEQ ID NO: 82264 - DNA, 21 bp, Artificial Sequence
  Synthetic
ggatgtccutcagctgucaca

SEQ ID NO: 82265 - DNA, 22 bp, Artificial Sequence
  Synthetic
ccgaauggcacauacacagagt

SEQ ID NO: 82266 - DNA, 25 bp, Artificial Sequence
  Synthetic
actgtgaagtcugacccctaaagua

SEQ ID NO: 82267 - DNA, 26 bp, Artificial Sequence
  Synthetic
ttgctggaactuttccaatgttgtut

SEQ ID NO: 82268 - DNA, 21 bp, Artificial Sequence
  Synthetic
tgtacgguccttgcaatguca

SEQ ID NO: 82269 - DNA, 26 bp, Artificial Sequence
  Synthetic
ctcttacatgccagutctctaggtut

SEQ ID NO: 82270 - DNA, 25 bp, Artificial Sequence
  Synthetic
gagcacaaggaguacacagtatuca

SEQ ID NO: 82271 - DNA, 21 bp, Artificial Sequence
  Synthetic
cactuggcagaacuccaggaa

SEQ ID NO: 82272 - DNA, 21 bp, Artificial Sequence
  Synthetic
aagagcagguaagcccttugg

SEQ ID NO: 82273 - DNA, 28 bp, Artificial Sequence
  Synthetic
gacgtggtgcuatgaacataagttuaat

SEQ ID NO: 82274 - DNA, 19 bp, Artificial Sequence
  Synthetic
gcctcggucccaatctcut

SEQ ID NO: 82275 - DNA, 26 bp, Artificial Sequence
  Synthetic
ggaccagccuaatttcttatcgtcuc

SEQ ID NO: 82276 - DNA, 26 bp, Artificial Sequence
  Synthetic
gcctctctucctttactttctucaca

SEQ ID NO: 82277 - DNA, 25 bp, Artificial Sequence
  Synthetic
agctcagctgutttctttccctuag

SEQ ID NO: 82278 - DNA, 25 bp, Artificial Sequence
  Synthetic
ccaugctagccttuaaaaagaaccc

SEQ ID NO: 82279 - DNA, 24 bp, Artificial Sequence
  Synthetic
gactgcucacagaaggaataugct

SEQ ID NO: 82280 - DNA, 26 bp, Artificial Sequence
  Synthetic
aatttcttggcauaaccagccattuc

SEQ ID NO: 82281 - DNA, 24 bp, Artificial Sequence
  Synthetic
gtugacaagcaagccatcaucaat

SEQ ID NO: 82282 - DNA, 24 bp, Artificial Sequence
  Synthetic
tgttacccauctttgctttcucca

SEQ ID NO: 82283 - DNA, 23 bp, Artificial Sequence
  Synthetic
tgttgtacugctggatgttucgt

SEQ ID NO: 82284 - DNA, 24 bp, Artificial Sequence
  Synthetic
gcttctttctcaugttggccttuc

SEQ ID NO: 82285 - DNA, 28 bp, Artificial Sequence
  Synthetic
tgctttucccccaagattataatuccat

SEQ ID NO: 82286 - DNA, 23 bp, Artificial Sequence
  Synthetic
catggcagguggaaatacgaaug

SEQ ID NO: 82287 - DNA, 26 bp, Artificial Sequence
  Synthetic
tcagaattaacugtgatgtggtgugg

SEQ ID NO: 82288 - DNA, 28 bp, Artificial Sequence
  Synthetic
tcaaaggtacaugagaaaggtgaaucaa

SEQ ID NO: 82289 - DNA, 29 bp, Artificial Sequence
  Synthetic
caccactgagcaaaugtttgaaattaugt

SEQ ID NO: 82290 - DNA, 21 bp, Artificial Sequence
  Synthetic
ccaccctcuggagcttctgua

SEQ ID NO: 82291 - DNA, 29 bp, Artificial Sequence
  Synthetic
ctccttgtgattgugatttctactctcut

SEQ ID NO: 82292 - DNA, 22 bp, Artificial Sequence
  Synthetic
cctgagacugttgcatcauggg

SEQ ID NO: 82293 - DNA, 28 bp, Artificial Sequence
  Synthetic
acagtctctttuggatttctgtttcugt

SEQ ID NO: 82294 - DNA, 21 bp, Artificial Sequence
  Synthetic
agctgtgagutgcatgagguc

SEQ ID NO: 82295 - DNA, 27 bp, Artificial Sequence
  Synthetic
gaggagatuttggatgattugcagaat

SEQ ID NO: 82296 - DNA, 18 bp, Artificial Sequence
  Synthetic
gagccuggactccccuct

SEQ ID NO: 82297 - DNA, 23 bp, Artificial Sequence
  Synthetic
gaugagacctuggccaaagagaa

SEQ ID NO: 82298 - DNA, 21 bp, Artificial Sequence
  Synthetic
cccatgcucagacatccucaa

SEQ ID NO: 82299 - DNA, 23 bp, Artificial Sequence
  Synthetic
gtttgcaugagtgaagcauggat

SEQ ID NO: 82300 - DNA, 22 bp, Artificial Sequence
  Synthetic
caaggagauggaacagguagca

SEQ ID NO: 82301 - DNA, 28 bp, Artificial Sequence
  Synthetic
cctctgacaggaugatctgactcauaaa

SEQ ID NO: 82302 - DNA, 24 bp, Artificial Sequence
  Synthetic
tgggaaaagcugtggtaatugact

SEQ ID NO: 82303 - DNA, 24 bp, Artificial Sequence
  Synthetic
gggcttgtggugtctactctuaga

SEQ ID NO: 82304 - DNA, 24 bp, Artificial Sequence
  Synthetic
aaaaagtcatuccttgtccuccgt

SEQ ID NO: 82305 - DNA, 25 bp, Artificial Sequence
  Synthetic
ctcactgagcagguacattacauga

SEQ ID NO: 82306 - DNA, 22 bp, Artificial Sequence
  Synthetic
tggcctctguttgctggattut

SEQ ID NO: 82307 - DNA, 24 bp, Artificial Sequence
  Synthetic
tttcttcctugccgtttcttccua

SEQ ID NO: 82308 - DNA, 22 bp, Artificial Sequence
  Synthetic
gagccccacacagauttccuat

SEQ ID NO: 82309 - DNA, 20 bp, Artificial Sequence
  Synthetic
cgagacatcaugcgggacuc

SEQ ID NO: 82310 - DNA, 20 bp, Artificial Sequence
  Synthetic
catgaggacacugcugacct

SEQ ID NO: 82311 - DNA, 22 bp, Artificial Sequence
  Synthetic
ccctccacccuaactcctcauc

SEQ ID NO: 82312 - DNA, 21 bp, Artificial Sequence
  Synthetic
ccgatcaucccgattcaugcc

SEQ ID NO: 82313 - DNA, 22 bp, Artificial Sequence
  Synthetic
gatgggaugggcctgtattcut

SEQ ID NO: 82314 - DNA, 29 bp, Artificial Sequence
  Synthetic
cagcttcaggguatatcatggtaaaaugt

SEQ ID NO: 82315 - DNA, 26 bp, Artificial Sequence
  Synthetic
gcgaccaugaacacactctttaatut

SEQ ID NO: 82316 - DNA, 20 bp, Artificial Sequence
  Synthetic
ggacatcctuccggcaaguc

SEQ ID NO: 82317 - DNA, 22 bp, Artificial Sequence
  Synthetic
gcagcutgctgaugagagaagt

SEQ ID NO: 82318 - DNA, 23 bp, Artificial Sequence
  Synthetic
cgctgccttuggagatgtaatuc

SEQ ID NO: 82319 - DNA, 21 bp, Artificial Sequence
  Synthetic
tttccccacaautguccccaa

SEQ ID NO: 82320 - DNA, 17 bp, Artificial Sequence
  Synthetic
cccgucccaggcttcuc

SEQ ID NO: 82321 - DNA, 18 bp, Artificial Sequence
  Synthetic
gcuccgagccaugcagaa

SEQ ID NO: 82322 - DNA, 25 bp, Artificial Sequence
  Synthetic
agaatgaagcaccaguttggaaaug

SEQ ID NO: 82323 - DNA, 28 bp, Artificial Sequence
  Synthetic
ctcatgctgtttuatgacagaaccaaut

SEQ ID NO: 82324 - DNA, 23 bp, Artificial Sequence
  Synthetic
gacctcccgauaaaacgctacut

SEQ ID NO: 82325 - DNA, 26 bp, Artificial Sequence
  Synthetic
tcattaatcccagcgcuttctacauc

SEQ ID NO: 82326 - DNA, 26 bp, Artificial Sequence
  Synthetic
gcttttcattttugctgtgctccuat

SEQ ID NO: 82327 - DNA, 21 bp, Artificial Sequence
  Synthetic
gagagcuggttgcaguagagg

SEQ ID NO: 82328 - DNA, 21 bp, Artificial Sequence
  Synthetic
tgaautcaugaccaccagcca

SEQ ID NO: 82329 - DNA, 21 bp, Artificial Sequence
  Synthetic
ccccaaagaggugtacgaugt

SEQ ID NO: 82330 - DNA, 20 bp, Artificial Sequence
  Synthetic
gcuggtccucagaaaaccga

SEQ ID NO: 82331 - DNA, 23 bp, Artificial Sequence
  Synthetic
ggaagcugtgguagaggaaggat

SEQ ID NO: 82332 - DNA, 22 bp, Artificial Sequence
  Synthetic
ccccttgctucgaaagacagut

SEQ ID NO: 82333 - DNA, 21 bp, Artificial Sequence
  Synthetic
gugatuaaggcccaacaccca

SEQ ID NO: 82334 - DNA, 20 bp, Artificial Sequence
  Synthetic
atgaucccgcacugagacac

SEQ ID NO: 82335 - DNA, 24 bp, Artificial Sequence
  Synthetic
gtacatttgacagcuctgggctua

SEQ ID NO: 82336 - DNA, 24 bp, Artificial Sequence
  Synthetic
gcctcaaaaaugacaatgugcaga

SEQ ID NO: 82337 - DNA, 24 bp, Artificial Sequence
  Synthetic
gtcccaagggutgtttctcttcua

SEQ ID NO: 82338 - DNA, 19 bp, Artificial Sequence
  Synthetic
cagggacugcacucaccaa

SEQ ID NO: 82339 - DNA, 24 bp, Artificial Sequence
  Synthetic
ccctgaccacugcttttcctttua

SEQ ID NO: 82340 - DNA, 21 bp, Artificial Sequence
  Synthetic
cagctccagcucatccctaut

SEQ ID NO: 82341 - DNA, 22 bp, Artificial Sequence
  Synthetic
ccaatgcataugggccttcucc

SEQ ID NO: 82342 - DNA, 19 bp, Artificial Sequence
  Synthetic
tgacccaagccgucaggua

SEQ ID NO: 82343 - DNA, 21 bp, Artificial Sequence
  Synthetic
cccccaaccccautcucaaag

SEQ ID NO: 82344 - DNA, 25 bp, Artificial Sequence
  Synthetic
gattcttttgcugtgggatcugaga

SEQ ID NO: 82345 - DNA, 23 bp, Artificial Sequence
  Synthetic
ctgccauaacagggctccauaaa

SEQ ID NO: 82346 - DNA, 20 bp, Artificial Sequence
  Synthetic
gatgtucaaccgctgctgug

SEQ ID NO: 82347 - DNA, 21 bp, Artificial Sequence
  Synthetic
aaggctgagcuttgggtguaa

SEQ ID NO: 82348 - DNA, 27 bp, Artificial Sequence
  Synthetic
gaaaagcacccagagauatttgugaac

SEQ ID NO: 82349 - DNA, 20 bp, Artificial Sequence
  Synthetic
aggaaugccctguccagact

SEQ ID NO: 82350 - DNA, 21 bp, Artificial Sequence
  Synthetic
gagcuccccgaaagagtaguc

SEQ ID NO: 82351 - DNA, 25 bp, Artificial Sequence
  Synthetic
ttgatgcaccauaagacctttcugt

SEQ ID NO: 82352 - DNA, 19 bp, Artificial Sequence
  Synthetic
cggccaugcagaaacugac

SEQ ID NO: 82353 - DNA, 24 bp, Artificial Sequence
  Synthetic
augccaaaagaaaaagugcccaat

SEQ ID NO: 82354 - DNA, 19 bp, Artificial Sequence
  Synthetic
ctcacccgugagcugagaa

SEQ ID NO: 82355 - DNA, 24 bp, Artificial Sequence
  Synthetic
caagaacaagcaugaggcaaugat

SEQ ID NO: 82356 - DNA, 27 bp, Artificial Sequence
  Synthetic
agtttaaacatutgctgagcucaacag

SEQ ID NO: 82357 - DNA, 24 bp, Artificial Sequence
  Synthetic
ccaacccccuaaatgggcaataua

SEQ ID NO: 82358 - DNA, 21 bp, Artificial Sequence
  Synthetic
ccctcaccutccaagtcagug

SEQ ID NO: 82359 - DNA, 23 bp, Artificial Sequence
  Synthetic
ccaacactaaaugccagccuact

SEQ ID NO: 82360 - DNA, 20 bp, Artificial Sequence
  Synthetic
ccttgctucggcctcagtua

SEQ ID NO: 82361 - DNA, 28 bp, Artificial Sequence
  Synthetic
gggctgaagaaagugataatttgctuat

SEQ ID NO: 82362 - DNA, 22 bp, Artificial Sequence
  Synthetic
ggttcuccagagagctgtgtut

SEQ ID NO: 82363 - DNA, 24 bp, Artificial Sequence
  Synthetic
gcatttctagcuctgtgacacuca

SEQ ID NO: 82364 - DNA, 18 bp, Artificial Sequence
  Synthetic
cctcctucgggcaccuct

SEQ ID NO: 82365 - DNA, 18 bp, Artificial Sequence
  Synthetic
gctucacgggcagcuact

SEQ ID NO: 82366 - DNA, 20 bp, Artificial Sequence
  Synthetic
gcactcautgacatcgugct

SEQ ID NO: 82367 - DNA, 19 bp, Artificial Sequence
  Synthetic
caccaaugccctccacuca

SEQ ID NO: 82368 - DNA, 28 bp, Artificial Sequence
  Synthetic
tgtcatggaagaaaugttggauaaagca

SEQ ID NO: 82369 - DNA, 22 bp, Artificial Sequence
  Synthetic
atggatccucctccacucacat

SEQ ID NO: 82370 - DNA, 20 bp, Artificial Sequence
  Synthetic
gggtcccucaggtaccauca

SEQ ID NO: 82371 - DNA, 26 bp, Artificial Sequence
  Synthetic
tgttttctacgutgttgtcatugcag

SEQ ID NO: 82372 - DNA, 23 bp, Artificial Sequence
  Synthetic
gcugaaagcctucacaagaccat

SEQ ID NO: 82373 - DNA, 21 bp, Artificial Sequence
  Synthetic
ccaggccagaautgcttcuct

SEQ ID NO: 82374 - DNA, 20 bp, Artificial Sequence
  Synthetic
cagccccuttgtagcctugt

SEQ ID NO: 82375 - DNA, 27 bp, Artificial Sequence
  Synthetic
gacattttctcutagttgtccttugcc

SEQ ID NO: 82376 - DNA, 28 bp, Artificial Sequence
  Synthetic
aaaagccttctaaagugactgacactua

SEQ ID NO: 82377 - DNA, 22 bp, Artificial Sequence
  Synthetic
ctggacaggcauctttgttugg

SEQ ID NO: 82378 - DNA, 27 bp, Artificial Sequence
  Synthetic
ctgagatgcacaauaaaacagtuagcc

SEQ ID NO: 82379 - DNA, 27 bp, Artificial Sequence
  Synthetic
gtttcatcctucttctcctgttugaga

SEQ ID NO: 82380 - DNA, 22 bp, Artificial Sequence
  Synthetic
gggtcagagutgagatgggaua

SEQ ID NO: 82381 - DNA, 20 bp, Artificial Sequence
  Synthetic
gaggactucctgcctuccac

SEQ ID NO: 82382 - DNA, 25 bp, Artificial Sequence
  Synthetic
cggagutttggaauagaggacaaag

SEQ ID NO: 82383 - DNA, 21 bp, Artificial Sequence
  Synthetic
cctgtaaacugaaggcggcua

SEQ ID NO: 82384 - DNA, 26 bp, Artificial Sequence
  Synthetic
gcaaaataatgaugtgccagtctuca

SEQ ID NO: 82385 - DNA, 21 bp, Artificial Sequence
  Synthetic
tcatggccugctctcatcuct

SEQ ID NO: 82386 - DNA, 27 bp, Artificial Sequence
  Synthetic
gtgggatgtattugaagcacctgaaua

SEQ ID NO: 82387 - DNA, 27 bp, Artificial Sequence
  Synthetic
tctcaaacacaaacuagagucacacac

SEQ ID NO: 82388 - DNA, 25 bp, Artificial Sequence
  Synthetic
ccctccaatcutaggttggttgtuc

SEQ ID NO: 82389 - DNA, 23 bp, Artificial Sequence
  Synthetic
guaactgacctcuggcacaacat

SEQ ID NO: 82390 - DNA, 23 bp, Artificial Sequence
  Synthetic
ggaatggaucaacatgacuggct

SEQ ID NO: 82391 - DNA, 23 bp, Artificial Sequence
  Synthetic
gtgtatctgcguttccctcugaa

SEQ ID NO: 82392 - DNA, 28 bp, Artificial Sequence
  Synthetic
caagtaguaaagacaacagggactucag

SEQ ID NO: 82393 - DNA, 24 bp, Artificial Sequence
  Synthetic
catctctuccccctcctgtttuag

SEQ ID NO: 82394 - DNA, 22 bp, Artificial Sequence
  Synthetic
gctggctcuaaatcccaccuaa

SEQ ID NO: 82395 - DNA, 23 bp, Artificial Sequence
  Synthetic
gatcctcugggagatctucacct

SEQ ID NO: 82396 - DNA, 23 bp, Artificial Sequence
  Synthetic
cagtcagugaacgtaagggtuct

SEQ ID NO: 82397 - DNA, 28 bp, Artificial Sequence
  Synthetic
cagatccttaacautggtccgtattuga

SEQ ID NO: 82398 - DNA, 18 bp, Artificial Sequence
  Synthetic
gggaagcugcacgcugat

SEQ ID NO: 82399 - DNA, 20 bp, Artificial Sequence
  Synthetic
tgaagaccccucccaagcua

SEQ ID NO: 82400 - DNA, 20 bp, Artificial Sequence
  Synthetic
tggcccccaugctaattuga

SEQ ID NO: 82401 - DNA, 23 bp, Artificial Sequence
  Synthetic
ggtgtctgacugtgacttcucct

SEQ ID NO: 82402 - DNA, 25 bp, Artificial Sequence
  Synthetic
tgaaaagatcatgucaggactgcut

SEQ ID NO: 82403 - DNA, 20 bp, Artificial Sequence
  Synthetic
caaggcaaugaugccacagt

SEQ ID NO: 82404 - DNA, 21 bp, Artificial Sequence
  Synthetic
ctgagacucaggcacugacaa

SEQ ID NO: 82405 - DNA, 25 bp, Artificial Sequence
  Synthetic
gaacctgcttugatgacataagugg

SEQ ID NO: 82406 - DNA, 27 bp, Artificial Sequence
  Synthetic
tctaaccaaaccugcaacacuaaaact

SEQ ID NO: 82407 - DNA, 24 bp, Artificial Sequence
  Synthetic
cagttgcugcaaactggttuaaga

SEQ ID NO: 82408 - DNA, 23 bp, Artificial Sequence
  Synthetic
gcagatacaccugtcagcaaaut

SEQ ID NO: 82409 - DNA, 28 bp, Artificial Sequence
  Synthetic
gtuaaatagcattggauacagagcagga

SEQ ID NO: 82410 - DNA, 27 bp, Artificial Sequence
  Synthetic
tgttgattgguagcagaaagugaaact

SEQ ID NO: 82411 - DNA, 29 bp, Artificial Sequence
  Synthetic
aaagcctgccuacttaagatcaattuact

SEQ ID NO: 82412 - DNA, 21 bp, Artificial Sequence
  Synthetic
ccatcaguagcatcacccuct

SEQ ID NO: 82413 - DNA, 27 bp, Artificial Sequence
  Synthetic
tccttttcttgtuccctacctctttut

SEQ ID NO: 82414 - DNA, 25 bp, Artificial Sequence
  Synthetic
cugacaguaaaaggaaaagcaacca

SEQ ID NO: 82415 - DNA, 22 bp, Artificial Sequence
  Synthetic
gaggacccagguaugcaagaag

SEQ ID NO: 82416 - DNA, 28 bp, Artificial Sequence
  Synthetic
tcctgctctguatccaatgctattuaac

SEQ ID NO: 82417 - DNA, 30 bp, Artificial Sequence; identical to SEQ ID NO: 57731
  Synthetic

SEQ ID NO: 82418 - DNA, 24 bp, Artificial Sequence
  Synthetic
tgatacaccaaaaucggcaagcua

SEQ ID NO: 82419 - DNA, 27 bp, Artificial Sequence
  Synthetic
actaatgacgtcuggttttctcacaut

SEQ ID NO: 82420 - DNA, 21 bp, Artificial Sequence
  Synthetic
agcacacaguggcaagtguag

SEQ ID NO: 82421 - DNA, 27 bp, Artificial Sequence
  Synthetic
tgaggctgucagaaagttttactgtut

SEQ ID NO: 82422 - DNA, 25 bp, Artificial Sequence
  Synthetic
acgacctuttgataagauggcaaca

SEQ ID NO: 82423 - DNA, 28 bp, Artificial Sequence
  Synthetic
cttcucaaccaaaaagaaagcaaucaac

SEQ ID NO: 82424 - DNA, 21 bp, Artificial Sequence
  Synthetic
ggaaaagugaucacccgggaa

SEQ ID NO: 82425 - DNA, 27 bp, Artificial Sequence
  Synthetic
ccctgatctgucttctgtttcucaaag

SEQ ID NO: 82426 - DNA, 28 bp, Artificial Sequence
  Synthetic
acaattggaactuacttagctactgcut

SEQ ID NO: 82427 - DNA, 28 bp, Artificial Sequence
  Synthetic
ttgagctacaataguataatggccacug

SEQ ID NO: 82428 - DNA, 23 bp, Artificial Sequence
  Synthetic
caacagaacuctgtagctuccca

SEQ ID NO: 82429 - DNA, 25 bp, Artificial Sequence
  Synthetic
tccagtcagagcuacaaatcuacga

SEQ ID NO: 82430 - DNA, 20 bp, Artificial Sequence
  Synthetic
ggctgaaacgutctgccuca

SEQ ID NO: 82431 - DNA, 26 bp, Artificial Sequence
  Synthetic
ccagagcatgugcaagagatactuac

SEQ ID NO: 82432 - DNA, 22 bp, Artificial Sequence
  Synthetic
ctccugaggagauggagaagga

SEQ ID NO: 82433 - DNA, 28 bp, Artificial Sequence
  Synthetic
catctgcatttggutctagcaacaauac

SEQ ID NO: 82434 - DNA, 22 bp, Artificial Sequence
  Synthetic
ccctgagaucagcuggagaagt

SEQ ID NO: 82435 - DNA, 19 bp, Artificial Sequence
  Synthetic
ccagcgcaucgtagaccug

SEQ ID NO: 82436 - DNA, 23 bp, Artificial Sequence
  Synthetic
cugatccgtgcuaaggaagaaga

SEQ ID NO: 82437 - DNA, 28 bp, Artificial Sequence
  Synthetic
agacactcatcuacagagctagcatuat

SEQ ID NO: 82438 - DNA, 21 bp, Artificial Sequence
  Synthetic
ggaaccauggctgcttuccat

SEQ ID NO: 82439 - DNA, 25 bp, Artificial Sequence
  Synthetic
gtgcctctatcucaacccctttuag

SEQ ID NO: 82440 - DNA, 24 bp, Artificial Sequence
  Synthetic
tcttggaatugccataaagugcct

SEQ ID NO: 82441 - DNA, 19 bp, Artificial Sequence
  Synthetic
gctctggugtggctgagua

SEQ ID NO: 82442 - DNA, 22 bp, Artificial Sequence
  Synthetic
tgaattuccaaagaggccucca

SEQ ID NO: 82443 - DNA, 28 bp, Artificial Sequence
  Synthetic
gccttttcattuggtcatcttacguaga

SEQ ID NO: 82444 - DNA, 17 bp, Artificial Sequence
  Synthetic
tugggcacgcuagagga

SEQ ID NO: 82445 - DNA, 26 bp, Artificial Sequence
  Synthetic
gcattctugaaaagggaauacagcaa

SEQ ID NO: 82446 - DNA, 19 bp, Artificial Sequence
  Synthetic
gatgucgcagggcctuaca

SEQ ID NO: 82447 - DNA, 21 bp, Artificial Sequence
  Synthetic
ccacccaaacucctaccugac

SEQ ID NO: 82448 - DNA, 20 bp, Artificial Sequence
  Synthetic
acttaccugaaggcgggcua

SEQ ID NO: 82449 - DNA, 22 bp, Artificial Sequence
  Synthetic
ccttccctcugactccacctut

SEQ ID NO: 82450 - DNA, 22 bp, Artificial Sequence
  Synthetic
aaagccgugataugaagccact

SEQ ID NO: 82451 - DNA, 19 bp, Artificial Sequence
  Synthetic
augtgtccauggcgaccaa

SEQ ID NO: 82452 - DNA, 23 bp, Artificial Sequence
  Synthetic
acagtccucccaatcugaagagt

SEQ ID NO: 82453 - DNA, 22 bp, Artificial Sequence
  Synthetic
accaaattuagccgtuggcaga

SEQ ID NO: 82454 - DNA, 33 bp, Artificial Sequence
  Synthetic
attacttactaattaaucatggccaactcatut

SEQ ID NO: 82455 - DNA, 25 bp, Artificial Sequence
  Synthetic
caaaggaagauaccgaccaugaaga

SEQ ID NO: 82456 - DNA, 25 bp, Artificial Sequence
  Synthetic
agaacataccucattgctggcttut

SEQ ID NO: 82457 - DNA, 27 bp, Artificial Sequence
  Synthetic
attaatagagutgattgcucacaggca

SEQ ID NO: 82458 - DNA, 28 bp, Artificial Sequence
  Synthetic
attttctactctgcucataatgcgtcut

SEQ ID NO: 82459 - DNA, 22 bp, Artificial Sequence
  Synthetic
cagtaggutttctgccuccaca

SEQ ID NO: 82460 - DNA, 22 bp, Artificial Sequence
  Synthetic
tcatctggtucatgctgcucat

SEQ ID NO: 82461 - DNA, 25 bp, Artificial Sequence
  Synthetic
accagcaagcugtaacattcatuca

SEQ ID NO: 82462 - DNA, 22 bp, Artificial Sequence
  Synthetic
cactgttccuctcctctcccua

SEQ ID NO: 82463 - DNA, 21 bp, Artificial Sequence
  Synthetic
tgaacttgucagccaccaugt

SEQ ID NO: 82464 - DNA, 24 bp, Artificial Sequence
  Synthetic
tcatgtaagcutaaacagcguggt

SEQ ID NO: 82465 - DNA, 23 bp, Artificial Sequence
  Synthetic
tgctgaagttutggcaggtttuc

SEQ ID NO: 82466 - DNA, 26 bp, Artificial Sequence
  Synthetic
agatggttucacccaaatatcacugg

SEQ ID NO: 82467 - DNA, 27 bp, Artificial Sequence
  Synthetic
acactctcaggaucctctcttttcaut

SEQ ID NO: 82468 - DNA, 30 bp, Artificial Sequence; identical to SEQ ID NO: 52016
  Synthetic

SEQ ID NO: 82469 - DNA, 23 bp, Artificial Sequence
  Synthetic
agcttgcaugactgccttaugaa

SEQ ID NO: 82470 - DNA, 26 bp, Artificial Sequence
  Synthetic
ctgctgaatgauactctcttgtucct

SEQ ID NO: 82471 - DNA, 29 bp, Artificial Sequence
  Synthetic
gactgattattgcuctctttatggctgua

SEQ ID NO: 82472 - DNA, 22 bp, Artificial Sequence
  Synthetic
ccagggttuaggactgatgugt

SEQ ID NO: 82473 - DNA, 20 bp, Artificial Sequence
  Synthetic
ggacggcaucaatggctuca

SEQ ID NO: 82474 - DNA, 28 bp, Artificial Sequence
  Synthetic
tgctgtttgguaacttgagtatatcugg

SEQ ID NO: 82475 - DNA, 25 bp, Artificial Sequence
  Synthetic
tgttttggguacactccagttgaug

SEQ ID NO: 82476 - DNA, 22 bp, Artificial Sequence
  Synthetic
ggacagaaggutggctugagaa

SEQ ID NO: 82477 - DNA, 25 bp, Artificial Sequence
  Synthetic
aaatcagtaagutacctgctuggct

SEQ ID NO: 82478 - DNA, 27 bp, Artificial Sequence
  Synthetic
gggaagugaaagaacttgaaagatuca

SEQ ID NO: 82479 - DNA, 25 bp, Artificial Sequence
  Synthetic
ctgtgatttggcutccatcaatucc

SEQ ID NO: 82480 - DNA, 20 bp, Artificial Sequence
  Synthetic
gccgcugaagacaagtccug

SEQ ID NO: 82481 - DNA, 21 bp, Artificial Sequence
  Synthetic
ccaatggtuccatcggccuaa

SEQ ID NO: 82482 - DNA, 21 bp, Artificial Sequence
  Synthetic
cucattgaccucagacaggca

SEQ ID NO: 82483 - DNA, 18 bp, Artificial Sequence
  Synthetic
ccugccctuagggagcat

SEQ ID NO: 82484 - DNA, 17 bp, Artificial Sequence
  Synthetic
ccgccccucccacauag

SEQ ID NO: 82485 - DNA, 18 bp, Artificial Sequence
  Synthetic
caggucccaacugccaga

SEQ ID NO: 82486 - DNA, 22 bp, Artificial Sequence
  Synthetic
cagccugaagaaggagatggug

SEQ ID NO: 82487 - DNA, 25 bp, Artificial Sequence
  Synthetic
cctatcctagucctgtcatggguat

SEQ ID NO: 82488 - DNA, 26 bp, Artificial Sequence
  Synthetic
cacactcaucgatgttgatgtuacac

SEQ ID NO: 82489 - DNA, 22 bp, Artificial Sequence
  Synthetic
ggtttcugacaccuggaaggat

SEQ ID NO: 82490 - DNA, 23 bp, Artificial Sequence
  Synthetic
tgggaaaauacaacacugcccat

SEQ ID NO: 82491 - DNA, 21 bp, Artificial Sequence
  Synthetic
ggccaauggcatggagttuct

SEQ ID NO: 82492 - DNA, 24 bp, Artificial Sequence
  Synthetic
ttgggccagutcaattgtctuact

SEQ ID NO: 82493 - DNA, 29 bp, Artificial Sequence
  Synthetic
acaagcaatgagutacaaaatcgacttuc

SEQ ID NO: 82494 - DNA, 21 bp, Artificial Sequence
  Synthetic
gacgcacacucgttgatgtug

SEQ ID NO: 82495 - DNA, 22 bp, Artificial Sequence
  Synthetic
tctggcucttggagaugaggag

SEQ ID NO: 82496 - DNA, 22 bp, Artificial Sequence
  Synthetic
tggagaaguctgaacacugcac

SEQ ID NO: 82497 - DNA, 23 bp, Artificial Sequence
  Synthetic
ttatttctgugcccaccttucca

SEQ ID NO: 82498 - DNA, 28 bp, Artificial Sequence
  Synthetic
caaccaaaggacacaaugagattagaug

SEQ ID NO: 82499 - DNA, 26 bp, Artificial Sequence
  Synthetic
agcugagagaaaauaaaaccccagag

SEQ ID NO: 82500 - DNA, 28 bp, Artificial Sequence
  Synthetic
tgcgttctcttutcaaaactgttttuca

SEQ ID NO: 82501 - DNA, 28 bp, Artificial Sequence
  Synthetic
aacaaagcaagucatgcattttccuaaa

SEQ ID NO: 82502 - DNA, 21 bp, Artificial Sequence
  Synthetic
caccacacguacgttctugga

SEQ ID NO: 82503 - DNA, 22 bp, Artificial Sequence
  Synthetic
gtgaccctcugcttctcctcua

SEQ ID NO: 82504 - DNA, 22 bp, Artificial Sequence
  Synthetic
tgcagcugaacttcggaatuct

SEQ ID NO: 82505 - DNA, 28 bp, Artificial Sequence
  Synthetic
tcatattacttcaguagtcccatgugga

SEQ ID NO: 82506 - DNA, 28 bp, Artificial Sequence
  Synthetic
tcatccaaggtuttcatcttgacttugt

SEQ ID NO: 82507 - DNA, 28 bp, Artificial Sequence
  Synthetic
cctctaactgacaugcatggagatagua

SEQ ID NO: 82508 - DNA, 27 bp, Artificial Sequence
  Synthetic
tgtggtctaaugcattcaactauccaa

SEQ ID NO: 82509 - DNA, 21 bp, Artificial Sequence
  Synthetic
gccctcuagcagtctggtuac

SEQ ID NO: 82510 - DNA, 23 bp, Artificial Sequence
  Synthetic
catacccatcucctaacggctut

SEQ ID NO: 82511 - DNA, 23 bp, Artificial Sequence
  Synthetic
agctctttctutggcttctcugg

SEQ ID NO: 82512 - DNA, 27 bp, Artificial Sequence
  Synthetic
ttgctgttctttutggcttcatttgua

SEQ ID NO: 82513 - DNA, 28 bp, Artificial Sequence
  Synthetic
ccttttggactuacattggtgatgatuc

SEQ ID NO: 82514 - DNA, 26 bp, Artificial Sequence
  Synthetic
tggctcagaatucaccttctacatut

SEQ ID NO: 82515 - DNA, 26 bp, Artificial Sequence
  Synthetic
aaccttttugaaaaccaagagugcat

SEQ ID NO: 82516 - DNA, 20 bp, Artificial Sequence
  Synthetic
ccccaguctgtcuccaaacc

SEQ ID NO: 82517 - DNA, 23 bp, Artificial Sequence
  Synthetic
gggaggtuagtgaacttgcugac

SEQ ID NO: 82518 - DNA, 19 bp, Artificial Sequence
  Synthetic
tcaaugcagccagcgcuaa

SEQ ID NO: 82519 - DNA, 23 bp, Artificial Sequence
  Synthetic
gggauccactgugagaacaacac

SEQ ID NO: 82520 - DNA, 19 bp, Artificial Sequence
  Synthetic
catgccccaagcuccuagt

SEQ ID NO: 82521 - DNA, 21 bp, Artificial Sequence
  Synthetic
gcugcagcaaagaagaagcug

SEQ ID NO: 82522 - DNA, 20 bp, Artificial Sequence
  Synthetic
cacacctcuctgtgcaguca

SEQ ID NO: 82523 - DNA, 23 bp, Artificial Sequence
  Synthetic
gcactttctgugaggaggacauc

SEQ ID NO: 82524 - DNA, 28 bp, Artificial Sequence
  Synthetic
caagtcatgcugtttacattcacuaagg

SEQ ID NO: 82525 - DNA, 29 bp, Artificial Sequence
  Synthetic
cacccattgagucattcactttuaaagaa

SEQ ID NO: 82526 - DNA, 21 bp, Artificial Sequence
  Synthetic
gauagcttccugagccaccac

SEQ ID NO: 82527 - DNA, 28 bp, Artificial Sequence
  Synthetic
gccugtaagataatgauagacagcaaca

SEQ ID NO: 82528 - DNA, 19 bp, Artificial Sequence
  Synthetic
ggtcacuggcacactcgut

SEQ ID NO: 82529 - DNA, 19 bp, Artificial Sequence
  Synthetic
ctcacacucaccctuccgt

SEQ ID NO: 82530 - DNA, 23 bp, Artificial Sequence
  Synthetic
cccatuaccagcacttcaguacc

SEQ ID NO: 82531 - DNA, 28 bp, Artificial Sequence
  Synthetic
gagcattatttgugccagacttgtttua

SEQ ID NO: 82532 - DNA, 22 bp, Artificial Sequence
  Synthetic
gggaccaccuttgtcttucgag

SEQ ID NO: 82533 - DNA, 28 bp, Artificial Sequence
  Synthetic
cacacactuccaaccttatttaatgcut

SEQ ID NO: 82534 - DNA, 21 bp, Artificial Sequence
  Synthetic
gggataggugaagggccttut

SEQ ID NO: 82535 - DNA, 25 bp, Artificial Sequence
  Synthetic
acacttagagcucagactgacctut

SEQ ID NO: 82536 - DNA, 21 bp, Artificial Sequence
  Synthetic
gcctgaagcuccaggtcttuc

SEQ ID NO: 82537 - DNA, 22 bp, Artificial Sequence
  Synthetic
gggcagcacacauctctatucc

SEQ ID NO: 82538 - DNA, 28 bp, Artificial Sequence
  Synthetic
tgattttcattttcugtaggcatgguga

SEQ ID NO: 82539 - DNA, 25 bp, Artificial Sequence
  Synthetic
tgcttcaaagccuttccttcactua

SEQ ID NO: 82540 - DNA, 28 bp, Artificial Sequence
  Synthetic
cctttggagcauatccattattgacuga

SEQ ID NO: 82541 - DNA, 28 bp, Artificial Sequence
  Synthetic
ggaagcuaggttgauaacagaagagaat

SEQ ID NO: 82542 - DNA, 28 bp, Artificial Sequence
  Synthetic
tgttattcctgtaucaacaacacacgut

SEQ ID NO: 82543 - DNA, 27 bp, Artificial Sequence
  Synthetic
cataagaaattgagutccgcagttguc

SEQ ID NO: 82544 - DNA, 26 bp, Artificial Sequence
  Synthetic
ctcttctgttaucaacctagctuccc

SEQ ID NO: 82545 - DNA, 26 bp, Artificial Sequence
  Synthetic
agtagcaccaagucttcttgaatugt

SEQ ID NO: 82546 - DNA, 20 bp, Artificial Sequence
  Synthetic
aggagtgugctgttgugcaa

SEQ ID NO: 82547 - DNA, 24 bp, Artificial Sequence
  Synthetic
ctgaagatcaugagtcacctuggg

SEQ ID NO: 82548 - DNA, 20 bp, Artificial Sequence
  Synthetic
cccaacaggutgaccacgut

SEQ ID NO: 82549 - DNA, 22 bp, Artificial Sequence
  Synthetic
gagtcagaauaggctcctgugg

SEQ ID NO: 82550 - DNA, 28 bp, Artificial Sequence
  Synthetic
tgtcatcaagaagautctaattggccut

SEQ ID NO: 82551 - DNA, 25 bp, Artificial Sequence
  Synthetic
gcatccaaatugcaaacacagtuca

SEQ ID NO: 82552 - DNA, 26 bp, Artificial Sequence
  Synthetic
aacaggttcacuggtttgttgattug

SEQ ID NO: 82553 - DNA, 24 bp, Artificial Sequence
  Synthetic
ccctgaaccacacutcaacctuaa

SEQ ID NO: 82554 - DNA, 33 bp, Artificial Sequence
  Synthetic
aaatgagactauaactctctacuaagaagaact

SEQ ID NO: 82555 - DNA, 28 bp, Artificial Sequence
  Synthetic
ggaagagcatuaagaagttggtttugaa

SEQ ID NO: 82556 - DNA, 25 bp, Artificial Sequence
  Synthetic
ggcatgtgttuctacagagctgaut

SEQ ID NO: 82557 - DNA, 25 bp, Artificial Sequence
  Synthetic
actaaacaautcgacagtucaggca

SEQ ID NO: 82558 - DNA, 27 bp, Artificial Sequence
  Synthetic
acgatuaacaggagaaaagagatugct

SEQ ID NO: 82559 - DNA, 21 bp, Artificial Sequence
  Synthetic
agtugagcagaagugcaccat

SEQ ID NO: 82560 - DNA, 25 bp, Artificial Sequence
  Synthetic
ctttgaaauaacaccaccagtgguc

SEQ ID NO: 82561 - DNA, 27 bp, Artificial Sequence
  Synthetic
gcaactgcacuaaagaggacaaacuaa

SEQ ID NO: 82562 - DNA, 27 bp, Artificial Sequence
  Synthetic
acagtgttagaaaaaugtggctcucat

SEQ ID NO: 82563 - DNA, 27 bp, Artificial Sequence
  Synthetic
cagggacctguttttaggtactguaaa

SEQ ID NO: 82564 - DNA, 21 bp, Artificial Sequence
  Synthetic
tggcuacgacccagtuaccat

SEQ ID NO: 82565 - DNA, 28 bp, Artificial Sequence
  Synthetic
ccactggtctauaatccagatgattcut

SEQ ID NO: 82566 - DNA, 17 bp, Artificial Sequence
  Synthetic
cccccaacccggucauc

SEQ ID NO: 82567 - DNA, 17 bp, Artificial Sequence
  Synthetic
ggacugggcgguggaac

SEQ ID NO: 82568 - DNA, 17 bp, Artificial Sequence
  Synthetic
ggtuccaccgcccaguc

SEQ ID NO: 82569 - DNA, 18 bp, Artificial Sequence
  Synthetic
gcgcutgtucacgggaaa

SEQ ID NO: 82570 - DNA, 19 bp, Artificial Sequence
  Synthetic
gaccacaaggcccucagua

SEQ ID NO: 82571 - DNA, 24 bp, Artificial Sequence
  Synthetic
agacauacgagcacuaacaaaggg

SEQ ID NO: 82572 - DNA, 28 bp, Artificial Sequence
  Synthetic
agaagaugaagacaatgttcucaaagca

SEQ ID NO: 82573 - DNA, 28 bp, Artificial Sequence
  Synthetic
ccaaagatgacaguttttcagtgaauga

SEQ ID NO: 82574 - DNA, 28 bp, Artificial Sequence
  Synthetic
tccttagaaguacaccugagaagaaaca

SEQ ID NO: 82575 - DNA, 27 bp, Artificial Sequence
  Synthetic
ccacagagcaagaaaaautgagctuaa

SEQ ID NO: 82576 - DNA, 26 bp, Artificial Sequence
  Synthetic
cttgacatttaatugaagcgcaggut

SEQ ID NO: 82577 - DNA, 26 bp, Artificial Sequence
  Synthetic
cacattcttttcaauggctttggcua

SEQ ID NO: 82578 - DNA, 29 bp, Artificial Sequence
  Synthetic
cagtcagaggcgcuatgtgtattattaua

SEQ ID NO: 82579 - DNA, 26 bp, Artificial Sequence
  Synthetic
acatggaaggaugagaattucaagca

SEQ ID NO: 82580 - DNA, 19 bp, Artificial Sequence
  Synthetic
gagcccccagugctttuct

SEQ ID NO: 82581 - DNA, 18 bp, Artificial Sequence
  Synthetic
gagucccagcgcaucaac

SEQ ID NO: 82582 - DNA, 21 bp, Artificial Sequence
  Synthetic
agttgtgcugttgctgaugga

SEQ ID NO: 82583 - DNA, 26 bp, Artificial Sequence
  Synthetic
cttctcttgauctcttttcucggaca

SEQ ID NO: 82584 - DNA, 17 bp, Artificial Sequence
  Synthetic
gcagctucctgcggtug

SEQ ID NO: 82585 - DNA, 21 bp, Artificial Sequence
  Synthetic
cctaaccaccccuccaacuct

SEQ ID NO: 82586 - DNA, 23 bp, Artificial Sequence
  Synthetic
agattacaagacaauggccgcut

SEQ ID NO: 82587 - DNA, 28 bp, Artificial Sequence
  Synthetic
ggatcacacccutacttgaaaaatagug

SEQ ID NO: 82588 - DNA, 23 bp, Artificial Sequence
  Synthetic
tgctugaaggagaggaaaugcaa

SEQ ID NO: 82589 - DNA, 17 bp, Artificial Sequence
  Synthetic
ccgccuacgacaagcug

SEQ ID NO: 82590 - DNA, 29 bp, Artificial Sequence
  Synthetic
ggtaaacttcugtggttctcttauaacga

SEQ ID NO: 82591 - DNA, 25 bp, Artificial Sequence
  Synthetic
ccattacctugggatcgtguacaaa

SEQ ID NO: 82592 - DNA, 21 bp, Artificial Sequence
  Synthetic
ttgcaggguggtatgtggtut

SEQ ID NO: 82593 - DNA, 24 bp, Artificial Sequence
  Synthetic
gcccucaaggctcctaugaaaaag

SEQ ID NO: 82594 - DNA, 28 bp, Artificial Sequence
  Synthetic
gtgctttttgaugcttttgtttatugag

SEQ ID NO: 82595 - DNA, 17 bp, Artificial Sequence
  Synthetic
ccagcagcucucaggga

SEQ ID NO: 82596 - DNA, 28 bp, Artificial Sequence
  Synthetic
gggaagatttagugaggaagtgcattua

SEQ ID NO: 82597 - DNA, 33 bp, Artificial Sequence
  Synthetic
agataagggutaatgaaaataatugagagagaa

SEQ ID NO: 82598 - DNA, 28 bp, Artificial Sequence
  Synthetic
ccaggaaatgaaauagaaacaggaccut

SEQ ID NO: 82599 - DNA, 20 bp, Artificial Sequence
  Synthetic
agaggcucaccagcaaacuc

SEQ ID NO: 82600 - DNA, 19 bp, Artificial Sequence
  Synthetic
gccgcgucttggtcttcuc

SEQ ID NO: 82601 - DNA, 18 bp, Artificial Sequence
  Synthetic
ccagguggccgacaugaa

SEQ ID NO: 82602 - DNA, 27 bp, Artificial Sequence
  Synthetic
ctttctgaaacugatcacactctcuct

SEQ ID NO: 82603 - DNA, 26 bp, Artificial Sequence
  Synthetic
ggctgggtgautgtattagcatttut

SEQ ID NO: 82604 - DNA, 22 bp, Artificial Sequence
  Synthetic
atgtgaagagcaucagcctgut

SEQ ID NO: 82605 - DNA, 26 bp, Artificial Sequence
  Synthetic
tgaaaggagacgucaaataugcagac

SEQ ID NO: 82606 - DNA, 21 bp, Artificial Sequence
  Synthetic
gcctccuaggatgcaactcua

SEQ ID NO: 82607 - DNA, 21 bp, Artificial Sequence
  Synthetic
cgaacatcauctggtcugcct

SEQ ID NO: 82608 - DNA, 23 bp, Artificial Sequence
  Synthetic
ccacactgucctccatcttctut

SEQ ID NO: 82609 - DNA, 21 bp, Artificial Sequence
  Synthetic
ttcataacugggcagauccct

SEQ ID NO: 82610 - DNA, 22 bp, Artificial Sequence
  Synthetic
agccagaggaaaugggttgtut

SEQ ID NO: 82611 - DNA, 19 bp, Artificial Sequence
  Synthetic
gagctgtucggcatgaugg

SEQ ID NO: 82612 - DNA, 22 bp, Artificial Sequence
  Synthetic
ccatgtagutggaggacucgat

SEQ ID NO: 82613 - DNA, 22 bp, Artificial Sequence
  Synthetic
ctcctgtgaugctccttuaccc

SEQ ID NO: 82614 - DNA, 19 bp, Artificial Sequence
  Synthetic
tcttttgcaugccggguga

SEQ ID NO: 82615 - DNA, 28 bp, Artificial Sequence
  Synthetic
ccataagttagctuccactctttccaua

SEQ ID NO: 82616 - DNA, 23 bp, Artificial Sequence
  Synthetic
cagaaccaucaggacccatguaa

SEQ ID NO: 82617 - DNA, 20 bp, Artificial Sequence
  Synthetic
gctcagguttgggtuccaca

SEQ ID NO: 82618 - DNA, 22 bp, Artificial Sequence
  Synthetic
tgctcacctuttgaggtctcug

SEQ ID NO: 82619 - DNA, 23 bp, Artificial Sequence
  Synthetic
tcctaacucagtgctctcuccat

SEQ ID NO: 82620 - DNA, 24 bp, Artificial Sequence
  Synthetic
ttcgtccagcaacutctgtagaug

SEQ ID NO: 82621 - DNA, 29 bp, Artificial Sequence
  Synthetic
cgggcctttctucatccatattacttuat

SEQ ID NO: 82622 - DNA, 23 bp, Artificial Sequence
  Synthetic
gcactgagcutgattccgaugag

SEQ ID NO: 82623 - DNA, 22 bp, Artificial Sequence
  Synthetic
tgatcugaaccgaggacaccut

SEQ ID NO: 82624 - DNA, 25 bp, Artificial Sequence
  Synthetic
ccagtaactuacctgttgtctucgg

SEQ ID NO: 82625 - DNA, 25 bp, Artificial Sequence
  Synthetic
tcctgaagacauaccagctauggaa

SEQ ID NO: 82626 - DNA, 22 bp, Artificial Sequence
  Synthetic
ccaauggcttcctugaggaagt

SEQ ID NO: 82627 - DNA, 28 bp, Artificial Sequence
  Synthetic
tgtatcataguccccatcatgttctuct

SEQ ID NO: 82628 - DNA, 21 bp, Artificial Sequence
  Synthetic
gttgcttgguagagctgccua

SEQ ID NO: 82629 - DNA, 26 bp, Artificial Sequence
  Synthetic
gtagcaggttgucttgaatgtctuca

SEQ ID NO: 82630 - DNA, 21 bp, Artificial Sequence
  Synthetic
ctgtgcccacucttgagtuct

SEQ ID NO: 82631 - DNA, 22 bp, Artificial Sequence
  Synthetic
ttuccacccacagauccaaaca

SEQ ID NO: 82632 - DNA, 27 bp, Artificial Sequence
  Synthetic
caacttttucccgaagaagtaagacut

SEQ ID NO: 82633 - DNA, 23 bp, Artificial Sequence
  Synthetic
tcaagacatttgutcccgtgcua

SEQ ID NO: 82634 - DNA, 24 bp, Artificial Sequence
  Synthetic
ggctctgtauaagtggcttcugaa

SEQ ID NO: 82635 - DNA, 29 bp, Artificial Sequence
  Synthetic
cctttggtgcuttagtttgttctatuact

SEQ ID NO: 82636 - DNA, 23 bp, Artificial Sequence
  Synthetic
acaagcacaggcauttaccuact

SEQ ID NO: 82637 - DNA, 28 bp, Artificial Sequence
  Synthetic
tcattcatgactaugcagattgggtuaa

SEQ ID NO: 82638 - DNA, 20 bp, Artificial Sequence
  Synthetic
gggtgtccugcatgtgacua

SEQ ID NO: 82639 - DNA, 20 bp, Artificial Sequence
  Synthetic
cttccaugagcaccucccat

SEQ ID NO: 82640 - DNA, 22 bp, Artificial Sequence
  Synthetic
guttgctgaatgugaagcccat

SEQ ID NO: 82641 - DNA, 23 bp, Artificial Sequence
  Synthetic
gtgttccgugacaatctgtcuga

SEQ ID NO: 82642 - DNA, 22 bp, Artificial Sequence
  Synthetic
gcgcaaccguattuaaaggagt

SEQ ID NO: 82643 - DNA, 27 bp, Artificial Sequence
  Synthetic
catggatacagaaauggaggactuaga

SEQ ID NO: 82644 - DNA, 28 bp, Artificial Sequence
  Synthetic
ctgaatatguggctctgtccuagaaaag

SEQ ID NO: 82645 - DNA, 26 bp, Artificial Sequence
  Synthetic
ttccttgggacutccttctttgtaug

SEQ ID NO: 82646 - DNA, 23 bp, Artificial Sequence
  Synthetic
aagctgcuccagaaaaugacaga

SEQ ID NO: 82647 - DNA, 23 bp, Artificial Sequence
  Synthetic
ggaagaagggaaaugtuggcagt

SEQ ID NO: 82648 - DNA, 22 bp, Artificial Sequence
  Synthetic
cagguaaagccatguagggaca

SEQ ID NO: 82649 - DNA, 25 bp, Artificial Sequence
  Synthetic
gcatgtttgaauggtgtaggagtuc

SEQ ID NO: 82650 - DNA, 23 bp, Artificial Sequence
  Synthetic
ctcccaggcacutgatgatacuc

SEQ ID NO: 82651 - DNA, 24 bp, Artificial Sequence
  Synthetic
catttctaggutacaggccuggat

SEQ ID NO: 82652 - DNA, 23 bp, Artificial Sequence
  Synthetic
aggcaggaaaagcaagutgagua

SEQ ID NO: 82653 - DNA, 19 bp, Artificial Sequence
  Synthetic
caaacutguccccgagcga

SEQ ID NO: 82654 - DNA, 18 bp, Artificial Sequence
  Synthetic
gaacagccccutgucgga

SEQ ID NO: 82655 - DNA, 23 bp, Artificial Sequence
  Synthetic
cccagucagctgtgtuaaaggaa

SEQ ID NO: 82656 - DNA, 27 bp, Artificial Sequence
  Synthetic
ttgctatcagttaauggaagtgctcut

SEQ ID NO: 82657 - DNA, 20 bp, Artificial Sequence
  Synthetic
gctttgugagagccgcuaca

SEQ ID NO: 82658 - DNA, 22 bp, Artificial Sequence
  Synthetic
gtaagtcccugtagtccccuca

SEQ ID NO: 82659 - DNA, 21 bp, Artificial Sequence
  Synthetic
gagccaccucctctacucagt

SEQ ID NO: 82660 - DNA, 21 bp, Artificial Sequence
  Synthetic
cagatcuggcggatgatcuct

SEQ ID NO: 82661 - DNA, 25 bp, Artificial Sequence
  Synthetic
tgtcttttggatugttcgtgcagua

SEQ ID NO: 82662 - DNA, 28 bp, Artificial Sequence
  Synthetic
aaaaggtcaatcutagaaagctcuccaa

SEQ ID NO: 82663 - DNA, 29 bp, Artificial Sequence
  Synthetic
catcagagagaacucctaatgggacuaat

SEQ ID NO: 82664 - DNA, 25 bp, Artificial Sequence
  Synthetic
tctacgttgttucaggtgaaagugt

SEQ ID NO: 82665 - DNA, 22 bp, Artificial Sequence
  Synthetic
accatccaucctgtctgtcuca

SEQ ID NO: 82666 - DNA, 24 bp, Artificial Sequence
  Synthetic
tctggtaagtcucctgatgctuct

SEQ ID NO: 82667 - DNA, 29 bp, Artificial Sequence
  Synthetic
caaagaaagccagaugaagacatgaaaut

SEQ ID NO: 82668 - DNA, 22 bp, Artificial Sequence
  Synthetic
ttcatctgcutgtcgctcucat

SEQ ID NO: 82669 - DNA, 24 bp, Artificial Sequence
  Synthetic
ttctcttucaggaaagtgtgcugt

SEQ ID NO: 82670 - DNA, 22 bp, Artificial Sequence
  Synthetic
agutgccataaucgggagaacc

SEQ ID NO: 82671 - DNA, 24 bp, Artificial Sequence
  Synthetic
gactgtacacugcaacagatucac

SEQ ID NO: 82672 - DNA, 19 bp, Artificial Sequence
  Synthetic
gctccuctgcagguaaggg

SEQ ID NO: 82673 - DNA, 17 bp, Artificial Sequence
  Synthetic
cggcaucctgggcauca

SEQ ID NO: 82674 - DNA, 24 bp, Artificial Sequence
  Synthetic
gcctctcttaccutcgtctctcut

SEQ ID NO: 82675 - DNA, 18 bp, Artificial Sequence
  Synthetic
ccugaccgcccgtcttuc

SEQ ID NO: 82676 - DNA, 28 bp, Artificial Sequence
  Synthetic
acagaagttuaaaagccccatgaauact

SEQ ID NO: 82677 - DNA, 27 bp, Artificial Sequence
  Synthetic
ccagtgctattutgatgtttatgcuca

SEQ ID NO: 82678 - DNA, 28 bp, Artificial Sequence
  Synthetic
gcaagcuacagaagcatacatcuaaaca

SEQ ID NO: 82679 - DNA, 23 bp, Artificial Sequence
  Synthetic
tgugcatauccggaggaaagaag

SEQ ID NO: 82680 - DNA, 24 bp, Artificial Sequence
  Synthetic
gtgtggcatgugattctgtagtug

SEQ ID NO: 82681 - DNA, 25 bp, Artificial Sequence
  Synthetic
cattctcacccugatacgucaacat

SEQ ID NO: 82682 - DNA, 28 bp, Artificial Sequence
  Synthetic
caaatctttgauaatgaacccaucgcaa

SEQ ID NO: 82683 - DNA, 25 bp, Artificial Sequence
  Synthetic
cttgaccaagaugtgaaggtttcug

SEQ ID NO: 82684 - DNA, 21 bp, Artificial Sequence
  Synthetic
agcugacaggcagaccuagat

SEQ ID NO: 82685 - DNA, 21 bp, Artificial Sequence
  Synthetic
cgagggagaucccatcaggut

SEQ ID NO: 82686 - DNA, 21 bp, Artificial Sequence
  Synthetic
ggcaguggccacatacttuct

SEQ ID NO: 82687 - DNA, 28 bp, Artificial Sequence
  Synthetic
cccaaagcaauatatttgtatucaccga

SEQ ID NO: 82688 - DNA, 20 bp, Artificial Sequence
  Synthetic
gcacagtugccaggcttaug

SEQ ID NO: 82689 - DNA, 26 bp, Artificial Sequence
  Synthetic
tttaaaaugaggtgttguccccagaa

SEQ ID NO: 82690 - DNA, 27 bp, Artificial Sequence
  Synthetic
gtcccctgaagaugctagtaagttcua

SEQ ID NO: 82691 - DNA, 28 bp, Artificial Sequence
  Synthetic
cagatcttctacuagatgagagggtguc

SEQ ID NO: 82692 - DNA, 23 bp, Artificial Sequence
  Synthetic
tgagctccagaggugtctgauat

SEQ ID NO: 82693 - DNA, 28 bp, Artificial Sequence
  Synthetic
cctagcttctgucttaggttcatttuct

SEQ ID NO: 82694 - DNA, 23 bp, Artificial Sequence
  Synthetic
ggtttaactguctccctcctucc

SEQ ID NO: 82695 - DNA, 22 bp, Artificial Sequence
  Synthetic
gcccaaauaagcagcaatguca

SEQ ID NO: 82696 - DNA, 26 bp, Artificial Sequence
  Synthetic
gacuaaaacaaccaaaccaaacucca

SEQ ID NO: 82697 - DNA, 21 bp, Artificial Sequence
  Synthetic
gtcgcacagaacuccacucaa

SEQ ID NO: 82698 - DNA, 20 bp, Artificial Sequence
  Synthetic
cagccuggcaactcctacug

SEQ ID NO: 82699 - DNA, 24 bp, Artificial Sequence
  Synthetic
cttttatctccuccccatcuccct

SEQ ID NO: 82700 - DNA, 24 bp, Artificial Sequence
  Synthetic
tctcttctatucccttggcucaca

SEQ ID NO: 82701 - DNA, 24 bp, Artificial Sequence
  Synthetic
tgcucgaaaggaatatcuccacac

SEQ ID NO: 82702 - DNA, 26 bp, Artificial Sequence
  Synthetic
cctaccaaggagaugaaaagugagaa

SEQ ID NO: 82703 - DNA, 26 bp, Artificial Sequence
  Synthetic
tcatgttaccacugtcccttttugag

SEQ ID NO: 82704 - DNA, 23 bp, Artificial Sequence
  Synthetic
gggatccugctgtatgatauggt

SEQ ID NO: 82705 - DNA, 28 bp, Artificial Sequence
  Synthetic
gaagactaauagccccatuaagaccaat

SEQ ID NO: 82706 - DNA, 21 bp, Artificial Sequence
  Synthetic
ggtggugaaggaaagcaccut

SEQ ID NO: 82707 - DNA, 22 bp, Artificial Sequence
  Synthetic
gctgtgtcaccugagatctgug

SEQ ID NO: 82708 - DNA, 22 bp, Artificial Sequence
  Synthetic
atgtucacagcagucccaagaa

SEQ ID NO: 82709 - DNA, 21 bp, Artificial Sequence
  Synthetic
aggtagauggcaaagcggaug

SEQ ID NO: 82710 - DNA, 25 bp, Artificial Sequence
  Synthetic
gacccaacauacacatccauacaca

SEQ ID NO: 82711 - DNA, 20 bp, Artificial Sequence
  Synthetic
gaugacaccgaugccaacag

SEQ ID NO: 82712 - DNA, 29 bp, Artificial Sequence
  Synthetic
ctgaaattttaagcugaggatgaaugcaa

SEQ ID NO: 82713 - DNA, 24 bp, Artificial Sequence
  Synthetic
catgagagccaucttgtgatcuga

SEQ ID NO: 82714 - DNA, 22 bp, Artificial Sequence
  Synthetic
aagaggcttautcggcaggtut

SEQ ID NO: 82715 - DNA, 22 bp, Artificial Sequence
  Synthetic
tgaccctcugcttctacctcug

SEQ ID NO: 82716 - DNA, 26 bp, Artificial Sequence
  Synthetic
cagttattuggcagaaaagcagagua

SEQ ID NO: 82717 - DNA, 28 bp, Artificial Sequence
  Synthetic
tgtgaacagcutcatgagtaaaucagaa

SEQ ID NO: 82718 - DNA, 24 bp, Artificial Sequence
  Synthetic
gactcattgccacutgaaccatug

SEQ ID NO: 82719 - DNA, 20 bp, Artificial Sequence
  Synthetic
acatgaguggcccccuagaa

SEQ ID NO: 82720 - DNA, 21 bp, Artificial Sequence
  Synthetic
cccccaggacaaaaugatucc

SEQ ID NO: 82721 - DNA, 21 bp, Artificial Sequence
  Synthetic
atcttccaccucactcccuca

SEQ ID NO: 82722 - DNA, 26 bp, Artificial Sequence
  Synthetic
agcactaaaaugaagatgtgcuacct

SEQ ID NO: 82723 - DNA, 28 bp, Artificial Sequence
  Synthetic
gcactgccattuaattcacacttatgut

SEQ ID NO: 82724 - DNA, 22 bp, Artificial Sequence
  Synthetic
ctgacgctuggtttttctgugt

SEQ ID NO: 82725 - DNA, 21 bp, Artificial Sequence
  Synthetic
gaggtctgucttctgctuggg

SEQ ID NO: 82726 - DNA, 20 bp, Artificial Sequence
  Synthetic
ggacgagaaccutgcugacc

SEQ ID NO: 82727 - DNA, 24 bp, Artificial Sequence
  Synthetic
gcacttctutttgggacucagaga

SEQ ID NO: 82728 - DNA, 18 bp, Artificial Sequence
  Synthetic
cgctgaggcccuccctua

SEQ ID NO: 82729 - DNA, 25 bp, Artificial Sequence
  Synthetic
tggatataattuccgagcgaagcug

SEQ ID NO: 82730 - DNA, 21 bp, Artificial Sequence
  Synthetic
tttccuaatgcctugcagcct

SEQ ID NO: 82731 - DNA, 28 bp, Artificial Sequence
  Synthetic
cccacatcatguctcatcttatcaaugt

SEQ ID NO: 82732 - DNA, 23 bp, Artificial Sequence
  Synthetic
tgcagaaagacutgaaggcguat

SEQ ID NO: 82733 - DNA, 28 bp, Artificial Sequence
  Synthetic
catcacaaagtauctttttctgtggcut

SEQ ID NO: 82734 - DNA, 20 bp, Artificial Sequence
  Synthetic
tcctcgagcugttcctucca

SEQ ID NO: 82735 - DNA, 22 bp, Artificial Sequence
  Synthetic
tcttatcctugctgctcacguc

SEQ ID NO: 82736 - DNA, 18 bp, Artificial Sequence
  Synthetic
tctctguggccgggtgua

SEQ ID NO: 82737 - DNA, 22 bp, Artificial Sequence
  Synthetic
ctgaccgtuacctttcctccuc

SEQ ID NO: 82738 - DNA, 28 bp, Artificial Sequence
  Synthetic
ttgcagttttuaaaccttttcctuccat

SEQ ID NO: 82739 - DNA, 26 bp, Artificial Sequence
  Synthetic
ccaagtctgucagctacttucagaaa

SEQ ID NO: 82740 - DNA, 21 bp, Artificial Sequence
  Synthetic
accatggaucagccagtctug

SEQ ID NO: 82741 - DNA, 25 bp, Artificial Sequence
  Synthetic
ggccaaagucacagatctucacaat

SEQ ID NO: 82742 - DNA, 22 bp, Artificial Sequence
  Synthetic
gcccactuccaaagctgtagut

SEQ ID NO: 82743 - DNA, 22 bp, Artificial Sequence
  Synthetic
ggcaagcagcguttagaactug

SEQ ID NO: 82744 - DNA, 22 bp, Artificial Sequence
  Synthetic
agtctucccttacauggagggt

SEQ ID NO: 82745 - DNA, 25 bp, Artificial Sequence
  Synthetic
acagaucagacactcagguaacaga

SEQ ID NO: 82746 - DNA, 22 bp, Artificial Sequence
  Synthetic
ggtcccagtugaagaccctcua

SEQ ID NO: 82747 - DNA, 22 bp, Artificial Sequence
  Synthetic
cttccaccuctacctgauccca

SEQ ID NO: 82748 - DNA, 19 bp, Artificial Sequence
  Synthetic
ccctacccugggagaugct

SEQ ID NO: 82749 - DNA, 20 bp, Artificial Sequence
  Synthetic
acctgcucgaacttctgcug

SEQ ID NO: 82750 - DNA, 20 bp, Artificial Sequence
  Synthetic
gcccacagaggaccutgaug

SEQ ID NO: 82751 - DNA, 18 bp, Artificial Sequence
  Synthetic
ccagtaccgcugcgagug

SEQ ID NO: 82752 - DNA, 22 bp, Artificial Sequence
  Synthetic
cctctgaccuccctcacatcut

SEQ ID NO: 82753 - DNA, 20 bp, Artificial Sequence
  Synthetic
ccttgggaugccacactucc

SEQ ID NO: 82754 - DNA, 18 bp, Artificial Sequence
  Synthetic
ggagcgcgagucctctug

SEQ ID NO: 82755 - DNA, 22 bp, Artificial Sequence
  Synthetic
ccaguaagagcagtugaaggga

SEQ ID NO: 82756 - DNA, 18 bp, Artificial Sequence
  Synthetic
tgggcacgucgcaguaaa

SEQ ID NO: 82757 - DNA, 20 bp, Artificial Sequence
  Synthetic
ccagcugaccccaatctguc

SEQ ID NO: 82758 - DNA, 21 bp, Artificial Sequence
  Synthetic
aatgtgcagggcugattguct

SEQ ID NO: 82759 - DNA, 24 bp, Artificial Sequence
  Synthetic
cacttcaaagcuaacatgtugcca

SEQ ID NO: 82760 - DNA, 28 bp, Artificial Sequence
  Synthetic
tctgtttttgccutttcaatttcctgut

SEQ ID NO: 82761 - DNA, 27 bp, Artificial Sequence
  Synthetic
cagcttgtccauttttcttcgtuacag

SEQ ID NO: 82762 - DNA, 21 bp, Artificial Sequence
  Synthetic
gucctccuggcacaaggaaaa

SEQ ID NO: 82763 - DNA, 25 bp, Artificial Sequence
  Synthetic
gaatctcuagaagcaacaccugact

SEQ ID NO: 82764 - DNA, 20 bp, Artificial Sequence
  Synthetic
gcacttucagctcuggagga

SEQ ID NO: 82765 - DNA, 26 bp, Artificial Sequence
  Synthetic
ccctagagatguctccttccagauat

SEQ ID NO: 82766 - DNA, 26 bp, Artificial Sequence
  Synthetic
ttatcctgtgaucctaattgccctua

SEQ ID NO: 82767 - DNA, 27 bp, Artificial Sequence
  Synthetic
gctgtgtcagcauctagaaatatguct

SEQ ID NO: 82768 - DNA, 28 bp, Artificial Sequence
  Synthetic
ctcctggatccuttattacgaattguga

SEQ ID NO: 82769 - DNA, 21 bp, Artificial Sequence
  Synthetic
ggagaaggugccttgctucat

SEQ ID NO: 82770 - DNA, 21 bp, Artificial Sequence
  Synthetic
cttccgaauggagcagucact

SEQ ID NO: 82771 - DNA, 24 bp, Artificial Sequence
  Synthetic
catagttcuggaaaaccccagcut

SEQ ID NO: 82772 - DNA, 29 bp, Artificial Sequence
  Synthetic
aaatccctgtgaaucagttgtctaaugaa

SEQ ID NO: 82773 - DNA, 23 bp, Artificial Sequence
  Synthetic
gacgtagagcucacattcucgaa

SEQ ID NO: 82774 - DNA, 26 bp, Artificial Sequence
  Synthetic
tgattctggtuctcttaccctuacct

SEQ ID NO: 82775 - DNA, 24 bp, Artificial Sequence
  Synthetic
cgaattgaugtctgcctucaaaca

SEQ ID NO: 82776 - DNA, 22 bp, Artificial Sequence
  Synthetic
agaaccatggaguctggcagua

SEQ ID NO: 82777 - DNA, 20 bp, Artificial Sequence
  Synthetic
gguctctcaggucgagcagt

SEQ ID NO: 82778 - DNA, 28 bp, Artificial Sequence
  Synthetic
tcacttgcagtcuatactcaccatcuat

SEQ ID NO: 82779 - DNA, 27 bp, Artificial Sequence
  Synthetic
gaaataaacctuagctgctgauaggct

SEQ ID NO: 82780 - DNA, 24 bp, Artificial Sequence
  Synthetic
gutaagacaccuccacaaccaaca

SEQ ID NO: 82781 - DNA, 20 bp, Artificial Sequence
  Synthetic
agggcaucgagtggaactuc

SEQ ID NO: 82782 - DNA, 21 bp, Artificial Sequence
  Synthetic
tggcuggaaaagcaatcguca

SEQ ID NO: 82783 - DNA, 28 bp, Artificial Sequence
  Synthetic
tctttttcttactugcttctgtcacuca

SEQ ID NO: 82784 - DNA, 21 bp, Artificial Sequence
  Synthetic
gggttacuggaggctacagug

SEQ ID NO: 82785 - DNA, 25 bp, Artificial Sequence
  Synthetic
ctgcacaagcutctacttcctauct

SEQ ID NO: 82786 - DNA, 26 bp, Artificial Sequence
  Synthetic
gctcaaagatuctattgtgcagtugt

SEQ ID NO: 82787 - DNA, 26 bp, Artificial Sequence
  Synthetic
caactgtcacaaucacctcatcauct

SEQ ID NO: 82788 - DNA, 27 bp, Artificial Sequence
  Synthetic
gcctgtcttuaagttgaacatgaucct

SEQ ID NO: 82789 - DNA, 25 bp, Artificial Sequence
  Synthetic
gacaagcaacacuatccgtgtttuc

SEQ ID NO: 82790 - DNA, 25 bp, Artificial Sequence
  Synthetic
gatcatttucaggaggacucccaag

SEQ ID NO: 82791 - DNA, 25 bp, Artificial Sequence
  Synthetic
ctgtgcctctucaatccattcttut

SEQ ID NO: 82792 - DNA, 19 bp, Artificial Sequence
  Synthetic
caagacaguccccgcuaca

SEQ ID NO: 82793 - DNA, 19 bp, Artificial Sequence
  Synthetic
aggaggtugtggcacucag

SEQ ID NO: 82794 - DNA, 18 bp, Artificial Sequence
  Synthetic
gggucacacgctgucaag

SEQ ID NO: 82795 - DNA, 28 bp, Artificial Sequence
  Synthetic
aattacaagaauggatcagacgauggag

SEQ ID NO: 82796 - DNA, 22 bp, Artificial Sequence
  Synthetic
gcctttgggaaggucttcctug

SEQ ID NO: 82797 - DNA, 22 bp, Artificial Sequence
  Synthetic
cactctgucctgatgtgaugga

SEQ ID NO: 82798 - DNA, 27 bp, Artificial Sequence
  Synthetic
gcatttgtggatuccatagaccgauaa

SEQ ID NO: 82799 - DNA, 23 bp, Artificial Sequence
  Synthetic
atgttgaatcugttcctgcuggt

SEQ ID NO: 82800 - DNA, 19 bp, Artificial Sequence
  Synthetic
ggucgaggccaaagucgat

SEQ ID NO: 82801 - DNA, 25 bp, Artificial Sequence
  Synthetic
ctgacattgutttctctcctugcag

SEQ ID NO: 82802 - DNA, 22 bp, Artificial Sequence
  Synthetic
gctccatcuggcacttcagaua

SEQ ID NO: 82803 - DNA, 17 bp, Artificial Sequence
  Synthetic
caucgccgcugcagaag

SEQ ID NO: 82804 - DNA, 21 bp, Artificial Sequence
  Synthetic
gctttugggcttgcttugagt

SEQ ID NO: 82805 - DNA, 20 bp, Artificial Sequence
  Synthetic
tttacaggacguccgugcat

SEQ ID NO: 82806 - DNA, 22 bp, Artificial Sequence
  Synthetic
ctgttctutgcttgtucggcaa

SEQ ID NO: 82807 - DNA, 22 bp, Artificial Sequence
  Synthetic
ccagctgcauctctccuacaat

SEQ ID NO: 82808 - DNA, 20 bp, Artificial Sequence
  Synthetic
ccgccacuggttguaccaaa

SEQ ID NO: 82809 - DNA, 24 bp, Artificial Sequence
  Synthetic
ccaacccaguatacctgagguaac

SEQ ID NO: 82810 - DNA, 17 bp, Artificial Sequence
  Synthetic
gggctgutctcggugct

SEQ ID NO: 82811 - DNA, 25 bp, Artificial Sequence
  Synthetic
cgatgagaagaagaaacugcgucat

SEQ ID NO: 82812 - DNA, 21 bp, Artificial Sequence
  Synthetic
ccaggaguttguaggcaagga

SEQ ID NO: 82813 - DNA, 28 bp, Artificial Sequence
  Synthetic
gctgcgagtuataatgtgttacaaucat

SEQ ID NO: 82814 - DNA, 20 bp, Artificial Sequence
  Synthetic
cctcgctcucactgttgcug

SEQ ID NO: 82815 - DNA, 25 bp, Artificial Sequence
  Synthetic
cgaagctgugctacacuacaaacat

SEQ ID NO: 82816 - DNA, 23 bp, Artificial Sequence
  Synthetic
aggcagaaagagugaggaggtua

SEQ ID NO: 82817 - DNA, 27 bp, Artificial Sequence
  Synthetic
gattaattggctuctctgcttcttugt

SEQ ID NO: 82818 - DNA, 22 bp, Artificial Sequence
  Synthetic
agaacaaaucacctugccacca

SEQ ID NO: 82819 - DNA, 26 bp, Artificial Sequence
  Synthetic
agaattuagaagacaccgugcagaat

SEQ ID NO: 82820 - DNA, 21 bp, Artificial Sequence
  Synthetic
tgggtguaggttccaugggat

SEQ ID NO: 82821 - DNA, 21 bp, Artificial Sequence
  Synthetic
ctgctccugtgaaggtacuca

SEQ ID NO: 82822 - DNA, 21 bp, Artificial Sequence
  Synthetic
gggagctguccagtgacttug

SEQ ID NO: 82823 - DNA, 20 bp, Artificial Sequence
  Synthetic
gcgagtgcucgtgtgagaug

SEQ ID NO: 82824 - DNA, 23 bp, Artificial Sequence
  Synthetic
gctgauagccaaactgcugaact

SEQ ID NO: 82825 - DNA, 28 bp, Artificial Sequence
  Synthetic
ccaggtttaagaautgtttaagcugcat

SEQ ID NO: 82826 - DNA, 20 bp, Artificial Sequence
  Synthetic
tccaggucatugaggagggt

SEQ ID NO: 82827 - DNA, 19 bp, Artificial Sequence
  Synthetic
ccacauccaccgaggcaut

SEQ ID NO: 82828 - DNA, 23 bp, Artificial Sequence
  Synthetic
ttaaggaacacugtccatuggca

SEQ ID NO: 82829 - DNA, 27 bp, Artificial Sequence
  Synthetic
gggttcagcaaaucttctaatccauga

SEQ ID NO: 82830 - DNA, 23 bp, Artificial Sequence
  Synthetic
gctttgaatcuttggccaguacc

SEQ ID NO: 82831 - DNA, 27 bp, Artificial Sequence
  Synthetic
agagagaagguttgactgccauaaaaa

SEQ ID NO: 82832 - DNA, 21 bp, Artificial Sequence
  Synthetic
gacaaggcaguggagtcctua

SEQ ID NO: 82833 - DNA, 21 bp, Artificial Sequence
  Synthetic
ccttcacagcacuggacacuc

SEQ ID NO: 82834 - DNA, 24 bp, Artificial Sequence
  Synthetic
gcatgacgcaguttcttcttcuca

SEQ ID NO: 82835 - DNA, 21 bp, Artificial Sequence
  Synthetic
gtcacagcuccagtgtctguc

SEQ ID NO: 82836 - DNA, 18 bp, Artificial Sequence
  Synthetic
cacgcugaagguccaggt

SEQ ID NO: 82837 - DNA, 19 bp, Artificial Sequence
  Synthetic
gccagcgaaggucttcuca

SEQ ID NO: 82838 - DNA, 21 bp, Artificial Sequence
  Synthetic
ccgggacauttgcaggttuac

SEQ ID NO: 82839 - DNA, 28 bp, Artificial Sequence
  Synthetic
gtccttattcatucctgaacatgcuaga

SEQ ID NO: 82840 - DNA, 26 bp, Artificial Sequence
  Synthetic
cccaccaataaaguaacagtgcatut

SEQ ID NO: 82841 - DNA, 26 bp, Artificial Sequence
  Synthetic
aacagtagtcccuactcagtgauacc

SEQ ID NO: 82842 - DNA, 22 bp, Artificial Sequence
  Synthetic
tcccagtcuctggagagugaag

SEQ ID NO: 82843 - DNA, 23 bp, Artificial Sequence
  Synthetic
ccaggugaagaaccaugaaccag

SEQ ID NO: 82844 - DNA, 25 bp, Artificial Sequence
  Synthetic
gtgtcaattuacaggaatggtuccc

SEQ ID NO: 82845 - DNA, 18 bp, Artificial Sequence
  Synthetic
gcugccaggccttcaugt

SEQ ID NO: 82846 - DNA, 20 bp, Artificial Sequence
  Synthetic
ggcctcttcuccgtctgcua

SEQ ID NO: 82847 - DNA, 22 bp, Artificial Sequence
  Synthetic
cccagcuagaccaaaaggaguc

SEQ ID NO: 82848 - DNA, 22 bp, Artificial Sequence
  Synthetic
actttacauagccctggcucct

SEQ ID NO: 82849 - DNA, 21 bp, Artificial Sequence
  Synthetic
gtgactguctggcaucaccaa

SEQ ID NO: 82850 - DNA, 24 bp, Artificial Sequence
  Synthetic
acaggctaugtagaaccaaugcag

SEQ ID NO: 82851 - DNA, 23 bp, Artificial Sequence
  Synthetic
tttctccaaaauggctggtcgua

SEQ ID NO: 82852 - DNA, 21 bp, Artificial Sequence
  Synthetic
tcagcttugctcacgtgucaa

SEQ ID NO: 82853 - DNA, 28 bp, Artificial Sequence
  Synthetic
tgcaatttcaucttgaactucaacacaa

SEQ ID NO: 82854 - DNA, 25 bp, Artificial Sequence
  Synthetic
ctgtacagtacugaggttctcaugt

SEQ ID NO: 82855 - DNA, 22 bp, Artificial Sequence
  Synthetic
ggagacagaaagcccuguagag

SEQ ID NO: 82856 - DNA, 26 bp, Artificial Sequence
  Synthetic
cttgccaataucccttcctcttguaa

SEQ ID NO: 82857 - DNA, 23 bp, Artificial Sequence
  Synthetic
cagcagctuttggaagactugag

SEQ ID NO: 82858 - DNA, 24 bp, Artificial Sequence
  Synthetic
agaaatctcugttatgccuggcaa

SEQ ID NO: 82859 - DNA, 26 bp, Artificial Sequence
  Synthetic
aaagcacgctuagattggaatacuga

SEQ ID NO: 82860 - DNA, 20 bp, Artificial Sequence
  Synthetic
ctggagguggaacuagcaca

SEQ ID NO: 82861 - DNA, 26 bp, Artificial Sequence
  Synthetic
gttcctcccaucaaactctctgtuac

SEQ ID NO: 82862 - DNA, 24 bp, Artificial Sequence
  Synthetic
gcagcaccutttgctaaatcucac

SEQ ID NO: 82863 - DNA, 26 bp, Artificial Sequence
  Synthetic
tggtgtgacaguataagacccagtua

SEQ ID NO: 82864 - DNA, 21 bp, Artificial Sequence
  Synthetic
caagacctcutgctgcttcuc

SEQ ID NO: 82865 - DNA, 25 bp, Artificial Sequence
  Synthetic
aaatcaatccugtgttcctcucacc

SEQ ID NO: 82866 - DNA, 23 bp, Artificial Sequence
  Synthetic
gattacccaucattcctggcuga

SEQ ID NO: 82867 - DNA, 28 bp, Artificial Sequence
  Synthetic
ttattgccaaaccagaauttaccactug

SEQ ID NO: 82868 - DNA, 24 bp, Artificial Sequence
  Synthetic
tcagagutctcttcuccagcaaac

SEQ ID NO: 82869 - DNA, 28 bp, Artificial Sequence
  Synthetic
ggatttatcacaguatcaaggatgcuca

SEQ ID NO: 82870 - DNA, 20 bp, Artificial Sequence
  Synthetic
ggucagccagagggagtuct

SEQ ID NO: 82871 - DNA, 20 bp, Artificial Sequence
  Synthetic
cggctcccuttgtgcttuca

SEQ ID NO: 82872 - DNA, 22 bp, Artificial Sequence
  Synthetic
gttgggctutgcaatgtgaugt

SEQ ID NO: 82873 - DNA, 28 bp, Artificial Sequence
  Synthetic
cagacattgtcccuaaacactactgtua

SEQ ID NO: 82874 - DNA, 17 bp, Artificial Sequence
  Synthetic
gcugccaaucgcaagca

SEQ ID NO: 82875 - DNA, 18 bp, Artificial Sequence
  Synthetic
actggcccuctcctccut

SEQ ID NO: 82876 - DNA, 22 bp, Artificial Sequence
  Synthetic
agcagggugcattggatcttua

SEQ ID NO: 82877 - DNA, 20 bp, Artificial Sequence
  Synthetic
ggtaccuggagagcugcaac

SEQ ID NO: 82878 - DNA, 20 bp, Artificial Sequence
  Synthetic
gagaccacuggtgtcucaca

SEQ ID NO: 82879 - DNA, 27 bp, Artificial Sequence
  Synthetic
cctaggcttucattttcactccauacc

SEQ ID NO: 82880 - DNA, 19 bp, Artificial Sequence
  Synthetic
gaggaaggcuagccagcut

SEQ ID NO: 82881 - DNA, 21 bp, Artificial Sequence
  Synthetic
ggtgaugtctggucagggaat

SEQ ID NO: 82882 - DNA, 22 bp, Artificial Sequence
  Synthetic
gaggcacauttacgcttagugg

SEQ ID NO: 82883 - DNA, 21 bp, Artificial Sequence
  Synthetic
ctggacagcaucctcagguaa

SEQ ID NO: 82884 - DNA, 27 bp, Artificial Sequence
  Synthetic
gtgatcttccaaauctacagagtuccc

SEQ ID NO: 82885 - DNA, 28 bp, Artificial Sequence
  Synthetic
agtcctgtacutctggatcttuaaccat

SEQ ID NO: 82886 - DNA, 23 bp, Artificial Sequence
  Synthetic
gcatgccagugtgtgaattugat

SEQ ID NO: 82887 - DNA, 28 bp, Artificial Sequence
  Synthetic
agacatacattgcuctactatgagguga

SEQ ID NO: 82888 - DNA, 27 bp, Artificial Sequence
  Synthetic
tttttcagggacaagaaucctucaaga

SEQ ID NO: 82889 - DNA, 23 bp, Artificial Sequence
  Synthetic
aaaccagacacgugcaattugag

SEQ ID NO: 82890 - DNA, 25 bp, Artificial Sequence
  Synthetic
catacgaaucaggagaataacgugt

SEQ ID NO: 82891 - DNA, 20 bp, Artificial Sequence
  Synthetic
gcacaaccagugcacctuca

SEQ ID NO: 82892 - DNA, 23 bp, Artificial Sequence
  Synthetic
ctgtggatcutagggaccucaat

SEQ ID NO: 82893 - DNA, 29 bp, Artificial Sequence
  Synthetic
acaggtagaagacugcactatagtaauga

SEQ ID NO: 82894 - DNA, 27 bp, Artificial Sequence
  Synthetic
gtcactagttguactgaaatgccaaug

SEQ ID NO: 82895 - DNA, 27 bp, Artificial Sequence
  Synthetic
ggctgggaacauttgtcatttattcut

SEQ ID NO: 82896 - DNA, 23 bp, Artificial Sequence
  Synthetic
agagaagtugagaggacccauga

SEQ ID NO: 82897 - DNA, 21 bp, Artificial Sequence
  Synthetic
ctcaacgtguctacgaagcug

SEQ ID NO: 82898 - DNA, 27 bp, Artificial Sequence
  Synthetic
aggtaactgccuttaaggaaactugac

SEQ ID NO: 82899 - DNA, 21 bp, Artificial Sequence
  Synthetic
ttctcgcggaugaatgtucca

SEQ ID NO: 82900 - DNA, 19 bp, Artificial Sequence
  Synthetic
tggtctugcaggctgtucc

SEQ ID NO: 82901 - DNA, 20 bp, Artificial Sequence
  Synthetic
gtgtccugccacatcaucca

SEQ ID NO: 82902 - DNA, 18 bp, Artificial Sequence
  Synthetic
gcctgucgcggagagtug

SEQ ID NO: 82903 - DNA, 22 bp, Artificial Sequence
  Synthetic
gucgcugaagcagaaagacaag

SEQ ID NO: 82904 - DNA, 20 bp, Artificial Sequence
  Synthetic
catgggaggugctcauggaa

SEQ ID NO: 82905 - DNA, 22 bp, Artificial Sequence
  Synthetic
agccgcacuatactcagaucca

SEQ ID NO: 82906 - DNA, 23 bp, Artificial Sequence
  Synthetic
gautagtguggccagggaagaaa

SEQ ID NO: 82907 - DNA, 23 bp, Artificial Sequence
  Synthetic
cctcagcuctgcaaugagaacag

SEQ ID NO: 82908 - DNA, 23 bp, Artificial Sequence
  Synthetic
ggccaaagaacugaagaagguga

SEQ ID NO: 82909 - DNA, 21 bp, Artificial Sequence
  Synthetic
accccaggcaaucaggauact

SEQ ID NO: 82910 - DNA, 25 bp, Artificial Sequence
  Synthetic
actcaggtuagaggaagaacuggaa

SEQ ID NO: 82911 - DNA, 22 bp, Artificial Sequence
  Synthetic
ccctatgacacucaaccctgug

SEQ ID NO: 82912 - DNA, 30 bp, Artificial Sequence
  Synthetic
actttttgcaaaugtttaacataggugaca

SEQ ID NO: 82913 - DNA, 21 bp, Artificial Sequence
  Synthetic
aggtttcctcuggtcctggua

SEQ ID NO: 82914 - DNA, 25 bp, Artificial Sequence
  Synthetic
gcagtatagagcgugcagataauga

SEQ ID NO: 82915 - DNA, 23 bp, Artificial Sequence
  Synthetic
cauacaagucaacaacccccaca

SEQ ID NO: 82916 - DNA, 22 bp, Artificial Sequence
  Synthetic
gcagcaagauttccttcagcut

SEQ ID NO: 82917 - DNA, 21 bp, Artificial Sequence
  Synthetic
aggaaagcacucaagaugcca

SEQ ID NO: 82918 - DNA, 22 bp, Artificial Sequence
  Synthetic
ccagauagcaccgagtcugaac

SEQ ID NO: 82919 - DNA, 23 bp, Artificial Sequence
  Synthetic
gaccgugaagaatgacaacucct

SEQ ID NO: 82920 - DNA, 17 bp, Artificial Sequence
  Synthetic
gccgcgcuacucacgaa

SEQ ID NO: 82921 - DNA, 17 bp, Artificial Sequence
  Synthetic
gcctucactgcguccct

SEQ ID NO: 82922 - DNA, 23 bp, Artificial Sequence
  Synthetic
ctcttccuccatgctttcuccat

SEQ ID NO: 82923 - DNA, 28 bp, Artificial Sequence
  Synthetic
gactatgaagccauttgtaaggtaccuc

SEQ ID NO: 82924 - DNA, 22 bp, Artificial Sequence
  Synthetic
tcgattgucttcccugaggact

SEQ ID NO: 82925 - DNA, 28 bp, Artificial Sequence
  Synthetic
tgagagataacgaaugggaaactttuga

SEQ ID NO: 82926 - DNA, 23 bp, Artificial Sequence
  Synthetic
tgcaaacaaggutttccatccug

SEQ ID NO: 82927 - DNA, 22 bp, Artificial Sequence
  Synthetic
ttacgcagucggcuagaagaag

SEQ ID NO: 82928 - DNA, 19 bp, Artificial Sequence
  Synthetic
gcactuggcctgtgctuct

SEQ ID NO: 82929 - DNA, 20 bp, Artificial Sequence
  Synthetic
acacggagcugaucaacgac

SEQ ID NO: 82930 - DNA, 19 bp, Artificial Sequence
  Synthetic
tgcaggtuggccttctuca

SEQ ID NO: 82931 - DNA, 18 bp, Artificial Sequence
  Synthetic
aggtgtguccccagggua

SEQ ID NO: 82932 - DNA, 22 bp, Artificial Sequence
  Synthetic
tggttuacaaccaccccttuga

SEQ ID NO: 82933 - DNA, 24 bp, Artificial Sequence
  Synthetic
acacatggcaguagtgactctuac

SEQ ID NO: 82934 - DNA, 24 bp, Artificial Sequence
  Synthetic
agtcaatgaaaucagggccttuga

SEQ ID NO: 82935 - DNA, 23 bp, Artificial Sequence
  Synthetic
cgaagacguaggtaccaauccac

SEQ ID NO: 82936 - DNA, 23 bp, Artificial Sequence
  Synthetic
gccatttcacgaugacctcucat

SEQ ID NO: 82937 - DNA, 22 bp, Artificial Sequence
  Synthetic
gcatcctgacugggttttccuc

SEQ ID NO: 82938 - DNA, 21 bp, Artificial Sequence
  Synthetic
ccaccuagagccagcacctua

SEQ ID NO: 82939 - DNA, 25 bp, Artificial Sequence
  Synthetic
tgtgaaaaguggaccctggttaaug

SEQ ID NO: 82940 - DNA, 20 bp, Artificial Sequence
  Synthetic
acccgcccugacacactaua

SEQ ID NO: 82941 - DNA, 22 bp, Artificial Sequence
  Synthetic
caaagatgacuggctggaaugg

SEQ ID NO: 82942 - DNA, 27 bp, Artificial Sequence
  Synthetic
gctgcttccaugtgtcataaagactua

SEQ ID NO: 82943 - DNA, 29 bp, Artificial Sequence
  Synthetic
tctgaaaccgacaguactgacatttatut

SEQ ID NO: 82944 - DNA, 23 bp, Artificial Sequence
  Synthetic
tgtctttcagutctggatgugct

SEQ ID NO: 82945 - DNA, 28 bp, Artificial Sequence
  Synthetic
aacaatgaaatttcutccacaggcauac

SEQ ID NO: 82946 - DNA, 23 bp, Artificial Sequence
  Synthetic
ggagatacttcuggccaccttuc

SEQ ID NO: 82947 - DNA, 22 bp, Artificial Sequence
  Synthetic
gtttgagugctggguggagaat

SEQ ID NO: 82948 - DNA, 22 bp, Artificial Sequence
  Synthetic
atgatgagtccutcagcagcuc

SEQ ID NO: 82949 - DNA, 26 bp, Artificial Sequence
  Synthetic
aattggccctugaaactgattgttut

SEQ ID NO: 82950 - DNA, 24 bp, Artificial Sequence
  Synthetic
cgaaagcagaaccuggagatugag

SEQ ID NO: 82951 - DNA, 21 bp, Artificial Sequence
  Synthetic
ccattgaguggtcacccagua

SEQ ID NO: 82952 - DNA, 32 bp, Artificial Sequence
  Synthetic
aatcttttataccaauatgtgtagctcaugat

SEQ ID NO: 82953 - DNA, 23 bp, Artificial Sequence
  Synthetic
gtgctgttgcaugcatgagtaug

SEQ ID NO: 82954 - DNA, 27 bp, Artificial Sequence
  Synthetic
tgatcttaacugtcggauccacaaaaa

SEQ ID NO: 82955 - DNA, 21 bp, Artificial Sequence
  Synthetic
tccactgguctggcagctaua

SEQ ID NO: 82956 - DNA, 23 bp, Artificial Sequence
  Synthetic
cagcatacucatgcaugcaacag

SEQ ID NO: 82957 - DNA, 28 bp, Artificial Sequence
  Synthetic
tgcgtgctcuaaaaacattcatattgut

SEQ ID NO: 82958 - DNA, 27 bp, Artificial Sequence
  Synthetic
ctgacaacauaaaccacaacaucagag

SEQ ID NO: 82959 - DNA, 27 bp, Artificial Sequence
  Synthetic
ccatccagggcautgtcttaagttaua

SEQ ID NO: 82960 - DNA, 21 bp, Artificial Sequence
  Synthetic
cgcuccaagcttctuccaaga

SEQ ID NO: 82961 - DNA, 24 bp, Artificial Sequence
  Synthetic
ggctaatccacuttccttccaugt

SEQ ID NO: 82962 - DNA, 21 bp, Artificial Sequence
  Synthetic
ccatcttggcutgggtcucat

SEQ ID NO: 82963 - DNA, 29 bp, Artificial Sequence
  Synthetic
ggaagattgguagtttaaggagattugga

SEQ ID NO: 82964 - DNA, 22 bp, Artificial Sequence
  Synthetic
ccccttcccugtttatccugaa

SEQ ID NO: 82965 - DNA, 20 bp, Artificial Sequence
  Synthetic
gcaugggaatgcaucagcct

SEQ ID NO: 82966 - DNA, 22 bp, Artificial Sequence
  Synthetic
ggaggtttctucagtggcctug

SEQ ID NO: 82967 - DNA, 27 bp, Artificial Sequence
  Synthetic
aacaccctaagaaugacaatggcatua

SEQ ID NO: 82968 - DNA, 27 bp, Artificial Sequence
  Synthetic
tgctatgtcaguctgaaactttctugt

SEQ ID NO: 82969 - DNA, 23 bp, Artificial Sequence
  Synthetic
gctgtucaagaagagccttcuca

SEQ ID NO: 82970 - DNA, 26 bp, Artificial Sequence
  Synthetic
tcccattucgaagattgguaaaacca

SEQ ID NO: 82971 - DNA, 21 bp, Artificial Sequence
  Synthetic
gaatggagggacutgtgcugt

SEQ ID NO: 82972 - DNA, 20 bp, Artificial Sequence
  Synthetic
gacctccugctgttgctcut

SEQ ID NO: 82973 - DNA, 24 bp, Artificial Sequence
  Synthetic
ctcagtgaagaugaagctggtcuc

SEQ ID NO: 82974 - DNA, 21 bp, Artificial Sequence
  Synthetic
tgtgtggcucctggatcugat

SEQ ID NO: 82975 - DNA, 27 bp, Artificial Sequence
  Synthetic
gtatcggaagaauaacgatgactcugg

SEQ ID NO: 82976 - DNA, 25 bp, Artificial Sequence
  Synthetic
ccacaacaguagaagggagaaauga

SEQ ID NO: 82977 - DNA, 28 bp, Artificial Sequence
  Synthetic
gggctccaucagttaaataatgtugact

SEQ ID NO: 82978 - DNA, 21 bp, Artificial Sequence
  Synthetic
cctucaagcccccttcucaac

SEQ ID NO: 82979 - DNA, 21 bp, Artificial Sequence
  Synthetic
gcacaaccucaaggagcgtua

SEQ ID NO: 82980 - DNA, 23 bp, Artificial Sequence
  Synthetic
gtctgtctctucacccacacauc

SEQ ID NO: 82981 - DNA, 20 bp, Artificial Sequence
  Synthetic
gttctgcucactgtggugct

SEQ ID NO: 82982 - DNA, 20 bp, Artificial Sequence
  Synthetic
tcaatggcuccgtgcucaat

SEQ ID NO: 82983 - DNA, 21 bp, Artificial Sequence
  Synthetic
cgtgtagtugccgttgtugac

SEQ ID NO: 82984 - DNA, 24 bp, Artificial Sequence
  Synthetic
tgaaaccaucaggcatgttacugg

SEQ ID NO: 82985 - DNA, 23 bp, Artificial Sequence
  Synthetic
ttgcagtgacuacttctgcctut

SEQ ID NO: 82986 - DNA, 17 bp, Artificial Sequence
  Synthetic
gggtgtcugcgccucaa

SEQ ID NO: 82987 - DNA, 18 bp, Artificial Sequence
  Synthetic
gggcagggutcaggaugg

SEQ ID NO: 82988 - DNA, 25 bp, Artificial Sequence
  Synthetic
acttacgtagaugagccctgaguag

SEQ ID NO: 82989 - DNA, 22 bp, Artificial Sequence
  Synthetic
gggaagaaggugaaggugaaca

SEQ ID NO: 82990 - DNA, 21 bp, Artificial Sequence
  Synthetic
ccagcutccugaagggaggat

SEQ ID NO: 82991 - DNA, 21 bp, Artificial Sequence
  Synthetic
ctgggcauaggtgatcuccac

SEQ ID NO: 82992 - DNA, 23 bp, Artificial Sequence
  Synthetic
ggcggcugcaaagaaaaauaact

SEQ ID NO: 82993 - DNA, 21 bp, Artificial Sequence
  Synthetic
gcaggtagtgutcgaggccua

SEQ ID NO: 82994 - DNA, 21 bp, Artificial Sequence
  Synthetic
gggagugaacacgtcctcaut

SEQ ID NO: 82995 - DNA, 20 bp, Artificial Sequence
  Synthetic
gcaagguagccttcgtgtug

SEQ ID NO: 82996 - DNA, 20 bp, Artificial Sequence
  Synthetic
gggucgcgcattttctucaa

SEQ ID NO: 82997 - DNA, 18 bp, Artificial Sequence
  Synthetic
gucgaaaaggcgcacugt

SEQ ID NO: 82998 - DNA, 23 bp, Artificial Sequence
  Synthetic
tugtcttugaaccacaggacagt

SEQ ID NO: 82999 - DNA, 17 bp, Artificial Sequence
  Synthetic
cctgacggucaccccut

SEQ ID NO: 83000 - DNA, 20 bp, Artificial Sequence
  Synthetic
gcttcgugcgcttcttucag

SEQ ID NO: 83001 - DNA, 19 bp, Artificial Sequence
  Synthetic
ccggccccaugtactugat

SEQ ID NO: 83002 - DNA, 19 bp, Artificial Sequence
  Synthetic
cccgggaggugtucaagac

SEQ ID NO: 83003 - DNA, 19 bp, Artificial Sequence
  Synthetic
cacuctcugaggcgggaaa

SEQ ID NO: 83004 - DNA, 22 bp, Artificial Sequence
  Synthetic
cacttacgugcgtactttgugg

SEQ ID NO: 83005 - DNA, 20 bp, Artificial Sequence
  Synthetic
cactccccuatccgcttcug

SEQ ID NO: 83006 - DNA, 21 bp, Artificial Sequence
  Synthetic
ggacatgucaaccgtcccaut

SEQ ID NO: 83007 - DNA, 21 bp, Artificial Sequence
  Synthetic
cgacacagutatugcccggat

SEQ ID NO: 83008 - DNA, 24 bp, Artificial Sequence
  Synthetic
ggtatcugctgaagguaggaaacc

SEQ ID NO: 83009 - DNA, 21 bp, Artificial Sequence
  Synthetic
ggagaggacugccagtacuca

SEQ ID NO: 83010 - DNA, 23 bp, Artificial Sequence
  Synthetic
aaacaagagaaggcugtguggat

SEQ ID NO: 83011 - DNA, 22 bp, Artificial Sequence
  Synthetic
acaucgctgaagucacacagac

SEQ ID NO: 83012 - DNA, 24 bp, Artificial Sequence
  Synthetic
ggttcatctuctggatgtcaucct

SEQ ID NO: 83013 - DNA, 20 bp, Artificial Sequence
  Synthetic
gccaagaagcuggtaugggt

SEQ ID NO: 83014 - DNA, 21 bp, Artificial Sequence
  Synthetic
catggtgacauactccccgut

SEQ ID NO: 83015 - DNA, 22 bp, Artificial Sequence
  Synthetic
gccttggtcucctggatctcua

SEQ ID NO: 83016 - DNA, 28 bp, Artificial Sequence
  Synthetic
acattctgcacautcagtttctcttuct

SEQ ID NO: 83017 - DNA, 28 bp, Artificial Sequence
  Synthetic
ccagcagcacaucaatagtctaacauac

SEQ ID NO: 83018 - DNA, 23 bp, Artificial Sequence
  Synthetic
agaggagaguctccaaaagguga

SEQ ID NO: 83019 - DNA, 25 bp, Artificial Sequence
  Synthetic
cgagctctgugttacaaatgcatug

SEQ ID NO: 83020 - DNA, 21 bp, Artificial Sequence
  Synthetic
cgctcaauagaaagcgctuca

SEQ ID NO: 83021 - DNA, 17 bp, Artificial Sequence
  Synthetic
tuccacacggcguccaa

SEQ ID NO: 83022 - DNA, 22 bp, Artificial Sequence
  Synthetic
tcaaagccacucttgucggaag

SEQ ID NO: 83023 - DNA, 21 bp, Artificial Sequence
  Synthetic
cccgcttaggucctggctaua

SEQ ID NO: 83024 - DNA, 26 bp, Artificial Sequence
  Synthetic
ccatgaatucagccaagttuaagagg

SEQ ID NO: 83025 - DNA, 23 bp, Artificial Sequence
  Synthetic
attttccaccutctctgcctuca

SEQ ID NO: 83026 - DNA, 17 bp, Artificial Sequence
  Synthetic
gcacgggcgugcttuag

SEQ ID NO: 83027 - DNA, 18 bp, Artificial Sequence
  Synthetic
ccccacccacucatccug

SEQ ID NO: 83028 - DNA, 22 bp, Artificial Sequence
  Synthetic
gctgttcctguagcaggttcut

SEQ ID NO: 83029 - DNA, 25 bp, Artificial Sequence
  Synthetic
gaaggcagagaaugagctuaaggag

SEQ ID NO: 83030 - DNA, 20 bp, Artificial Sequence
  Synthetic
ccuttggagauggacgagca

SEQ ID NO: 83031 - DNA, 27 bp, Artificial Sequence
  Synthetic
ggtctgtgatggucataatttgctgua

SEQ ID NO: 83032 - DNA, 29 bp, Artificial Sequence
  Synthetic
gaggtgaaagutgtaaatctttguaacac

SEQ ID NO: 83033 - DNA, 25 bp, Artificial Sequence
  Synthetic
tttgcagaggacauaatucgacact

SEQ ID NO: 83034 - DNA, 26 bp, Artificial Sequence
  Synthetic
aaggcttgaagagugtcgaattaugt

SEQ ID NO: 83035 - DNA, 28 bp, Artificial Sequence
  Synthetic
gctcattaatacucttccttaccauccc

SEQ ID NO: 83036 - DNA, 20 bp, Artificial Sequence
  Synthetic
ggcgaccuctctctcccuaa

SEQ ID NO: 83037 - DNA, 25 bp, Artificial Sequence
  Synthetic
tgagacuaaggaaagagccuggaaa

SEQ ID NO: 83038 - DNA, 24 bp, Artificial Sequence
  Synthetic
ggaagcaggacautggagacatut

SEQ ID NO: 83039 - DNA, 21 bp, Artificial Sequence
  Synthetic
cattgtutcccccugcaagag

SEQ ID NO: 83040 - DNA, 21 bp, Artificial Sequence
  Synthetic
gtacctgcgagugcttctgut

SEQ ID NO: 83041 - DNA, 24 bp, Artificial Sequence
  Synthetic
gccacaaaaacaaaugatgggcua

SEQ ID NO: 83042 - DNA, 28 bp, Artificial Sequence
  Synthetic
gacatcatgucagagttactgttucaga

SEQ ID NO: 83043 - DNA, 26 bp, Artificial Sequence
  Synthetic
tggctttcaguagttttcatggtuca

SEQ ID NO: 83044 - DNA, 28 bp, Artificial Sequence
  Synthetic
accttttgtattutcctgttctcucacc

SEQ ID NO: 83045 - DNA, 20 bp, Artificial Sequence
  Synthetic
ggaaggacuaggugcaccat

SEQ ID NO: 83046 - DNA, 21 bp, Artificial Sequence
  Synthetic
gcttctctucacgcacuccaa

SEQ ID NO: 83047 - DNA, 17 bp, Artificial Sequence
  Synthetic
gcuggcggcctucagag

SEQ ID NO: 83048 - DNA, 21 bp, Artificial Sequence
  Synthetic
ctugccacgaaaaccgugaaa

SEQ ID NO: 83049 - DNA, 22 bp, Artificial Sequence
  Synthetic
cctgtgacucagacagctcaua

SEQ ID NO: 83050 - DNA, 21 bp, Artificial Sequence
  Synthetic
cctctugggacacaccactua

SEQ ID NO: 83051 - DNA, 23 bp, Artificial Sequence
  Synthetic
tcagaaggaacucaugacagcac

SEQ ID NO: 83052 - DNA, 18 bp, Artificial Sequence
  Synthetic
ggtccauggagccugcac

SEQ ID NO: 83053 - DNA, 23 bp, Artificial Sequence
  Synthetic
gcttaaccccaucatccccuaac

SEQ ID NO: 83054 - DNA, 21 bp, Artificial Sequence
  Synthetic
ggaggtaccutggcattgugg

SEQ ID NO: 83055 - DNA, 21 bp, Artificial Sequence
  Synthetic
tgtcuccccaaagagggacut

SEQ ID NO: 83056 - DNA, 27 bp, Artificial Sequence
  Synthetic
gaaaaugaagaattgcauaaccagcga

SEQ ID NO: 83057 - DNA, 23 bp, Artificial Sequence
  Synthetic
gggtacgaguatgtcucacacat

SEQ ID NO: 83058 - DNA, 21 bp, Artificial Sequence
  Synthetic
cgccttaccugctgctcatua

SEQ ID NO: 83059 - DNA, 28 bp, Artificial Sequence
  Synthetic
caactcatgauacagaccccuaaagaag

SEQ ID NO: 83060 - DNA, 21 bp, Artificial Sequence
  Synthetic
gtcgaagcutgagctcucgaa

SEQ ID NO: 83061 - DNA, 21 bp, Artificial Sequence
  Synthetic
ggccacacuctgggactaaug

SEQ ID NO: 83062 - DNA, 21 bp, Artificial Sequence
  Synthetic
gctttgtccucgttccagtug

SEQ ID NO: 83063 - DNA, 22 bp, Artificial Sequence
  Synthetic
actgatgatgugccttccctug

SEQ ID NO: 83064 - DNA, 20 bp, Artificial Sequence
  Synthetic
ggtcaagacugtggctguga

SEQ ID NO: 83065 - DNA, 21 bp, Artificial Sequence
  Synthetic
ccagtcatcugcagcagcuac

SEQ ID NO: 83066 - DNA, 22 bp, Artificial Sequence
  Synthetic
gtggtcaggacautagcaccut

SEQ ID NO: 83067 - DNA, 29 bp, Artificial Sequence
  Synthetic
catgagtttgcagugattttgctattcua

SEQ ID NO: 83068 - DNA, 28 bp, Artificial Sequence
  Synthetic
agagtctuggccaaacctataauacaga

SEQ ID NO: 83069 - DNA, 24 bp, Artificial Sequence
  Synthetic
cttcattgacugccaaagaggaug

SEQ ID NO: 83070 - DNA, 20 bp, Artificial Sequence
  Synthetic
catcctguccctgagtggug

SEQ ID NO: 83071 - DNA, 21 bp, Artificial Sequence
  Synthetic
ttacgggutctggtcaugcaa

SEQ ID NO: 83072 - DNA, 24 bp, Artificial Sequence
  Synthetic
ctaatgtggauctgggtatgcuga

SEQ ID NO: 83073 - DNA, 28 bp, Artificial Sequence
  Synthetic
gtgatcatagtucctgcatcttccuaag

SEQ ID NO: 83074 - DNA, 20 bp, Artificial Sequence
  Synthetic
tcagctcautgagggcaucc

SEQ ID NO: 83075 - DNA, 24 bp, Artificial Sequence
  Synthetic
gtttgtagagggutggcaggauaa

SEQ ID NO: 83076 - DNA, 20 bp, Artificial Sequence
  Synthetic
gccacacacguguacaaggt

SEQ ID NO: 83077 - DNA, 21 bp, Artificial Sequence
  Synthetic
caccatgutcatccuggagca

SEQ ID NO: 83078 - DNA, 22 bp, Artificial Sequence
  Synthetic
catcuagggcacagcuacacat

SEQ ID NO: 83079 - DNA, 23 bp, Artificial Sequence
  Synthetic
acactatagggcutgggtctcug

SEQ ID NO: 83080 - DNA, 23 bp, Artificial Sequence
  Synthetic
gctgaggaagcagcutcttcaua

SEQ ID NO: 83081 - DNA, 28 bp, Artificial Sequence
  Synthetic
caaagattgctgaauactctggtccuaa

SEQ ID NO: 83082 - DNA, 22 bp, Artificial Sequence
  Synthetic
gccgaaguctccttttcuccac

SEQ ID NO: 83083 - DNA, 25 bp, Artificial Sequence
  Synthetic
tggtggccagagcutatattttcut

SEQ ID NO: 83084 - DNA, 27 bp, Artificial Sequence
  Synthetic
ggtagatttctuactgttgtcctucct

SEQ ID NO: 83085 - DNA, 28 bp, Artificial Sequence
  Synthetic
tgccaaaaatagacuaagaggagtgtuc

SEQ ID NO: 83086 - DNA, 18 bp, Artificial Sequence
  Synthetic
ctcgcgcuggtactccuc

SEQ ID NO: 83087 - DNA, 23 bp, Artificial Sequence
  Synthetic
ggctccttgucttctgactucat

SEQ ID NO: 83088 - DNA, 21 bp, Artificial Sequence
  Synthetic
tgaaagcugctgacagugagt

SEQ ID NO: 83089 - DNA, 25 bp, Artificial Sequence
  Synthetic
ggaaugagctatucccaggaagaag

SEQ ID NO: 83090 - DNA, 19 bp, Artificial Sequence
  Synthetic
guccaccttcugggaacct

SEQ ID NO: 83091 - DNA, 22 bp, Artificial Sequence
  Synthetic
gtccatggucctttgtgtcucc

SEQ ID NO: 83092 - DNA, 25 bp, Artificial Sequence
  Synthetic
ctttcaacttcgguatcacggatuc

SEQ ID NO: 83093 - DNA, 26 bp, Artificial Sequence
  Synthetic
ggagcatccguctaaaactaguacaa

SEQ ID NO: 83094 - DNA, 29 bp, Artificial Sequence
  Synthetic
catggcatagaaaaaugtgtaacttugga

SEQ ID NO: 83095 - DNA, 28 bp, Artificial Sequence
  Synthetic
gtagaugaatcagatguggaagaagaca

SEQ ID NO: 83096 - DNA, 21 bp, Artificial Sequence
  Synthetic
accatgguggagctauaagcc

SEQ ID NO: 83097 - DNA, 23 bp, Artificial Sequence
  Synthetic
gacatagucagcgaguacacaca

SEQ ID NO: 83098 - DNA, 19 bp, Artificial Sequence
  Synthetic
ctccuccccacagaacugg

SEQ ID NO: 83099 - DNA, 19 bp, Artificial Sequence
  Synthetic
aggagcugcagtccaagug

SEQ ID NO: 83100 - DNA, 19 bp, Artificial Sequence
  Synthetic
caccugcagcttguggact

SEQ ID NO: 83101 - DNA, 22 bp, Artificial Sequence
  Synthetic
ccaagcaggagguggaacauaa

SEQ ID NO: 83102 - DNA, 24 bp, Artificial Sequence
  Synthetic
gcaaaggagcagucttcaactuct

SEQ ID NO: 83103 - DNA, 29 bp, Artificial Sequence
  Synthetic
caggtatugggaaagcataatgttuaagt

SEQ ID NO: 83104 - DNA, 27 bp, Artificial Sequence
  Synthetic
ttctgttttccuaaaaggcactugaga

SEQ ID NO: 83105 - DNA, 26 bp, Artificial Sequence
  Synthetic
acactgauacccaaaatgaaugcact

SEQ ID NO: 83106 - DNA, 21 bp, Artificial Sequence
  Synthetic
tcctcagcuaccaagctagut

SEQ ID NO: 83107 - DNA, 26 bp, Artificial Sequence
  Synthetic
caggaaaaccaccutctcaaagauga

SEQ ID NO: 83108 - DNA, 20 bp, Artificial Sequence
  Synthetic
gcgccuccagcttcttctuc

SEQ ID NO: 83109 - DNA, 21 bp, Artificial Sequence
  Synthetic
gttatcccucccctctgctuc

SEQ ID NO: 83110 - DNA, 28 bp, Artificial Sequence
  Synthetic
gctttctattatgugaacctccactgut

SEQ ID NO: 83111 - DNA, 21 bp, Artificial Sequence
  Synthetic
gugatgaagguggcagagagg

SEQ ID NO: 83112 - DNA, 27 bp, Artificial Sequence
  Synthetic
aaggccatgtuagtaaatttgcatcug

SEQ ID NO: 83113 - DNA, 24 bp, Artificial Sequence
  Synthetic
ctctcaaaccgaucagccaauact

SEQ ID NO: 83114 - DNA, 21 bp, Artificial Sequence
  Synthetic
tggaggcuacctgagtgacug

SEQ ID NO: 83115 - DNA, 20 bp, Artificial Sequence
  Synthetic
cagccaugccttgtcugact

SEQ ID NO: 83116 - DNA, 23 bp, Artificial Sequence
  Synthetic
ttctgactucttgctgctugagt

SEQ ID NO: 83117 - DNA, 29 bp, Artificial Sequence
  Synthetic
accgctttccagauatacttaagagttuc

SEQ ID NO: 83118 - DNA, 22 bp, Artificial Sequence
  Synthetic
cccacagaaacuggatgctuct

SEQ ID NO: 83119 - DNA, 21 bp, Artificial Sequence
  Synthetic
ccagtgaccguagcagaugac

SEQ ID NO: 83120 - DNA, 19 bp, Artificial Sequence
  Synthetic
gttctcccagcucctggut

SEQ ID NO: 83121 - DNA, 18 bp, Artificial Sequence
  Synthetic
ccuagaggccagggugga

SEQ ID NO: 83122 - DNA, 24 bp, Artificial Sequence
  Synthetic
agaagaugaagaggaggaggaugt

SEQ ID NO: 83123 - DNA, 29 bp, Artificial Sequence
  Synthetic
caagagctgtuctatcaccaaacuaaaag

SEQ ID NO: 83124 - DNA, 25 bp, Artificial Sequence
  Synthetic
tgttctgctgcaucttcttcttcuc

SEQ ID NO: 83125 - DNA, 19 bp, Artificial Sequence
  Synthetic
ggcagaaaccgagcugugt

SEQ ID NO: 83126 - DNA, 22 bp, Artificial Sequence
  Synthetic
gctctcctgutatgtgccctua

SEQ ID NO: 83127 - DNA, 27 bp, Artificial Sequence
  Synthetic
accttcttatagucgtctttcccauct

SEQ ID NO: 83128 - DNA, 28 bp, Artificial Sequence
  Synthetic
tgttctccttuggttcttcatcttugaa

SEQ ID NO: 83129 - DNA, 21 bp, Artificial Sequence
  Synthetic
gcuagggaggcttuagaaggg

SEQ ID NO: 83130 - DNA, 18 bp, Artificial Sequence
  Synthetic
agaggugctgcugggaga

SEQ ID NO: 83131 - DNA, 22 bp, Artificial Sequence
  Synthetic
tgaccttggutttacccgtugt

SEQ ID NO: 83132 - DNA, 21 bp, Artificial Sequence
  Synthetic
tgtttttctucaccccucgca

SEQ ID NO: 83133 - DNA, 20 bp, Artificial Sequence
  Synthetic
cccagccccucagaaaucac

SEQ ID NO: 83134 - DNA, 26 bp, Artificial Sequence
  Synthetic
gccttaccugtttcattttcuccagt

SEQ ID NO: 83135 - DNA, 26 bp, Artificial Sequence
  Synthetic
ccccagccuaaatatgtatgtctgut

SEQ ID NO: 83136 - DNA, 27 bp, Artificial Sequence
  Synthetic
actatcactcuttactcccatucagga

SEQ ID NO: 83137 - DNA, 27 bp, Artificial Sequence
  Synthetic
acctaattgguactggaacaagugaac

SEQ ID NO: 83138 - DNA, 28 bp, Artificial Sequence
  Synthetic
cagatctcttcuaattcctgcttctugg

SEQ ID NO: 83139 - DNA, 23 bp, Artificial Sequence
  Synthetic
aggagcttgugttttccactugt

SEQ ID NO: 83140 - DNA, 23 bp, Artificial Sequence
  Synthetic
gcccatcaaccutctcttttgut

SEQ ID NO: 83141 - DNA, 26 bp, Artificial Sequence
  Synthetic
gctatattuggagcagacacactugg

SEQ ID NO: 83142 - DNA, 26 bp, Artificial Sequence
  Synthetic
acagaattugacacactugcagaaac

SEQ ID NO: 83143 - DNA, 26 bp, Artificial Sequence
  Synthetic
cttccccgcutactctaatcactuac

SEQ ID NO: 83144 - DNA, 23 bp, Artificial Sequence
  Synthetic
atccacuaagaaggcattucgct

SEQ ID NO: 83145 - DNA, 27 bp, Artificial Sequence
  Synthetic
acatccttcccugtctaattgctttut

SEQ ID NO: 83146 - DNA, 20 bp, Artificial Sequence
  Synthetic
ccuacccuggaaagcacacc

SEQ ID NO: 83147 - DNA, 27 bp, Artificial Sequence
  Synthetic
tctacccaacucacagaagaaucaaac

SEQ ID NO: 83148 - DNA, 22 bp, Artificial Sequence
  Synthetic
cccacagaugacaggugagaga

SEQ ID NO: 83149 - DNA, 25 bp, Artificial Sequence
  Synthetic
ctgttagaccautttgccaaucgag

SEQ ID NO: 83150 - DNA, 20 bp, Artificial Sequence
  Synthetic
cccutcatcaucgacccagt

SEQ ID NO: 83151 - DNA, 24 bp, Artificial Sequence
  Synthetic
catgguggaaagtgtugaaaacca

SEQ ID NO: 83152 - DNA, 24 bp, Artificial Sequence
  Synthetic
gggtgataugagggatagcaaauc

SEQ ID NO: 83153 - DNA, 25 bp, Artificial Sequence
  Synthetic
tcacattccagcuttaactccagut

SEQ ID NO: 83154 - DNA, 24 bp, Artificial Sequence
  Synthetic
gacgatccauatggtctgtgaugt

SEQ ID NO: 83155 - DNA, 24 bp, Artificial Sequence
  Synthetic
ttctgtgaugggccttttctguag

SEQ ID NO: 83156 - DNA, 28 bp, Artificial Sequence
  Synthetic
acgagttaatggcaauaaagggatguaa

SEQ ID NO: 83157 - DNA, 27 bp, Artificial Sequence
  Synthetic
gtgaaaaggctucttcaagagaaagug

SEQ ID NO: 83158 - DNA, 27 bp, Artificial Sequence
  Synthetic
ttctccctttctuctgtcctctcttua

SEQ ID NO: 83159 - DNA, 21 bp, Artificial Sequence
  Synthetic
guggtgttcucccaaacagga

SEQ ID NO: 83160 - DNA, 30 bp, Artificial Sequence; identical to SEQ ID NO: 20508
  Synthetic

SEQ ID NO: 83161 - DNA, 26 bp, Artificial Sequence
  Synthetic
agctgccuggaatggatatgatuaag

SEQ ID NO: 83162 - DNA, 22 bp, Artificial Sequence
  Synthetic
ggcacagacacautgcagguaa

SEQ ID NO: 83163 - DNA, 21 bp, Artificial Sequence
  Synthetic
gtggugcacacuggaagaaag

SEQ ID NO: 83164 - DNA, 19 bp, Artificial Sequence
  Synthetic
ctggccaucacctcggtua

SEQ ID NO: 83165 - DNA, 22 bp, Artificial Sequence
  Synthetic
tgtttguggctctgaaugacca

SEQ ID NO: 83166 - DNA, 25 bp, Artificial Sequence
  Synthetic
ctcacagagtaucatgtctccctug

SEQ ID NO: 83167 - DNA, 27 bp, Artificial Sequence
  Synthetic
ccaaatuaacgcccaggaaaaauacat

SEQ ID NO: 83168 - DNA, 23 bp, Artificial Sequence
  Synthetic
tttcttacccgugttgtgtcucc

SEQ ID NO: 83169 - DNA, 23 bp, Artificial Sequence
  Synthetic
ttttccagugcactctuggacat

SEQ ID NO: 83170 - DNA, 24 bp, Artificial Sequence
  Synthetic
gctcacttgtuctttgagctgaut

SEQ ID NO: 83171 - DNA, 25 bp, Artificial Sequence
  Synthetic
accagtgtttucagtgtgacaugat

SEQ ID NO: 83172 - DNA, 23 bp, Artificial Sequence
  Synthetic
cccctcctcutcttgttctcuca

SEQ ID NO: 83173 - DNA, 21 bp, Artificial Sequence
  Synthetic
aaaaccaccucccaagagucc

SEQ ID NO: 83174 - DNA, 28 bp, Artificial Sequence
  Synthetic
gtggcagaatatutctacagggttaugt

SEQ ID NO: 83175 - DNA, 23 bp, Artificial Sequence
  Synthetic
aggcatcucgtttgtacttuggg

SEQ ID NO: 83176 - DNA, 21 bp, Artificial Sequence
  Synthetic
catggagacagugcacctgut

SEQ ID NO: 83177 - DNA, 28 bp, Artificial Sequence
  Synthetic
agtgtttctgcaaautctaagaggtuct

SEQ ID NO: 83178 - DNA, 27 bp, Artificial Sequence
  Synthetic
caggttttggguctagtaatactggut

SEQ ID NO: 83179 - DNA, 27 bp, Artificial Sequence
  Synthetic
cagtgaagaaaacugaatgggttugat

SEQ ID NO: 83180 - DNA, 25 bp, Artificial Sequence
  Synthetic
cagggcaccautctggataatgtua

SEQ ID NO: 83181 - DNA, 28 bp, Artificial Sequence
  Synthetic
gcttggctauagaaaatggcaatgatut

SEQ ID NO: 83182 - DNA, 20 bp, Artificial Sequence
  Synthetic
cgcagaagcucagctguaac

SEQ ID NO: 83183 - DNA, 22 bp, Artificial Sequence
  Synthetic
gcatcaaugagagcacaauccc

SEQ ID NO: 83184 - DNA, 20 bp, Artificial Sequence
  Synthetic
ccccacacucgaccauagga

SEQ ID NO: 83185 - DNA, 20 bp, Artificial Sequence
  Synthetic
tcctgtuggagccguacaac

SEQ ID NO: 83186 - DNA, 24 bp, Artificial Sequence
  Synthetic
gcatgacacaauaactgggcucaa

SEQ ID NO: 83187 - DNA, 19 bp, Artificial Sequence
  Synthetic
ctcctccagcucctccgua

SEQ ID NO: 83188 - DNA, 20 bp, Artificial Sequence
  Synthetic
gcucccggatcucaaacacc

SEQ ID NO: 83189 - DNA, 23 bp, Artificial Sequence
  Synthetic
tgttcaaaggcuccattgctcut

SEQ ID NO: 83190 - DNA, 17 bp, Artificial Sequence
  Synthetic
ggctgcuggcaccctua

SEQ ID NO: 83191 - DNA, 19 bp, Artificial Sequence
  Synthetic
cgtggttcugcctgaccug

SEQ ID NO: 83192 - DNA, 19 bp, Artificial Sequence
  Synthetic
ggtggtcugtctggtcguc

SEQ ID NO: 83193 - DNA, 22 bp, Artificial Sequence
  Synthetic
aggaccuggagaccaagaagut

SEQ ID NO: 83194 - DNA, 18 bp, Artificial Sequence
  Synthetic
cttcucccagccctucgg

SEQ ID NO: 83195 - DNA, 22 bp, Artificial Sequence
  Synthetic
tcctccacagcutctctuacct

SEQ ID NO: 83196 - DNA, 22 bp, Artificial Sequence
  Synthetic
gctgtagtacugcagcacttug

SEQ ID NO: 83197 - DNA, 23 bp, Artificial Sequence
  Synthetic
ttttgaggagggaaugtcauggg

SEQ ID NO: 83198 - DNA, 24 bp, Artificial Sequence
  Synthetic
ccutgcagaauccaagaaaacagg

SEQ ID NO: 83199 - DNA, 24 bp, Artificial Sequence
  Synthetic
cattttccccutacctccatugct

SEQ ID NO: 83200 - DNA, 24 bp, Artificial Sequence
  Synthetic
tgcacaatacugacagaggaaguc

SEQ ID NO: 83201 - DNA, 21 bp, Artificial Sequence
  Synthetic
gagtgcttcuggagcacctua

SEQ ID NO: 83202 - DNA, 18 bp, Artificial Sequence
  Synthetic
cgggaccuccctgtcgua

SEQ ID NO: 83203 - DNA, 22 bp, Artificial Sequence
  Synthetic
gctccaccccutcctctttauc

SEQ ID NO: 83204 - DNA, 24 bp, Artificial Sequence
  Synthetic
aaacatgccttucacgttccttuc

SEQ ID NO: 83205 - DNA, 24 bp, Artificial Sequence
  Synthetic
tctctccttcutctcttggctuca

SEQ ID NO: 83206 - DNA, 21 bp, Artificial Sequence
  Synthetic
catgccagagautgcucagga

SEQ ID NO: 83207 - DNA, 24 bp, Artificial Sequence
  Synthetic
ccugttacucacagaaaccacaca

SEQ ID NO: 83208 - DNA, 22 bp, Artificial Sequence
  Synthetic
ccatuggacaggaagcggtaut

SEQ ID NO: 83209 - DNA, 22 bp, Artificial Sequence
  Synthetic
tgtcccagtcuctccaacctut

SEQ ID NO: 83210 - DNA, 22 bp, Artificial Sequence
  Synthetic
cagauccaaaaaggcggagcua

SEQ ID NO: 83211 - DNA, 21 bp, Artificial Sequence
  Synthetic
acaccccuctctccttgtugt

SEQ ID NO: 83212 - DNA, 24 bp, Artificial Sequence
  Synthetic
tgtgatagaaagccucccttcugt

SEQ ID NO: 83213 - DNA, 28 bp, Artificial Sequence
  Synthetic
tctactcatgccccucaaacttatttut

SEQ ID NO: 83214 - DNA, 27 bp, Artificial Sequence
  Synthetic
acacagcaacuattacatccugaaaca

SEQ ID NO: 83215 - DNA, 23 bp, Artificial Sequence
  Synthetic
cctgaaagcagutgaguccaaga

SEQ ID NO: 83216 - DNA, 21 bp, Artificial Sequence
  Synthetic
acgacttgccugcatgagaut

SEQ ID NO: 83217 - DNA, 27 bp, Artificial Sequence
  Synthetic
gaatguggcaagaactacaauaccaag

SEQ ID NO: 83218 - DNA, 22 bp, Artificial Sequence
  Synthetic
acguccacaaatgagugcacat

SEQ ID NO: 83219 - DNA, 27 bp, Artificial Sequence
  Synthetic
tggatgtaaacagccuctttgtagtut

SEQ ID NO: 83220 - DNA, 20 bp, Artificial Sequence
  Synthetic
tggguagcaacuggcacaaa

SEQ ID NO: 83221 - DNA, 20 bp, Artificial Sequence
  Synthetic
gcagccucaacatccccuac

SEQ ID NO: 83222 - DNA, 27 bp, Artificial Sequence
  Synthetic
cctaaaacgucatgattttcaauggca

SEQ ID NO: 83223 - DNA, 26 bp, Artificial Sequence
  Synthetic
attagacattccutgttgtgcucagt

SEQ ID NO: 83224 - DNA, 27 bp, Artificial Sequence
  Synthetic
aagtgtatacuaaggccttgtgaggua

SEQ ID NO: 83225 - DNA, 24 bp, Artificial Sequence
  Synthetic
cagcctaautcaggatugggaaac

SEQ ID NO: 83226 - DNA, 18 bp, Artificial Sequence
  Synthetic
ctgcacggccucgatcut

SEQ ID NO: 83227 - DNA, 20 bp, Artificial Sequence
  Synthetic
cagccccuctctgattgucc

SEQ ID NO: 83228 - DNA, 25 bp, Artificial Sequence
  Synthetic
gcagaacacacauaccaaagucagt

SEQ ID NO: 83229 - DNA, 23 bp, Artificial Sequence
  Synthetic
tuccccaaaacacaguaacccaa

SEQ ID NO: 83230 - DNA, 24 bp, Artificial Sequence
  Synthetic
ggccaagugacgtttaaauccaag

SEQ ID NO: 83231 - DNA, 26 bp, Artificial Sequence
  Synthetic
tgugagaaaatgttucaccggaaaga

SEQ ID NO: 83232 - DNA, 22 bp, Artificial Sequence
  Synthetic
ccutagaaacactucggcaggt

SEQ ID NO: 83233 - DNA, 26 bp, Artificial Sequence
  Synthetic
ctgggcttccutacttgtaatcugat

SEQ ID NO: 83234 - DNA, 19 bp, Artificial Sequence
  Synthetic
acctcugagcacagugcag

SEQ ID NO: 83235 - DNA, 17 bp, Artificial Sequence
  Synthetic
acgugccacccctucag

SEQ ID NO: 83236 - DNA, 28 bp, Artificial Sequence
  Synthetic
gtcagacacaaggucagaaaguaaaaga

SEQ ID NO: 83237 - DNA, 25 bp, Artificial Sequence
  Synthetic
ctttgaagatgutaactgggctucc

SEQ ID NO: 83238 - DNA, 33 bp, Artificial Sequence; identical to SEQ ID NO: 62440
  Synthetic

SEQ ID NO: 83239 - DNA, 24 bp, Artificial Sequence
  Synthetic
gccgcataugttcttcttttguga

SEQ ID NO: 83240 - DNA, 28 bp, Artificial Sequence
  Synthetic
acttcagagtatugccaatcatgttcuc

SEQ ID NO: 83241 - DNA, 24 bp, Artificial Sequence
  Synthetic
agcaacugagtaaguggcaagaaa

SEQ ID NO: 83242 - DNA, 28 bp, Artificial Sequence
  Synthetic
ctctaccagagutaatcaactgaugcaa

SEQ ID NO: 83243 - DNA, 24 bp, Artificial Sequence
  Synthetic
tgccaacaaggacagutgauacaa

SEQ ID NO: 83244 - DNA, 24 bp, Artificial Sequence
  Synthetic
tgucccaaagcagaaguaaaacca

SEQ ID NO: 83245 - DNA, 25 bp, Artificial Sequence
  Synthetic
ccaagccugggacctctattaucat

SEQ ID NO: 83246 - DNA, 17 bp, Artificial Sequence
  Synthetic
ggctggccuggtgacug

SEQ ID NO: 83247 - DNA, 22 bp, Artificial Sequence
  Synthetic
agtaugaccagcagcgtacuct

SEQ ID NO: 83248 - DNA, 26 bp, Artificial Sequence
  Synthetic
gagtcucaaacaggaagacaacucaa

SEQ ID NO: 83249 - DNA, 27 bp, Artificial Sequence
  Synthetic
aggaatatcacaucctaccccguaaaa

SEQ ID NO: 83250 - DNA, 25 bp, Artificial Sequence
  Synthetic
ctgcaaagaaauatacaugcgggaa

SEQ ID NO: 83251 - DNA, 27 bp, Artificial Sequence
  Synthetic
ctttggaaccacaaauaccacctcuaa

SEQ ID NO: 83252 - DNA, 22 bp, Artificial Sequence
  Synthetic
guccagguaaacaagcccagat

SEQ ID NO: 83253 - DNA, 28 bp, Artificial Sequence
  Synthetic
gcagacattgugctcaatactttgttuc

SEQ ID NO: 83254 - DNA, 28 bp, Artificial Sequence
  Synthetic
cagaatatggguaaagatgauccgacaa

SEQ ID NO: 83255 - DNA, 25 bp, Artificial Sequence
  Synthetic
cactgacaauccagctaauccagaa

SEQ ID NO: 83256 - DNA, 21 bp, Artificial Sequence
  Synthetic
ccagaugtgcugccaaaagga

SEQ ID NO: 83257 - DNA, 27 bp, Artificial Sequence
  Synthetic
gcccaattccaaugcatcttatacaut

SEQ ID NO: 83258 - DNA, 19 bp, Artificial Sequence
  Synthetic
ccacagcccugcctgtauc

SEQ ID NO: 83259 - DNA, 17 bp, Artificial Sequence
  Synthetic
ggcutccuccccggagt

SEQ ID NO: 83260 - DNA, 17 bp, Artificial Sequence
  Synthetic
gccccaugggctgcuac

SEQ ID NO: 83261 - DNA, 17 bp, Artificial Sequence
  Synthetic
gtgccccggaguccaua

SEQ ID NO: 83262 - DNA, 28 bp, Artificial Sequence
  Synthetic
agatagaagttccugtcactttctccut

SEQ ID NO: 83263 - DNA, 27 bp, Artificial Sequence
  Synthetic
agaaaaaguacagaagaagcugaccat

SEQ ID NO: 83264 - DNA, 24 bp, Artificial Sequence
  Synthetic
cctgatcacutctcatcugaagca

SEQ ID NO: 83265 - DNA, 23 bp, Artificial Sequence
  Synthetic
gagcacaacugagcatcugaaga

SEQ ID NO: 83266 - DNA, 22 bp, Artificial Sequence
  Synthetic
caugtgtggugcagaggagaaa

SEQ ID NO: 83267 - DNA, 24 bp, Artificial Sequence
  Synthetic
catcacctucatcttcaaguccct

SEQ ID NO: 83268 - DNA, 29 bp, Artificial Sequence
  Synthetic
ctatctttggutgagtttctuagagaagt

SEQ ID NO: 83269 - DNA, 26 bp, Artificial Sequence
  Synthetic
ggacagttgaaucttcaggctuaagg

SEQ ID NO: 83270 - DNA, 20 bp, Artificial Sequence
  Synthetic
cccagacugggcagttugac

SEQ ID NO: 83271 - DNA, 26 bp, Artificial Sequence
  Synthetic
gcccagtgaagcauatgagattacuc

SEQ ID NO: 83272 - DNA, 26 bp, Artificial Sequence
  Synthetic
gacagcttugaggaagcatgtattuc

SEQ ID NO: 83273 - DNA, 21 bp, Artificial Sequence
  Synthetic
guttgtagcucccccaccaaa

SEQ ID NO: 83274 - DNA, 19 bp, Artificial Sequence
  Synthetic
gccagttcgugggcttgut

SEQ ID NO: 83275 - DNA, 28 bp, Artificial Sequence
  Synthetic
acccagcctaaucttgtttttcttaugt

SEQ ID NO: 83276 - DNA, 28 bp, Artificial Sequence
  Synthetic
agagcauaaaagtuaaaagcaaacagca

SEQ ID NO: 83277 - DNA, 21 bp, Artificial Sequence
  Synthetic
gctaccaccagugccaugaac

SEQ ID NO: 83278 - DNA, 28 bp, Artificial Sequence
  Synthetic
ggtgggatcauattcatctacaaagugg

SEQ ID NO: 83279 - DNA, 21 bp, Artificial Sequence
  Synthetic
acaggttcutgctggtgugaa

SEQ ID NO: 83280 - DNA, 23 bp, Artificial Sequence
  Synthetic
aactgttccaugctctccttcug

SEQ ID NO: 83281 - DNA, 20 bp, Artificial Sequence
  Synthetic
ctttaggccutctgccuggt

SEQ ID NO: 83282 - DNA, 22 bp, Artificial Sequence
  Synthetic
gctutgagattcgucggaacac

SEQ ID NO: 83283 - DNA, 25 bp, Artificial Sequence
  Synthetic
gataacttgaaaacgugcctgctut

SEQ ID NO: 83284 - DNA, 22 bp, Artificial Sequence
  Synthetic
ggaacugcacacatttgagucc

SEQ ID NO: 83285 - DNA, 23 bp, Artificial Sequence
  Synthetic
gaaatgcuggtcaacaugggaaa

SEQ ID NO: 83286 - DNA, 22 bp, Artificial Sequence
  Synthetic
aggtaggccuctgagugaagaa

SEQ ID NO: 83287 - DNA, 22 bp, Artificial Sequence
  Synthetic
catgtggtccugtgctcttuca

SEQ ID NO: 83288 - DNA, 23 bp, Artificial Sequence
  Synthetic
cgaatcataccuccttggacugg

SEQ ID NO: 83289 - DNA, 28 bp, Artificial Sequence
  Synthetic
cagttactgcauctctcagttttcttug

SEQ ID NO: 83290 - DNA, 19 bp, Artificial Sequence
  Synthetic
ccaucugccagggagcaaa

SEQ ID NO: 83291 - DNA, 19 bp, Artificial Sequence
  Synthetic
cuccccacccattucacca

SEQ ID NO: 83292 - DNA, 25 bp, Artificial Sequence
  Synthetic
gtaaacccttuagccttcctggtua

SEQ ID NO: 83293 - DNA, 27 bp, Artificial Sequence
  Synthetic
cutaatttacatgtagugcccaggact

SEQ ID NO: 83294 - DNA, 27 bp, Artificial Sequence
  Synthetic
gctctagacuaagttgctttcaaguga

SEQ ID NO: 83295 - DNA, 28 bp, Artificial Sequence
  Synthetic
gcagatcagtuaacagacaaaagucaac

SEQ ID NO: 83296 - DNA, 18 bp, Artificial Sequence
  Synthetic
gatgccuggcaggcctua

SEQ ID NO: 83297 - DNA, 18 bp, Artificial Sequence
  Synthetic
ggttcugctcccguccag

SEQ ID NO: 83298 - DNA, 22 bp, Artificial Sequence
  Synthetic
tgggaauggagccatctcctua

SEQ ID NO: 83299 - DNA, 22 bp, Artificial Sequence
  Synthetic
agcaagugcaacccttcttuga

SEQ ID NO: 83300 - DNA, 23 bp, Artificial Sequence
  Synthetic
gguagaactcauccagaggcaag

SEQ ID NO: 83301 - DNA, 22 bp, Artificial Sequence
  Synthetic
ctaaccaugctctgccugaagt

SEQ ID NO: 83302 - DNA, 22 bp, Artificial Sequence
  Synthetic
ccccgactutgcagtcctuaat

SEQ ID NO: 83303 - DNA, 21 bp, Artificial Sequence
  Synthetic
cttctcaggcccutcagaguc

SEQ ID NO: 83304 - DNA, 24 bp, Artificial Sequence
  Synthetic
ctcctcagguatcccaaagatuca

SEQ ID NO: 83305 - DNA, 20 bp, Artificial Sequence
  Synthetic
acggagaccuggtggacuac

SEQ ID NO: 83306 - DNA, 20 bp, Artificial Sequence
  Synthetic
ccucagggaccaaggcuagt

SEQ ID NO: 83307 - DNA, 23 bp, Artificial Sequence
  Synthetic
ccatgtgagcutgagaaggcuat

SEQ ID NO: 83308 - DNA, 21 bp, Artificial Sequence
  Synthetic
cccctacccugcctcaacaua

SEQ ID NO: 83309 - DNA, 21 bp, Artificial Sequence
  Synthetic
gccctgacccutctccctauc

SEQ ID NO: 83310 - DNA, 22 bp, Artificial Sequence
  Synthetic
gctttatcuacagcctguccga

SEQ ID NO: 83311 - DNA, 22 bp, Artificial Sequence
  Synthetic
aauatcgugcacaaggcagagt

SEQ ID NO: 83312 - DNA, 21 bp, Artificial Sequence
  Synthetic
ctggcacuaatggcctttucc

SEQ ID NO: 83313 - DNA, 21 bp, Artificial Sequence
  Synthetic
gtctcctggcutgatggaguc

SEQ ID NO: 83314 - DNA, 22 bp, Artificial Sequence
  Synthetic
ccaactcaccagcugttcctua

SEQ ID NO: 83315 - DNA, 19 bp, Artificial Sequence
  Synthetic
ggcacaguccagcaccuac

SEQ ID NO: 83316 - DNA, 22 bp, Artificial Sequence
  Synthetic
ctgcaggaaggugtgtttgtug

SEQ ID NO: 83317 - DNA, 20 bp, Artificial Sequence
  Synthetic
ccacauccagcccctgatua

SEQ ID NO: 83318 - DNA, 22 bp, Artificial Sequence
  Synthetic
cccctaccuctgatagcgacuc

SEQ ID NO: 83319 - DNA, 26 bp, Artificial Sequence
  Synthetic
agcctgtgtcuttaagtccagauact

SEQ ID NO: 83320 - DNA, 18 bp, Artificial Sequence
  Synthetic
tcggccaccuccatcuca

SEQ ID NO: 83321 - DNA, 17 bp, Artificial Sequence
  Synthetic
ggguccacgctguagcc

SEQ ID NO: 83322 - DNA, 21 bp, Artificial Sequence
  Synthetic
cacacggccacaaaaaugtug

SEQ ID NO: 83323 - DNA, 25 bp, Artificial Sequence
  Synthetic
caatgagagttcucggtttgcttut

SEQ ID NO: 83324 - DNA, 21 bp, Artificial Sequence
  Synthetic
gttggtctcaugcctcctugt

SEQ ID NO: 83325 - DNA, 25 bp, Artificial Sequence
  Synthetic
aacuttaagctgcauacaggcaaag

SEQ ID NO: 83326 - DNA, 19 bp, Artificial Sequence
  Synthetic
cctacugcccacccaccua

SEQ ID NO: 83327 - DNA, 24 bp, Artificial Sequence
  Synthetic
guagctctccauaaacaagcagga

SEQ ID NO: 83328 - DNA, 25 bp, Artificial Sequence
  Synthetic
cagattcttcauatctaggcugcga

SEQ ID NO: 83329 - DNA, 21 bp, Artificial Sequence
  Synthetic
agctgcgugtgtttcctuaca

SEQ ID NO: 83330 - DNA, 25 bp, Artificial Sequence
  Synthetic
cttcttcugacggtgagttctucaa

SEQ ID NO: 83331 - DNA, 25 bp, Artificial Sequence
  Synthetic
cagtgtuggtttttaaaucccaggt

SEQ ID NO: 83332 - DNA, 24 bp, Artificial Sequence
  Synthetic
gggccctaucctcctgattagtut

SEQ ID NO: 83333 - DNA, 22 bp, Artificial Sequence
  Synthetic
gagaacagcugaatggctcuca

SEQ ID NO: 83334 - DNA, 21 bp, Artificial Sequence
  Synthetic
cctcccugcagtttgtgauct

SEQ ID NO: 83335 - DNA, 28 bp, Artificial Sequence
  Synthetic
cagtgagccaaguatgacttcatatgua

SEQ ID NO: 83336 - DNA, 23 bp, Artificial Sequence
  Synthetic
tcatggugaaagacgauggacaa

SEQ ID NO: 83337 - DNA, 27 bp, Artificial Sequence
  Synthetic
tcttcttgtgauccaaaaagtguccaa

SEQ ID NO: 83338 - DNA, 28 bp, Artificial Sequence
  Synthetic
gattttggacacuttttggaucacaaga

SEQ ID NO: 83339 - DNA, 22 bp, Artificial Sequence
  Synthetic
gctcgagcucacctctcaaaut

SEQ ID NO: 83340 - DNA, 28 bp, Artificial Sequence
  Synthetic
gccatttgtttugacacaggatttctua

SEQ ID NO: 83341 - DNA, 28 bp, Artificial Sequence
  Synthetic
tgautgtttctaauagagcagccagaac

SEQ ID NO: 83342 - DNA, 28 bp, Artificial Sequence
  Synthetic
aaaagcacaaauacctaccgagaauaca

SEQ ID NO: 83343 - DNA, 25 bp, Artificial Sequence
  Synthetic
ccaucttcatucacccagaagaaac

SEQ ID NO: 83344 - DNA, 26 bp, Artificial Sequence
  Synthetic
gcaggtttcutccagattacucagaa

SEQ ID NO: 83345 - DNA, 27 bp, Artificial Sequence
  Synthetic
tcctccccaagaautgaaaaagtaugg

SEQ ID NO: 83346 - DNA, 25 bp, Artificial Sequence
  Synthetic
gctcuaccaagagaagtucagaaca

SEQ ID NO: 83347 - DNA, 22 bp, Artificial Sequence
  Synthetic
gacctcgutgtgagauggacat

SEQ ID NO: 83348 - DNA, 21 bp, Artificial Sequence
  Synthetic
ctgagagauctgggtgcaugt

SEQ ID NO: 83349 - DNA, 28 bp, Artificial Sequence
  Synthetic
tgctttctgtcuatgtgtgtgtgtauag

SEQ ID NO: 83350 - DNA, 28 bp, Artificial Sequence
  Synthetic
ccataaaaataugcagctccatcucgaa

SEQ ID NO: 83351 - DNA, 21 bp, Artificial Sequence
  Synthetic
cagccagugaaactcctcuga

SEQ ID NO: 83352 - DNA, 27 bp, Artificial Sequence
  Synthetic
ctgttggatttucatcaagtcaauggg

SEQ ID NO: 83353 - DNA, 24 bp, Artificial Sequence
  Synthetic
tgctctgucacttggaatgtugaa

SEQ ID NO: 83354 - DNA, 28 bp, Artificial Sequence
  Synthetic
atcggcaatcugatgattttctagtuca

SEQ ID NO: 83355 - DNA, 20 bp, Artificial Sequence
  Synthetic
aggcctaguccctcgugaaa

SEQ ID NO: 83356 - DNA, 20 bp, Artificial Sequence
  Synthetic
ctgaccacaccgcgutctua

SEQ ID NO: 83357 - DNA, 21 bp, Artificial Sequence
  Synthetic
atcgcatcucatgcccttcuc

SEQ ID NO: 83358 - DNA, 23 bp, Artificial Sequence
  Synthetic
ccctcgggagaugtccauaaaag

SEQ ID NO: 83359 - DNA, 20 bp, Artificial Sequence
  Synthetic
cggatgccaaucacctcgut

SEQ ID NO: 83360 - DNA, 20 bp, Artificial Sequence
  Synthetic
tcaggtggcuacaggccaua

SEQ ID NO: 83361 - DNA, 28 bp, Artificial Sequence
  Synthetic
aaaaccaggaaaaacugcaagaactuaa

SEQ ID NO: 83362 - DNA, 18 bp, Artificial Sequence
  Synthetic
tccctcguctccccctug

SEQ ID NO: 83363 - DNA, 17 bp, Artificial Sequence
  Synthetic
cugcacuccgccgaaag

SEQ ID NO: 83364 - DNA, 21 bp, Artificial Sequence
  Synthetic
gggtctgaauggcactcatug

SEQ ID NO: 83365 - DNA, 27 bp, Artificial Sequence
  Synthetic
tttgatcccaguaattggtacttgugt

SEQ ID NO: 83366 - DNA, 21 bp, Artificial Sequence
  Synthetic
tcatuccctggtuagccagat

SEQ ID NO: 83367 - DNA, 22 bp, Artificial Sequence
  Synthetic
gcacagcaguttccatttccuc

SEQ ID NO: 83368 - DNA, 26 bp, Artificial Sequence
  Synthetic
ggcatagcattuctgttagacgtuga

SEQ ID NO: 83369 - DNA, 28 bp, Artificial Sequence
  Synthetic
gcacaaguagggtaacaagttugaaaaa

SEQ ID NO: 83370 - DNA, 21 bp, Artificial Sequence
  Synthetic
ggttgagcaucctgcatccut

SEQ ID NO: 83371 - DNA, 21 bp, Artificial Sequence
  Synthetic
ctagatgcaaggcugttcguc

SEQ ID NO: 83372 - DNA, 21 bp, Artificial Sequence
  Synthetic
cctugccataggugacagact

SEQ ID NO: 83373 - DNA, 27 bp, Artificial Sequence
  Synthetic
cagagcagcauctttaatgaatauccc

SEQ ID NO: 83374 - DNA, 25 bp, Artificial Sequence
  Synthetic
acatcatctcuaacctggactgugt

SEQ ID NO: 83375 - DNA, 20 bp, Artificial Sequence
  Synthetic
ctcctcacucaccagctguc

SEQ ID NO: 83376 - DNA, 26 bp, Artificial Sequence
  Synthetic
gtcttuacaaaaggaacggaaagugt

SEQ ID NO: 83377 - DNA, 20 bp, Artificial Sequence
  Synthetic
ctgacaggucctgcctaugg

SEQ ID NO: 83378 - DNA, 21 bp, Artificial Sequence
  Synthetic
ggccugcagcataagagauca

SEQ ID NO: 83379 - DNA, 27 bp, Artificial Sequence
  Synthetic
cacactaatcttcucttgccttctcua

SEQ ID NO: 83380 - DNA, 20 bp, Artificial Sequence
  Synthetic
ctggatcugctgguggacag

SEQ ID NO: 83381 - DNA, 22 bp, Artificial Sequence
  Synthetic
cactcctuccacaatccucagt

SEQ ID NO: 83382 - DNA, 22 bp, Artificial Sequence
  Synthetic
cattgagtacaugcccctccug

SEQ ID NO: 83383 - DNA, 21 bp, Artificial Sequence
  Synthetic
cagttgucacagcctccacua

SEQ ID NO: 83384 - DNA, 20 bp, Artificial Sequence
  Synthetic
tccaagucacccagcaagug

SEQ ID NO: 83385 - DNA, 27 bp, Artificial Sequence
  Synthetic
agaagtaaatucgggaaaggugaagag

SEQ ID NO: 83386 - DNA, 26 bp, Artificial Sequence
  Synthetic
ggatctaaguccagtaccgtagttug

SEQ ID NO: 83387 - DNA, 25 bp, Artificial Sequence
  Synthetic
aacuttgatgaugagaggacaaggg

SEQ ID NO: 83388 - DNA, 20 bp, Artificial Sequence
  Synthetic
gatgccuctgcctucaggaa

SEQ ID NO: 83389 - DNA, 19 bp, Artificial Sequence
  Synthetic
tggaccgcgugttugagag

SEQ ID NO: 83390 - DNA, 20 bp, Artificial Sequence
  Synthetic
ctctttgccuggctcuaggt

SEQ ID NO: 83391 - DNA, 19 bp, Artificial Sequence
  Synthetic
tttccacguccggtgugag

SEQ ID NO: 83392 - DNA, 17 bp, Artificial Sequence
  Synthetic
gcggccgccugactuac

SEQ ID NO: 83393 - DNA, 22 bp, Artificial Sequence
  Synthetic
gcaaautgtgtcugcagcaaga

SEQ ID NO: 83394 - DNA, 18 bp, Artificial Sequence
  Synthetic
gccgcagaacutccuggt

SEQ ID NO: 83395 - DNA, 17 bp, Artificial Sequence
  Synthetic
gagcggugcuggcaaag

SEQ ID NO: 83396 - DNA, 22 bp, Artificial Sequence
  Synthetic
ctgatgccuccagtugacaaga

SEQ ID NO: 83397 - DNA, 21 bp, Artificial Sequence
  Synthetic
ctcacacugaccaaccucact

SEQ ID NO: 83398 - DNA, 27 bp, Artificial Sequence
  Synthetic
ccaataaagaauaaggtttgccccaut

SEQ ID NO: 83399 - DNA, 22 bp, Artificial Sequence
  Synthetic
ggaagcacaaagautgcgcuat

SEQ ID NO: 83400 - DNA, 22 bp, Artificial Sequence
  Synthetic
tgtttggccutcttctcgctut

SEQ ID NO: 83401 - DNA, 21 bp, Artificial Sequence
  Synthetic
ccctgctugtctcaaccaugt

SEQ ID NO: 83402 - DNA, 27 bp, Artificial Sequence
  Synthetic
ctgtcttaccuaaaccatauagcgcaa

SEQ ID NO: 83403 - DNA, 28 bp, Artificial Sequence
  Synthetic
ggacattttaagtugtgctggatttgua

SEQ ID NO: 83404 - DNA, 20 bp, Artificial Sequence
  Synthetic
tccacctucgaatcccucct

SEQ ID NO: 83405 - DNA, 18 bp, Artificial Sequence
  Synthetic
gcttcugcctccgugact

SEQ ID NO: 83406 - DNA, 18 bp, Artificial Sequence
  Synthetic
ggguagccugggcagagt

SEQ ID NO: 83407 - DNA, 20 bp, Artificial Sequence
  Synthetic
ttcucacaacccucggaacc

SEQ ID NO: 83408 - DNA, 22 bp, Artificial Sequence
  Synthetic
gacagaccaagaggauguggat

SEQ ID NO: 83409 - DNA, 23 bp, Artificial Sequence
  Synthetic
ccttcatucccgcttcattucag

SEQ ID NO: 83410 - DNA, 17 bp, Artificial Sequence
  Synthetic
ccauggcaguggacgct

SEQ ID NO: 83411 - DNA, 19 bp, Artificial Sequence
  Synthetic
cccccagagaaggcutgug

SEQ ID NO: 83412 - DNA, 24 bp, Artificial Sequence
  Synthetic
ggtgaagatguctgagtagtgcug

SEQ ID NO: 83413 - DNA, 23 bp, Artificial Sequence
  Synthetic
ccttcctcuctcctgctcaucaa

SEQ ID NO: 83414 - DNA, 26 bp, Artificial Sequence
  Synthetic
acagacattgaacguccaaagtgaut

SEQ ID NO: 83415 - DNA, 28 bp, Artificial Sequence
  Synthetic
aggtgatacgauattcatgcagauacct

SEQ ID NO: 83416 - DNA, 23 bp, Artificial Sequence
  Synthetic
gctgggaagutctggttaaugga

SEQ ID NO: 83417 - DNA, 19 bp, Artificial Sequence
  Synthetic
tggcagagguacgagcuct

SEQ ID NO: 83418 - DNA, 24 bp, Artificial Sequence
  Synthetic
caccatgctuggtgtcatatucaa

SEQ ID NO: 83419 - DNA, 20 bp, Artificial Sequence
  Synthetic
catgtgtugccccggattuc

SEQ ID NO: 83420 - DNA, 21 bp, Artificial Sequence
  Synthetic
cccccacccccaguaacuaaa

SEQ ID NO: 83421 - DNA, 21 bp, Artificial Sequence
  Synthetic
agauttgatgcuccgggacac

SEQ ID NO: 83422 - DNA, 28 bp, Artificial Sequence
  Synthetic
cttcagtagaaauttcaaaagcgtcuct

SEQ ID NO: 83423 - DNA, 20 bp, Artificial Sequence
  Synthetic
atcccgaauccaggcaucac

SEQ ID NO: 83424 - DNA, 24 bp, Artificial Sequence
  Synthetic
aaaagtattcucccgtgtcuagcc

SEQ ID NO: 83425 - DNA, 21 bp, Artificial Sequence
  Synthetic
aatgtcuccagcaccttcgut

SEQ ID NO: 83426 - DNA, 19 bp, Artificial Sequence
  Synthetic
ccgccggcaautgatcuca

SEQ ID NO: 83427 - DNA, 20 bp, Artificial Sequence
  Synthetic
gcgatcggagauggatguct

SEQ ID NO: 83428 - DNA, 23 bp, Artificial Sequence
  Synthetic
cgcagacaautgttccccugaat

SEQ ID NO: 83429 - DNA, 26 bp, Artificial Sequence
  Synthetic
aatgttaccagacuccttctctcuca

SEQ ID NO: 83430 - DNA, 23 bp, Artificial Sequence
  Synthetic
cagatucaagagctgugggagaa

SEQ ID NO: 83431 - DNA, 22 bp, Artificial Sequence
  Synthetic
gtccaccuatacccuggaggag

SEQ ID NO: 83432 - DNA, 24 bp, Artificial Sequence
  Synthetic
gttgtatgctuggcgaatgtugag

SEQ ID NO: 83433 - DNA, 25 bp, Artificial Sequence
  Synthetic
tccauttgucgaaagaacaggagag

SEQ ID NO: 83434 - DNA, 23 bp, Artificial Sequence
  Synthetic
cttttcagccagugagaggguag

SEQ ID NO: 83435 - DNA, 28 bp, Artificial Sequence
  Synthetic
tcagaccttagaacugagggaaatttug

SEQ ID NO: 83436 - DNA, 19 bp, Artificial Sequence
  Synthetic
cacutggcugggcaaagag

SEQ ID NO: 83437 - DNA, 18 bp, Artificial Sequence
  Synthetic
cucggcgttucaaaggca

SEQ ID NO: 83438 - DNA, 18 bp, Artificial Sequence
  Synthetic
gcugaacccgagcagguc

SEQ ID NO: 83439 - DNA, 21 bp, Artificial Sequence
  Synthetic
gaagccccugtttcctgaugt

SEQ ID NO: 83440 - DNA, 21 bp, Artificial Sequence
  Synthetic
ctcaugcaccaagactgguca

SEQ ID NO: 83441 - DNA, 24 bp, Artificial Sequence
  Synthetic
gcctcatctcacuctgtctctgut

SEQ ID NO: 83442 - DNA, 20 bp, Artificial Sequence
  Synthetic
ctcagacgugatgtgcucca

SEQ ID NO: 83443 - DNA, 22 bp, Artificial Sequence
  Synthetic
cctccttacugaatgccucact

SEQ ID NO: 83444 - DNA, 23 bp, Artificial Sequence
  Synthetic
tgtggaatccugatgctcctgua

SEQ ID NO: 83445 - DNA, 30 bp, Artificial Sequence; identical to SEQ ID NO: 54239
  Synthetic

SEQ ID NO: 83446 - DNA, 28 bp, Artificial Sequence
  Synthetic
acaggcttcaugagaatgtaaucaacat

SEQ ID NO: 83447 - DNA, 27 bp, Artificial Sequence
  Synthetic
cagauaatcctaaaguaacccaagcca

SEQ ID NO: 83448 - DNA, 22 bp, Artificial Sequence
  Synthetic
cagaagctutgtatggctuggg

SEQ ID NO: 83449 - DNA, 23 bp, Artificial Sequence
  Synthetic
cacttcagacaugttggttugct

SEQ ID NO: 83450 - DNA, 23 bp, Artificial Sequence
  Synthetic
gcagtgatgagucccttccttuc

SEQ ID NO: 83451 - DNA, 26 bp, Artificial Sequence
  Synthetic
gatgcatcttcauctctgttttccuc

SEQ ID NO: 83452 - DNA, 22 bp, Artificial Sequence
  Synthetic
tggcaggagguactgttgtcua

SEQ ID NO: 83453 - DNA, 27 bp, Artificial Sequence
  Synthetic
gtcttgtctatuaagcctcacctucag

SEQ ID NO: 83454 - DNA, 29 bp, Artificial Sequence
  Synthetic
cactgtgugaagaggaattttatgcauat

SEQ ID NO: 83455 - DNA, 25 bp, Artificial Sequence
  Synthetic
ttgcacatcacccugaggaaattua

SEQ ID NO: 83456 - DNA, 21 bp, Artificial Sequence
  Synthetic
ggtctacucaggcctcctugt

SEQ ID NO: 83457 - DNA, 23 bp, Artificial Sequence
  Synthetic
gtgattgttcuccctccatucca

SEQ ID NO: 83458 - DNA, 22 bp, Artificial Sequence
  Synthetic
gggaagaccuttgcagtguaaa

SEQ ID NO: 83459 - DNA, 25 bp, Artificial Sequence
  Synthetic
ggatggtuctggatttctucgaagg

SEQ ID NO: 83460 - DNA, 21 bp, Artificial Sequence
  Synthetic
ctgttgggcucagattgtugg

SEQ ID NO: 83461 - DNA, 22 bp, Artificial Sequence
  Synthetic
cgaagucacagcgaatcaggua

SEQ ID NO: 83462 - DNA, 28 bp, Artificial Sequence
  Synthetic
tggtcactaaaccutaagatgagcatug

SEQ ID NO: 83463 - DNA, 28 bp, Artificial Sequence
  Synthetic
cctaatttcagcuatattccctggctua

SEQ ID NO: 83464 - DNA, 24 bp, Artificial Sequence
  Synthetic
gcgaagaauccacuaagggaaagt

SEQ ID NO: 83465 - DNA, 21 bp, Artificial Sequence
  Synthetic
cccaggatgugggagtctuct

SEQ ID NO: 83466 - DNA, 23 bp, Artificial Sequence
  Synthetic
cctgagaccaucagauaggccaa

SEQ ID NO: 83467 - DNA, 20 bp, Artificial Sequence
  Synthetic
ccucgggcatcugacaagag

SEQ ID NO: 83468 - DNA, 21 bp, Artificial Sequence
  Synthetic
gagauggagcaguggaaccat

SEQ ID NO: 83469 - DNA, 22 bp, Artificial Sequence
  Synthetic
cttctcaguggctgtctcctuc

SEQ ID NO: 83470 - DNA, 22 bp, Artificial Sequence
  Synthetic
guagtgacattucgggaaggct

SEQ ID NO: 83471 - DNA, 27 bp, Artificial Sequence
  Synthetic
atcattcagtttugcagataggacuca

SEQ ID NO: 83472 - DNA, 26 bp, Artificial Sequence
  Synthetic
actttaaugccagggattttgtucct

SEQ ID NO: 83473 - DNA, 29 bp, Artificial Sequence
  Synthetic
tctggacacaagauaaggagaatgattug

SEQ ID NO: 83474 - DNA, 25 bp, Artificial Sequence
  Synthetic
ccaaagagaacaaugcctagagcut

SEQ ID NO: 83475 - DNA, 21 bp, Artificial Sequence
  Synthetic
ccggacatuccaagcctctua

SEQ ID NO: 83476 - DNA, 24 bp, Artificial Sequence
  Synthetic
caaagaaucagaacaatgccucca

SEQ ID NO: 83477 - DNA, 28 bp, Artificial Sequence
  Synthetic
gaggcattcuaaagtcactatcatucca

SEQ ID NO: 83478 - DNA, 19 bp, Artificial Sequence
  Synthetic
agcagcaguttggccacua

SEQ ID NO: 83479 - DNA, 29 bp, Artificial Sequence
  Synthetic
caccttgaguaaaataaactgctucacat

SEQ ID NO: 83480 - DNA, 23 bp, Artificial Sequence
  Synthetic
cccagcttucaggtaaccttuga

SEQ ID NO: 83481 - DNA, 24 bp, Artificial Sequence
  Synthetic
tgaatactcuggcaatgcctaugg

SEQ ID NO: 83482 - DNA, 25 bp, Artificial Sequence
  Synthetic
gatagtgacuttagaatgccuccgt

SEQ ID NO: 83483 - DNA, 27 bp, Artificial Sequence
  Synthetic
ccctttctgctucttgagtaacactua

SEQ ID NO: 83484 - DNA, 23 bp, Artificial Sequence
  Synthetic
cctgctccgaaaugtagacgaut

SEQ ID NO: 83485 - DNA, 24 bp, Artificial Sequence
  Synthetic
gagtacacactucagaaccagguc

SEQ ID NO: 83486 - DNA, 28 bp, Artificial Sequence
  Synthetic
ttgaaatttgguggatctatgtctucgt

SEQ ID NO: 83487 - DNA, 29 bp, Artificial Sequence
  Synthetic
gactacttgaugagatgtctgatttcugt

SEQ ID NO: 83488 - DNA, 21 bp, Artificial Sequence
  Synthetic
gcctcgcugtaggaggaguag

SEQ ID NO: 83489 - DNA, 21 bp, Artificial Sequence
  Synthetic
ccccaaccautcctgagctug

SEQ ID NO: 83490 - DNA, 27 bp, Artificial Sequence
  Synthetic
agagaaatcaacaacugatgacgaugt

SEQ ID NO: 83491 - DNA, 27 bp, Artificial Sequence
  Synthetic
cactttctgagucaatgaagacaccua

SEQ ID NO: 83492 - DNA, 25 bp, Artificial Sequence
  Synthetic
aaaacagcctcuctcttacctcuct

SEQ ID NO: 83493 - DNA, 26 bp, Artificial Sequence
  Synthetic
gcgtattgctucctctctcttcttua

SEQ ID NO: 83494 - DNA, 28 bp, Artificial Sequence
  Synthetic
cctccatcaacutcttcaagatgaauct

SEQ ID NO: 83495 - DNA, 25 bp, Artificial Sequence
  Synthetic
cggttgcctacuggttcaattacut

SEQ ID NO: 83496 - DNA, 26 bp, Artificial Sequence
  Synthetic
ccttcggcttuttcaacccttttuaa

SEQ ID NO: 83497 - DNA, 26 bp, Artificial Sequence
  Synthetic
aagggacaacagutaagctttauggt

SEQ ID NO: 83498 - DNA, 21 bp, Artificial Sequence
  Synthetic
ctgtgatucaggtgccucact

SEQ ID NO: 83499 - DNA, 22 bp, Artificial Sequence
  Synthetic
gacatattggcugggtcccuac

SEQ ID NO: 83500 - DNA, 21 bp, Artificial Sequence
  Synthetic
gatcagcaggugggatuccaa

SEQ ID NO: 83501 - DNA, 18 bp, Artificial Sequence
  Synthetic
gcagcgcaaucgagtgug

SEQ ID NO: 83502 - DNA, 27 bp, Artificial Sequence
  Synthetic
caaagucattggtcaucaggaaaaagt

SEQ ID NO: 83503 - DNA, 23 bp, Artificial Sequence
  Synthetic
cattgaccttugtgtctgctcug

SEQ ID NO: 83504 - DNA, 22 bp, Artificial Sequence
  Synthetic
gggatagcaggucttcagaugt

SEQ ID NO: 83505 - DNA, 22 bp, Artificial Sequence
  Synthetic
cgactccaggcucatttgtucc

SEQ ID NO: 83506 - DNA, 25 bp, Artificial Sequence
  Synthetic
ccttctcaucctccaagacauagga

SEQ ID NO: 83507 - DNA, 22 bp, Artificial Sequence
  Synthetic
ccctttucagtccagaugacct

SEQ ID NO: 83508 - DNA, 24 bp, Artificial Sequence
  Synthetic
gaagcuguaaggagaaacgggaat

SEQ ID NO: 83509 - DNA, 27 bp, Artificial Sequence
  Synthetic
caataatguggaggcaactcttttgut

SEQ ID NO: 83510 - DNA, 26 bp, Artificial Sequence
  Synthetic
tcttctgcaaugtttctgaaggauga

SEQ ID NO: 83511 - DNA, 22 bp, Artificial Sequence
  Synthetic
ttggtagcagugacagctgtut

SEQ ID NO: 83512 - DNA, 20 bp, Artificial Sequence
  Synthetic
caggcugaccagaagagucc

SEQ ID NO: 83513 - DNA, 21 bp, Artificial Sequence
  Synthetic
tcggagguggatgaucaccat

SEQ ID NO: 83514 - DNA, 28 bp, Artificial Sequence
  Synthetic
acatctucccccaaactaucagaaaaac

SEQ ID NO: 83515 - DNA, 24 bp, Artificial Sequence
  Synthetic
tcttttgtuccagatgctgauccc

SEQ ID NO: 83516 - DNA, 24 bp, Artificial Sequence
  Synthetic
aggaagccaauatttatgcugcca

SEQ ID NO: 83517 - DNA, 27 bp, Artificial Sequence
  Synthetic
cccaatguaggaacagccagtauaaaa

SEQ ID NO: 83518 - DNA, 28 bp, Artificial Sequence
  Synthetic
gaagacttctcaaautgttgccattuca

SEQ ID NO: 83519 - DNA, 25 bp, Artificial Sequence
  Synthetic
acggacatgaguttgttttcctuct

SEQ ID NO: 83520 - DNA, 21 bp, Artificial Sequence
  Synthetic
cggtuggccccattttucaac

SEQ ID NO: 83521 - DNA, 28 bp, Artificial Sequence
  Synthetic
agatttcattgugcaagtcatagtguct

SEQ ID NO: 83522 - DNA, 21 bp, Artificial Sequence
  Synthetic
cccatcuaacccatgctucct

SEQ ID NO: 83523 - DNA, 22 bp, Artificial Sequence
  Synthetic
cugactuccaagaccaccacaa

SEQ ID NO: 83524 - DNA, 19 bp, Artificial Sequence
  Synthetic
tcatuccgccgctctaugg

SEQ ID NO: 83525 - DNA, 28 bp, Artificial Sequence
  Synthetic
tgcttagaaacaguttcccattaacuca

SEQ ID NO: 83526 - DNA, 20 bp, Artificial Sequence
  Synthetic
ccacgcccaguatccaggua

SEQ ID NO: 83527 - DNA, 20 bp, Artificial Sequence
  Synthetic
ccctgggaguggtcaactuc

SEQ ID NO: 83528 - DNA, 22 bp, Artificial Sequence
  Synthetic
accgutcctgatguacccagat

SEQ ID NO: 83529 - DNA, 22 bp, Artificial Sequence
  Synthetic
gatactcagcugcctgcttcut

SEQ ID NO: 83530 - DNA, 28 bp, Artificial Sequence
  Synthetic
tgtgtgtgauagatcttattggttugct

SEQ ID NO: 83531 - DNA, 26 bp, Artificial Sequence
  Synthetic
gaactuacaggaagatacuggaccac

SEQ ID NO: 83532 - DNA, 17 bp, Artificial Sequence
  Synthetic
cttgcggcuggccttuc

SEQ ID NO: 83533 - DNA, 18 bp, Artificial Sequence
  Synthetic
ggccaaagcccacucuct

SEQ ID NO: 83534 - DNA, 29 bp, Artificial Sequence
  Synthetic
gacagtagaagaagautggaagaagacut

SEQ ID NO: 83535 - DNA, 26 bp, Artificial Sequence
  Synthetic
caagtattggtcuctcgtctttcuca

SEQ ID NO: 83536 - DNA, 22 bp, Artificial Sequence
  Synthetic
cttctccaggcuaagacaugct

SEQ ID NO: 83537 - DNA, 26 bp, Artificial Sequence
  Synthetic
gcaagatgguacaattcagaaccuca

SEQ ID NO: 83538 - DNA, 19 bp, Artificial Sequence
  Synthetic
ggcugcaggccaactacuc

SEQ ID NO: 83539 - DNA, 26 bp, Artificial Sequence
  Synthetic
ccagcttgtgutgctccttaatatut

SEQ ID NO: 83540 - DNA, 23 bp, Artificial Sequence
  Synthetic
gggcaagguaatguagacagagg

SEQ ID NO: 83541 - DNA, 25 bp, Artificial Sequence
  Synthetic
aagcaatuagagcctttaggtuggt

SEQ ID NO: 83542 - DNA, 25 bp, Artificial Sequence
  Synthetic
ttcagatgagucccttaaacccuct

SEQ ID NO: 83543 - DNA, 23 bp, Artificial Sequence
  Synthetic
gacaaagcacaccauctgtugaa

SEQ ID NO: 83544 - DNA, 26 bp, Artificial Sequence
  Synthetic
acagcatuaaaccagaccttauccag

SEQ ID NO: 83545 - DNA, 23 bp, Artificial Sequence
  Synthetic
cgaacaccuttttgagucaacca

SEQ ID NO: 83546 - DNA, 21 bp, Artificial Sequence
  Synthetic
cgcagatctucatggccttut

SEQ ID NO: 83547 - DNA, 23 bp, Artificial Sequence
  Synthetic
gggatctctugaatgcagtggug

SEQ ID NO: 83548 - DNA, 23 bp, Artificial Sequence
  Synthetic
ttccctgcutttcagagttucct

SEQ ID NO: 83549 - DNA, 29 bp, Artificial Sequence
  Synthetic
atttgaggcuaaaagacatcattgaccua

SEQ ID NO: 83550 - DNA, 25 bp, Artificial Sequence
  Synthetic
aagaagtaatgcugatccaggctut

SEQ ID NO: 83551 - DNA, 25 bp, Artificial Sequence
  Synthetic
ctcttttcggcugtagagaagttug

SEQ ID NO: 83552 - DNA, 22 bp, Artificial Sequence
  Synthetic
tctccttucccagtcaccugaa

SEQ ID NO: 83553 - DNA, 26 bp, Artificial Sequence
  Synthetic
ggaggatccttugatttaccagcauc

SEQ ID NO: 83554 - DNA, 24 bp, Artificial Sequence
  Synthetic
ccagacacuacaacaacaggagug

SEQ ID NO: 83555 - DNA, 25 bp, Artificial Sequence
  Synthetic
aggtacagaggugctaggaaucaaa

SEQ ID NO: 83556 - DNA, 22 bp, Artificial Sequence
  Synthetic
gcccagagcuctttgtttgaut

SEQ ID NO: 83557 - DNA, 20 bp, Artificial Sequence
  Synthetic
cacgttggguagaggtccug

SEQ ID NO: 83558 - DNA, 26 bp, Artificial Sequence
  Synthetic
caggcucagccacaacaaaauaaaat

SEQ ID NO: 83559 - DNA, 28 bp, Artificial Sequence
  Synthetic
aaccttttuaccatttgcctucaaagaa

SEQ ID NO: 83560 - DNA, 22 bp, Artificial Sequence
  Synthetic
acacgagcaugtgtgtgtaucc

SEQ ID NO: 83561 - DNA, 25 bp, Artificial Sequence
  Synthetic
tcatggcctutcttctcttcaucac

SEQ ID NO: 83562 - DNA, 18 bp, Artificial Sequence
  Synthetic
gccttcuggacggctcuc

SEQ ID NO: 83563 - DNA, 21 bp, Artificial Sequence
  Synthetic
guaccaggacaccaugaggaa

SEQ ID NO: 83564 - DNA, 17 bp, Artificial Sequence
  Synthetic
ggtuggcgccguaccat

SEQ ID NO: 83565 - DNA, 17 bp, Artificial Sequence
  Synthetic
cgccgccuaccacauga

SEQ ID NO: 83566 - DNA, 20 bp, Artificial Sequence
  Synthetic
ttggccacucctaagcaucc

SEQ ID NO: 83567 - DNA, 27 bp, Artificial Sequence
  Synthetic
tctgcaccucccaaaatttaaggauat

SEQ ID NO: 83568 - DNA, 17 bp, Artificial Sequence
  Synthetic
gccgccgucatgtggua

SEQ ID NO: 83569 - DNA, 21 bp, Artificial Sequence
  Synthetic
ctugagtccccuggaggaaag

SEQ ID NO: 83570 - DNA, 29 bp, Artificial Sequence
  Synthetic
gtgatatgggcautttaatttgctgguaa

SEQ ID NO: 83571 - DNA, 27 bp, Artificial Sequence
  Synthetic
tcagctttaugacacagttaggagtug

SEQ ID NO: 83572 - DNA, 20 bp, Artificial Sequence
  Synthetic
gctgcccutggttatuccga

SEQ ID NO: 83573 - DNA, 27 bp, Artificial Sequence
  Synthetic
ttctttcttcatcucattcgtccctut

SEQ ID NO: 83574 - DNA, 22 bp, Artificial Sequence
  Synthetic
cttccugctggacucagagaac

SEQ ID NO: 83575 - DNA, 24 bp, Artificial Sequence
  Synthetic
aaaactatactucccgaggcaucc

SEQ ID NO: 83576 - DNA, 23 bp, Artificial Sequence
  Synthetic
cctccaugcccactttcttguag

SEQ ID NO: 83577 - DNA, 21 bp, Artificial Sequence
  Synthetic
tcctcttccutcctccuccag

SEQ ID NO: 83578 - DNA, 23 bp, Artificial Sequence
  Synthetic
cctgctccagutctcatgtuact

SEQ ID NO: 83579 - DNA, 23 bp, Artificial Sequence
  Synthetic
cccutactgauaaagcaggcaga

SEQ ID NO: 83580 - DNA, 20 bp, Artificial Sequence
  Synthetic
ctctttgcagugctccccut

SEQ ID NO: 83581 - DNA, 26 bp, Artificial Sequence
  Synthetic
tgacgactcuttgctgtattttucca

SEQ ID NO: 83582 - DNA, 21 bp, Artificial Sequence
  Synthetic
ccccaagcaaguaggcctuaa

SEQ ID NO: 83583 - DNA, 20 bp, Artificial Sequence
  Synthetic
tctgtcggugctgttgacug

SEQ ID NO: 83584 - DNA, 25 bp, Artificial Sequence
  Synthetic
cgaggaagaaaaacaaucccactug

SEQ ID NO: 83585 - DNA, 24 bp, Artificial Sequence
  Synthetic
aatgcagccaacaagautcugaag

SEQ ID NO: 83586 - DNA, 20 bp, Artificial Sequence
  Synthetic
caacgucagcgggaactgua

SEQ ID NO: 83587 - DNA, 22 bp, Artificial Sequence
  Synthetic
ccccattugaactggtagucca

SEQ ID NO: 83588 - DNA, 18 bp, Artificial Sequence
  Synthetic
cctgcucctctccugggt

SEQ ID NO: 83589 - DNA, 21 bp, Artificial Sequence
  Synthetic
cgugaagcuggagaaggagaa

SEQ ID NO: 83590 - DNA, 18 bp, Artificial Sequence
  Synthetic
cttgcctccuccgggtut

SEQ ID NO: 83591 - DNA, 17 bp, Artificial Sequence
  Synthetic
gggcuagugccccaagg

SEQ ID NO: 83592 - DNA, 21 bp, Artificial Sequence
  Synthetic
gttgctgtgcucacacatgut

SEQ ID NO: 83593 - DNA, 27 bp, Artificial Sequence
  Synthetic
tccttaaaattcauaccagctctuccc

SEQ ID NO: 83594 - DNA, 20 bp, Artificial Sequence
  Synthetic
aggagggccutggaagctua

SEQ ID NO: 83595 - DNA, 20 bp, Artificial Sequence
  Synthetic
gcaagcccucattucaccag

SEQ ID NO: 83596 - DNA, 26 bp, Artificial Sequence
  Synthetic
ttggcatcataaugtgttttggctut

SEQ ID NO: 83597 - DNA, 22 bp, Artificial Sequence
  Synthetic
gaatgaacugcaagcccagtug

SEQ ID NO: 83598 - DNA, 22 bp, Artificial Sequence
  Synthetic
tggagcagaaacaccuccctua

SEQ ID NO: 83599 - DNA, 18 bp, Artificial Sequence
  Synthetic
gctgcguggacucgacag

SEQ ID NO: 83600 - DNA, 21 bp, Artificial Sequence
  Synthetic
gaacaaccuccctccctcauc

SEQ ID NO: 83601 - DNA, 23 bp, Artificial Sequence
  Synthetic
atgcttcaggauttgctgcuagt

SEQ ID NO: 83602 - DNA, 20 bp, Artificial Sequence
  Synthetic
cugagggagctguggaagag

SEQ ID NO: 83603 - DNA, 17 bp, Artificial Sequence
  Synthetic
cagacgccuaccgucca

SEQ ID NO: 83604 - DNA, 21 bp, Artificial Sequence
  Synthetic
cgtctggaguttttgggtgut

SEQ ID NO: 83605 - DNA, 21 bp, Artificial Sequence
  Synthetic
ccaggaaggagcacutacgut

SEQ ID NO: 83606 - DNA, 21 bp, Artificial Sequence
  Synthetic
gcttatagugctcagcugcct

SEQ ID NO: 83607 - DNA, 23 bp, Artificial Sequence
  Synthetic
tttcctgaguggcctttcttcuc

SEQ ID NO: 83608 - DNA, 28 bp, Artificial Sequence
  Synthetic
aacttcaaacaaaucaaaccagucaaca

SEQ ID NO: 83609 - DNA, 26 bp, Artificial Sequence
  Synthetic
agttgaagtagcutttatgcccucag

SEQ ID NO: 83610 - DNA, 17 bp, Artificial Sequence
  Synthetic
cctgccgcutccaucca

SEQ ID NO: 83611 - DNA, 17 bp, Artificial Sequence
  Synthetic
gtccccgugccgcauat

SEQ ID NO: 83612 - DNA, 17 bp, Artificial Sequence
  Synthetic
agcacggccutggucag

SEQ ID NO: 83613 - DNA, 23 bp, Artificial Sequence
  Synthetic
cctgaagtggutctgatgaccut

SEQ ID NO: 83614 - DNA, 24 bp, Artificial Sequence
  Synthetic
tcttcctgttuggctaaggtttug

SEQ ID NO: 83615 - DNA, 28 bp, Artificial Sequence
  Synthetic
cgagcugaagacaattttaactuggaaa

SEQ ID NO: 83616 - DNA, 21 bp, Artificial Sequence
  Synthetic
gaactaggcuccagggttgut

SEQ ID NO: 83617 - DNA, 22 bp, Artificial Sequence
  Synthetic
caaggaacucagagaggacugg

SEQ ID NO: 83618 - DNA, 21 bp, Artificial Sequence
  Synthetic
ccctgcucatggtcttugagt

SEQ ID NO: 83619 - DNA, 24 bp, Artificial Sequence
  Synthetic
gggaugtctauagggaagggaaga

SEQ ID NO: 83620 - DNA, 22 bp, Artificial Sequence
  Synthetic
gtgttttgcuctccaccctuct

SEQ ID NO: 83621 - DNA, 25 bp, Artificial Sequence
  Synthetic
gaaatgctgaauaaggctgaggtug

SEQ ID NO: 83622 - DNA, 23 bp, Artificial Sequence
  Synthetic
caagaccgcaaautttccctcut

SEQ ID NO: 83623 - DNA, 21 bp, Artificial Sequence
  Synthetic
ctggatcaccccutcctgaug

SEQ ID NO: 83624 - DNA, 25 bp, Artificial Sequence
  Synthetic
ctgtgtggcuattatctgcauacct

SEQ ID NO: 83625 - DNA, 19 bp, Artificial Sequence
  Synthetic
gttcgcguggcctctguat

SEQ ID NO: 83626 - DNA, 21 bp, Artificial Sequence
  Synthetic
cagtgtctgcuctccatccuc

SEQ ID NO: 83627 - DNA, 20 bp, Artificial Sequence
  Synthetic
ggtgggccauctccactauc

SEQ ID NO: 83628 - DNA, 20 bp, Artificial Sequence
  Synthetic
ccuaaccacauccgccacaa

SEQ ID NO: 83629 - DNA, 19 bp, Artificial Sequence
  Synthetic
ggacccgguctcctgguag

SEQ ID NO: 83630 - DNA, 27 bp, Artificial Sequence
  Synthetic
atgatttgtuggcagaatttgtctugt

SEQ ID NO: 83631 - DNA, 28 bp, Artificial Sequence
  Synthetic
gacaactgctcutcctttctttttagut

SEQ ID NO: 83632 - DNA, 20 bp, Artificial Sequence
  Synthetic
gcggtccaugtaaccaugac

SEQ ID NO: 83633 - DNA, 28 bp, Artificial Sequence
  Synthetic
tcttttcatggtcucgtctcctaattuc

SEQ ID NO: 83634 - DNA, 28 bp, Artificial Sequence
  Synthetic
ctctgagttgtcugtattcttctcauca

SEQ ID NO: 83635 - DNA, 23 bp, Artificial Sequence
  Synthetic
attaaactguggaccaugcccat

SEQ ID NO: 83636 - DNA, 28 bp, Artificial Sequence
  Synthetic
ggaactagctucatctgagcagaauaaa

SEQ ID NO: 83637 - DNA, 28 bp, Artificial Sequence
  Synthetic
gcctgtctaaaucactttcaaaatccug

SEQ ID NO: 83638 - DNA, 21 bp, Artificial Sequence
  Synthetic
ttcuaccagcccgtttucaca

SEQ ID NO: 83639 - DNA, 24 bp, Artificial Sequence
  Synthetic
gctgcatcugaggattgatuccag

SEQ ID NO: 83640 - DNA, 21 bp, Artificial Sequence
  Synthetic
cgagggacaaaccugacugag

SEQ ID NO: 83641 - DNA, 28 bp, Artificial Sequence
  Synthetic
ccaggaauactttaagttaugcccagaa

SEQ ID NO: 83642 - DNA, 21 bp, Artificial Sequence
  Synthetic
gcgtcuccaagattcttugcc

SEQ ID NO: 83643 - DNA, 20 bp, Artificial Sequence
  Synthetic
ggagcccccgacuauaggaa

SEQ ID NO: 83644 - DNA, 21 bp, Artificial Sequence
  Synthetic
gcccagugactatccagucca

SEQ ID NO: 83645 - DNA, 22 bp, Artificial Sequence
  Synthetic
tgcctgtctuttcacccactut

SEQ ID NO: 83646 - DNA, 25 bp, Artificial Sequence
  Synthetic
gcaggcauaagtgaatggtcuagat

SEQ ID NO: 83647 - DNA, 23 bp, Artificial Sequence
  Synthetic
gctgttttugtctcctcuagcgt

SEQ ID NO: 83648 - DNA, 25 bp, Artificial Sequence
  Synthetic
gacaagctgttugatgtttgtggua

SEQ ID NO: 83649 - DNA, 24 bp, Artificial Sequence
  Synthetic
cccatcctuaacagttacctguga

SEQ ID NO: 83650 - DNA, 26 bp, Artificial Sequence
  Synthetic
acaaaaacatccucatctcggaagut

SEQ ID NO: 83651 - DNA, 25 bp, Artificial Sequence
  Synthetic
cagttcagcttutgtttggttggut

SEQ ID NO: 83652 - DNA, 27 bp, Artificial Sequence
  Synthetic
atgggtguagatagagtgaauggaaga

SEQ ID NO: 83653 - DNA, 17 bp, Artificial Sequence
  Synthetic
ttcaugcgacgcugggt

SEQ ID NO: 83654 - DNA, 24 bp, Artificial Sequence
  Synthetic
gaaacauaggaggacagttuggca

SEQ ID NO: 83655 - DNA, 27 bp, Artificial Sequence
  Synthetic
agagagaccuaagcctgtatggatuac

SEQ ID NO: 83656 - DNA, 27 bp, Artificial Sequence
  Synthetic
ctgttgattatcuggccaaaaatguga

SEQ ID NO: 83657 - DNA, 21 bp, Artificial Sequence
  Synthetic
gttagggtugggctgggaaut

SEQ ID NO: 83658 - DNA, 23 bp, Artificial Sequence
  Synthetic
ctggtcttucagttccatgucgt

SEQ ID NO: 83659 - DNA, 19 bp, Artificial Sequence
  Synthetic
tccugagcgagcgagguaa

SEQ ID NO: 83660 - DNA, 21 bp, Artificial Sequence
  Synthetic
gccacagcauacatcctgucc

SEQ ID NO: 83661 - DNA, 26 bp, Artificial Sequence
  Synthetic
ttccutacttttcctuacgcacaaga

SEQ ID NO: 83662 - DNA, 20 bp, Artificial Sequence
  Synthetic
gctagtcacuggtgcggtuc

SEQ ID NO: 83663 - DNA, 28 bp, Artificial Sequence
  Synthetic
tggctttttggugtttgaattttctgut

SEQ ID NO: 83664 - DNA, 28 bp, Artificial Sequence
  Synthetic
cttgttttauaagttccgtuaagcacac

SEQ ID NO: 83665 - DNA, 25 bp, Artificial Sequence
  Synthetic
gtatatttccccugctccactcauc

SEQ ID NO: 83666 - DNA, 24 bp, Artificial Sequence
  Synthetic
ccaactgaaguctctcctgtccua

SEQ ID NO: 83667 - DNA, 24 bp, Artificial Sequence
  Synthetic
ccctctcucattttcagacugagg

SEQ ID NO: 83668 - DNA, 26 bp, Artificial Sequence
  Synthetic
caggtcttgaaaacucttcggaaaut

SEQ ID NO: 83669 - DNA, 30 bp, Artificial Sequence
  Synthetic
tcattaagattcauttgttcagggatugga

SEQ ID NO: 83670 - DNA, 28 bp, Artificial Sequence
  Synthetic
acttagcaaucgagtaaucaagaaaccc

SEQ ID NO: 83671 - DNA, 26 bp, Artificial Sequence
  Synthetic
actcaatgtctuccacagttctucaa

SEQ ID NO: 83672 - DNA, 23 bp, Artificial Sequence
  Synthetic
ggaacatgagagugccagcttua

SEQ ID NO: 83673 - DNA, 21 bp, Artificial Sequence
  Synthetic
cctttaaccacugggtugggt

SEQ ID NO: 83674 - DNA, 24 bp, Artificial Sequence
  Synthetic
cacaaactugaacagcuacggaac

SEQ ID NO: 83675 - DNA, 24 bp, Artificial Sequence
  Synthetic
ggttgtgaggutgcatttgaucat

SEQ ID NO: 83676 - DNA, 28 bp, Artificial Sequence
  Synthetic
cactgcaaagaaagaauttgagactuca

SEQ ID NO: 83677 - DNA, 25 bp, Artificial Sequence
  Synthetic
cttttcctcaucacctgctccaaua

SEQ ID NO: 83678 - DNA, 23 bp, Artificial Sequence
  Synthetic
tgccaacaguctgaaacatcugt

SEQ ID NO: 83679 - DNA, 23 bp, Artificial Sequence
  Synthetic
gatgaatgtuacagcagccctug

SEQ ID NO: 83680 - DNA, 18 bp, Artificial Sequence
  Synthetic
catggguggguggacagt

SEQ ID NO: 83681 - DNA, 22 bp, Artificial Sequence
  Synthetic
cttccatgaggaugctgagguc

SEQ ID NO: 83682 - DNA, 24 bp, Artificial Sequence
  Synthetic
cattgauctgtagcuggaaggaga

SEQ ID NO: 83683 - DNA, 20 bp, Artificial Sequence
  Synthetic
cctttcctgcuccccaggua

SEQ ID NO: 83684 - DNA, 28 bp, Artificial Sequence
  Synthetic
tcctaagacuagtttagaggaugcaaca

SEQ ID NO: 83685 - DNA, 27 bp, Artificial Sequence
  Synthetic
tggaaatagcugaacattcaagucaca

SEQ ID NO: 83686 - DNA, 21 bp, Artificial Sequence
  Synthetic
gcagaccguggagtacctgua

SEQ ID NO: 83687 - DNA, 23 bp, Artificial Sequence
  Synthetic
gtatctggccutgcggaatttug

SEQ ID NO: 83688 - DNA, 25 bp, Artificial Sequence
  Synthetic
agactcaagggaggaugagattuct

SEQ ID NO: 83689 - DNA, 21 bp, Artificial Sequence
  Synthetic
ccaagugggucccaaaagcat

SEQ ID NO: 83690 - DNA, 24 bp, Artificial Sequence
  Synthetic
tggttcaaaagugaagctctgcua

SEQ ID NO: 83691 - DNA, 23 bp, Artificial Sequence
  Synthetic
gactctgagcugtgttctauggg

SEQ ID NO: 83692 - DNA, 19 bp, Artificial Sequence
  Synthetic
caaugcagcgaccatcgut

SEQ ID NO: 83693 - DNA, 22 bp, Artificial Sequence
  Synthetic
catggtcagugtcaggatggua

SEQ ID NO: 83694 - DNA, 21 bp, Artificial Sequence
  Synthetic
gggtctgucttgctcaaucag

SEQ ID NO: 83695 - DNA, 24 bp, Artificial Sequence
  Synthetic
ctttctgccacccuctttttcaut

SEQ ID NO: 83696 - DNA, 26 bp, Artificial Sequence
  Synthetic
cataactctguatttctccagcucgt

SEQ ID NO: 83697 - DNA, 17 bp, Artificial Sequence
  Synthetic
acccugggcctcaguca

SEQ ID NO: 83698 - DNA, 21 bp, Artificial Sequence
  Synthetic
gatggaagcagugaccuggat

SEQ ID NO: 83699 - DNA, 27 bp, Artificial Sequence
  Synthetic
cttctgttttgcutttaccctagtgut

SEQ ID NO: 83700 - DNA, 23 bp, Artificial Sequence
  Synthetic
tcuatcaatctccuccaggccat

SEQ ID NO: 83701 - DNA, 25 bp, Artificial Sequence
  Synthetic
gcccaaggugacatttctgtcttua

SEQ ID NO: 83702 - DNA, 23 bp, Artificial Sequence
  Synthetic
ctagatccguccttctgcuacct

SEQ ID NO: 83703 - DNA, 22 bp, Artificial Sequence
  Synthetic
aggctatggcugtgtatgtguc

SEQ ID NO: 83704 - DNA, 21 bp, Artificial Sequence
  Synthetic
acaccaagaagccacuctucc

SEQ ID NO: 83705 - DNA, 21 bp, Artificial Sequence
  Synthetic
ggacgacaugaaggccaauct

SEQ ID NO: 83706 - DNA, 21 bp, Artificial Sequence
  Synthetic
ggtggacccuggtaggcuaaa

SEQ ID NO: 83707 - DNA, 25 bp, Artificial Sequence
  Synthetic
gagtaaaguccacagggtucagaag

SEQ ID NO: 83708 - DNA, 17 bp, Artificial Sequence
  Synthetic
actctccugccgaugcc

SEQ ID NO: 83709 - DNA, 26 bp, Artificial Sequence
  Synthetic
gctgacgagguctttctttttctugt

SEQ ID NO: 83710 - DNA, 23 bp, Artificial Sequence
  Synthetic
gcagatgcaggugtaggaaucaa

SEQ ID NO: 83711 - DNA, 23 bp, Artificial Sequence
  Synthetic
ctgccttgguctttgagaaucct

SEQ ID NO: 83712 - DNA, 24 bp, Artificial Sequence
  Synthetic
ctacaagatcugctaacggauggt

SEQ ID NO: 83713 - DNA, 22 bp, Artificial Sequence
  Synthetic
gctggtgguttctactctgugg

SEQ ID NO: 83714 - DNA, 19 bp, Artificial Sequence
  Synthetic
cacactgcucccgatguca

SEQ ID NO: 83715 - DNA, 21 bp, Artificial Sequence
  Synthetic
acgtggagutggcattugact

SEQ ID NO: 83716 - DNA, 27 bp, Artificial Sequence
  Synthetic
agggaaagaagagagaauaggagucaa

SEQ ID NO: 83717 - DNA, 22 bp, Artificial Sequence
  Synthetic
gtccaagguaaagcatugcagt

SEQ ID NO: 83718 - DNA, 19 bp, Artificial Sequence
  Synthetic
catctccacuccagccgut

SEQ ID NO: 83719 - DNA, 26 bp, Artificial Sequence
  Synthetic
gagacucaagagccctaaucaaaagt

SEQ ID NO: 83720 - DNA, 25 bp, Artificial Sequence
  Synthetic
aaagtattcuaggtttgcugccaca

SEQ ID NO: 83721 - DNA, 25 bp, Artificial Sequence
  Synthetic
gtgaacaagaguagatgcctucaga

SEQ ID NO: 83722 - DNA, 27 bp, Artificial Sequence
  Synthetic
gctgctttatttutaactgcagtgugt

SEQ ID NO: 83723 - DNA, 22 bp, Artificial Sequence
  Synthetic
tgcgguacctgctgaauacaag

SEQ ID NO: 83724 - DNA, 26 bp, Artificial Sequence
  Synthetic
ttuaaggagcaaagaatcugcagagt

SEQ ID NO: 83725 - DNA, 27 bp, Artificial Sequence
  Synthetic
gccaaataccaaucattctcctuggat

SEQ ID NO: 83726 - DNA, 26 bp, Artificial Sequence
  Synthetic
cggaagcaugttacttatuggcagaa

SEQ ID NO: 83727 - DNA, 21 bp, Artificial Sequence
  Synthetic
ggctgggaauaaaggtugggt

SEQ ID NO: 83728 - DNA, 25 bp, Artificial Sequence
  Synthetic
cttctttgactutagtggcactugg

SEQ ID NO: 83729 - DNA, 23 bp, Artificial Sequence
  Synthetic
ctcaatcagcagutcagctcuca

SEQ ID NO: 83730 - DNA, 21 bp, Artificial Sequence
  Synthetic
gctgcagcutgatgaggucaa

SEQ ID NO: 83731 - DNA, 26 bp, Artificial Sequence
  Synthetic
gtaauctaggaaccucaaggcaaagt

SEQ ID NO: 83732 - DNA, 25 bp, Artificial Sequence
  Synthetic
agacctgaucctatgcaauggagat

SEQ ID NO: 83733 - DNA, 23 bp, Artificial Sequence
  Synthetic
ccatgtuagaagagagcaugcct

SEQ ID NO: 83734 - DNA, 23 bp, Artificial Sequence
  Synthetic
gccaccuttgatcauggaagaaa

SEQ ID NO: 83735 - DNA, 21 bp, Artificial Sequence
  Synthetic
ccaugccaggugaaaaagcac

SEQ ID NO: 83736 - DNA, 18 bp, Artificial Sequence
  Synthetic
cctggaucccgccaagua

SEQ ID NO: 83737 - DNA, 18 bp, Artificial Sequence
  Synthetic
cgaccugctcacgcugac

SEQ ID NO: 83738 - DNA, 22 bp, Artificial Sequence
  Synthetic
cugaagtgcctuagcagagacc

SEQ ID NO: 83739 - DNA, 22 bp, Artificial Sequence
  Synthetic
atcagcaatgucacagcctuct

SEQ ID NO: 83740 - DNA, 18 bp, Artificial Sequence
  Synthetic
ggcagcggcacutguact

SEQ ID NO: 83741 - DNA, 18 bp, Artificial Sequence
  Synthetic
acaugccacgtgguggac

SEQ ID NO: 83742 - DNA, 20 bp, Artificial Sequence
  Synthetic
catagtcugccacgcctcug

SEQ ID NO: 83743 - DNA, 20 bp, Artificial Sequence
  Synthetic
aactaacugcccuggcacat

SEQ ID NO: 83744 - DNA, 25 bp, Artificial Sequence
  Synthetic
agacgtctcaggutaatctctcuga

SEQ ID NO: 83745 - DNA, 26 bp, Artificial Sequence
  Synthetic
gttctcacuggatatgcttgaugaca

SEQ ID NO: 83746 - DNA, 26 bp, Artificial Sequence
  Synthetic
gtacagaaacgcuttaagttugcaca

SEQ ID NO: 83747 - DNA, 22 bp, Artificial Sequence
  Synthetic
gagtggttcucagcaggtugaa

SEQ ID NO: 83748 - DNA, 19 bp, Artificial Sequence
  Synthetic
gggatuaacgcggccauga

SEQ ID NO: 83749 - DNA, 22 bp, Artificial Sequence
  Synthetic
cacgtatcugctcacacaguct

SEQ ID NO: 83750 - DNA, 27 bp, Artificial Sequence
  Synthetic
gagtgaatctcucacgtatttggauct

SEQ ID NO: 83751 - DNA, 22 bp, Artificial Sequence
  Synthetic
tggtggcagaacugatcaacug

SEQ ID NO: 83752 - DNA, 22 bp, Artificial Sequence
  Synthetic
cagacacaggutcctgatccuc

SEQ ID NO: 83753 - DNA, 25 bp, Artificial Sequence
  Synthetic
gctttcctgauctttctgctgtcua

SEQ ID NO: 83754 - DNA, 20 bp, Artificial Sequence
  Synthetic
caucaucccaccaaggccaa

SEQ ID NO: 83755 - DNA, 22 bp, Artificial Sequence
  Synthetic
gacttcctugcctctcttggua

SEQ ID NO: 83756 - DNA, 23 bp, Artificial Sequence
  Synthetic
gacgatgccugttcaaguaacac

SEQ ID NO: 83757 - DNA, 27 bp, Artificial Sequence
  Synthetic
agtatcaactgcuaaacaagagcacut

SEQ ID NO: 83758 - DNA, 21 bp, Artificial Sequence
  Synthetic
gaggacagagccaguaggtug

SEQ ID NO: 83759 - DNA, 25 bp, Artificial Sequence
  Synthetic
accagagtccutaacaagcatugag

SEQ ID NO: 83760 - DNA, 21 bp, Artificial Sequence
  Synthetic
gcctguccaggtccatcucat

SEQ ID NO: 83761 - DNA, 21 bp, Artificial Sequence
  Synthetic
tgcuaagctgguacgaccaag

SEQ ID NO: 83762 - DNA, 22 bp, Artificial Sequence
  Synthetic
ctccacataaucaggccagcut

SEQ ID NO: 83763 - DNA, 20 bp, Artificial Sequence
  Synthetic
ccatgggagccutctgugag

SEQ ID NO: 83764 - DNA, 28 bp, Artificial Sequence
  Synthetic
tgttaatggtggcuttttgtttgttugt

SEQ ID NO: 83765 - DNA, 28 bp, Artificial Sequence
  Synthetic
tctacctcacuctaacaagcagauaact

SEQ ID NO: 83766 - DNA, 21 bp, Artificial Sequence
  Synthetic
catguggaacagaggctcuct

SEQ ID NO: 83767 - DNA, 26 bp, Artificial Sequence
  Synthetic
tgttccttcttuccctcccttactua

SEQ ID NO: 83768 - DNA, 21 bp, Artificial Sequence
  Synthetic
gaagcaacccacagaugtucc

SEQ ID NO: 83769 - DNA, 19 bp, Artificial Sequence
  Synthetic
tcaacgagugcgtcucgaa

SEQ ID NO: 83770 - DNA, 21 bp, Artificial Sequence
  Synthetic
tccatgguaggtcccgttuct

SEQ ID NO: 83771 - DNA, 22 bp, Artificial Sequence
  Synthetic
gggatgattgcugagtgtccug

SEQ ID NO: 83772 - DNA, 17 bp, Artificial Sequence
  Synthetic
caggtggcgucgttcug

SEQ ID NO: 83773 - DNA, 17 bp, Artificial Sequence
  Synthetic
cagcctcucacccgugt

SEQ ID NO: 83774 - DNA, 24 bp, Artificial Sequence
  Synthetic
gtgacttcagcuacgtctcugaat

SEQ ID NO: 83775 - DNA, 21 bp, Artificial Sequence
  Synthetic
ctgtgucccaagaccctgaug

SEQ ID NO: 83776 - DNA, 20 bp, Artificial Sequence
  Synthetic
ctgcatucacatccgctugg

SEQ ID NO: 83777 - DNA, 27 bp, Artificial Sequence
  Synthetic
caggtgactcucttttctgtacttuct

SEQ ID NO: 83778 - DNA, 18 bp, Artificial Sequence
  Synthetic
gguccgagccgtgaucag

SEQ ID NO: 83779 - DNA, 23 bp, Artificial Sequence
  Synthetic
tgctcttcaucctcgatggtgua

SEQ ID NO: 83780 - DNA, 29 bp, Artificial Sequence
  Synthetic
gatggaaatgaaacaauttgtcactguct

SEQ ID NO: 83781 - DNA, 23 bp, Artificial Sequence
  Synthetic
tgtttcacctuggacaggaacuc

SEQ ID NO: 83782 - DNA, 21 bp, Artificial Sequence
  Synthetic
tcaggagutcctguccaaggt

SEQ ID NO: 83783 - DNA, 28 bp, Artificial Sequence
  Synthetic
attccattacugggatttttcacguagt

SEQ ID NO: 83784 - DNA, 27 bp, Artificial Sequence
  Synthetic
atgcccttuactgaaatgucagaagaa

SEQ ID NO: 83785 - DNA, 28 bp, Artificial Sequence
  Synthetic
ccttcattccautactgggattttucac

SEQ ID NO: 83786 - DNA, 26 bp, Artificial Sequence
  Synthetic
atgacttgcagucttgtgatcugaat

SEQ ID NO: 83787 - DNA, 27 bp, Artificial Sequence
  Synthetic
tttccttcagggauatcaatgtucagg

SEQ ID NO: 83788 - DNA, 26 bp, Artificial Sequence
  Synthetic
ttttcactcaatcuaagcccacacut

SEQ ID NO: 83789 - DNA, 28 bp, Artificial Sequence
  Synthetic
tgaaagaauaaacacagaactggtuggt

SEQ ID NO: 83790 - DNA, 20 bp, Artificial Sequence
  Synthetic
caagacccaucctggcucat

SEQ ID NO: 83791 - DNA, 24 bp, Artificial Sequence
  Synthetic
gtcttcuacttcagcugcagagag

SEQ ID NO: 83792 - DNA, 22 bp, Artificial Sequence
  Synthetic
cattccccucctcttggtgtug

SEQ ID NO: 83793 - DNA, 28 bp, Artificial Sequence
  Synthetic
ccacaatatcaucaacctccucaaagaa

SEQ ID NO: 83794 - DNA, 17 bp, Artificial Sequence
  Synthetic
ccctgtgcuggcaccua

SEQ ID NO: 83795 - DNA, 21 bp, Artificial Sequence
  Synthetic
atcagcaaccccuguaacgag

SEQ ID NO: 83796 - DNA, 19 bp, Artificial Sequence
  Synthetic
ggttggugtcgcagtugga

SEQ ID NO: 83797 - DNA, 17 bp, Artificial Sequence
  Synthetic
cgtggguggtgugccat

SEQ ID NO: 83798 - DNA, 23 bp, Artificial Sequence
  Synthetic
cctgctgctuttcatcgtgaaug

SEQ ID NO: 83799 - DNA, 27 bp, Artificial Sequence
  Synthetic
agagatgagtgcuattcttcaggctua

SEQ ID NO: 83800 - DNA, 23 bp, Artificial Sequence
  Synthetic
gccacgggcutcttaaattucat

SEQ ID NO: 83801 - DNA, 23 bp, Artificial Sequence
  Synthetic
cagaugccaaugagaggaaaggt

SEQ ID NO: 83802 - DNA, 21 bp, Artificial Sequence
  Synthetic
cgagacucaccacctuggact

SEQ ID NO: 83803 - DNA, 25 bp, Artificial Sequence
  Synthetic
ccaagaaccucgcatagtcatacug

SEQ ID NO: 83804 - DNA, 23 bp, Artificial Sequence
  Synthetic
cttaggcttcucctggcaatcuc

SEQ ID NO: 83805 - DNA, 26 bp, Artificial Sequence
  Synthetic
gaattcacacagucctagtttccuct

SEQ ID NO: 83806 - DNA, 21 bp, Artificial Sequence
  Synthetic
gttttctugccgtggugcaaa

SEQ ID NO: 83807 - DNA, 28 bp, Artificial Sequence
  Synthetic
ggacgtagagtuattgaaaatgcagaug

SEQ ID NO: 83808 - DNA, 22 bp, Artificial Sequence
  Synthetic
gtgtccguttcctccucagaac

SEQ ID NO: 83809 - DNA, 27 bp, Artificial Sequence
  Synthetic
tcccaaccaugaagatttctttgcuaa

SEQ ID NO: 83810 - DNA, 23 bp, Artificial Sequence
  Synthetic
cutccttgctacucagcacaagt

SEQ ID NO: 83811 - DNA, 23 bp, Artificial Sequence
  Synthetic
ggtgatggtugagactgtgguaa

SEQ ID NO: 83812 - DNA, 19 bp, Artificial Sequence
  Synthetic
catcctgccagugcctcua

SEQ ID NO: 83813 - DNA, 21 bp, Artificial Sequence
  Synthetic
tcaaagaaggcccuguccaag

SEQ ID NO: 83814 - DNA, 22 bp, Artificial Sequence
  Synthetic
ccttacctauggccaagaugcc

SEQ ID NO: 83815 - DNA, 28 bp, Artificial Sequence
  Synthetic
tcccaccaccacagutagagaattatua

SEQ ID NO: 83816 - DNA, 25 bp, Artificial Sequence
  Synthetic
cccagccuagacattttctuaaacc

SEQ ID NO: 83817 - DNA, 29 bp, Artificial Sequence
  Synthetic
gcattaagctguccttttatctgttccut

SEQ ID NO: 83818 - DNA, 19 bp, Artificial Sequence
  Synthetic
ggttccacugcgagtgtug

SEQ ID NO: 83819 - DNA, 18 bp, Artificial Sequence
  Synthetic
cattggguctcccgguct

SEQ ID NO: 83820 - DNA, 22 bp, Artificial Sequence
  Synthetic
gttgacutcccaatuccagcag

SEQ ID NO: 83821 - DNA, 21 bp, Artificial Sequence
  Synthetic
ccaagaucccctggucaagag

SEQ ID NO: 83822 - DNA, 22 bp, Artificial Sequence
  Synthetic
catgctucaggctcaggauaca

SEQ ID NO: 83823 - DNA, 20 bp, Artificial Sequence
  Synthetic
ccagcttcgucttgctguga

SEQ ID NO: 83824 - DNA, 24 bp, Artificial Sequence
  Synthetic
ccctaattctggugccttcactut

SEQ ID NO: 83825 - DNA, 24 bp, Artificial Sequence
  Synthetic
tcacagtcttucatcaggttcugg

SEQ ID NO: 83826 - DNA, 20 bp, Artificial Sequence
  Synthetic
ggcacagggutgagtgucat

SEQ ID NO: 83827 - DNA, 20 bp, Artificial Sequence
  Synthetic
ccacagugtguaccccacag

SEQ ID NO: 83828 - DNA, 23 bp, Artificial Sequence
  Synthetic
agttguacaatctccugggaggt

SEQ ID NO: 83829 - DNA, 22 bp, Artificial Sequence
  Synthetic
ctgggctauactgggagcuact

SEQ ID NO: 83830 - DNA, 18 bp, Artificial Sequence
  Synthetic
gcacaggcucuccacagg

SEQ ID NO: 83831 - DNA, 20 bp, Artificial Sequence
  Synthetic
tgcaaaggagcuctgctuca

SEQ ID NO: 83832 - DNA, 26 bp, Artificial Sequence
  Synthetic
tttgatgtcacutgcactttagguct

SEQ ID NO: 83833 - DNA, 23 bp, Artificial Sequence
  Synthetic
cgatgccccacaauttcacatut

SEQ ID NO: 83834 - DNA, 29 bp, Artificial Sequence
  Synthetic
acacttgccuagaattttactaacuggaa

SEQ ID NO: 83835 - DNA, 27 bp, Artificial Sequence
  Synthetic
aaatggttgtauggctgttggtttuac

SEQ ID NO: 83836 - DNA, 22 bp, Artificial Sequence
  Synthetic
gggattcucaggagtgtguacc

SEQ ID NO: 83837 - DNA, 27 bp, Artificial Sequence
  Synthetic
gcctaacaccuaagtgatgctctttut

SEQ ID NO: 83838 - DNA, 22 bp, Artificial Sequence
  Synthetic
cagccacugucaaagcaaagac

SEQ ID NO: 83839 - DNA, 32 bp, Artificial Sequence
  Synthetic
gttacgtagatgagaautctaaatcacacuct

SEQ ID NO: 83840 - DNA, 25 bp, Artificial Sequence
  Synthetic
tggagttggguatgtggattccaua

SEQ ID NO: 83841 - DNA, 22 bp, Artificial Sequence
  Synthetic
tcctccggguaaaacacatucc

SEQ ID NO: 83842 - DNA, 22 bp, Artificial Sequence
  Synthetic
ggaactgagaugtccccagcua

SEQ ID NO: 83843 - DNA, 25 bp, Artificial Sequence
  Synthetic
caactcctgagauctgctctgttut

SEQ ID NO: 83844 - DNA, 20 bp, Artificial Sequence
  Synthetic
gggccugagaucaccaagac

SEQ ID NO: 83845 - DNA, 21 bp, Artificial Sequence
  Synthetic
gatgtgcuagttccaccucca

SEQ ID NO: 83846 - DNA, 22 bp, Artificial Sequence
  Synthetic
cctcacaugtgcactctuccaa

SEQ ID NO: 83847 - DNA, 27 bp, Artificial Sequence
  Synthetic
cagguaaaaagaatttcctucagcact

SEQ ID NO: 83848 - DNA, 21 bp, Artificial Sequence
  Synthetic
ctgagccuggaaaggtggtua

SEQ ID NO: 83849 - DNA, 23 bp, Artificial Sequence
  Synthetic
cctccaggugagaaagaucgaga

SEQ ID NO: 83850 - DNA, 26 bp, Artificial Sequence
  Synthetic
tctctctaagtcaugatctcgctcuc

SEQ ID NO: 83851 - DNA, 26 bp, Artificial Sequence
  Synthetic
agagctttaggagucttcctttccut

SEQ ID NO: 83852 - DNA, 28 bp, Artificial Sequence
  Synthetic
atttttcagugacagacauacagagagg

SEQ ID NO: 83853 - DNA, 21 bp, Artificial Sequence
  Synthetic
cauccgggacuacagggagaa

SEQ ID NO: 83854 - DNA, 23 bp, Artificial Sequence
  Synthetic
ctcctcauccagatuggaccaaa

SEQ ID NO: 83855 - DNA, 22 bp, Artificial Sequence
  Synthetic
cctttccuaggcctggaatcuc

SEQ ID NO: 83856 - DNA, 21 bp, Artificial Sequence
  Synthetic
actcatcgagutgctccucac

SEQ ID NO: 83857 - DNA, 28 bp, Artificial Sequence
  Synthetic
tgttcttctaugacatttctcccucact

SEQ ID NO: 83858 - DNA, 24 bp, Artificial Sequence
  Synthetic
ctactctcacucagaccctcttug

SEQ ID NO: 83859 - DNA, 21 bp, Artificial Sequence
  Synthetic
gaacaccaugctgagccttug

SEQ ID NO: 83860 - DNA, 20 bp, Artificial Sequence
  Synthetic
gtcgtttgcccuctccagut

SEQ ID NO: 83861 - DNA, 19 bp, Artificial Sequence
  Synthetic
ccgtagauggcgtgcaguc

SEQ ID NO: 83862 - DNA, 21 bp, Artificial Sequence
  Synthetic
ccgcatctcutcccgatgtut

SEQ ID NO: 83863 - DNA, 23 bp, Artificial Sequence
  Synthetic
tcgcacauttcgagaugaagagg

SEQ ID NO: 83864 - DNA, 19 bp, Artificial Sequence
  Synthetic
cugtggtgttugggaggct

SEQ ID NO: 83865 - DNA, 18 bp, Artificial Sequence
  Synthetic
gccctggcuatgcaggua

SEQ ID NO: 83866 - DNA, 21 bp, Artificial Sequence
  Synthetic
agautggcttctuccgcacaa

SEQ ID NO: 83867 - DNA, 19 bp, Artificial Sequence
  Synthetic
cuccgggcttucgaggaaa

SEQ ID NO: 83868 - DNA, 19 bp, Artificial Sequence
  Synthetic
ccttcgcutcgctcttucc

SEQ ID NO: 83869 - DNA, 20 bp, Artificial Sequence
  Synthetic
cctcggcgcuttaaccctut

SEQ ID NO: 83870 - DNA, 23 bp, Artificial Sequence
  Synthetic
gcaggtactuctgtcagctgaut

SEQ ID NO: 83871 - DNA, 18 bp, Artificial Sequence
  Synthetic
ccccuagcacgtgccuac

SEQ ID NO: 83872 - DNA, 24 bp, Artificial Sequence
  Synthetic
gtgatgaaauggccaagaatcugg

SEQ ID NO: 83873 - DNA, 28 bp, Artificial Sequence
  Synthetic
tgctggatctcugtgatgaaaaactuaa

SEQ ID NO: 83874 - DNA, 24 bp, Artificial Sequence
  Synthetic
gatctttgccagguttccgttuat

SEQ ID NO: 83875 - DNA, 23 bp, Artificial Sequence
  Synthetic
tcaggtgguggagagttgtttut

SEQ ID NO: 83876 - DNA, 26 bp, Artificial Sequence
  Synthetic
gtgaggcattutggaaagtttctugt

SEQ ID NO: 83877 - DNA, 27 bp, Artificial Sequence
  Synthetic
gcatgacattugcttctgctaauaact

SEQ ID NO: 83878 - DNA, 19 bp, Artificial Sequence
  Synthetic
cgcucttacctuccaccca

SEQ ID NO: 83879 - DNA, 27 bp, Artificial Sequence
  Synthetic
gagagcgaagtutcagagactcttaut

SEQ ID NO: 83880 - DNA, 33 bp, Artificial Sequence
  Synthetic
acagatttcatgtuagtaacttggttattttug

SEQ ID NO: 83881 - DNA, 23 bp, Artificial Sequence
  Synthetic
acctgcattugacccatttccut

SEQ ID NO: 83882 - DNA, 27 bp, Artificial Sequence
  Synthetic
atcttttcagtagugtgattaggcgut

SEQ ID NO: 83883 - DNA, 24 bp, Artificial Sequence
  Synthetic
cagaccccgcautatttcaatcuc

SEQ ID NO: 83884 - DNA, 21 bp, Artificial Sequence
  Synthetic
attcucaagtggtugcgggaa

SEQ ID NO: 83885 - DNA, 26 bp, Artificial Sequence
  Synthetic
ggaggaaggagaagcugaaauagaac

SEQ ID NO: 83886 - DNA, 21 bp, Artificial Sequence
  Synthetic
guggacagatcucacgggaat

SEQ ID NO: 83887 - DNA, 26 bp, Artificial Sequence
  Synthetic
ggtcaggatugaatgggaaaugaaga

SEQ ID NO: 83888 - DNA, 25 bp, Artificial Sequence
  Synthetic
ccacatcagutcttcaccuccaaat

SEQ ID NO: 83889 - DNA, 20 bp, Artificial Sequence
  Synthetic
gcccactccutcccaaacut

SEQ ID NO: 83890 - DNA, 28 bp, Artificial Sequence
  Synthetic
tcaaattacagucaactgcagaaaccua

SEQ ID NO: 83891 - DNA, 22 bp, Artificial Sequence
  Synthetic
cctggaggucttttugggacag

SEQ ID NO: 83892 - DNA, 21 bp, Artificial Sequence
  Synthetic
gctctguccaggtgtccttug

SEQ ID NO: 83893 - DNA, 26 bp, Artificial Sequence
  Synthetic
tgaaggagauagacatcagccaucat

SEQ ID NO: 83894 - DNA, 21 bp, Artificial Sequence
  Synthetic
tcccagtgcuggtgtttguag

SEQ ID NO: 83895 - DNA, 28 bp, Artificial Sequence
  Synthetic
tgagattcgtuacggaaactatuacagg

SEQ ID NO: 83896 - DNA, 22 bp, Artificial Sequence
  Synthetic
ccaagaactugccgcagtttut

SEQ ID NO: 83897 - DNA, 20 bp, Artificial Sequence
  Synthetic
actcctcccutctgctucgt

SEQ ID NO: 83898 - DNA, 28 bp, Artificial Sequence
  Synthetic
caggcaatattucatgtgggagatuaga

SEQ ID NO: 83899 - DNA, 29 bp, Artificial Sequence
  Synthetic
gttggaatatttcuggttgttacaauccc

SEQ ID NO: 83900 - DNA, 24 bp, Artificial Sequence
  Synthetic
cttaccaaaggucagtgggatugt

SEQ ID NO: 83901 - DNA, 23 bp, Artificial Sequence
  Synthetic
ctctgtgtgcutaggtagagcug

SEQ ID NO: 83902 - DNA, 25 bp, Artificial Sequence
  Synthetic
atctgtatgutcctggucagagact

SEQ ID NO: 83903 - DNA, 25 bp, Artificial Sequence
  Synthetic
ggcagacatugtttcctctttucac

SEQ ID NO: 83904 - DNA, 28 bp, Artificial Sequence
  Synthetic
tcagattaattgcugtgcttttggatuc

SEQ ID NO: 83905 - DNA, 25 bp, Artificial Sequence
  Synthetic
ggctcagaaaaautggatugaccat

SEQ ID NO: 83906 - DNA, 25 bp, Artificial Sequence
  Synthetic
gctcgatgtugagaaggatcttcut

SEQ ID NO: 83907 - DNA, 25 bp, Artificial Sequence
  Synthetic
tttacggtacacuaaccctgcttut

SEQ ID NO: 83908 - DNA, 23 bp, Artificial Sequence
  Synthetic
gcaaccugaagaagctaguggaa

SEQ ID NO: 83909 - DNA, 18 bp, Artificial Sequence
  Synthetic
cuagggaugggccagcag

SEQ ID NO: 83910 - DNA, 22 bp, Artificial Sequence
  Synthetic
tctccatcuttgcctgugagat

SEQ ID NO: 83911 - DNA, 27 bp, Artificial Sequence
  Synthetic
tgaaaaagtacucatttggtgcacuct

SEQ ID NO: 83912 - DNA, 25 bp, Artificial Sequence
  Synthetic
agtgggucaggaaaacattcttgut

SEQ ID NO: 83913 - DNA, 22 bp, Artificial Sequence
  Synthetic
ggguggaagtuaaagaaggcat

SEQ ID NO: 83914 - DNA, 21 bp, Artificial Sequence
  Synthetic
gagcugaggaattugcaacga

SEQ ID NO: 83915 - DNA, 22 bp, Artificial Sequence
  Synthetic
tgggaaattccuggaaccctug

SEQ ID NO: 83916 - DNA, 21 bp, Artificial Sequence
  Synthetic
aggcagaggucttctccagut

SEQ ID NO: 83917 - DNA, 23 bp, Artificial Sequence
  Synthetic
cttagtggatucttcgcagccua

SEQ ID NO: 83918 - DNA, 25 bp, Artificial Sequence
  Synthetic
tgtctcacagcgaacauactcttuc

SEQ ID NO: 83919 - DNA, 21 bp, Artificial Sequence
  Synthetic
ctacggcgaaugctactggua

SEQ ID NO: 83920 - DNA, 22 bp, Artificial Sequence
  Synthetic
ccccctcautggtcacaaatug

SEQ ID NO: 83921 - DNA, 28 bp, Artificial Sequence
  Synthetic
agtggatcagacauctgggaactataut

SEQ ID NO: 83922 - DNA, 19 bp, Artificial Sequence
  Synthetic
cagcaaccacuagccucct

SEQ ID NO: 83923 - DNA, 19 bp, Artificial Sequence
  Synthetic
gcgagucggaggacaacug

SEQ ID NO: 83924 - DNA, 18 bp, Artificial Sequence
  Synthetic
cccaggcauagcctucgg

SEQ ID NO: 83925 - DNA, 17 bp, Artificial Sequence
  Synthetic
aggugggcaagcgagut

SEQ ID NO: 83926 - DNA, 23 bp, Artificial Sequence
  Synthetic
cttggatttcuctggtggcagua

SEQ ID NO: 83927 - DNA, 22 bp, Artificial Sequence
  Synthetic
aacagagucagcaucagagcag

SEQ ID NO: 83928 - DNA, 19 bp, Artificial Sequence
  Synthetic
ggaagucccagacccugac

SEQ ID NO: 83929 - DNA, 28 bp, Artificial Sequence
  Synthetic
ggaatcacttttcutttctggacttgut

SEQ ID NO: 83930 - DNA, 23 bp, Artificial Sequence
  Synthetic
caatgaccccgcucttaaagaug

SEQ ID NO: 83931 - DNA, 27 bp, Artificial Sequence
  Synthetic
acaatacctgttcugctgcaaatacut

SEQ ID NO: 83932 - DNA, 22 bp, Artificial Sequence
  Synthetic
tgttctuccacgccatcatcuc

SEQ ID NO: 83933 - DNA, 22 bp, Artificial Sequence
  Synthetic
gattccucccaagccuacagac

SEQ ID NO: 83934 - DNA, 20 bp, Artificial Sequence
  Synthetic
tcagcuccgcattcucaagg

SEQ ID NO: 83935 - DNA, 23 bp, Artificial Sequence
  Synthetic
agttaattgcgggcugagatgut

SEQ ID NO: 83936 - DNA, 22 bp, Artificial Sequence
  Synthetic
ggcggtguaaataagagggcut

SEQ ID NO: 83937 - DNA, 26 bp, Artificial Sequence
  Synthetic
aagcatctgtttuctctccctttcut

SEQ ID NO: 83938 - DNA, 21 bp, Artificial Sequence
  Synthetic
cacctgautggagugcaagac

SEQ ID NO: 83939 - DNA, 22 bp, Artificial Sequence
  Synthetic
ttgaccuctgatccuacccaca

SEQ ID NO: 83940 - DNA, 22 bp, Artificial Sequence
  Synthetic
gcugccagcacuaaggaaagag

SEQ ID NO: 83941 - DNA, 20 bp, Artificial Sequence
  Synthetic
cggaagcagccuctcgauat

SEQ ID NO: 83942 - DNA, 18 bp, Artificial Sequence
  Synthetic
acactggucccccugaga

SEQ ID NO: 83943 - DNA, 28 bp, Artificial Sequence
  Synthetic
agctcattgtcuaatgtcattctcctut

SEQ ID NO: 83944 - DNA, 32 bp, Artificial Sequence
  Synthetic
gtatcttagaaagugaaataactaaccucgct

SEQ ID NO: 83945 - DNA, 25 bp, Artificial Sequence
  Synthetic
catagggattgugggcatttaguca

SEQ ID NO: 83946 - DNA, 23 bp, Artificial Sequence
  Synthetic
atctctcuggaggatgacguagg

SEQ ID NO: 83947 - DNA, 26 bp, Artificial Sequence
  Synthetic
tcagagcacgaucattcttctcatug

SEQ ID NO: 83948 - DNA, 27 bp, Artificial Sequence
  Synthetic
aagcgagctaauttgtcttctttcuct

SEQ ID NO: 83949 - DNA, 27 bp, Artificial Sequence
  Synthetic
catcuggagctaattgugaaaaacagt

SEQ ID NO: 83950 - DNA, 21 bp, Artificial Sequence
  Synthetic
gacgtctgagaucgtcaggut

SEQ ID NO: 83951 - DNA, 21 bp, Artificial Sequence
  Synthetic
ctgaagugcccatttcccugt

SEQ ID NO: 83952 - DNA, 21 bp, Artificial Sequence
  Synthetic
gcagaactuggtccccucaat

SEQ ID NO: 83953 - DNA, 21 bp, Artificial Sequence
  Synthetic
gctucccaaggaaaucaggct

SEQ ID NO: 83954 - DNA, 22 bp, Artificial Sequence
  Synthetic
cacacugagaaagcggaagaug

SEQ ID NO: 83955 - DNA, 27 bp, Artificial Sequence
  Synthetic
cccaagtccauccaattctaatucagg

SEQ ID NO: 83956 - DNA, 21 bp, Artificial Sequence
  Synthetic
gcaaaggtuggactgaauggg

SEQ ID NO: 83957 - DNA, 27 bp, Artificial Sequence
  Synthetic
cctttggagggaauattatccagcaut

SEQ ID NO: 83958 - DNA, 22 bp, Artificial Sequence
  Synthetic
ccttcucaaagccctcctucac

SEQ ID NO: 83959 - DNA, 20 bp, Artificial Sequence
  Synthetic
cccagcucgtggtaaacuca

SEQ ID NO: 83960 - DNA, 20 bp, Artificial Sequence
  Synthetic
gctggttguggcccagatut

SEQ ID NO: 83961 - DNA, 21 bp, Artificial Sequence
  Synthetic
aagtacaaggccuccaucacc

SEQ ID NO: 83962 - DNA, 25 bp, Artificial Sequence
  Synthetic
cgttccttctucattttccctccug

SEQ ID NO: 83963 - DNA, 26 bp, Artificial Sequence
  Synthetic
agctgacttctutcctatgctcttug

SEQ ID NO: 83964 - DNA, 21 bp, Artificial Sequence
  Synthetic
gcacgtacutggtctcgtugt

SEQ ID NO: 83965 - DNA, 24 bp, Artificial Sequence
  Synthetic
ccagaacaaggagcutaaggucaa

SEQ ID NO: 83966 - DNA, 25 bp, Artificial Sequence
  Synthetic
gtcaatgaatgutttggcccatugt

SEQ ID NO: 83967 - DNA, 21 bp, Artificial Sequence
  Synthetic
ctcggccaauggaccuacaaa

SEQ ID NO: 83968 - DNA, 22 bp, Artificial Sequence
  Synthetic
gagggaaguggctttugaggaa

SEQ ID NO: 83969 - DNA, 28 bp, Artificial Sequence
  Synthetic
tcatggcttauccagaaagtataugcac

SEQ ID NO: 83970 - DNA, 22 bp, Artificial Sequence
  Synthetic
ttcctccaggaugggtccttua

SEQ ID NO: 83971 - DNA, 26 bp, Artificial Sequence
  Synthetic
ctgtacaugctaacataguccaaggg

SEQ ID NO: 83972 - DNA, 23 bp, Artificial Sequence
  Synthetic
tgattgtttccugatgctgcuga

SEQ ID NO: 83973 - DNA, 28 bp, Artificial Sequence
  Synthetic
autgagaacatgtugcagaacaagaaaa

SEQ ID NO: 83974 - DNA, 17 bp, Artificial Sequence
  Synthetic
gccctgcugtccgtcuc

SEQ ID NO: 83975 - DNA, 18 bp, Artificial Sequence
  Synthetic
gcuccagcggcauggaaa

SEQ ID NO: 83976 - DNA, 20 bp, Artificial Sequence
  Synthetic
gacttgacagugcccuccat

SEQ ID NO: 83977 - DNA, 20 bp, Artificial Sequence
  Synthetic
aaggtcacuggcccttctuc

SEQ ID NO: 83978 - DNA, 28 bp, Artificial Sequence
  Synthetic
tccttctcaucaggaatttccaaaauga

SEQ ID NO: 83979 - DNA, 26 bp, Artificial Sequence
  Synthetic
attgacaatgaggauctggtgtaugg

SEQ ID NO: 83980 - DNA, 21 bp, Artificial Sequence
  Synthetic
ccttcaaggucagggttuggt

SEQ ID NO: 83981 - DNA, 22 bp, Artificial Sequence
  Synthetic
cctctggctucttgaggtctuc

SEQ ID NO: 83982 - DNA, 28 bp, Artificial Sequence
  Synthetic
atgaaaaccatuacaaacttctcaagug

SEQ ID NO: 83983 - DNA, 25 bp, Artificial Sequence
  Synthetic
ttgtaccttucccccttttctucag

SEQ ID NO: 83984 - DNA, 23 bp, Artificial Sequence
  Synthetic
cccaagagcuaccacaattugct

SEQ ID NO: 83985 - DNA, 23 bp, Artificial Sequence
  Synthetic
tcatcagaaagggaccugacuca

SEQ ID NO: 83986 - DNA, 22 bp, Artificial Sequence
  Synthetic
gggctgccauaattccauagca

SEQ ID NO: 83987 - DNA, 20 bp, Artificial Sequence
  Synthetic
acaggugtcaucagggagga

SEQ ID NO: 83988 - DNA, 20 bp, Artificial Sequence
  Synthetic
gggagcgutgaaggaatugg

SEQ ID NO: 83989 - DNA, 19 bp, Artificial Sequence
  Synthetic
catccccagugccgagtua

SEQ ID NO: 83990 - DNA, 23 bp, Artificial Sequence
  Synthetic
cgtggcuacagttggugaagaat

SEQ ID NO: 83991 - DNA, 21 bp, Artificial Sequence
  Synthetic
ccagaugaagcagtgggugag

SEQ ID NO: 83992 - DNA, 25 bp, Artificial Sequence
  Synthetic
catcccaaaugatattgtccuccca

SEQ ID NO: 83993 - DNA, 23 bp, Artificial Sequence
  Synthetic
tggcutacaatgtucagcaaggt

SEQ ID NO: 83994 - DNA, 20 bp, Artificial Sequence
  Synthetic
gctccucccattcacgugac

SEQ ID NO: 83995 - DNA, 24 bp, Artificial Sequence
  Synthetic
gtcagcguatctttgaccuacaga

SEQ ID NO: 83996 - DNA, 27 bp, Artificial Sequence
  Synthetic
gaaaaagucggtaagaaugaacaaggg

SEQ ID NO: 83997 - DNA, 22 bp, Artificial Sequence
  Synthetic
catccctaccutgccttcacut

SEQ ID NO: 83998 - DNA, 22 bp, Artificial Sequence
  Synthetic
ctgagacaugttctgctguggt

SEQ ID NO: 83999 - DNA, 24 bp, Artificial Sequence
  Synthetic
ggcacttgaucccaatgaugagaa

SEQ ID NO: 84000 - DNA, 25 bp, Artificial Sequence
  Synthetic
gtagaggcatutacgcacatttuca

SEQ ID NO: 84001 - DNA, 20 bp, Artificial Sequence
  Synthetic
ggtgacgcugtcatccaucc

SEQ ID NO: 84002 - DNA, 23 bp, Artificial Sequence
  Synthetic
aaaaaccaggaagcagaugucca

SEQ ID NO: 84003 - DNA, 25 bp, Artificial Sequence
  Synthetic
gttaaactugccaaaacagcugact

SEQ ID NO: 84004 - DNA, 20 bp, Artificial Sequence
  Synthetic
gtgtagguccccgagtctuc

SEQ ID NO: 84005 - DNA, 20 bp, Artificial Sequence
  Synthetic
gcttgcaggcugatttcucc

SEQ ID NO: 84006 - DNA, 21 bp, Artificial Sequence
  Synthetic
cacaatcaacucctccugcca

SEQ ID NO: 84007 - DNA, 27 bp, Artificial Sequence
  Synthetic
gtgacctgccuactaattcccataaut

SEQ ID NO: 84008 - DNA, 19 bp, Artificial Sequence
  Synthetic
ccccucgtcccaugaagga

SEQ ID NO: 84009 - DNA, 20 bp, Artificial Sequence
  Synthetic
cctccaccutgggctacuca

SEQ ID NO: 84010 - DNA, 21 bp, Artificial Sequence
  Synthetic
gccctggcaccutcatatgua

SEQ ID NO: 84011 - DNA, 20 bp, Artificial Sequence
  Synthetic
acaucgacucggccaacaag

SEQ ID NO: 84012 - DNA, 17 bp, Artificial Sequence
  Synthetic
ggutggguggcccagac

SEQ ID NO: 84013 - DNA, 27 bp, Artificial Sequence
  Synthetic
ggataaagaacagguggcatatacuca

SEQ ID NO: 84014 - DNA, 21 bp, Artificial Sequence
  Synthetic
ggtactgcuccagaagtggut

SEQ ID NO: 84015 - DNA, 28 bp, Artificial Sequence
  Synthetic
acttaggaaauagaatccugacccacat

SEQ ID NO: 84016 - DNA, 19 bp, Artificial Sequence
  Synthetic
tgaactcccugacggguct

SEQ ID NO: 84017 - DNA, 18 bp, Artificial Sequence
  Synthetic
caggaagucgcgcuccaa

SEQ ID NO: 84018 - DNA, 18 bp, Artificial Sequence
  Synthetic
gatggctucgtcccggut

SEQ ID NO: 84019 - DNA, 24 bp, Artificial Sequence
  Synthetic
cttcccaagtugttgatgttccut

SEQ ID NO: 84020 - DNA, 22 bp, Artificial Sequence
  Synthetic
catcauccagagtgggugcaaa

SEQ ID NO: 84021 - DNA, 20 bp, Artificial Sequence
  Synthetic
cacagcugcatugggaggat

SEQ ID NO: 84022 - DNA, 21 bp, Artificial Sequence
  Synthetic
ggaagcugtgatguccccaaa

SEQ ID NO: 84023 - DNA, 24 bp, Artificial Sequence
  Synthetic
caccatcctcugtttttgctguag

SEQ ID NO: 84024 - DNA, 19 bp, Artificial Sequence
  Synthetic
gccgcagucugacaggaaa

SEQ ID NO: 84025 - DNA, 18 bp, Artificial Sequence
  Synthetic
ccaagucccccguagcct

SEQ ID NO: 84026 - DNA, 27 bp, Artificial Sequence
  Synthetic
aaagggtgtgtauttggaagatctcuc

SEQ ID NO: 84027 - DNA, 26 bp, Artificial Sequence
  Synthetic
ttggaaccacugttcattgtgacuat

SEQ ID NO: 84028 - DNA, 21 bp, Artificial Sequence
  Synthetic
catgcctcugcaacctgauga

SEQ ID NO: 84029 - DNA, 27 bp, Artificial Sequence
  Synthetic
tgataggugaagctcaacaaauccaat

SEQ ID NO: 84030 - DNA, 24 bp, Artificial Sequence
  Synthetic
cctcagttgaugacagaacctugt

SEQ ID NO: 84031 - DNA, 22 bp, Artificial Sequence
  Synthetic
gaacaggcucattcuggagagg

SEQ ID NO: 84032 - DNA, 23 bp, Artificial Sequence
  Synthetic
agccatgcuggttacatttucct

SEQ ID NO: 84033 - DNA, 23 bp, Artificial Sequence
  Synthetic
cctcaatucccaggtggaccuat

SEQ ID NO: 84034 - DNA, 25 bp, Artificial Sequence
  Synthetic
tttttgcattucccaagacagtgut

SEQ ID NO: 84035 - DNA, 28 bp, Artificial Sequence
  Synthetic
aagcttaaggacuatggagtggatctua

SEQ ID NO: 84036 - DNA, 18 bp, Artificial Sequence
  Synthetic
gggucagtgcucaccagt

SEQ ID NO: 84037 - DNA, 20 bp, Artificial Sequence
  Synthetic
agctctccacuccagcucaa

SEQ ID NO: 84038 - DNA, 17 bp, Artificial Sequence
  Synthetic
ggccuccugcaacagca

SEQ ID NO: 84039 - DNA, 19 bp, Artificial Sequence
  Synthetic
tcgcacuccccttcuccat

SEQ ID NO: 84040 - DNA, 24 bp, Artificial Sequence
  Synthetic
cttgauccacgggcaaatttacuc

SEQ ID NO: 84041 - DNA, 26 bp, Artificial Sequence
  Synthetic
ggtgtgccugaggaagagatuaaaaa

SEQ ID NO: 84042 - DNA, 25 bp, Artificial Sequence
  Synthetic
cttcttcuaccccacatccattguc

SEQ ID NO: 84043 - DNA, 23 bp, Artificial Sequence
  Synthetic
aaaaactgauagcatggguccgt

SEQ ID NO: 84044 - DNA, 24 bp, Artificial Sequence
  Synthetic
gcctggctuggtattgcaaaauat

SEQ ID NO: 84045 - DNA, 21 bp, Artificial Sequence
  Synthetic
tctcttcttuggccgtggtuc

SEQ ID NO: 84046 - DNA, 22 bp, Artificial Sequence
  Synthetic
agagaacacugggagaggguag

SEQ ID NO: 84047 - DNA, 20 bp, Artificial Sequence
  Synthetic
acaccacugccgauccaaag

SEQ ID NO: 84048 - DNA, 28 bp, Artificial Sequence
  Synthetic
ggtggatggacutatgaggtatatucaa

SEQ ID NO: 84049 - DNA, 27 bp, Artificial Sequence
  Synthetic
gtctucgggaaacagctaatugagaat

SEQ ID NO: 84050 - DNA, 19 bp, Artificial Sequence
  Synthetic
gagacauagcagggcgcut

SEQ ID NO: 84051 - DNA, 20 bp, Artificial Sequence
  Synthetic
gggtacuaaccccaggtuga

SEQ ID NO: 84052 - DNA, 27 bp, Artificial Sequence
  Synthetic
ctgatcagccutaagttauaacccaaa

SEQ ID NO: 84053 - DNA, 28 bp, Artificial Sequence
  Synthetic
gctcattatgucaccattatctctucca

SEQ ID NO: 84054 - DNA, 21 bp, Artificial Sequence
  Synthetic
actcactugggcatgaaugct

SEQ ID NO: 84055 - DNA, 29 bp, Artificial Sequence
  Synthetic
agaaggctcttacuacacctactcatuat

SEQ ID NO: 84056 - DNA, 27 bp, Artificial Sequence
  Synthetic
tccagagcaacagcuttatcatgtaut

SEQ ID NO: 84057 - DNA, 29 bp, Artificial Sequence
  Synthetic
gaaactatttttgguctcaggaattucgg

SEQ ID NO: 84058 - DNA, 22 bp, Artificial Sequence
  Synthetic
gctgcauctcgagtugaacagt

SEQ ID NO: 84059 - DNA, 25 bp, Artificial Sequence
  Synthetic
ctaactatctgtucccaaccccauc

SEQ ID NO: 84060 - DNA, 28 bp, Artificial Sequence
  Synthetic
tggttttattttagugctgttccttugg

SEQ ID NO: 84061 - DNA, 24 bp, Artificial Sequence
  Synthetic
ccactaccuctagattctcuggct

SEQ ID NO: 84062 - DNA, 17 bp, Artificial Sequence
  Synthetic
tttucaggccgcccuca

SEQ ID NO: 84063 - DNA, 24 bp, Artificial Sequence
  Synthetic
atgatccaaauggctggtgagaut

SEQ ID NO: 84064 - DNA, 22 bp, Artificial Sequence
  Synthetic
tctggagugccccataaggaua

SEQ ID NO: 84065 - DNA, 21 bp, Artificial Sequence
  Synthetic
ccctacccuctcccagtgtuc

SEQ ID NO: 84066 - DNA, 28 bp, Artificial Sequence
  Synthetic
cagatgataacucagaaggccttactut

SEQ ID NO: 84067 - DNA, 25 bp, Artificial Sequence
  Synthetic
gggtctaaaaagguctgtgttccut

SEQ ID NO: 84068 - DNA, 22 bp, Artificial Sequence
  Synthetic
cctccccaucccagatgauaga

SEQ ID NO: 84069 - DNA, 25 bp, Artificial Sequence
  Synthetic
tgagaaagacacaacaugaaccugt

SEQ ID NO: 84070 - DNA, 24 bp, Artificial Sequence
  Synthetic
gaacagauagtuagggagcaccaa

SEQ ID NO: 84071 - DNA, 18 bp, Artificial Sequence
  Synthetic
ctucccagcggttgucca

SEQ ID NO: 84072 - DNA, 23 bp, Artificial Sequence
  Synthetic
ggagggaaugcgaagaaactcut

SEQ ID NO: 84073 - DNA, 20 bp, Artificial Sequence
  Synthetic
cgtcgtaugcgagagtcugt

SEQ ID NO: 84074 - DNA, 22 bp, Artificial Sequence
  Synthetic
ccctaacacaauccagguggaa

SEQ ID NO: 84075 - DNA, 20 bp, Artificial Sequence
  Synthetic
ccaugaaggcccagtucgag

SEQ ID NO: 84076 - DNA, 22 bp, Artificial Sequence
  Synthetic
ctgaccagcugcttcttctuct

SEQ ID NO: 84077 - DNA, 21 bp, Artificial Sequence
  Synthetic
gagaugaagacgcagcuggaa

SEQ ID NO: 84078 - DNA, 22 bp, Artificial Sequence
  Synthetic
ccagagcucaaggctgtcttuc

SEQ ID NO: 84079 - DNA, 22 bp, Artificial Sequence
  Synthetic
tcctcactgucatcgtcacuca

SEQ ID NO: 84080 - DNA, 20 bp, Artificial Sequence
  Synthetic
ctttggccggacuctagugg

SEQ ID NO: 84081 - DNA, 25 bp, Artificial Sequence
  Synthetic
tgtgattttuaaggccagtgcagua

SEQ ID NO: 84082 - DNA, 28 bp, Artificial Sequence
  Synthetic
ttacccacautcctttataaguccacag

SEQ ID NO: 84083 - DNA, 25 bp, Artificial Sequence
  Synthetic
tcctgcaattcucagcatggattua

SEQ ID NO: 84084 - DNA, 27 bp, Artificial Sequence
  Synthetic
tcttttctggtutttcttggctcuact

SEQ ID NO: 84085 - DNA, 18 bp, Artificial Sequence
  Synthetic
cggcccugcatccaugat

SEQ ID NO: 84086 - DNA, 19 bp, Artificial Sequence
  Synthetic
gcagctuggcatctucggt

SEQ ID NO: 84087 - DNA, 20 bp, Artificial Sequence
  Synthetic
aggtaccugccagtccctut

SEQ ID NO: 84088 - DNA, 20 bp, Artificial Sequence
  Synthetic
aagaucaagctuggccggaa

SEQ ID NO: 84089 - DNA, 18 bp, Artificial Sequence
  Synthetic
cggccucacctcctctug

SEQ ID NO: 84090 - DNA, 27 bp, Artificial Sequence
  Synthetic
aaaaattaccuaacaggcatccuggaa

SEQ ID NO: 84091 - DNA, 28 bp, Artificial Sequence
  Synthetic
gtctctgtaagautactgcaagccuaaa

SEQ ID NO: 84092 - DNA, 20 bp, Artificial Sequence
  Synthetic
tcagcuggcgcttacaguag

SEQ ID NO: 84093 - DNA, 25 bp, Artificial Sequence
  Synthetic
actgtacgagaugtttcggattuca

SEQ ID NO: 84094 - DNA, 20 bp, Artificial Sequence
  Synthetic
gaggugcaccauaagcagga

SEQ ID NO: 84095 - DNA, 24 bp, Artificial Sequence
  Synthetic
ttaaagagcuaggagtggguaggt

SEQ ID NO: 84096 - DNA, 25 bp, Artificial Sequence
  Synthetic
aagatctgugacgttcctuccaaat

SEQ ID NO: 84097 - DNA, 25 bp, Artificial Sequence
  Synthetic
gctcatgaggagaucttggatctut

SEQ ID NO: 84098 - DNA, 28 bp, Artificial Sequence
  Synthetic
aacaggtacaacugtaactgcttuaaga

SEQ ID NO: 84099 - DNA, 25 bp, Artificial Sequence
  Synthetic
aggauaccaaagctcaugaggagat

SEQ ID NO: 84100 - DNA, 18 bp, Artificial Sequence
  Synthetic
ggcctcaccugcctcuct

SEQ ID NO: 84101 - DNA, 18 bp, Artificial Sequence
  Synthetic
gcauccugagcacagcgt

SEQ ID NO: 84102 - DNA, 23 bp, Artificial Sequence
  Synthetic
ggtctcacctuctctctgctcut

SEQ ID NO: 84103 - DNA, 20 bp, Artificial Sequence
  Synthetic
caatgtgcucacggatgcug

SEQ ID NO: 84104 - DNA, 29 bp, Artificial Sequence
  Synthetic
ctcaagtttccuaaattcctccatcatuc

SEQ ID NO: 84105 - DNA, 20 bp, Artificial Sequence
  Synthetic
gagtggcugagtggcgtuat

SEQ ID NO: 84106 - DNA, 18 bp, Artificial Sequence
  Synthetic
cgaagcugctgccttguc

SEQ ID NO: 84107 - DNA, 18 bp, Artificial Sequence
  Synthetic
ccgcugcagactcucgaa

SEQ ID NO: 84108 - DNA, 21 bp, Artificial Sequence
  Synthetic
caagatcuccttcccguggaa

SEQ ID NO: 84109 - DNA, 27 bp, Artificial Sequence
  Synthetic
gcctgggaautaaaggactctaugaat

SEQ ID NO: 84110 - DNA, 23 bp, Artificial Sequence
  Synthetic
ggatgacagggcuggaataugac

SEQ ID NO: 84111 - DNA, 20 bp, Artificial Sequence
  Synthetic
aucgatgcctuccagcacat

SEQ ID NO: 84112 - DNA, 19 bp, Artificial Sequence
  Synthetic
tcctgtccucgcgtcgaua

SEQ ID NO: 84113 - DNA, 25 bp, Artificial Sequence
  Synthetic
gcatgttggugacctctgaatttut

SEQ ID NO: 84114 - DNA, 28 bp, Artificial Sequence
  Synthetic
acacacgccuctaaattattattugcac

SEQ ID NO: 84115 - DNA, 21 bp, Artificial Sequence
  Synthetic
gccacggagaacacuacugaa

SEQ ID NO: 84116 - DNA, 20 bp, Artificial Sequence
  Synthetic
ccgcccuggataacgtctut

SEQ ID NO: 84117 - DNA, 19 bp, Artificial Sequence
  Synthetic
gtgtgccucgaagcactug

SEQ ID NO: 84118 - DNA, 19 bp, Artificial Sequence
  Synthetic
tctggugctttgagugcga

SEQ ID NO: 84119 - DNA, 24 bp, Artificial Sequence
  Synthetic
ggagcagaagaugttgttggtcut

SEQ ID NO: 84120 - DNA, 22 bp, Artificial Sequence
  Synthetic
acagcaggcacuccauaaacag

SEQ ID NO: 84121 - DNA, 21 bp, Artificial Sequence
  Synthetic
caaattccagguggcaacuga

SEQ ID NO: 84122 - DNA, 28 bp, Artificial Sequence
  Synthetic
gatcacacatctuactagaacacacuca

SEQ ID NO: 84123 - DNA, 28 bp, Artificial Sequence
  Synthetic
tgtttgaaaaugccaaacgctataaugt

SEQ ID NO: 84124 - DNA, 21 bp, Artificial Sequence
  Synthetic
gtctcuggcaaaggtgttugg

SEQ ID NO: 84125 - DNA, 23 bp, Artificial Sequence
  Synthetic
tgagtaaccugaagaccaugggt

SEQ ID NO: 84126 - DNA, 19 bp, Artificial Sequence
  Synthetic
ggtgcgugagttccuggac

SEQ ID NO: 84127 - DNA, 22 bp, Artificial Sequence
  Synthetic
gccctcuacctggtactuggat

SEQ ID NO: 84128 - DNA, 22 bp, Artificial Sequence
  Synthetic
gcatggtcuggacaaaatgcug

SEQ ID NO: 84129 - DNA, 26 bp, Artificial Sequence
  Synthetic
tcattctgtgcuctagggtattcugt

SEQ ID NO: 84130 - DNA, 22 bp, Artificial Sequence
  Synthetic
cagaugagacagcucacgagaa

SEQ ID NO: 84131 - DNA, 22 bp, Artificial Sequence
  Synthetic
gcagcaugaaggagaatctgug

SEQ ID NO: 84132 - DNA, 25 bp, Artificial Sequence
  Synthetic
ctgaattgggcacautatagcgtut

SEQ ID NO: 84133 - DNA, 28 bp, Artificial Sequence
  Synthetic
cattggacttucaggaagaatgttucat

SEQ ID NO: 84134 - DNA, 20 bp, Artificial Sequence
  Synthetic
gtggccugcctgatgaugat

SEQ ID NO: 84135 - DNA, 23 bp, Artificial Sequence
  Synthetic
gagtccatcacugtatcctccug

SEQ ID NO: 84136 - DNA, 21 bp, Artificial Sequence
  Synthetic
agagcctguctttgcggauag

SEQ ID NO: 84137 - DNA, 19 bp, Artificial Sequence
  Synthetic
gtctgcgacutcggcttug

SEQ ID NO: 84138 - DNA, 21 bp, Artificial Sequence
  Synthetic
ggcucacggctcttuaaagca

SEQ ID NO: 84139 - DNA, 23 bp, Artificial Sequence
  Synthetic
gctgcctuaggcttttctucact

SEQ ID NO: 84140 - DNA, 24 bp, Artificial Sequence
  Synthetic
gccatctctcucctcctttttcut

SEQ ID NO: 84141 - DNA, 24 bp, Artificial Sequence
  Synthetic
gugacagaaagguaaagaggagca

SEQ ID NO: 84142 - DNA, 21 bp, Artificial Sequence
  Synthetic
cgtguagcagggtgtcaugag

SEQ ID NO: 84143 - DNA, 22 bp, Artificial Sequence
  Synthetic
gccttctgtcutgcaggttgut

SEQ ID NO: 84144 - DNA, 22 bp, Artificial Sequence
  Synthetic
attttcugcgaacctcaugcac

SEQ ID NO: 84145 - DNA, 20 bp, Artificial Sequence
  Synthetic
atgugccacctucgaaacct

SEQ ID NO: 84146 - DNA, 28 bp, Artificial Sequence
  Synthetic
ttgattgctgutgttaggaaauaggaca

SEQ ID NO: 84147 - DNA, 21 bp, Artificial Sequence
  Synthetic
tggatagguggctgcaaggua

SEQ ID NO: 84148 - DNA, 20 bp, Artificial Sequence
  Synthetic
actcggcutcaggtcucgat

SEQ ID NO: 84149 - DNA, 20 bp, Artificial Sequence
  Synthetic
gcaggaccugcuaggaagac

SEQ ID NO: 84150 - DNA, 28 bp, Artificial Sequence
  Synthetic
agaagctcttuacttgatagctugcaat

SEQ ID NO: 84151 - DNA, 28 bp, Artificial Sequence
  Synthetic
ccagaatuagtgtcatctugaggagaaa

SEQ ID NO: 84152 - DNA, 18 bp, Artificial Sequence
  Synthetic
cccuagggagcacagugg

SEQ ID NO: 84153 - DNA, 26 bp, Artificial Sequence
  Synthetic
cggtttattctgguggataccatgut

SEQ ID NO: 84154 - DNA, 25 bp, Artificial Sequence
  Synthetic
aggaaauacatgtguaagccacact

SEQ ID NO: 84155 - DNA, 26 bp, Artificial Sequence
  Synthetic
agcatggctguttttgtctctttcua

SEQ ID NO: 84156 - DNA, 17 bp, Artificial Sequence
  Synthetic
ccugaugccaggacgga

SEQ ID NO: 84157 - DNA, 19 bp, Artificial Sequence
  Synthetic
gtggtgcuggaggctaugg

SEQ ID NO: 84158 - DNA, 22 bp, Artificial Sequence
  Synthetic
gggtcttuggacagacaaccut

SEQ ID NO: 84159 - DNA, 21 bp, Artificial Sequence
  Synthetic
gcaccaaagacacutccacug

SEQ ID NO: 84160 - DNA, 22 bp, Artificial Sequence
  Synthetic
cttcgccaugttaucagccaga

SEQ ID NO: 84161 - DNA, 28 bp, Artificial Sequence
  Synthetic
ccctatggcttugaaataattggtagug

SEQ ID NO: 84162 - DNA, 26 bp, Artificial Sequence
  Synthetic
tcatgatgaugcctcttagcauagga

SEQ ID NO: 84163 - DNA, 28 bp, Artificial Sequence
  Synthetic
catgtaggtataaugcctgctgttacut

SEQ ID NO: 84164 - DNA, 24 bp, Artificial Sequence
  Synthetic
cctgttggucaggaatgctuaaca

SEQ ID NO: 84165 - DNA, 28 bp, Artificial Sequence
  Synthetic
gaagtgatgauctgagaactugaaagga

SEQ ID NO: 84166 - DNA, 22 bp, Artificial Sequence
  Synthetic
ggtccucaccaaagttctcugt

SEQ ID NO: 84167 - DNA, 22 bp, Artificial Sequence
  Synthetic
ccaggtaatcutctgcctccuc

SEQ ID NO: 84168 - DNA, 22 bp, Artificial Sequence
  Synthetic
ctcucccaaaggttcugaagga

SEQ ID NO: 84169 - DNA, 26 bp, Artificial Sequence
  Synthetic
ctaaccaagcaacutcttagtgtugg

SEQ ID NO: 84170 - DNA, 21 bp, Artificial Sequence
  Synthetic
gccgucgaaacatcaaguacc

SEQ ID NO: 84171 - DNA, 21 bp, Artificial Sequence
  Synthetic
tgttgttggugagctggtuga

SEQ ID NO: 84172 - DNA, 19 bp, Artificial Sequence
  Synthetic
ggcaaccutcucaggccaa

SEQ ID NO: 84173 - DNA, 28 bp, Artificial Sequence
  Synthetic
aaaaactttgcuacactgacauggaaaa

SEQ ID NO: 84174 - DNA, 22 bp, Artificial Sequence
  Synthetic
gcccttcttuttcggcaacauc

SEQ ID NO: 84175 - DNA, 20 bp, Artificial Sequence
  Synthetic
ggtgtaguggtgtgcctucc

SEQ ID NO: 84176 - DNA, 20 bp, Artificial Sequence
  Synthetic
gcttccuccactcccacauc

SEQ ID NO: 84177 - DNA, 19 bp, Artificial Sequence
  Synthetic
cagagccuccctguccaaa

SEQ ID NO: 84178 - DNA, 24 bp, Artificial Sequence
  Synthetic
catgagtgaugggctttattugct

SEQ ID NO: 84179 - DNA, 20 bp, Artificial Sequence
  Synthetic
gcgtaggugccattcagcuc

SEQ ID NO: 84180 - DNA, 27 bp, Artificial Sequence
  Synthetic
gtcatcttttgcuaaatccaacccaut

SEQ ID NO: 84181 - DNA, 21 bp, Artificial Sequence
  Synthetic
tgtgattccugagggagguga

SEQ ID NO: 84182 - DNA, 21 bp, Artificial Sequence
  Synthetic
gcacaccacuacaccaucgag

SEQ ID NO: 84183 - DNA, 21 bp, Artificial Sequence
  Synthetic
ccggtugaagggcttctugag

SEQ ID NO: 84184 - DNA, 18 bp, Artificial Sequence
  Synthetic
cugcggcaacagtucgac

SEQ ID NO: 84185 - DNA, 25 bp, Artificial Sequence
  Synthetic
gtatttgggtuctcaaggacacuca

SEQ ID NO: 84186 - DNA, 28 bp, Artificial Sequence
  Synthetic
gaaaaagaggaagautcttctggccaua

SEQ ID NO: 84187 - DNA, 26 bp, Artificial Sequence
  Synthetic
gccactagagucctaaatcucgaaca

SEQ ID NO: 84188 - DNA, 21 bp, Artificial Sequence
  Synthetic
ctggcatcaguggcagatcut

SEQ ID NO: 84189 - DNA, 23 bp, Artificial Sequence
  Synthetic
gaaaggttcaugtggttcugcac

SEQ ID NO: 84190 - DNA, 27 bp, Artificial Sequence
  Synthetic
aggaagutcuagaaacaacaaagcact

SEQ ID NO: 84191 - DNA, 20 bp, Artificial Sequence
  Synthetic
ggctggugcacacgtactua

SEQ ID NO: 84192 - DNA, 23 bp, Artificial Sequence
  Synthetic
ggtgattaaaguccacccaucct

SEQ ID NO: 84193 - DNA, 21 bp, Artificial Sequence
  Synthetic
cacaaagucccagtucaccca

SEQ ID NO: 84194 - DNA, 22 bp, Artificial Sequence
  Synthetic
ctaccacucccaggagtcugat

SEQ ID NO: 84195 - DNA, 21 bp, Artificial Sequence
  Synthetic
gcaggttccaugtctgctuca

SEQ ID NO: 84196 - DNA, 21 bp, Artificial Sequence
  Synthetic
ctgccagtuctagctcagcut

SEQ ID NO: 84197 - DNA, 19 bp, Artificial Sequence
  Synthetic
gctggctgugctaccaguc

SEQ ID NO: 84198 - DNA, 24 bp, Artificial Sequence
  Synthetic
ggtcagtuttcagatgaucgccat

SEQ ID NO: 84199 - DNA, 20 bp, Artificial Sequence
  Synthetic
aaaacugggagccgggtauc

SEQ ID NO: 84200 - DNA, 21 bp, Artificial Sequence
  Synthetic
ctgctcutctgtcauggcaac

SEQ ID NO: 84201 - DNA, 25 bp, Artificial Sequence
  Synthetic
gaaaatgaaagagcgucctgaccua

SEQ ID NO: 84202 - DNA, 26 bp, Artificial Sequence
  Synthetic
ccttcttaugaggccattccugaaag

SEQ ID NO: 84203 - DNA, 22 bp, Artificial Sequence
  Synthetic
ccagcttacuagaggtggugga

SEQ ID NO: 84204 - DNA, 24 bp, Artificial Sequence
  Synthetic
gtcttggaguggctgttttgttut

SEQ ID NO: 84205 - DNA, 23 bp, Artificial Sequence
  Synthetic
catccgcuctcctttctcuaaca

SEQ ID NO: 84206 - DNA, 19 bp, Artificial Sequence
  Synthetic
ccctgugaccctgcttguc

SEQ ID NO: 84207 - DNA, 18 bp, Artificial Sequence
  Synthetic
ggcgttuccagggctuac

SEQ ID NO: 84208 - DNA, 21 bp, Artificial Sequence
  Synthetic
gtttgaatucccggcaggtut

SEQ ID NO: 84209 - DNA, 24 bp, Artificial Sequence
  Synthetic
gaaagccaggaaaugcactctuac

SEQ ID NO: 84210 - DNA, 20 bp, Artificial Sequence
  Synthetic
cucctgctttugggcagagt

SEQ ID NO: 84211 - DNA, 26 bp, Artificial Sequence
  Synthetic
agagggaaacaaguaaaaagctucca

SEQ ID NO: 84212 - DNA, 27 bp, Artificial Sequence
  Synthetic
tgaaggaaaaccucatcagggaataug

SEQ ID NO: 84213 - DNA, 22 bp, Artificial Sequence
  Synthetic
gttgcatguagccaggaaguct

SEQ ID NO: 84214 - DNA, 20 bp, Artificial Sequence
  Synthetic
caccgcaccaaguctgttug

SEQ ID NO: 84215 - DNA, 20 bp, Artificial Sequence
  Synthetic
cgacugcccaaagacugagg

SEQ ID NO: 84216 - DNA, 28 bp, Artificial Sequence
  Synthetic
ggcatgacaaguagtgcctgtaataaua

SEQ ID NO: 84217 - DNA, 25 bp, Artificial Sequence
  Synthetic
gctaggtgaatuctgtgagctcauc

SEQ ID NO: 84218 - DNA, 20 bp, Artificial Sequence
  Synthetic
gtaccagccccaaguggaug

SEQ ID NO: 84219 - DNA, 28 bp, Artificial Sequence
  Synthetic
aacctcattcugttttgttctctaucgt

SEQ ID NO: 84220 - DNA, 22 bp, Artificial Sequence
  Synthetic
cagggaagggucatgaucagaa

SEQ ID NO: 84221 - DNA, 27 bp, Artificial Sequence
  Synthetic
cattgacguagaagagaauaacagcag

SEQ ID NO: 84222 - DNA, 23 bp, Artificial Sequence
  Synthetic
gaaaggaagugaagtcaccgcua

SEQ ID NO: 84223 - DNA, 23 bp, Artificial Sequence
  Synthetic
tcacagtcagugtcaggtacuca

SEQ ID NO: 84224 - DNA, 21 bp, Artificial Sequence
  Synthetic
gaggcuccaggacttcgaaut

SEQ ID NO: 84225 - DNA, 20 bp, Artificial Sequence
  Synthetic
ggagacucacuaccccgaca

SEQ ID NO: 84226 - DNA, 22 bp, Artificial Sequence
  Synthetic
cacatgccccacauttcagtut

SEQ ID NO: 84227 - DNA, 23 bp, Artificial Sequence
  Synthetic
ggaggatucaagagcaacugagg

SEQ ID NO: 84228 - DNA, 22 bp, Artificial Sequence
  Synthetic
caaacacagutaccugcacgat

SEQ ID NO: 84229 - DNA, 21 bp, Artificial Sequence
  Synthetic
catctgaacuctgcccctguc

SEQ ID NO: 84230 - DNA, 25 bp, Artificial Sequence
  Synthetic
agttcattgucctgttctctucagg

SEQ ID NO: 84231 - DNA, 23 bp, Artificial Sequence
  Synthetic
cccaatgccaucacttagcttut

SEQ ID NO: 84232 - DNA, 21 bp, Artificial Sequence
  Synthetic
cacatugccaccauccaacag

SEQ ID NO: 84233 - DNA, 24 bp, Artificial Sequence
  Synthetic
cttggttuaaggcaacattggcua

SEQ ID NO: 84234 - DNA, 20 bp, Artificial Sequence
  Synthetic
cagctccucccgagtguaga

SEQ ID NO: 84235 - DNA, 27 bp, Artificial Sequence
  Synthetic
gtctcctctgucatactctagttccut

SEQ ID NO: 84236 - DNA, 22 bp, Artificial Sequence
  Synthetic
cttctctgccagutctccaguc

SEQ ID NO: 84237 - DNA, 23 bp, Artificial Sequence
  Synthetic
gaatccagagguttgccaucact

SEQ ID NO: 84238 - DNA, 21 bp, Artificial Sequence
  Synthetic
gatagcctuccccacauggaa

SEQ ID NO: 84239 - DNA, 19 bp, Artificial Sequence
  Synthetic
cttcgtgcgcugcatcauc

SEQ ID NO: 84240 - DNA, 21 bp, Artificial Sequence
  Synthetic
gcaccttcuggaactgctcut

SEQ ID NO: 84241 - DNA, 21 bp, Artificial Sequence
  Synthetic
cgcagtccugaaaaactuccc

SEQ ID NO: 84242 - DNA, 27 bp, Artificial Sequence
  Synthetic
ctttgagaacuctcctugaggaagaat

SEQ ID NO: 84243 - DNA, 25 bp, Artificial Sequence
  Synthetic
agguagaagacacaaccaccuagag

SEQ ID NO: 84244 - DNA, 23 bp, Artificial Sequence
  Synthetic
ctccttttccuggttccgctuaa

SEQ ID NO: 84245 - DNA, 25 bp, Artificial Sequence
  Synthetic
cgcatacggacuacaaaagaugaga

SEQ ID NO: 84246 - DNA, 24 bp, Artificial Sequence
  Synthetic
tguaagacacgagacacuggaaga

SEQ ID NO: 84247 - DNA, 23 bp, Artificial Sequence
  Synthetic
tgggtaaugcaggcagacatuat

SEQ ID NO: 84248 - DNA, 24 bp, Artificial Sequence
  Synthetic
cutgggcttccuaaaaacagcaat

SEQ ID NO: 84249 - DNA, 19 bp, Artificial Sequence
  Synthetic
cctgtgcacccucacctug

SEQ ID NO: 84250 - DNA, 26 bp, Artificial Sequence
  Synthetic
gccaacttgaaaugaagactttucct

SEQ ID NO: 84251 - DNA, 28 bp, Artificial Sequence
  Synthetic
gaaagagagguagatttcaatggctuct

SEQ ID NO: 84252 - DNA, 20 bp, Artificial Sequence
  Synthetic
ctcaccctcutctcgtggut

SEQ ID NO: 84253 - DNA, 20 bp, Artificial Sequence
  Synthetic
gauggccaagaugacggaga

SEQ ID NO: 84254 - DNA, 20 bp, Artificial Sequence
  Synthetic
ggagtatcucccgggacuca

SEQ ID NO: 84255 - DNA, 21 bp, Artificial Sequence
  Synthetic
ggagcucgacagcaatctgua

SEQ ID NO: 84256 - DNA, 28 bp, Artificial Sequence
  Synthetic
ggaaaagtuagcaacacaaatgaaguct

SEQ ID NO: 84257 - DNA, 25 bp, Artificial Sequence
  Synthetic
cctcctccttuttgtgtttggttut

SEQ ID NO: 84258 - DNA, 21 bp, Artificial Sequence
  Synthetic
cgtggtccgugaagagttugt

SEQ ID NO: 84259 - DNA, 20 bp, Artificial Sequence
  Synthetic
tgccgtaugacctgacctug

SEQ ID NO: 84260 - DNA, 21 bp, Artificial Sequence
  Synthetic
ggtgagauggcctacatcgug

SEQ ID NO: 84261 - DNA, 23 bp, Artificial Sequence
  Synthetic
ctgtgctgaauctgacctgtcut

SEQ ID NO: 84262 - DNA, 20 bp, Artificial Sequence
  Synthetic
gcggaacucgaatcgcuacc

SEQ ID NO: 84263 - DNA, 19 bp, Artificial Sequence
  Synthetic
tggguccccaagacaccua

SEQ ID NO: 84264 - DNA, 20 bp, Artificial Sequence
  Synthetic
tgccuccatugacacaaggt

SEQ ID NO: 84265 - DNA, 27 bp, Artificial Sequence
  Synthetic
aaatgtgagacugatgtcaatgagugt

SEQ ID NO: 84266 - DNA, 21 bp, Artificial Sequence
  Synthetic
tgcctccatugacacaaggug

SEQ ID NO: 84267 - DNA, 27 bp, Artificial Sequence
  Synthetic
cagaaatgugagactgatgtcaaugag

SEQ ID NO: 84268 - DNA, 24 bp, Artificial Sequence
  Synthetic
gagaaaagtgaautggccctcuct

SEQ ID NO: 84269 - DNA, 25 bp, Artificial Sequence
  Synthetic
tgataggctutggtgaagauagcac

SEQ ID NO: 84270 - DNA, 23 bp, Artificial Sequence
  Synthetic
ttccctgguatcccattctucca

SEQ ID NO: 84271 - DNA, 26 bp, Artificial Sequence
  Synthetic
ctacaacauacgtagcugacacagaa

SEQ ID NO: 84272 - DNA, 24 bp, Artificial Sequence
  Synthetic
tgacctttttggutacccacacut

SEQ ID NO: 84273 - DNA, 27 bp, Artificial Sequence
  Synthetic
actggtgcucattttcatcattaucca

SEQ ID NO: 84274 - DNA, 21 bp, Artificial Sequence
  Synthetic
catgcccutcttggtctugga

SEQ ID NO: 84275 - DNA, 22 bp, Artificial Sequence
  Synthetic
gctgagccuctggcctattuag

SEQ ID NO: 84276 - DNA, 21 bp, Artificial Sequence
  Synthetic
cagatagcaucagggccucag

SEQ ID NO: 84277 - DNA, 26 bp, Artificial Sequence
  Synthetic
tgcugtctaaaaatuaaggcccacat

SEQ ID NO: 84278 - DNA, 27 bp, Artificial Sequence
  Synthetic
aggccgacaaagautatcacttuaagg

SEQ ID NO: 84279 - DNA, 28 bp, Artificial Sequence
  Synthetic
aaagtcucaagccacatgaauagaaact

SEQ ID NO: 84280 - DNA, 26 bp, Artificial Sequence
  Synthetic
cacactcatugacatcagtcucacat

SEQ ID NO: 84281 - DNA, 18 bp, Artificial Sequence
  Synthetic
ggagugccaauggacgga

SEQ ID NO: 84282 - DNA, 22 bp, Artificial Sequence
  Synthetic
gaagactttgcuctggccaaug

SEQ ID NO: 84283 - DNA, 21 bp, Artificial Sequence
  Synthetic
ctcgucagccagugagaagaa

SEQ ID NO: 84284 - DNA, 23 bp, Artificial Sequence
  Synthetic
caagutctttggcuggagagact

SEQ ID NO: 84285 - DNA, 24 bp, Artificial Sequence
  Synthetic
tcttggttggcugggtactagtua

SEQ ID NO: 84286 - DNA, 21 bp, Artificial Sequence
  Synthetic
gtcacttugagagccccacuc

SEQ ID NO: 84287 - DNA, 26 bp, Artificial Sequence
  Synthetic
gaaatgtttttgtucctcctgtgcua

SEQ ID NO: 84288 - DNA, 19 bp, Artificial Sequence
  Synthetic
augagacaggcaggcaucc

SEQ ID NO: 84289 - DNA, 22 bp, Artificial Sequence
  Synthetic
aagagctcgcugatgtcaauga

SEQ ID NO: 84290 - DNA, 20 bp, Artificial Sequence
  Synthetic
gctcacccggaagucagaut

SEQ ID NO: 84291 - DNA, 23 bp, Artificial Sequence
  Synthetic
ttgccaauccagaagtaaccugt

SEQ ID NO: 84292 - DNA, 28 bp, Artificial Sequence
  Synthetic
tgaaatgattcaauctgacaacagcuct

SEQ ID NO: 84293 - DNA, 20 bp, Artificial Sequence
  Synthetic
gcatgccguaactgctgtuc

SEQ ID NO: 84294 - DNA, 26 bp, Artificial Sequence
  Synthetic
ctttaccatgtauctgcttgctcuga

SEQ ID NO: 84295 - DNA, 29 bp, Artificial Sequence
  Synthetic
cagttgtgattcuttctttctacttgugt

SEQ ID NO: 84296 - DNA, 21 bp, Artificial Sequence
  Synthetic
ctccttcugcttcaggcuact

SEQ ID NO: 84297 - DNA, 20 bp, Artificial Sequence
  Synthetic
cacactcaaugccaccaucc

SEQ ID NO: 84298 - DNA, 25 bp, Artificial Sequence
  Synthetic
caaccaauaaggcttcauccacaag

SEQ ID NO: 84299 - DNA, 20 bp, Artificial Sequence
  Synthetic
ctgctgguggtgctacugag

SEQ ID NO: 84300 - DNA, 26 bp, Artificial Sequence
  Synthetic
tgtgtgtttgtutagctttttgguga

SEQ ID NO: 84301 - DNA, 27 bp, Artificial Sequence
  Synthetic
cactgagaggugactuaaagaaaccat

SEQ ID NO: 84302 - DNA, 22 bp, Artificial Sequence
  Synthetic
gccagttcutgatcctgtugct

SEQ ID NO: 84303 - DNA, 22 bp, Artificial Sequence
  Synthetic
gtctagccugatcactgaccug

SEQ ID NO: 84304 - DNA, 21 bp, Artificial Sequence
  Synthetic
cttccaagagcccauccauca

SEQ ID NO: 84305 - DNA, 28 bp, Artificial Sequence
  Synthetic
gatttgtacctucgaacaagaaaugagt

SEQ ID NO: 84306 - DNA, 21 bp, Artificial Sequence
  Synthetic
gtcattgtugtgccccuacct

SEQ ID NO: 84307 - DNA, 22 bp, Artificial Sequence
  Synthetic
cgutgaaguggagcaagaggac

SEQ ID NO: 84308 - DNA, 21 bp, Artificial Sequence
  Synthetic
cagcctugccccttcaaacua

SEQ ID NO: 84309 - DNA, 28 bp, Artificial Sequence
  Synthetic
ccaagatctuaggcagaatgaacaatuc

SEQ ID NO: 84310 - DNA, 22 bp, Artificial Sequence
  Synthetic
gcacagutcatgtcuccaagga

SEQ ID NO: 84311 - DNA, 28 bp, Artificial Sequence
  Synthetic
ttactgggatgtutgaataagatcggut

SEQ ID NO: 84312 - DNA, 21 bp, Artificial Sequence
  Synthetic
gtggucccagccagtcatuac

SEQ ID NO: 84313 - DNA, 29 bp, Artificial Sequence
  Synthetic
gtttgttggaagaaugtgatcagcttaut

SEQ ID NO: 84314 - DNA, 23 bp, Artificial Sequence
  Synthetic
gctgagaaagcugaaggtcctua

SEQ ID NO: 84315 - DNA, 20 bp, Artificial Sequence
  Synthetic
gacutcagttccugcagcca

SEQ ID NO: 84316 - DNA, 24 bp, Artificial Sequence
  Synthetic
ctggtcaaugactcagactuccag

SEQ ID NO: 84317 - DNA, 21 bp, Artificial Sequence
  Synthetic
tccccagacaggcaauaggua

SEQ ID NO: 84318 - DNA, 21 bp, Artificial Sequence
  Synthetic
tgaggtuggagatggagcuct

SEQ ID NO: 84319 - DNA, 22 bp, Artificial Sequence
  Synthetic
ccacucttgcugcaaacaacac

SEQ ID NO: 84320 - DNA, 22 bp, Artificial Sequence
  Synthetic
ttgcatggucatagcucccaat

SEQ ID NO: 84321 - DNA, 26 bp, Artificial Sequence
  Synthetic
tgtagtttctcuttggaaagctcugg

SEQ ID NO: 84322 - DNA, 24 bp, Artificial Sequence
  Synthetic
ctagugcagctttugacaacaact

SEQ ID NO: 84323 - DNA, 25 bp, Artificial Sequence
  Synthetic
tttatgccgttcugtcaatgagcua

SEQ ID NO: 84324 - DNA, 22 bp, Artificial Sequence
  Synthetic
gcuacctgttguacagagcaca

SEQ ID NO: 84325 - DNA, 20 bp, Artificial Sequence
  Synthetic
gcatuggcaggatggtugag

SEQ ID NO: 84326 - DNA, 22 bp, Artificial Sequence
  Synthetic
gggaagccutcctttcaaaucc

SEQ ID NO: 84327 - DNA, 24 bp, Artificial Sequence
  Synthetic
ggcctaugacaagaaaauggacac

SEQ ID NO: 84328 - DNA, 27 bp, Artificial Sequence
  Synthetic
aagtgcttaauggctagacaaauagca

SEQ ID NO: 84329 - DNA, 20 bp, Artificial Sequence
  Synthetic
tcccgggaucgtgttcuaca

SEQ ID NO: 84330 - DNA, 22 bp, Artificial Sequence
  Synthetic
tcgggutatacuggaagccact

SEQ ID NO: 84331 - DNA, 21 bp, Artificial Sequence
  Synthetic
gctgagccauccagaacctut

SEQ ID NO: 84332 - DNA, 24 bp, Artificial Sequence
  Synthetic
tcaaagcatugccatggaaaaugg

SEQ ID NO: 84333 - DNA, 21 bp, Artificial Sequence
  Synthetic
aatccagugcttccuccacag

SEQ ID NO: 84334 - DNA, 19 bp, Artificial Sequence
  Synthetic
gtctccccaugtgguccaa

SEQ ID NO: 84335 - DNA, 18 bp, Artificial Sequence
  Synthetic
cgcacagccccucgtauc

SEQ ID NO: 84336 - DNA, 26 bp, Artificial Sequence
  Synthetic
gtcatctgcutctcctttcugaacaa

SEQ ID NO: 84337 - DNA, 27 bp, Artificial Sequence
  Synthetic
gaaacaggugctttaaaaguagcaact

SEQ ID NO: 84338 - DNA, 22 bp, Artificial Sequence
  Synthetic
ccaaggagacugtugaggaagg

SEQ ID NO: 84339 - DNA, 25 bp, Artificial Sequence
  Synthetic
acacaagugggcaaacatttctcua

SEQ ID NO: 84340 - DNA, 22 bp, Artificial Sequence
  Synthetic
ccagguagagggaguacagagt

SEQ ID NO: 84341 - DNA, 21 bp, Artificial Sequence
  Synthetic
cagggcttugaaggaagtgug

SEQ ID NO: 84342 - DNA, 22 bp, Artificial Sequence
  Synthetic
tcagtcuccagcatctcuaccc

SEQ ID NO: 84343 - DNA, 23 bp, Artificial Sequence
  Synthetic
ggttcctggugttcctccattuc

SEQ ID NO: 84344 - DNA, 20 bp, Artificial Sequence
  Synthetic
gctccctcuccgctactcuc

SEQ ID NO: 84345 - DNA, 24 bp, Artificial Sequence
  Synthetic
ggctggatucactcttcactcuac

SEQ ID NO: 84346 - DNA, 28 bp, Artificial Sequence
  Synthetic
tcttagaacuaggattacctgugaagca

SEQ ID NO: 84347 - DNA, 26 bp, Artificial Sequence
  Synthetic
agacaaggatuggcattcagucaaat

SEQ ID NO: 84348 - DNA, 19 bp, Artificial Sequence
  Synthetic
gcccaccccagutcacaua

SEQ ID NO: 84349 - DNA, 19 bp, Artificial Sequence
  Synthetic
gctgacaccugaggcacug

SEQ ID NO: 84350 - DNA, 22 bp, Artificial Sequence
  Synthetic
tcaccccaggaugaacaatgug

SEQ ID NO: 84351 - DNA, 28 bp, Artificial Sequence
  Synthetic
cctcaactttgtucacttctcaggaaua

SEQ ID NO: 84352 - DNA, 20 bp, Artificial Sequence
  Synthetic
gctctgggucgtccttgtug

SEQ ID NO: 84353 - DNA, 25 bp, Artificial Sequence
  Synthetic
acagcagtctutctttcccatguaa

SEQ ID NO: 84354 - DNA, 22 bp, Artificial Sequence
  Synthetic
aucaaugcaggcaaaagcaact

SEQ ID NO: 84355 - DNA, 21 bp, Artificial Sequence
  Synthetic
gcctctgaucttgctgcctuc

SEQ ID NO: 84356 - DNA, 25 bp, Artificial Sequence
  Synthetic
gccaucagacaaggaaaaacgauag

SEQ ID NO: 84357 - DNA, 27 bp, Artificial Sequence
  Synthetic
tgctggtgggaaacuattatgaaacut

SEQ ID NO: 84358 - DNA, 23 bp, Artificial Sequence
  Synthetic
ggaggttctugtccctcttcuca

SEQ ID NO: 84359 - DNA, 23 bp, Artificial Sequence
  Synthetic
tttccttguacctgtccagucac

SEQ ID NO: 84360 - DNA, 22 bp, Artificial Sequence
  Synthetic
ccgaaucugaaggcagcaagat

SEQ ID NO: 84361 - DNA, 20 bp, Artificial Sequence
  Synthetic
tgcatacacucgggcaugac

SEQ ID NO: 84362 - DNA, 17 bp, Artificial Sequence
  Synthetic
ccaccgugggcctgtua

SEQ ID NO: 84363 - DNA, 17 bp, Artificial Sequence
  Synthetic
agccgccuccgaagaug

SEQ ID NO: 84364 - DNA, 21 bp, Artificial Sequence
  Synthetic
guttttcccacugccaagcat

SEQ ID NO: 84365 - DNA, 23 bp, Artificial Sequence
  Synthetic
acagaactgtugccattgtguca

SEQ ID NO: 84366 - DNA, 19 bp, Artificial Sequence
  Synthetic
ctgcgctucttgcatggut

SEQ ID NO: 84367 - DNA, 21 bp, Artificial Sequence
  Synthetic
tttggtcaccacguagctcuc

SEQ ID NO: 84368 - DNA, 23 bp, Artificial Sequence
  Synthetic
ttggtttgtggucctcacctaug

SEQ ID NO: 84369 - DNA, 22 bp, Artificial Sequence
  Synthetic
tcccgttccuaccagtcacuat

SEQ ID NO: 84370 - DNA, 24 bp, Artificial Sequence
  Synthetic
agaaaaggaagugccaggcaaaua

SEQ ID NO: 84371 - DNA, 26 bp, Artificial Sequence
  Synthetic
ttgttaacagguccaaggaagaaguc

SEQ ID NO: 84372 - DNA, 24 bp, Artificial Sequence
  Synthetic
cttcggagugattgcaaggtauca

SEQ ID NO: 84373 - DNA, 21 bp, Artificial Sequence
  Synthetic
cgaugcaagtgcucaaacacc

SEQ ID NO: 84374 - DNA, 22 bp, Artificial Sequence
  Synthetic
ccaaacgaugaagcctcactut

SEQ ID NO: 84375 - DNA, 26 bp, Artificial Sequence
  Synthetic
cgtgatccuttaagctcuaagaaggg

SEQ ID NO: 84376 - DNA, 24 bp, Artificial Sequence
  Synthetic
ttcgtgcugatatttgtgugaggt

SEQ ID NO: 84377 - DNA, 25 bp, Artificial Sequence
  Synthetic
aatgacttgtcuaggaaggcagtug

SEQ ID NO: 84378 - DNA, 22 bp, Artificial Sequence
  Synthetic
gguactctctgtugaccaccca

SEQ ID NO: 84379 - DNA, 21 bp, Artificial Sequence
  Synthetic
gcuctcugacccagcacaaat

SEQ ID NO: 84380 - DNA, 27 bp, Artificial Sequence
  Synthetic
tttttagccaugagttcaagttccuct

SEQ ID NO: 84381 - DNA, 27 bp, Artificial Sequence
  Synthetic
gaggcagcagauaccacattatgtuaa

SEQ ID NO: 84382 - DNA, 22 bp, Artificial Sequence
  Synthetic
attctgtugccggaagauaccc

SEQ ID NO: 84383 - DNA, 22 bp, Artificial Sequence
  Synthetic
tuggtccaguaacaagcacaca

SEQ ID NO: 84384 - DNA, 28 bp, Artificial Sequence
  Synthetic
agttggtggaautaatacactgtctuca

SEQ ID NO: 84385 - DNA, 27 bp, Artificial Sequence
  Synthetic
aaggaacaggaagaaaucaguagcaaa

SEQ ID NO: 84386 - DNA, 26 bp, Artificial Sequence
  Synthetic
tcagttactggugatctagcaggaut

SEQ ID NO: 84387 - DNA, 28 bp, Artificial Sequence
  Synthetic
gaggacauttattucacaggagagagac

SEQ ID NO: 84388 - DNA, 22 bp, Artificial Sequence
  Synthetic
gcaggaaaauggcaaagccuat

SEQ ID NO: 84389 - DNA, 29 bp, Artificial Sequence
  Synthetic
actgtgtttggaaaaugatcacctaagua

SEQ ID NO: 84390 - DNA, 22 bp, Artificial Sequence
  Synthetic
tgaaaaattgggugagctgcug

SEQ ID NO: 84391 - DNA, 25 bp, Artificial Sequence
  Synthetic
ttggaggaagaccgutcgatatcua

SEQ ID NO: 84392 - DNA, 19 bp, Artificial Sequence
  Synthetic
gcctcccugggtgcttaug

SEQ ID NO: 84393 - DNA, 18 bp, Artificial Sequence
  Synthetic
gcuacagugggcgcaact

SEQ ID NO: 84394 - DNA, 17 bp, Artificial Sequence
  Synthetic
cccgacucccgcccuaa

SEQ ID NO: 84395 - DNA, 21 bp, Artificial Sequence
  Synthetic
ccaguccaggagcctaaugac

SEQ ID NO: 84396 - DNA, 24 bp, Artificial Sequence
  Synthetic
gagaacaggaagutggtagcucag

SEQ ID NO: 84397 - DNA, 27 bp, Artificial Sequence
  Synthetic
ccagcaagttuacaatgttcaaatgug

SEQ ID NO: 84398 - DNA, 18 bp, Artificial Sequence
  Synthetic
gcagtcgucgatgucggt

SEQ ID NO: 84399 - DNA, 21 bp, Artificial Sequence
  Synthetic
acatcaacgagugcgttcuga

SEQ ID NO: 84400 - DNA, 19 bp, Artificial Sequence
  Synthetic
gugggtgttcuggcaggat

SEQ ID NO: 84401 - DNA, 19 bp, Artificial Sequence
  Synthetic
ggucgggagaggcactgua

SEQ ID NO: 84402 - DNA, 23 bp, Artificial Sequence
  Synthetic
gtatcttcuaccaggtgctuggg

SEQ ID NO: 84403 - DNA, 26 bp, Artificial Sequence
  Synthetic
caatgaggaaacugaccaaagugaaa

SEQ ID NO: 84404 - DNA, 23 bp, Artificial Sequence
  Synthetic
gtcccctaccutatctcccauct

SEQ ID NO: 84405 - DNA, 20 bp, Artificial Sequence
  Synthetic
ggtggtgagauagccccugt

SEQ ID NO: 84406 - DNA, 31 bp, Artificial Sequence
  Synthetic
attttattcctagggaaugagtgagacttug

SEQ ID NO: 84407 - DNA, 25 bp, Artificial Sequence
  Synthetic
ccacctggcuacacgaaaatttcua

SEQ ID NO: 84408 - DNA, 21 bp, Artificial Sequence
  Synthetic
gucttcuggccccaagaaagt

SEQ ID NO: 84409 - DNA, 27 bp, Artificial Sequence
  Synthetic
agacatcagcaucaacttgtucaaaag

SEQ ID NO: 84410 - DNA, 21 bp, Artificial Sequence
  Synthetic
aagaaggugagctcgggttuc

SEQ ID NO: 84411 - DNA, 21 bp, Artificial Sequence
  Synthetic
ctccccuttccgtgaugaagt

SEQ ID NO: 84412 - DNA, 24 bp, Artificial Sequence
  Synthetic
ccgccctcuttcacttttatcuct

SEQ ID NO: 84413 - DNA, 21 bp, Artificial Sequence
  Synthetic
gatagcgaaagcucccctucc

SEQ ID NO: 84414 - DNA, 23 bp, Artificial Sequence
  Synthetic
agugaatcagugccaaagacaca

SEQ ID NO: 84415 - DNA, 28 bp, Artificial Sequence
  Synthetic
ccaggaggautacctauacaaagaacag

SEQ ID NO: 84416 - DNA, 20 bp, Artificial Sequence
  Synthetic
gcccaccagcugatucacag

SEQ ID NO: 84417 - DNA, 20 bp, Artificial Sequence
  Synthetic
cctccaccgcagugctaaug

SEQ ID NO: 84418 - DNA, 20 bp, Artificial Sequence
  Synthetic
gagccggugcaagatctcut

SEQ ID NO: 84419 - DNA, 25 bp, Artificial Sequence
  Synthetic
tgaggtcgauaaggatgttttcguc

SEQ ID NO: 84420 - DNA, 23 bp, Artificial Sequence
  Synthetic
cctggctcugcagtttctcttua

SEQ ID NO: 84421 - DNA, 28 bp, Artificial Sequence
  Synthetic
caatataatgcuggaccgccatauagat

SEQ ID NO: 84422 - DNA, 28 bp, Artificial Sequence
  Synthetic
gtctgaactgaagauaatgactcaccug

SEQ ID NO: 84423 - DNA, 25 bp, Artificial Sequence
  Synthetic
agagtggaggauttaagcctgatug

SEQ ID NO: 84424 - DNA, 23 bp, Artificial Sequence
  Synthetic
caauggctucaaacagccaacat

SEQ ID NO: 84425 - DNA, 24 bp, Artificial Sequence
  Synthetic
gcccuacaagtgcauacaacaaga

SEQ ID NO: 84426 - DNA, 33 bp, Artificial Sequence
  Synthetic
tctattcttagataugaagagaaggctacuaaa

SEQ ID NO: 84427 - DNA, 21 bp, Artificial Sequence
  Synthetic
catgcgcuggtgggttttauc

SEQ ID NO: 84428 - DNA, 20 bp, Artificial Sequence
  Synthetic
gcggcaccucatgaccauat

SEQ ID NO: 84429 - DNA, 27 bp, Artificial Sequence
  Synthetic
ctcggttgacautaggagcaattcuaa

SEQ ID NO: 84430 - DNA, 18 bp, Artificial Sequence
  Synthetic
cuccaccgcgacaucaag

SEQ ID NO: 84431 - DNA, 18 bp, Artificial Sequence
  Synthetic
gcctggcucaccaucgaa

SEQ ID NO: 84432 - DNA, 20 bp, Artificial Sequence
  Synthetic
gttttguggcaccgcttcuc

SEQ ID NO: 84433 - DNA, 23 bp, Artificial Sequence
  Synthetic
gaagagagaucaatgcacuccca

SEQ ID NO: 84434 - DNA, 28 bp, Artificial Sequence
  Synthetic
agtatctggactuaaagacacaggctua

SEQ ID NO: 84435 - DNA, 21 bp, Artificial Sequence
  Synthetic
gggatgccugatgcttcucac

SEQ ID NO: 84436 - DNA, 21 bp, Artificial Sequence
  Synthetic
gaaacaaaggccutggugcag

SEQ ID NO: 84437 - DNA, 24 bp, Artificial Sequence
  Synthetic
cguggugaaaccaaaccaagaaaa

SEQ ID NO: 84438 - DNA, 28 bp, Artificial Sequence
  Synthetic
cacaaatgucactaaaagauggcagaaa

SEQ ID NO: 84439 - DNA, 26 bp, Artificial Sequence
  Synthetic
tttcaatttgggacugaaggagtuca

SEQ ID NO: 84440 - DNA, 21 bp, Artificial Sequence
  Synthetic
tgcatgugccagacatccuaa

SEQ ID NO: 84441 - DNA, 21 bp, Artificial Sequence
  Synthetic
cacgaagcaugtccaatugcc

SEQ ID NO: 84442 - DNA, 27 bp, Artificial Sequence
  Synthetic
tcaaccaaaactugatgaactcctuca

SEQ ID NO: 84443 - DNA, 24 bp, Artificial Sequence
  Synthetic
aaacctgagautgtggaucaagca

SEQ ID NO: 84444 - DNA, 20 bp, Artificial Sequence
  Synthetic
ccggcaautcatggauccag

SEQ ID NO: 84445 - DNA, 20 bp, Artificial Sequence
  Synthetic
cccctcugatgtgtcuccaa

SEQ ID NO: 84446 - DNA, 23 bp, Artificial Sequence
  Synthetic
gggaaaatgutcttgggtgucat

SEQ ID NO: 84447 - DNA, 27 bp, Artificial Sequence
  Synthetic
tgacaagttacacaucaaaacccauct

SEQ ID NO: 84448 - DNA, 28 bp, Artificial Sequence
  Synthetic
agttgactuagaagagaaggaugaacct

SEQ ID NO: 84449 - DNA, 26 bp, Artificial Sequence
  Synthetic
gctctgcaggaaguttatgattcuca

SEQ ID NO: 84450 - DNA, 26 bp, Artificial Sequence
  Synthetic
agtactcttuagaggaggugaaggag

SEQ ID NO: 84451 - DNA, 21 bp, Artificial Sequence
  Synthetic
cttagcgccacugcaaagaug

SEQ ID NO: 84452 - DNA, 21 bp, Artificial Sequence
  Synthetic
ttccactcaacugccaagugt

SEQ ID NO: 84453 - DNA, 27 bp, Artificial Sequence
  Synthetic
ggctaatgactcugatgatagcatcuc

SEQ ID NO: 84454 - DNA, 22 bp, Artificial Sequence
  Synthetic
ccauccctgctucagaacagaa

SEQ ID NO: 84455 - DNA, 22 bp, Artificial Sequence
  Synthetic
cgucctcaaggucaccagaaac

SEQ ID NO: 84456 - DNA, 26 bp, Artificial Sequence
  Synthetic
gaagccctgcuatttaaaagactuct

SEQ ID NO: 84457 - DNA, 28 bp, Artificial Sequence
  Synthetic
cccaaccttcuaccttcgattttaauct

SEQ ID NO: 84458 - DNA, 24 bp, Artificial Sequence
  Synthetic
cagacagaagcacaguaccgatut

SEQ ID NO: 84459 - DNA, 25 bp, Artificial Sequence
  Synthetic
ctagcaagagaaugagaauccgcat

SEQ ID NO: 84460 - DNA, 27 bp, Artificial Sequence
  Synthetic
ccugagaaggaaaagcgaauaaaggaa

SEQ ID NO: 84461 - DNA, 23 bp, Artificial Sequence
  Synthetic
aagctgctaucccctcatucaag

SEQ ID NO: 84462 - DNA, 22 bp, Artificial Sequence
  Synthetic
cctcaaggccugtttgtctgut

SEQ ID NO: 84463 - DNA, 22 bp, Artificial Sequence
  Synthetic
cagagaaccucggaacauacgg

SEQ ID NO: 84464 - DNA, 26 bp, Artificial Sequence
  Synthetic
agaattttcaucccatagagcacugg

SEQ ID NO: 84465 - DNA, 22 bp, Artificial Sequence
  Synthetic
cttggccacacugtcctcuaag

SEQ ID NO: 84466 - DNA, 22 bp, Artificial Sequence
  Synthetic
cacacagtuggcaaggaaagut

SEQ ID NO: 84467 - DNA, 23 bp, Artificial Sequence
  Synthetic
tccaacaagaaggccuggttuag

SEQ ID NO: 84468 - DNA, 22 bp, Artificial Sequence
  Synthetic
cacttagguccagctcctucag

SEQ ID NO: 84469 - DNA, 24 bp, Artificial Sequence
  Synthetic
acacatcacatcuctcctgtccut

SEQ ID NO: 84470 - DNA, 22 bp, Artificial Sequence
  Synthetic
tcttccttugttggttgcugct

SEQ ID NO: 84471 - DNA, 26 bp, Artificial Sequence
  Synthetic
tgtactttctccutcttctccctcut

SEQ ID NO: 84472 - DNA, 27 bp, Artificial Sequence
  Synthetic
gctttactcauaggtgggaaacuacct

SEQ ID NO: 84473 - DNA, 19 bp, Artificial Sequence
  Synthetic
aaacccucgugaagacgca

SEQ ID NO: 84474 - DNA, 23 bp, Artificial Sequence
  Synthetic
caauagttgcugggacaccaaag

SEQ ID NO: 84475 - DNA, 22 bp, Artificial Sequence
  Synthetic
tcatagcccutagctgggucat

SEQ ID NO: 84476 - DNA, 28 bp, Artificial Sequence
  Synthetic
tcagcagaaacagccutaattattuggt

SEQ ID NO: 84477 - DNA, 29 bp, Artificial Sequence
  Synthetic
tgcatacttggaaugaatccttcuagaga

SEQ ID NO: 84478 - DNA, 23 bp, Artificial Sequence
  Synthetic
acataccguggacgtctcuagaa

SEQ ID NO: 84479 - DNA, 28 bp, Artificial Sequence
  Synthetic
tgtcaaagctauaaaaatctccagugct

SEQ ID NO: 84480 - DNA, 27 bp, Artificial Sequence
  Synthetic
tcatattgatuaggctgttccaaugaa

SEQ ID NO: 84481 - DNA, 23 bp, Artificial Sequence
  Synthetic
cctgttgcacuggttttgaugaa

SEQ ID NO: 84482 - DNA, 27 bp, Artificial Sequence
  Synthetic
gatctgctugatgttgtacuagacagt

SEQ ID NO: 84483 - DNA, 27 bp, Artificial Sequence
  Synthetic
cttgcttgaaaccaauttcacattucc

SEQ ID NO: 84484 - DNA, 24 bp, Artificial Sequence
  Synthetic
gatactgctguagctttggctuct

SEQ ID NO: 84485 - DNA, 26 bp, Artificial Sequence
  Synthetic
acatgggacucaaagtttuagcacaa

SEQ ID NO: 84486 - DNA, 26 bp, Artificial Sequence
  Synthetic
gatcttcatcucttgtttgcuccact

SEQ ID NO: 84487 - DNA, 25 bp, Artificial Sequence
  Synthetic
agcttgtgugaaatgcattaugcaa

SEQ ID NO: 84488 - DNA, 29 bp, Artificial Sequence
  Synthetic
ttcaagtgactcutctcatgttcttuacc

SEQ ID NO: 84489 - DNA, 18 bp, Artificial Sequence
  Synthetic
gccaagcguctccuggat

SEQ ID NO: 84490 - DNA, 20 bp, Artificial Sequence
  Synthetic
gcagucgcuaccgggaaaat

SEQ ID NO: 84491 - DNA, 18 bp, Artificial Sequence
  Synthetic
cgtatccgcgcucgtcua

SEQ ID NO: 84492 - DNA, 29 bp, Artificial Sequence
  Synthetic
ccaaattattagaugcagaactccaguga

SEQ ID NO: 84493 - DNA, 25 bp, Artificial Sequence
  Synthetic
ggtacgucaacaggaacagcaaaua

SEQ ID NO: 84494 - DNA, 27 bp, Artificial Sequence
  Synthetic
cagcactaaagaautgggatgtttuga

SEQ ID NO: 84495 - DNA, 28 bp, Artificial Sequence
  Synthetic
acaaaggagagugattgattttctucct

SEQ ID NO: 84496 - DNA, 20 bp, Artificial Sequence
  Synthetic
catgttgucctgggcatugg

SEQ ID NO: 84497 - DNA, 26 bp, Artificial Sequence
  Synthetic
agaggactctuctgctaacatcauca

SEQ ID NO: 84498 - DNA, 27 bp, Artificial Sequence
  Synthetic
acccctagcaaguatatgagtaacgua

SEQ ID NO: 84499 - DNA, 27 bp, Artificial Sequence
  Synthetic
ctattccugaagcagaaattggatugg

SEQ ID NO: 84500 - DNA, 21 bp, Artificial Sequence
  Synthetic
ccgccaauccaatttctgcut

SEQ ID NO: 84501 - DNA, 31 bp, Artificial Sequence
  Synthetic
aaagaggttgcttuatcttgacattatcuga

SEQ ID NO: 84502 - DNA, 25 bp, Artificial Sequence
  Synthetic
ccctcttccuccattcagtttccua

SEQ ID NO: 84503 - DNA, 21 bp, Artificial Sequence
  Synthetic
ccuttcccuggcagacaacag

SEQ ID NO: 84504 - DNA, 28 bp, Artificial Sequence
  Synthetic
acattgcttttucagaaggctaauagga

SEQ ID NO: 84505 - DNA, 27 bp, Artificial Sequence
  Synthetic
cccagatgagauctccaacttcauact

SEQ ID NO: 84506 - DNA, 17 bp, Artificial Sequence
  Synthetic
ggcccutcuagcacgca

SEQ ID NO: 84507 - DNA, 21 bp, Artificial Sequence
  Synthetic
gaccaugttccucaccacaca

SEQ ID NO: 84508 - DNA, 18 bp, Artificial Sequence
  Synthetic
gctugcacgagccaguct

SEQ ID NO: 84509 - DNA, 18 bp, Artificial Sequence
  Synthetic
ggcgaguaucgagcggaa

SEQ ID NO: 84510 - DNA, 28 bp, Artificial Sequence
  Synthetic
tgaagtcaaataaugaagtcccaaguga

SEQ ID NO: 84511 - DNA, 26 bp, Artificial Sequence
  Synthetic
ggctttttguacttgtttgtccucaa

SEQ ID NO: 84512 - DNA, 17 bp, Artificial Sequence
  Synthetic
ccuggcgcagcaucagt

SEQ ID NO: 84513 - DNA, 19 bp, Artificial Sequence
  Synthetic
agctgggagcuaggtccuc

SEQ ID NO: 84514 - DNA, 21 bp, Artificial Sequence
  Synthetic
gcaccctgguagaccaaguct

SEQ ID NO: 84515 - DNA, 27 bp, Artificial Sequence
  Synthetic
gggttaactaccutctccttctugagt

SEQ ID NO: 84516 - DNA, 25 bp, Artificial Sequence
  Synthetic
cctaagaaaaaguctacgccacuga

SEQ ID NO: 84517 - DNA, 28 bp, Artificial Sequence
  Synthetic
gcaactgccuttaacatgtataaucact

SEQ ID NO: 84518 - DNA, 26 bp, Artificial Sequence
  Synthetic
ccttgcattutccattgcatuagagg

SEQ ID NO: 84519 - DNA, 25 bp, Artificial Sequence
  Synthetic
cgtucaaaccaagagcuagagagat

SEQ ID NO: 84520 - DNA, 28 bp, Artificial Sequence
  Synthetic
gtcttgggtagaaucatcttgtctcaut

SEQ ID NO: 84521 - DNA, 31 bp, Artificial Sequence; identical to SEQ ID NO: 59803
  Synthetic

SEQ ID NO: 84522 - DNA, 25 bp, Artificial Sequence
  Synthetic
cccccaaatugaactgaagtcaugt

SEQ ID NO: 84523 - DNA, 20 bp, Artificial Sequence
  Synthetic
gggaggcaccutcaagtguc

SEQ ID NO: 84524 - DNA, 21 bp, Artificial Sequence
  Synthetic
ggcttgtccucttccctccua

SEQ ID NO: 84525 - DNA, 21 bp, Artificial Sequence
  Synthetic
ctcctgcucgatcttctgcug

SEQ ID NO: 84526 - DNA, 21 bp, Artificial Sequence
  Synthetic
cactucagggacttctuggca

SEQ ID NO: 84527 - DNA, 23 bp, Artificial Sequence
  Synthetic
gaaggtcttcgutggaaggguaa

SEQ ID NO: 84528 - DNA, 19 bp, Artificial Sequence
  Synthetic
ccacugcgaaugagcgaat

SEQ ID NO: 84529 - DNA, 19 bp, Artificial Sequence
  Synthetic
ccacgagcagaucgcugac

SEQ ID NO: 84530 - DNA, 22 bp, Artificial Sequence
  Synthetic
gcatcacugagaagcuggagaa

SEQ ID NO: 84531 - DNA, 23 bp, Artificial Sequence
  Synthetic
gcagcaugttuaggaacaaagca

SEQ ID NO: 84532 - DNA, 21 bp, Artificial Sequence
  Synthetic
ccttttccgucagggcaugag

SEQ ID NO: 84533 - DNA, 19 bp, Artificial Sequence
  Synthetic
ctgaccutgcccuggagaa

SEQ ID NO: 84534 - DNA, 21 bp, Artificial Sequence
  Synthetic
tgcutgcagtuccaaacaagg

SEQ ID NO: 84535 - DNA, 28 bp, Artificial Sequence
  Synthetic
tgacttagtggcuctgatgtactuaact

SEQ ID NO: 84536 - DNA, 22 bp, Artificial Sequence
  Synthetic
ccaagaaacugaccctgagcut

SEQ ID NO: 84537 - DNA, 25 bp, Artificial Sequence
  Synthetic
acttttcucccacttcattttugcc

SEQ ID NO: 84538 - DNA, 19 bp, Artificial Sequence
  Synthetic
gccagcagucagcctacut

SEQ ID NO: 84539 - DNA, 27 bp, Artificial Sequence
  Synthetic
cctccaaauactgagacttugaacaca

SEQ ID NO: 84540 - DNA, 21 bp, Artificial Sequence
  Synthetic
cgcatcucaagctctgctcug

SEQ ID NO: 84541 - DNA, 21 bp, Artificial Sequence
  Synthetic
cagatgggcaaugagcuggaa

SEQ ID NO: 84542 - DNA, 28 bp, Artificial Sequence
  Synthetic
gcttcacggguataagaatcttctgaut

SEQ ID NO: 84543 - DNA, 26 bp, Artificial Sequence
  Synthetic
caaaatggtutgtagcaguggaaagg

SEQ ID NO: 84544 - DNA, 17 bp, Artificial Sequence
  Synthetic
tgccccuggctcuccat

SEQ ID NO: 84545 - DNA, 18 bp, Artificial Sequence
  Synthetic
cccgaguggcuggaagag

SEQ ID NO: 84546 - DNA, 22 bp, Artificial Sequence
  Synthetic
tgtttgcatguctgagggaugt

SEQ ID NO: 84547 - DNA, 21 bp, Artificial Sequence
  Synthetic
ctggucttcttcucagagcct

SEQ ID NO: 84548 - DNA, 26 bp, Artificial Sequence
  Synthetic
tgtccatcgtcutgcaagtaaaaaug

SEQ ID NO: 84549 - DNA, 28 bp, Artificial Sequence
  Synthetic
aatccacccttuggtttgtattgtauct

SEQ ID NO: 84550 - DNA, 19 bp, Artificial Sequence
  Synthetic
cagaacuggcgtccctgut

SEQ ID NO: 84551 - DNA, 22 bp, Artificial Sequence
  Synthetic
cactcugcaggaaaagauggct

SEQ ID NO: 84552 - DNA, 18 bp, Artificial Sequence
  Synthetic
cutcugcagggagccaga

SEQ ID NO: 84553 - DNA, 17 bp, Artificial Sequence
  Synthetic
gccccacucacctgcut

SEQ ID NO: 84554 - DNA, 22 bp, Artificial Sequence
  Synthetic
gcatcttgagcuctgcgatcug

SEQ ID NO: 84555 - DNA, 21 bp, Artificial Sequence
  Synthetic
cccttccugaagagcacctug

SEQ ID NO: 84556 - DNA, 18 bp, Artificial Sequence
  Synthetic
cgtcctgcugcagtgcut

SEQ ID NO: 84557 - DNA, 18 bp, Artificial Sequence
  Synthetic
aggcucagctcugaggga

SEQ ID NO: 84558 - DNA, 23 bp, Artificial Sequence
  Synthetic
cgtccttccuctccaaccaaaug

SEQ ID NO: 84559 - DNA, 21 bp, Artificial Sequence
  Synthetic
ctttctguggctgtgagguct

SEQ ID NO: 84560 - DNA, 21 bp, Artificial Sequence
  Synthetic
gccccaugtctcagacucaag

SEQ ID NO: 84561 - DNA, 25 bp, Artificial Sequence
  Synthetic
ggtcttgcugacattctttccctut

SEQ ID NO: 84562 - DNA, 21 bp, Artificial Sequence
  Synthetic
tgugcaagaaccgtacucagg

SEQ ID NO: 84563 - DNA, 25 bp, Artificial Sequence
  Synthetic
tgaaggacaaagcugatttcugcat

SEQ ID NO: 84564 - DNA, 25 bp, Artificial Sequence
  Synthetic
ccctcttcuttaaggtcaucaagga

SEQ ID NO: 84565 - DNA, 22 bp, Artificial Sequence
  Synthetic
tgaucgucaaggccagagaaac

SEQ ID NO: 84566 - DNA, 17 bp, Artificial Sequence
  Synthetic
ctcctcacgguggcgut

SEQ ID NO: 84567 - DNA, 20 bp, Artificial Sequence
  Synthetic
gcguggcaggagaagttcut

SEQ ID NO: 84568 - DNA, 25 bp, Artificial Sequence
  Synthetic
gtatgtgctgutgtcacatgtugat

SEQ ID NO: 84569 - DNA, 27 bp, Artificial Sequence
  Synthetic
caagtagucccaccagttagaaguaga

SEQ ID NO: 84570 - DNA, 21 bp, Artificial Sequence
  Synthetic
gccugcgugaaagaagcagat

SEQ ID NO: 84571 - DNA, 22 bp, Artificial Sequence
  Synthetic
ggaggaccucatcaacucacac

SEQ ID NO: 84572 - DNA, 18 bp, Artificial Sequence
  Synthetic
ggccaccuctttgcuggt

SEQ ID NO: 84573 - DNA, 21 bp, Artificial Sequence
  Synthetic
ccacagcgagcuccagauaag

SEQ ID NO: 84574 - DNA, 20 bp, Artificial Sequence
  Synthetic
ggaatgccgugggtcucaaa

SEQ ID NO: 84575 - DNA, 20 bp, Artificial Sequence
  Synthetic
gagcccuggagggaacttuc

SEQ ID NO: 84576 - DNA, 20 bp, Artificial Sequence
  Synthetic
ccttgccggcauagtggaua

SEQ ID NO: 84577 - DNA, 19 bp, Artificial Sequence
  Synthetic
ggacgaggagugctggtuc

SEQ ID NO: 84578 - DNA, 20 bp, Artificial Sequence
  Synthetic
ccaggtcauctacggcgtug

SEQ ID NO: 84579 - DNA, 18 bp, Artificial Sequence
  Synthetic
cctgagccuctccctgut

SEQ ID NO: 84580 - DNA, 21 bp, Artificial Sequence
  Synthetic
cgcutggtggtuggcaaaaag

SEQ ID NO: 84581 - DNA, 26 bp, Artificial Sequence
  Synthetic
cctgttgucaggaaaagucaaacaag

SEQ ID NO: 84582 - DNA, 18 bp, Artificial Sequence
  Synthetic
ggagagggccugctctut

SEQ ID NO: 84583 - DNA, 17 bp, Artificial Sequence
  Synthetic
tcugctcugcgggagga

SEQ ID NO: 84584 - DNA, 22 bp, Artificial Sequence
  Synthetic
ctucccacctguaaagcagact

SEQ ID NO: 84585 - DNA, 28 bp, Artificial Sequence
  Synthetic
catttctcttcaugtgttttcctugaca

SEQ ID NO: 84586 - DNA, 19 bp, Artificial Sequence
  Synthetic
cgctgttuctcagccucct

SEQ ID NO: 84587 - DNA, 19 bp, Artificial Sequence
  Synthetic
gttgaagcggcuggtgaug

SEQ ID NO: 84588 - DNA, 19 bp, Artificial Sequence
  Synthetic
ccacgaagcucttgucggt

SEQ ID NO: 84589 - DNA, 19 bp, Artificial Sequence
  Synthetic
tctgatguccgggcttugg

SEQ ID NO: 84590 - DNA, 22 bp, Artificial Sequence
  Synthetic
agcttcuggctcttctcugact

SEQ ID NO: 84591 - DNA, 25 bp, Artificial Sequence
  Synthetic
gaaaaatagccucatcagcagctug

SEQ ID NO: 84592 - DNA, 28 bp, Artificial Sequence
  Synthetic
ctttaggagtcugctttaagtacucaca

SEQ ID NO: 84593 - DNA, 23 bp, Artificial Sequence
  Synthetic
tggaaagcaccagacuaaauggg

SEQ ID NO: 84594 - DNA, 24 bp, Artificial Sequence
  Synthetic
gcgaggcaaauagaccttaaacuc

SEQ ID NO: 84595 - DNA, 28 bp, Artificial Sequence
  Synthetic
gctatctactttgucttttctgtgcuca

SEQ ID NO: 84596 - DNA, 21 bp, Artificial Sequence
  Synthetic
ctcttccugcccacaucagat

SEQ ID NO: 84597 - DNA, 22 bp, Artificial Sequence
  Synthetic
tgtgtgguacgctggatucaag

SEQ ID NO: 84598 - DNA, 22 bp, Artificial Sequence
  Synthetic
ccagcaaucagctttgcctuag

SEQ ID NO: 84599 - DNA, 26 bp, Artificial Sequence
  Synthetic
actaggctgutccctttgattuacag

SEQ ID NO: 84600 - DNA, 19 bp, Artificial Sequence
  Synthetic
gggacgucugaacggaagt

SEQ ID NO: 84601 - DNA, 19 bp, Artificial Sequence
  Synthetic
tgaaacugcgccatcguca

SEQ ID NO: 84602 - DNA, 20 bp, Artificial Sequence
  Synthetic
ctggcgautcaggauggaca

SEQ ID NO: 84603 - DNA, 21 bp, Artificial Sequence
  Synthetic
ctuccgcaccaagguacaaga

SEQ ID NO: 84604 - DNA, 23 bp, Artificial Sequence
  Synthetic
acutggcatgguacagagcaaat

SEQ ID NO: 84605 - DNA, 22 bp, Artificial Sequence
  Synthetic
ggctgtcagugttggagagtua

SEQ ID NO: 84606 - DNA, 26 bp, Artificial Sequence
  Synthetic
ctgtgtctgtaguacaagggaactut

SEQ ID NO: 84607 - DNA, 24 bp, Artificial Sequence
  Synthetic
cacgtgaagcuattggtgaaugac

SEQ ID NO: 84608 - DNA, 19 bp, Artificial Sequence
  Synthetic
gccaccucacgtuccacat

SEQ ID NO: 84609 - DNA, 22 bp, Artificial Sequence
  Synthetic
gcatccccautcctttcatcug

SEQ ID NO: 84610 - DNA, 22 bp, Artificial Sequence
  Synthetic
ccacccacuactatctgcccut

SEQ ID NO: 84611 - DNA, 21 bp, Artificial Sequence
  Synthetic
cctattgugacgtgcccaaug

SEQ ID NO: 84612 - DNA, 28 bp, Artificial Sequence
  Synthetic
gctatattaatcucactgacctccucct

SEQ ID NO: 84613 - DNA, 19 bp, Artificial Sequence
  Synthetic
tggaatgcugcctgcugat

SEQ ID NO: 84614 - DNA, 22 bp, Artificial Sequence
  Synthetic
cctgaagacaggugcaaaguca

SEQ ID NO: 84615 - DNA, 22 bp, Artificial Sequence
  Synthetic
tcttccatugagctgcuccaac

SEQ ID NO: 84616 - DNA, 21 bp, Artificial Sequence
  Synthetic
catgcaugagaagggcatguc

SEQ ID NO: 84617 - DNA, 24 bp, Artificial Sequence
  Synthetic
ggacuctggagtaugacaaacaca

SEQ ID NO: 84618 - DNA, 19 bp, Artificial Sequence
  Synthetic
gcggtagaugcggtgctut

SEQ ID NO: 84619 - DNA, 17 bp, Artificial Sequence
  Synthetic
ctggccgaggccutgut

SEQ ID NO: 84620 - DNA, 28 bp, Artificial Sequence
  Synthetic
gggaatgcgtuttagatacaaatgugaa

SEQ ID NO: 84621 - DNA, 25 bp, Artificial Sequence
  Synthetic
tgagauagacacagaagaaggguct

SEQ ID NO: 84622 - DNA, 22 bp, Artificial Sequence
  Synthetic
tgtgcacaugtttttgttuggg

SEQ ID NO: 84623 - DNA, 27 bp, Artificial Sequence
  Synthetic
ctcattccaaccutgatgtgtuaaact

SEQ ID NO: 84624 - DNA, 22 bp, Artificial Sequence
  Synthetic
caccaacugaauccaccaccat

SEQ ID NO: 84625 - DNA, 28 bp, Artificial Sequence
  Synthetic
agccattaacuggccatacaattatgut

SEQ ID NO: 84626 - DNA, 18 bp, Artificial Sequence
  Synthetic
cgcugagtgaugccaaca

SEQ ID NO: 84627 - DNA, 20 bp, Artificial Sequence
  Synthetic
ccgttgaggutcttcgccut

SEQ ID NO: 84628 - DNA, 21 bp, Artificial Sequence
  Synthetic
gtctcccucctgttugcacat

SEQ ID NO: 84629 - DNA, 27 bp, Artificial Sequence
  Synthetic
agaaactactguaaacctggtgttugt

SEQ ID NO: 84630 - DNA, 26 bp, Artificial Sequence
  Synthetic
aagtgagtcatcuctgttctcctaut

SEQ ID NO: 84631 - DNA, 24 bp, Artificial Sequence
  Synthetic
ggcaattcagcucgactagaaucc

SEQ ID NO: 84632 - DNA, 20 bp, Artificial Sequence
  Synthetic
gagccucgcggtcgaauaat

SEQ ID NO: 84633 - DNA, 21 bp, Artificial Sequence
  Synthetic
tutatttgcagcucggagcct

SEQ ID NO: 84634 - DNA, 21 bp, Artificial Sequence
  Synthetic
cgagcauagcaggtactguga

SEQ ID NO: 84635 - DNA, 29 bp, Artificial Sequence
  Synthetic
aggaatcaatgtucttgtaatgtgacuga

SEQ ID NO: 84636 - DNA, 23 bp, Artificial Sequence
  Synthetic
ccagcctugccacatcaactuat

SEQ ID NO: 84637 - DNA, 22 bp, Artificial Sequence
  Synthetic
ggaaaugcagacaatgcctuca

SEQ ID NO: 84638 - DNA, 22 bp, Artificial Sequence
  Synthetic
ggccttgcaguaaaaggagcut

SEQ ID NO: 84639 - DNA, 22 bp, Artificial Sequence
  Synthetic
tccgttgggutttctctuccag

SEQ ID NO: 84640 - DNA, 28 bp, Artificial Sequence
  Synthetic
tttactatgtggtutcccatctggtuac

SEQ ID NO: 84641 - DNA, 23 bp, Artificial Sequence
  Synthetic
ggcttccuaaggcgtttcttcuc

SEQ ID NO: 84642 - DNA, 25 bp, Artificial Sequence
  Synthetic
cagcutatguagccaaagaacacaa

SEQ ID NO: 84643 - DNA, 22 bp, Artificial Sequence
  Synthetic
cttccgcuaacagcatgttguc

SEQ ID NO: 84644 - DNA, 22 bp, Artificial Sequence
  Synthetic
aaggcctgtugcttggaacaua

SEQ ID NO: 84645 - DNA, 23 bp, Artificial Sequence
  Synthetic
cagucacaaccaaggagtctugt

SEQ ID NO: 84646 - DNA, 21 bp, Artificial Sequence
  Synthetic
cccatagugagtgctcctuga

SEQ ID NO: 84647 - DNA, 23 bp, Artificial Sequence
  Synthetic
tcgugtattuggacgagaagcag

SEQ ID NO: 84648 - DNA, 22 bp, Artificial Sequence
  Synthetic
gaggcugctatgucacaagaga

SEQ ID NO: 84649 - DNA, 21 bp, Artificial Sequence
  Synthetic
gtatgtacaccccugcctcug

SEQ ID NO: 84650 - DNA, 25 bp, Artificial Sequence
  Synthetic
tgttatatauagccagacccgugga

SEQ ID NO: 84651 - DNA, 28 bp, Artificial Sequence
  Synthetic
ttctggtgtugaaagactagugaaagag

SEQ ID NO: 84652 - DNA, 22 bp, Artificial Sequence
  Synthetic
gatcgaacugctcgtucaggaa

SEQ ID NO: 84653 - DNA, 20 bp, Artificial Sequence
  Synthetic
gcccagugaccctcctaugt

SEQ ID NO: 84654 - DNA, 21 bp, Artificial Sequence
  Synthetic
cagaggcugagccatagacug

SEQ ID NO: 84655 - DNA, 22 bp, Artificial Sequence
  Synthetic
tcctcccagcugatctgaagut

SEQ ID NO: 84656 - DNA, 27 bp, Artificial Sequence
  Synthetic
gattaattgggaaucttggctacugga

SEQ ID NO: 84657 - DNA, 25 bp, Artificial Sequence
  Synthetic
gcactaacuaccaggctacactuac

SEQ ID NO: 84658 - DNA, 19 bp, Artificial Sequence
  Synthetic
cacagacccccagcugaug

SEQ ID NO: 84659 - DNA, 25 bp, Artificial Sequence
  Synthetic
ctgtgagagtutggctctgtaauct

SEQ ID NO: 84660 - DNA, 23 bp, Artificial Sequence
  Synthetic
ctggctguacctcgatggtuaag

SEQ ID NO: 84661 - DNA, 21 bp, Artificial Sequence
  Synthetic
cttgagaggcuctggctctug

SEQ ID NO: 84662 - DNA, 22 bp, Artificial Sequence
  Synthetic
ttccaaagugtgaugcagacca

SEQ ID NO: 84663 - DNA, 25 bp, Artificial Sequence
  Synthetic
ggaagcaguccttgttacaatguga

SEQ ID NO: 84664 - DNA, 23 bp, Artificial Sequence
  Synthetic
atcatctttuagctgtgcgguca

SEQ ID NO: 84665 - DNA, 25 bp, Artificial Sequence
  Synthetic
ggaccagugaaagtttgctgaaaut

SEQ ID NO: 84666 - DNA, 24 bp, Artificial Sequence
  Synthetic
gatggctccugcactcttcattua

SEQ ID NO: 84667 - DNA, 21 bp, Artificial Sequence
  Synthetic
gaaaagtgccauctcgctucc

SEQ ID NO: 84668 - DNA, 25 bp, Artificial Sequence
  Synthetic
agccattgcuccacttaacucaaat

SEQ ID NO: 84669 - DNA, 27 bp, Artificial Sequence
  Synthetic
ttggctaccagaugttctactacagua

SEQ ID NO: 84670 - DNA, 25 bp, Artificial Sequence
  Synthetic
cagcuccagactttcuaaacacaac

SEQ ID NO: 84671 - DNA, 23 bp, Artificial Sequence
  Synthetic
aagcacaaagugaacatuggcat

SEQ ID NO: 84672 - DNA, 17 bp, Artificial Sequence
  Synthetic
ccugcaggguccccaga

SEQ ID NO: 84673 - DNA, 18 bp, Artificial Sequence
  Synthetic
acctggcugtggcugaag

SEQ ID NO: 84674 - DNA, 23 bp, Artificial Sequence
  Synthetic
tcagacaacucagtggagcatuc

SEQ ID NO: 84675 - DNA, 22 bp, Artificial Sequence
  Synthetic
gcttccuccaccctttccuaaa

SEQ ID NO: 84676 - DNA, 19 bp, Artificial Sequence
  Synthetic
tgcaggtuggtgggaacug

SEQ ID NO: 84677 - DNA, 17 bp, Artificial Sequence
  Synthetic
ggcgugcactgctucct

SEQ ID NO: 84678 - DNA, 19 bp, Artificial Sequence
  Synthetic
gtcaugaccgcgttctugt

SEQ ID NO: 84679 - DNA, 20 bp, Artificial Sequence
  Synthetic
ggttgacguactcgccctuc

SEQ ID NO: 84680 - DNA, 22 bp, Artificial Sequence
  Synthetic
cagtatcaucaaggccaugggt

SEQ ID NO: 84681 - DNA, 21 bp, Artificial Sequence
  Synthetic
agcaggttuctgtggcaauca

SEQ ID NO: 84682 - DNA, 21 bp, Artificial Sequence
  Synthetic
cagaagcaggugttcctuggt

SEQ ID NO: 84683 - DNA, 25 bp, Artificial Sequence
  Synthetic
tgagcaggaagaugaagtacucaga

SEQ ID NO: 84684 - DNA, 25 bp, Artificial Sequence
  Synthetic
tcttttgcttguccctgatttucct

SEQ ID NO: 84685 - DNA, 29 bp, Artificial Sequence
  Synthetic
gggtaaagtgatuagggcagatgatacua

SEQ ID NO: 84686 - DNA, 18 bp, Artificial Sequence
  Synthetic
tgtggcugtggctgugag

SEQ ID NO: 84687 - DNA, 20 bp, Artificial Sequence
  Synthetic
cgtctgcaaggugagccaua

SEQ ID NO: 84688 - DNA, 22 bp, Artificial Sequence
  Synthetic
cggtgcaaggugtgactgauaa

SEQ ID NO: 84689 - DNA, 29 bp, Artificial Sequence
  Synthetic
gttgctctgcautagaaaccaatattuga

SEQ ID NO: 84690 - DNA, 20 bp, Artificial Sequence
  Synthetic
actggucccacggtcauaca

SEQ ID NO: 84691 - DNA, 21 bp, Artificial Sequence
  Synthetic
gggcagaagaaggucagcaua

SEQ ID NO: 84692 - DNA, 22 bp, Artificial Sequence
  Synthetic
gctgggucaaagatcctugcat

SEQ ID NO: 84693 - DNA, 28 bp, Artificial Sequence
  Synthetic
agaaatgattucttaccttcugagcaca

SEQ ID NO: 84694 - DNA, 26 bp, Artificial Sequence
  Synthetic
catgttaatgtuagctggtgcttugt

SEQ ID NO: 84695 - DNA, 31 bp, Artificial Sequence; identical to SEQ ID NO: 34327
  Synthetic

SEQ ID NO: 84696 - DNA, 21 bp, Artificial Sequence
  Synthetic
gctgcugaaaacctucaacga

SEQ ID NO: 84697 - DNA, 20 bp, Artificial Sequence
  Synthetic
ccttccttcucctcgaccug

SEQ ID NO: 84698 - DNA, 22 bp, Artificial Sequence
  Synthetic
caaagcugaaaacctgtugcga

SEQ ID NO: 84699 - DNA, 23 bp, Artificial Sequence
  Synthetic
gcccccaaaacucaatgaaugaa

SEQ ID NO: 84700 - DNA, 20 bp, Artificial Sequence
  Synthetic
catcccgggacuggtctauc

SEQ ID NO: 84701 - DNA, 27 bp, Artificial Sequence
  Synthetic
attatgtaaccugagaggagtauccgt

SEQ ID NO: 84702 - DNA, 20 bp, Artificial Sequence
  Synthetic
ggcctccugactgacugact

SEQ ID NO: 84703 - DNA, 22 bp, Artificial Sequence
  Synthetic
ccttcagaagagcuccttuccc

SEQ ID NO: 84704 - DNA, 24 bp, Artificial Sequence
  Synthetic
gutcattuacaagcaccagcagaa

SEQ ID NO: 84705 - DNA, 19 bp, Artificial Sequence
  Synthetic
gagagacgcguccaguacc

SEQ ID NO: 84706 - DNA, 26 bp, Artificial Sequence
  Synthetic
ctgaaacucaaaagcctgaaaugact

SEQ ID NO: 84707 - DNA, 23 bp, Artificial Sequence
  Synthetic
tggatgugaagacgcaatcuagg

SEQ ID NO: 84708 - DNA, 18 bp, Artificial Sequence
  Synthetic
gggcctucagctcctuct

SEQ ID NO: 84709 - DNA, 19 bp, Artificial Sequence
  Synthetic
cctgacccuaggcctgtug

SEQ ID NO: 84710 - DNA, 26 bp, Artificial Sequence
  Synthetic
ttaaaccugccataacttucccaaga

SEQ ID NO: 84711 - DNA, 28 bp, Artificial Sequence
  Synthetic
agttacaactagaugaagagacagguga

SEQ ID NO: 84712 - DNA, 23 bp, Artificial Sequence
  Synthetic
gcagtgagcugcctttttcttuc

SEQ ID NO: 84713 - DNA, 23 bp, Artificial Sequence
  Synthetic
gcttuccagaagcaagtcuccat

SEQ ID NO: 84714 - DNA, 28 bp, Artificial Sequence
  Synthetic
aatttacaaaacugtaccagaucccaca

SEQ ID NO: 84715 - DNA, 27 bp, Artificial Sequence
  Synthetic
tgacaccagtugacaatagaagatgua

SEQ ID NO: 84716 - DNA, 26 bp, Artificial Sequence
  Synthetic
catacctagcugagtcacugacaaat

SEQ ID NO: 84717 - DNA, 26 bp, Artificial Sequence
  Synthetic
ctgttacctagtutagtcatggccut

SEQ ID NO: 84718 - DNA, 25 bp, Artificial Sequence
  Synthetic
gggccttccauatgatctgauaacc

SEQ ID NO: 84719 - DNA, 21 bp, Artificial Sequence
  Synthetic
gtuccccaaacccttgugaga

SEQ ID NO: 84720 - DNA, 21 bp, Artificial Sequence
  Synthetic
tggcattgutggaggagucag

SEQ ID NO: 84721 - DNA, 28 bp, Artificial Sequence
  Synthetic
tgaaaaactgaggugcttaaggaguaaa

SEQ ID NO: 84722 - DNA, 22 bp, Artificial Sequence
  Synthetic
ggcuggctgaatugggagaaat

SEQ ID NO: 84723 - DNA, 28 bp, Artificial Sequence
  Synthetic
ggaaagaguatgagcuggaaaaacagaa

SEQ ID NO: 84724 - DNA, 22 bp, Artificial Sequence
  Synthetic
gacucttugcaaacagcagcat

SEQ ID NO: 84725 - DNA, 26 bp, Artificial Sequence
  Synthetic
tcagagaacauccttgggauaaggaa

SEQ ID NO: 84726 - DNA, 28 bp, Artificial Sequence
  Synthetic
tggagttgttcutgtctttcctttucaa

SEQ ID NO: 84727 - DNA, 29 bp, Artificial Sequence
  Synthetic
tttgattgacatacuttggaggcaagaua

SEQ ID NO: 84728 - DNA, 29 bp, Artificial Sequence
  Synthetic
gtcaaatactuctcgacttacuccaagat

SEQ ID NO: 84729 - DNA, 21 bp, Artificial Sequence
  Synthetic
cccactucccaccaucaacag

SEQ ID NO: 84730 - DNA, 21 bp, Artificial Sequence
  Synthetic
agtgctugcagctcacagaut

SEQ ID NO: 84731 - DNA, 22 bp, Artificial Sequence
  Synthetic
gatgtccuggagcagcttttug

SEQ ID NO: 84732 - DNA, 22 bp, Artificial Sequence
  Synthetic
gauttggatacugaggccacca

SEQ ID NO: 84733 - DNA, 24 bp, Artificial Sequence
  Synthetic
ctctctucagacgaaaggucaact

SEQ ID NO: 84734 - DNA, 19 bp, Artificial Sequence
  Synthetic
cccacguctgcacatcugt

SEQ ID NO: 84735 - DNA, 20 bp, Artificial Sequence
  Synthetic
tctcauccccaccccatcuc

SEQ ID NO: 84736 - DNA, 22 bp, Artificial Sequence
  Synthetic
cccugaagaacctgaguggagt

SEQ ID NO: 84737 - DNA, 23 bp, Artificial Sequence
  Synthetic
ctcaccctggauctcttttccut

SEQ ID NO: 84738 - DNA, 24 bp, Artificial Sequence
  Synthetic
ccttttagaugtcctccttugcct

SEQ ID NO: 84739 - DNA, 22 bp, Artificial Sequence
  Synthetic
cagtuccccaaccactcatuca

SEQ ID NO: 84740 - DNA, 20 bp, Artificial Sequence
  Synthetic
tgccggaaagcaugucagat

SEQ ID NO: 84741 - DNA, 21 bp, Artificial Sequence
  Synthetic
gctccguggagtttgacaugg

SEQ ID NO: 84742 - DNA, 21 bp, Artificial Sequence
  Synthetic
ggctatggguttgcacaguga

SEQ ID NO: 84743 - DNA, 23 bp, Artificial Sequence
  Synthetic
cguagcaagagaggaaaccucag

SEQ ID NO: 84744 - DNA, 20 bp, Artificial Sequence
  Synthetic
catggaguccaccagctuga

SEQ ID NO: 84745 - DNA, 21 bp, Artificial Sequence
  Synthetic
tgttggccacaugtcccttut

SEQ ID NO: 84746 - DNA, 23 bp, Artificial Sequence
  Synthetic
cttttcccugggattctggacut

SEQ ID NO: 84747 - DNA, 22 bp, Artificial Sequence
  Synthetic
cctgtgttcucgtacactgugg

SEQ ID NO: 84748 - DNA, 23 bp, Artificial Sequence
  Synthetic
aggtctttgauttgcgtcagugt

SEQ ID NO: 84749 - DNA, 24 bp, Artificial Sequence
  Synthetic
ggagctatuccacctactgaucct

SEQ ID NO: 84750 - DNA, 19 bp, Artificial Sequence
  Synthetic
cccatgggaucctcaugct

SEQ ID NO: 84751 - DNA, 21 bp, Artificial Sequence
  Synthetic
cgctgacacugtgcttctcuc

SEQ ID NO: 84752 - DNA, 22 bp, Artificial Sequence
  Synthetic
tcagcuctcucaagaggaagca

SEQ ID NO: 84753 - DNA, 21 bp, Artificial Sequence
  Synthetic
agagaaccuctcgagctucca

SEQ ID NO: 84754 - DNA, 18 bp, Artificial Sequence
  Synthetic
gggtgggcugtgagauca

SEQ ID NO: 84755 - DNA, 24 bp, Artificial Sequence
  Synthetic
tcttgagtctugcactccaaucag

SEQ ID NO: 84756 - DNA, 22 bp, Artificial Sequence
  Synthetic
gaucaaccaggagctcauccag

SEQ ID NO: 84757 - DNA, 26 bp, Artificial Sequence
  Synthetic
atctgaaaactutctccacactucca

SEQ ID NO: 84758 - DNA, 22 bp, Artificial Sequence
  Synthetic
ggacctaguggttttggcttug

SEQ ID NO: 84759 - DNA, 21 bp, Artificial Sequence
  Synthetic
caaccaggcucauggcaaaag

SEQ ID NO: 84760 - DNA, 18 bp, Artificial Sequence
  Synthetic
cgagguaggcacgtgcua

SEQ ID NO: 84761 - DNA, 18 bp, Artificial Sequence
  Synthetic
gaaggtguccaggccgut

SEQ ID NO: 84762 - DNA, 20 bp, Artificial Sequence
  Synthetic
gacacctuctccggctucaa

SEQ ID NO: 84763 - DNA, 18 bp, Artificial Sequence
  Synthetic
tguggccagagaggguct

SEQ ID NO: 84764 - DNA, 20 bp, Artificial Sequence
  Synthetic
ctctgaggcuccaggacuca

SEQ ID NO: 84765 - DNA, 18 bp, Artificial Sequence
  Synthetic
cgaugtucgacgggacac

SEQ ID NO: 84766 - DNA, 19 bp, Artificial Sequence
  Synthetic
ctucccggaggccuacaag

SEQ ID NO: 84767 - DNA, 21 bp, Artificial Sequence
  Synthetic
cagaguagcacaucagcacca

SEQ ID NO: 84768 - DNA, 18 bp, Artificial Sequence
  Synthetic
tggtgccugcatgcugat

SEQ ID NO: 84769 - DNA, 18 bp, Artificial Sequence
  Synthetic
tccgcgucgtccttgaug

SEQ ID NO: 84770 - DNA, 18 bp, Artificial Sequence
  Synthetic
cgagcucccctcguggat

SEQ ID NO: 84771 - DNA, 19 bp, Artificial Sequence
  Synthetic
tgggcctcuccagcatgua

SEQ ID NO: 84772 - DNA, 27 bp, Artificial Sequence
  Synthetic
cattctctaggaucgaagctcattuct

SEQ ID NO: 84773 - DNA, 28 bp, Artificial Sequence
  Synthetic
agtgttcagaaugaagtacaagaagcuc

SEQ ID NO: 84774 - DNA, 18 bp, Artificial Sequence
  Synthetic
caucccgcctucccaact

SEQ ID NO: 84775 - DNA, 18 bp, Artificial Sequence
  Synthetic
gacgucacccacgagugt

SEQ ID NO: 84776 - DNA, 17 bp, Artificial Sequence
  Synthetic
gcacuaccuggcaggca

SEQ ID NO: 84777 - DNA, 19 bp, Artificial Sequence
  Synthetic
acaacgaggucggctccua

SEQ ID NO: 84778 - DNA, 17 bp, Artificial Sequence
  Synthetic
gcugcagggcacguagg

SEQ ID NO: 84779 - DNA, 20 bp, Artificial Sequence
  Synthetic
tcaacgaguguggccagaag

SEQ ID NO: 84780 - DNA, 19 bp, Artificial Sequence
  Synthetic
gtaggagccgaccucgtug

SEQ ID NO: 84781 - DNA, 21 bp, Artificial Sequence
  Synthetic
cttcgaggccucctacatcug

SEQ ID NO: 84782 - DNA, 25 bp, Artificial Sequence
  Synthetic
tcagctcugttttagcaaugacagt

SEQ ID NO: 84783 - DNA, 22 bp, Artificial Sequence
  Synthetic
actgcatcgugctttccactua

SEQ ID NO: 84784 - DNA, 20 bp, Artificial Sequence
  Synthetic
tgacgccutcagaagcaucc

SEQ ID NO: 84785 - DNA, 21 bp, Artificial Sequence
  Synthetic
gtacagggcaagutgctccua

SEQ ID NO: 84786 - DNA, 20 bp, Artificial Sequence
  Synthetic
gccacacucgttgacaucct

SEQ ID NO: 84787 - DNA, 20 bp, Artificial Sequence
  Synthetic
gaccctctugtccccttguc

SEQ ID NO: 84788 - DNA, 21 bp, Artificial Sequence
  Synthetic
ggacugacccatucaccacat

SEQ ID NO: 84789 - DNA, 21 bp, Artificial Sequence
  Synthetic
gctcagagucatctggtuggg

SEQ ID NO: 84790 - DNA, 26 bp, Artificial Sequence
  Synthetic
gtgccaatatccguaataaccctgua

SEQ ID NO: 84791 - DNA, 28 bp, Artificial Sequence
  Synthetic
acagttttatggucctttactcacctug

SEQ ID NO: 84792 - DNA, 19 bp, Artificial Sequence
  Synthetic
gcgtcucgtgccuccaaga

SEQ ID NO: 84793 - DNA, 19 bp, Artificial Sequence
  Synthetic
aggctutgctgcugaggac

SEQ ID NO: 84794 - DNA, 19 bp, Artificial Sequence
  Synthetic
cgccttccuacctgctgua

SEQ ID NO: 84795 - DNA, 22 bp, Artificial Sequence
  Synthetic
ctcagctgtcutcggttctcuc

SEQ ID NO: 84796 - DNA, 22 bp, Artificial Sequence
  Synthetic
gaagcctggaguggagaatgut

SEQ ID NO: 84797 - DNA, 24 bp, Artificial Sequence
  Synthetic
ctcacctcccugtcttcttgtcua

SEQ ID NO: 84798 - DNA, 21 bp, Artificial Sequence
  Synthetic
tcttcccucccctcgaaauga

SEQ ID NO: 84799 - DNA, 21 bp, Artificial Sequence
  Synthetic
caccttucagcaggucagaga

SEQ ID NO: 84800 - DNA, 22 bp, Artificial Sequence
  Synthetic
tguttgagaacaucgggaaggg

SEQ ID NO: 84801 - DNA, 24 bp, Artificial Sequence
  Synthetic
ccaacccuacatttcugcacaaaa

SEQ ID NO: 84802 - DNA, 22 bp, Artificial Sequence
  Synthetic
acctttttcuggacctgtuggg

SEQ ID NO: 84803 - DNA, 24 bp, Artificial Sequence
  Synthetic
acacggagaaugauaggagacaca

SEQ ID NO: 84804 - DNA, 23 bp, Artificial Sequence
  Synthetic
actggctacucccaattgtccua

SEQ ID NO: 84805 - DNA, 21 bp, Artificial Sequence
  Synthetic
cctccauccacctcatcagug

SEQ ID NO: 84806 - DNA, 20 bp, Artificial Sequence
  Synthetic
gctguggcgcaggtatagug

SEQ ID NO: 84807 - DNA, 23 bp, Artificial Sequence
  Synthetic
cgguagttcttguagcccacaaa

SEQ ID NO: 84808 - DNA, 18 bp, Artificial Sequence
  Synthetic
ctgcguctgtgggucaga

SEQ ID NO: 84809 - DNA, 17 bp, Artificial Sequence
  Synthetic
ccuggcagaggguacgg

SEQ ID NO: 84810 - DNA, 24 bp, Artificial Sequence
  Synthetic
cttctcacctcutccaagctctut

SEQ ID NO: 84811 - DNA, 20 bp, Artificial Sequence
  Synthetic
gaguaccccaccuaccacac

SEQ ID NO: 84812 - DNA, 21 bp, Artificial Sequence
  Synthetic
ggactuaggctgtgugggaat

SEQ ID NO: 84813 - DNA, 21 bp, Artificial Sequence
  Synthetic
ttgtacuggacgttgaugcca

SEQ ID NO: 84814 - DNA, 20 bp, Artificial Sequence
  Synthetic
gggtgggaautgtcgccuaa

SEQ ID NO: 84815 - DNA, 20 bp, Artificial Sequence
  Synthetic
ggctacgcuaagcaccucag

SEQ ID NO: 84816 - DNA, 21 bp, Artificial Sequence
  Synthetic
cctugggccacaacctagtuc

SEQ ID NO: 84817 - DNA, 23 bp, Artificial Sequence
  Synthetic
gggtctttttguttcaggccauc

SEQ ID NO: 84818 - DNA, 26 bp, Artificial Sequence
  Synthetic
cctccatcauaaccctgtaactgcua

SEQ ID NO: 84819 - DNA, 27 bp, Artificial Sequence
  Synthetic
tgtaacaacagtuccagactgacttug

SEQ ID NO: 84820 - DNA, 19 bp, Artificial Sequence
  Synthetic
gtgagaaugaccgggugga

SEQ ID NO: 84821 - DNA, 20 bp, Artificial Sequence
  Synthetic
cctggaccutgtcucacaga

SEQ ID NO: 84822 - DNA, 22 bp, Artificial Sequence
  Synthetic
tttgcctcuttgttagguggct

SEQ ID NO: 84823 - DNA, 28 bp, Artificial Sequence
  Synthetic
tctgcctctagaugaaaccttgatauct

SEQ ID NO: 84824 - DNA, 22 bp, Artificial Sequence
  Synthetic
ggactctgugagtgggattugt

SEQ ID NO: 84825 - DNA, 25 bp, Artificial Sequence
  Synthetic
cccagtatatttugttgcccaacug

SEQ ID NO: 84826 - DNA, 20 bp, Artificial Sequence
  Synthetic
actuccccaccgagctacua

SEQ ID NO: 84827 - DNA, 24 bp, Artificial Sequence
  Synthetic
atgtgctttccuttccttgttugg

SEQ ID NO: 84828 - DNA, 21 bp, Artificial Sequence
  Synthetic
gtcccaggaacugatgcuaca

SEQ ID NO: 84829 - DNA, 21 bp, Artificial Sequence
  Synthetic
cacgcagcagcaaaguctuac

SEQ ID NO: 84830 - DNA, 22 bp, Artificial Sequence
  Synthetic
ggcccaatcucaccttctcaua

SEQ ID NO: 84831 - DNA, 19 bp, Artificial Sequence
  Synthetic
gugccgccgaaagaacuac

SEQ ID NO: 84832 - DNA, 27 bp, Artificial Sequence
  Synthetic
gaagtcagaugatgaatccucccaaaa

SEQ ID NO: 84833 - DNA, 28 bp, Artificial Sequence
  Synthetic
cagcttctcaaguatgtttacctaugga

SEQ ID NO: 84834 - DNA, 26 bp, Artificial Sequence
  Synthetic
tgtttcacgtaguacacattgctuct

SEQ ID NO: 84835 - DNA, 28 bp, Artificial Sequence
  Synthetic
tgacaatttcttuaacaatggcatccug

SEQ ID NO: 84836 - DNA, 24 bp, Artificial Sequence
  Synthetic
cggttttctuccccttttgctgua

SEQ ID NO: 84837 - DNA, 24 bp, Artificial Sequence
  Synthetic
cttcatttcttugacctcccuggt

SEQ ID NO: 84838 - DNA, 21 bp, Artificial Sequence
  Synthetic
ggaaaacugccaggcatucag

SEQ ID NO: 84839 - DNA, 23 bp, Artificial Sequence
  Synthetic
atgtagtgaagutcggcacacut

SEQ ID NO: 84840 - DNA, 17 bp, Artificial Sequence
  Synthetic
gccugctgccucaggat

SEQ ID NO: 84841 - DNA, 21 bp, Artificial Sequence
  Synthetic
actcttgacgutgtccagcuc

SEQ ID NO: 84842 - DNA, 26 bp, Artificial Sequence
  Synthetic
aacagaataugaagaagcccaggaug

SEQ ID NO: 84843 - DNA, 28 bp, Artificial Sequence
  Synthetic
cttgcgaaaauaacaaaacacactucaa

SEQ ID NO: 84844 - DNA, 23 bp, Artificial Sequence
  Synthetic
agtggaauaggagtgaggugagt

SEQ ID NO: 84845 - DNA, 21 bp, Artificial Sequence
  Synthetic
aaaacaaagagcugcgagcug

SEQ ID NO: 84846 - DNA, 29 bp, Artificial Sequence
  Synthetic
gggatgaaauagaaagtcaaugaggagaa

SEQ ID NO: 84847 - DNA, 21 bp, Artificial Sequence
  Synthetic
acctgagtcucctgctctugt

SEQ ID NO: 84848 - DNA, 25 bp, Artificial Sequence
  Synthetic
acagttccucacagcctgttattuc

SEQ ID NO: 84849 - DNA, 28 bp, Artificial Sequence
  Synthetic
tgctggcaaaauacagaatttuaagcat

SEQ ID NO: 84850 - DNA, 19 bp, Artificial Sequence
  Synthetic
gggagttugccaaggugct

SEQ ID NO: 84851 - DNA, 21 bp, Artificial Sequence
  Synthetic
ccttgctgagcuctgggatuc

SEQ ID NO: 84852 - DNA, 25 bp, Artificial Sequence
  Synthetic
tctctggagagacugaagcauaaga

SEQ ID NO: 84853 - DNA, 23 bp, Artificial Sequence
  Synthetic
ggaggagaauggagaccttucct

SEQ ID NO: 84854 - DNA, 22 bp, Artificial Sequence
  Synthetic
ccacttcagcuaagagcacugt

SEQ ID NO: 84855 - DNA, 17 bp, Artificial Sequence
  Synthetic
cctccgugcgaaucgct

SEQ ID NO: 84856 - DNA, 21 bp, Artificial Sequence
  Synthetic
gtatcccgggcuggaaagaug

SEQ ID NO: 84857 - DNA, 23 bp, Artificial Sequence
  Synthetic
gctggccatugtctatctcatug

SEQ ID NO: 84858 - DNA, 21 bp, Artificial Sequence
  Synthetic
ctgttcagccuccttggtcut

SEQ ID NO: 84859 - DNA, 26 bp, Artificial Sequence
  Synthetic
agaaagccaaaacacautatgaugcc

SEQ ID NO: 84860 - DNA, 25 bp, Artificial Sequence
  Synthetic
ggatccugtttgtgaaugacaccaa

SEQ ID NO: 84861 - DNA, 21 bp, Artificial Sequence
  Synthetic
ccccuccactgtuacaagcag

SEQ ID NO: 84862 - DNA, 22 bp, Artificial Sequence
  Synthetic
gtgccgaacutcactacauggt

SEQ ID NO: 84863 - DNA, 22 bp, Artificial Sequence
  Synthetic
tgcutttcucaaagggcaggag

SEQ ID NO: 84864 - DNA, 28 bp, Artificial Sequence
  Synthetic
aggtttcattgtauctactctcccucaa

SEQ ID NO: 84865 - DNA, 27 bp, Artificial Sequence
  Synthetic
cagttgacataacuactccaaaagcug

SEQ ID NO: 84866 - DNA, 22 bp, Artificial Sequence
  Synthetic
gtctggcuaaccacaugagcat

SEQ ID NO: 84867 - DNA, 23 bp, Artificial Sequence
  Synthetic
ctttctauccaggccactctcug

SEQ ID NO: 84868 - DNA, 21 bp, Artificial Sequence
  Synthetic
ggatgatguggcaggacacuc

SEQ ID NO: 84869 - DNA, 21 bp, Artificial Sequence
  Synthetic
accagtctcutggcaccctua

SEQ ID NO: 84870 - DNA, 20 bp, Artificial Sequence
  Synthetic
aggaaaugcagcgcaucaag

SEQ ID NO: 84871 - DNA, 18 bp, Artificial Sequence
  Synthetic
cctccucgccagtcuggt

SEQ ID NO: 84872 - DNA, 23 bp, Artificial Sequence
  Synthetic
ctttctctttcucccccttcugg

SEQ ID NO: 84873 - DNA, 27 bp, Artificial Sequence
  Synthetic
aatgctttcagtuaaacgtgcttguaa

SEQ ID NO: 84874 - DNA, 22 bp, Artificial Sequence
  Synthetic
gctcttggtuctgctgcttcut

SEQ ID NO: 84875 - DNA, 23 bp, Artificial Sequence
  Synthetic
ctgagcactauaagctgcaggua

SEQ ID NO: 84876 - DNA, 24 bp, Artificial Sequence
  Synthetic
acagtggagautacgaatgtgcug

SEQ ID NO: 84877 - DNA, 25 bp, Artificial Sequence
  Synthetic
tctctguacagggaagagttuccat

SEQ ID NO: 84878 - DNA, 23 bp, Artificial Sequence
  Synthetic
caccacctuaacacccacctuaa

SEQ ID NO: 84879 - DNA, 24 bp, Artificial Sequence
  Synthetic
catactctctuctcactgctuccc

SEQ ID NO: 84880 - DNA, 18 bp, Artificial Sequence
  Synthetic
caagggutcggugggact

SEQ ID NO: 84881 - DNA, 20 bp, Artificial Sequence
  Synthetic
gcagcaugagcacattguca

SEQ ID NO: 84882 - DNA, 21 bp, Artificial Sequence
  Synthetic
ccatgtgtgutcccaagctuc

SEQ ID NO: 84883 - DNA, 24 bp, Artificial Sequence
  Synthetic
gttctcaccccutttgcttcuaac

SEQ ID NO: 84884 - DNA, 20 bp, Artificial Sequence
  Synthetic
caguggcgaacaaatugggt

SEQ ID NO: 84885 - DNA, 28 bp, Artificial Sequence
  Synthetic
agtagcctcaaaauggaaaattcagcua

SEQ ID NO: 84886 - DNA, 20 bp, Artificial Sequence
  Synthetic
gccgcacacuccauagaact

SEQ ID NO: 84887 - DNA, 22 bp, Artificial Sequence
  Synthetic
cctgtgtccugcattgttccua

SEQ ID NO: 84888 - DNA, 28 bp, Artificial Sequence
  Synthetic
tgctctttagcugtaacttgtaaaugct

SEQ ID NO: 84889 - DNA, 26 bp, Artificial Sequence
  Synthetic
gtgtttatgtcugttggtgaaacuga

SEQ ID NO: 84890 - DNA, 24 bp, Artificial Sequence
  Synthetic
cctatccccuctccttttcttgut

SEQ ID NO: 84891 - DNA, 19 bp, Artificial Sequence
  Synthetic
ggtcccggugcacaaaaug

SEQ ID NO: 84892 - DNA, 28 bp, Artificial Sequence
  Synthetic
ctctttccatcuagagttatccuccaca

SEQ ID NO: 84893 - DNA, 20 bp, Artificial Sequence
  Synthetic
tgtgugaggcagcaacguaa

SEQ ID NO: 84894 - DNA, 20 bp, Artificial Sequence
  Synthetic
gtcgcttcauccccctucag

SEQ ID NO: 84895 - DNA, 25 bp, Artificial Sequence
  Synthetic
tgcctaactgucctcttctccauag

SEQ ID NO: 84896 - DNA, 28 bp, Artificial Sequence
  Synthetic
agtcccgatcagauttagaataggauga

SEQ ID NO: 84897 - DNA, 21 bp, Artificial Sequence
  Synthetic
gcgctatuctcggccauacac

SEQ ID NO: 84898 - DNA, 18 bp, Artificial Sequence
  Synthetic
gtgtaccuggcgggtcug

SEQ ID NO: 84899 - DNA, 24 bp, Artificial Sequence
  Synthetic
acggtaatagucggtgctguagat

SEQ ID NO: 84900 - DNA, 20 bp, Artificial Sequence
  Synthetic
ggcaguaccagcagtucacc

SEQ ID NO: 84901 - DNA, 24 bp, Artificial Sequence
  Synthetic
gggtcacugaaagtccacaaacut

SEQ ID NO: 84902 - DNA, 28 bp, Artificial Sequence
  Synthetic
tcggatgatcucagatttttaagcctuc

SEQ ID NO: 84903 - DNA, 22 bp, Artificial Sequence
  Synthetic
auctatcgaugggacccagaca

SEQ ID NO: 84904 - DNA, 21 bp, Artificial Sequence
  Synthetic
gggaggaaguttgctgucgag

SEQ ID NO: 84905 - DNA, 23 bp, Artificial Sequence
  Synthetic
cccggttaguctctgacctucat

SEQ ID NO: 84906 - DNA, 22 bp, Artificial Sequence
  Synthetic
cgagatggaugccatgatuccc

SEQ ID NO: 84907 - DNA, 20 bp, Artificial Sequence
  Synthetic
tgtgaacgcgguaaactgut

SEQ ID NO: 84908 - DNA, 28 bp, Artificial Sequence
  Synthetic
tgttactttugacaggacttuagcagaa

SEQ ID NO: 84909 - DNA, 18 bp, Artificial Sequence
  Synthetic
gtggccgaugtccgttug

SEQ ID NO: 84910 - DNA, 19 bp, Artificial Sequence
  Synthetic
ggacaucggccacaaaguc

SEQ ID NO: 84911 - DNA, 29 bp, Artificial Sequence
  Synthetic
ggagaattcttattugccattatgtgcut

SEQ ID NO: 84912 - DNA, 25 bp, Artificial Sequence
  Synthetic
agaactctcucgtgctctgttauct

SEQ ID NO: 84913 - DNA, 28 bp, Artificial Sequence
  Synthetic
cctattccaggucagaacgatctcatua

SEQ ID NO: 84914 - DNA, 26 bp, Artificial Sequence
  Synthetic
cctcaaatgguggtgatttctccaua

SEQ ID NO: 84915 - DNA, 23 bp, Artificial Sequence
  Synthetic
gaaaggaucttgcatucgccaat

SEQ ID NO: 84916 - DNA, 22 bp, Artificial Sequence
  Synthetic
tgautttggcaugagcagggat

SEQ ID NO: 84917 - DNA, 22 bp, Artificial Sequence
  Synthetic
accagagccagugaatcucaga

SEQ ID NO: 84918 - DNA, 21 bp, Artificial Sequence
  Synthetic
ggtaacgcutgcttctccugt

SEQ ID NO: 84919 - DNA, 21 bp, Artificial Sequence
  Synthetic
gctccccucaaaactccauca

SEQ ID NO: 84920 - DNA, 22 bp, Artificial Sequence
  Synthetic
tgtctccaugttcccatcucca

SEQ ID NO: 84921 - DNA, 21 bp, Artificial Sequence
  Synthetic
gggcctuctcacttguaacca

SEQ ID NO: 84922 - DNA, 24 bp, Artificial Sequence
  Synthetic
tggtagcgacgaucagagtcauaa

SEQ ID NO: 84923 - DNA, 26 bp, Artificial Sequence
  Synthetic
actcggtatgtaucttcccgatguag

SEQ ID NO: 84924 - DNA, 23 bp, Artificial Sequence
  Synthetic
catatgagguttgtcuccagcct

SEQ ID NO: 84925 - DNA, 28 bp, Artificial Sequence
  Synthetic
gtgccagcaaaauggaattatcttguat

SEQ ID NO: 84926 - DNA, 22 bp, Artificial Sequence
  Synthetic
gggaggctautctgcccattug

SEQ ID NO: 84927 - DNA, 21 bp, Artificial Sequence
  Synthetic
gcaagtggacutcggtgctua

SEQ ID NO: 84928 - DNA, 22 bp, Artificial Sequence
  Synthetic
ctgaccuggtatggtcauggaa

SEQ ID NO: 84929 - DNA, 22 bp, Artificial Sequence
  Synthetic
tgatgacatgugggtggtugac

SEQ ID NO: 84930 - DNA, 25 bp, Artificial Sequence
  Synthetic
gaaacaggaauccauagcagaacca

SEQ ID NO: 84931 - DNA, 24 bp, Artificial Sequence
  Synthetic
gtgaaagacacauctgaagcucct

SEQ ID NO: 84932 - DNA, 24 bp, Artificial Sequence
  Synthetic
caatgtgaagcugtgagcaaatuc

SEQ ID NO: 84933 - DNA, 22 bp, Artificial Sequence
  Synthetic
gccatttcugtcaccgtuccat

SEQ ID NO: 84934 - DNA, 21 bp, Artificial Sequence
  Synthetic
ctatgcugcagctgtuaccca

SEQ ID NO: 84935 - DNA, 22 bp, Artificial Sequence
  Synthetic
ctttctcucctgcccucacaag

SEQ ID NO: 84936 - DNA, 20 bp, Artificial Sequence
  Synthetic
gccgtcgcuctctttcugat

SEQ ID NO: 84937 - DNA, 28 bp, Artificial Sequence
  Synthetic
agagattttaaaaagagcucagcaccut

SEQ ID NO: 84938 - DNA, 19 bp, Artificial Sequence
  Synthetic
cctuacgcggctcauggac

SEQ ID NO: 84939 - DNA, 22 bp, Artificial Sequence
  Synthetic
gccctgaauccatgaggcatuc

SEQ ID NO: 84940 - DNA, 22 bp, Artificial Sequence
  Synthetic
cagagtucaacgtccugaagca

SEQ ID NO: 84941 - DNA, 21 bp, Artificial Sequence
  Synthetic
ggagaacagggcugtauggag

SEQ ID NO: 84942 - DNA, 26 bp, Artificial Sequence
  Synthetic
tttttcatcagaacugctaggagcut

SEQ ID NO: 84943 - DNA, 28 bp, Artificial Sequence
  Synthetic
ggacatcaugcacaatttctttatucct

SEQ ID NO: 84944 - DNA, 20 bp, Artificial Sequence
  Synthetic
caggccaucatcctgacgut

SEQ ID NO: 84945 - DNA, 28 bp, Artificial Sequence
  Synthetic
ccggaaaggauatattttctgcttcuct

SEQ ID NO: 84946 - DNA, 28 bp, Artificial Sequence
  Synthetic
gaaggtttcccuagatcctcacttttua

SEQ ID NO: 84947 - DNA, 25 bp, Artificial Sequence
  Synthetic
tgaaggcauctttcttggtucagaa

SEQ ID NO: 84948 - DNA, 22 bp, Artificial Sequence
  Synthetic
ccctggcutcctcagaaaucat

SEQ ID NO: 84949 - DNA, 19 bp, Artificial Sequence
  Synthetic
ggccagacgauaccccuga

SEQ ID NO: 84950 - DNA, 27 bp, Artificial Sequence
  Synthetic
agaagtccguacagaatcttcaucaga

SEQ ID NO: 84951 - DNA, 28 bp, Artificial Sequence
  Synthetic
gggaaggaugaagaaattccagatagut

SEQ ID NO: 84952 - DNA, 24 bp, Artificial Sequence
  Synthetic
gctgguggatgtgttauacaacga

SEQ ID NO: 84953 - DNA, 21 bp, Artificial Sequence
  Synthetic
cgtgtgccaguctcctucaag

SEQ ID NO: 84954 - DNA, 21 bp, Artificial Sequence
  Synthetic
ggcctagugacagcaacctug

SEQ ID NO: 84955 - DNA, 24 bp, Artificial Sequence
  Synthetic
cgatggaattguggcctactctua

SEQ ID NO: 84956 - DNA, 27 bp, Artificial Sequence
  Synthetic
gcaaggagaagucaaacagtcatauct

SEQ ID NO: 84957 - DNA, 28 bp, Artificial Sequence
  Synthetic
gtagcttuaaaaacagcatgtaccaugt

SEQ ID NO: 84958 - DNA, 19 bp, Artificial Sequence
  Synthetic
cgauccgcgccagaatcuc

SEQ ID NO: 84959 - DNA, 23 bp, Artificial Sequence
  Synthetic
gggagaagcaaagugctatucct

SEQ ID NO: 84960 - DNA, 27 bp, Artificial Sequence
  Synthetic
cagcaaccaautgaaaataaaauggga

SEQ ID NO: 84961 - DNA, 24 bp, Artificial Sequence
  Synthetic
gcggttatcutctcgagtuaaggt

SEQ ID NO: 84962 - DNA, 29 bp, Artificial Sequence
  Synthetic
caaccagcattucacttagtcttctcuat

SEQ ID NO: 84963 - DNA, 21 bp, Artificial Sequence
  Synthetic
catcctgcugctctcagtgut

SEQ ID NO: 84964 - DNA, 18 bp, Artificial Sequence
  Synthetic
gggtgcuggctgtccuat

SEQ ID NO: 84965 - DNA, 17 bp, Artificial Sequence
  Synthetic
cgtcgcugtctcgctug

SEQ ID NO: 84966 - DNA, 19 bp, Artificial Sequence
  Synthetic
gggacagcagcucaacuca

SEQ ID NO: 84967 - DNA, 25 bp, Artificial Sequence
  Synthetic
gggtaaaaugaccaggcttctctut

SEQ ID NO: 84968 - DNA, 25 bp, Artificial Sequence
  Synthetic
aggttccacauagacgtaatcucca

SEQ ID NO: 84969 - DNA, 25 bp, Artificial Sequence
  Synthetic
ccctttggtgaguacctttttccut

SEQ ID NO: 84970 - DNA, 23 bp, Artificial Sequence
  Synthetic
caggcagctauagaggagtcgua

SEQ ID NO: 84971 - DNA, 24 bp, Artificial Sequence
  Synthetic
gtcttctggagutctctcccguat

SEQ ID NO: 84972 - DNA, 25 bp, Artificial Sequence
  Synthetic
gtgtgcugaagtgttttaugcagaa

SEQ ID NO: 84973 - DNA, 23 bp, Artificial Sequence
  Synthetic
tcauccggacaaaaguacagcag

SEQ ID NO: 84974 - DNA, 23 bp, Artificial Sequence
  Synthetic
ggcagaagaaaucaucacggaag

SEQ ID NO: 84975 - DNA, 20 bp, Artificial Sequence
  Synthetic
tggtgaggtugggtgggtua

SEQ ID NO: 84976 - DNA, 17 bp, Artificial Sequence
  Synthetic
cgccugccgagaaacuc

SEQ ID NO: 84977 - DNA, 21 bp, Artificial Sequence
  Synthetic
gtgcagagucagagugcagat

SEQ ID NO: 84978 - DNA, 28 bp, Artificial Sequence
  Synthetic
aggtatctctcucggtgtatttctcuac

SEQ ID NO: 84979 - DNA, 26 bp, Artificial Sequence
  Synthetic
atcatguccccagaaaatccagtuac

SEQ ID NO: 84980 - DNA, 29 bp, Artificial Sequence
  Synthetic
caagaaccccaucaatcaatcaauagaat

SEQ ID NO: 84981 - DNA, 24 bp, Artificial Sequence
  Synthetic
aaggaaacagggagcucaatucaa

SEQ ID NO: 84982 - DNA, 22 bp, Artificial Sequence
  Synthetic
cctatgctgugactggaagcug

SEQ ID NO: 84983 - DNA, 26 bp, Artificial Sequence
  Synthetic
cttgggtatgagutttctggttguct

SEQ ID NO: 84984 - DNA, 28 bp, Artificial Sequence
  Synthetic
ggaaugaagtuacacaaaacaacagcaa

SEQ ID NO: 84985 - DNA, 21 bp, Artificial Sequence
  Synthetic
cttctctuaaggcaggcugct

SEQ ID NO: 84986 - DNA, 21 bp, Artificial Sequence
  Synthetic
ccagttucaggccggtatuct

SEQ ID NO: 84987 - DNA, 26 bp, Artificial Sequence
  Synthetic
gccaacagauaaaacatctcgttgut

SEQ ID NO: 84988 - DNA, 26 bp, Artificial Sequence
  Synthetic
gtttuagagaggaacctuaaccccaa

SEQ ID NO: 84989 - DNA, 21 bp, Artificial Sequence
  Synthetic
ccgtactuacctggctgaugt

SEQ ID NO: 84990 - DNA, 28 bp, Artificial Sequence
  Synthetic
ttcatgtttttcuccctatcaggttugt

SEQ ID NO: 84991 - DNA, 24 bp, Artificial Sequence
  Synthetic
cccagattugatcttggctuccat

SEQ ID NO: 84992 - DNA, 24 bp, Artificial Sequence
  Synthetic
caaggcgatcugggctctttatua

SEQ ID NO: 84993 - DNA, 29 bp, Artificial Sequence
  Synthetic
ctttctggtcttauatatgaagcgcttut

SEQ ID NO: 84994 - DNA, 19 bp, Artificial Sequence
  Synthetic
ggtgggcaugggaacucaa

SEQ ID NO: 84995 - DNA, 19 bp, Artificial Sequence
  Synthetic
acagtccccguttcccuca

SEQ ID NO: 84996 - DNA, 28 bp, Artificial Sequence
  Synthetic
gttacttacctccucatcgattttguct

SEQ ID NO: 84997 - DNA, 26 bp, Artificial Sequence
  Synthetic
caagaauttguggacaaggaggagaa

SEQ ID NO: 84998 - DNA, 23 bp, Artificial Sequence
  Synthetic
gcaataugcggaaagctgugaag

SEQ ID NO: 84999 - DNA, 21 bp, Artificial Sequence
  Synthetic
gtcgaugagggctttguggat

SEQ ID NO: 85000 - DNA, 21 bp, Artificial Sequence
  Synthetic
gaguttggcuccaaggaagga

SEQ ID NO: 85001 - DNA, 27 bp, Artificial Sequence
  Synthetic
tcttttccacugcccttatcttatgug

SEQ ID NO: 85002 - DNA, 20 bp, Artificial Sequence
  Synthetic
tcuacccgacaucccccaat

SEQ ID NO: 85003 - DNA, 20 bp, Artificial Sequence
  Synthetic
gtgtcttggcuccaccguag

SEQ ID NO: 85004 - DNA, 27 bp, Artificial Sequence
  Synthetic
tggtatttcacuaattcctcaauggca

SEQ ID NO: 85005 - DNA, 28 bp, Artificial Sequence
  Synthetic
tctgcatccagugatttgtatctuacag

SEQ ID NO: 85006 - DNA, 19 bp, Artificial Sequence
  Synthetic
gcagacucccggugaggat

SEQ ID NO: 85007 - DNA, 17 bp, Artificial Sequence
  Synthetic
gcauggccagctcuggt

SEQ ID NO: 85008 - DNA, 20 bp, Artificial Sequence
  Synthetic
cacttugaagcccucaggga

SEQ ID NO: 85009 - DNA, 18 bp, Artificial Sequence
  Synthetic
cgcagcugcacttcaugt

SEQ ID NO: 85010 - DNA, 20 bp, Artificial Sequence
  Synthetic
ctctgcccuaggacctgcua

SEQ ID NO: 85011 - DNA, 24 bp, Artificial Sequence
  Synthetic
agatgccauggaaagctctcauac

SEQ ID NO: 85012 - DNA, 33 bp, Artificial Sequence
  Synthetic
tgcttaaaaattaataugttcatctgcaaaaug

SEQ ID NO: 85013 - DNA, 24 bp, Artificial Sequence
  Synthetic
atttgacggcucctctactgttut

SEQ ID NO: 85014 - DNA, 30 bp, Artificial Sequence
  Synthetic
attttctttctctaggugaagctgtactuc

SEQ ID NO: 85015 - DNA, 28 bp, Artificial Sequence
  Synthetic
atcagagtcaguggtgtcagaatatcua

SEQ ID NO: 85016 - DNA, 21 bp, Artificial Sequence
  Synthetic
cttccaccaggguaggucaaa

SEQ ID NO: 85017 - DNA, 25 bp, Artificial Sequence
  Synthetic
ccgtaagggugaactaggaaactug

SEQ ID NO: 85018 - DNA, 23 bp, Artificial Sequence
  Synthetic
ctatcccatucctgtccccatut

SEQ ID NO: 85019 - DNA, 18 bp, Artificial Sequence
  Synthetic
gcaggcagcaggucagug

SEQ ID NO: 85020 - DNA, 21 bp, Artificial Sequence
  Synthetic
gatcgaugcaggaccaugaga

SEQ ID NO: 85021 - DNA, 21 bp, Artificial Sequence
  Synthetic
ggcucuggacaagaccaagag

SEQ ID NO: 85022 - DNA, 19 bp, Artificial Sequence
  Synthetic
gatgagcugcctggcctua

SEQ ID NO: 85023 - DNA, 19 bp, Artificial Sequence
  Synthetic
caggcucaaggacctgcuc

SEQ ID NO: 85024 - DNA, 26 bp, Artificial Sequence
  Synthetic
ctgagttguatctagttguggcacat

SEQ ID NO: 85025 - DNA, 22 bp, Artificial Sequence
  Synthetic
gggcautattacaguccaccag

SEQ ID NO: 85026 - DNA, 22 bp, Artificial Sequence
  Synthetic
ccttatgctcucacacacgtug

SEQ ID NO: 85027 - DNA, 26 bp, Artificial Sequence
  Synthetic
tcagacttgaaaugggtgagaugaag

SEQ ID NO: 85028 - DNA, 24 bp, Artificial Sequence
  Synthetic
gttttgucctcagttucgggagat

SEQ ID NO: 85029 - DNA, 23 bp, Artificial Sequence
  Synthetic
gagcuaucacccaggcaaaagaa

SEQ ID NO: 85030 - DNA, 23 bp, Artificial Sequence
  Synthetic
tgcccttccucttcctcaaagua

SEQ ID NO: 85031 - DNA, 20 bp, Artificial Sequence
  Synthetic
ccgcagugatcagctcugac

SEQ ID NO: 85032 - DNA, 20 bp, Artificial Sequence
  Synthetic
ctgcccugacctttctcgut

SEQ ID NO: 85033 - DNA, 22 bp, Artificial Sequence
  Synthetic
ggaccttcutaccaggguaggg

SEQ ID NO: 85034 - DNA, 25 bp, Artificial Sequence
  Synthetic
gatgtttttaaucgacaggcaccut

SEQ ID NO: 85035 - DNA, 28 bp, Artificial Sequence
  Synthetic
catactgtctccuacatctgctagaaug

SEQ ID NO: 85036 - DNA, 27 bp, Artificial Sequence
  Synthetic
aggcaccttcutactgagatacguaat

SEQ ID NO: 85037 - DNA, 28 bp, Artificial Sequence
  Synthetic
agccaaattgttgucttaaaagagcauc

SEQ ID NO: 85038 - DNA, 23 bp, Artificial Sequence
  Synthetic
tgcgatgaugacagaggttctug

SEQ ID NO: 85039 - DNA, 24 bp, Artificial Sequence
  Synthetic
gcagagatuaccaggttccauagg

SEQ ID NO: 85040 - DNA, 26 bp, Artificial Sequence
  Synthetic
aaaagtgaaatgcugtgcaaatcuca

SEQ ID NO: 85041 - DNA, 20 bp, Artificial Sequence
  Synthetic
guggacaccaggtcuacgaa

SEQ ID NO: 85042 - DNA, 22 bp, Artificial Sequence
  Synthetic
ctcacattccucgaagccctua

SEQ ID NO: 85043 - DNA, 28 bp, Artificial Sequence
  Synthetic
acuacttcccuaaagagaaaacacacac

SEQ ID NO: 85044 - DNA, 22 bp, Artificial Sequence
  Synthetic
gatttaugacgacggcctcuca

SEQ ID NO: 85045 - DNA, 23 bp, Artificial Sequence
  Synthetic
gagaggaaggauagugcaaaggg

SEQ ID NO: 85046 - DNA, 21 bp, Artificial Sequence
  Synthetic
gcugactgagcucaccacaaa

SEQ ID NO: 85047 - DNA, 22 bp, Artificial Sequence
  Synthetic
gagcctaacaucagacgcucaa

SEQ ID NO: 85048 - DNA, 22 bp, Artificial Sequence
  Synthetic
caatgtccaggaucccgaugaa

SEQ ID NO: 85049 - DNA, 22 bp, Artificial Sequence
  Synthetic
ccuttgtatcugacaccacgct

SEQ ID NO: 85050 - DNA, 20 bp, Artificial Sequence
  Synthetic
ccucccctgtucacggagat

SEQ ID NO: 85051 - DNA, 28 bp, Artificial Sequence
  Synthetic
gcttttacttctgauaagctccaatgug

SEQ ID NO: 85052 - DNA, 17 bp, Artificial Sequence
  Synthetic
gcggcuagctcugcact

SEQ ID NO: 85053 - DNA, 23 bp, Artificial Sequence
  Synthetic
gaagtccgaaaugatcccaucca

SEQ ID NO: 85054 - DNA, 25 bp, Artificial Sequence
  Synthetic
cagtgcgtutttcataaagguccat

SEQ ID NO: 85055 - DNA, 26 bp, Artificial Sequence
  Synthetic
gtgactttugggaagatgucaagaaa

SEQ ID NO: 85056 - DNA, 21 bp, Artificial Sequence
  Synthetic
aagcacauggtcaccauggat

SEQ ID NO: 85057 - DNA, 20 bp, Artificial Sequence
  Synthetic
cgacacugccgttgatgtug

SEQ ID NO: 85058 - DNA, 20 bp, Artificial Sequence
  Synthetic
tccatccccugtccgauacc

SEQ ID NO: 85059 - DNA, 20 bp, Artificial Sequence
  Synthetic
agccugaaggagcuagacct

SEQ ID NO: 85060 - DNA, 27 bp, Artificial Sequence
  Synthetic
actcatcuccctttaatttuggcacat

SEQ ID NO: 85061 - DNA, 25 bp, Artificial Sequence
  Synthetic
tggatctuggcacaatgauaacagg

SEQ ID NO: 85062 - DNA, 24 bp, Artificial Sequence
  Synthetic
tggactctaagaucaacacccugt

SEQ ID NO: 85063 - DNA, 28 bp, Artificial Sequence
  Synthetic
catcaaccatccutctccagatacatut

SEQ ID NO: 85064 - DNA, 21 bp, Artificial Sequence
  Synthetic
cagctcacugcgggatcttua

SEQ ID NO: 85065 - DNA, 20 bp, Artificial Sequence
  Synthetic
ctgtcuccaggcatcctugt

SEQ ID NO: 85066 - DNA, 23 bp, Artificial Sequence
  Synthetic
gaguacttucacagacagaggca

SEQ ID NO: 85067 - DNA, 23 bp, Artificial Sequence
  Synthetic
tgacacgagggauttaggacuct

SEQ ID NO: 85068 - DNA, 22 bp, Artificial Sequence
  Synthetic
caacgtcauccaggttgttcug

SEQ ID NO: 85069 - DNA, 20 bp, Artificial Sequence
  Synthetic
ccugaagagcgagccctuag

SEQ ID NO: 85070 - DNA, 19 bp, Artificial Sequence
  Synthetic
ggtggauggtggtctgugt

SEQ ID NO: 85071 - DNA, 18 bp, Artificial Sequence
  Synthetic
gccagguatccagccugt

SEQ ID NO: 85072 - DNA, 19 bp, Artificial Sequence
  Synthetic
aggugggacaggctggaua

SEQ ID NO: 85073 - DNA, 17 bp, Artificial Sequence
  Synthetic
gccauctccgugggcag

SEQ ID NO: 85074 - DNA, 26 bp, Artificial Sequence
  Synthetic
tcccatattuccagtgaaugaaagca

SEQ ID NO: 85075 - DNA, 22 bp, Artificial Sequence
  Synthetic
acgttucggaccgtatttcugt

SEQ ID NO: 85076 - DNA, 20 bp, Artificial Sequence
  Synthetic
cacgtguaccccagtucagt

SEQ ID NO: 85077 - DNA, 28 bp, Artificial Sequence
  Synthetic
cgtcttaaatacuggtaaggtcttugga

SEQ ID NO: 85078 - DNA, 22 bp, Artificial Sequence
  Synthetic
cttgcttcugagccttcctuga

SEQ ID NO: 85079 - DNA, 23 bp, Artificial Sequence
  Synthetic
gctggttgaccucttgtccatut

SEQ ID NO: 85080 - DNA, 24 bp, Artificial Sequence
  Synthetic
ccgcggcuttgtattcatuaaaca

SEQ ID NO: 85081 - DNA, 20 bp, Artificial Sequence
  Synthetic
ctgatgcacgutggcttcuc

SEQ ID NO: 85082 - DNA, 17 bp, Artificial Sequence
  Synthetic
gtgctguccgggucagt

SEQ ID NO: 85083 - DNA, 19 bp, Artificial Sequence
  Synthetic
gccaggugtggtuccagaa

SEQ ID NO: 85084 - DNA, 27 bp, Artificial Sequence
  Synthetic
acataguagagagggacucaacaaaca

SEQ ID NO: 85085 - DNA, 21 bp, Artificial Sequence
  Synthetic
ctcttgtggugccacatcgua

SEQ ID NO: 85086 - DNA, 21 bp, Artificial Sequence
  Synthetic
gatacagggcaagcucaggut

SEQ ID NO: 85087 - DNA, 24 bp, Artificial Sequence
  Synthetic
cauttctcuacaggaggcagaagg

SEQ ID NO: 85088 - DNA, 28 bp, Artificial Sequence
  Synthetic
gtgtttatctgaaggugatagagctugt

SEQ ID NO: 85089 - DNA, 27 bp, Artificial Sequence
  Synthetic
ttctgtccaggaggutttcttaactuc

SEQ ID NO: 85090 - DNA, 25 bp, Artificial Sequence
  Synthetic
tgaattgctucagcaaatccaucag

SEQ ID NO: 85091 - DNA, 28 bp, Artificial Sequence
  Synthetic
tgtggtgttttguttgttaactctgtut

SEQ ID NO: 85092 - DNA, 21 bp, Artificial Sequence
  Synthetic
cggcagatgugcaacagttuc

SEQ ID NO: 85093 - DNA, 25 bp, Artificial Sequence
  Synthetic
ggcuaggttuacaggaagaaagcaa

SEQ ID NO: 85094 - DNA, 23 bp, Artificial Sequence
  Synthetic
atgacattcaucggcttccauct

SEQ ID NO: 85095 - DNA, 25 bp, Artificial Sequence
  Synthetic
tgtgtctgggcaguttatcaaaguc

SEQ ID NO: 85096 - DNA, 20 bp, Artificial Sequence
  Synthetic
tgcactgcugtatggagcug

SEQ ID NO: 85097 - DNA, 25 bp, Artificial Sequence
  Synthetic
aatgtaggagucagtctucccagat

SEQ ID NO: 85098 - DNA, 25 bp, Artificial Sequence
  Synthetic
cattgaaagagugaccgtagagcut

SEQ ID NO: 85099 - DNA, 28 bp, Artificial Sequence
  Synthetic
gtcattgcaagaacagutgaatgtagut

SEQ ID NO: 85100 - DNA, 21 bp, Artificial Sequence
  Synthetic
cacagccaucccccacaauaa

SEQ ID NO: 85101 - DNA, 22 bp, Artificial Sequence
  Synthetic
tcaacttgacgcuggtgaaugt

SEQ ID NO: 85102 - DNA, 20 bp, Artificial Sequence
  Synthetic
ctcctgcutgcgaaactugg

SEQ ID NO: 85103 - DNA, 24 bp, Artificial Sequence
  Synthetic
agggtgtuaaaacaagccgaagua

SEQ ID NO: 85104 - DNA, 18 bp, Artificial Sequence
  Synthetic
gcuatggcuggcaagggt

SEQ ID NO: 85105 - DNA, 17 bp, Artificial Sequence
  Synthetic
gccccuccaguccacaa

SEQ ID NO: 85106 - DNA, 26 bp, Artificial Sequence
  Synthetic
gaugagaaaaaucaagacccgagaca

SEQ ID NO: 85107 - DNA, 21 bp, Artificial Sequence
  Synthetic
tcagcagaugguccagcaaaa

SEQ ID NO: 85108 - DNA, 25 bp, Artificial Sequence
  Synthetic
ctcucagggtttcaugaggaaaaca

SEQ ID NO: 85109 - DNA, 24 bp, Artificial Sequence
  Synthetic
atctctcucggtgtgattttugct

SEQ ID NO: 85110 - DNA, 23 bp, Artificial Sequence
  Synthetic
cccaattcucctcttctucacga

SEQ ID NO: 85111 - DNA, 22 bp, Artificial Sequence
  Synthetic
tgattacuggcaaggcaauggt

SEQ ID NO: 85112 - DNA, 21 bp, Artificial Sequence
  Synthetic
ccttugcagacaccccugaag

SEQ ID NO: 85113 - DNA, 22 bp, Artificial Sequence
  Synthetic
ctaactcttuggcccctctgug

SEQ ID NO: 85114 - DNA, 23 bp, Artificial Sequence
  Synthetic
acacaaugaggguacagggagaa

SEQ ID NO: 85115 - DNA, 21 bp, Artificial Sequence
  Synthetic
agaagcggaugctggaaucag

SEQ ID NO: 85116 - DNA, 22 bp, Artificial Sequence
  Synthetic
caagtgaagacugtggcaucca

SEQ ID NO: 85117 - DNA, 21 bp, Artificial Sequence
  Synthetic
gcctgaguaacctgctcucct

SEQ ID NO: 85118 - DNA, 28 bp, Artificial Sequence
  Synthetic
aggcaggcgautatctatttgttttcua

SEQ ID NO: 85119 - DNA, 28 bp, Artificial Sequence
  Synthetic
gagtcaaggagacauttgtaugaggaaa

SEQ ID NO: 85120 - DNA, 23 bp, Artificial Sequence
  Synthetic
ggtggcauaaccacttgaaucca

SEQ ID NO: 85121 - DNA, 23 bp, Artificial Sequence
  Synthetic
ctccctcautcttcccgaucaat

SEQ ID NO: 85122 - DNA, 20 bp, Artificial Sequence
  Synthetic
cagagggugcccttcaaugt

SEQ ID NO: 85123 - DNA, 24 bp, Artificial Sequence
  Synthetic
cgcatctcgauggcaaggatttua

SEQ ID NO: 85124 - DNA, 22 bp, Artificial Sequence
  Synthetic
cagtttcauccctttgctugga

SEQ ID NO: 85125 - DNA, 22 bp, Artificial Sequence
  Synthetic
gggaagguggcttcttcttgut

SEQ ID NO: 85126 - DNA, 21 bp, Artificial Sequence
  Synthetic
gggagttcugcagcgaaacut

SEQ ID NO: 85127 - DNA, 25 bp, Artificial Sequence
  Synthetic
ctctgaccaggaugggtttatuacc

SEQ ID NO: 85128 - DNA, 21 bp, Artificial Sequence
  Synthetic
caacaccggcucttctttuga

SEQ ID NO: 85129 - DNA, 20 bp, Artificial Sequence
  Synthetic
ggcuacagaggacccccuac

SEQ ID NO: 85130 - DNA, 21 bp, Artificial Sequence
  Synthetic
gcacaggaggaagugccaaua

SEQ ID NO: 85131 - DNA, 27 bp, Artificial Sequence
  Synthetic
tcucaggataaaattuggccaagaagt

SEQ ID NO: 85132 - DNA, 21 bp, Artificial Sequence
  Synthetic
aagccattgucctcactcguc

SEQ ID NO: 85133 - DNA, 26 bp, Artificial Sequence
  Synthetic
gccatccttguagaagctatctgaut

SEQ ID NO: 85134 - DNA, 26 bp, Artificial Sequence
  Synthetic
ggagaggacauaagggtcattcauct

SEQ ID NO: 85135 - DNA, 22 bp, Artificial Sequence
  Synthetic
ccctgaccuctccaagaaggua

SEQ ID NO: 85136 - DNA, 26 bp, Artificial Sequence
  Synthetic
caacaagctgagguatgtgactacut

SEQ ID NO: 85137 - DNA, 29 bp, Artificial Sequence
  Synthetic
tcatctgaggtaauatcacagcatcuagt

SEQ ID NO: 85138 - DNA, 24 bp, Artificial Sequence
  Synthetic
ttcctaaggutgcacauaggcaaa

SEQ ID NO: 85139 - DNA, 27 bp, Artificial Sequence
  Synthetic
cccagcttcuctgtctaagtaguaact

SEQ ID NO: 85140 - DNA, 22 bp, Artificial Sequence
  Synthetic
gaagggttuctgtccccaucaa

SEQ ID NO: 85141 - DNA, 20 bp, Artificial Sequence
  Synthetic
gagtcaccccagucggatuc

SEQ ID NO: 85142 - DNA, 23 bp, Artificial Sequence
  Synthetic
aaccaacacaacaucagcgttut

SEQ ID NO: 85143 - DNA, 27 bp, Artificial Sequence
  Synthetic
ttcggtttcacuttttacttcaggtug

SEQ ID NO: 85144 - DNA, 29 bp, Artificial Sequence
  Synthetic
ggacaggcttuacttgctatacttucaaa

SEQ ID NO: 85145 - DNA, 24 bp, Artificial Sequence
  Synthetic
ctttgcccauggaagaaacaaguc

SEQ ID NO: 85146 - DNA, 21 bp, Artificial Sequence
  Synthetic
agtcacctuggccactttcut

SEQ ID NO: 85147 - DNA, 26 bp, Artificial Sequence
  Synthetic
caccttatgttcugtgttgtcaccua

SEQ ID NO: 85148 - DNA, 28 bp, Artificial Sequence
  Synthetic
ggaaacatcautctttgggatuaacact

SEQ ID NO: 85149 - DNA, 24 bp, Artificial Sequence
  Synthetic
cctgttcauacagccataccucac

SEQ ID NO: 85150 - DNA, 28 bp, Artificial Sequence
  Synthetic
cactaagagacgutgattttgttgtuga

SEQ ID NO: 85151 - DNA, 27 bp, Artificial Sequence
  Synthetic
agagtgcttutgatggaactugaagaa

SEQ ID NO: 85152 - DNA, 23 bp, Artificial Sequence
  Synthetic
acgaattacguggttacccctug

SEQ ID NO: 85153 - DNA, 25 bp, Artificial Sequence
  Synthetic
atttgaggcaguacaagtugaaggt

SEQ ID NO: 85154 - DNA, 28 bp, Artificial Sequence
  Synthetic
gccttcagattgugaggatttcttctua

SEQ ID NO: 85155 - DNA, 28 bp, Artificial Sequence
  Synthetic
gaatgagcaagcagauatttccucaaaa

SEQ ID NO: 85156 - DNA, 28 bp, Artificial Sequence
  Synthetic
tggaatttcttcauccttcccaataugg

SEQ ID NO: 85157 - DNA, 26 bp, Artificial Sequence
  Synthetic
agaagcagatacuaagcaggacacua

SEQ ID NO: 85158 - DNA, 31 bp, Artificial Sequence
  Synthetic
gaagtaggacauaaatccatcatactugaca

SEQ ID NO: 85159 - DNA, 25 bp, Artificial Sequence
  Synthetic
ccttcaattccuacacctgccttut

SEQ ID NO: 85160 - DNA, 20 bp, Artificial Sequence
  Synthetic
accacgcgguctttguacag

SEQ ID NO: 85161 - DNA, 28 bp, Artificial Sequence
  Synthetic
cacccagauttcaattctttugacaaca

SEQ ID NO: 85162 - DNA, 22 bp, Artificial Sequence
  Synthetic
ggtctgggutgagguacaaagg

SEQ ID NO: 85163 - DNA, 26 bp, Artificial Sequence
  Synthetic
tggaagccacaauatgacatuacgat

SEQ ID NO: 85164 - DNA, 22 bp, Artificial Sequence
  Synthetic
agcucacaaccgacaataugct

SEQ ID NO: 85165 - DNA, 22 bp, Artificial Sequence
  Synthetic
ccgcaggucgctaaggaattua

SEQ ID NO: 85166 - DNA, 28 bp, Artificial Sequence
  Synthetic
tgaggaaatatcugcttgctcatucaat

SEQ ID NO: 85167 - DNA, 26 bp, Artificial Sequence
  Synthetic
accagtacccutaccagtagatguag

SEQ ID NO: 85168 - DNA, 26 bp, Artificial Sequence
  Synthetic
cccagggatuaaaaatgttgctugaa

SEQ ID NO: 85169 - DNA, 27 bp, Artificial Sequence
  Synthetic
caacatctgucaactccacaaaatuct

SEQ ID NO: 85170 - DNA, 21 bp, Artificial Sequence
  Synthetic
ccttccucggttagggucgat

SEQ ID NO: 85171 - DNA, 22 bp, Artificial Sequence
  Synthetic
agcatcatcagcucagacctuc

SEQ ID NO: 85172 - DNA, 28 bp, Artificial Sequence
  Synthetic
cagtggaaacttcuacgtgactttgaua

SEQ ID NO: 85173 - DNA, 33 bp, Artificial Sequence; identical to SEQ ID NO: 63355
  Synthetic

SEQ ID NO: 85174 - DNA, 21 bp, Artificial Sequence
  Synthetic
ctttcuctccaaguccagcgt

SEQ ID NO: 85175 - DNA, 19 bp, Artificial Sequence
  Synthetic
gcagccugctgtcgtcaua

SEQ ID NO: 85176 - DNA, 28 bp, Artificial Sequence
  Synthetic
ggtaacttucactgataccaugacaagg

SEQ ID NO: 85177 - DNA, 28 bp, Artificial Sequence
  Synthetic
ctcttcttgtutagatgtctcugggaaa

SEQ ID NO: 85178 - DNA, 25 bp, Artificial Sequence
  Synthetic
tcaaaggaagaaccagucaccttuc

SEQ ID NO: 85179 - DNA, 21 bp, Artificial Sequence
  Synthetic
actccugggcaagttctcuca

SEQ ID NO: 85180 - DNA, 26 bp, Artificial Sequence
  Synthetic
tggactcugcaaataggacattucaa

SEQ ID NO: 85181 - DNA, 28 bp, Artificial Sequence
  Synthetic
cacccaaaagaauagtcaaugaacaaca

SEQ ID NO: 85182 - DNA, 21 bp, Artificial Sequence
  Synthetic
cccattgauggagtaggugga

SEQ ID NO: 85183 - DNA, 23 bp, Artificial Sequence
  Synthetic
agtccccagcucaactgtaacua

SEQ ID NO: 85184 - DNA, 28 bp, Artificial Sequence
  Synthetic
attggtggttctutcagagatctaacug

SEQ ID NO: 85185 - DNA, 22 bp, Artificial Sequence
  Synthetic
ctctcaucaccagcaccaguaa

SEQ ID NO: 85186 - DNA, 25 bp, Artificial Sequence
  Synthetic
gtctacctgatcutggatcccagua

SEQ ID NO: 85187 - DNA, 26 bp, Artificial Sequence
  Synthetic
ctcagaaactuaggttgggacttcuc

SEQ ID NO: 85188 - DNA, 21 bp, Artificial Sequence
  Synthetic
agggaguaacacugagaccgt

SEQ ID NO: 85189 - DNA, 20 bp, Artificial Sequence
  Synthetic
ggtgtggcugaagcagtcut

SEQ ID NO: 85190 - DNA, 22 bp, Artificial Sequence
  Synthetic
tgacugcuccgagaagaacaag

SEQ ID NO: 85191 - DNA, 28 bp, Artificial Sequence
  Synthetic
gtgattcagaagauacagattcggauga

SEQ ID NO: 85192 - DNA, 25 bp, Artificial Sequence
  Synthetic
cuagatctgtaacuacgagggacca

SEQ ID NO: 85193 - DNA, 18 bp, Artificial Sequence
  Synthetic
aggcguagagggcaccua

SEQ ID NO: 85194 - DNA, 23 bp, Artificial Sequence
  Synthetic
ctccagcattucctgtttcacug

SEQ ID NO: 85195 - DNA, 23 bp, Artificial Sequence
  Synthetic
aaggucaccacgaacttctugaa

SEQ ID NO: 85196 - DNA, 22 bp, Artificial Sequence
  Synthetic
accccatttcuaccaccagcua

SEQ ID NO: 85197 - DNA, 29 bp, Artificial Sequence
  Synthetic
cgctgacatttgutttatactgtgttgut

SEQ ID NO: 85198 - DNA, 28 bp, Artificial Sequence
  Synthetic
tcctccaagtugcaatatagcttgatut

SEQ ID NO: 85199 - DNA, 23 bp, Artificial Sequence
  Synthetic
aattgccatcuctgcaactcuga

SEQ ID NO: 85200 - DNA, 23 bp, Artificial Sequence
  Synthetic
ggtgtgugtgtggctucaaaaac

SEQ ID NO: 85201 - DNA, 27 bp, Artificial Sequence
  Synthetic
agacattttacaucatcatctgcugct

SEQ ID NO: 85202 - DNA, 24 bp, Artificial Sequence
  Synthetic
gtcaccuggaatgtctuagaagcc

SEQ ID NO: 85203 - DNA, 24 bp, Artificial Sequence
  Synthetic
attctagccaugcagtcacctuac

SEQ ID NO: 85204 - DNA, 20 bp, Artificial Sequence
  Synthetic
ccctgaccagacuccacuga

SEQ ID NO: 85205 - DNA, 23 bp, Artificial Sequence
  Synthetic
gtaaaggcggaugaaguaggact

SEQ ID NO: 85206 - DNA, 25 bp, Artificial Sequence
  Synthetic
gagacggtttcutggaatactgcua

SEQ ID NO: 85207 - DNA, 25 bp, Artificial Sequence
  Synthetic
catggaagacagugatggtguaact

SEQ ID NO: 85208 - DNA, 25 bp, Artificial Sequence
  Synthetic
actccagagaaguttgcagattucc

SEQ ID NO: 85209 - DNA, 20 bp, Artificial Sequence
  Synthetic
actctctugcgctgauggac

SEQ ID NO: 85210 - DNA, 24 bp, Artificial Sequence
  Synthetic
ctgttatuggtgtatguggcaagg

SEQ ID NO: 85211 - DNA, 21 bp, Artificial Sequence
  Synthetic
caccuactcaugcagcaccat

SEQ ID NO: 85212 - DNA, 24 bp, Artificial Sequence
  Synthetic
cctacaggaagcuatcctctgcut

SEQ ID NO: 85213 - DNA, 22 bp, Artificial Sequence
  Synthetic
tcctcaaccauctcctgugaca

SEQ ID NO: 85214 - DNA, 21 bp, Artificial Sequence
  Synthetic
gaaagaggcauctccaggcut

SEQ ID NO: 85215 - DNA, 21 bp, Artificial Sequence
  Synthetic
cattggcaccacugagtctuc

SEQ ID NO: 85216 - DNA, 22 bp, Artificial Sequence
  Synthetic
gctgugggaaaaccaggctuat

SEQ ID NO: 85217 - DNA, 22 bp, Artificial Sequence
  Synthetic
attttcagccuccctgactcug

SEQ ID NO: 85218 - DNA, 18 bp, Artificial Sequence
  Synthetic
gctctggcuctggtucgt

SEQ ID NO: 85219 - DNA, 19 bp, Artificial Sequence
  Synthetic
tgctgcuggaatcctccug

SEQ ID NO: 85220 - DNA, 28 bp, Artificial Sequence
  Synthetic
gaccactactgucacactttaatgcaua

SEQ ID NO: 85221 - DNA, 27 bp, Artificial Sequence
  Synthetic
ccauattgccugaaagaagaggaagac

SEQ ID NO: 85222 - DNA, 20 bp, Artificial Sequence
  Synthetic
cgccaggutcttuccgaaac

SEQ ID NO: 85223 - DNA, 22 bp, Artificial Sequence
  Synthetic
gaatctucagctcgaugcagac

SEQ ID NO: 85224 - DNA, 21 bp, Artificial Sequence
  Synthetic
tcgugaaggauaacccccaga

SEQ ID NO: 85225 - DNA, 24 bp, Artificial Sequence
  Synthetic
ggtctgaggucttgaagctaugga

SEQ ID NO: 85226 - DNA, 24 bp, Artificial Sequence
  Synthetic
cgagttttatuggcgacacacuga

SEQ ID NO: 85227 - DNA, 23 bp, Artificial Sequence
  Synthetic
cgctagaucttcttcccuaaccc

SEQ ID NO: 85228 - DNA, 25 bp, Artificial Sequence
  Synthetic
gagaagcuccagagcctttuaaaga

SEQ ID NO: 85229 - DNA, 21 bp, Artificial Sequence
  Synthetic
caactcccagucccacugaag

SEQ ID NO: 85230 - DNA, 22 bp, Artificial Sequence
  Synthetic
gaauttgctugaaggccaccat

SEQ ID NO: 85231 - DNA, 25 bp, Artificial Sequence
  Synthetic
aaaactuccacacatcatuggagga

SEQ ID NO: 85232 - DNA, 26 bp, Artificial Sequence
  Synthetic
gatacgtgguagaaggcttttctuga

SEQ ID NO: 85233 - DNA, 25 bp, Artificial Sequence
  Synthetic
aataagtctuggcaacagaccacut

SEQ ID NO: 85234 - DNA, 25 bp, Artificial Sequence
  Synthetic
gttgattctgcuatcactgctggua

SEQ ID NO: 85235 - DNA, 23 bp, Artificial Sequence
  Synthetic
gcagaagaauctuccccaccaaa

SEQ ID NO: 85236 - DNA, 18 bp, Artificial Sequence
  Synthetic
cagccuggcugacaggaa

SEQ ID NO: 85237 - DNA, 19 bp, Artificial Sequence
  Synthetic
gcuggaacagtugccggat

SEQ ID NO: 85238 - DNA, 20 bp, Artificial Sequence
  Synthetic
ccactguacgatgcctucgg

SEQ ID NO: 85239 - DNA, 21 bp, Artificial Sequence
  Synthetic
caccaguggaaggcucagaat

SEQ ID NO: 85240 - DNA, 27 bp, Artificial Sequence
  Synthetic
tgtcctccttcucctctttcatcuaaa

SEQ ID NO: 85241 - DNA, 23 bp, Artificial Sequence
  Synthetic
tcaggaaagggauttgctuccag

SEQ ID NO: 85242 - DNA, 24 bp, Artificial Sequence
  Synthetic
gaaggagaacgucttcatgauggt

SEQ ID NO: 85243 - DNA, 18 bp, Artificial Sequence
  Synthetic
ccagguggacctgctuca

SEQ ID NO: 85244 - DNA, 26 bp, Artificial Sequence
  Synthetic
aaaatgggattguttgcactaaccug

SEQ ID NO: 85245 - DNA, 28 bp, Artificial Sequence
  Synthetic
catggagtcugccaattctacttcttua

SEQ ID NO: 85246 - DNA, 21 bp, Artificial Sequence
  Synthetic
aggaaugcagggagagctgua

SEQ ID NO: 85247 - DNA, 22 bp, Artificial Sequence
  Synthetic
acagauagccatgaugcagcag

SEQ ID NO: 85248 - DNA, 24 bp, Artificial Sequence
  Synthetic
ctcctatactgacugggaggacut

SEQ ID NO: 85249 - DNA, 20 bp, Artificial Sequence
  Synthetic
cucttcttgtcucggcccat

SEQ ID NO: 85250 - DNA, 27 bp, Artificial Sequence
  Synthetic
tcgagcatgaugagctattagatcuga

SEQ ID NO: 85251 - DNA, 29 bp, Artificial Sequence
  Synthetic
cacttatgcatgauttaccatctttgcut

SEQ ID NO: 85252 - DNA, 25 bp, Artificial Sequence
  Synthetic
agtctactatcuggcctgtttugga

SEQ ID NO: 85253 - DNA, 21 bp, Artificial Sequence
  Synthetic
tgggucacccaaatucagagg

SEQ ID NO: 85254 - DNA, 22 bp, Artificial Sequence
  Synthetic
cttctcatucagcagggcuagg

SEQ ID NO: 85255 - DNA, 22 bp, Artificial Sequence
  Synthetic
ccccttgugcacatagttcugt

SEQ ID NO: 85256 - DNA, 21 bp, Artificial Sequence
  Synthetic
ctgtgauggagcccctcatua

SEQ ID NO: 85257 - DNA, 25 bp, Artificial Sequence
  Synthetic
gaatgctgcucatcttcttccatug

SEQ ID NO: 85258 - DNA, 23 bp, Artificial Sequence
  Synthetic
acccattatuacgcctgttcucc

SEQ ID NO: 85259 - DNA, 27 bp, Artificial Sequence
  Synthetic
tctggatgcagugctaaagaguaaaaa

SEQ ID NO: 85260 - DNA, 22 bp, Artificial Sequence
  Synthetic
gcuccacaaccaucaacaggaa

SEQ ID NO: 85261 - DNA, 21 bp, Artificial Sequence
  Synthetic
gcacaaggucaaagcagagug

SEQ ID NO: 85262 - DNA, 25 bp, Artificial Sequence
  Synthetic
gaaggtatttuggctttcacggtut

SEQ ID NO: 85263 - DNA, 26 bp, Artificial Sequence
  Synthetic
ccggaaattucttttacacaguccag

SEQ ID NO: 85264 - DNA, 29 bp, Artificial Sequence
  Synthetic
ccatgaatagtcuagcagtttgattguct

SEQ ID NO: 85265 - DNA, 28 bp, Artificial Sequence
  Synthetic
aatcattaaactuacttgacagccuggt

SEQ ID NO: 85266 - DNA, 24 bp, Artificial Sequence
  Synthetic
ccaactgctcuggaacatgtttuc

SEQ ID NO: 85267 - DNA, 24 bp, Artificial Sequence
  Synthetic
gacataccucagcacacacauaca

SEQ ID NO: 85268 - DNA, 22 bp, Artificial Sequence
  Synthetic
cctcaagaccutgcctcttcuc

SEQ ID NO: 85269 - DNA, 23 bp, Artificial Sequence
  Synthetic
gatgtgcucactgtcugaccaat

SEQ ID NO: 85270 - DNA, 27 bp, Artificial Sequence
  Synthetic
aaaactcacautcctcttucaccagaa

SEQ ID NO: 85271 - DNA, 26 bp, Artificial Sequence
  Synthetic
catttttagtggacucttgtgggcua

SEQ ID NO: 85272 - DNA, 28 bp, Artificial Sequence
  Synthetic
ttcattcaaauggttctcacaugagagt

SEQ ID NO: 85273 - DNA, 20 bp, Artificial Sequence
  Synthetic
ttctugggacgcacagugat

SEQ ID NO: 85274 - DNA, 27 bp, Artificial Sequence
  Synthetic
cctgcatgcttuaaaaactctgaacut

SEQ ID NO: 85275 - DNA, 25 bp, Artificial Sequence
  Synthetic
tcttcagagtcutccaccaggaaua

SEQ ID NO: 85276 - DNA, 22 bp, Artificial Sequence
  Synthetic
caaggttcugccactcucagac

SEQ ID NO: 85277 - DNA, 24 bp, Artificial Sequence
  Synthetic
aggacaagacugagttctccauca

SEQ ID NO: 85278 - DNA, 25 bp, Artificial Sequence
  Synthetic
tcaagagagtuagactgtccaccut

SEQ ID NO: 85279 - DNA, 28 bp, Artificial Sequence
  Synthetic
cagatcacucaaaatttgcatgugaaga

SEQ ID NO: 85280 - DNA, 22 bp, Artificial Sequence
  Synthetic
gattcuccaacctcgtcuccaa

SEQ ID NO: 85281 - DNA, 20 bp, Artificial Sequence
  Synthetic
ccagccaucgagacttugct

SEQ ID NO: 85282 - DNA, 21 bp, Artificial Sequence
  Synthetic
accaaggcugtcaccacatuc

SEQ ID NO: 85283 - DNA, 21 bp, Artificial Sequence
  Synthetic
atagttgugctgctgguggat

SEQ ID NO: 85284 - DNA, 23 bp, Artificial Sequence
  Synthetic
tggtacctucccagcataaugga

SEQ ID NO: 85285 - DNA, 20 bp, Artificial Sequence
  Synthetic
ctggacgaggaaugctggut

SEQ ID NO: 85286 - DNA, 18 bp, Artificial Sequence
  Synthetic
tgcagcuccagguagcac

SEQ ID NO: 85287 - DNA, 21 bp, Artificial Sequence
  Synthetic
gcttaccguacaggcttugga

SEQ ID NO: 85288 - DNA, 33 bp, Artificial Sequence
  Synthetic
ttacaaagaatggutagtggtttaacauaaaca

SEQ ID NO: 85289 - DNA, 26 bp, Artificial Sequence
  Synthetic
aagctttgucaccagatgataacuga

SEQ ID NO: 85290 - DNA, 24 bp, Artificial Sequence
  Synthetic
gtgctaccgaugctctgcttauat

SEQ ID NO: 85291 - DNA, 27 bp, Artificial Sequence
  Synthetic
actctgaagcugaaaatattgagccut

SEQ ID NO: 85292 - DNA, 21 bp, Artificial Sequence
  Synthetic
ccttaagccauctgggccuac

SEQ ID NO: 85293 - DNA, 23 bp, Artificial Sequence
  Synthetic
gactccugtttcctauggcaact

SEQ ID NO: 85294 - DNA, 22 bp, Artificial Sequence
  Synthetic
tgatccucaaacgatgcctucc

SEQ ID NO: 85295 - DNA, 21 bp, Artificial Sequence
  Synthetic
gggctcaagcucttagcctut

SEQ ID NO: 85296 - DNA, 22 bp, Artificial Sequence
  Synthetic
cgccaagguggtcatttugaaa

SEQ ID NO: 85297 - DNA, 22 bp, Artificial Sequence
  Synthetic
acugtccagtttugagaagcgt

SEQ ID NO: 85298 - DNA, 24 bp, Artificial Sequence
  Synthetic
agaaatugccccacattgaugagt

SEQ ID NO: 85299 - DNA, 22 bp, Artificial Sequence
  Synthetic
gggttggaugattacggtuggg

SEQ ID NO: 85300 - DNA, 28 bp, Artificial Sequence
  Synthetic
ccaaactttauaagatcctggctaucct

SEQ ID NO: 85301 - DNA, 28 bp, Artificial Sequence
  Synthetic
gtttcccctgacutatacacggtttuaa

SEQ ID NO: 85302 - DNA, 20 bp, Artificial Sequence
  Synthetic
cgtccgcucaagagtgucat

SEQ ID NO: 85303 - DNA, 21 bp, Artificial Sequence
  Synthetic
cgugagaaagcuggaccgaag

SEQ ID NO: 85304 - DNA, 33 bp, Artificial Sequence; identical to SEQ ID NO: 54944
  Synthetic

SEQ ID NO: 85305 - DNA, 24 bp, Artificial Sequence
  Synthetic
gcagctgacutgactttgctaaug

SEQ ID NO: 85306 - DNA, 20 bp, Artificial Sequence
  Synthetic
ggctcctucctcacccgaua

SEQ ID NO: 85307 - DNA, 17 bp, Artificial Sequence
  Synthetic
cgcuaccugcggaccac

SEQ ID NO: 85308 - DNA, 23 bp, Artificial Sequence
  Synthetic
gcagcaucagtgtgtcugaacat

SEQ ID NO: 85309 - DNA, 21 bp, Artificial Sequence
  Synthetic
gcagacgaugaggtcaugcaa

SEQ ID NO: 85310 - DNA, 28 bp, Artificial Sequence
  Synthetic
gtctgacagagtuctcattacccaaaut

SEQ ID NO: 85311 - DNA, 22 bp, Artificial Sequence
  Synthetic
cuctctctcauaggagccagga

SEQ ID NO: 85312 - DNA, 20 bp, Artificial Sequence
  Synthetic
agacttguccgtggcttugg

SEQ ID NO: 85313 - DNA, 22 bp, Artificial Sequence
  Synthetic
gatgcccaugcgttgtgtauag

SEQ ID NO: 85314 - DNA, 20 bp, Artificial Sequence
  Synthetic
cacgcuaccactcctgtuga

SEQ ID NO: 85315 - DNA, 29 bp, Artificial Sequence
  Synthetic
agcttctttagccucaaacttaatctugt

SEQ ID NO: 85316 - DNA, 21 bp, Artificial Sequence
  Synthetic
cgucgcagaaaccacaacauc

SEQ ID NO: 85317 - DNA, 21 bp, Artificial Sequence
  Synthetic
gtggacatacucagtggccut

SEQ ID NO: 85318 - DNA, 25 bp, Artificial Sequence
  Synthetic
tcttcttttgcutccctctcttucc

SEQ ID NO: 85319 - DNA, 27 bp, Artificial Sequence
  Synthetic
accatcagcauctactccatauagaca

SEQ ID NO: 85320 - DNA, 24 bp, Artificial Sequence
  Synthetic
agctggatcuagaaatggaagcuc

SEQ ID NO: 85321 - DNA, 23 bp, Artificial Sequence
  Synthetic
attgcacgtttugagggtaccua

SEQ ID NO: 85322 - DNA, 23 bp, Artificial Sequence
  Synthetic
tcattgcctuccgttccagtuac

SEQ ID NO: 85323 - DNA, 27 bp, Artificial Sequence
  Synthetic
tcattttggctuctatacctccaugat

SEQ ID NO: 85324 - DNA, 21 bp, Artificial Sequence
  Synthetic
agaattcgcuagccctgggua

SEQ ID NO: 85325 - DNA, 24 bp, Artificial Sequence
  Synthetic
tcatggucgagcattttugcaaag

SEQ ID NO: 85326 - DNA, 24 bp, Artificial Sequence
  Synthetic
cccggcccacaautttattctuaa

SEQ ID NO: 85327 - DNA, 27 bp, Artificial Sequence
  Synthetic
ttgctggagaacutgtagtagttgaug

SEQ ID NO: 85328 - DNA, 23 bp, Artificial Sequence
  Synthetic
gcatggaaaggugccttttuagt

SEQ ID NO: 85329 - DNA, 28 bp, Artificial Sequence
  Synthetic
tctagatgcucgaggaagtattccauaa

SEQ ID NO: 85330 - DNA, 28 bp, Artificial Sequence
  Synthetic
ctactgcattugacattccttgtttugt

SEQ ID NO: 85331 - DNA, 22 bp, Artificial Sequence
  Synthetic
tgctgggtaugtaaggagctug

SEQ ID NO: 85332 - DNA, 24 bp, Artificial Sequence
  Synthetic
caaagcagaggaaguagctacgut

SEQ ID NO: 85333 - DNA, 28 bp, Artificial Sequence
  Synthetic
actaggatatuaacacatgggcuacagt

SEQ ID NO: 85334 - DNA, 24 bp, Artificial Sequence
  Synthetic
ctcattguaccgtcaggaucaaga

SEQ ID NO: 85335 - DNA, 28 bp, Artificial Sequence
  Synthetic
gtactgattactacuggccggaagtaua

SEQ ID NO: 85336 - DNA, 21 bp, Artificial Sequence
  Synthetic
cttgccttugcagccatugat

SEQ ID NO: 85337 - DNA, 20 bp, Artificial Sequence
  Synthetic
gcgcgucaatgactuccact

SEQ ID NO: 85338 - DNA, 28 bp, Artificial Sequence
  Synthetic
ctcagttgaattugctgggttttatugt

SEQ ID NO: 85339 - DNA, 25 bp, Artificial Sequence
  Synthetic
aacatcagctguaggaacatcgaut

SEQ ID NO: 85340 - DNA, 23 bp, Artificial Sequence
  Synthetic
agccccaacauggttttgaacua

SEQ ID NO: 85341 - DNA, 29 bp, Artificial Sequence
  Synthetic
ggttcaattcattuacttcagaggacugt

SEQ ID NO: 85342 - DNA, 17 bp, Artificial Sequence
  Synthetic
caccggugugaccagca

SEQ ID NO: 85343 - DNA, 17 bp, Artificial Sequence
  Synthetic
gtgggugagcgctguga

SEQ ID NO: 85344 - DNA, 21 bp, Artificial Sequence
  Synthetic
ggacaggcacucgttgacauc

SEQ ID NO: 85345 - DNA, 20 bp, Artificial Sequence
  Synthetic
tcaacguggacgacugcaat

SEQ ID NO: 85346 - DNA, 21 bp, Artificial Sequence
  Synthetic
caggcagcuaatgaaggucca

SEQ ID NO: 85347 - DNA, 26 bp, Artificial Sequence
  Synthetic
aaagcctucagacccaatggttauag

SEQ ID NO: 85348 - DNA, 21 bp, Artificial Sequence
  Synthetic
agcaaaccugccagtggtuat

SEQ ID NO: 85349 - DNA, 26 bp, Artificial Sequence
  Synthetic
acctactgcugtgtctactguagaaa

SEQ ID NO: 85350 - DNA, 20 bp, Artificial Sequence
  Synthetic
caggugccgttgtuaaagca

SEQ ID NO: 85351 - DNA, 18 bp, Artificial Sequence
  Synthetic
guctuccgggacggacac

SEQ ID NO: 85352 - DNA, 20 bp, Artificial Sequence
  Synthetic
aagtggtacgcuccggaaug

SEQ ID NO: 85353 - DNA, 22 bp, Artificial Sequence
  Synthetic
agaaaaugaagcaggacuggct

SEQ ID NO: 85354 - DNA, 18 bp, Artificial Sequence
  Synthetic
gcucccucacgacaggat

SEQ ID NO: 85355 - DNA, 20 bp, Artificial Sequence
  Synthetic
ctcgagggcauccgtatcug

SEQ ID NO: 85356 - DNA, 20 bp, Artificial Sequence
  Synthetic
ccuggaagaccaccctgtug

SEQ ID NO: 85357 - DNA, 24 bp, Artificial Sequence
  Synthetic
ccctgactatuctccgactgtuct

SEQ ID NO: 85358 - DNA, 26 bp, Artificial Sequence
  Synthetic
catctgagutctgagaatugggacat

SEQ ID NO: 85359 - DNA, 21 bp, Artificial Sequence
  Synthetic
aaggctucaagctcucaggac

SEQ ID NO: 85360 - DNA, 21 bp, Artificial Sequence
  Synthetic
tgtgccucccacattgttuca

SEQ ID NO: 85361 - DNA, 21 bp, Artificial Sequence
  Synthetic
gttcaccctugggctaggtuc

SEQ ID NO: 85362 - DNA, 22 bp, Artificial Sequence
  Synthetic
gccttcttccucctcctccaua

SEQ ID NO: 85363 - DNA, 22 bp, Artificial Sequence
  Synthetic
cttctcagagcuggatggacug

SEQ ID NO: 85364 - DNA, 22 bp, Artificial Sequence
  Synthetic
ttcccccaautgacactctucc

SEQ ID NO: 85365 - DNA, 22 bp, Artificial Sequence
  Synthetic
gccagtgugttcaagacucaga

SEQ ID NO: 85366 - DNA, 28 bp, Artificial Sequence
  Synthetic
tgtcattttccutaggttcaaaacuggt

SEQ ID NO: 85367 - DNA, 20 bp, Artificial Sequence
  Synthetic
cgattgcuaggcccggtaug

SEQ ID NO: 85368 - DNA, 19 bp, Artificial Sequence
  Synthetic
cctctuccatgggcuccag

SEQ ID NO: 85369 - DNA, 20 bp, Artificial Sequence
  Synthetic
ctggcaggutagcagugaga

SEQ ID NO: 85370 - DNA, 28 bp, Artificial Sequence
  Synthetic
gccatatgaaatugtagtggacctuacc

SEQ ID NO: 85371 - DNA, 21 bp, Artificial Sequence
  Synthetic
actcccugacccaggagtuac

SEQ ID NO: 85372 - DNA, 21 bp, Artificial Sequence
  Synthetic
agcagtuccacttacgugcat

SEQ ID NO: 85373 - DNA, 24 bp, Artificial Sequence
  Synthetic
agcatggagaagcuttagaauggg

SEQ ID NO: 85374 - DNA, 18 bp, Artificial Sequence
  Synthetic
cagacgagcuggaucgca

SEQ ID NO: 85375 - DNA, 27 bp, Artificial Sequence
  Synthetic
gttcatatatgtuctgcccttgtcuct

SEQ ID NO: 85376 - DNA, 26 bp, Artificial Sequence
  Synthetic
tggaaaaccaaaugaaaccatucagg

SEQ ID NO: 85377 - DNA, 23 bp, Artificial Sequence
  Synthetic
ccgttcttuagcggtcatgucaa

SEQ ID NO: 85378 - DNA, 22 bp, Artificial Sequence
  Synthetic
caatgggacuaaaccugcagga

SEQ ID NO: 85379 - DNA, 22 bp, Artificial Sequence
  Synthetic
ctacagtcuccagtggcuaagg

SEQ ID NO: 85380 - DNA, 24 bp, Artificial Sequence
  Synthetic
ccaggccuaaaatauacccaacca

SEQ ID NO: 85381 - DNA, 29 bp, Artificial Sequence
  Synthetic
tctcaaaaguacaaaccaaagacagctua

SEQ ID NO: 85382 - DNA, 21 bp, Artificial Sequence
  Synthetic
tccgtgttcutgaagcagugg

SEQ ID NO: 85383 - DNA, 24 bp, Artificial Sequence
  Synthetic
cctgaccugcactcttctgtttua

SEQ ID NO: 85384 - DNA, 21 bp, Artificial Sequence
  Synthetic
cccatcucccaagcttguaga

SEQ ID NO: 85385 - DNA, 26 bp, Artificial Sequence
  Synthetic
cactacaacaauggcaactauaccct

SEQ ID NO: 85386 - DNA, 22 bp, Artificial Sequence
  Synthetic
ttccatcctucacattgcccut

SEQ ID NO: 85387 - DNA, 28 bp, Artificial Sequence
  Synthetic
caacaatgcaaaagcacutcttatccua

SEQ ID NO: 85388 - DNA, 24 bp, Artificial Sequence
  Synthetic
ttccacuggtcatcctucgaaaaa

SEQ ID NO: 85389 - DNA, 25 bp, Artificial Sequence
  Synthetic
tgagtaacagcugtgcagaaatugt

SEQ ID NO: 85390 - DNA, 22 bp, Artificial Sequence
  Synthetic
cccaccaccauctcctctttuc

SEQ ID NO: 85391 - DNA, 22 bp, Artificial Sequence
  Synthetic
tcctgaaggccuctgtggatua

SEQ ID NO: 85392 - DNA, 28 bp, Artificial Sequence
  Synthetic
aacgtctccgcaguctatatctauaact

SEQ ID NO: 85393 - DNA, 25 bp, Artificial Sequence
  Synthetic
caggtagtttcugttgttcatgcuc

SEQ ID NO: 85394 - DNA, 21 bp, Artificial Sequence
  Synthetic
cccagtggguttttggcaaug

SEQ ID NO: 85395 - DNA, 18 bp, Artificial Sequence
  Synthetic
cactggcugcacaauggg

SEQ ID NO: 85396 - DNA, 20 bp, Artificial Sequence
  Synthetic
ccttctgcagcutgcggaua

SEQ ID NO: 85397 - DNA, 23 bp, Artificial Sequence
  Synthetic
agctccugagaaactcctcaugt

SEQ ID NO: 85398 - DNA, 26 bp, Artificial Sequence
  Synthetic
ggtcagaaaugaccatgtgtaaguct

SEQ ID NO: 85399 - DNA, 25 bp, Artificial Sequence
  Synthetic
cactgtaaugagggctgtctguaaa

SEQ ID NO: 85400 - DNA, 20 bp, Artificial Sequence
  Synthetic
gctggaggaucggttgucaa

SEQ ID NO: 85401 - DNA, 22 bp, Artificial Sequence
  Synthetic
gctgtcaccaaugaggtugaag

SEQ ID NO: 85402 - DNA, 23 bp, Artificial Sequence
  Synthetic
tgatcttttuctcccccuagggt

SEQ ID NO: 85403 - DNA, 28 bp, Artificial Sequence
  Synthetic
gaagactacutgcagagaatuaccaact

SEQ ID NO: 85404 - DNA, 21 bp, Artificial Sequence
  Synthetic
gggaaacuggctgagcacaua

SEQ ID NO: 85405 - DNA, 26 bp, Artificial Sequence
  Synthetic
tcgttuacaaaacacagacuggaact

SEQ ID NO: 85406 - DNA, 20 bp, Artificial Sequence
  Synthetic
ctgccagutagcgguaacct

SEQ ID NO: 85407 - DNA, 24 bp, Artificial Sequence
  Synthetic
gctcagtggutacttctcttuccc

SEQ ID NO: 85408 - DNA, 27 bp, Artificial Sequence
  Synthetic
gtagtattccacauggatgatctugga

SEQ ID NO: 85409 - DNA, 20 bp, Artificial Sequence
  Synthetic
gcaggcutctccctugacag

SEQ ID NO: 85410 - DNA, 26 bp, Artificial Sequence
  Synthetic
aacactcactuctttacagcttcucc

SEQ ID NO: 85411 - DNA, 24 bp, Artificial Sequence
  Synthetic
gggccaugaacatgagtguaaaat

SEQ ID NO: 85412 - DNA, 22 bp, Artificial Sequence
  Synthetic
cgttgccucctgacauaccaag

SEQ ID NO: 85413 - DNA, 24 bp, Artificial Sequence
  Synthetic
cccaatcacucagtctagtucaca

SEQ ID NO: 85414 - DNA, 18 bp, Artificial Sequence
  Synthetic
ccatgtgggugggtggut

SEQ ID NO: 85415 - DNA, 18 bp, Artificial Sequence
  Synthetic
aatgtuccagggcugcca

SEQ ID NO: 85416 - DNA, 25 bp, Artificial Sequence
  Synthetic
caccaaagcutttctggaaaaucca

SEQ ID NO: 85417 - DNA, 28 bp, Artificial Sequence
  Synthetic
ggttgctttcuccaataactagatguga

SEQ ID NO: 85418 - DNA, 27 bp, Artificial Sequence
  Synthetic
cacatgtgagucaaattgtucagaaaa

SEQ ID NO: 85419 - DNA, 23 bp, Artificial Sequence
  Synthetic
gcacatcgaucatttccaagucc

SEQ ID NO: 85420 - DNA, 23 bp, Artificial Sequence
  Synthetic
tgtttccuagatacacccuccgt

SEQ ID NO: 85421 - DNA, 27 bp, Artificial Sequence
  Synthetic
tucaatgaggtucccagaagagaaaaa

SEQ ID NO: 85422 - DNA, 18 bp, Artificial Sequence
  Synthetic
ccacgccucccagactua

SEQ ID NO: 85423 - DNA, 18 bp, Artificial Sequence
  Synthetic
gctcggcuggagtctgug

SEQ ID NO: 85424 - DNA, 26 bp, Artificial Sequence
  Synthetic
ctcccaacaaauacctcattcaugga

SEQ ID NO: 85425 - DNA, 28 bp, Artificial Sequence
  Synthetic
agtcagaugaattccctugaacaagaat

SEQ ID NO: 85426 - DNA, 19 bp, Artificial Sequence
  Synthetic
ccctccgucccauagcaaa

SEQ ID NO: 85427 - DNA, 25 bp, Artificial Sequence
  Synthetic
ttatttcacugacaggcaauaccgt

SEQ ID NO: 85428 - DNA, 22 bp, Artificial Sequence
  Synthetic
gugctggtuccaagaaggagag

SEQ ID NO: 85429 - DNA, 21 bp, Artificial Sequence
  Synthetic
ccctgggucctccagtgauag

SEQ ID NO: 85430 - DNA, 25 bp, Artificial Sequence
  Synthetic
gtatccatucccacatgguaagaca

SEQ ID NO: 85431 - DNA, 28 bp, Artificial Sequence
  Synthetic
accaagcugaaacaaaatcaaaaucact

SEQ ID NO: 85432 - DNA, 18 bp, Artificial Sequence
  Synthetic
tctgcaucacccccgtug

SEQ ID NO: 85433 - DNA, 20 bp, Artificial Sequence
  Synthetic
cgggucaagccatcuaacct

SEQ ID NO: 85434 - DNA, 27 bp, Artificial Sequence
  Synthetic
tttcttttucaggccttcatttuccaa

SEQ ID NO: 85435 - DNA, 26 bp, Artificial Sequence
  Synthetic
aagagutgagatttcugacaagcaca

SEQ ID NO: 85436 - DNA, 28 bp, Artificial Sequence
  Synthetic
cttctgcagatuctctacttgacttuca

SEQ ID NO: 85437 - DNA, 28 bp, Artificial Sequence
  Synthetic
actgtttgtugtcttaggttauggagac

SEQ ID NO: 85438 - DNA, 22 bp, Artificial Sequence
  Synthetic
aggaggcagcutcttctcuaca

SEQ ID NO: 85439 - DNA, 29 bp, Artificial Sequence
  Synthetic
ctctgatctctugctatcctttcttacut

SEQ ID NO: 85440 - DNA, 22 bp, Artificial Sequence
  Synthetic
cctgaagcauatgtagcccuga

SEQ ID NO: 85441 - DNA, 24 bp, Artificial Sequence
  Synthetic
gtggtgcttugaacagtgaaugat

SEQ ID NO: 85442 - DNA, 17 bp, Artificial Sequence
  Synthetic
gcuacgccucggaccag

SEQ ID NO: 85443 - DNA, 19 bp, Artificial Sequence
  Synthetic
ccccugggtgaugcaagag

SEQ ID NO: 85444 - DNA, 28 bp, Artificial Sequence
  Synthetic
cgtttuaagaggaaaaagucaggagagt

SEQ ID NO: 85445 - DNA, 20 bp, Artificial Sequence
  Synthetic
ctggatctcugcgctgaugt

SEQ ID NO: 85446 - DNA, 20 bp, Artificial Sequence
  Synthetic
gcttcgacgagutcaaggug

SEQ ID NO: 85447 - DNA, 28 bp, Artificial Sequence
  Synthetic
ccagttttcutttctgtcaaauggagat

SEQ ID NO: 85448 - DNA, 23 bp, Artificial Sequence
  Synthetic
ggatgggugtgtatucaggaact

SEQ ID NO: 85449 - DNA, 25 bp, Artificial Sequence
  Synthetic
aaccacacagguaatcgtctcttuc

SEQ ID NO: 85450 - DNA, 20 bp, Artificial Sequence
  Synthetic
ggctucagcgtccagucaat

SEQ ID NO: 85451 - DNA, 22 bp, Artificial Sequence
  Synthetic
gctatctcccaucacctcugct

SEQ ID NO: 85452 - DNA, 19 bp, Artificial Sequence
  Synthetic
gcagccacagugagcucaa

SEQ ID NO: 85453 - DNA, 17 bp, Artificial Sequence
  Synthetic
gtgcatcugcgcgugaa

SEQ ID NO: 85454 - DNA, 21 bp, Artificial Sequence
  Synthetic
caggagcaggauagtgcctut

SEQ ID NO: 85455 - DNA, 18 bp, Artificial Sequence
  Synthetic
guccacagccuccagcag

SEQ ID NO: 85456 - DNA, 17 bp, Artificial Sequence
  Synthetic
gcgccagguggtagcuc

SEQ ID NO: 85457 - DNA, 18 bp, Artificial Sequence
  Synthetic
gcugcagcacagcaucca

SEQ ID NO: 85458 - DNA, 19 bp, Artificial Sequence
  Synthetic
gcgcgacuacgaggagaug

SEQ ID NO: 85459 - DNA, 20 bp, Artificial Sequence
  Synthetic
aggaaaccgugcatguccag

SEQ ID NO: 85460 - DNA, 24 bp, Artificial Sequence
  Synthetic
tcctacagacutcatcugcagaga

SEQ ID NO: 85461 - DNA, 27 bp, Artificial Sequence
  Synthetic
cataattgttctgguaattgccagcut

SEQ ID NO: 85462 - DNA, 25 bp, Artificial Sequence
  Synthetic
aaaagtgtagugttgagggctucat

SEQ ID NO: 85463 - DNA, 25 bp, Artificial Sequence
  Synthetic
caccugtaccaacuacaacaacaac

SEQ ID NO: 85464 - DNA, 22 bp, Artificial Sequence
  Synthetic
cggcacccutccatctctcuaa

SEQ ID NO: 85465 - DNA, 19 bp, Artificial Sequence
  Synthetic
ccgtgaaugtgguccgact

SEQ ID NO: 85466 - DNA, 20 bp, Artificial Sequence
  Synthetic
tcggtgagucctgtcuggat

SEQ ID NO: 85467 - DNA, 26 bp, Artificial Sequence
  Synthetic
aacatgttatctgucgctcctctuag

SEQ ID NO: 85468 - DNA, 24 bp, Artificial Sequence
  Synthetic
gcttgtctaggaugctgttgtgut

SEQ ID NO: 85469 - DNA, 20 bp, Artificial Sequence
  Synthetic
cagcutcgacuccagcacat

SEQ ID NO: 85470 - DNA, 20 bp, Artificial Sequence
  Synthetic
gaacctgaccucccacugaa

SEQ ID NO: 85471 - DNA, 21 bp, Artificial Sequence
  Synthetic
ctcctcgcgggugtatatguc

SEQ ID NO: 85472 - DNA, 21 bp, Artificial Sequence
  Synthetic
ttugagaggacccacuaccca

SEQ ID NO: 85473 - DNA, 24 bp, Artificial Sequence
  Synthetic
gccatcccaaacutctgaatcuct

SEQ ID NO: 85474 - DNA, 29 bp, Artificial Sequence
  Synthetic
tgatgtttctgugcatatacttgttgtug

SEQ ID NO: 85475 - DNA, 26 bp, Artificial Sequence
  Synthetic
cagctcctggutatactcctaatgut

SEQ ID NO: 85476 - DNA, 26 bp, Artificial Sequence
  Synthetic
gtcctggtgtuttattgtttggctut

SEQ ID NO: 85477 - DNA, 21 bp, Artificial Sequence
  Synthetic
cccacagacugugaacacagg

SEQ ID NO: 85478 - DNA, 22 bp, Artificial Sequence
  Synthetic
ccggcccaaucacaatgattuc

SEQ ID NO: 85479 - DNA, 19 bp, Artificial Sequence
  Synthetic
gttugcacccgtccuggat

SEQ ID NO: 85480 - DNA, 20 bp, Artificial Sequence
  Synthetic
gaggccaugccacuagagat

SEQ ID NO: 85481 - DNA, 21 bp, Artificial Sequence
  Synthetic
cctcaugctggctauccacaa

SEQ ID NO: 85482 - DNA, 21 bp, Artificial Sequence
  Synthetic
tggaggaacutgcccaacuac

SEQ ID NO: 85483 - DNA, 29 bp, Artificial Sequence
  Synthetic
agaggaaaacauggtgattacucaacaaa

SEQ ID NO: 85484 - DNA, 21 bp, Artificial Sequence
  Synthetic
ggcgagaggaacucactctuc

SEQ ID NO: 85485 - DNA, 20 bp, Artificial Sequence
  Synthetic
gccactcugatgcctcctuc

SEQ ID NO: 85486 - DNA, 24 bp, Artificial Sequence
  Synthetic
acaatgaagucgaactcagauccc

SEQ ID NO: 85487 - DNA, 24 bp, Artificial Sequence
  Synthetic
gcaacctgaucttgtgaacaucct

SEQ ID NO: 85488 - DNA, 25 bp, Artificial Sequence
  Synthetic
ccttccaccutcctttcuacagaat

SEQ ID NO: 85489 - DNA, 23 bp, Artificial Sequence
  Synthetic
ccatgtggauaaggtacgtguca

SEQ ID NO: 85490 - DNA, 28 bp, Artificial Sequence
  Synthetic
tgttagttccugaaaacattgacacgua

SEQ ID NO: 85491 - DNA, 24 bp, Artificial Sequence
  Synthetic
agaaccgggaaaacauctccttut

SEQ ID NO: 85492 - DNA, 22 bp, Artificial Sequence
  Synthetic
cttgtgtgaccuttgcccttug

SEQ ID NO: 85493 - DNA, 21 bp, Artificial Sequence
  Synthetic
cacaaacacacccaugagcug

SEQ ID NO: 85494 - DNA, 23 bp, Artificial Sequence
  Synthetic
cctctcagcutcttctctgctut

SEQ ID NO: 85495 - DNA, 24 bp, Artificial Sequence
  Synthetic
ctctcttgauatctggtccauccc

SEQ ID NO: 85496 - DNA, 26 bp, Artificial Sequence
  Synthetic
gacttcaaccutcatgtgatgucaac

SEQ ID NO: 85497 - DNA, 28 bp, Artificial Sequence
  Synthetic
ggatatgcaaautgaacaaacugacact

SEQ ID NO: 85498 - DNA, 24 bp, Artificial Sequence
  Synthetic
agcatgcuaccaactacaaaucat

SEQ ID NO: 85499 - DNA, 28 bp, Artificial Sequence
  Synthetic
cauatgtttgaagtatuggaacgagcaa

SEQ ID NO: 85500 - DNA, 27 bp, Artificial Sequence
  Synthetic
gctttgaaaacauaccgattcatccut

SEQ ID NO: 85501 - DNA, 28 bp, Artificial Sequence
  Synthetic
accacccctuacatttgacataatuagg

SEQ ID NO: 85502 - DNA, 26 bp, Artificial Sequence
  Synthetic
tcagatagtagucaggcaacucagat

SEQ ID NO: 85503 - DNA, 22 bp, Artificial Sequence
  Synthetic
aggaagaguggcatttctccua

SEQ ID NO: 85504 - DNA, 22 bp, Artificial Sequence
  Synthetic
caccactagagugcctcagtut

SEQ ID NO: 85505 - DNA, 19 bp, Artificial Sequence
  Synthetic
caccagccucaugcacaac

SEQ ID NO: 85506 - DNA, 21 bp, Artificial Sequence
  Synthetic
gctcaagggcutaccactgua

SEQ ID NO: 85507 - DNA, 17 bp, Artificial Sequence
  Synthetic
ggcuccccctgaugcac

SEQ ID NO: 85508 - DNA, 29 bp, Artificial Sequence
  Synthetic
gctgcattggagucatgtattttgattut

SEQ ID NO: 85509 - DNA, 26 bp, Artificial Sequence
  Synthetic
caaattacttggaaucgtcccttgug

SEQ ID NO: 85510 - DNA, 28 bp, Artificial Sequence
  Synthetic
gacggtagcgautattttcaacattcut

SEQ ID NO: 85511 - DNA, 25 bp, Artificial Sequence
  Synthetic
tttgtgtcagucatgagtcaucagg

SEQ ID NO: 85512 - DNA, 21 bp, Artificial Sequence
  Synthetic
cggtgtcuccttggttgucat

SEQ ID NO: 85513 - DNA, 22 bp, Artificial Sequence
  Synthetic
cctggtgtgucaatcactguca

SEQ ID NO: 85514 - DNA, 19 bp, Artificial Sequence
  Synthetic
gctggcccagcaugtcuac

SEQ ID NO: 85515 - DNA, 18 bp, Artificial Sequence
  Synthetic
gtgtgcacucagcagcuc

SEQ ID NO: 85516 - DNA, 25 bp, Artificial Sequence
  Synthetic
tggtttucaactctgtatucagcca

SEQ ID NO: 85517 - DNA, 22 bp, Artificial Sequence
  Synthetic
ctgcttgtgucccttagcuaca

SEQ ID NO: 85518 - DNA, 18 bp, Artificial Sequence
  Synthetic
tcctcacccugccctuct

SEQ ID NO: 85519 - DNA, 22 bp, Artificial Sequence
  Synthetic
gagcucagaaagcugaggaagt

SEQ ID NO: 85520 - DNA, 22 bp, Artificial Sequence
  Synthetic
gcagactgcugtgttctttgug

SEQ ID NO: 85521 - DNA, 23 bp, Artificial Sequence
  Synthetic
cagctgucagcacttactgctua

SEQ ID NO: 85522 - DNA, 23 bp, Artificial Sequence
  Synthetic
gctgtagcaucttccctcaucat

SEQ ID NO: 85523 - DNA, 25 bp, Artificial Sequence
  Synthetic
tgctcttgttcuacacaaagtccug

SEQ ID NO: 85524 - DNA, 20 bp, Artificial Sequence
  Synthetic
gagaaaggcguccggaugaa

SEQ ID NO: 85525 - DNA, 21 bp, Artificial Sequence
  Synthetic
ggaaacctcuagggctgacuc

SEQ ID NO: 85526 - DNA, 21 bp, Artificial Sequence
  Synthetic
catctacuccaaggccgtguc

SEQ ID NO: 85527 - DNA, 24 bp, Artificial Sequence
  Synthetic
ggaatucccacagcctgttaaugt

SEQ ID NO: 85528 - DNA, 22 bp, Artificial Sequence
  Synthetic
ccctacacaacgugagctucat

SEQ ID NO: 85529 - DNA, 22 bp, Artificial Sequence
  Synthetic
ccutcaaagtaggugcccagag

SEQ ID NO: 85530 - DNA, 24 bp, Artificial Sequence
  Synthetic
gcttaagcauaaccctgtcgttua

SEQ ID NO: 85531 - DNA, 27 bp, Artificial Sequence
  Synthetic
acaatttcattgugtaggcgaaucaag

SEQ ID NO: 85532 - DNA, 19 bp, Artificial Sequence
  Synthetic
cccagccugcttucaacct

SEQ ID NO: 85533 - DNA, 20 bp, Artificial Sequence
  Synthetic
ccagagacuccaagctgguc

SEQ ID NO: 85534 - DNA, 21 bp, Artificial Sequence
  Synthetic
cctggccucccaaacttctuc

SEQ ID NO: 85535 - DNA, 21 bp, Artificial Sequence
  Synthetic
gctcatgttuctcgccaggua

SEQ ID NO: 85536 - DNA, 28 bp, Artificial Sequence
  Synthetic
gaatcttcaccuctctgggatattucac

SEQ ID NO: 85537 - DNA, 28 bp, Artificial Sequence
  Synthetic
gcttttccaagautcactggttttugat

SEQ ID NO: 85538 - DNA, 20 bp, Artificial Sequence
  Synthetic
cucaagaaccuggcccagac

SEQ ID NO: 85539 - DNA, 21 bp, Artificial Sequence
  Synthetic
aaagcacugcaggctacugaa

SEQ ID NO: 85540 - DNA, 21 bp, Artificial Sequence
  Synthetic
ccaggtcuctgcgtgttucaa

SEQ ID NO: 85541 - DNA, 27 bp, Artificial Sequence
  Synthetic
gccaacaaguaccaagatattgacuct

SEQ ID NO: 85542 - DNA, 28 bp, Artificial Sequence
  Synthetic
acaggaagaatcuagctaaaggctttut

SEQ ID NO: 85543 - DNA, 27 bp, Artificial Sequence
  Synthetic
gucaagaagcatuagaagaagcaaagg

SEQ ID NO: 85544 - DNA, 22 bp, Artificial Sequence
  Synthetic
ttcagatggcuttcatcgucca

SEQ ID NO: 85545 - DNA, 28 bp, Artificial Sequence
  Synthetic
cttgagctgttuctgcctttatttucat

SEQ ID NO: 85546 - DNA, 21 bp, Artificial Sequence
  Synthetic
ctcggtttucctgtcggacut

SEQ ID NO: 85547 - DNA, 29 bp, Artificial Sequence
  Synthetic
tctttggtacctutggatttgacagtuat

SEQ ID NO: 85548 - DNA, 19 bp, Artificial Sequence
  Synthetic
cagacgcugggctaucgaa

SEQ ID NO: 85549 - DNA, 20 bp, Artificial Sequence
  Synthetic
tccagggaccutggtaggug

SEQ ID NO: 85550 - DNA, 28 bp, Artificial Sequence
  Synthetic
gtgccttgaaauccagtcaattgtaaua

SEQ ID NO: 85551 - DNA, 28 bp, Artificial Sequence
  Synthetic
gggattacaaaugagaagtgcaguaaac

SEQ ID NO: 85552 - DNA, 20 bp, Artificial Sequence
  Synthetic
cgcgatcucgctaccgttua

SEQ ID NO: 85553 - DNA, 17 bp, Artificial Sequence
  Synthetic
gctgugcggctttggug

SEQ ID NO: 85554 - DNA, 28 bp, Artificial Sequence
  Synthetic
aacaaagaaagaugtttcacctucaacc

SEQ ID NO: 85555 - DNA, 25 bp, Artificial Sequence
  Synthetic
atcttccttccugtggtcttuacac

SEQ ID NO: 85556 - DNA, 20 bp, Artificial Sequence
  Synthetic
gctaccgcuctcgtcagcua

SEQ ID NO: 85557 - DNA, 20 bp, Artificial Sequence
  Synthetic
actgggctuagggactcugg

SEQ ID NO: 85558 - DNA, 21 bp, Artificial Sequence
  Synthetic
gtcagttucactgcccugagt

SEQ ID NO: 85559 - DNA, 20 bp, Artificial Sequence
  Synthetic
ccaguacgatguggacgagt

SEQ ID NO: 85560 - DNA, 21 bp, Artificial Sequence
  Synthetic
cactuggcaccattctugcag

SEQ ID NO: 85561 - DNA, 21 bp, Artificial Sequence
  Synthetic
ctgaagggccauagtgctgut

SEQ ID NO: 85562 - DNA, 33 bp, Artificial Sequence
  Synthetic
tatcatatatgctuacacgatttcggtatcuaa

SEQ ID NO: 85563 - DNA, 28 bp, Artificial Sequence
  Synthetic
ggacgtagguacaagactcaataugaag

SEQ ID NO: 85564 - DNA, 28 bp, Artificial Sequence
  Synthetic
tcttcaaaataccutatcctgttgugct

SEQ ID NO: 85565 - DNA, 26 bp, Artificial Sequence
  Synthetic
aggaaaccauccagaaggactuagat

SEQ ID NO: 85566 - DNA, 25 bp, Artificial Sequence
  Synthetic
acatcaugacaaagtccucaaccat

SEQ ID NO: 85567 - DNA, 25 bp, Artificial Sequence
  Synthetic
gccatatttcugaggcttccctcua

SEQ ID NO: 85568 - DNA, 28 bp, Artificial Sequence
  Synthetic
gagtcttgtaccuacgtccaattttcut

SEQ ID NO: 85569 - DNA, 28 bp, Artificial Sequence
  Synthetic
tgcatctttgacuaacaaccagaactua

SEQ ID NO: 85570 - DNA, 28 bp, Artificial Sequence
  Synthetic
tggatggtttccutttcagttcttacut

SEQ ID NO: 85571 - DNA, 30 bp, Artificial Sequence
  Synthetic
attggacttcaaacuttgaaaaatgtcuca

SEQ ID NO: 85572 - DNA, 17 bp, Artificial Sequence
  Synthetic
cctccgcguctggacuc

SEQ ID NO: 85573 - DNA, 20 bp, Artificial Sequence
  Synthetic
gaacugcgcagccagaaauc

SEQ ID NO: 85574 - DNA, 27 bp, Artificial Sequence
  Synthetic
gctgatttagtugagacttacgtgcut

SEQ ID NO: 85575 - DNA, 28 bp, Artificial Sequence
  Synthetic
gggaatcgacgaaguaaatcttcttgua

SEQ ID NO: 85576 - DNA, 20 bp, Artificial Sequence
  Synthetic
ctctcacccucctcctccuc

SEQ ID NO: 85577 - DNA, 17 bp, Artificial Sequence
  Synthetic
tgcgucacucgcgaagt

SEQ ID NO: 85578 - DNA, 24 bp, Artificial Sequence
  Synthetic
gggaactagaaaagucccctcuca

SEQ ID NO: 85579 - DNA, 26 bp, Artificial Sequence
  Synthetic
ccttattaccccuacttgcacuagag

SEQ ID NO: 85580 - DNA, 21 bp, Artificial Sequence
  Synthetic
ggctcgauacgtcttcuccaa

SEQ ID NO: 85581 - DNA, 19 bp, Artificial Sequence
  Synthetic
ccaggtuttggtccugcca

SEQ ID NO: 85582 - DNA, 21 bp, Artificial Sequence
  Synthetic
ggtgagcaagucagcattugg

SEQ ID NO: 85583 - DNA, 22 bp, Artificial Sequence
  Synthetic
agaaaatgaccugggcctgtut

SEQ ID NO: 85584 - DNA, 24 bp, Artificial Sequence
  Synthetic
aagatgcagaautgaggcagacut

SEQ ID NO: 85585 - DNA, 28 bp, Artificial Sequence
  Synthetic
agttgatttauaccctgatagagucggt

SEQ ID NO: 85586 - DNA, 28 bp, Artificial Sequence
  Synthetic
tggatgaagaagaucaactgaagttucc

SEQ ID NO: 85587 - DNA, 23 bp, Artificial Sequence
  Synthetic
gccaucacaacatgcaucagaga

SEQ ID NO: 85588 - DNA, 19 bp, Artificial Sequence
  Synthetic
tgtgggcgagutcctccua

SEQ ID NO: 85589 - DNA, 21 bp, Artificial Sequence
  Synthetic
gaggaaaggaaggugcaguca

SEQ ID NO: 85590 - DNA, 24 bp, Artificial Sequence
  Synthetic
tgatactcctcugtctgccaguag

SEQ ID NO: 85591 - DNA, 22 bp, Artificial Sequence
  Synthetic
ctgaggaacuggatgccttugt

SEQ ID NO: 85592 - DNA, 27 bp, Artificial Sequence
  Synthetic
gacaagcagcaaacutacaagattgut

SEQ ID NO: 85593 - DNA, 28 bp, Artificial Sequence
  Synthetic
ggacagcacatugccaagtatatatugt

SEQ ID NO: 85594 - DNA, 31 bp, Artificial Sequence; identical to SEQ ID NO: 70434
  Synthetic

SEQ ID NO: 85595 - DNA, 20 bp, Artificial Sequence
  Synthetic
aggctggaaugcaagcucat

SEQ ID NO: 85596 - DNA, 24 bp, Artificial Sequence
  Synthetic
tcttttcttuagggcctgtucaca

SEQ ID NO: 85597 - DNA, 27 bp, Artificial Sequence
  Synthetic
gtgcgtttcaaucaccactaaaucaat

SEQ ID NO: 85598 - DNA, 28 bp, Artificial Sequence
  Synthetic
aacagaacttacuactgagactuggaga

SEQ ID NO: 85599 - DNA, 24 bp, Artificial Sequence
  Synthetic
cctgagtgugacatgttctcucat

SEQ ID NO: 85600 - DNA, 26 bp, Artificial Sequence
  Synthetic
agtctgtctutactacactgucccaa

SEQ ID NO: 85601 - DNA, 24 bp, Artificial Sequence
  Synthetic
ggacttccagucttctcgatacug

SEQ ID NO: 85602 - DNA, 22 bp, Artificial Sequence
  Synthetic
gtuctagcactcugaccagcaa

SEQ ID NO: 85603 - DNA, 22 bp, Artificial Sequence
  Synthetic
tcactcaucctcatcucgaggt

SEQ ID NO: 85604 - DNA, 33 bp, Artificial Sequence; identical to SEQ ID NO: 59000
  Synthetic

SEQ ID NO: 85605 - DNA, 28 bp, Artificial Sequence
  Synthetic
acctgaacagtautctggagttacguat

SEQ ID NO: 85606 - DNA, 29 bp, Artificial Sequence
  Synthetic
tgtttttacagagguaaataccggatugt

SEQ ID NO: 85607 - DNA, 26 bp, Artificial Sequence
  Synthetic
ccagtgtccauccataggtttaacut

SEQ ID NO: 85608 - DNA, 22 bp, Artificial Sequence
  Synthetic
cuaaagggacagcctuggagaa

SEQ ID NO: 85609 - DNA, 22 bp, Artificial Sequence
  Synthetic
aggtgaaggcccuaaggaguag

SEQ ID NO: 85610 - DNA, 26 bp, Artificial Sequence
  Synthetic
gcatctgtaucaggcaaagtcauaga

SEQ ID NO: 85611 - DNA, 29 bp, Artificial Sequence
  Synthetic
gtagctaactaacutcagaacaccaacut

SEQ ID NO: 85612 - DNA, 22 bp, Artificial Sequence
  Synthetic
ccagctggaguttggtcatgut

SEQ ID NO: 85613 - DNA, 23 bp, Artificial Sequence
  Synthetic
ctgacuggcaattgtgucaacag

SEQ ID NO: 85614 - DNA, 21 bp, Artificial Sequence
  Synthetic
tgggaacaaugtcatcagugg

SEQ ID NO: 85615 - DNA, 21 bp, Artificial Sequence
  Synthetic
atccugaccacctugcaagag

SEQ ID NO: 85616 - DNA, 21 bp, Artificial Sequence
  Synthetic
gctcagaugacagccggtuct

SEQ ID NO: 85617 - DNA, 23 bp, Artificial Sequence
  Synthetic
gaaccaagutctuccgagggaat

SEQ ID NO: 85618 - DNA, 18 bp, Artificial Sequence
  Synthetic
agctctgugccctgtgug

SEQ ID NO: 85619 - DNA, 17 bp, Artificial Sequence
  Synthetic
agcacguccagcaccut

SEQ ID NO: 85620 - DNA, 21 bp, Artificial Sequence
  Synthetic
gcaacccutgccuaggaagaa

SEQ ID NO: 85621 - DNA, 23 bp, Artificial Sequence
  Synthetic
ctgaagcggcauctcctgaaaua

SEQ ID NO: 85622 - DNA, 25 bp, Artificial Sequence
  Synthetic
gttcagattuaagcctgaggagcut

SEQ ID NO: 85623 - DNA, 27 bp, Artificial Sequence
  Synthetic
ccactgtgtttuctcctccattttuag

SEQ ID NO: 85624 - DNA, 21 bp, Artificial Sequence
  Synthetic
tgtguggacaagauccggaac

SEQ ID NO: 85625 - DNA, 26 bp, Artificial Sequence
  Synthetic
tccctttgtuaagctcaacacuagac

SEQ ID NO: 85626 - DNA, 22 bp, Artificial Sequence
  Synthetic
ctgcugcagaaggaaagcatut

SEQ ID NO: 85627 - DNA, 27 bp, Artificial Sequence
  Synthetic
gatggagggaguagaactggtaauact

SEQ ID NO: 85628 - DNA, 28 bp, Artificial Sequence
  Synthetic
tgcataactgaacugtaagccaagauat

SEQ ID NO: 85629 - DNA, 24 bp, Artificial Sequence
  Synthetic
agcaggaaaaacccutgttagcut

SEQ ID NO: 85630 - DNA, 25 bp, Artificial Sequence
  Synthetic
cagtcucaaagtctguaaccccaat

SEQ ID NO: 85631 - DNA, 23 bp, Artificial Sequence
  Synthetic
ctggaacugcttcactagauccc

SEQ ID NO: 85632 - DNA, 28 bp, Artificial Sequence
  Synthetic
gcutaatgtttgaaatucacggaagaga

SEQ ID NO: 85633 - DNA, 25 bp, Artificial Sequence
  Synthetic
gtaacaatautgcatgcuccagagg

SEQ ID NO: 85634 - DNA, 20 bp, Artificial Sequence
  Synthetic
tctcgggauagatggccuca

SEQ ID NO: 85635 - DNA, 26 bp, Artificial Sequence
  Synthetic
aataacatgcucaaccttgtctguct

SEQ ID NO: 85636 - DNA, 23 bp, Artificial Sequence
  Synthetic
tcagccatuaccttgtcatgugg

SEQ ID NO: 85637 - DNA, 28 bp, Artificial Sequence
  Synthetic
agtatcatccatugcccttttcttgaut

SEQ ID NO: 85638 - DNA, 26 bp, Artificial Sequence
  Synthetic
gtctacatguccattcctuacagcat

SEQ ID NO: 85639 - DNA, 21 bp, Artificial Sequence
  Synthetic
gacattttuggccgtctguca

SEQ ID NO: 85640 - DNA, 22 bp, Artificial Sequence
  Synthetic
ggcagacaacuactgaauccca

SEQ ID NO: 85641 - DNA, 28 bp, Artificial Sequence
  Synthetic
ggactggataugcacattttguagagat

SEQ ID NO: 85642 - DNA, 28 bp, Artificial Sequence
  Synthetic
tctactttgugacaaagtucagaaaggt

SEQ ID NO: 85643 - DNA, 24 bp, Artificial Sequence
  Synthetic
gctucccaatcgtucaacacaaaa

SEQ ID NO: 85644 - DNA, 28 bp, Artificial Sequence
  Synthetic
catagaagtucgttttgtgtugaacgat

SEQ ID NO: 85645 - DNA, 20 bp, Artificial Sequence
  Synthetic
ggtcuccgcaactgcattut

SEQ ID NO: 85646 - DNA, 28 bp, Artificial Sequence
  Synthetic
ttttcactgcauatggtctatgtgugat

SEQ ID NO: 85647 - DNA, 23 bp, Artificial Sequence
  Synthetic
cccttgaugagctcagggttuag

SEQ ID NO: 85648 - DNA, 23 bp, Artificial Sequence
  Synthetic
acataggaggauccaaaguggga

SEQ ID NO: 85649 - DNA, 23 bp, Artificial Sequence
  Synthetic
gcaggtaccuttcagcatctuca

SEQ ID NO: 85650 - DNA, 22 bp, Artificial Sequence
  Synthetic
gctcctgaguattggtgtucca

SEQ ID NO: 85651 - DNA, 22 bp, Artificial Sequence
  Synthetic
cccaaacaaaagcgauctccuc

SEQ ID NO: 85652 - DNA, 21 bp, Artificial Sequence
  Synthetic
cagcaccgauggcagaaagua

SEQ ID NO: 85653 - DNA, 27 bp, Artificial Sequence
  Synthetic
ccattttaccugcttcctcaaauagga

SEQ ID NO: 85654 - DNA, 28 bp, Artificial Sequence
  Synthetic
gcacatcctgauctcattgattgatcug

SEQ ID NO: 85655 - DNA, 27 bp, Artificial Sequence
  Synthetic
cattcagtggtautcctagtgacacut

SEQ ID NO: 85656 - DNA, 22 bp, Artificial Sequence
  Synthetic
cutccatcugaaaggcagagca

SEQ ID NO: 85657 - DNA, 20 bp, Artificial Sequence
  Synthetic
agccgctcuagaacagcaut

SEQ ID NO: 85658 - DNA, 23 bp, Artificial Sequence
  Synthetic
gctaucacagaacccguaacagt

SEQ ID NO: 85659 - DNA, 28 bp, Artificial Sequence
  Synthetic
caagaagatgttatuagcaggaccacut

SEQ ID NO: 85660 - DNA, 22 bp, Artificial Sequence
  Synthetic
cctgagautttggcctugcaaa

SEQ ID NO: 85661 - DNA, 22 bp, Artificial Sequence
  Synthetic
gatccttucgaaccgccaaaug

SEQ ID NO: 85662 - DNA, 29 bp, Artificial Sequence
  Synthetic
caatcatattcaacutctggcttuccaat

SEQ ID NO: 85663 - DNA, 21 bp, Artificial Sequence
  Synthetic
cccaguccagggaagtagcut

SEQ ID NO: 85664 - DNA, 21 bp, Artificial Sequence
  Synthetic
tggtttctucaggcaccauga

SEQ ID NO: 85665 - DNA, 24 bp, Artificial Sequence
  Synthetic
cgtttcctguttgaccttttcucc

SEQ ID NO: 85666 - DNA, 24 bp, Artificial Sequence
  Synthetic
acttgcauggactgtgttatuggt

SEQ ID NO: 85667 - DNA, 22 bp, Artificial Sequence
  Synthetic
gagctagttcugtccactgguc

SEQ ID NO: 85668 - DNA, 22 bp, Artificial Sequence
  Synthetic
gctggaccaguggacagaacua

SEQ ID NO: 85669 - DNA, 28 bp, Artificial Sequence
  Synthetic
tccacagaactuataaaaacctttgugt

SEQ ID NO: 85670 - DNA, 24 bp, Artificial Sequence
  Synthetic
aacaccaaggaaaaugagggacut

SEQ ID NO: 85671 - DNA, 28 bp, Artificial Sequence
  Synthetic
agtuctaaaaacttgatuaccgcagaca

SEQ ID NO: 85672 - DNA, 22 bp, Artificial Sequence
  Synthetic
gtctacgagcucccatucaaca

SEQ ID NO: 85673 - DNA, 20 bp, Artificial Sequence
  Synthetic
gaaaccugcccagaggaguc

SEQ ID NO: 85674 - DNA, 28 bp, Artificial Sequence
  Synthetic
actagaacttgtutgtggcatatctuca

SEQ ID NO: 85675 - DNA, 28 bp, Artificial Sequence
  Synthetic
ttgttgatgttcautcttccttctucct

SEQ ID NO: 85676 - DNA, 22 bp, Artificial Sequence
  Synthetic
acctgccaccgutttcctttua

SEQ ID NO: 85677 - DNA, 28 bp, Artificial Sequence
  Synthetic
caccatgatgaaugggatatgtauccat

SEQ ID NO: 85678 - DNA, 26 bp, Artificial Sequence
  Synthetic
tttaggttgcaguttcatcactguct

SEQ ID NO: 85679 - DNA, 25 bp, Artificial Sequence
  Synthetic
gctctgactgcugcaatatccaaut

SEQ ID NO: 85680 - DNA, 24 bp, Artificial Sequence
  Synthetic
tcaaaatttcccugtctgccgtua

SEQ ID NO: 85681 - DNA, 28 bp, Artificial Sequence
  Synthetic
tcctttttgcgutctcattacagtauga

SEQ ID NO: 85682 - DNA, 25 bp, Artificial Sequence
  Synthetic
tcactgtcugcggtaatcaagttut

SEQ ID NO: 85683 - DNA, 24 bp, Artificial Sequence
  Synthetic
acctgaaaaaggutaagggctcug

SEQ ID NO: 85684 - DNA, 26 bp, Artificial Sequence
  Synthetic
tgaaattggauattgcagcagucaga

SEQ ID NO: 85685 - DNA, 31 bp, Artificial Sequence; identical to SEQ ID NO: 52781
  Synthetic

SEQ ID NO: 85686 - DNA, 22 bp, Artificial Sequence
  Synthetic
gcattcugagggctgtcatcut

SEQ ID NO: 85687 - DNA, 22 bp, Artificial Sequence
  Synthetic
cgaactttcuccctggucacac

SEQ ID NO: 85688 - DNA, 22 bp, Artificial Sequence
  Synthetic
gctcatugcggaagttcctcut

SEQ ID NO: 85689 - DNA, 18 bp, Artificial Sequence
  Synthetic
gtcgcuggttctcguggt

SEQ ID NO: 85690 - DNA, 21 bp, Artificial Sequence
  Synthetic
ggutttccgaugaccaggact

SEQ ID NO: 85691 - DNA, 21 bp, Artificial Sequence
  Synthetic
agatagugcccctggaagugt

SEQ ID NO: 85692 - DNA, 27 bp, Artificial Sequence
  Synthetic
attccttctcucaactgagtcuaaacc

SEQ ID NO: 85693 - DNA, 24 bp, Artificial Sequence
  Synthetic
ccacaccaggacucatacagguaa

SEQ ID NO: 85694 - DNA, 20 bp, Artificial Sequence
  Synthetic
gaggctccaucgctgaagua

SEQ ID NO: 85695 - DNA, 22 bp, Artificial Sequence
  Synthetic
cacagacaaggagcucagugac

SEQ ID NO: 85696 - DNA, 20 bp, Artificial Sequence
  Synthetic
ctcccugaggctgagugaac

SEQ ID NO: 85697 - DNA, 23 bp, Artificial Sequence
  Synthetic
gtggagcaaacaaugacgaugac

SEQ ID NO: 85698 - DNA, 18 bp, Artificial Sequence
  Synthetic
tccacccuccuccaggac

SEQ ID NO: 85699 - DNA, 23 bp, Artificial Sequence
  Synthetic
ggagaugauggagagggaaagga

SEQ ID NO: 85700 - DNA, 19 bp, Artificial Sequence
  Synthetic
tctccactucaccccguca

SEQ ID NO: 85701 - DNA, 25 bp, Artificial Sequence
  Synthetic
ggttaaggugaactggttctcauct

SEQ ID NO: 85702 - DNA, 28 bp, Artificial Sequence
  Synthetic
gcagcctaaaacauagaaagtcactuct

SEQ ID NO: 85703 - DNA, 21 bp, Artificial Sequence
  Synthetic
gctgcttgccuccattagtug

SEQ ID NO: 85704 - DNA, 23 bp, Artificial Sequence
  Synthetic
actgggtauggtggtttctcuca

SEQ ID NO: 85705 - DNA, 21 bp, Artificial Sequence
  Synthetic
gacagagcuccaagaggugac

SEQ ID NO: 85706 - DNA, 19 bp, Artificial Sequence
  Synthetic
gggcttgguaacgtccugt

SEQ ID NO: 85707 - DNA, 18 bp, Artificial Sequence
  Synthetic
ctccaugcccctcacuca

SEQ ID NO: 85708 - DNA, 27 bp, Artificial Sequence
  Synthetic
caugctgtattcauggaaaaccaagat

SEQ ID NO: 85709 - DNA, 27 bp, Artificial Sequence
  Synthetic
ggaaagctautgcagagaucaagaaaa

SEQ ID NO: 85710 - DNA, 24 bp, Artificial Sequence
  Synthetic
aacaacaggautctcagggaaugg

SEQ ID NO: 85711 - DNA, 20 bp, Artificial Sequence
  Synthetic
tctccgugcagucggaaaaa

SEQ ID NO: 85712 - DNA, 22 bp, Artificial Sequence
  Synthetic
agttcguggacatcttucagca

SEQ ID NO: 85713 - DNA, 26 bp, Artificial Sequence
  Synthetic
ctgaccctuagccagtatcuaaacat

SEQ ID NO: 85714 - DNA, 21 bp, Artificial Sequence
  Synthetic
caccaugctgaaguccaggag

SEQ ID NO: 85715 - DNA, 21 bp, Artificial Sequence
  Synthetic
aactcttcucccctccctgut

SEQ ID NO: 85716 - DNA, 28 bp, Artificial Sequence
  Synthetic
acttcttcaaaaguctccaggttttcut

SEQ ID NO: 85717 - DNA, 25 bp, Artificial Sequence
  Synthetic
ctcttctcaacgggutccttttcua

SEQ ID NO: 85718 - DNA, 22 bp, Artificial Sequence
  Synthetic
catagcctuggcccatgtgaua

SEQ ID NO: 85719 - DNA, 23 bp, Artificial Sequence
  Synthetic
gatgctgctuacaaaaggagcug

SEQ ID NO: 85720 - DNA, 27 bp, Artificial Sequence
  Synthetic
ctttcttctccutataggttgccauca

SEQ ID NO: 85721 - DNA, 24 bp, Artificial Sequence
  Synthetic
ggaaggagttucacccaagatugt

SEQ ID NO: 85722 - DNA, 28 bp, Artificial Sequence
  Synthetic
aatgtgaagaaaaguttacgcacttgut

SEQ ID NO: 85723 - DNA, 25 bp, Artificial Sequence
  Synthetic
ggctagacctuctctgtccattuag

SEQ ID NO: 85724 - DNA, 28 bp, Artificial Sequence
  Synthetic
ggtcatttagaaaguttgtcagtccugt

SEQ ID NO: 85725 - DNA, 22 bp, Artificial Sequence
  Synthetic
cggtccugaagaaatgcugaga

SEQ ID NO: 85726 - DNA, 28 bp, Artificial Sequence
  Synthetic
agatgugagaccgaaagaaattauccag

SEQ ID NO: 85727 - DNA, 20 bp, Artificial Sequence
  Synthetic
actacaaggccuccctccut

SEQ ID NO: 85728 - DNA, 27 bp, Artificial Sequence
  Synthetic
tgttggaugcaaacagtaatattugga

SEQ ID NO: 85729 - DNA, 25 bp, Artificial Sequence
  Synthetic
ctgtttttcucagccttgctuaact

SEQ ID NO: 85730 - DNA, 25 bp, Artificial Sequence
  Synthetic
tgacuaggaacgtgagtuaagcaag

SEQ ID NO: 85731 - DNA, 21 bp, Artificial Sequence
  Synthetic
actgctccauctcctggucaa

SEQ ID NO: 85732 - DNA, 19 bp, Artificial Sequence
  Synthetic
actcacccgcuttctcgut

SEQ ID NO: 85733 - DNA, 19 bp, Artificial Sequence
  Synthetic
gcccugcacgaactccauc

SEQ ID NO: 85734 - DNA, 20 bp, Artificial Sequence
  Synthetic
gtgcttcugacgcacaccua

SEQ ID NO: 85735 - DNA, 21 bp, Artificial Sequence
  Synthetic
gtucaagacagaagggccuga

SEQ ID NO: 85736 - DNA, 26 bp, Artificial Sequence
  Synthetic
tggctgttgttugatattctctccut

SEQ ID NO: 85737 - DNA, 21 bp, Artificial Sequence
  Synthetic
acutagtctcugggacgccat

SEQ ID NO: 85738 - DNA, 21 bp, Artificial Sequence
  Synthetic
cagcctccutctgtgagaugt

SEQ ID NO: 85739 - DNA, 20 bp, Artificial Sequence
  Synthetic
cccaggtuccagaggatugg

SEQ ID NO: 85740 - DNA, 23 bp, Artificial Sequence
  Synthetic
ttgagaaaggcugtgtgucagat

SEQ ID NO: 85741 - DNA, 21 bp, Artificial Sequence
  Synthetic
cctgcagaagcucttccugag

SEQ ID NO: 85742 - DNA, 17 bp, Artificial Sequence
  Synthetic
accgggugtacctggug

SEQ ID NO: 85743 - DNA, 21 bp, Artificial Sequence
  Synthetic
ttctcaccugctgctugacaa

SEQ ID NO: 85744 - DNA, 28 bp, Artificial Sequence
  Synthetic
tcaactcacuaacaagcatctatuagcc

SEQ ID NO: 85745 - DNA, 26 bp, Artificial Sequence
  Synthetic
gatcatcttcuagaggtggagcaauc

SEQ ID NO: 85746 - DNA, 23 bp, Artificial Sequence
  Synthetic
cttagacaggacccugcguaaac

SEQ ID NO: 85747 - DNA, 27 bp, Artificial Sequence
  Synthetic
gtgcaagguaggctattttaaguacca

SEQ ID NO: 85748 - DNA, 24 bp, Artificial Sequence
  Synthetic
cttctctgcgguttgaaagtacug

SEQ ID NO: 85749 - DNA, 27 bp, Artificial Sequence
  Synthetic
acaacttgcaaugagtatgcacattut

SEQ ID NO: 85750 - DNA, 24 bp, Artificial Sequence
  Synthetic
agacctcatucctctgtcttcuca

SEQ ID NO: 85751 - DNA, 20 bp, Artificial Sequence
  Synthetic
tccagguccagatccaccut

SEQ ID NO: 85752 - DNA, 21 bp, Artificial Sequence
  Synthetic
cagtggucagacctgctcaua

SEQ ID NO: 85753 - DNA, 25 bp, Artificial Sequence
  Synthetic
guaaagatggcuagagcccagaaag

SEQ ID NO: 85754 - DNA, 25 bp, Artificial Sequence
  Synthetic
tgtgtcaaggagutcgaagatucac

SEQ ID NO: 85755 - DNA, 24 bp, Artificial Sequence
  Synthetic
attgaaaatcutcctgcctuccct

SEQ ID NO: 85756 - DNA, 29 bp, Artificial Sequence
  Synthetic
ccaatctccctautttctcaagcattuct

SEQ ID NO: 85757 - DNA, 24 bp, Artificial Sequence
  Synthetic
ggagaagugactgatctgtugcat

SEQ ID NO: 85758 - DNA, 27 bp, Artificial Sequence
  Synthetic
ttcggaaatugaagaaatctgccuagt

SEQ ID NO: 85759 - DNA, 20 bp, Artificial Sequence
  Synthetic
gcggguccggatatgaauga

SEQ ID NO: 85760 - DNA, 26 bp, Artificial Sequence
  Synthetic
caagaagtggagaaugtcagtcugag

SEQ ID NO: 85761 - DNA, 23 bp, Artificial Sequence
  Synthetic
cagaccctcucactcatgtgaug

SEQ ID NO: 85762 - DNA, 24 bp, Artificial Sequence
  Synthetic
cagaagaggauaggcagaaacuca

SEQ ID NO: 85763 - DNA, 22 bp, Artificial Sequence
  Synthetic
agtgatgaugggactcagggut

SEQ ID NO: 85764 - DNA, 23 bp, Artificial Sequence
  Synthetic
ctgggauggagggaagauaaacc

SEQ ID NO: 85765 - DNA, 22 bp, Artificial Sequence
  Synthetic
gcctatcatguggcagctcuac

SEQ ID NO: 85766 - DNA, 26 bp, Artificial Sequence
  Synthetic
ctggtgtttuaggaccattctgttug

SEQ ID NO: 85767 - DNA, 24 bp, Artificial Sequence
  Synthetic
tcaatgattcugactccggcatut

SEQ ID NO: 85768 - DNA, 22 bp, Artificial Sequence
  Synthetic
agacgcagagucagttttuccc

SEQ ID NO: 85769 - DNA, 28 bp, Artificial Sequence
  Synthetic
aataccaacacaaacutgtacacccuat

SEQ ID NO: 85770 - DNA, 26 bp, Artificial Sequence
  Synthetic
gcctttttataugagccaacaacuca

SEQ ID NO: 85771 - DNA, 25 bp, Artificial Sequence
  Synthetic
gagacctaaaagautgcccactcut

SEQ ID NO: 85772 - DNA, 21 bp, Artificial Sequence
  Synthetic
gaactgaggugacatgggcut

SEQ ID NO: 85773 - DNA, 19 bp, Artificial Sequence
  Synthetic
ctgtgucgggacccctuac

SEQ ID NO: 85774 - DNA, 22 bp, Artificial Sequence
  Synthetic
agtgtugagcaaaagccgagua

SEQ ID NO: 85775 - DNA, 27 bp, Artificial Sequence
  Synthetic
tctcatcgagauattaagcgaaugcag

SEQ ID NO: 85776 - DNA, 21 bp, Artificial Sequence
  Synthetic
tgtactgagcaugaccccugt

SEQ ID NO: 85777 - DNA, 26 bp, Artificial Sequence
  Synthetic
agcaggagguttatctgacatttugg

SEQ ID NO: 85778 - DNA, 23 bp, Artificial Sequence
  Synthetic
gtgtgaagccautgtccagtcua

SEQ ID NO: 85779 - DNA, 21 bp, Artificial Sequence
  Synthetic
acctaccguaaactcggguca

SEQ ID NO: 85780 - DNA, 20 bp, Artificial Sequence
  Synthetic
gccagcaacuacctgcacut

SEQ ID NO: 85781 - DNA, 20 bp, Artificial Sequence
  Synthetic
gtctguccagccactauggg

SEQ ID NO: 85782 - DNA, 24 bp, Artificial Sequence
  Synthetic
ggttatctggaautcccacgguaa

SEQ ID NO: 85783 - DNA, 24 bp, Artificial Sequence
  Synthetic
caccaacaacuttcgucaacacag

SEQ ID NO: 85784 - DNA, 22 bp, Artificial Sequence
  Synthetic
accacacauggcaatcccauac

SEQ ID NO: 85785 - DNA, 23 bp, Artificial Sequence
  Synthetic
tttggattgtguccgttgagcua

SEQ ID NO: 85786 - DNA, 21 bp, Artificial Sequence
  Synthetic
atcaacaggaauggctgcuca

SEQ ID NO: 85787 - DNA, 26 bp, Artificial Sequence
  Synthetic
gtcagttctcucaagaggtcttucag

SEQ ID NO: 85788 - DNA, 27 bp, Artificial Sequence
  Synthetic
ggacatcagtuacatcttcccatugac

SEQ ID NO: 85789 - DNA, 28 bp, Artificial Sequence
  Synthetic
tgaaggcacuaacugagaaaaacaaaga

SEQ ID NO: 85790 - DNA, 21 bp, Artificial Sequence
  Synthetic
ggatcgguatcgtccaucagg

SEQ ID NO: 85791 - DNA, 25 bp, Artificial Sequence
  Synthetic
tgaaagtatgcccugtccttttcut

SEQ ID NO: 85792 - DNA, 23 bp, Artificial Sequence
  Synthetic
tgcgatccugagcaattucaagt

SEQ ID NO: 85793 - DNA, 26 bp, Artificial Sequence
  Synthetic
tggcagttgcauaaaaacactcatug

SEQ ID NO: 85794 - DNA, 28 bp, Artificial Sequence
  Synthetic
tcgcattacttaauttaggcagttcuga

SEQ ID NO: 85795 - DNA, 28 bp, Artificial Sequence
  Synthetic
caacactgcauaccttccaattuacaat

SEQ ID NO: 85796 - DNA, 23 bp, Artificial Sequence
  Synthetic
cacactgggacutgtgtttagug

SEQ ID NO: 85797 - DNA, 23 bp, Artificial Sequence
  Synthetic
cctcaccugctacttuaagccat

SEQ ID NO: 85798 - DNA, 21 bp, Artificial Sequence
  Synthetic
tgaccugccttggttuaacgg

SEQ ID NO: 85799 - DNA, 25 bp, Artificial Sequence
  Synthetic
ccatccaucccaagatccatctgua

SEQ ID NO: 85800 - DNA, 24 bp, Artificial Sequence
  Synthetic
ccagctcctcutcaaagactcauc

SEQ ID NO: 85801 - DNA, 24 bp, Artificial Sequence
  Synthetic
actatgagagcutctcctgtguct

SEQ ID NO: 85802 - DNA, 24 bp, Artificial Sequence
  Synthetic
ttgtttgtttccugtctggacuga

SEQ ID NO: 85803 - DNA, 21 bp, Artificial Sequence
  Synthetic
ctucacagcagaacagcugga

SEQ ID NO: 85804 - DNA, 17 bp, Artificial Sequence
  Synthetic
ccagccucacctugcca

SEQ ID NO: 85805 - DNA, 19 bp, Artificial Sequence
  Synthetic
gggtcacgugtgtctccut

SEQ ID NO: 85806 - DNA, 24 bp, Artificial Sequence
  Synthetic
ccagccucugagagaaacacaaat

SEQ ID NO: 85807 - DNA, 21 bp, Artificial Sequence
  Synthetic
tctgcatgcuattggcctguc

SEQ ID NO: 85808 - DNA, 21 bp, Artificial Sequence
  Synthetic
ggaaggcucaagccauccaat

SEQ ID NO: 85809 - DNA, 23 bp, Artificial Sequence
  Synthetic
gaatcccuaactcccuccaaacc

SEQ ID NO: 85810 - DNA, 23 bp, Artificial Sequence
  Synthetic
ccagcagtcugagcagttaguaa

SEQ ID NO: 85811 - DNA, 22 bp, Artificial Sequence
  Synthetic
cactuggaaacaggcttuggaa

SEQ ID NO: 85812 - DNA, 22 bp, Artificial Sequence
  Synthetic
gacttgucagaggccattgcua

SEQ ID NO: 85813 - DNA, 20 bp, Artificial Sequence
  Synthetic
gccuctggcuggaaaccaag

SEQ ID NO: 85814 - DNA, 20 bp, Artificial Sequence
  Synthetic
gctgauagctgtugccgact

SEQ ID NO: 85815 - DNA, 20 bp, Artificial Sequence
  Synthetic
gtgcgtaucgactcgaugct

SEQ ID NO: 85816 - DNA, 23 bp, Artificial Sequence
  Synthetic
cagggccagagaguagagagtua

SEQ ID NO: 85817 - DNA, 21 bp, Artificial Sequence
  Synthetic
ccaccccucaaaccctatcut

SEQ ID NO: 85818 - DNA, 22 bp, Artificial Sequence
  Synthetic
agagggcaagaggguttcacua

SEQ ID NO: 85819 - DNA, 26 bp, Artificial Sequence
  Synthetic
gtccaagagacuctgaagttacucac

SEQ ID NO: 85820 - DNA, 25 bp, Artificial Sequence
  Synthetic
aagaagtgagucaagcagtaugcaa

SEQ ID NO: 85821 - DNA, 27 bp, Artificial Sequence
  Synthetic
ggacaaaaatgaaugcctttcgaaucc

SEQ ID NO: 85822 - DNA, 32 bp, Artificial Sequence
  Synthetic
atatatatgaaguaccaatgacttcctttucc

SEQ ID NO: 85823 - DNA, 23 bp, Artificial Sequence
  Synthetic
tggtactcaccutgtccacgaua

SEQ ID NO: 85824 - DNA, 33 bp, Artificial Sequence
  Synthetic
tttaagcttagaactutagtcagtctagaatut

SEQ ID NO: 85825 - DNA, 28 bp, Artificial Sequence
  Synthetic
aggttaattcatcacugtgcctagatut

SEQ ID NO: 85826 - DNA, 31 bp, Artificial Sequence
  Synthetic
ttttacctauaggctgacaaagaugaacaaa

SEQ ID NO: 85827 - DNA, 28 bp, Artificial Sequence
  Synthetic
tgtccctgguctgattaatttctttuga

SEQ ID NO: 85828 - DNA, 21 bp, Artificial Sequence
  Synthetic
tctcaaaagcacgcuccagut

SEQ ID NO: 85829 - DNA, 26 bp, Artificial Sequence
  Synthetic
tgttttgttcutctgtgctttuagcc

SEQ ID NO: 85830 - DNA, 25 bp, Artificial Sequence
  Synthetic
gcccatttagaagutcagagaguga

SEQ ID NO: 85831 - DNA, 27 bp, Artificial Sequence
  Synthetic
caaccagtugacagtgaactcatuaaa

SEQ ID NO: 85832 - DNA, 21 bp, Artificial Sequence
  Synthetic
ccaaguggacacagggacuat

SEQ ID NO: 85833 - DNA, 21 bp, Artificial Sequence
  Synthetic
atgggccugttcgtccttuag

SEQ ID NO: 85834 - DNA, 28 bp, Artificial Sequence
  Synthetic
gtgatgaattaaccucactgttgggaua

SEQ ID NO: 85835 - DNA, 31 bp, Artificial Sequence
  Synthetic
tctattacatcuccaaatgttgcaactuact

SEQ ID NO: 85836 - DNA, 26 bp, Artificial Sequence
  Synthetic
ttcctgguagaacaataaggtccuct

SEQ ID NO: 85837 - DNA, 25 bp, Artificial Sequence
  Synthetic
tgaaaaagugaagtcctgcucagaa

SEQ ID NO: 85838 - DNA, 24 bp, Artificial Sequence
  Synthetic
aaattatacgugacctguggcgaa

SEQ ID NO: 85839 - DNA, 20 bp, Artificial Sequence
  Synthetic
ggguccagggaggtaaugct

SEQ ID NO: 85840 - DNA, 21 bp, Artificial Sequence
  Synthetic
gcccacutgguggaagaacag

SEQ ID NO: 85841 - DNA, 23 bp, Artificial Sequence
  Synthetic
caccgcucagauaaggaacagag

SEQ ID NO: 85842 - DNA, 24 bp, Artificial Sequence
  Synthetic
ctgtcctttcugactgcatccuat

SEQ ID NO: 85843 - DNA, 21 bp, Artificial Sequence
  Synthetic
gtacugccagctcactucact

SEQ ID NO: 85844 - DNA, 23 bp, Artificial Sequence
  Synthetic
acttgcaaccuttccttgaaguc

SEQ ID NO: 85845 - DNA, 22 bp, Artificial Sequence
  Synthetic
gagtactcggugtcaaacugct

SEQ ID NO: 85846 - DNA, 20 bp, Artificial Sequence
  Synthetic
gcacagaacgguguccagag

SEQ ID NO: 85847 - DNA, 21 bp, Artificial Sequence
  Synthetic
cagcttgcggaucttgtagug

SEQ ID NO: 85848 - DNA, 20 bp, Artificial Sequence
  Synthetic
ctgcagcgagguatggacuc

SEQ ID NO: 85849 - DNA, 19 bp, Artificial Sequence
  Synthetic
gtgacgccguagtcgagua

SEQ ID NO: 85850 - DNA, 20 bp, Artificial Sequence
  Synthetic
cccgtagcucgagaguacaa

SEQ ID NO: 85851 - DNA, 18 bp, Artificial Sequence
  Synthetic
caggcccuctgttgccua

SEQ ID NO: 85852 - DNA, 28 bp, Artificial Sequence
  Synthetic
aacttgaggutgctaactaugaaacact

SEQ ID NO: 85853 - DNA, 23 bp, Artificial Sequence
  Synthetic
ccttcagcacutctttugagcac

SEQ ID NO: 85854 - DNA, 19 bp, Artificial Sequence
  Synthetic
ccaagggccucaacgugaa

SEQ ID NO: 85855 - DNA, 19 bp, Artificial Sequence
  Synthetic
cccagaguctgcagcugag

SEQ ID NO: 85856 - DNA, 21 bp, Artificial Sequence
  Synthetic
cactgtcucagccagaggtug

SEQ ID NO: 85857 - DNA, 26 bp, Artificial Sequence
  Synthetic
acttctguggagacaccctacttuat

SEQ ID NO: 85858 - DNA, 22 bp, Artificial Sequence
  Synthetic
tgtgttgacugtggcatcugaa

SEQ ID NO: 85859 - DNA, 28 bp, Artificial Sequence
  Synthetic
ctcaatggaaaaagaaguaggtaacugt

SEQ ID NO: 85860 - DNA, 23 bp, Artificial Sequence
  Synthetic
ctcttcatgggugagggtaguct

SEQ ID NO: 85861 - DNA, 21 bp, Artificial Sequence
  Synthetic
agaagaggaucacccugggat

SEQ ID NO: 85862 - DNA, 21 bp, Artificial Sequence
  Synthetic
gccatcgugtcgtgtgttuac

SEQ ID NO: 85863 - DNA, 21 bp, Artificial Sequence
  Synthetic
gacgtccucctttccaggaut

SEQ ID NO: 85864 - DNA, 22 bp, Artificial Sequence
  Synthetic
gauggtatguaacagcgaccgt

SEQ ID NO: 85865 - DNA, 27 bp, Artificial Sequence
  Synthetic
gctactggaaaacautcaaaactggut

SEQ ID NO: 85866 - DNA, 26 bp, Artificial Sequence
  Synthetic
gggtcaggutttatcaactcauagca

SEQ ID NO: 85867 - DNA, 28 bp, Artificial Sequence
  Synthetic
gacttcagttguctttgtttctctucag

SEQ ID NO: 85868 - DNA, 21 bp, Artificial Sequence
  Synthetic
ctacccccagaacutcagguc

SEQ ID NO: 85869 - DNA, 26 bp, Artificial Sequence
  Synthetic
agcctggtcauttcacatatttucct

SEQ ID NO: 85870 - DNA, 24 bp, Artificial Sequence
  Synthetic
ggagggccuttaaaatgaggtuct

SEQ ID NO: 85871 - DNA, 28 bp, Artificial Sequence
  Synthetic
gctaagcattgucccatcattcaataug

SEQ ID NO: 85872 - DNA, 20 bp, Artificial Sequence
  Synthetic
ctccgaaacccacacuccug

SEQ ID NO: 85873 - DNA, 20 bp, Artificial Sequence
  Synthetic
cgtgactguggcgctcatua

SEQ ID NO: 85874 - DNA, 20 bp, Artificial Sequence
  Synthetic
gtaaagcgggcugggaugat

SEQ ID NO: 85875 - DNA, 22 bp, Artificial Sequence
  Synthetic
cagcaaaaatucctcctggugt

SEQ ID NO: 85876 - DNA, 22 bp, Artificial Sequence
  Synthetic
acaagttccuccattcuggcat

SEQ ID NO: 85877 - DNA, 28 bp, Artificial Sequence
  Synthetic
caccaagtccugtatttcactctaugac

SEQ ID NO: 85878 - DNA, 28 bp, Artificial Sequence
  Synthetic
agtggctaaaugaatatctctgcttugt

SEQ ID NO: 85879 - DNA, 28 bp, Artificial Sequence
  Synthetic
ggttttccaatutactgaaagcaugagg

SEQ ID NO: 85880 - DNA, 22 bp, Artificial Sequence
  Synthetic
cctccagccccucctatagaut

SEQ ID NO: 85881 - DNA, 28 bp, Artificial Sequence
  Synthetic
ctgtcgatgataugaattcccatgauga

SEQ ID NO: 85882 - DNA, 21 bp, Artificial Sequence
  Synthetic
agagagggugggtgacagaut

SEQ ID NO: 85883 - DNA, 23 bp, Artificial Sequence
  Synthetic
cactaacctuccttctcccctug

SEQ ID NO: 85884 - DNA, 21 bp, Artificial Sequence
  Synthetic
ctcaaagggcuccactggtut

SEQ ID NO: 85885 - DNA, 20 bp, Artificial Sequence
  Synthetic
tgatgcttucacggcuccat

SEQ ID NO: 85886 - DNA, 24 bp, Artificial Sequence
  Synthetic
gutggaagagtuaaaagcccgaac

SEQ ID NO: 85887 - DNA, 28 bp, Artificial Sequence
  Synthetic
tgcaattcaacucaggaaaagtauccat

SEQ ID NO: 85888 - DNA, 23 bp, Artificial Sequence
  Synthetic
tcaaagtccagacaugcaaccut

SEQ ID NO: 85889 - DNA, 29 bp, Artificial Sequence
  Synthetic
aatttctgctttcuagccatcaagaguat

SEQ ID NO: 85890 - DNA, 28 bp, Artificial Sequence
  Synthetic
tgagacaacagaagcautatactgctut

SEQ ID NO: 85891 - DNA, 25 bp, Artificial Sequence
  Synthetic
ctggagtgtguggaggaattacaut

SEQ ID NO: 85892 - DNA, 21 bp, Artificial Sequence
  Synthetic
ctacccuaggtgcucaggact

SEQ ID NO: 85893 - DNA, 26 bp, Artificial Sequence
  Synthetic
ccctttcuagggccatctgaatuaga

SEQ ID NO: 85894 - DNA, 24 bp, Artificial Sequence
  Synthetic
gtgatggatcuggctaagcatcut

SEQ ID NO: 85895 - DNA, 28 bp, Artificial Sequence
  Synthetic
tcaagcaaatttcuatgagtcagcctua

SEQ ID NO: 85896 - DNA, 19 bp, Artificial Sequence
  Synthetic
ggactgacuggcacctcut

SEQ ID NO: 85897 - DNA, 20 bp, Artificial Sequence
  Synthetic
gcctggaucaccttctgguc

SEQ ID NO: 85898 - DNA, 24 bp, Artificial Sequence
  Synthetic
gcttgttgutggctatacugaggt

SEQ ID NO: 85899 - DNA, 25 bp, Artificial Sequence
  Synthetic
ctgcttctgugttttcccttttuca

SEQ ID NO: 85900 - DNA, 18 bp, Artificial Sequence
  Synthetic
ggaccccagcaucugcac

SEQ ID NO: 85901 - DNA, 20 bp, Artificial Sequence
  Synthetic
atgtgccagaugcaccucaa

SEQ ID NO: 85902 - DNA, 20 bp, Artificial Sequence
  Synthetic
gttgcccugggtcctcttua

SEQ ID NO: 85903 - DNA, 27 bp, Artificial Sequence
  Synthetic
ctgcctcaugaaagcctttatctttut

SEQ ID NO: 85904 - DNA, 18 bp, Artificial Sequence
  Synthetic
ggtcugcgctttguccga

SEQ ID NO: 85905 - DNA, 21 bp, Artificial Sequence
  Synthetic
cugtcccuggaggagaaagac

SEQ ID NO: 85906 - DNA, 28 bp, Artificial Sequence
  Synthetic
tttaaactcagcautccatccctaugaa

SEQ ID NO: 85907 - DNA, 29 bp, Artificial Sequence
  Synthetic
agattgtctgtttugttgggttttgtuac

SEQ ID NO: 85908 - DNA, 21 bp, Artificial Sequence
  Synthetic
gcagccaaguacaagcucaac

SEQ ID NO: 85909 - DNA, 18 bp, Artificial Sequence
  Synthetic
gcguccaccatucacgct

SEQ ID NO: 85910 - DNA, 24 bp, Artificial Sequence
  Synthetic
cccctgccauttgtatatcgtuga

SEQ ID NO: 85911 - DNA, 26 bp, Artificial Sequence
  Synthetic
ccacutcaguaagaccagaaagaacc

SEQ ID NO: 85912 - DNA, 28 bp, Artificial Sequence
  Synthetic
gttatttgatgugaactttgtgcctgut

SEQ ID NO: 85913 - DNA, 24 bp, Artificial Sequence
  Synthetic
gacaggaaagagcaaucacuagca

SEQ ID NO: 85914 - DNA, 25 bp, Artificial Sequence
  Synthetic
tgtgctaaaacuttgagtcccaugt

SEQ ID NO: 85915 - DNA, 27 bp, Artificial Sequence
  Synthetic
agcatgtagcgugctaaaatagcaaua

SEQ ID NO: 85916 - DNA, 17 bp, Artificial Sequence
  Synthetic
gcucccgcgcgttatug

SEQ ID NO: 85917 - DNA, 23 bp, Artificial Sequence
  Synthetic
acacaagtagcuggatacccuct

SEQ ID NO: 85918 - DNA, 28 bp, Artificial Sequence
  Synthetic
gttaaaaagctucacagtttgtcctugt

SEQ ID NO: 85919 - DNA, 25 bp, Artificial Sequence
  Synthetic
ggcctcagtucagtctcaatgtuag

SEQ ID NO: 85920 - DNA, 26 bp, Artificial Sequence
  Synthetic
tcatccttttcuctgagatgcttugg

SEQ ID NO: 85921 - DNA, 21 bp, Artificial Sequence
  Synthetic
caagtguacaaccctgtgugg

SEQ ID NO: 85922 - DNA, 28 bp, Artificial Sequence
  Synthetic
tcactggatccautgtgtatagtuacga

SEQ ID NO: 85923 - DNA, 28 bp, Artificial Sequence
  Synthetic
cacacctcaccugtaaaactcagtauat

SEQ ID NO: 85924 - DNA, 26 bp, Artificial Sequence
  Synthetic
actgaggaggaugataattgggtcua

SEQ ID NO: 85925 - DNA, 28 bp, Artificial Sequence
  Synthetic
cccatgtttcaucttcaacgtgaatuaa

SEQ ID NO: 85926 - DNA, 29 bp, Artificial Sequence
  Synthetic
gggaguacaacagaaacaaatuagagaac

SEQ ID NO: 85927 - DNA, 28 bp, Artificial Sequence
  Synthetic
gttgtcttctacuccatcttcaaaucca

SEQ ID NO: 85928 - DNA, 29 bp, Artificial Sequence
  Synthetic
cutggaaataaaguggaacgaaaagaaga

SEQ ID NO: 85929 - DNA, 24 bp, Artificial Sequence
  Synthetic
tcctgagacugctgttccaaaaut

SEQ ID NO: 85930 - DNA, 29 bp, Artificial Sequence
  Synthetic
tctccaactccuactttagaacaacauct

SEQ ID NO: 85931 - DNA, 21 bp, Artificial Sequence
  Synthetic
cggaccugtggctacuaagaa

SEQ ID NO: 85932 - DNA, 27 bp, Artificial Sequence
  Synthetic
tttacatagguggaatgaatggcugaa

SEQ ID NO: 85933 - DNA, 28 bp, Artificial Sequence
  Synthetic
agcggtataaucaggagttttuaaaggt

SEQ ID NO: 85934 - DNA, 29 bp, Artificial Sequence
  Synthetic
ggaaagagcttguttgatgtcgttagaua

SEQ ID NO: 85935 - DNA, 28 bp, Artificial Sequence
  Synthetic
gtgcttcctcuttatttagtaccucagt

SEQ ID NO: 85936 - DNA, 23 bp, Artificial Sequence
  Synthetic
tccagaucugagagaaccaggaa

SEQ ID NO: 85937 - DNA, 22 bp, Artificial Sequence
  Synthetic
agagtucacttaccuccaggca

SEQ ID NO: 85938 - DNA, 23 bp, Artificial Sequence
  Synthetic
cctacctctuccacgttgtuact

SEQ ID NO: 85939 - DNA, 29 bp, Artificial Sequence
  Synthetic
tggtaaacacaaautcctttccuagaact

SEQ ID NO: 85940 - DNA, 23 bp, Artificial Sequence
  Synthetic
ttttgtgacggucttggaaguga

SEQ ID NO: 85941 - DNA, 23 bp, Artificial Sequence
  Synthetic
aggaagagaagaagcutggucct

SEQ ID NO: 85942 - DNA, 27 bp, Artificial Sequence
  Synthetic
actgaactguacatgctcttcaucaac

SEQ ID NO: 85943 - DNA, 28 bp, Artificial Sequence
  Synthetic
gcacggaacagagcautcgttaattaua

SEQ ID NO: 85944 - DNA, 27 bp, Artificial Sequence
  Synthetic
ggcaaaagaaggaggutaactgtaauc

SEQ ID NO: 85945 - DNA, 28 bp, Artificial Sequence
  Synthetic
acatgtatcgaagcacaucaaagaguaa

SEQ ID NO: 85946 - DNA, 28 bp, Artificial Sequence
  Synthetic
gacatcttctttcutcctgatcaaguga

SEQ ID NO: 85947 - DNA, 32 bp, Artificial Sequence
  Synthetic
agattagtgcttatutcttcttttaggtaugt

SEQ ID NO: 85948 - DNA, 22 bp, Artificial Sequence
  Synthetic
ctgcactugcattgtctucaca

SEQ ID NO: 85949 - DNA, 33 bp, Artificial Sequence
  Synthetic
tctgtgtacagugaaatagtatatugaagaaca

SEQ ID NO: 85950 - DNA, 21 bp, Artificial Sequence
  Synthetic
gagcttuggcccttggtgaua

SEQ ID NO: 85951 - DNA, 21 bp, Artificial Sequence
  Synthetic
gutctcatcugcagaccccaa

SEQ ID NO: 85952 - DNA, 21 bp, Artificial Sequence
  Synthetic
ggtgcaggcaacauggtctua

SEQ ID NO: 85953 - DNA, 23 bp, Artificial Sequence
  Synthetic
cagcacauccgtatacacucagg

SEQ ID NO: 85954 - DNA, 21 bp, Artificial Sequence
  Synthetic
ctgaagggucagccttctcut

SEQ ID NO: 85955 - DNA, 23 bp, Artificial Sequence
  Synthetic
ccttggtcagcutctggatttug

SEQ ID NO: 85956 - DNA, 21 bp, Artificial Sequence
  Synthetic
gcaggauacagacgtcccuca

SEQ ID NO: 85957 - DNA, 21 bp, Artificial Sequence
  Synthetic
agccgugaagtuggagaagac

SEQ ID NO: 85958 - DNA, 23 bp, Artificial Sequence
  Synthetic
gtctggacaugatggctcgauac

SEQ ID NO: 85959 - DNA, 22 bp, Artificial Sequence
  Synthetic
cuagaagacagggagcgugaaa

SEQ ID NO: 85960 - DNA, 22 bp, Artificial Sequence
  Synthetic
acaggccautttccatgtuggt

SEQ ID NO: 85961 - DNA, 28 bp, Artificial Sequence
  Synthetic
atgacgccatautcttttagagcauact

SEQ ID NO: 85962 - DNA, 26 bp, Artificial Sequence
  Synthetic
cacagaagtuacaactgtagggctua

SEQ ID NO: 85963 - DNA, 23 bp, Artificial Sequence
  Synthetic
gtgctcacugacattctacucca

SEQ ID NO: 85964 - DNA, 29 bp, Artificial Sequence
  Synthetic
aaccuacaactatttauggagaacaagca

SEQ ID NO: 85965 - DNA, 22 bp, Artificial Sequence
  Synthetic
ccctccccuttaggtactguga

SEQ ID NO: 85966 - DNA, 24 bp, Artificial Sequence
  Synthetic
ggaataucacagatccgucacagg

SEQ ID NO: 85967 - DNA, 21 bp, Artificial Sequence
  Synthetic
tguagaagagcgcacgucaag

SEQ ID NO: 85968 - DNA, 27 bp, Artificial Sequence
  Synthetic
gtaaatgtgtcaaauactggcctgaug

SEQ ID NO: 85969 - DNA, 27 bp, Artificial Sequence
  Synthetic
acagttcccaaaguctctagaauacga

SEQ ID NO: 85970 - DNA, 21 bp, Artificial Sequence
  Synthetic
cttgatgcgugttgaggctug

SEQ ID NO: 85971 - DNA, 21 bp, Artificial Sequence
  Synthetic
ctgaactugcggtggatgaug

SEQ ID NO: 85972 - DNA, 18 bp, Artificial Sequence
  Synthetic
gagcuggccatgctcuca

SEQ ID NO: 85973 - DNA, 17 bp, Artificial Sequence
  Synthetic
acgcgaaccccucaguc

SEQ ID NO: 85974 - DNA, 20 bp, Artificial Sequence
  Synthetic
ccatgctcucacctcaucca

SEQ ID NO: 85975 - DNA, 18 bp, Artificial Sequence
  Synthetic
gggctcacuacacgccut

SEQ ID NO: 85976 - DNA, 17 bp, Artificial Sequence
  Synthetic
guccccggaccgguaag

SEQ ID NO: 85977 - DNA, 21 bp, Artificial Sequence
  Synthetic
caggaaccguagctaggacug

SEQ ID NO: 85978 - DNA, 21 bp, Artificial Sequence
  Synthetic
agtggauctgcatcuccgact

SEQ ID NO: 85979 - DNA, 22 bp, Artificial Sequence
  Synthetic
aggtgggctuctcttggaagua

SEQ ID NO: 85980 - DNA, 22 bp, Artificial Sequence
  Synthetic
caaaggagautgagcggauggt

SEQ ID NO: 85981 - DNA, 21 bp, Artificial Sequence
  Synthetic
cagaucagggacucccagaga

SEQ ID NO: 85982 - DNA, 25 bp, Artificial Sequence
  Synthetic
gatgtattguttgcactctucagca

SEQ ID NO: 85983 - DNA, 28 bp, Artificial Sequence
  Synthetic
gctaacatuaaaagggacaagtcuaaga

SEQ ID NO: 85984 - DNA, 21 bp, Artificial Sequence
  Synthetic
gcaccacaagggcucaguaaa

SEQ ID NO: 85985 - DNA, 21 bp, Artificial Sequence
  Synthetic
ctgacaccacucaggtuggag

SEQ ID NO: 85986 - DNA, 25 bp, Artificial Sequence
  Synthetic
cttttcctcaaautcttcccugcaa

SEQ ID NO: 85987 - DNA, 27 bp, Artificial Sequence
  Synthetic
aaatatttcatcucctcctcugacact

SEQ ID NO: 85988 - DNA, 26 bp, Artificial Sequence
  Synthetic
acaacatgctuccactcttgauaact

SEQ ID NO: 85989 - DNA, 29 bp, Artificial Sequence
  Synthetic
gcatgaagaacugatgaagaaaacugaaa

SEQ ID NO: 85990 - DNA, 23 bp, Artificial Sequence
  Synthetic
acacactgugcacaatttcctug

SEQ ID NO: 85991 - DNA, 25 bp, Artificial Sequence
  Synthetic
ccaatgagggugacaacgactauat

SEQ ID NO: 85992 - DNA, 27 bp, Artificial Sequence
  Synthetic
atgatggugaaggatgaatatgugcat

SEQ ID NO: 85993 - DNA, 23 bp, Artificial Sequence
  Synthetic
gcagtgctgguagcattagacuc

SEQ ID NO: 85994 - DNA, 17 bp, Artificial Sequence
  Synthetic
gggcccucgucagcaac

SEQ ID NO: 85995 - DNA, 20 bp, Artificial Sequence
  Synthetic
gttccatggccuccgatcuc

SEQ ID NO: 85996 - DNA, 23 bp, Artificial Sequence
  Synthetic
gccaagctuccgttttccttgua

SEQ ID NO: 85997 - DNA, 26 bp, Artificial Sequence
  Synthetic
gtgtcagtgaguccttagcctaatut

SEQ ID NO: 85998 - DNA, 24 bp, Artificial Sequence
  Synthetic
atgcccctauggagaaaatcctug

SEQ ID NO: 85999 - DNA, 26 bp, Artificial Sequence
  Synthetic
ccaaactugagagactggacaguaag

SEQ ID NO: 86000 - DNA, 20 bp, Artificial Sequence
  Synthetic
tttcctggcuccgctucaat

SEQ ID NO: 86001 - DNA, 27 bp, Artificial Sequence
  Synthetic
ctatccatctutggtatttgctuccac

SEQ ID NO: 86002 - DNA, 26 bp, Artificial Sequence
  Synthetic
ccaggctcatuataagttttggcaut

SEQ ID NO: 86003 - DNA, 28 bp, Artificial Sequence
  Synthetic
tgatgaactcucattaaaaggaacugct

SEQ ID NO: 86004 - DNA, 23 bp, Artificial Sequence
  Synthetic
tgaaucgccgtatcugagaaaac

SEQ ID NO: 86005 - DNA, 23 bp, Artificial Sequence
  Synthetic
augcaacaagcucagaaacacac

SEQ ID NO: 86006 - DNA, 29 bp, Artificial Sequence
  Synthetic
agtctctccttcucttctcttagcattut

SEQ ID NO: 86007 - DNA, 27 bp, Artificial Sequence
  Synthetic
ctcataggaacagguagacttucaact

SEQ ID NO: 86008 - DNA, 21 bp, Artificial Sequence
  Synthetic
gcagtauagaggacggagcug

SEQ ID NO: 86009 - DNA, 21 bp, Artificial Sequence
  Synthetic
cagaaguaccagcagguggat

SEQ ID NO: 86010 - DNA, 21 bp, Artificial Sequence
  Synthetic
caggagttuggtctgccctut

SEQ ID NO: 86011 - DNA, 22 bp, Artificial Sequence
  Synthetic
gguacaacuggacaagcagaga

SEQ ID NO: 86012 - DNA, 22 bp, Artificial Sequence
  Synthetic
tgagcttgutgcattgugacct

SEQ ID NO: 86013 - DNA, 26 bp, Artificial Sequence
  Synthetic
actggtcatttugcactacctcttut

SEQ ID NO: 86014 - DNA, 20 bp, Artificial Sequence
  Synthetic
ggtttcgcgutggttgtgut

SEQ ID NO: 86015 - DNA, 20 bp, Artificial Sequence
  Synthetic
gcagtcagcucctctgucac

SEQ ID NO: 86016 - DNA, 23 bp, Artificial Sequence
  Synthetic
tugacaaaggcaucgagacagat

SEQ ID NO: 86017 - DNA, 21 bp, Artificial Sequence
  Synthetic
tggtggaaugctgagtgaugg

SEQ ID NO: 86018 - DNA, 25 bp, Artificial Sequence
  Synthetic
gtcatttgttuccttttgctcucca

SEQ ID NO: 86019 - DNA, 26 bp, Artificial Sequence
  Synthetic
agttaatatgaaucctcccccacuca

SEQ ID NO: 86020 - DNA, 19 bp, Artificial Sequence
  Synthetic
tgctggtggugtgtccauc

SEQ ID NO: 86021 - DNA, 22 bp, Artificial Sequence
  Synthetic
gcccgatacugtggctcattut

SEQ ID NO: 86022 - DNA, 26 bp, Artificial Sequence
  Synthetic
gagtggcuattgcttatgtugcaaaa

SEQ ID NO: 86023 - DNA, 26 bp, Artificial Sequence
  Synthetic
caaatgcagcutgttgattccauagt

SEQ ID NO: 86024 - DNA, 20 bp, Artificial Sequence
  Synthetic
cagctctgutagccccauct

SEQ ID NO: 86025 - DNA, 28 bp, Artificial Sequence
  Synthetic
caatgattaggaaaacucaacttgcuga

SEQ ID NO: 86026 - DNA, 18 bp, Artificial Sequence
  Synthetic
gccccugacacgcatugt

SEQ ID NO: 86027 - DNA, 19 bp, Artificial Sequence
  Synthetic
gcaagggacacuggagcug

SEQ ID NO: 86028 - DNA, 24 bp, Artificial Sequence
  Synthetic
ttttgtgttacuggcaggatcugt

SEQ ID NO: 86029 - DNA, 24 bp, Artificial Sequence
  Synthetic
agctcctggaucagaagtgacuat

SEQ ID NO: 86030 - DNA, 21 bp, Artificial Sequence
  Synthetic
cggtacauatcacgcugacga

SEQ ID NO: 86031 - DNA, 26 bp, Artificial Sequence
  Synthetic
cctgtgaatuaggccgactttttcua

SEQ ID NO: 86032 - DNA, 18 bp, Artificial Sequence
  Synthetic
gggactccugctcgctut

SEQ ID NO: 86033 - DNA, 18 bp, Artificial Sequence
  Synthetic
gggccaagucggacagua

SEQ ID NO: 86034 - DNA, 22 bp, Artificial Sequence
  Synthetic
gccctagaaauggaggctgtug

SEQ ID NO: 86035 - DNA, 29 bp, Artificial Sequence
  Synthetic
caaggtagaatauagccatggtgatgaut

SEQ ID NO: 86036 - DNA, 23 bp, Artificial Sequence
  Synthetic
gggctgttcautttgagtgcaua

SEQ ID NO: 86037 - DNA, 29 bp, Artificial Sequence
  Synthetic
ggacatgacccucagtagcaatataaaut

SEQ ID NO: 86038 - DNA, 19 bp, Artificial Sequence
  Synthetic
ggcgaacucacccacgtut

SEQ ID NO: 86039 - DNA, 18 bp, Artificial Sequence
  Synthetic
cgaaaaggcgcucacguc

SEQ ID NO: 86040 - DNA, 20 bp, Artificial Sequence
  Synthetic
gttggtcugggaaggtgugt

SEQ ID NO: 86041 - DNA, 23 bp, Artificial Sequence
  Synthetic
ctttaacccucagcctcagaguc

SEQ ID NO: 86042 - DNA, 23 bp, Artificial Sequence
  Synthetic
tgatctgccugttctttccacuc

SEQ ID NO: 86043 - DNA, 18 bp, Artificial Sequence
  Synthetic
agggcccaucctctggut

SEQ ID NO: 86044 - DNA, 17 bp, Artificial Sequence
  Synthetic
cccaggauggcgacgug

SEQ ID NO: 86045 - DNA, 19 bp, Artificial Sequence
  Synthetic
agcccuggcaccttcttug

SEQ ID NO: 86046 - DNA, 22 bp, Artificial Sequence
  Synthetic
gcttctcccaguctttgtgcug

SEQ ID NO: 86047 - DNA, 28 bp, Artificial Sequence
  Synthetic
taacagtgtatuaacttgggatctugct

SEQ ID NO: 86048 - DNA, 20 bp, Artificial Sequence
  Synthetic
ggctcaccggcucttgttua

SEQ ID NO: 86049 - DNA, 28 bp, Artificial Sequence
  Synthetic
tcaaggagaagcauaaaatttugcacag

SEQ ID NO: 86050 - DNA, 18 bp, Artificial Sequence
  Synthetic
gagccgccgaguactugt

SEQ ID NO: 86051 - DNA, 19 bp, Artificial Sequence
  Synthetic
cccccaacuacacccugga

SEQ ID NO: 86052 - DNA, 24 bp, Artificial Sequence
  Synthetic
ttttgagtccaagcutcccatcut

SEQ ID NO: 86053 - DNA, 24 bp, Artificial Sequence
  Synthetic
ccatagttauaccaacagcuccct

SEQ ID NO: 86054 - DNA, 19 bp, Artificial Sequence
  Synthetic
gtcatuccccgacguggat

SEQ ID NO: 86055 - DNA, 19 bp, Artificial Sequence
  Synthetic
cccgggcucggattactuc

SEQ ID NO: 86056 - DNA, 23 bp, Artificial Sequence
  Synthetic
catctggtacutaccctgcauct

SEQ ID NO: 86057 - DNA, 20 bp, Artificial Sequence
  Synthetic
gggagcutgtcctttuccga

SEQ ID NO: 86058 - DNA, 18 bp, Artificial Sequence
  Synthetic
gcttuggagccgctgcua

SEQ ID NO: 86059 - DNA, 23 bp, Artificial Sequence
  Synthetic
cgugacctucaacaagaagaacc

SEQ ID NO: 86060 - DNA, 20 bp, Artificial Sequence
  Synthetic
gagctcugcatggagtguca

SEQ ID NO: 86061 - DNA, 22 bp, Artificial Sequence
  Synthetic
gaaagcatucgttgcaguagcc

SEQ ID NO: 86062 - DNA, 18 bp, Artificial Sequence
  Synthetic
cagacugcccccgaacug

SEQ ID NO: 86063 - DNA, 17 bp, Artificial Sequence
  Synthetic
tctgcccgcugactgug

SEQ ID NO: 86064 - DNA, 19 bp, Artificial Sequence
  Synthetic
cctcuccgggcatccucat

SEQ ID NO: 86065 - DNA, 17 bp, Artificial Sequence
  Synthetic
gacctgcugccccguag

SEQ ID NO: 86066 - DNA, 17 bp, Artificial Sequence
  Synthetic
cgagccgcccauccuac

SEQ ID NO: 86067 - DNA, 17 bp, Artificial Sequence
  Synthetic
tuggcccagccgaacut

SEQ ID NO: 86068 - DNA, 21 bp, Artificial Sequence
  Synthetic
ctcagtttccucttgcccuct

SEQ ID NO: 86069 - DNA, 18 bp, Artificial Sequence
  Synthetic
tcgcugggctcctucaac

SEQ ID NO: 86070 - DNA, 23 bp, Artificial Sequence
  Synthetic
ccaggcucaccatcttctcuaca

SEQ ID NO: 86071 - DNA, 20 bp, Artificial Sequence
  Synthetic
ccaactgcuccaggtcctuc

SEQ ID NO: 86072 - DNA, 18 bp, Artificial Sequence
  Synthetic
gcctgcugctcgaaggug

SEQ ID NO: 86073 - DNA, 18 bp, Artificial Sequence
  Synthetic
cccaaccuggctcagcua

SEQ ID NO: 86074 - DNA, 23 bp, Artificial Sequence
  Synthetic
tctaccugagcaatatgccucca

SEQ ID NO: 86075 - DNA, 28 bp, Artificial Sequence
  Synthetic
gcatcatcttcatucgcttatgggatua

SEQ ID NO: 86076 - DNA, 22 bp, Artificial Sequence
  Synthetic
ccatttgttccuttgggccaut

SEQ ID NO: 86077 - DNA, 23 bp, Artificial Sequence
  Synthetic
gtgtgtgtgaugaatccggauct

SEQ ID NO: 86078 - DNA, 21 bp, Artificial Sequence
  Synthetic
gagtcctccugttgctcaguc

SEQ ID NO: 86079 - DNA, 24 bp, Artificial Sequence
  Synthetic
ttctgaccagcagugttgttgtua

SEQ ID NO: 86080 - DNA, 23 bp, Artificial Sequence
  Synthetic
cctgcactuaaaaccagcugaca

SEQ ID NO: 86081 - DNA, 29 bp, Artificial Sequence
  Synthetic
gctgctttgtttuatttaggttccaguat

SEQ ID NO: 86082 - DNA, 20 bp, Artificial Sequence
  Synthetic
ccccuccggagtgtttugaa

SEQ ID NO: 86083 - DNA, 23 bp, Artificial Sequence
  Synthetic
ccagttgagccauggtgatcauc

SEQ ID NO: 86084 - DNA, 24 bp, Artificial Sequence
  Synthetic
tgatcatttuggcaatgccaagug

SEQ ID NO: 86085 - DNA, 24 bp, Artificial Sequence
  Synthetic
tcagaggauagcaccatgaugact

SEQ ID NO: 86086 - DNA, 19 bp, Artificial Sequence
  Synthetic
gccttcgcgcucaaagtuc

SEQ ID NO: 86087 - DNA, 20 bp, Artificial Sequence
  Synthetic
aacgcggcccucatgatuaa

SEQ ID NO: 86088 - DNA, 17 bp, Artificial Sequence
  Synthetic
cgggcccauccacucaa

SEQ ID NO: 86089 - DNA, 21 bp, Artificial Sequence
  Synthetic
acattcggatucggagcctuc

SEQ ID NO: 86090 - DNA, 20 bp, Artificial Sequence
  Synthetic
tgagggccugaagtgcatug

SEQ ID NO: 86091 - DNA, 19 bp, Artificial Sequence
  Synthetic
caccaaggcaucgcaugag

SEQ ID NO: 86092 - DNA, 20 bp, Artificial Sequence
  Synthetic
cagctgcuccagttcacuga

SEQ ID NO: 86093 - DNA, 24 bp, Artificial Sequence
  Synthetic
gccccagutttaggaaauccacaa

SEQ ID NO: 86094 - DNA, 17 bp, Artificial Sequence
  Synthetic
atuccgcgacgccauct

SEQ ID NO: 86095 - DNA, 18 bp, Artificial Sequence
  Synthetic
gaccaccagucccugcaa

SEQ ID NO: 86096 - DNA, 18 bp, Artificial Sequence
  Synthetic
gtcctuggagctgggcut

SEQ ID NO: 86097 - DNA, 17 bp, Artificial Sequence
  Synthetic
cgguccaggcgugaact

SEQ ID NO: 86098 - DNA, 28 bp, Artificial Sequence
  Synthetic
tccagagacaaagutgcaaaacagauaa

SEQ ID NO: 86099 - DNA, 26 bp, Artificial Sequence
  Synthetic
cagaagcctcauatgaagatggcuat

SEQ ID NO: 86100 - DNA, 19 bp, Artificial Sequence
  Synthetic
ggctgggcuggaaaucagg

SEQ ID NO: 86101 - DNA, 17 bp, Artificial Sequence
  Synthetic
agccgggcuttccgtut

SEQ ID NO: 86102 - DNA, 18 bp, Artificial Sequence
  Synthetic
tcaugagggccgcgttut

SEQ ID NO: 86103 - DNA, 18 bp, Artificial Sequence
  Synthetic
gcccgacagcutccctuc

SEQ ID NO: 86104 - DNA, 21 bp, Artificial Sequence
  Synthetic
ttccccatcguttgtccaguc

SEQ ID NO: 86105 - DNA, 28 bp, Artificial Sequence
  Synthetic
gttcttttaaggugaagaggccatauca

SEQ ID NO: 86106 - DNA, 25 bp, Artificial Sequence
  Synthetic
acatcaggcacuggaactatctgua

SEQ ID NO: 86107 - DNA, 28 bp, Artificial Sequence
  Synthetic
gccttcaaatgaugaaaattatcctugt

SEQ ID NO: 86108 - DNA, 21 bp, Artificial Sequence
  Synthetic
gaacugctgtccugcaagagt

SEQ ID NO: 86109 - DNA, 21 bp, Artificial Sequence
  Synthetic
gccagctcuttgtcggauaca

SEQ ID NO: 86110 - DNA, 20 bp, Artificial Sequence
  Synthetic
gugcggcagaaaaucgagaa

SEQ ID NO: 86111 - DNA, 19 bp, Artificial Sequence
  Synthetic
ggagggcugtgaaaagcug

SEQ ID NO: 86112 - DNA, 18 bp, Artificial Sequence
  Synthetic
gttgcagggacugguggt

SEQ ID NO: 86113 - DNA, 20 bp, Artificial Sequence
  Synthetic
acaacggcgcuctggauaat

SEQ ID NO: 86114 - DNA, 17 bp, Artificial Sequence
  Synthetic
cuggguaggcggaaggg

SEQ ID NO: 86115 - DNA, 17 bp, Artificial Sequence
  Synthetic
cagcggcugcagcatut

SEQ ID NO: 86116 - DNA, 19 bp, Artificial Sequence
  Synthetic
gcgacccgcugcataauga

SEQ ID NO: 86117 - DNA, 20 bp, Artificial Sequence
  Synthetic
tccgatucccacagtcugga

SEQ ID NO: 86118 - DNA, 27 bp, Artificial Sequence
  Synthetic
ctctttctgaaacuctgtgagatugct

SEQ ID NO: 86119 - DNA, 23 bp, Artificial Sequence
  Synthetic
ggtcttccautacggagagaucc

SEQ ID NO: 86120 - DNA, 21 bp, Artificial Sequence
  Synthetic
tcccgcacaugtguaaccaat

SEQ ID NO: 86121 - DNA, 21 bp, Artificial Sequence
  Synthetic
ccttcgatgguaccccactug

SEQ ID NO: 86122 - DNA, 30 bp, Artificial Sequence
  Synthetic
gtgcuaagcagtacattuaaaaagaaagga

SEQ ID NO: 86123 - DNA, 27 bp, Artificial Sequence
  Synthetic
tctaggacaaaggaaautgaagccaut

SEQ ID NO: 86124 - DNA, 27 bp, Artificial Sequence
  Synthetic
cttacctctgauctcaagattgcauga

SEQ ID NO: 86125 - DNA, 29 bp, Artificial Sequence
  Synthetic
gcctactattcugtgtaaactcagugaaa

SEQ ID NO: 86126 - DNA, 21 bp, Artificial Sequence
  Synthetic
ggaagcgatutttgccgacut

SEQ ID NO: 86127 - DNA, 19 bp, Artificial Sequence
  Synthetic
ccagccugggcgttctuac

SEQ ID NO: 86128 - DNA, 23 bp, Artificial Sequence
  Synthetic
ccttcatccautctggactuggt

SEQ ID NO: 86129 - DNA, 28 bp, Artificial Sequence
  Synthetic
gggagaaauattcugaccacgaaagaag

SEQ ID NO: 86130 - DNA, 22 bp, Artificial Sequence
  Synthetic
gggcctgaggugttctgttuag

SEQ ID NO: 86131 - DNA, 20 bp, Artificial Sequence
  Synthetic
gctctggttuctcccacgut

SEQ ID NO: 86132 - DNA, 18 bp, Artificial Sequence
  Synthetic
gacggcuccttggtucgt

SEQ ID NO: 86133 - DNA, 21 bp, Artificial Sequence
  Synthetic
cggactuccacagttcaggug

SEQ ID NO: 86134 - DNA, 19 bp, Artificial Sequence
  Synthetic
ttcugcagcagcacaucct

SEQ ID NO: 86135 - DNA, 19 bp, Artificial Sequence
  Synthetic
ccctugcccctttccucac

SEQ ID NO: 86136 - DNA, 23 bp, Artificial Sequence
  Synthetic
catcgtcauggaaagcugaagga

SEQ ID NO: 86137 - DNA, 26 bp, Artificial Sequence
  Synthetic
aggtagaaaucagccatctuaaagcc

SEQ ID NO: 86138 - DNA, 18 bp, Artificial Sequence
  Synthetic
ctcggtuagggctcuggt

SEQ ID NO: 86139 - DNA, 19 bp, Artificial Sequence
  Synthetic
ctucgccgagggctaugag

SEQ ID NO: 86140 - DNA, 23 bp, Artificial Sequence
  Synthetic
ggaaaactgacugggtgggatuc

SEQ ID NO: 86141 - DNA, 23 bp, Artificial Sequence
  Synthetic
caaccactccucagggtaguaac

SEQ ID NO: 86142 - DNA, 22 bp, Artificial Sequence
  Synthetic
agaggaucctugggaggaagac

SEQ ID NO: 86143 - DNA, 21 bp, Artificial Sequence
  Synthetic
gcaaggcaguggatgaggtuc

SEQ ID NO: 86144 - DNA, 17 bp, Artificial Sequence
  Synthetic
ctggctcuccgccaugt

SEQ ID NO: 86145 - DNA, 20 bp, Artificial Sequence
  Synthetic
ggaagucatcauccccacca

SEQ ID NO: 86146 - DNA, 21 bp, Artificial Sequence
  Synthetic
gccattgcugagtcacccuaa

SEQ ID NO: 86147 - DNA, 22 bp, Artificial Sequence
  Synthetic
gaactctgccucttgagacugg

SEQ ID NO: 86148 - DNA, 24 bp, Artificial Sequence
  Synthetic
caagctacctguggagtctttgut

SEQ ID NO: 86149 - DNA, 20 bp, Artificial Sequence
  Synthetic
gcagagcagacugcaugaca

SEQ ID NO: 86150 - DNA, 22 bp, Artificial Sequence
  Synthetic
ggagtgcaauctgtctggctut

SEQ ID NO: 86151 - DNA, 27 bp, Artificial Sequence
  Synthetic
tcagttgauagaggaccatcatuggat

SEQ ID NO: 86152 - DNA, 23 bp, Artificial Sequence
  Synthetic
gcugagatttggugagacacaga

SEQ ID NO: 86153 - DNA, 28 bp, Artificial Sequence
  Synthetic
gtttgcatttctugactttcattgcaut

SEQ ID NO: 86154 - DNA, 30 bp, Artificial Sequence
  Synthetic
ggagcaaaagtaauacgtaaatggaaagut

SEQ ID NO: 86155 - DNA, 21 bp, Artificial Sequence
  Synthetic
tgctaacugcgcaaccttcut

SEQ ID NO: 86156 - DNA, 27 bp, Artificial Sequence
  Synthetic
attaaagatgcccugaagagttgugaa

SEQ ID NO: 86157 - DNA, 26 bp, Artificial Sequence
  Synthetic
cagttcttucagagagctguacaagt

SEQ ID NO: 86158 - DNA, 28 bp, Artificial Sequence
  Synthetic
gcagttagcagutataaatagccuggaa

SEQ ID NO: 86159 - DNA, 30 bp, Artificial Sequence; identical to SEQ ID NO: 62431
  Synthetic

SEQ ID NO: 86160 - DNA, 21 bp, Artificial Sequence
  Synthetic
caacttugggatcagcuccgt

SEQ ID NO: 86161 - DNA, 28 bp, Artificial Sequence
  Synthetic
aatggaatgtctucgtaatgtggaguag

SEQ ID NO: 86162 - DNA, 25 bp, Artificial Sequence
  Synthetic
tgtgtgtaatgutcaagcacgttut

SEQ ID NO: 86163 - DNA, 20 bp, Artificial Sequence
  Synthetic
ccucagggcagaaagacgut

SEQ ID NO: 86164 - DNA, 26 bp, Artificial Sequence
  Synthetic
gaaacaaauagacacagctcuccaga

SEQ ID NO: 86165 - DNA, 26 bp, Artificial Sequence
  Synthetic
gtttttgtggugggctttatgatgut

SEQ ID NO: 86166 - DNA, 22 bp, Artificial Sequence
  Synthetic
attcaccucctgtggguaggat

SEQ ID NO: 86167 - DNA, 23 bp, Artificial Sequence
  Synthetic
cttgacctugtctctttcugcct

SEQ ID NO: 86168 - DNA, 23 bp, Artificial Sequence
  Synthetic
aatcacacccaccauttctgugt

SEQ ID NO: 86169 - DNA, 28 bp, Artificial Sequence
  Synthetic
aggaaacacugatagctgagauagaaga

SEQ ID NO: 86170 - DNA, 27 bp, Artificial Sequence
  Synthetic
gtagcttctugattctgtctguccaat

SEQ ID NO: 86171 - DNA, 29 bp, Artificial Sequence
  Synthetic
gctacaagagacauaagtttggatucaga

SEQ ID NO: 86172 - DNA, 26 bp, Artificial Sequence
  Synthetic
cactactgttgacutctccagcatut

SEQ ID NO: 86173 - DNA, 28 bp, Artificial Sequence
  Synthetic
gagtccaattcuagtcctagtagtcuga

SEQ ID NO: 86174 - DNA, 28 bp, Artificial Sequence
  Synthetic
tgcctccaaatuaagtcttaagtcaugt

SEQ ID NO: 86175 - DNA, 26 bp, Artificial Sequence
  Synthetic
tggtgtctccaautgaaagtatgugt

SEQ ID NO: 86176 - DNA, 21 bp, Artificial Sequence
  Synthetic
ctttccauccccatctcugga

SEQ ID NO: 86177 - DNA, 22 bp, Artificial Sequence
  Synthetic
gctgaaccugcccaatcuacac

SEQ ID NO: 86178 - DNA, 27 bp, Artificial Sequence
  Synthetic
gatgaauggatatctguaaggaagcag

SEQ ID NO: 86179 - DNA, 21 bp, Artificial Sequence
  Synthetic
cgcggctaaucgaactcacua

SEQ ID NO: 86180 - DNA, 22 bp, Artificial Sequence
  Synthetic
gcaggcaagaaccutttgguaa

SEQ ID NO: 86181 - DNA, 25 bp, Artificial Sequence
  Synthetic
aatttccaaauggaaggctcacuct

SEQ ID NO: 86182 - DNA, 20 bp, Artificial Sequence
  Synthetic
gccaggacucaagggucaag

SEQ ID NO: 86183 - DNA, 20 bp, Artificial Sequence
  Synthetic
ggaccggaagugcaaagaug

SEQ ID NO: 86184 - DNA, 19 bp, Artificial Sequence
  Synthetic
ggcttugccgagccctaua

SEQ ID NO: 86185 - DNA, 26 bp, Artificial Sequence
  Synthetic
gaactucaggagaaggaucaaagagt

SEQ ID NO: 86186 - DNA, 21 bp, Artificial Sequence
  Synthetic
cagtgggtucagacgatguca

SEQ ID NO: 86187 - DNA, 26 bp, Artificial Sequence
  Synthetic
ccacuctgcttacauacaaaacaggt

SEQ ID NO: 86188 - DNA, 19 bp, Artificial Sequence
  Synthetic
gcctgaggugtcctgtcuc

SEQ ID NO: 86189 - DNA, 20 bp, Artificial Sequence
  Synthetic
tgagatgugcgtgagctuca

SEQ ID NO: 86190 - DNA, 28 bp, Artificial Sequence
  Synthetic
ctctgaaaatatcaaucgttgcctctut

SEQ ID NO: 86191 - DNA, 22 bp, Artificial Sequence
  Synthetic
cucccggcagaaggaauacaag

SEQ ID NO: 86192 - DNA, 21 bp, Artificial Sequence
  Synthetic
gacacagtcgaugtccagcut

SEQ ID NO: 86193 - DNA, 21 bp, Artificial Sequence
  Synthetic
gccaaatgcugacttgcucac

SEQ ID NO: 86194 - DNA, 21 bp, Artificial Sequence
  Synthetic
gccagaggccagcuagctaua

SEQ ID NO: 86195 - DNA, 25 bp, Artificial Sequence
  Synthetic
ccttaacagguctttgaaaccccut

SEQ ID NO: 86196 - DNA, 24 bp, Artificial Sequence
  Synthetic
ggagatgccugacatcatcaucaa

SEQ ID NO: 86197 - DNA, 20 bp, Artificial Sequence
  Synthetic
gtuacacagcccgaaccuct

SEQ ID NO: 86198 - DNA, 23 bp, Artificial Sequence
  Synthetic
catgtttgccugccattttcugt

SEQ ID NO: 86199 - DNA, 20 bp, Artificial Sequence
  Synthetic
ctcatctggcuggtctcguc

SEQ ID NO: 86200 - DNA, 25 bp, Artificial Sequence
  Synthetic
ttcttttggcutctcaggaauccat

SEQ ID NO: 86201 - DNA, 21 bp, Artificial Sequence
  Synthetic
ctgcataacagugggtgggua

SEQ ID NO: 86202 - DNA, 18 bp, Artificial Sequence
  Synthetic
cacagcaucgacggcauc

SEQ ID NO: 86203 - DNA, 21 bp, Artificial Sequence
  Synthetic
gagagtttcuccgctggagut

SEQ ID NO: 86204 - DNA, 21 bp, Artificial Sequence
  Synthetic
ccttcagggcutggtagaguc

SEQ ID NO: 86205 - DNA, 20 bp, Artificial Sequence
  Synthetic
gagtgacaucggtggaggut

SEQ ID NO: 86206 - DNA, 24 bp, Artificial Sequence
  Synthetic
ccaccagacaguctaguaacaagg

SEQ ID NO: 86207 - DNA, 26 bp, Artificial Sequence
  Synthetic
aagccaaauggacctaaagaaucagt

SEQ ID NO: 86208 - DNA, 21 bp, Artificial Sequence
  Synthetic
tccagcugcagtgattctgut

SEQ ID NO: 86209 - DNA, 20 bp, Artificial Sequence
  Synthetic
gcttctggccuggtgctuac

SEQ ID NO: 86210 - DNA, 24 bp, Artificial Sequence
  Synthetic
gcatctgtttcuggaggcattcut

SEQ ID NO: 86211 - DNA, 20 bp, Artificial Sequence
  Synthetic
gaggtcaaaggucaccccut

SEQ ID NO: 86212 - DNA, 24 bp, Artificial Sequence
  Synthetic
acgaatgacuctttttcagccuct

SEQ ID NO: 86213 - DNA, 20 bp, Artificial Sequence
  Synthetic
ggaaugcaaggcccaacuca

SEQ ID NO: 86214 - DNA, 24 bp, Artificial Sequence
  Synthetic
gggttgctaucatacggttctuac

SEQ ID NO: 86215 - DNA, 21 bp, Artificial Sequence
  Synthetic
cctggaacgcutagtgguaca

SEQ ID NO: 86216 - DNA, 26 bp, Artificial Sequence
  Synthetic
tttaccaugaagagtgtguccagaag

SEQ ID NO: 86217 - DNA, 29 bp, Artificial Sequence
  Synthetic
caattagactgguccacataagaaaucca

SEQ ID NO: 86218 - DNA, 18 bp, Artificial Sequence
  Synthetic
gcctgcauccctccucaa

SEQ ID NO: 86219 - DNA, 23 bp, Artificial Sequence
  Synthetic
gctcctcugaaaccacagcauac

SEQ ID NO: 86220 - DNA, 22 bp, Artificial Sequence
  Synthetic
tgtccaugcagtttguccaaga

SEQ ID NO: 86221 - DNA, 21 bp, Artificial Sequence
  Synthetic
ctgtggtuggagcccttctut

SEQ ID NO: 86222 - DNA, 23 bp, Artificial Sequence
  Synthetic
gtctatugggacagcttggucag

SEQ ID NO: 86223 - DNA, 24 bp, Artificial Sequence
  Synthetic
cttttcccctugaatgcagtccua

SEQ ID NO: 86224 - DNA, 24 bp, Artificial Sequence
  Synthetic
agggataacucacaggtgtctugt

SEQ ID NO: 86225 - DNA, 26 bp, Artificial Sequence
  Synthetic
ggtcttgatuataagcccauccagag

SEQ ID NO: 86226 - DNA, 24 bp, Artificial Sequence
  Synthetic
tgtgagatugccaactgauaacgg

SEQ ID NO: 86227 - DNA, 22 bp, Artificial Sequence
  Synthetic
ttcagtgcuattgcagcaucct

SEQ ID NO: 86228 - DNA, 17 bp, Artificial Sequence
  Synthetic
catgugccgccgtugag

SEQ ID NO: 86229 - DNA, 17 bp, Artificial Sequence
  Synthetic
cgagggcugggtgugag

SEQ ID NO: 86230 - DNA, 24 bp, Artificial Sequence
  Synthetic
ctaccaacaugggccaggaaaaua

SEQ ID NO: 86231 - DNA, 23 bp, Artificial Sequence
  Synthetic
ccttggctutagaccatcuccac

SEQ ID NO: 86232 - DNA, 24 bp, Artificial Sequence
  Synthetic
ctcctttaccccuccttccuagag

SEQ ID NO: 86233 - DNA, 21 bp, Artificial Sequence
  Synthetic
tguaaccuccaccccaagaga

SEQ ID NO: 86234 - DNA, 21 bp, Artificial Sequence
  Synthetic
gcatgagaagcuggtgcagut

SEQ ID NO: 86235 - DNA, 25 bp, Artificial Sequence
  Synthetic
tctagacaugagaggaaaugaggct

SEQ ID NO: 86236 - DNA, 18 bp, Artificial Sequence
  Synthetic
cgccgccgaugtguagaa

SEQ ID NO: 86237 - DNA, 18 bp, Artificial Sequence
  Synthetic
cgctgcuctacagccuca

SEQ ID NO: 86238 - DNA, 17 bp, Artificial Sequence
  Synthetic
ggctggcugaggctgua

SEQ ID NO: 86239 - DNA, 18 bp, Artificial Sequence
  Synthetic
ccaccgagcugugcagac

SEQ ID NO: 86240 - DNA, 17 bp, Artificial Sequence
  Synthetic
ggtcugcacagcucggt

SEQ ID NO: 86241 - DNA, 18 bp, Artificial Sequence
  Synthetic
gagcccccagucaucgaa

SEQ ID NO: 86242 - DNA, 21 bp, Artificial Sequence
  Synthetic
gctgtcccucagtcctgcaua

SEQ ID NO: 86243 - DNA, 20 bp, Artificial Sequence
  Synthetic
gttgacaucgcgttgtgucc

SEQ ID NO: 86244 - DNA, 24 bp, Artificial Sequence
  Synthetic
tgtttguggcatatcctucccaat

SEQ ID NO: 86245 - DNA, 28 bp, Artificial Sequence
  Synthetic
gaagttcctctucccaattcatctauga

SEQ ID NO: 86246 - DNA, 19 bp, Artificial Sequence
  Synthetic
cgcggcccuttaagtcuct

SEQ ID NO: 86247 - DNA, 17 bp, Artificial Sequence
  Synthetic
gcaccuggtcctgcuga

SEQ ID NO: 86248 - DNA, 19 bp, Artificial Sequence
  Synthetic
cgtucagcaggaccaggug

SEQ ID NO: 86249 - DNA, 21 bp, Artificial Sequence
  Synthetic
catccgctugtctgtctguct

SEQ ID NO: 86250 - DNA, 21 bp, Artificial Sequence
  Synthetic
tcugtagatgauccccaggct

SEQ ID NO: 86251 - DNA, 28 bp, Artificial Sequence
  Synthetic
gagttcttuaaaacacaccagccauaaa

SEQ ID NO: 86252 - DNA, 22 bp, Artificial Sequence
  Synthetic
auttcactggaaucggaagcct

SEQ ID NO: 86253 - DNA, 23 bp, Artificial Sequence
  Synthetic
gagacugagagaagugcaaagga

SEQ ID NO: 86254 - DNA, 21 bp, Artificial Sequence
  Synthetic
cuggtgaauagcacagagggt

SEQ ID NO: 86255 - DNA, 20 bp, Artificial Sequence
  Synthetic
ccctugaagaggcctuggaa

SEQ ID NO: 86256 - DNA, 27 bp, Artificial Sequence
  Synthetic
tcaggtcugcaaccaaagattcatuaa

SEQ ID NO: 86257 - DNA, 24 bp, Artificial Sequence
  Synthetic
gcaaacaugcaaaaagcaccaauc

SEQ ID NO: 86258 - DNA, 28 bp, Artificial Sequence
  Synthetic
tcctccacugagataatgacttctuacc

SEQ ID NO: 86259 - DNA, 28 bp, Artificial Sequence
  Synthetic
gctgtcactguattatttgtccauggaa

SEQ ID NO: 86260 - DNA, 21 bp, Artificial Sequence
  Synthetic
ccaggaacaggcgaucagaut

SEQ ID NO: 86261 - DNA, 27 bp, Artificial Sequence
  Synthetic
ccactgtagacugaaatgtagttugga

SEQ ID NO: 86262 - DNA, 28 bp, Artificial Sequence
  Synthetic
tgggctataucagaatacatugcaacaa

SEQ ID NO: 86263 - DNA, 23 bp, Artificial Sequence
  Synthetic
ggtgagtgcugtgacatguagat

SEQ ID NO: 86264 - DNA, 25 bp, Artificial Sequence
  Synthetic
gattaaagggacuctgaagggacut

SEQ ID NO: 86265 - DNA, 29 bp, Artificial Sequence
  Synthetic
aaacctgacaaaugtgcaatctuaaaaga

SEQ ID NO: 86266 - DNA, 21 bp, Artificial Sequence
  Synthetic
gggacacugccctggaaauat

SEQ ID NO: 86267 - DNA, 21 bp, Artificial Sequence
  Synthetic
cacutctcctccucagggaag

SEQ ID NO: 86268 - DNA, 28 bp, Artificial Sequence
  Synthetic
ttggccaatcagauaccaactgttaaua

SEQ ID NO: 86269 - DNA, 28 bp, Artificial Sequence
  Synthetic
ggtagtaagttucccattaccaagtuct

SEQ ID NO: 86270 - DNA, 22 bp, Artificial Sequence
  Synthetic
gggatuaaagctggctauggca

SEQ ID NO: 86271 - DNA, 21 bp, Artificial Sequence
  Synthetic
ccttgtugggacctcagaugt

SEQ ID NO: 86272 - DNA, 25 bp, Artificial Sequence
  Synthetic
gatctgacgaauttgcttcacagut

SEQ ID NO: 86273 - DNA, 25 bp, Artificial Sequence
  Synthetic
cccaaaaggaacacugaaaaacgua

SEQ ID NO: 86274 - DNA, 19 bp, Artificial Sequence
  Synthetic
ctctctgcucgacctgugt

SEQ ID NO: 86275 - DNA, 21 bp, Artificial Sequence
  Synthetic
gcttccctcugagaggcgaua

SEQ ID NO: 86276 - DNA, 20 bp, Artificial Sequence
  Synthetic
ccgctcgagutcctcttugg

SEQ ID NO: 86277 - DNA, 22 bp, Artificial Sequence
  Synthetic
gaagtcaccuctgggtcttgug

SEQ ID NO: 86278 - DNA, 26 bp, Artificial Sequence
  Synthetic
cacgattacgtutttcagtgttccut

SEQ ID NO: 86279 - DNA, 31 bp, Artificial Sequence
  Synthetic
tctgtgtttatauaggtagcttttgttugct

SEQ ID NO: 86280 - DNA, 25 bp, Artificial Sequence
  Synthetic
tgaacaacagucacacttuccaagt

SEQ ID NO: 86281 - DNA, 23 bp, Artificial Sequence
  Synthetic
actuagcaagcacaaagguaccc

SEQ ID NO: 86282 - DNA, 21 bp, Artificial Sequence
  Synthetic
gcagatucaggtctgccucat

SEQ ID NO: 86283 - DNA, 23 bp, Artificial Sequence
  Synthetic
acttcatguccacgtctcttugg

SEQ ID NO: 86284 - DNA, 17 bp, Artificial Sequence
  Synthetic
tggccccutgccttcuc

SEQ ID NO: 86285 - DNA, 17 bp, Artificial Sequence
  Synthetic
gggtcugcggtggcauc

SEQ ID NO: 86286 - DNA, 20 bp, Artificial Sequence
  Synthetic
gcaccccucagaagctgaut

SEQ ID NO: 86287 - DNA, 18 bp, Artificial Sequence
  Synthetic
ggtgaugcggctctgcut

SEQ ID NO: 86288 - DNA, 17 bp, Artificial Sequence
  Synthetic
cgugaugccaccgcaga

SEQ ID NO: 86289 - DNA, 18 bp, Artificial Sequence
  Synthetic
cccgcccucacctguact

SEQ ID NO: 86290 - DNA, 19 bp, Artificial Sequence
  Synthetic
gccucgaccctguggagat

SEQ ID NO: 86291 - DNA, 20 bp, Artificial Sequence
  Synthetic
gcacagggcacugtttgcua

SEQ ID NO: 86292 - DNA, 20 bp, Artificial Sequence
  Synthetic
agcuaacgggaagcctccua

SEQ ID NO: 86293 - DNA, 17 bp, Artificial Sequence
  Synthetic
cugtcccctucgggcat

SEQ ID NO: 86294 - DNA, 21 bp, Artificial Sequence
  Synthetic
gtagtacugggaggtccccut

SEQ ID NO: 86295 - DNA, 20 bp, Artificial Sequence
  Synthetic
gcttcggccuttgcagttut

SEQ ID NO: 86296 - DNA, 19 bp, Artificial Sequence
  Synthetic
tcugugagcccacgaggat

SEQ ID NO: 86297 - DNA, 18 bp, Artificial Sequence
  Synthetic
gccgccaccuacttugct

SEQ ID NO: 86298 - DNA, 19 bp, Artificial Sequence
  Synthetic
cugggcagcagctguaagt

SEQ ID NO: 86299 - DNA, 19 bp, Artificial Sequence
  Synthetic
tcauacacacggcctuggg

SEQ ID NO: 86300 - DNA, 19 bp, Artificial Sequence
  Synthetic
ggaggccagucacaaugga

SEQ ID NO: 86301 - DNA, 17 bp, Artificial Sequence
  Synthetic
gacagccggcggaucut

SEQ ID NO: 86302 - DNA, 25 bp, Artificial Sequence
  Synthetic
tgtaacttaugagcagctgugacaa

SEQ ID NO: 86303 - DNA, 26 bp, Artificial Sequence
  Synthetic
cacagggactucacaagttccaaaua

SEQ ID NO: 86304 - DNA, 19 bp, Artificial Sequence
  Synthetic
cgcagcugagcaccaaauc

SEQ ID NO: 86305 - DNA, 18 bp, Artificial Sequence
  Synthetic
caggcgutguccccacat

SEQ ID NO: 86306 - DNA, 19 bp, Artificial Sequence
  Synthetic
agagtgccccaguccctua

SEQ ID NO: 86307 - DNA, 24 bp, Artificial Sequence
  Synthetic
gcccaucattttgtcaucaggaag

SEQ ID NO: 86308 - DNA, 22 bp, Artificial Sequence
  Synthetic
actcccugggaactttgaguct

SEQ ID NO: 86309 - DNA, 28 bp, Artificial Sequence
  Synthetic
gagaaaatgugcaaatcccgaatuaact

SEQ ID NO: 86310 - DNA, 20 bp, Artificial Sequence
  Synthetic
caaggacagcccuttcggua

SEQ ID NO: 86311 - DNA, 24 bp, Artificial Sequence
  Synthetic
gatcauggaggccaaatcctguag

SEQ ID NO: 86312 - DNA, 22 bp, Artificial Sequence
  Synthetic
gctgccagcaaugagaagugaa

SEQ ID NO: 86313 - DNA, 29 bp, Artificial Sequence
  Synthetic
gagatccccttutccagtatcatttucaa

SEQ ID NO: 86314 - DNA, 28 bp, Artificial Sequence
  Synthetic
agaaaacctuccaaagacaaaguagaca

SEQ ID NO: 86315 - DNA, 22 bp, Artificial Sequence
  Synthetic
ggcaacagautttcacagcuca

SEQ ID NO: 86316 - DNA, 25 bp, Artificial Sequence
  Synthetic
ttttcttagtucatcttcggcugct

SEQ ID NO: 86317 - DNA, 27 bp, Artificial Sequence
  Synthetic
cccctggactuttctatgagttcttua

SEQ ID NO: 86318 - DNA, 24 bp, Artificial Sequence
  Synthetic
ggaaagtcuctgtacgugaagagg

SEQ ID NO: 86319 - DNA, 21 bp, Artificial Sequence
  Synthetic
ctgatacugcgcauccaggaa

SEQ ID NO: 86320 - DNA, 28 bp, Artificial Sequence
  Synthetic
tgacccatauaaacctcatcctcaugat

SEQ ID NO: 86321 - DNA, 26 bp, Artificial Sequence
  Synthetic
tgtcauggagaagaaacagaacaucc

SEQ ID NO: 86322 - DNA, 17 bp, Artificial Sequence
  Synthetic
gggagcuggccgcauac

SEQ ID NO: 86323 - DNA, 20 bp, Artificial Sequence
  Synthetic
ccagugacccuacggacaga

SEQ ID NO: 86324 - DNA, 21 bp, Artificial Sequence
  Synthetic
ctgagtccugaccttugcaca

SEQ ID NO: 86325 - DNA, 21 bp, Artificial Sequence
  Synthetic
gttggucccagggaucgaaag

SEQ ID NO: 86326 - DNA, 21 bp, Artificial Sequence
  Synthetic
cccttaggagcguccagguat

SEQ ID NO: 86327 - DNA, 19 bp, Artificial Sequence
  Synthetic
ctctuggccggttcguact

SEQ ID NO: 86328 - DNA, 20 bp, Artificial Sequence
  Synthetic
gcttctccucagggatgcut

SEQ ID NO: 86329 - DNA, 17 bp, Artificial Sequence
  Synthetic
tcuagcgcccgcucaac

SEQ ID NO: 86330 - DNA, 17 bp, Artificial Sequence
  Synthetic
gtgccccgagucctuct

SEQ ID NO: 86331 - DNA, 25 bp, Artificial Sequence
  Synthetic
gtatgctgtcutctagcactucagg

SEQ ID NO: 86332 - DNA, 28 bp, Artificial Sequence
  Synthetic
tctgtagacagaccucttttcaaguaca

SEQ ID NO: 86333 - DNA, 27 bp, Artificial Sequence
  Synthetic
tccctgtaacaugaaagtcacactuac

SEQ ID NO: 86334 - DNA, 24 bp, Artificial Sequence
  Synthetic
ctgtguaggagggacctcttcuat

SEQ ID NO: 86335 - DNA, 21 bp, Artificial Sequence
  Synthetic
gaagagacgcacutcctccug

SEQ ID NO: 86336 - DNA, 21 bp, Artificial Sequence
  Synthetic
tgtaccaccacuccttgugga

SEQ ID NO: 86337 - DNA, 28 bp, Artificial Sequence
  Synthetic
gccaacttggaagucagtctgtttatua

SEQ ID NO: 86338 - DNA, 21 bp, Artificial Sequence
  Synthetic
ccttugtcagagauggcacct

SEQ ID NO: 86339 - DNA, 24 bp, Artificial Sequence
  Synthetic
aaaagacgugtccattuccagact

SEQ ID NO: 86340 - DNA, 21 bp, Artificial Sequence
  Synthetic
tggctgccuttaaaccucgaa

SEQ ID NO: 86341 - DNA, 22 bp, Artificial Sequence
  Synthetic
tgtattcaucgccguacaccag

SEQ ID NO: 86342 - DNA, 19 bp, Artificial Sequence
  Synthetic
gctgaagaucaggcgggut

SEQ ID NO: 86343 - DNA, 27 bp, Artificial Sequence
  Synthetic
gctccagaaaaccaguataaagctuac

SEQ ID NO: 86344 - DNA, 24 bp, Artificial Sequence
  Synthetic
aaaacaautcgactgaucgaccct

SEQ ID NO: 86345 - DNA, 21 bp, Artificial Sequence
  Synthetic
gggaccacguctttactgaug

SEQ ID NO: 86346 - DNA, 25 bp, Artificial Sequence
  Synthetic
ttgctttcttuaacagctccucagt

SEQ ID NO: 86347 - DNA, 23 bp, Artificial Sequence
  Synthetic
accagtatctucactcccagucc

SEQ ID NO: 86348 - DNA, 26 bp, Artificial Sequence
  Synthetic
ctttgctgtgcutcatgatgtaacug

SEQ ID NO: 86349 - DNA, 21 bp, Artificial Sequence
  Synthetic
actcaggacaugtcagccuct

SEQ ID NO: 86350 - DNA, 22 bp, Artificial Sequence
  Synthetic
gcaccugaagtgcuagaagaca

SEQ ID NO: 86351 - DNA, 24 bp, Artificial Sequence
  Synthetic
ccccttcautaaggacuggagaag

SEQ ID NO: 86352 - DNA, 28 bp, Artificial Sequence
  Synthetic
gggcacaacuttcttattaatttucaca

SEQ ID NO: 86353 - DNA, 22 bp, Artificial Sequence
  Synthetic
cctcagccaacuaatcucgcaa

SEQ ID NO: 86354 - DNA, 21 bp, Artificial Sequence
  Synthetic
cctgggcaugctaactcctut

SEQ ID NO: 86355 - DNA, 19 bp, Artificial Sequence
  Synthetic
ggacacgcaggaggucauc

SEQ ID NO: 86356 - DNA, 22 bp, Artificial Sequence
  Synthetic
gatacgtgugccagttuccaga

SEQ ID NO: 86357 - DNA, 22 bp, Artificial Sequence
  Synthetic
ggtgacaggaggauggctctua

SEQ ID NO: 86358 - DNA, 21 bp, Artificial Sequence
  Synthetic
tcugcaccgaggugaaacaag

SEQ ID NO: 86359 - DNA, 22 bp, Artificial Sequence
  Synthetic
gagggugcatttucaggaggaa

SEQ ID NO: 86360 - DNA, 23 bp, Artificial Sequence
  Synthetic
cagtctggaaauggacacgtcut

SEQ ID NO: 86361 - DNA, 24 bp, Artificial Sequence
  Synthetic
tctcaccatutcaggataguccct

SEQ ID NO: 86362 - DNA, 22 bp, Artificial Sequence
  Synthetic
agaggctgacaugtcctgagua

SEQ ID NO: 86363 - DNA, 27 bp, Artificial Sequence
  Synthetic
accaggaagauaccggatgtaaattuc

SEQ ID NO: 86364 - DNA, 28 bp, Artificial Sequence
  Synthetic
ggtgtgagccuttttgttattattucct

SEQ ID NO: 86365 - DNA, 22 bp, Artificial Sequence
  Synthetic
tggctaacucctctttggctuc

SEQ ID NO: 86366 - DNA, 24 bp, Artificial Sequence
  Synthetic
cggtatggtutactctgcttugct

SEQ ID NO: 86367 - DNA, 27 bp, Artificial Sequence
  Synthetic
tcctatcaggacaauttgctcagatuc

SEQ ID NO: 86368 - DNA, 30 bp, Artificial Sequence; identical to SEQ ID NO: 61368
  Synthetic

SEQ ID NO: 86369 - DNA, 24 bp, Artificial Sequence
  Synthetic
ccaaataaactgugcctgcgauat

SEQ ID NO: 86370 - DNA, 19 bp, Artificial Sequence
  Synthetic
ctcagcgucttgccgauca

SEQ ID NO: 86371 - DNA, 27 bp, Artificial Sequence
  Synthetic
agaaacttcuaccaagaatcccucagt

SEQ ID NO: 86372 - DNA, 22 bp, Artificial Sequence
  Synthetic
gtatgttcccuccacccactuc

SEQ ID NO: 86373 - DNA, 29 bp, Artificial Sequence
  Synthetic
gttctgatgatcauttctgtgttgtugac

SEQ ID NO: 86374 - DNA, 18 bp, Artificial Sequence
  Synthetic
gggacucacagtguggca

SEQ ID NO: 86375 - DNA, 21 bp, Artificial Sequence
  Synthetic
ggagagccagcuggagacuaa

SEQ ID NO: 86376 - DNA, 23 bp, Artificial Sequence
  Synthetic
cttgttacautccacugcggaga

SEQ ID NO: 86377 - DNA, 22 bp, Artificial Sequence
  Synthetic
aggacucaaggaagugcaaaca

SEQ ID NO: 86378 - DNA, 20 bp, Artificial Sequence
  Synthetic
cctggcccautttgucacct

SEQ ID NO: 86379 - DNA, 17 bp, Artificial Sequence
  Synthetic
cgcaccuggcagtgugt

SEQ ID NO: 86380 - DNA, 20 bp, Artificial Sequence
  Synthetic
gcaacccutaccccagugag

SEQ ID NO: 86381 - DNA, 26 bp, Artificial Sequence
  Synthetic
tgtccaguaaagcaagacctcuaaga

SEQ ID NO: 86382 - DNA, 24 bp, Artificial Sequence
  Synthetic
agautagttggcugaggcaaaact

SEQ ID NO: 86383 - DNA, 19 bp, Artificial Sequence
  Synthetic
gtcacugcagcagcgagua

SEQ ID NO: 86384 - DNA, 20 bp, Artificial Sequence
  Synthetic
tcctccucccagtacgucac

SEQ ID NO: 86385 - DNA, 24 bp, Artificial Sequence
  Synthetic
agtttctccucagtttccctguct

SEQ ID NO: 86386 - DNA, 23 bp, Artificial Sequence
  Synthetic
tcgtcggagguggaatttuacaa

SEQ ID NO: 86387 - DNA, 23 bp, Artificial Sequence
  Synthetic
ctttacacucctcccuggacaag

SEQ ID NO: 86388 - DNA, 21 bp, Artificial Sequence
  Synthetic
cccaggccagauggataggua

SEQ ID NO: 86389 - DNA, 20 bp, Artificial Sequence
  Synthetic
caagggaugccacctgguat

SEQ ID NO: 86390 - DNA, 23 bp, Artificial Sequence
  Synthetic
tccauggaaaaatctcucgggaa

SEQ ID NO: 86391 - DNA, 25 bp, Artificial Sequence
  Synthetic
gccagucacaaggaagctgaatuat

SEQ ID NO: 86392 - DNA, 23 bp, Artificial Sequence
  Synthetic
agaaaagaaaacugcccccacua

SEQ ID NO: 86393 - DNA, 23 bp, Artificial Sequence
  Synthetic
accaggtgatuaagtacgtgcuc

SEQ ID NO: 86394 - DNA, 31 bp, Artificial Sequence
  Synthetic
aagcactttttauagtatttcctgguaagca

SEQ ID NO: 86395 - DNA, 23 bp, Artificial Sequence
  Synthetic
tgcccuguacacaaacaagaaca

SEQ ID NO: 86396 - DNA, 20 bp, Artificial Sequence
  Synthetic
gucacugcaaggaggcaact

SEQ ID NO: 86397 - DNA, 21 bp, Artificial Sequence
  Synthetic
gctgtcucggtcatccugaac

SEQ ID NO: 86398 - DNA, 26 bp, Artificial Sequence
  Synthetic
agatgatgauagagaacaccctugga

SEQ ID NO: 86399 - DNA, 23 bp, Artificial Sequence
  Synthetic
caauactcacagaugccaaagcc

SEQ ID NO: 86400 - DNA, 27 bp, Artificial Sequence
  Synthetic
tgttccaatagcugacagtctcuacat

SEQ ID NO: 86401 - DNA, 21 bp, Artificial Sequence
  Synthetic
gctacagaguctgtuggagca

SEQ ID NO: 86402 - DNA, 19 bp, Artificial Sequence
  Synthetic
acagggcgutgaccagaug

SEQ ID NO: 86403 - DNA, 27 bp, Artificial Sequence
  Synthetic
ctccttctttugcccctatagaattut

SEQ ID NO: 86404 - DNA, 21 bp, Artificial Sequence
  Synthetic
ggcttttucccgtcagcugat

SEQ ID NO: 86405 - DNA, 27 bp, Artificial Sequence
  Synthetic
aggatctttuaatgtggagugggaaac

SEQ ID NO: 86406 - DNA, 22 bp, Artificial Sequence
  Synthetic
cggttccugaggaatuggaagt

SEQ ID NO: 86407 - DNA, 20 bp, Artificial Sequence
  Synthetic
ctttcggaccuggtggtcut

SEQ ID NO: 86408 - DNA, 18 bp, Artificial Sequence
  Synthetic
tcgcacutgctgcuccaa

SEQ ID NO: 86409 - DNA, 17 bp, Artificial Sequence
  Synthetic
tgcggguccgtgacauc

SEQ ID NO: 86410 - DNA, 21 bp, Artificial Sequence
  Synthetic
cagctcctuaaaggcctcgut

SEQ ID NO: 86411 - DNA, 20 bp, Artificial Sequence
  Synthetic
acctcactguctccctcugg

SEQ ID NO: 86412 - DNA, 24 bp, Artificial Sequence
  Synthetic
gggctaaatuaggctaaggacuca

SEQ ID NO: 86413 - DNA, 19 bp, Artificial Sequence
  Synthetic
ctcctcgcutgcgttucag

SEQ ID NO: 86414 - DNA, 22 bp, Artificial Sequence
  Synthetic
autcaagagcucagacgccaat

SEQ ID NO: 86415 - DNA, 27 bp, Artificial Sequence
  Synthetic
gcagaaagccautcttgatagtcttug

SEQ ID NO: 86416 - DNA, 20 bp, Artificial Sequence
  Synthetic
gagcagccaaaugggaucct

SEQ ID NO: 86417 - DNA, 19 bp, Artificial Sequence
  Synthetic
gcctgacucccattgguct

SEQ ID NO: 86418 - DNA, 26 bp, Artificial Sequence
  Synthetic
gatcatggaagaucaacaccucagat

SEQ ID NO: 86419 - DNA, 22 bp, Artificial Sequence
  Synthetic
cctcaggcaucagtauggacac

SEQ ID NO: 86420 - DNA, 28 bp, Artificial Sequence
  Synthetic
actgacatguacctgtttttaacugcat

SEQ ID NO: 86421 - DNA, 24 bp, Artificial Sequence
  Synthetic
ctccacatuaccagtcttcuccag

SEQ ID NO: 86422 - DNA, 23 bp, Artificial Sequence
  Synthetic
ggccagcguggtagtttttctua

SEQ ID NO: 86423 - DNA, 21 bp, Artificial Sequence
  Synthetic
ggaaggacagguttgctgtug

SEQ ID NO: 86424 - DNA, 22 bp, Artificial Sequence
  Synthetic
tcagcaataguggcccttucaa

SEQ ID NO: 86425 - DNA, 26 bp, Artificial Sequence
  Synthetic
cattctgacauctccaacagattugg

SEQ ID NO: 86426 - DNA, 24 bp, Artificial Sequence
  Synthetic
gctccaggauctccttcaaguaag

SEQ ID NO: 86427 - DNA, 31 bp, Artificial Sequence
  Synthetic
aaaaagttgctgutttgaattagctcuacaa

SEQ ID NO: 86428 - DNA, 27 bp, Artificial Sequence
  Synthetic
ttggtactaatgugttcacagaaugct

SEQ ID NO: 86429 - DNA, 26 bp, Artificial Sequence
  Synthetic
catccccacaacuaaaacactcauct

SEQ ID NO: 86430 - DNA, 23 bp, Artificial Sequence
  Synthetic
acgttttcttugggacctguagt

SEQ ID NO: 86431 - DNA, 27 bp, Artificial Sequence
  Synthetic
agagactttgtauaaaggcagaacgug

SEQ ID NO: 86432 - DNA, 20 bp, Artificial Sequence
  Synthetic
aggcttgcuttggtgtguca

SEQ ID NO: 86433 - DNA, 21 bp, Artificial Sequence
  Synthetic
cctcgaggaggcuttgacuct

SEQ ID NO: 86434 - DNA, 20 bp, Artificial Sequence
  Synthetic
agtuagggcagccacgaaug

SEQ ID NO: 86435 - DNA, 19 bp, Artificial Sequence
  Synthetic
agtgcctguctgtccacug

SEQ ID NO: 86436 - DNA, 20 bp, Artificial Sequence
  Synthetic
ctcccacauccccgaggaua

SEQ ID NO: 86437 - DNA, 18 bp, Artificial Sequence
  Synthetic
cggguacaacggctcuca

SEQ ID NO: 86438 - DNA, 21 bp, Artificial Sequence
  Synthetic
ccugaggagaggacucgagat

SEQ ID NO: 86439 - DNA, 21 bp, Artificial Sequence
  Synthetic
cucatgcaauccacagggaca

SEQ ID NO: 86440 - DNA, 28 bp, Artificial Sequence
  Synthetic
cttactaggaaguttttccatggctuct

SEQ ID NO: 86441 - DNA, 27 bp, Artificial Sequence
  Synthetic
cctatttgccaaagugtgactacagut

SEQ ID NO: 86442 - DNA, 22 bp, Artificial Sequence
  Synthetic
gcctguaacagtgtttcugcaa

SEQ ID NO: 86443 - DNA, 22 bp, Artificial Sequence
  Synthetic
ctcttgggaccutcttcuagcc

SEQ ID NO: 86444 - DNA, 18 bp, Artificial Sequence
  Synthetic
gtcacccacgucgtcugt

SEQ ID NO: 86445 - DNA, 20 bp, Artificial Sequence
  Synthetic
gccacttuggcccccatuat

SEQ ID NO: 86446 - DNA, 21 bp, Artificial Sequence
  Synthetic
agctggtcugacttggacuct

SEQ ID NO: 86447 - DNA, 27 bp, Artificial Sequence
  Synthetic
cgagaacacaaugttcaucaacaagat

SEQ ID NO: 86448 - DNA, 22 bp, Artificial Sequence
  Synthetic
ggagacugtctcgguaaaaggg

SEQ ID NO: 86449 - DNA, 25 bp, Artificial Sequence
  Synthetic
ataccgacugccatttcttttgtut

SEQ ID NO: 86450 - DNA, 21 bp, Artificial Sequence
  Synthetic
ccttctcuggcaacagcugat

SEQ ID NO: 86451 - DNA, 22 bp, Artificial Sequence
  Synthetic
gaagtgcucatccttgauccct

SEQ ID NO: 86452 - DNA, 23 bp, Artificial Sequence
  Synthetic
ggugaaaucacaaaggagcgaga

SEQ ID NO: 86453 - DNA, 25 bp, Artificial Sequence
  Synthetic
cgagtagcgguacaaatggatttug

SEQ ID NO: 86454 - DNA, 23 bp, Artificial Sequence
  Synthetic
agccaatgaaggugagtcctcua

SEQ ID NO: 86455 - DNA, 20 bp, Artificial Sequence
  Synthetic
gaagaaucagcacgcaccuc

SEQ ID NO: 86456 - DNA, 22 bp, Artificial Sequence
  Synthetic
aaaacctgaggaugagcagcut

SEQ ID NO: 86457 - DNA, 21 bp, Artificial Sequence
  Synthetic
ggcaagtctugactggctcug

SEQ ID NO: 86458 - DNA, 23 bp, Artificial Sequence
  Synthetic
tcactatgacucctgctguccat

SEQ ID NO: 86459 - DNA, 23 bp, Artificial Sequence
  Synthetic
agtccaagtucaagtccaccauc

SEQ ID NO: 86460 - DNA, 20 bp, Artificial Sequence
  Synthetic
cagucccugaacccaagcat

SEQ ID NO: 86461 - DNA, 17 bp, Artificial Sequence
  Synthetic
cagcuggtuggcgaagg

SEQ ID NO: 86462 - DNA, 21 bp, Artificial Sequence
  Synthetic
ctcctccagcugtgcaatcut

SEQ ID NO: 86463 - DNA, 21 bp, Artificial Sequence
  Synthetic
cggcccagaagaaugagagug

SEQ ID NO: 86464 - DNA, 18 bp, Artificial Sequence
  Synthetic
gtctcgaguggccgtuct

SEQ ID NO: 86465 - DNA, 22 bp, Artificial Sequence
  Synthetic
ggaaaaggtgucaggtgtggut

SEQ ID NO: 86466 - DNA, 19 bp, Artificial Sequence
  Synthetic
cctcaccgaccuggtctut

SEQ ID NO: 86467 - DNA, 20 bp, Artificial Sequence
  Synthetic
agctcccuggaagagacucc

SEQ ID NO: 86468 - DNA, 20 bp, Artificial Sequence
  Synthetic
ctccggagcuccttgttcug

SEQ ID NO: 86469 - DNA, 20 bp, Artificial Sequence
  Synthetic
ggtctcagugcgctctctug

SEQ ID NO: 86470 - DNA, 24 bp, Artificial Sequence
  Synthetic
tccctggauctatagctctucacc

SEQ ID NO: 86471 - DNA, 24 bp, Artificial Sequence
  Synthetic
aaaggtauccctctttgugcaaca

SEQ ID NO: 86472 - DNA, 23 bp, Artificial Sequence
  Synthetic
ttcggcgaaaagucaggatgtua

SEQ ID NO: 86473 - DNA, 27 bp, Artificial Sequence
  Synthetic
gttttcagtttgutttgtacgtgaugg

SEQ ID NO: 86474 - DNA, 26 bp, Artificial Sequence
  Synthetic
ctcccuggagaacagctcaaauaaaa

SEQ ID NO: 86475 - DNA, 28 bp, Artificial Sequence
  Synthetic
ccacacaacacauttatctacaaaugct

SEQ ID NO: 86476 - DNA, 22 bp, Artificial Sequence
  Synthetic
tcctggaaauaacctgggucct

SEQ ID NO: 86477 - DNA, 28 bp, Artificial Sequence
  Synthetic
ttacccaggcugcaataagagatattut

SEQ ID NO: 86478 - DNA, 22 bp, Artificial Sequence
  Synthetic
gcatctgtaagugggacagcut

SEQ ID NO: 86479 - DNA, 25 bp, Artificial Sequence
  Synthetic
ttaaagcctcccutcctcttacuct

SEQ ID NO: 86480 - DNA, 27 bp, Artificial Sequence
  Synthetic
gctatatgctautcattaccgtgugct

SEQ ID NO: 86481 - DNA, 28 bp, Artificial Sequence
  Synthetic
aacggaaactguaaaacaagaaaaugct

SEQ ID NO: 86482 - DNA, 26 bp, Artificial Sequence
  Synthetic
gatgtctatgaagugttgtggtucct

SEQ ID NO: 86483 - DNA, 28 bp, Artificial Sequence
  Synthetic
acagccagauatcaactgtuacagaaat

SEQ ID NO: 86484 - DNA, 21 bp, Artificial Sequence
  Synthetic
agtgagaucccagcccagaut

SEQ ID NO: 86485 - DNA, 24 bp, Artificial Sequence
  Synthetic
cagcatgtgcugaattcttgacuc

SEQ ID NO: 86486 - DNA, 22 bp, Artificial Sequence
  Synthetic
gggtgaccccuatgtggtacua

SEQ ID NO: 86487 - DNA, 25 bp, Artificial Sequence
  Synthetic
tgaaacacttcuggcagtatcctuc

SEQ ID NO: 86488 - DNA, 22 bp, Artificial Sequence
  Synthetic
gcacagcccuttggauaacagt

SEQ ID NO: 86489 - DNA, 20 bp, Artificial Sequence
  Synthetic
ctucccacaggaaggctuga

SEQ ID NO: 86490 - DNA, 22 bp, Artificial Sequence
  Synthetic
gcaccaagaccccuttaacuca

SEQ ID NO: 86491 - DNA, 21 bp, Artificial Sequence
  Synthetic
gtagaaauacggcugcaccga

SEQ ID NO: 86492 - DNA, 20 bp, Artificial Sequence
  Synthetic
gccaagcucgtcucagagaa

SEQ ID NO: 86493 - DNA, 19 bp, Artificial Sequence
  Synthetic
gggtcgaugcactcugagg

SEQ ID NO: 86494 - DNA, 20 bp, Artificial Sequence
  Synthetic
ccagcutgtaccugcaggat

SEQ ID NO: 86495 - DNA, 19 bp, Artificial Sequence
  Synthetic
gaggacuccgucgaggaga

SEQ ID NO: 86496 - DNA, 20 bp, Artificial Sequence
  Synthetic
tctgaggucccccttctgut

SEQ ID NO: 86497 - DNA, 18 bp, Artificial Sequence
  Synthetic
ggagggugcagtgtuggg

SEQ ID NO: 86498 - DNA, 21 bp, Artificial Sequence
  Synthetic
ctctccgucctcggattcuct

SEQ ID NO: 86499 - DNA, 26 bp, Artificial Sequence
  Synthetic
gccaatgaaaaugggaaaggtaucca

SEQ ID NO: 86500 - DNA, 23 bp, Artificial Sequence
  Synthetic
aggaactaugacctcgacuacga

SEQ ID NO: 86501 - DNA, 21 bp, Artificial Sequence
  Synthetic
gcagcagcucgaatttctucc

SEQ ID NO: 86502 - DNA, 21 bp, Artificial Sequence
  Synthetic
accctuggaagcaccatgtut

SEQ ID NO: 86503 - DNA, 22 bp, Artificial Sequence
  Synthetic
cuccagcaaaaagcaucgaaca

SEQ ID NO: 86504 - DNA, 28 bp, Artificial Sequence
  Synthetic
cactattaaccacagautgctgattugg

SEQ ID NO: 86505 - DNA, 26 bp, Artificial Sequence
  Synthetic
ctttcagttguttcatgacgaucagg

SEQ ID NO: 86506 - DNA, 19 bp, Artificial Sequence
  Synthetic
ctgguaacaccgcccugat

SEQ ID NO: 86507 - DNA, 29 bp, Artificial Sequence
  Synthetic
gtaggaaacattuactaggacttgaacut

SEQ ID NO: 86508 - DNA, 23 bp, Artificial Sequence
  Synthetic
ggataaaugaccggtaugcccaa

SEQ ID NO: 86509 - DNA, 21 bp, Artificial Sequence
  Synthetic
ggcttcaguggtatggacugt

SEQ ID NO: 86510 - DNA, 18 bp, Artificial Sequence
  Synthetic
cgcccagcgaggauauct

SEQ ID NO: 86511 - DNA, 19 bp, Artificial Sequence
  Synthetic
gucgttgtcuccccgaagg

SEQ ID NO: 86512 - DNA, 19 bp, Artificial Sequence
  Synthetic
cctccuacgttgcggucac

SEQ ID NO: 86513 - DNA, 23 bp, Artificial Sequence
  Synthetic
tcgcagaugaaactctggtucac

SEQ ID NO: 86514 - DNA, 28 bp, Artificial Sequence
  Synthetic
ttttgtcctugaagaagccttattcuca

SEQ ID NO: 86515 - DNA, 19 bp, Artificial Sequence
  Synthetic
ggcauggacguacagcaag

SEQ ID NO: 86516 - DNA, 19 bp, Artificial Sequence
  Synthetic
agcugcugggaggagacat

SEQ ID NO: 86517 - DNA, 17 bp, Artificial Sequence
  Synthetic
gggcugccgctgtctut

SEQ ID NO: 86518 - DNA, 22 bp, Artificial Sequence
  Synthetic
ctgggagaagcugtatguggac

SEQ ID NO: 86519 - DNA, 20 bp, Artificial Sequence
  Synthetic
gtgtccucctggaugcagat

SEQ ID NO: 86520 - DNA, 20 bp, Artificial Sequence
  Synthetic
cggctgcaugagaacaacug

SEQ ID NO: 86521 - DNA, 20 bp, Artificial Sequence
  Synthetic
ctgtgauaagggcggctuga

SEQ ID NO: 86522 - DNA, 22 bp, Artificial Sequence
  Synthetic
ggcagtcaucaatgtcctccuc

SEQ ID NO: 86523 - DNA, 25 bp, Artificial Sequence
  Synthetic
gtcatttatuggccctgtgttccua

SEQ ID NO: 86524 - DNA, 18 bp, Artificial Sequence
  Synthetic
ggcucccacatgggugac

SEQ ID NO: 86525 - DNA, 23 bp, Artificial Sequence
  Synthetic
tgccctgatuaaaccctgctuac

SEQ ID NO: 86526 - DNA, 27 bp, Artificial Sequence
  Synthetic
cattgcattcaaauttggcatactugt

SEQ ID NO: 86527 - DNA, 20 bp, Artificial Sequence
  Synthetic
ccacaccaugaugagcacca

SEQ ID NO: 86528 - DNA, 21 bp, Artificial Sequence
  Synthetic
cactgtccaacugctgtgaug

SEQ ID NO: 86529 - DNA, 25 bp, Artificial Sequence
  Synthetic
acttttcatugagggtgcatctuct

SEQ ID NO: 86530 - DNA, 27 bp, Artificial Sequence
  Synthetic
ctctagtgagtutccacttcaaguagt

SEQ ID NO: 86531 - DNA, 21 bp, Artificial Sequence
  Synthetic
gaccaggcuggttcagguaag

SEQ ID NO: 86532 - DNA, 30 bp, Artificial Sequence; identical to SEQ ID NO: 20354
  Synthetic

SEQ ID NO: 86533 - DNA, 28 bp, Artificial Sequence
  Synthetic
ggtcctgctuatgtctgtaataucacaa

SEQ ID NO: 86534 - DNA, 21 bp, Artificial Sequence
  Synthetic
cgacagaagaugcacccucaa

SEQ ID NO: 86535 - DNA, 28 bp, Artificial Sequence
  Synthetic
tccacaatacucaaatcctattcuccca

SEQ ID NO: 86536 - DNA, 27 bp, Artificial Sequence
  Synthetic
ctttctggaagugaggtgctatttuct

SEQ ID NO: 86537 - DNA, 24 bp, Artificial Sequence
  Synthetic
ccatgutaaaacttcaugcagcca

SEQ ID NO: 86538 - DNA, 19 bp, Artificial Sequence
  Synthetic
caggaccutggctgcauga

SEQ ID NO: 86539 - DNA, 30 bp, Artificial Sequence
  Synthetic
cacttgctauaagcctatacatttttgugt

SEQ ID NO: 86540 - DNA, 22 bp, Artificial Sequence
  Synthetic
ctgacguccagtgtacagugaa

SEQ ID NO: 86541 - DNA, 26 bp, Artificial Sequence
  Synthetic
ggttattcagucagtagctgcugaag

SEQ ID NO: 86542 - DNA, 19 bp, Artificial Sequence
  Synthetic
ccagcagaagagccuccut

SEQ ID NO: 86543 - DNA, 27 bp, Artificial Sequence
  Synthetic
gaagaatggcugcagattgagatauca

SEQ ID NO: 86544 - DNA, 26 bp, Artificial Sequence
  Synthetic
caagtacttugcaaacacacauacct

SEQ ID NO: 86545 - DNA, 21 bp, Artificial Sequence
  Synthetic
tcccuaaagctggagucccaa

SEQ ID NO: 86546 - DNA, 20 bp, Artificial Sequence
  Synthetic
ggaccuagcgtggacucact

SEQ ID NO: 86547 - DNA, 19 bp, Artificial Sequence
  Synthetic
catctgaaucgggcugcga

SEQ ID NO: 86548 - DNA, 27 bp, Artificial Sequence
  Synthetic
ttctagtaattugggaatgcctggtut

SEQ ID NO: 86549 - DNA, 28 bp, Artificial Sequence
  Synthetic
cccgcctcugaatatttctttaatgtug

SEQ ID NO: 86550 - DNA, 19 bp, Artificial Sequence
  Synthetic
cctggcguagactguggac

SEQ ID NO: 86551 - DNA, 17 bp, Artificial Sequence
  Synthetic
gcutcugccgccacaac

SEQ ID NO: 86552 - DNA, 19 bp, Artificial Sequence
  Synthetic
tccuacgguggagccaaga

SEQ ID NO: 86553 - DNA, 18 bp, Artificial Sequence
  Synthetic
gttcuccagcagggcugt

SEQ ID NO: 86554 - DNA, 19 bp, Artificial Sequence
  Synthetic
caccgaugccguggaagat

SEQ ID NO: 86555 - DNA, 21 bp, Artificial Sequence
  Synthetic
gagcucagaggaagcctgaug

SEQ ID NO: 86556 - DNA, 23 bp, Artificial Sequence
  Synthetic
gutagtttctcuaggcacggcaa

SEQ ID NO: 86557 - DNA, 22 bp, Artificial Sequence
  Synthetic
agctgaaggcaaugatgcauga

SEQ ID NO: 86558 - DNA, 27 bp, Artificial Sequence
  Synthetic
gagggaggaaugataaaggttaaguga

SEQ ID NO: 86559 - DNA, 22 bp, Artificial Sequence
  Synthetic
ggucggccaagacacctauaag

SEQ ID NO: 86560 - DNA, 19 bp, Artificial Sequence
  Synthetic
gtgctacuctcggucccaa

SEQ ID NO: 86561 - DNA, 24 bp, Artificial Sequence
  Synthetic
gatggacaggacgauctcauagga

SEQ ID NO: 86562 - DNA, 23 bp, Artificial Sequence
  Synthetic
gagcugggaaacagaagaatgug

SEQ ID NO: 86563 - DNA, 24 bp, Artificial Sequence
  Synthetic
ctatctccaucagtgacccccuaa

SEQ ID NO: 86564 - DNA, 27 bp, Artificial Sequence
  Synthetic
tgaatccttttaccucctgttctcuca

SEQ ID NO: 86565 - DNA, 23 bp, Artificial Sequence
  Synthetic
gaaacgagacgauggttcuaggg

SEQ ID NO: 86566 - DNA, 23 bp, Artificial Sequence
  Synthetic
aattcagtccucatcagctguct

SEQ ID NO: 86567 - DNA, 22 bp, Artificial Sequence
  Synthetic
gaggtcctuccctttccactuc

SEQ ID NO: 86568 - DNA, 19 bp, Artificial Sequence
  Synthetic
catguccgaacgagguggt

SEQ ID NO: 86569 - DNA, 19 bp, Artificial Sequence
  Synthetic
gcugaaggagccgtucgat

SEQ ID NO: 86570 - DNA, 20 bp, Artificial Sequence
  Synthetic
attggcugcagagtucggat

SEQ ID NO: 86571 - DNA, 28 bp, Artificial Sequence
  Synthetic
cuactatcaatacucgaccagcagaaaa

SEQ ID NO: 86572 - DNA, 20 bp, Artificial Sequence
  Synthetic
gcccgtgutctctcctttug

SEQ ID NO: 86573 - DNA, 21 bp, Artificial Sequence
  Synthetic
ctcacctttuggccaccttug

SEQ ID NO: 86574 - DNA, 28 bp, Artificial Sequence
  Synthetic
cctctattttgacutcctgtctcugaac

SEQ ID NO: 86575 - DNA, 24 bp, Artificial Sequence
  Synthetic
tggaaauacugcggaacaaacaga

SEQ ID NO: 86576 - DNA, 21 bp, Artificial Sequence
  Synthetic
cccaagaguacctgccatgug

SEQ ID NO: 86577 - DNA, 25 bp, Artificial Sequence
  Synthetic
ctgctgatccuctttttctctcugt

SEQ ID NO: 86578 - DNA, 21 bp, Artificial Sequence
  Synthetic
gtcagccagcugctgtttcua

SEQ ID NO: 86579 - DNA, 23 bp, Artificial Sequence
  Synthetic
gttctgaggcutcatatcucggt

SEQ ID NO: 86580 - DNA, 22 bp, Artificial Sequence
  Synthetic
cgtgggacautctgcugaacat

SEQ ID NO: 86581 - DNA, 22 bp, Artificial Sequence
  Synthetic
cccaagguaccatcttcugagt

SEQ ID NO: 86582 - DNA, 21 bp, Artificial Sequence
  Synthetic
ctggacatggaugctgaccuc

SEQ ID NO: 86583 - DNA, 27 bp, Artificial Sequence
  Synthetic
gctgctgggaaguaaattagaggauac

SEQ ID NO: 86584 - DNA, 24 bp, Artificial Sequence
  Synthetic
gagaaaaatccaaugctggtgugt

SEQ ID NO: 86585 - DNA, 23 bp, Artificial Sequence
  Synthetic
ccctcttcaucccaagattcuca

SEQ ID NO: 86586 - DNA, 21 bp, Artificial Sequence
  Synthetic
ttgtgaacacagugtcugcct

SEQ ID NO: 86587 - DNA, 26 bp, Artificial Sequence
  Synthetic
agaagctcttggauaaaggacaagug

SEQ ID NO: 86588 - DNA, 25 bp, Artificial Sequence
  Synthetic
gctttcacaccuctcagtgacttuc

SEQ ID NO: 86589 - DNA, 28 bp, Artificial Sequence
  Synthetic
ggcagtttcaauaatgctgtatgtugac

SEQ ID NO: 86590 - DNA, 27 bp, Artificial Sequence
  Synthetic
tgtgtatggaggugattcttcagauga

SEQ ID NO: 86591 - DNA, 29 bp, Artificial Sequence
  Synthetic
ttccatttgaaaagugaatacatgccaut

SEQ ID NO: 86592 - DNA, 25 bp, Artificial Sequence
  Synthetic
ccaaagaggcauctatgtgauccag

SEQ ID NO: 86593 - DNA, 27 bp, Artificial Sequence
  Synthetic
tctgtgaagagcauaggttagaaguca

SEQ ID NO: 86594 - DNA, 18 bp, Artificial Sequence
  Synthetic
gggccacaacugctgcua

SEQ ID NO: 86595 - DNA, 19 bp, Artificial Sequence
  Synthetic
gcaggagcugcaggucaag

SEQ ID NO: 86596 - DNA, 18 bp, Artificial Sequence
  Synthetic
gcgctcuccctcgtugaa

SEQ ID NO: 86597 - DNA, 23 bp, Artificial Sequence
  Synthetic
aggugaaagcaaaccucgagaag

SEQ ID NO: 86598 - DNA, 23 bp, Artificial Sequence
  Synthetic
gctctaacucctctgctgtucct

SEQ ID NO: 86599 - DNA, 19 bp, Artificial Sequence
  Synthetic
ccacguagccgaaguccac

SEQ ID NO: 86600 - DNA, 20 bp, Artificial Sequence
  Synthetic
cugcaucacggaacgagaag

SEQ ID NO: 86601 - DNA, 20 bp, Artificial Sequence
  Synthetic
gtttccggcautggtugagt

SEQ ID NO: 86602 - DNA, 20 bp, Artificial Sequence
  Synthetic
catacugccagggtcctguc

SEQ ID NO: 86603 - DNA, 20 bp, Artificial Sequence
  Synthetic
tgctgtgtuggagcaagugt

SEQ ID NO: 86604 - DNA, 17 bp, Artificial Sequence
  Synthetic
ccuggcgugaccaccaa

SEQ ID NO: 86605 - DNA, 18 bp, Artificial Sequence
  Synthetic
cctgucccaccagcucac

SEQ ID NO: 86606 - DNA, 22 bp, Artificial Sequence
  Synthetic
ctcgttcuccagagtctgctut

SEQ ID NO: 86607 - DNA, 21 bp, Artificial Sequence
  Synthetic
gaagcagcgaugtctggauct

SEQ ID NO: 86608 - DNA, 20 bp, Artificial Sequence
  Synthetic
gcatucccaccgcatccuac

SEQ ID NO: 86609 - DNA, 24 bp, Artificial Sequence
  Synthetic
gtggaacuggaagcttagauggat

SEQ ID NO: 86610 - DNA, 24 bp, Artificial Sequence
  Synthetic
cctagcttagaugatgacgaugct

SEQ ID NO: 86611 - DNA, 22 bp, Artificial Sequence
  Synthetic
ccctcucaccacctttcttuca

SEQ ID NO: 86612 - DNA, 25 bp, Artificial Sequence
  Synthetic
gcttcgtucggttttgctguaaaaa

SEQ ID NO: 86613 - DNA, 27 bp, Artificial Sequence
  Synthetic
tctagatugcaacagaggcuacaaaag

SEQ ID NO: 86614 - DNA, 25 bp, Artificial Sequence
  Synthetic
tccccatuggtttgttatugcagat

SEQ ID NO: 86615 - DNA, 24 bp, Artificial Sequence
  Synthetic
agtttcaucgagttcuagcccaac

SEQ ID NO: 86616 - DNA, 20 bp, Artificial Sequence
  Synthetic
tgcgggcacacacutauagg

SEQ ID NO: 86617 - DNA, 19 bp, Artificial Sequence
  Synthetic
cacagcaaagcuggcacug

SEQ ID NO: 86618 - DNA, 28 bp, Artificial Sequence
  Synthetic
aactatcttgtutatttggagctuccca

SEQ ID NO: 86619 - DNA, 21 bp, Artificial Sequence
  Synthetic
gaaagcccacgacaugaucac

SEQ ID NO: 86620 - DNA, 18 bp, Artificial Sequence
  Synthetic
tguctcgggtucgagggt

SEQ ID NO: 86621 - DNA, 22 bp, Artificial Sequence
  Synthetic
cagggtugactgagtcttuggt

SEQ ID NO: 86622 - DNA, 23 bp, Artificial Sequence
  Synthetic
gggtgaaguggactgtactctua

SEQ ID NO: 86623 - DNA, 21 bp, Artificial Sequence
  Synthetic
gatgcagccucactagaggug

SEQ ID NO: 86624 - DNA, 22 bp, Artificial Sequence
  Synthetic
gcttggagacaaggaucctgut

SEQ ID NO: 86625 - DNA, 21 bp, Artificial Sequence
  Synthetic
gcccagagcugatgcaacaut

SEQ ID NO: 86626 - DNA, 19 bp, Artificial Sequence
  Synthetic
ccgtgguacgctucagagt

SEQ ID NO: 86627 - DNA, 21 bp, Artificial Sequence
  Synthetic
ccttuacaggacgacguggag

SEQ ID NO: 86628 - DNA, 20 bp, Artificial Sequence
  Synthetic
agagtgcgguattcccggua

SEQ ID NO: 86629 - DNA, 20 bp, Artificial Sequence
  Synthetic
ctgacgcgutcccttuacag

SEQ ID NO: 86630 - DNA, 28 bp, Artificial Sequence
  Synthetic
gtaagtcaucgaaagcatcatagtuact

SEQ ID NO: 86631 - DNA, 25 bp, Artificial Sequence
  Synthetic
ttctgccagtutctgctgaaattug

SEQ ID NO: 86632 - DNA, 24 bp, Artificial Sequence
  Synthetic
cagtaaacatcucccaggagaguc

SEQ ID NO: 86633 - DNA, 24 bp, Artificial Sequence
  Synthetic
gcataaacaaaccugccaacugaa

SEQ ID NO: 86634 - DNA, 20 bp, Artificial Sequence
  Synthetic
ccatctuggccctctctgut

SEQ ID NO: 86635 - DNA, 21 bp, Artificial Sequence
  Synthetic
cttgtctgguttggccugact

SEQ ID NO: 86636 - DNA, 27 bp, Artificial Sequence
  Synthetic
agaagacattacuaaccctggctcuaa

SEQ ID NO: 86637 - DNA, 20 bp, Artificial Sequence
  Synthetic
cctguccctgctucagcaag

SEQ ID NO: 86638 - DNA, 20 bp, Artificial Sequence
  Synthetic
cacugtgtgcguagacaggt

SEQ ID NO: 86639 - DNA, 23 bp, Artificial Sequence
  Synthetic
ggcaggaggaaagaguacaaugt

SEQ ID NO: 86640 - DNA, 28 bp, Artificial Sequence
  Synthetic
gcatatgagguagaactgaacggataut

SEQ ID NO: 86641 - DNA, 26 bp, Artificial Sequence
  Synthetic
gcagttaaaccuctacaacacuccat

SEQ ID NO: 86642 - DNA, 22 bp, Artificial Sequence
  Synthetic
cgtccccautttctuccaacag

SEQ ID NO: 86643 - DNA, 24 bp, Artificial Sequence
  Synthetic
gagcacagaaauctccagactuca

SEQ ID NO: 86644 - DNA, 22 bp, Artificial Sequence
  Synthetic
ggccagtutctctgctucagaa

SEQ ID NO: 86645 - DNA, 21 bp, Artificial Sequence
  Synthetic
tcauctgctcugaggcaaacc

SEQ ID NO: 86646 - DNA, 19 bp, Artificial Sequence
  Synthetic
tgacggcucccttctccut

SEQ ID NO: 86647 - DNA, 19 bp, Artificial Sequence
  Synthetic
gcagccagagacgguacuc

SEQ ID NO: 86648 - DNA, 25 bp, Artificial Sequence
  Synthetic
tgtgtttuaaaaaggctcctcuggt

SEQ ID NO: 86649 - DNA, 17 bp, Artificial Sequence
  Synthetic
cagaucgcccgcatucc

SEQ ID NO: 86650 - DNA, 18 bp, Artificial Sequence
  Synthetic
gcgcgccguttactugaa

SEQ ID NO: 86651 - DNA, 19 bp, Artificial Sequence
  Synthetic
ctgaccaguggtccagcuc

SEQ ID NO: 86652 - DNA, 20 bp, Artificial Sequence
  Synthetic
ccagucggagacgtuggaat

SEQ ID NO: 86653 - DNA, 18 bp, Artificial Sequence
  Synthetic
cccucgcagcacagcuac

SEQ ID NO: 86654 - DNA, 18 bp, Artificial Sequence
  Synthetic
gutguccacaggcgagga

SEQ ID NO: 86655 - DNA, 17 bp, Artificial Sequence
  Synthetic
cctggcggugcacacua

SEQ ID NO: 86656 - DNA, 20 bp, Artificial Sequence
  Synthetic
caaaggaccccguctgtcug

SEQ ID NO: 86657 - DNA, 24 bp, Artificial Sequence
  Synthetic
cttgagagaaagggugttguacct

SEQ ID NO: 86658 - DNA, 23 bp, Artificial Sequence
  Synthetic
caaaatactugcgagaacggugt

SEQ ID NO: 86659 - DNA, 25 bp, Artificial Sequence
  Synthetic
tgacattucacccgagauaggagaa

SEQ ID NO: 86660 - DNA, 19 bp, Artificial Sequence
  Synthetic
tgaaatucagggccccucc

SEQ ID NO: 86661 - DNA, 17 bp, Artificial Sequence
  Synthetic
gcaucgggcaccugaac

SEQ ID NO: 86662 - DNA, 19 bp, Artificial Sequence
  Synthetic
ggugggccagtcucaaagg

SEQ ID NO: 86663 - DNA, 17 bp, Artificial Sequence
  Synthetic
cagcaguctccguccgt

SEQ ID NO: 86664 - DNA, 18 bp, Artificial Sequence
  Synthetic
catcccaggcagguggut

SEQ ID NO: 86665 - DNA, 17 bp, Artificial Sequence
  Synthetic
agctccggcaugctcuc

SEQ ID NO: 86666 - DNA, 23 bp, Artificial Sequence
  Synthetic
attctcuccagctgttucccaag

SEQ ID NO: 86667 - DNA, 28 bp, Artificial Sequence
  Synthetic
tcttatgatagttcuctgaggtcaggut

SEQ ID NO: 86668 - DNA, 20 bp, Artificial Sequence
  Synthetic
cacgtcugacagguagccat

SEQ ID NO: 86669 - DNA, 18 bp, Artificial Sequence
  Synthetic
ggccuguggaagcaagga

SEQ ID NO: 86670 - DNA, 20 bp, Artificial Sequence
  Synthetic
ccgtccugggacttctucct

SEQ ID NO: 86671 - DNA, 17 bp, Artificial Sequence
  Synthetic
cgcccaacggcuaccug

SEQ ID NO: 86672 - DNA, 20 bp, Artificial Sequence
  Synthetic
cgagctcugcatggacugaa

SEQ ID NO: 86673 - DNA, 23 bp, Artificial Sequence
  Synthetic
accaguggatttcctugacccat

SEQ ID NO: 86674 - DNA, 18 bp, Artificial Sequence
  Synthetic
gggctugcggaccttcut

SEQ ID NO: 86675 - DNA, 19 bp, Artificial Sequence
  Synthetic
gcgcatgcaucacgacauc

SEQ ID NO: 86676 - DNA, 22 bp, Artificial Sequence
  Synthetic
ccacaaguatcuggagcccaac

SEQ ID NO: 86677 - DNA, 27 bp, Artificial Sequence
  Synthetic
gggaggtugaacgttacataaauacca

SEQ ID NO: 86678 - DNA, 28 bp, Artificial Sequence
  Synthetic
atctgtgguctaattagcucaaaagaaa

SEQ ID NO: 86679 - DNA, 28 bp, Artificial Sequence
  Synthetic
aggaagaaagugaaaatgatugggaaga

SEQ ID NO: 86680 - DNA, 18 bp, Artificial Sequence
  Synthetic
ctcgagcacuggcagugt

SEQ ID NO: 86681 - DNA, 17 bp, Artificial Sequence
  Synthetic
tggaccggccagaugug

SEQ ID NO: 86682 - DNA, 22 bp, Artificial Sequence
  Synthetic
accatgcugaggagactgttut

SEQ ID NO: 86683 - DNA, 25 bp, Artificial Sequence
  Synthetic
gcagtatctcutctgggaacugaga

SEQ ID NO: 86684 - DNA, 19 bp, Artificial Sequence
  Synthetic
cctgcacguagctcucgaa

SEQ ID NO: 86685 - DNA, 17 bp, Artificial Sequence
  Synthetic
caugugcagccgggaac

SEQ ID NO: 86686 - DNA, 26 bp, Artificial Sequence
  Synthetic
gtctatcgagtgugtgcatatgtgua

SEQ ID NO: 86687 - DNA, 23 bp, Artificial Sequence
  Synthetic
cttcctuacctgggatuggaaca

SEQ ID NO: 86688 - DNA, 20 bp, Artificial Sequence
  Synthetic
gcatgaaggcucgctguacc

SEQ ID NO: 86689 - DNA, 20 bp, Artificial Sequence
  Synthetic
acatggucccatcccacuga

SEQ ID NO: 86690 - DNA, 22 bp, Artificial Sequence
  Synthetic
agggccaaagaguccatcagua

SEQ ID NO: 86691 - DNA, 20 bp, Artificial Sequence
  Synthetic
gaauacacacgcacggtguc

SEQ ID NO: 86692 - DNA, 19 bp, Artificial Sequence
  Synthetic
gaacgagggugcgaacuct

SEQ ID NO: 86693 - DNA, 22 bp, Artificial Sequence
  Synthetic
gcaatgggccutcctcttctuc

SEQ ID NO: 86694 - DNA, 27 bp, Artificial Sequence
  Synthetic
gaaagtgaaatucttcctgaaauggca

SEQ ID NO: 86695 - DNA, 28 bp, Artificial Sequence
  Synthetic
aaagtcauccaaagatagcugaggaaat

SEQ ID NO: 86696 - DNA, 21 bp, Artificial Sequence
  Synthetic
gctcaccugaatgcctcugaa

SEQ ID NO: 86697 - DNA, 24 bp, Artificial Sequence
  Synthetic
tgagccttttucccttctttgugt

SEQ ID NO: 86698 - DNA, 25 bp, Artificial Sequence
  Synthetic
gtcaagatgauacaggtcagtgugg

SEQ ID NO: 86699 - DNA, 26 bp, Artificial Sequence
  Synthetic
caagttttcaaaucctgtggaauggt

SEQ ID NO: 86700 - DNA, 23 bp, Artificial Sequence
  Synthetic
tgutgatuagccagagaggagga

SEQ ID NO: 86701 - DNA, 26 bp, Artificial Sequence
  Synthetic
acttccttctgautttgtgctctuga

SEQ ID NO: 86702 - DNA, 27 bp, Artificial Sequence
  Synthetic
caacaccataccutagaatgagcacua

SEQ ID NO: 86703 - DNA, 28 bp, Artificial Sequence
  Synthetic
ggttattccagautctgttcaagaguct

SEQ ID NO: 86704 - DNA, 27 bp, Artificial Sequence
  Synthetic
ccattccacaggauttgaaaactugaa

SEQ ID NO: 86705 - DNA, 33 bp, Artificial Sequence
  Synthetic
tttctatgatttcuatattggtcaataaucccc

SEQ ID NO: 86706 - DNA, 31 bp, Artificial Sequence
  Synthetic
cacaaagaatuaggctatttacugacaggat

SEQ ID NO: 86707 - DNA, 24 bp, Artificial Sequence
  Synthetic
agtccaagtugcttctcagtctuc

SEQ ID NO: 86708 - DNA, 26 bp, Artificial Sequence
  Synthetic
acctttaccagutctctgugaagact

SEQ ID NO: 86709 - DNA, 26 bp, Artificial Sequence
  Synthetic
caaagagacaacuggauacagagaca

SEQ ID NO: 86710 - DNA, 21 bp, Artificial Sequence
  Synthetic
cccttcctucatctgccgtua

SEQ ID NO: 86711 - DNA, 20 bp, Artificial Sequence
  Synthetic
gcttuggaacagggctccuc

SEQ ID NO: 86712 - DNA, 27 bp, Artificial Sequence
  Synthetic
aagatgcatagauaggctcatctggua

SEQ ID NO: 86713 - DNA, 24 bp, Artificial Sequence
  Synthetic
caccctctautagtgcaccucaaa

SEQ ID NO: 86714 - DNA, 28 bp, Artificial Sequence
  Synthetic
gaagatttgtctcugtatccagttguct

SEQ ID NO: 86715 - DNA, 27 bp, Artificial Sequence
  Synthetic
ccgagcuccaaaggtctauaaaaagat

SEQ ID NO: 86716 - DNA, 29 bp, Artificial Sequence
  Synthetic
gcaaaattcaaugatcataatggaugaca

SEQ ID NO: 86717 - DNA, 26 bp, Artificial Sequence
  Synthetic
gggcaaaactuactgctaactaauct

SEQ ID NO: 86718 - DNA, 22 bp, Artificial Sequence
  Synthetic
agcagtaagtuttgccccctut

SEQ ID NO: 86719 - DNA, 26 bp, Artificial Sequence
  Synthetic
cacttgacaccaugtttttcagcaut

SEQ ID NO: 86720 - DNA, 18 bp, Artificial Sequence
  Synthetic
gtgtgcgucacgctugaa

SEQ ID NO: 86721 - DNA, 17 bp, Artificial Sequence
  Synthetic
ggacgggcuggactgug

SEQ ID NO: 86722 - DNA, 23 bp, Artificial Sequence
  Synthetic
cucagacagtuggcaagaaaacc

SEQ ID NO: 86723 - DNA, 22 bp, Artificial Sequence
  Synthetic
cagctgugcagtgagatttucc

SEQ ID NO: 86724 - DNA, 21 bp, Artificial Sequence
  Synthetic
gctgaagtgguccttgcagua

SEQ ID NO: 86725 - DNA, 22 bp, Artificial Sequence
  Synthetic
atgcagttcuaaggctctgcuc

SEQ ID NO: 86726 - DNA, 26 bp, Artificial Sequence
  Synthetic
cccattgtatgaaucagccacaatut

SEQ ID NO: 86727 - DNA, 28 bp, Artificial Sequence
  Synthetic
cagggatacttgutggctgaatttaaug

SEQ ID NO: 86728 - DNA, 28 bp, Artificial Sequence
  Synthetic
tgtgaataaaggguccttagtagctcut

SEQ ID NO: 86729 - DNA, 21 bp, Artificial Sequence
  Synthetic
ggtgugggaggcgagatttut

SEQ ID NO: 86730 - DNA, 25 bp, Artificial Sequence
  Synthetic
aaggcaccauatattgtgttuggga

SEQ ID NO: 86731 - DNA, 24 bp, Artificial Sequence
  Synthetic
tgccataagaguggacaggtttug

SEQ ID NO: 86732 - DNA, 26 bp, Artificial Sequence
  Synthetic
aggaagagaaacuggagtctcattug

SEQ ID NO: 86733 - DNA, 27 bp, Artificial Sequence
  Synthetic
aagttgttacaatugctgccaatgaut

SEQ ID NO: 86734 - DNA, 28 bp, Artificial Sequence
  Synthetic
tccgggaactuacgtagaatatatugga

SEQ ID NO: 86735 - DNA, 26 bp, Artificial Sequence
  Synthetic
aaagaaagggagucatuaagcaacca

SEQ ID NO: 86736 - DNA, 21 bp, Artificial Sequence
  Synthetic
ggtgtguggctactttugggt

SEQ ID NO: 86737 - DNA, 28 bp, Artificial Sequence
  Synthetic
ccagatugaccaaaaacaaacaaacuct

SEQ ID NO: 86738 - DNA, 25 bp, Artificial Sequence
  Synthetic
acttgtttugccctaaaccuacaca

SEQ ID NO: 86739 - DNA, 28 bp, Artificial Sequence
  Synthetic
cgaagaatgugggaaagaatttauggat

SEQ ID NO: 86740 - DNA, 27 bp, Artificial Sequence
  Synthetic
gcagttaucacaagttggcaaaucaaa

SEQ ID NO: 86741 - DNA, 28 bp, Artificial Sequence
  Synthetic
agttcattttccutttcttaggaccugt

SEQ ID NO: 86742 - DNA, 27 bp, Artificial Sequence
  Synthetic
tctttcccacautcttcgcatatuaca

SEQ ID NO: 86743 - DNA, 33 bp, Artificial Sequence
  Synthetic
ttgtcttttactuaaatgtatttatgucaggca

SEQ ID NO: 86744 - DNA, 22 bp, Artificial Sequence
  Synthetic
cctcttaucccctgtgauccct

SEQ ID NO: 86745 - DNA, 22 bp, Artificial Sequence
  Synthetic
catgacacugcagcttctgtuc

SEQ ID NO: 86746 - DNA, 18 bp, Artificial Sequence
  Synthetic
agctggagcugggtcuct

SEQ ID NO: 86747 - DNA, 20 bp, Artificial Sequence
  Synthetic
gctugaggaccaagggtgug

SEQ ID NO: 86748 - DNA, 21 bp, Artificial Sequence
  Synthetic
catggccuaccagagtugcat

SEQ ID NO: 86749 - DNA, 23 bp, Artificial Sequence
  Synthetic
ctaacacgugtgtgtuccaacag

SEQ ID NO: 86750 - DNA, 25 bp, Artificial Sequence
  Synthetic
tgcttccaaguggactgattctgua

SEQ ID NO: 86751 - DNA, 22 bp, Artificial Sequence
  Synthetic
actggauccaaggaccaugaac

SEQ ID NO: 86752 - DNA, 24 bp, Artificial Sequence
  Synthetic
tcatgaacagaaagcuttgguggt

SEQ ID NO: 86753 - DNA, 28 bp, Artificial Sequence
  Synthetic
aagctggtacatutccttagttgtagug

SEQ ID NO: 86754 - DNA, 21 bp, Artificial Sequence
  Synthetic
ggaaccctcugcactgttcut

SEQ ID NO: 86755 - DNA, 20 bp, Artificial Sequence
  Synthetic
ccttacaccaccucccucac

SEQ ID NO: 86756 - DNA, 26 bp, Artificial Sequence
  Synthetic
ctagtttctauaccttcgagggucca

SEQ ID NO: 86757 - DNA, 28 bp, Artificial Sequence
  Synthetic
gttccacaaacautcagccctttauaat

SEQ ID NO: 86758 - DNA, 19 bp, Artificial Sequence
  Synthetic
guactggccucaggccaaa

SEQ ID NO: 86759 - DNA, 19 bp, Artificial Sequence
  Synthetic
gccaugagggcgtuagaca

SEQ ID NO: 86760 - DNA, 19 bp, Artificial Sequence
  Synthetic
ctagctuccgcctctguct

SEQ ID NO: 86761 - DNA, 19 bp, Artificial Sequence
  Synthetic
gctgguccacacugcaagg

SEQ ID NO: 86762 - DNA, 24 bp, Artificial Sequence
  Synthetic
tttctccucggacaucaacaacat

SEQ ID NO: 86763 - DNA, 19 bp, Artificial Sequence
  Synthetic
ctcaccugtgtuggagcga

SEQ ID NO: 86764 - DNA, 21 bp, Artificial Sequence
  Synthetic
cagccctguacaagtcacugt

SEQ ID NO: 86765 - DNA, 17 bp, Artificial Sequence
  Synthetic
gccacautgccgucacc

SEQ ID NO: 86766 - DNA, 27 bp, Artificial Sequence
  Synthetic
tgcgctataaagugctcatctttacut

SEQ ID NO: 86767 - DNA, 20 bp, Artificial Sequence
  Synthetic
cagaggcucgcagtctttug

SEQ ID NO: 86768 - DNA, 26 bp, Artificial Sequence
  Synthetic
caagaagaaaacggcautttgagugt

SEQ ID NO: 86769 - DNA, 23 bp, Artificial Sequence
  Synthetic
cacctttcctugcctctttccua

SEQ ID NO: 86770 - DNA, 18 bp, Artificial Sequence
  Synthetic
ccaactcugcccccucac

SEQ ID NO: 86771 - DNA, 21 bp, Artificial Sequence
  Synthetic
gctgccttuaggtcacacuct

SEQ ID NO: 86772 - DNA, 28 bp, Artificial Sequence
  Synthetic
gaactatgaucacaatgacagtacugag

SEQ ID NO: 86773 - DNA, 18 bp, Artificial Sequence
  Synthetic
cccacuggctgtctugga

SEQ ID NO: 86774 - DNA, 22 bp, Artificial Sequence
  Synthetic
tcugtttuccaagacagccagt

SEQ ID NO: 86775 - DNA, 28 bp, Artificial Sequence
  Synthetic
gcaagcctuaatggaaagaaatucagaa

SEQ ID NO: 86776 - DNA, 27 bp, Artificial Sequence
  Synthetic
ggtaactucagcttgttggtuagagat

SEQ ID NO: 86777 - DNA, 24 bp, Artificial Sequence
  Synthetic
gtgatttccucttactaggcugct

SEQ ID NO: 86778 - DNA, 31 bp, Artificial Sequence
  Synthetic
gttttaattgcucttgaaaatctgaugacga

SEQ ID NO: 86779 - DNA, 28 bp, Artificial Sequence
  Synthetic
gcacatctgttuctgctgttttacuaag

SEQ ID NO: 86780 - DNA, 28 bp, Artificial Sequence
  Synthetic
gacttgttauggaccattacctaguaca

SEQ ID NO: 86781 - DNA, 28 bp, Artificial Sequence
  Synthetic
ttggaatggaaugactgaagtaucaaca

SEQ ID NO: 86782 - DNA, 19 bp, Artificial Sequence
  Synthetic
gaagacccgccuaacugct

SEQ ID NO: 86783 - DNA, 17 bp, Artificial Sequence
  Synthetic
cccuggcccagctugac

SEQ ID NO: 86784 - DNA, 27 bp, Artificial Sequence
  Synthetic
ctcagagcugaaagaatcaatgaagug

SEQ ID NO: 86785 - DNA, 27 bp, Artificial Sequence
  Synthetic
caagaacctgggacugaagatgaaaua

SEQ ID NO: 86786 - DNA, 27 bp, Artificial Sequence
  Synthetic
caccagataaguattggtgacttuggt

SEQ ID NO: 86787 - DNA, 28 bp, Artificial Sequence
  Synthetic
tctgagagttcucccatgatacatuact

SEQ ID NO: 86788 - DNA, 18 bp, Artificial Sequence
  Synthetic
gggagaucccucgggagt

SEQ ID NO: 86789 - DNA, 21 bp, Artificial Sequence
  Synthetic
cauccagcagaggcagcuaaa

SEQ ID NO: 86790 - DNA, 28 bp, Artificial Sequence
  Synthetic
cactaagaatgcauttcaggacattuca

SEQ ID NO: 86791 - DNA, 26 bp, Artificial Sequence
  Synthetic
ggtctttatugccattttctgacugg

SEQ ID NO: 86792 - DNA, 28 bp, Artificial Sequence
  Synthetic
ctgatttgagauaccttgtgtatucagt

SEQ ID NO: 86793 - DNA, 25 bp, Artificial Sequence
  Synthetic
gcctcctgcauctttcaaaagctua

SEQ ID NO: 86794 - DNA, 23 bp, Artificial Sequence
  Synthetic
caaaaacgcccauttgcctauca

SEQ ID NO: 86795 - DNA, 22 bp, Artificial Sequence
  Synthetic
tgactugcaggacagcaauact

SEQ ID NO: 86796 - DNA, 21 bp, Artificial Sequence
  Synthetic
caacggaaguctcuccagagt

SEQ ID NO: 86797 - DNA, 26 bp, Artificial Sequence
  Synthetic
ccatgaaaggaaaaaggutctcuggt

SEQ ID NO: 86798 - DNA, 27 bp, Artificial Sequence
  Synthetic
ttgttttacaccucctgaaaagcuaca

SEQ ID NO: 86799 - DNA, 27 bp, Artificial Sequence
  Synthetic
tgttgtttcttautagctgtgggucat

SEQ ID NO: 86800 - DNA, 20 bp, Artificial Sequence
  Synthetic
ccagcccccutctcatcuca

SEQ ID NO: 86801 - DNA, 19 bp, Artificial Sequence
  Synthetic
cuggccuaccgagagacac

SEQ ID NO: 86802 - DNA, 28 bp, Artificial Sequence
  Synthetic
aggttgtttgcautaatcactttccauc

SEQ ID NO: 86803 - DNA, 21 bp, Artificial Sequence
  Synthetic
gaattccccagcuctggtcut

SEQ ID NO: 86804 - DNA, 28 bp, Artificial Sequence
  Synthetic
cctttagttgccauatttaccattugct

SEQ ID NO: 86805 - DNA, 20 bp, Artificial Sequence
  Synthetic
gggctccugaaaactguggt

SEQ ID NO: 86806 - DNA, 23 bp, Artificial Sequence
  Synthetic
tcaactgutgcatgguagcagat

SEQ ID NO: 86807 - DNA, 23 bp, Artificial Sequence
  Synthetic
gcttcctguccatcactgaaucc

SEQ ID NO: 86808 - DNA, 21 bp, Artificial Sequence
  Synthetic
gcagtttguctggctgauggt

SEQ ID NO: 86809 - DNA, 28 bp, Artificial Sequence
  Synthetic
tgctacagtgugaaagcctttattacuc

SEQ ID NO: 86810 - DNA, 23 bp, Artificial Sequence
  Synthetic
gcagagaaacgacugaaggcuct

SEQ ID NO: 86811 - DNA, 22 bp, Artificial Sequence
  Synthetic
caactttguccgctgcatcauc

SEQ ID NO: 86812 - DNA, 20 bp, Artificial Sequence
  Synthetic
attcagtgtugcccccuacc

SEQ ID NO: 86813 - DNA, 24 bp, Artificial Sequence
  Synthetic
gctgctctucaattctgaggcuaa

SEQ ID NO: 86814 - DNA, 20 bp, Artificial Sequence
  Synthetic
cgcaccttcutctcgtggut

SEQ ID NO: 86815 - DNA, 18 bp, Artificial Sequence
  Synthetic
aagggcaugtuccgcact

SEQ ID NO: 86816 - DNA, 22 bp, Artificial Sequence
  Synthetic
gtaaaggcutctgcaaguccct

SEQ ID NO: 86817 - DNA, 21 bp, Artificial Sequence
  Synthetic
cagagcctcugtgagcatgua

SEQ ID NO: 86818 - DNA, 20 bp, Artificial Sequence
  Synthetic
gccagcugctccttguaaag

SEQ ID NO: 86819 - DNA, 20 bp, Artificial Sequence
  Synthetic
ggcacucacgtgttctcugt

SEQ ID NO: 86820 - DNA, 21 bp, Artificial Sequence
  Synthetic
aaguggattggugggaaggac

SEQ ID NO: 86821 - DNA, 25 bp, Artificial Sequence
  Synthetic
aggatcaatgagucccatgtgttut

SEQ ID NO: 86822 - DNA, 21 bp, Artificial Sequence
  Synthetic
ggccacucctcaggaaucaag

SEQ ID NO: 86823 - DNA, 26 bp, Artificial Sequence
  Synthetic
ctttggcuagagttaaagatgugcaa

SEQ ID NO: 86824 - DNA, 21 bp, Artificial Sequence
  Synthetic
ggccccagaacuaacaggtua

SEQ ID NO: 86825 - DNA, 21 bp, Artificial Sequence
  Synthetic
gggagauctctgccucaacca

SEQ ID NO: 86826 - DNA, 22 bp, Artificial Sequence
  Synthetic
cacctccugtcccaaatgugaa

SEQ ID NO: 86827 - DNA, 25 bp, Artificial Sequence
  Synthetic
ccatgaaggtgautcagaggaacug

SEQ ID NO: 86828 - DNA, 27 bp, Artificial Sequence
  Synthetic
ttattgtctctuaggagttggcatcug

SEQ ID NO: 86829 - DNA, 21 bp, Artificial Sequence
  Synthetic
ttgtcttugcccaagauggga

SEQ ID NO: 86830 - DNA, 21 bp, Artificial Sequence
  Synthetic
gctcctcccugtagacacuca

SEQ ID NO: 86831 - DNA, 23 bp, Artificial Sequence
  Synthetic
gttgtcauggaaatggcauccaa

SEQ ID NO: 86832 - DNA, 20 bp, Artificial Sequence
  Synthetic
aggaacaagccaaccugugg

SEQ ID NO: 86833 - DNA, 21 bp, Artificial Sequence
  Synthetic
aggcagucgaggaatgguact

SEQ ID NO: 86834 - DNA, 18 bp, Artificial Sequence
  Synthetic
gtgauagccgccggtuct

SEQ ID NO: 86835 - DNA, 22 bp, Artificial Sequence
  Synthetic
gcaggtacaacgucagggtuac

SEQ ID NO: 86836 - DNA, 17 bp, Artificial Sequence
  Synthetic
cgcccccugagctucac

SEQ ID NO: 86837 - DNA, 19 bp, Artificial Sequence
  Synthetic
gctcugggcagaatgggut

SEQ ID NO: 86838 - DNA, 20 bp, Artificial Sequence
  Synthetic
cagttccgcagcutgaggua

SEQ ID NO: 86839 - DNA, 20 bp, Artificial Sequence
  Synthetic
ctgtgcaggutcaggaugct

SEQ ID NO: 86840 - DNA, 17 bp, Artificial Sequence
  Synthetic
gcgtggacccuggtcuc

SEQ ID NO: 86841 - DNA, 23 bp, Artificial Sequence
  Synthetic
gagtctgcauccatgagttcugt

SEQ ID NO: 86842 - DNA, 21 bp, Artificial Sequence
  Synthetic
ccuattcacucccgcaccaac

SEQ ID NO: 86843 - DNA, 21 bp, Artificial Sequence
  Synthetic
ttctcuggaagacgggaucct

SEQ ID NO: 86844 - DNA, 22 bp, Artificial Sequence
  Synthetic
gcctcagtcaucatgggtcuct

SEQ ID NO: 86845 - DNA, 21 bp, Artificial Sequence
  Synthetic
caaacccagagcugagaucct

SEQ ID NO: 86846 - DNA, 19 bp, Artificial Sequence
  Synthetic
cauggcaagacggccaaug

SEQ ID NO: 86847 - DNA, 24 bp, Artificial Sequence
  Synthetic
catcatcaccutttgccttccuct

SEQ ID NO: 86848 - DNA, 17 bp, Artificial Sequence
  Synthetic
agcagcaacuggugggt

SEQ ID NO: 86849 - DNA, 25 bp, Artificial Sequence
  Synthetic
gccucaaaaccgagaagaugaagaa

SEQ ID NO: 86850 - DNA, 26 bp, Artificial Sequence
  Synthetic
ttctaatguagttgggatugcgaaca

SEQ ID NO: 86851 - DNA, 29 bp, Artificial Sequence
  Synthetic
gtaccattcagcaucttgtaaggacauat

SEQ ID NO: 86852 - DNA, 21 bp, Artificial Sequence
  Synthetic
cggcgacaaauggcacattua

SEQ ID NO: 86853 - DNA, 23 bp, Artificial Sequence
  Synthetic
gcaguaggctgtucaaacacaag

SEQ ID NO: 86854 - DNA, 20 bp, Artificial Sequence
  Synthetic
ccaccctucagcttctgcut

SEQ ID NO: 86855 - DNA, 18 bp, Artificial Sequence
  Synthetic
ccaccacugccacctguc

SEQ ID NO: 86856 - DNA, 26 bp, Artificial Sequence
  Synthetic
tgtagccaacaacgguatgaauaaca

SEQ ID NO: 86857 - DNA, 28 bp, Artificial Sequence
  Synthetic
gcaagctggugcttttctttctttuaat

SEQ ID NO: 86858 - DNA, 22 bp, Artificial Sequence
  Synthetic
gctgactgutgcttccattuca

SEQ ID NO: 86859 - DNA, 25 bp, Artificial Sequence
  Synthetic
tgtaccattcaugttccaggugaag

SEQ ID NO: 86860 - DNA, 28 bp, Artificial Sequence
  Synthetic
gcaacactatugcaaattagctctugaa

SEQ ID NO: 86861 - DNA, 27 bp, Artificial Sequence
  Synthetic
caagaacaagtuacagatttgcgauca

SEQ ID NO: 86862 - DNA, 28 bp, Artificial Sequence
  Synthetic
ggtattttgtgaucgcaaatctguaact

SEQ ID NO: 86863 - DNA, 28 bp, Artificial Sequence
  Synthetic
cacagtgttaccutctcataatcuccaa

SEQ ID NO: 86864 - DNA, 25 bp, Artificial Sequence
  Synthetic
cactgacctcutgtgatacagtuga

SEQ ID NO: 86865 - DNA, 27 bp, Artificial Sequence
  Synthetic
aggatgatagugagatgctuccaaaaa

SEQ ID NO: 86866 - DNA, 29 bp, Artificial Sequence
  Synthetic
ctcttgtgauacagttgaaataccuacct

SEQ ID NO: 86867 - DNA, 27 bp, Artificial Sequence
  Synthetic
caaacttcaggaugatagtgagaugct

SEQ ID NO: 86868 - DNA, 24 bp, Artificial Sequence
  Synthetic
ctgctgggucatgttttaggtcut

SEQ ID NO: 86869 - DNA, 20 bp, Artificial Sequence
  Synthetic
ccgccagaggauaguggaac

SEQ ID NO: 86870 - DNA, 22 bp, Artificial Sequence
  Synthetic
ggaccgtttcutgaggaggtua

SEQ ID NO: 86871 - DNA, 23 bp, Artificial Sequence
  Synthetic
aagtgaacuccagaaccacaucc

SEQ ID NO: 86872 - DNA, 22 bp, Artificial Sequence
  Synthetic
cauggagatcgaugggcagaag

SEQ ID NO: 86873 - DNA, 20 bp, Artificial Sequence
  Synthetic
ctgcgugtcagguccagaat

SEQ ID NO: 86874 - DNA, 21 bp, Artificial Sequence
  Synthetic
tcactagaguggtgcagccua

SEQ ID NO: 86875 - DNA, 28 bp, Artificial Sequence
  Synthetic
gaagcttaucagcaaaaccagtaucaag

SEQ ID NO: 86876 - DNA, 24 bp, Artificial Sequence
  Synthetic
tgtggagttttaugtggcgatcuc

SEQ ID NO: 86877 - DNA, 20 bp, Artificial Sequence
  Synthetic
ggcttccauacccgtgucaa

SEQ ID NO: 86878 - DNA, 22 bp, Artificial Sequence
  Synthetic
gagtgguaacgcaatcacgtut

SEQ ID NO: 86879 - DNA, 23 bp, Artificial Sequence
  Synthetic
gaggtttcctutcccaccttcuc

SEQ ID NO: 86880 - DNA, 17 bp, Artificial Sequence
  Synthetic
cagcggccautgugcag

SEQ ID NO: 86881 - DNA, 19 bp, Artificial Sequence
  Synthetic
ctggaggcagggutcgtut

SEQ ID NO: 86882 - DNA, 22 bp, Artificial Sequence
  Synthetic
cggccccagagcutagagaaua

SEQ ID NO: 86883 - DNA, 23 bp, Artificial Sequence
  Synthetic
tgagtcttcugtcctcctctucc

SEQ ID NO: 86884 - DNA, 23 bp, Artificial Sequence
  Synthetic
aggccauggaaacagaaagtuct

SEQ ID NO: 86885 - DNA, 25 bp, Artificial Sequence
  Synthetic
gtttaaagaugcagcucagaagcat

SEQ ID NO: 86886 - DNA, 28 bp, Artificial Sequence
  Synthetic
gaaactuggaaaattatgcucagcagat

SEQ ID NO: 86887 - DNA, 24 bp, Artificial Sequence
  Synthetic
ctttccacutatgtccuggaggag

SEQ ID NO: 86888 - DNA, 20 bp, Artificial Sequence
  Synthetic
gagctctcgguggatggtut

SEQ ID NO: 86889 - DNA, 23 bp, Artificial Sequence
  Synthetic
gggccagaaugagaatctgagug

SEQ ID NO: 86890 - DNA, 23 bp, Artificial Sequence
  Synthetic
cagagaugccaaggttccttcuc

SEQ ID NO: 86891 - DNA, 23 bp, Artificial Sequence
  Synthetic
gcagctcucaactatcccctuac

SEQ ID NO: 86892 - DNA, 21 bp, Artificial Sequence
  Synthetic
gccugacaccttgaugagcaa

SEQ ID NO: 86893 - DNA, 24 bp, Artificial Sequence
  Synthetic
actggttcuaactacccttuccct

SEQ ID NO: 86894 - DNA, 23 bp, Artificial Sequence
  Synthetic
ctcctaggaucactcctcaguca

SEQ ID NO: 86895 - DNA, 20 bp, Artificial Sequence
  Synthetic
atctctgtggutggcgtcuc

SEQ ID NO: 86896 - DNA, 30 bp, Artificial Sequence
  Synthetic
cttttagttgtgcugaaagacattaugaca

SEQ ID NO: 86897 - DNA, 28 bp, Artificial Sequence
  Synthetic
tctcactcgataauctggatgactcaut

SEQ ID NO: 86898 - DNA, 21 bp, Artificial Sequence
  Synthetic
ccttgcctutcccctcaaugg

SEQ ID NO: 86899 - DNA, 25 bp, Artificial Sequence
  Synthetic
ccaagcaagauctggtgaaactuga

SEQ ID NO: 86900 - DNA, 19 bp, Artificial Sequence
  Synthetic
tggacggcucaatgtgugg

SEQ ID NO: 86901 - DNA, 18 bp, Artificial Sequence
  Synthetic
cugcggcagcagctaaug

SEQ ID NO: 86902 - DNA, 17 bp, Artificial Sequence
  Synthetic
cctgtucccgacgcuca

SEQ ID NO: 86903 - DNA, 23 bp, Artificial Sequence
  Synthetic
ctacactctcugcatcgtctuct

SEQ ID NO: 86904 - DNA, 23 bp, Artificial Sequence
  Synthetic
cggcuaaacgacttgucacagaa

SEQ ID NO: 86905 - DNA, 23 bp, Artificial Sequence
  Synthetic
gcagatggaguggatgtugaaga

SEQ ID NO: 86906 - DNA, 21 bp, Artificial Sequence
  Synthetic
ccatttggguccctctcauct

SEQ ID NO: 86907 - DNA, 20 bp, Artificial Sequence
  Synthetic
gccuaggagcucagcagaca

SEQ ID NO: 86908 - DNA, 22 bp, Artificial Sequence
  Synthetic
gctgctgccuagtcatttcuga

SEQ ID NO: 86909 - DNA, 22 bp, Artificial Sequence
  Synthetic
ttgatggagaaggcguacacug

SEQ ID NO: 86910 - DNA, 23 bp, Artificial Sequence
  Synthetic
atgaagaagaugacgacauggca

SEQ ID NO: 86911 - DNA, 22 bp, Artificial Sequence
  Synthetic
agacccttuaggcttgggauga

SEQ ID NO: 86912 - DNA, 22 bp, Artificial Sequence
  Synthetic
ctatggcugtggtacagucagt

SEQ ID NO: 86913 - DNA, 22 bp, Artificial Sequence
  Synthetic
gctcactttccuggtggaacuc

SEQ ID NO: 86914 - DNA, 24 bp, Artificial Sequence
  Synthetic
gcccagcuccttcattgatttuct

SEQ ID NO: 86915 - DNA, 22 bp, Artificial Sequence
  Synthetic
ccagctgtuctcggagttcuac

SEQ ID NO: 86916 - DNA, 23 bp, Artificial Sequence
  Synthetic
gaccatauggcaggccattgaua

SEQ ID NO: 86917 - DNA, 23 bp, Artificial Sequence
  Synthetic
gacgutccacaugcaaaagacag

SEQ ID NO: 86918 - DNA, 20 bp, Artificial Sequence
  Synthetic
gcggaaagaagcccucaguc

SEQ ID NO: 86919 - DNA, 21 bp, Artificial Sequence
  Synthetic
gccgccgaaguagaagtcauc

SEQ ID NO: 86920 - DNA, 19 bp, Artificial Sequence
  Synthetic
cugcttcuacccggacgaa

SEQ ID NO: 86921 - DNA, 20 bp, Artificial Sequence
  Synthetic
ctcaagcagcauctccguga

SEQ ID NO: 86922 - DNA, 20 bp, Artificial Sequence
  Synthetic
gccaagagcaagucggauca

SEQ ID NO: 86923 - DNA, 21 bp, Artificial Sequence
  Synthetic
actctgcgugctggtugaaat

SEQ ID NO: 86924 - DNA, 24 bp, Artificial Sequence
  Synthetic
ggaggacatcuggaagaagttuga

SEQ ID NO: 86925 - DNA, 20 bp, Artificial Sequence
  Synthetic
ccacagcucgttcucaagca

SEQ ID NO: 86926 - DNA, 19 bp, Artificial Sequence
  Synthetic
gagctgggucacggagaug

SEQ ID NO: 86927 - DNA, 19 bp, Artificial Sequence
  Synthetic
tccacaugcagtccuggag

SEQ ID NO: 86928 - DNA, 20 bp, Artificial Sequence
  Synthetic
caaggcccacagcaucctua

SEQ ID NO: 86929 - DNA, 21 bp, Artificial Sequence
  Synthetic
ggtgtctuctcctcgauccct

SEQ ID NO: 86930 - DNA, 26 bp, Artificial Sequence
  Synthetic
gttctagatgcaugaaaaagccctut

SEQ ID NO: 86931 - DNA, 27 bp, Artificial Sequence
  Synthetic
cttattccttggutccagagaacacua

SEQ ID NO: 86932 - DNA, 21 bp, Artificial Sequence
  Synthetic
tctgaacugcagacccatucc

SEQ ID NO: 86933 - DNA, 26 bp, Artificial Sequence
  Synthetic
gaggagttuttagagcatugccaaat

SEQ ID NO: 86934 - DNA, 20 bp, Artificial Sequence
  Synthetic
cctgaucccaaguggccaac

SEQ ID NO: 86935 - DNA, 25 bp, Artificial Sequence
  Synthetic
gaaagacctuccatgcaagaugaac

SEQ ID NO: 86936 - DNA, 26 bp, Artificial Sequence
  Synthetic
tggagccutccaattaaatugcaaac

SEQ ID NO: 86937 - DNA, 28 bp, Artificial Sequence
  Synthetic
gctctcaaaaggutaagcaattgttcut

SEQ ID NO: 86938 - DNA, 27 bp, Artificial Sequence
  Synthetic
gtaaaactccccutatagtggcaacut

SEQ ID NO: 86939 - DNA, 23 bp, Artificial Sequence
  Synthetic
cattgtctuacctcccaacugga

SEQ ID NO: 86940 - DNA, 22 bp, Artificial Sequence
  Synthetic
ccttctggauctcgagctguct

SEQ ID NO: 86941 - DNA, 28 bp, Artificial Sequence
  Synthetic
agagatcactgaucaaaaatgtgtgugt

SEQ ID NO: 86942 - DNA, 28 bp, Artificial Sequence
  Synthetic
gacaaagactcuacaagtaactgtucca

SEQ ID NO: 86943 - DNA, 28 bp, Artificial Sequence
  Synthetic
gaggaaaaagcuatgtattctgcugaac

SEQ ID NO: 86944 - DNA, 28 bp, Artificial Sequence
  Synthetic
gctataagctgtutttgcttttcgagut

SEQ ID NO: 86945 - DNA, 28 bp, Artificial Sequence
  Synthetic
gagacatttgaacugttttcgttggaut

SEQ ID NO: 86946 - DNA, 26 bp, Artificial Sequence
  Synthetic
ctctgtccgugcctttatgaatauca

SEQ ID NO: 86947 - DNA, 28 bp, Artificial Sequence
  Synthetic
gcttagttctcgaacuctgctttctaut

SEQ ID NO: 86948 - DNA, 27 bp, Artificial Sequence
  Synthetic
tcccttgaaaaaugaaagagagauggt

SEQ ID NO: 86949 - DNA, 26 bp, Artificial Sequence
  Synthetic
acacagtcauggttgatttucagagt

SEQ ID NO: 86950 - DNA, 28 bp, Artificial Sequence
  Synthetic
ggtgatcugggtaatagtttcuccaaat

SEQ ID NO: 86951 - DNA, 28 bp, Artificial Sequence
  Synthetic
agaggatagcaacauacttcgagtttut

SEQ ID NO: 86952 - DNA, 27 bp, Artificial Sequence
  Synthetic
ccagaacaagtaautgctgaagcaauc

SEQ ID NO: 86953 - DNA, 26 bp, Artificial Sequence
  Synthetic
ggaaguattcatcacauccacacact

SEQ ID NO: 86954 - DNA, 23 bp, Artificial Sequence
  Synthetic
acgactcguataaatgctgcuga

SEQ ID NO: 86955 - DNA, 27 bp, Artificial Sequence
  Synthetic
agcaacttcucctccactaaaaauagg

SEQ ID NO: 86956 - DNA, 21 bp, Artificial Sequence
  Synthetic
cttgcgaagutcccactcuct

SEQ ID NO: 86957 - DNA, 19 bp, Artificial Sequence
  Synthetic
ggctgtgcuggcctctuac

SEQ ID NO: 86958 - DNA, 25 bp, Artificial Sequence
  Synthetic
atgcaaaugggaatcctctuacaca

SEQ ID NO: 86959 - DNA, 27 bp, Artificial Sequence
  Synthetic
tcactcaccatugtctgttattgtcuc

SEQ ID NO: 86960 - DNA, 23 bp, Artificial Sequence
  Synthetic
aggccttttuaagcccctuacag

SEQ ID NO: 86961 - DNA, 27 bp, Artificial Sequence
  Synthetic
tggataacuaggagattcacggtugaa

SEQ ID NO: 86962 - DNA, 20 bp, Artificial Sequence
  Synthetic
gagccgtguctcactgtcug

SEQ ID NO: 86963 - DNA, 25 bp, Artificial Sequence
  Synthetic
tctttcagttucaaggcctcgatut

SEQ ID NO: 86964 - DNA, 24 bp, Artificial Sequence
  Synthetic
gcaccauccccaaattcagaugat

SEQ ID NO: 86965 - DNA, 28 bp, Artificial Sequence
  Synthetic
cagtagtattuggcaattgtttgguagt

SEQ ID NO: 86966 - DNA, 25 bp, Artificial Sequence
  Synthetic
gttaagacagaccgaguttcuaggg

SEQ ID NO: 86967 - DNA, 26 bp, Artificial Sequence
  Synthetic
catgaagaaccaggutgcaagattua

SEQ ID NO: 86968 - DNA, 25 bp, Artificial Sequence
  Synthetic
gattgtgcuccatgctttctttuct

SEQ ID NO: 86969 - DNA, 26 bp, Artificial Sequence
  Synthetic
ggtacataccacagugcttccatuat

SEQ ID NO: 86970 - DNA, 28 bp, Artificial Sequence
  Synthetic
cttacttgtctucatctatcagccaugt

SEQ ID NO: 86971 - DNA, 24 bp, Artificial Sequence
  Synthetic
ttctccatttgcutctttcggcua

SEQ ID NO: 86972 - DNA, 28 bp, Artificial Sequence
  Synthetic
gacaatgaaatuaaagccttggauagcc

SEQ ID NO: 86973 - DNA, 26 bp, Artificial Sequence
  Synthetic
aatgtggauggcaaaatggatucaaa

SEQ ID NO: 86974 - DNA, 21 bp, Artificial Sequence
  Synthetic
cataaaccugggacgcacugt

SEQ ID NO: 86975 - DNA, 22 bp, Artificial Sequence
  Synthetic
ccaccauagaagagggagcuca

SEQ ID NO: 86976 - DNA, 23 bp, Artificial Sequence
  Synthetic
ccacagggacautcacaacauga

SEQ ID NO: 86977 - DNA, 33 bp, Artificial Sequence
  Synthetic
attaagattttucacagtaatagtcaucacagt

SEQ ID NO: 86978 - DNA, 21 bp, Artificial Sequence
  Synthetic
gggagcugaaagcaccatcug

SEQ ID NO: 86979 - DNA, 22 bp, Artificial Sequence
  Synthetic
acctcacauctttctccuccct

SEQ ID NO: 86980 - DNA, 21 bp, Artificial Sequence
  Synthetic
tgcuagucccaaagaggaggt

SEQ ID NO: 86981 - DNA, 22 bp, Artificial Sequence
  Synthetic
caccatgctuttgctcccttut

SEQ ID NO: 86982 - DNA, 19 bp, Artificial Sequence
  Synthetic
ctggcucaccctgcttuca

SEQ ID NO: 86983 - DNA, 20 bp, Artificial Sequence
  Synthetic
gccagatgcauggctgaguc

SEQ ID NO: 86984 - DNA, 31 bp, Artificial Sequence; identical to SEQ ID NO: 50936
  Synthetic

SEQ ID NO: 86985 - DNA, 27 bp, Artificial Sequence
  Synthetic
agcctgctauaatcgatcaaacuaacc

SEQ ID NO: 86986 - DNA, 23 bp, Artificial Sequence
  Synthetic
gcagcucaatgaacucaagacag

SEQ ID NO: 86987 - DNA, 28 bp, Artificial Sequence
  Synthetic
tccugatcagcaaaauacaagaaagaga

SEQ ID NO: 86988 - DNA, 18 bp, Artificial Sequence
  Synthetic
ctgctggaucggcaugga

SEQ ID NO: 86989 - DNA, 21 bp, Artificial Sequence
  Synthetic
ccccttagucaggtgagaugg

SEQ ID NO: 86990 - DNA, 21 bp, Artificial Sequence
  Synthetic
gaccgacaaaccugaggucat

SEQ ID NO: 86991 - DNA, 26 bp, Artificial Sequence
  Synthetic
gcatttgtcctutgactggtgttuag

SEQ ID NO: 86992 - DNA, 25 bp, Artificial Sequence
  Synthetic
ctatgtcagugtaaaccuacgcgat

SEQ ID NO: 86993 - DNA, 27 bp, Artificial Sequence
  Synthetic
caccccagttugtcgaatatatgtuga

SEQ ID NO: 86994 - DNA, 21 bp, Artificial Sequence
  Synthetic
gtatgtguctcaccagucgct

SEQ ID NO: 86995 - DNA, 26 bp, Artificial Sequence
  Synthetic
aagttacuacagcagcagaaugacat

SEQ ID NO: 86996 - DNA, 20 bp, Artificial Sequence
  Synthetic
tggugggcuaccaaaagcaa

SEQ ID NO: 86997 - DNA, 23 bp, Artificial Sequence
  Synthetic
aacgtgttcucttttctcugcct

SEQ ID NO: 86998 - DNA, 20 bp, Artificial Sequence
  Synthetic
cgucggaaacggaaacacut

SEQ ID NO: 86999 - DNA, 20 bp, Artificial Sequence
  Synthetic
cgggctgcutccgagaaaut

SEQ ID NO: 87000 - DNA, 22 bp, Artificial Sequence
  Synthetic
aggccccaauatgggagguaaa

SEQ ID NO: 87001 - DNA, 22 bp, Artificial Sequence
  Synthetic
gggcuaagatgcaguccacaat

SEQ ID NO: 87002 - DNA, 25 bp, Artificial Sequence
  Synthetic
ttggtctcacucaactatgccaaut

SEQ ID NO: 87003 - DNA, 21 bp, Artificial Sequence
  Synthetic
gctgcatuggattcagcauca

SEQ ID NO: 87004 - DNA, 33 bp, Artificial Sequence
  Synthetic
aaaaccaatgatgcutaatcaatattttcaugt

SEQ ID NO: 87005 - DNA, 22 bp, Artificial Sequence
  Synthetic
gcggctugagctagagaaacuc

SEQ ID NO: 87006 - DNA, 24 bp, Artificial Sequence
  Synthetic
gactgugggacaacctcttttcua

SEQ ID NO: 87007 - DNA, 28 bp, Artificial Sequence
  Synthetic
tcttatgtggagcacaautctaatacug

SEQ ID NO: 87008 - DNA, 28 bp, Artificial Sequence
  Synthetic
ctaactgttctguaagtcttgatgcuga

SEQ ID NO: 87009 - DNA, 25 bp, Artificial Sequence
  Synthetic
cagctgaaatguagaggttgacuct

SEQ ID NO: 87010 - DNA, 21 bp, Artificial Sequence
  Synthetic
gagtcaucagcggcactcuaa

SEQ ID NO: 87011 - DNA, 21 bp, Artificial Sequence
  Synthetic
ggaacaacaggccaguaugga

SEQ ID NO: 87012 - DNA, 29 bp, Artificial Sequence
  Synthetic
tttcagattgaguacttccaaagaaccut

SEQ ID NO: 87013 - DNA, 25 bp, Artificial Sequence
  Synthetic
gtcttgctcaucctcatgtgguaat

SEQ ID NO: 87014 - DNA, 28 bp, Artificial Sequence
  Synthetic
cccaatttgtgaagutcataacatgcut

SEQ ID NO: 87015 - DNA, 27 bp, Artificial Sequence
  Synthetic
catatggaattcuacagcgaagctcut

SEQ ID NO: 87016 - DNA, 22 bp, Artificial Sequence
  Synthetic
atgtgagucagcagaagtgucc

SEQ ID NO: 87017 - DNA, 24 bp, Artificial Sequence
  Synthetic
tcaagggacuaggagatgcactua

SEQ ID NO: 87018 - DNA, 17 bp, Artificial Sequence
  Synthetic
cagggcuctgtgugcca

SEQ ID NO: 87019 - DNA, 18 bp, Artificial Sequence
  Synthetic
gccctguccaggcaccua

SEQ ID NO: 87020 - DNA, 22 bp, Artificial Sequence
  Synthetic
gaaagaatgggutgggctggua

SEQ ID NO: 87021 - DNA, 22 bp, Artificial Sequence
  Synthetic
cgtccttgaucctgacagctuc

SEQ ID NO: 87022 - DNA, 21 bp, Artificial Sequence
  Synthetic
gccctcgugagcattatgugt

SEQ ID NO: 87023 - DNA, 21 bp, Artificial Sequence
  Synthetic
cttgtccttcucggagccauc

SEQ ID NO: 87024 - DNA, 19 bp, Artificial Sequence
  Synthetic
gagugctcuaccgccacat

SEQ ID NO: 87025 - DNA, 22 bp, Artificial Sequence
  Synthetic
agatcaugacccgatggucaga

SEQ ID NO: 87026 - DNA, 27 bp, Artificial Sequence
  Synthetic
caaagcagucataattgttcuggcaaa

SEQ ID NO: 87027 - DNA, 28 bp, Artificial Sequence
  Synthetic
tggaatggcugttacacttttgauaact

SEQ ID NO: 87028 - DNA, 24 bp, Artificial Sequence
  Synthetic
ttgataagggugaaaauggccact

SEQ ID NO: 87029 - DNA, 27 bp, Artificial Sequence
  Synthetic
acagttgatgautcagagaccuaggat

SEQ ID NO: 87030 - DNA, 21 bp, Artificial Sequence
  Synthetic
gggttggcutttgagctcgua

SEQ ID NO: 87031 - DNA, 23 bp, Artificial Sequence
  Synthetic
attcaatcacugaccaccacucc

SEQ ID NO: 87032 - DNA, 18 bp, Artificial Sequence
  Synthetic
cccggcccutcttcacut

SEQ ID NO: 87033 - DNA, 17 bp, Artificial Sequence
  Synthetic
ctccgcagcuccgaguc

SEQ ID NO: 87034 - DNA, 27 bp, Artificial Sequence
  Synthetic
atgagatctactuacctatggcctugt

SEQ ID NO: 87035 - DNA, 29 bp, Artificial Sequence
  Synthetic
ccttcatctcautttcaggatctgucaaa

SEQ ID NO: 87036 - DNA, 23 bp, Artificial Sequence
  Synthetic
tttattccucctctcccucccat

SEQ ID NO: 87037 - DNA, 28 bp, Artificial Sequence
  Synthetic
cccaacagttttauatccacaatgccua

SEQ ID NO: 87038 - DNA, 27 bp, Artificial Sequence
  Synthetic
tcacatcacuacattaacaacugcaca

SEQ ID NO: 87039 - DNA, 23 bp, Artificial Sequence
  Synthetic
accccctucccatccttttcaua

SEQ ID NO: 87040 - DNA, 25 bp, Artificial Sequence
  Synthetic
gagctgtuccacttgtuaacagaga

SEQ ID NO: 87041 - DNA, 22 bp, Artificial Sequence
  Synthetic
atgagatgagutgtgccauggt

SEQ ID NO: 87042 - DNA, 23 bp, Artificial Sequence
  Synthetic
ggtgatagaaauccccguccaag

SEQ ID NO: 87043 - DNA, 26 bp, Artificial Sequence
  Synthetic
caaatcactcuactgttgagctucag

SEQ ID NO: 87044 - DNA, 24 bp, Artificial Sequence
  Synthetic
aaaactggcucctcaagagugaaa

SEQ ID NO: 87045 - DNA, 25 bp, Artificial Sequence
  Synthetic
catctcatctugatcaggaagcuct

SEQ ID NO: 87046 - DNA, 27 bp, Artificial Sequence
  Synthetic
cattgaaauggaaaaggttggagauca

SEQ ID NO: 87047 - DNA, 27 bp, Artificial Sequence
  Synthetic
agagcttaaacutctcactggttucac

SEQ ID NO: 87048 - DNA, 20 bp, Artificial Sequence
  Synthetic
cccucgagucccagacagaa

SEQ ID NO: 87049 - DNA, 21 bp, Artificial Sequence
  Synthetic
tcaaaatgcggguctctgucc

SEQ ID NO: 87050 - DNA, 26 bp, Artificial Sequence
  Synthetic
gctacgaagaagutttctcuagacga

SEQ ID NO: 87051 - DNA, 19 bp, Artificial Sequence
  Synthetic
ggacggacgucucgagagt

SEQ ID NO: 87052 - DNA, 23 bp, Artificial Sequence
  Synthetic
caccctcatucctgtgtagcuaa

SEQ ID NO: 87053 - DNA, 25 bp, Artificial Sequence
  Synthetic
tgtgaaacacguctctccaaatugt

SEQ ID NO: 87054 - DNA, 21 bp, Artificial Sequence
  Synthetic
ggaagccugagaatggcaguc

SEQ ID NO: 87055 - DNA, 22 bp, Artificial Sequence
  Synthetic
gcacttcagautgcccaggtut

SEQ ID NO: 87056 - DNA, 21 bp, Artificial Sequence
  Synthetic
gactgggaggcucatcaucac

SEQ ID NO: 87057 - DNA, 21 bp, Artificial Sequence
  Synthetic
gtgaggcutggagaaguaccc

SEQ ID NO: 87058 - DNA, 24 bp, Artificial Sequence
  Synthetic
cgtgtutccatgtttuggaagagt

SEQ ID NO: 87059 - DNA, 28 bp, Artificial Sequence
  Synthetic
tcaggtgaggaaacuggagttagataut

SEQ ID NO: 87060 - DNA, 23 bp, Artificial Sequence
  Synthetic
agtggcautttcaacacuggact

SEQ ID NO: 87061 - DNA, 28 bp, Artificial Sequence
  Synthetic
ccctcatgactguattctagttcttguc

SEQ ID NO: 87062 - DNA, 23 bp, Artificial Sequence
  Synthetic
ttctgtgataucgctcagcgaut

SEQ ID NO: 87063 - DNA, 25 bp, Artificial Sequence
  Synthetic
actgaagauggagaggcactagaut

SEQ ID NO: 87064 - DNA, 28 bp, Artificial Sequence
  Synthetic
ctcactttagcaugagtctatcagaugg

SEQ ID NO: 87065 - DNA, 27 bp, Artificial Sequence
  Synthetic
aguaacatttgctcucagaaacacaca

SEQ ID NO: 87066 - DNA, 22 bp, Artificial Sequence
  Synthetic
tctggtctctucctctctgcug

SEQ ID NO: 87067 - DNA, 26 bp, Artificial Sequence
  Synthetic
atttaggaatgugctgaggagctuag

SEQ ID NO: 87068 - DNA, 21 bp, Artificial Sequence
  Synthetic
cagcccaaaggugtggagaut

SEQ ID NO: 87069 - DNA, 20 bp, Artificial Sequence
  Synthetic
gctcugcacacctcctcuac

SEQ ID NO: 87070 - DNA, 22 bp, Artificial Sequence
  Synthetic
ccccagcuccagttaccttgua

SEQ ID NO: 87071 - DNA, 22 bp, Artificial Sequence
  Synthetic
acctttgtgucctgtgttggut

SEQ ID NO: 87072 - DNA, 25 bp, Artificial Sequence
  Synthetic
cttggcaaagutgcactaatucagt

SEQ ID NO: 87073 - DNA, 27 bp, Artificial Sequence
  Synthetic
agaacggccagcuaataaaagaactua

SEQ ID NO: 87074 - DNA, 21 bp, Artificial Sequence
  Synthetic
cgtctuccggcctcttctuac

SEQ ID NO: 87075 - DNA, 28 bp, Artificial Sequence
  Synthetic
gtgtutctgtttttgguagcaagaagat

SEQ ID NO: 87076 - DNA, 26 bp, Artificial Sequence
  Synthetic
tcagcatttgcutcttgtaaggguaa

SEQ ID NO: 87077 - DNA, 28 bp, Artificial Sequence
  Synthetic
ttagttatcaagaguggaagcatgtugt

SEQ ID NO: 87078 - DNA, 21 bp, Artificial Sequence
  Synthetic
cggatcugagcccggaaaaug

SEQ ID NO: 87079 - DNA, 23 bp, Artificial Sequence
  Synthetic
ccccataggugtgcaaatccaua

SEQ ID NO: 87080 - DNA, 28 bp, Artificial Sequence
  Synthetic
gactctctactauggtgtcatctttucc

SEQ ID NO: 87081 - DNA, 24 bp, Artificial Sequence
  Synthetic
catacctgcacucaaagcaauacc

SEQ ID NO: 87082 - DNA, 20 bp, Artificial Sequence
  Synthetic
tctcttcccauggcgatguc

SEQ ID NO: 87083 - DNA, 25 bp, Artificial Sequence
  Synthetic
gttccctcuaaatcaagtgcugagt

SEQ ID NO: 87084 - DNA, 28 bp, Artificial Sequence
  Synthetic
tctgattacacaguatcctcgacatuga

SEQ ID NO: 87085 - DNA, 26 bp, Artificial Sequence
  Synthetic
caagttaccugtgatccaattucgac

SEQ ID NO: 87086 - DNA, 20 bp, Artificial Sequence
  Synthetic
actgccgcuccgtctttuag

SEQ ID NO: 87087 - DNA, 22 bp, Artificial Sequence
  Synthetic
aacugcagaacaagcacucaga

SEQ ID NO: 87088 - DNA, 18 bp, Artificial Sequence
  Synthetic
gctgugggacagggtugt

SEQ ID NO: 87089 - DNA, 28 bp, Artificial Sequence
  Synthetic
gcagcagggauatagtatctgacaguat

SEQ ID NO: 87090 - DNA, 27 bp, Artificial Sequence
  Synthetic
gaaacaagcaagcuaaatgtgaacuga

SEQ ID NO: 87091 - DNA, 21 bp, Artificial Sequence
  Synthetic
gtctcccutcccccaugaaag

SEQ ID NO: 87092 - DNA, 24 bp, Artificial Sequence
  Synthetic
gtagccagugaggtatgcaatuct

SEQ ID NO: 87093 - DNA, 25 bp, Artificial Sequence
  Synthetic
cccaaaguagtgatccuaagcaagg

SEQ ID NO: 87094 - DNA, 27 bp, Artificial Sequence
  Synthetic
gcattccaatauaatccatcccugcaa

SEQ ID NO: 87095 - DNA, 19 bp, Artificial Sequence
  Synthetic
agugagggcggaacaggua

SEQ ID NO: 87096 - DNA, 21 bp, Artificial Sequence
  Synthetic
ccaccagggcutgcaagtaut

SEQ ID NO: 87097 - DNA, 23 bp, Artificial Sequence
  Synthetic
tgaggaugugaccaagaggaaga

SEQ ID NO: 87098 - DNA, 25 bp, Artificial Sequence
  Synthetic
tctgtttgtcauctgctggaaaugt

SEQ ID NO: 87099 - DNA, 24 bp, Artificial Sequence
  Synthetic
acaggatcagguttatcgggauca

SEQ ID NO: 87100 - DNA, 18 bp, Artificial Sequence
  Synthetic
ccccaucccgagggacut

SEQ ID NO: 87101 - DNA, 19 bp, Artificial Sequence
  Synthetic
tgagcgugctuccaggaat

SEQ ID NO: 87102 - DNA, 21 bp, Artificial Sequence
  Synthetic
ccctggcauacctttgtggua

SEQ ID NO: 87103 - DNA, 28 bp, Artificial Sequence
  Synthetic
tcggatttttcacuttgctcatgtttut

SEQ ID NO: 87104 - DNA, 21 bp, Artificial Sequence
  Synthetic
tgtguccacccccttacucat

SEQ ID NO: 87105 - DNA, 20 bp, Artificial Sequence
  Synthetic
ccgtattuggcgtacuccac

SEQ ID NO: 87106 - DNA, 21 bp, Artificial Sequence
  Synthetic
gggtggtgucttttcctgcua

SEQ ID NO: 87107 - DNA, 22 bp, Artificial Sequence
  Synthetic
caatctccaggagcutctgcut

SEQ ID NO: 87108 - DNA, 17 bp, Artificial Sequence
  Synthetic
gcccgcucctcctcauc

SEQ ID NO: 87109 - DNA, 18 bp, Artificial Sequence
  Synthetic
gtccagggagcuggagut

SEQ ID NO: 87110 - DNA, 26 bp, Artificial Sequence
  Synthetic
tttctttcagctucttgccttcatug

SEQ ID NO: 87111 - DNA, 27 bp, Artificial Sequence
  Synthetic
aaattgcattcucgattttgtctuggt

SEQ ID NO: 87112 - DNA, 20 bp, Artificial Sequence
  Synthetic
gcgcuccaggaagttgugat

SEQ ID NO: 87113 - DNA, 25 bp, Artificial Sequence
  Synthetic
caagaagaggtuctggagagagaug

SEQ ID NO: 87114 - DNA, 17 bp, Artificial Sequence
  Synthetic
gctaccugggcagugga

SEQ ID NO: 87115 - DNA, 18 bp, Artificial Sequence
  Synthetic
gctgggugcagagccaua

SEQ ID NO: 87116 - DNA, 21 bp, Artificial Sequence
  Synthetic
gcagaucagcugaagcaggac

SEQ ID NO: 87117 - DNA, 25 bp, Artificial Sequence
  Synthetic
aggaaagagaacaucaccaggacua

SEQ ID NO: 87118 - DNA, 22 bp, Artificial Sequence
  Synthetic
cccgtttcugcttctcagctut

SEQ ID NO: 87119 - DNA, 21 bp, Artificial Sequence
  Synthetic
ctgatgttgcuggtcgcttug

SEQ ID NO: 87120 - DNA, 23 bp, Artificial Sequence
  Synthetic
agaaaagctucacttgggtcugg

SEQ ID NO: 87121 - DNA, 24 bp, Artificial Sequence
  Synthetic
caccaatgacuacctgtgtgttug

SEQ ID NO: 87122 - DNA, 22 bp, Artificial Sequence
  Synthetic
gcactggccccuttttcttcut

SEQ ID NO: 87123 - DNA, 28 bp, Artificial Sequence
  Synthetic
ctctctaguagctcaactggauaaacct

SEQ ID NO: 87124 - DNA, 27 bp, Artificial Sequence
  Synthetic
tctcttcatccucctcatcttccttut

SEQ ID NO: 87125 - DNA, 24 bp, Artificial Sequence
  Synthetic
gcatgaagcauttccacatcucca

SEQ ID NO: 87126 - DNA, 25 bp, Artificial Sequence
  Synthetic
gacccagtgaugtttgtctgtuaca

SEQ ID NO: 87127 - DNA, 19 bp, Artificial Sequence
  Synthetic
cuggccaggaacgcatuac

SEQ ID NO: 87128 - DNA, 23 bp, Artificial Sequence
  Synthetic
gcttctcaccaguaaaggcacua

SEQ ID NO: 87129 - DNA, 20 bp, Artificial Sequence
  Synthetic
gctacagtugtcgctgctug

SEQ ID NO: 87130 - DNA, 24 bp, Artificial Sequence
  Synthetic
ctgtcccaccauaaccaaaatgug

SEQ ID NO: 87131 - DNA, 23 bp, Artificial Sequence
  Synthetic
acagagaaaagacagcuccgaug

SEQ ID NO: 87132 - DNA, 17 bp, Artificial Sequence
  Synthetic
gggagacgggugcauca

SEQ ID NO: 87133 - DNA, 17 bp, Artificial Sequence
  Synthetic
gacaugcacacgcugct

SEQ ID NO: 87134 - DNA, 20 bp, Artificial Sequence
  Synthetic
gaugacccaaccgtcuccac

SEQ ID NO: 87135 - DNA, 21 bp, Artificial Sequence
  Synthetic
gcacgcgucatcctcatucaa

SEQ ID NO: 87136 - DNA, 22 bp, Artificial Sequence
  Synthetic
ctcgttgaugtctcccucacaa

SEQ ID NO: 87137 - DNA, 26 bp, Artificial Sequence
  Synthetic
attctgtaccucttctctttccucca

SEQ ID NO: 87138 - DNA, 24 bp, Artificial Sequence
  Synthetic
gtgcagttuagtaagtggguagca

SEQ ID NO: 87139 - DNA, 26 bp, Artificial Sequence
  Synthetic
tgaggaaaataucgacgattguccag

SEQ ID NO: 87140 - DNA, 18 bp, Artificial Sequence
  Synthetic
gggccggugaaaccugag

SEQ ID NO: 87141 - DNA, 18 bp, Artificial Sequence
  Synthetic
ccacccugcagcagagua

SEQ ID NO: 87142 - DNA, 22 bp, Artificial Sequence
  Synthetic
tcgtccagguggtcttctauct

SEQ ID NO: 87143 - DNA, 20 bp, Artificial Sequence
  Synthetic
cctggcauatgcagctucct

SEQ ID NO: 87144 - DNA, 19 bp, Artificial Sequence
  Synthetic
cccaggcaaucgacugcat

SEQ ID NO: 87145 - DNA, 19 bp, Artificial Sequence
  Synthetic
cgtgcacauccttgaugct

SEQ ID NO: 87146 - DNA, 27 bp, Artificial Sequence
  Synthetic
tccctucacccctaaaaauagagaagt

SEQ ID NO: 87147 - DNA, 24 bp, Artificial Sequence
  Synthetic
ctgatacagagcugagggcuaaag

SEQ ID NO: 87148 - DNA, 21 bp, Artificial Sequence
  Synthetic
ccccgttcutgcagttgttuc

SEQ ID NO: 87149 - DNA, 21 bp, Artificial Sequence
  Synthetic
cttgtguccagagcagtgugt

SEQ ID NO: 87150 - DNA, 21 bp, Artificial Sequence
  Synthetic
accagagguctacgccaucat

SEQ ID NO: 87151 - DNA, 22 bp, Artificial Sequence
  Synthetic
cagtattccggcuaaccacucc

SEQ ID NO: 87152 - DNA, 18 bp, Artificial Sequence
  Synthetic
gagcugcacgcgcaauat

SEQ ID NO: 87153 - DNA, 22 bp, Artificial Sequence
  Synthetic
cccccaacacacagugaaauga

SEQ ID NO: 87154 - DNA, 23 bp, Artificial Sequence
  Synthetic
gatgatgcagutccatcctcuct

SEQ ID NO: 87155 - DNA, 23 bp, Artificial Sequence
  Synthetic
agcttccctgucttgtctttguc

SEQ ID NO: 87156 - DNA, 23 bp, Artificial Sequence
  Synthetic
gtcgtggaagggaucctgtatut

SEQ ID NO: 87157 - DNA, 22 bp, Artificial Sequence
  Synthetic
cacutagtuggacagcaagcag

SEQ ID NO: 87158 - DNA, 20 bp, Artificial Sequence
  Synthetic
aggtgcugcactatcgcauc

SEQ ID NO: 87159 - DNA, 21 bp, Artificial Sequence
  Synthetic
tgcccugtactcuacccacaa

SEQ ID NO: 87160 - DNA, 19 bp, Artificial Sequence
  Synthetic
gcacacgcuctctggctua

SEQ ID NO: 87161 - DNA, 23 bp, Artificial Sequence
  Synthetic
catgtgtttctugccttcctgug

SEQ ID NO: 87162 - DNA, 18 bp, Artificial Sequence
  Synthetic
cctgcagcugccctctua

SEQ ID NO: 87163 - DNA, 20 bp, Artificial Sequence
  Synthetic
gcagggaagguttcctggug

SEQ ID NO: 87164 - DNA, 21 bp, Artificial Sequence
  Synthetic
ctcatugagaaggugcgcaaa

SEQ ID NO: 87165 - DNA, 21 bp, Artificial Sequence
  Synthetic
agagaucttgccuggcacaag

SEQ ID NO: 87166 - DNA, 23 bp, Artificial Sequence
  Synthetic
ttggtactaaggauggcgaccua

SEQ ID NO: 87167 - DNA, 22 bp, Artificial Sequence
  Synthetic
ctgaggacutgtccugacagac

SEQ ID NO: 87168 - DNA, 23 bp, Artificial Sequence
  Synthetic
gccttcuaggctagtgtcuaggt

SEQ ID NO: 87169 - DNA, 23 bp, Artificial Sequence
  Synthetic
cgtctgtgaugtggttcaugact

SEQ ID NO: 87170 - DNA, 20 bp, Artificial Sequence
  Synthetic
gtggcccauctctcttcugt

SEQ ID NO: 87171 - DNA, 22 bp, Artificial Sequence
  Synthetic
tggcctggucagtaactcuagg

SEQ ID NO: 87172 - DNA, 20 bp, Artificial Sequence
  Synthetic
cggcacugacagttugcaat

SEQ ID NO: 87173 - DNA, 20 bp, Artificial Sequence
  Synthetic
gcagagugggatgccugaac

SEQ ID NO: 87174 - DNA, 21 bp, Artificial Sequence
  Synthetic
autcaucgacagagacggcaa

SEQ ID NO: 87175 - DNA, 22 bp, Artificial Sequence
  Synthetic
gggaaagaaagccutccacuca

SEQ ID NO: 87176 - DNA, 21 bp, Artificial Sequence
  Synthetic
cgcatcuacaagccttgctut

SEQ ID NO: 87177 - DNA, 24 bp, Artificial Sequence
  Synthetic
cattgacctcaucaagctgtccut

SEQ ID NO: 87178 - DNA, 21 bp, Artificial Sequence
  Synthetic
cgtctctttuctccgtcccua

SEQ ID NO: 87179 - DNA, 28 bp, Artificial Sequence
  Synthetic
aggtgctcaaugaagttttccatauaca

SEQ ID NO: 87180 - DNA, 22 bp, Artificial Sequence
  Synthetic
cgcatugggcagaaaagaaaug

SEQ ID NO: 87181 - DNA, 25 bp, Artificial Sequence
  Synthetic
ccttcttgtutgctgatgguaacct

SEQ ID NO: 87182 - DNA, 22 bp, Artificial Sequence
  Synthetic
gcaggccugattcaatgacuct

SEQ ID NO: 87183 - DNA, 26 bp, Artificial Sequence
  Synthetic
ccacaaggatgugaataatgctguca

SEQ ID NO: 87184 - DNA, 21 bp, Artificial Sequence
  Synthetic
gcctcaugggagacuccagaa

SEQ ID NO: 87185 - DNA, 21 bp, Artificial Sequence
  Synthetic
aaactgcucgaactgggugaa

SEQ ID NO: 87186 - DNA, 19 bp, Artificial Sequence
  Synthetic
gcctgacgacucgtgcuat

SEQ ID NO: 87187 - DNA, 23 bp, Artificial Sequence
  Synthetic
tcauaaacatcucgggacaagcc

SEQ ID NO: 87188 - DNA, 28 bp, Artificial Sequence
  Synthetic
tcctttagcaaacutctgaaugacaaca

SEQ ID NO: 87189 - DNA, 19 bp, Artificial Sequence
  Synthetic
cucucccccgaccaaagaa

SEQ ID NO: 87190 - DNA, 25 bp, Artificial Sequence
  Synthetic
gcggaagaugaagatttcggattuc

SEQ ID NO: 87191 - DNA, 23 bp, Artificial Sequence
  Synthetic
ggtatcttucctaggctucccaa

SEQ ID NO: 87192 - DNA, 21 bp, Artificial Sequence
  Synthetic
ctgccacutcaagucacgaaa

SEQ ID NO: 87193 - DNA, 28 bp, Artificial Sequence
  Synthetic
gtgggaagaaugaggaagaaagttctua

SEQ ID NO: 87194 - DNA, 28 bp, Artificial Sequence
  Synthetic
tgatcattgucccttcattaucaacaca

SEQ ID NO: 87195 - DNA, 28 bp, Artificial Sequence
  Synthetic
ggtgtttactaccuccttcttcattuca

SEQ ID NO: 87196 - DNA, 21 bp, Artificial Sequence
  Synthetic
gcctgaccgugtctctctcua

SEQ ID NO: 87197 - DNA, 25 bp, Artificial Sequence
  Synthetic
ccttagggcuagcttgatactucca

SEQ ID NO: 87198 - DNA, 22 bp, Artificial Sequence
  Synthetic
acaccatcaaccugaacagcut

SEQ ID NO: 87199 - DNA, 20 bp, Artificial Sequence
  Synthetic
gctgguggcaagcctgauac

SEQ ID NO: 87200 - DNA, 23 bp, Artificial Sequence
  Synthetic
tcttttggttutgcaggcttugg

SEQ ID NO: 87201 - DNA, 26 bp, Artificial Sequence
  Synthetic
gtatgctguagacgctcgtattcaut

SEQ ID NO: 87202 - DNA, 17 bp, Artificial Sequence
  Synthetic
ccctcuccgggccagua

SEQ ID NO: 87203 - DNA, 17 bp, Artificial Sequence
  Synthetic
accgcagcaugguggag

SEQ ID NO: 87204 - DNA, 18 bp, Artificial Sequence
  Synthetic
cagcaccuccaccaugct

SEQ ID NO: 87205 - DNA, 18 bp, Artificial Sequence
  Synthetic
ccguagaugccagcacga

SEQ ID NO: 87206 - DNA, 23 bp, Artificial Sequence
  Synthetic
gctacctcugagtcacctggtua

SEQ ID NO: 87207 - DNA, 20 bp, Artificial Sequence
  Synthetic
cuccagagccgactucagac

SEQ ID NO: 87208 - DNA, 21 bp, Artificial Sequence
  Synthetic
cagagttuctccacugggaca

SEQ ID NO: 87209 - DNA, 19 bp, Artificial Sequence
  Synthetic
ccgctguagggccctctua

SEQ ID NO: 87210 - DNA, 19 bp, Artificial Sequence
  Synthetic
caacgccucgctcatctug

SEQ ID NO: 87211 - DNA, 21 bp, Artificial Sequence
  Synthetic
gagctgttugcagggtccuaa

SEQ ID NO: 87212 - DNA, 21 bp, Artificial Sequence
  Synthetic
cctcugggcaggagattggua

SEQ ID NO: 87213 - DNA, 23 bp, Artificial Sequence
  Synthetic
cctgaactgugttttcctgtugg

SEQ ID NO: 87214 - DNA, 23 bp, Artificial Sequence
  Synthetic
cacacuctguaagcaaaagccaa

SEQ ID NO: 87215 - DNA, 28 bp, Artificial Sequence
  Synthetic
gaagaagaauccacatcattcacaaugg

SEQ ID NO: 87216 - DNA, 27 bp, Artificial Sequence
  Synthetic
gtagagtttcataucaccccattguga

SEQ ID NO: 87217 - DNA, 28 bp, Artificial Sequence
  Synthetic
agagatgctgaugataaacacaagctua

SEQ ID NO: 87218 - DNA, 28 bp, Artificial Sequence
  Synthetic
gctacttaggtuacaatcaggaggaaut

SEQ ID NO: 87219 - DNA, 32 bp, Artificial Sequence; identical to SEQ ID NO: 21971
  Synthetic

SEQ ID NO: 87220 - DNA, 18 bp, Artificial Sequence
  Synthetic
ccctccugatcccucgca

SEQ ID NO: 87221 - DNA, 19 bp, Artificial Sequence
  Synthetic
ctaccucggagccgaucat

SEQ ID NO: 87222 - DNA, 29 bp, Artificial Sequence
  Synthetic
ctcatctgaagaaaagutacctagugcaa

SEQ ID NO: 87223 - DNA, 21 bp, Artificial Sequence
  Synthetic
ccgtacuaaggcggtgucaag

SEQ ID NO: 87224 - DNA, 21 bp, Artificial Sequence
  Synthetic
ctgatuacccacgtcagucct

SEQ ID NO: 87225 - DNA, 25 bp, Artificial Sequence
  Synthetic
actccccaccucttcttcttttcua

SEQ ID NO: 87226 - DNA, 29 bp, Artificial Sequence
  Synthetic
gatattcttgtttugcctctgttttggut

SEQ ID NO: 87227 - DNA, 20 bp, Artificial Sequence
  Synthetic
gctgtgtgugcccctaagut

SEQ ID NO: 87228 - DNA, 27 bp, Artificial Sequence
  Synthetic
tctttgcttaaugggtgtcgtatauca

SEQ ID NO: 87229 - DNA, 21 bp, Artificial Sequence
  Synthetic
ctgcatgacuggtccugaaag

SEQ ID NO: 87230 - DNA, 21 bp, Artificial Sequence
  Synthetic
tgctttaauccagcgcctcuc

SEQ ID NO: 87231 - DNA, 22 bp, Artificial Sequence
  Synthetic
gctgcaaucttcggtaguccat

SEQ ID NO: 87232 - DNA, 25 bp, Artificial Sequence
  Synthetic
ctgttctucctcagacatucaaacg

SEQ ID NO: 87233 - DNA, 26 bp, Artificial Sequence
  Synthetic
cctggtggaagcauactgcaaaauat

SEQ ID NO: 87234 - DNA, 22 bp, Artificial Sequence
  Synthetic
cctguccacagaactttugcga

SEQ ID NO: 87235 - DNA, 25 bp, Artificial Sequence
  Synthetic
ggtggauccagaagcagaauaagag

SEQ ID NO: 87236 - DNA, 23 bp, Artificial Sequence
  Synthetic
cggtcttcaugcagagacugaaa

SEQ ID NO: 87237 - DNA, 24 bp, Artificial Sequence
  Synthetic
gtgaggtatuggtgacaagguagg

SEQ ID NO: 87238 - DNA, 23 bp, Artificial Sequence
  Synthetic
tgacauaggccagcggtttaaut

SEQ ID NO: 87239 - DNA, 20 bp, Artificial Sequence
  Synthetic
gcaccaccucacctgtugac

SEQ ID NO: 87240 - DNA, 23 bp, Artificial Sequence
  Synthetic
attcaattctucccggtctgcut

SEQ ID NO: 87241 - DNA, 23 bp, Artificial Sequence
  Synthetic
tgctcttcccuattctcccctut

SEQ ID NO: 87242 - DNA, 28 bp, Artificial Sequence
  Synthetic
gtggctctaaagucaatctcttcttuct

SEQ ID NO: 87243 - DNA, 22 bp, Artificial Sequence
  Synthetic
agaauggcccaacaagcaaaug

SEQ ID NO: 87244 - DNA, 21 bp, Artificial Sequence
  Synthetic
ggaguccagcauggcaagaag

SEQ ID NO: 87245 - DNA, 22 bp, Artificial Sequence
  Synthetic
gggccattuagtgactgtucat

SEQ ID NO: 87246 - DNA, 24 bp, Artificial Sequence
  Synthetic
ggtctcctaugagtgagaacucct

SEQ ID NO: 87247 - DNA, 22 bp, Artificial Sequence
  Synthetic
ccccaaaggaccuaagtctcut

SEQ ID NO: 87248 - DNA, 20 bp, Artificial Sequence
  Synthetic
gactccttugcccctgtgut

SEQ ID NO: 87249 - DNA, 22 bp, Artificial Sequence
  Synthetic
ctgctgccaauagcttaguggt

SEQ ID NO: 87250 - DNA, 22 bp, Artificial Sequence
  Synthetic
acccucagacagagtctgucaa

SEQ ID NO: 87251 - DNA, 24 bp, Artificial Sequence
  Synthetic
cagcttgagaugaggtggaauaga

SEQ ID NO: 87252 - DNA, 32 bp, Artificial Sequence
  Synthetic
aacatgaataggauacagtcttctacttcuca

SEQ ID NO: 87253 - DNA, 28 bp, Artificial Sequence
  Synthetic
attcgttgatcaaacucatctgtgguat

SEQ ID NO: 87254 - DNA, 23 bp, Artificial Sequence
  Synthetic
gatgtucaaagccaaagcctuca

SEQ ID NO: 87255 - DNA, 29 bp, Artificial Sequence
  Synthetic
cttctttaccggugtacactactattuct

SEQ ID NO: 87256 - DNA, 23 bp, Artificial Sequence
  Synthetic
ttggcaggcuacactgguaaaat

SEQ ID NO: 87257 - DNA, 28 bp, Artificial Sequence
  Synthetic
gcacgaaggugaattaaaaucaaaagga

SEQ ID NO: 87258 - DNA, 21 bp, Artificial Sequence
  Synthetic
cacaucgagaagcagctcuga

SEQ ID NO: 87259 - DNA, 23 bp, Artificial Sequence
  Synthetic
tcattcctgucattccctugcag

SEQ ID NO: 87260 - DNA, 26 bp, Artificial Sequence
  Synthetic
ggucaaaaaggaaacgcaauaaggat

SEQ ID NO: 87261 - DNA, 27 bp, Artificial Sequence
  Synthetic
cagctctggaauaacaagctucaaaaa

SEQ ID NO: 87262 - DNA, 28 bp, Artificial Sequence
  Synthetic
gtgttattgacgucatagagtgacuaga

SEQ ID NO: 87263 - DNA, 21 bp, Artificial Sequence
  Synthetic
gcacugacctctatguccaca

SEQ ID NO: 87264 - DNA, 22 bp, Artificial Sequence
  Synthetic
acatugccaaccattccuacct

SEQ ID NO: 87265 - DNA, 25 bp, Artificial Sequence
  Synthetic
gtaggguagggaagtucacagagaa

SEQ ID NO: 87266 - DNA, 21 bp, Artificial Sequence
  Synthetic
gggcacucagctagtcctcut

SEQ ID NO: 87267 - DNA, 25 bp, Artificial Sequence
  Synthetic
ctgcagagugctatgaaauacaagg

SEQ ID NO: 87268 - DNA, 21 bp, Artificial Sequence
  Synthetic
gaagcaccagcccuaugaact

SEQ ID NO: 87269 - DNA, 28 bp, Artificial Sequence
  Synthetic
ccattgcattgauatgatggatatuggg

SEQ ID NO: 87270 - DNA, 20 bp, Artificial Sequence
  Synthetic
gtccgccutctctccuacct

SEQ ID NO: 87271 - DNA, 17 bp, Artificial Sequence
  Synthetic
ggatucccgccccucac

SEQ ID NO: 87272 - DNA, 22 bp, Artificial Sequence
  Synthetic
tgccuaccccaaaatgcttuct

SEQ ID NO: 87273 - DNA, 29 bp, Artificial Sequence
  Synthetic
agcatttataaguccagagaugaagcaaa

SEQ ID NO: 87274 - DNA, 20 bp, Artificial Sequence
  Synthetic
ccggccccuactcactttug

SEQ ID NO: 87275 - DNA, 24 bp, Artificial Sequence
  Synthetic
cucttttcccuccacaacaaagga

SEQ ID NO: 87276 - DNA, 22 bp, Artificial Sequence
  Synthetic
tgcttggaucatattggccugt

SEQ ID NO: 87277 - DNA, 23 bp, Artificial Sequence
  Synthetic
actttcagcutgtgggaatugga

SEQ ID NO: 87278 - DNA, 22 bp, Artificial Sequence
  Synthetic
gcggtgtcutgactctcugaag

SEQ ID NO: 87279 - DNA, 21 bp, Artificial Sequence
  Synthetic
atgccgtucaggttgttgtug

SEQ ID NO: 87280 - DNA, 28 bp, Artificial Sequence
  Synthetic
caaagctttcattuatgactccactgut

SEQ ID NO: 87281 - DNA, 24 bp, Artificial Sequence
  Synthetic
ggtggaattuaatgacccagugct

SEQ ID NO: 87282 - DNA, 22 bp, Artificial Sequence
  Synthetic
ggtctttggucgggttctugag

SEQ ID NO: 87283 - DNA, 28 bp, Artificial Sequence
  Synthetic
aggaaaactggcaauaactcagattcut

SEQ ID NO: 87284 - DNA, 21 bp, Artificial Sequence
  Synthetic
gatgactgacccuccctctug

SEQ ID NO: 87285 - DNA, 28 bp, Artificial Sequence
  Synthetic
ctgaagatgugagcatgttctttguaaa

SEQ ID NO: 87286 - DNA, 19 bp, Artificial Sequence
  Synthetic
agtggctggugtccctgua

SEQ ID NO: 87287 - DNA, 17 bp, Artificial Sequence
  Synthetic
tggcagcggguacucac

SEQ ID NO: 87288 - DNA, 27 bp, Artificial Sequence
  Synthetic
cttaccctgggcutttgaatcagaaua

SEQ ID NO: 87289 - DNA, 24 bp, Artificial Sequence
  Synthetic
tggtagacugagctuagacagagg

SEQ ID NO: 87290 - DNA, 25 bp, Artificial Sequence
  Synthetic
tttggagaacutgctcucacagaaa

SEQ ID NO: 87291 - DNA, 25 bp, Artificial Sequence
  Synthetic
cagaacuggacctatgaggugaaag

SEQ ID NO: 87292 - DNA, 22 bp, Artificial Sequence
  Synthetic
ctccuccagctgttctucaagg

SEQ ID NO: 87293 - DNA, 24 bp, Artificial Sequence
  Synthetic
ctacagagtuctgggcatctucag

SEQ ID NO: 87294 - DNA, 26 bp, Artificial Sequence
  Synthetic
gttaggtgaagugattatccaggugt

SEQ ID NO: 87295 - DNA, 28 bp, Artificial Sequence
  Synthetic
ggatcttcggaucagtaagtacttctuc

SEQ ID NO: 87296 - DNA, 20 bp, Artificial Sequence
  Synthetic
acgggcucctcgaacuacat

SEQ ID NO: 87297 - DNA, 22 bp, Artificial Sequence
  Synthetic
ggacgacaaccagaaugagugg

SEQ ID NO: 87298 - DNA, 23 bp, Artificial Sequence
  Synthetic
aggcagagaagagaagugaguga

SEQ ID NO: 87299 - DNA, 29 bp, Artificial Sequence
  Synthetic
tgcattcttagagcugtggaaattactut

SEQ ID NO: 87300 - DNA, 28 bp, Artificial Sequence
  Synthetic
agtgtctgaaucaaatgttctctuggat

SEQ ID NO: 87301 - DNA, 28 bp, Artificial Sequence
  Synthetic
ggcctccuaaaagtagactggaauaaaa

SEQ ID NO: 87302 - DNA, 21 bp, Artificial Sequence
  Synthetic
cgacucacccggaacttctug

SEQ ID NO: 87303 - DNA, 19 bp, Artificial Sequence
  Synthetic
tcctagggagcucgcucag

SEQ ID NO: 87304 - DNA, 21 bp, Artificial Sequence
  Synthetic
aaaaggtggcuccgagaagut

SEQ ID NO: 87305 - DNA, 22 bp, Artificial Sequence
  Synthetic
cgatcagucacatcccuaccca

SEQ ID NO: 87306 - DNA, 21 bp, Artificial Sequence
  Synthetic
caggagggucttgggtggaua

SEQ ID NO: 87307 - DNA, 22 bp, Artificial Sequence
  Synthetic
gagaatcctuggtttgccctug

SEQ ID NO: 87308 - DNA, 27 bp, Artificial Sequence
  Synthetic
gagattcatugacgggacttacauaga

SEQ ID NO: 87309 - DNA, 24 bp, Artificial Sequence
  Synthetic
ccacattcccaaaucagatgctut

SEQ ID NO: 87310 - DNA, 27 bp, Artificial Sequence
  Synthetic
gcagtcatcaaaguacaaagcatcuga

SEQ ID NO: 87311 - DNA, 33 bp, Artificial Sequence
  Synthetic
acatcaattattgaauatttagcttggcaaugg

SEQ ID NO: 87312 - DNA, 27 bp, Artificial Sequence
  Synthetic
gtgcagtaactugatttgctgttguat

SEQ ID NO: 87313 - DNA, 22 bp, Artificial Sequence
  Synthetic
aagaggcutccaaatugagggt

SEQ ID NO: 87314 - DNA, 26 bp, Artificial Sequence
  Synthetic
ttcttctauccttccttcuccacagt

SEQ ID NO: 87315 - DNA, 24 bp, Artificial Sequence
  Synthetic
accttcctcutctaggtggtucag

SEQ ID NO: 87316 - DNA, 26 bp, Artificial Sequence
  Synthetic
ccagtgcttacuccagaaatgaugaa

SEQ ID NO: 87317 - DNA, 22 bp, Artificial Sequence
  Synthetic
agaggaaatcugcagctctguc

SEQ ID NO: 87318 - DNA, 20 bp, Artificial Sequence
  Synthetic
ggccaauaactcccuagcca

SEQ ID NO: 87319 - DNA, 28 bp, Artificial Sequence
  Synthetic
ttgagtgtaacuaccttttccctttgut

SEQ ID NO: 87320 - DNA, 22 bp, Artificial Sequence
  Synthetic
cctcggutgaataccugcaaga

SEQ ID NO: 87321 - DNA, 27 bp, Artificial Sequence
  Synthetic
tcgaagaactaguttcccatactucct

SEQ ID NO: 87322 - DNA, 19 bp, Artificial Sequence
  Synthetic
cutctcacugccccaccag

SEQ ID NO: 87323 - DNA, 21 bp, Artificial Sequence
  Synthetic
ctgagccaccutgtctgucat

SEQ ID NO: 87324 - DNA, 21 bp, Artificial Sequence
  Synthetic
ccttgtugccaccacttcuca

SEQ ID NO: 87325 - DNA, 28 bp, Artificial Sequence
  Synthetic
gcagtgtacagtuttaaatagctgccua

SEQ ID NO: 87326 - DNA, 28 bp, Artificial Sequence
  Synthetic
gacttaccagatuagttacacacgacut

SEQ ID NO: 87327 - DNA, 28 bp, Artificial Sequence
  Synthetic
catctaaaaatcugccattggtgaagug

SEQ ID NO: 87328 - DNA, 17 bp, Artificial Sequence
  Synthetic
caggcgccccuggaaut

SEQ ID NO: 87329 - DNA, 17 bp, Artificial Sequence
  Synthetic
gggctgcutgccguagg

SEQ ID NO: 87330 - DNA, 21 bp, Artificial Sequence
  Synthetic
tggtgctcugggagatctuca

SEQ ID NO: 87331 - DNA, 22 bp, Artificial Sequence
  Synthetic
gaaccgagutcccugaaaaagg

SEQ ID NO: 87332 - DNA, 21 bp, Artificial Sequence
  Synthetic
aggcacugagagggacaguag

SEQ ID NO: 87333 - DNA, 21 bp, Artificial Sequence
  Synthetic
cgcaagutctcatcuggccat

SEQ ID NO: 87334 - DNA, 26 bp, Artificial Sequence
  Synthetic
tgcttttagacguggatgtacuaacc

SEQ ID NO: 87335 - DNA, 21 bp, Artificial Sequence
  Synthetic
ttgctatugccgtcccaucaa

SEQ ID NO: 87336 - DNA, 27 bp, Artificial Sequence
  Synthetic
cttuaacaggaagaggtacugcaacat

SEQ ID NO: 87337 - DNA, 28 bp, Artificial Sequence
  Synthetic
cgcacagcaacautttgagaataatcut

SEQ ID NO: 87338 - DNA, 28 bp, Artificial Sequence
  Synthetic
gcagttgttaaagaacutgctgagacua

SEQ ID NO: 87339 - DNA, 21 bp, Artificial Sequence
  Synthetic
gcaagagaagugccctcucaa

SEQ ID NO: 87340 - DNA, 22 bp, Artificial Sequence
  Synthetic
cttttcctgugcttgctucaca

SEQ ID NO: 87341 - DNA, 23 bp, Artificial Sequence
  Synthetic
acctuaggcagagaggaaugagg

SEQ ID NO: 87342 - DNA, 27 bp, Artificial Sequence
  Synthetic
tcacactgagcauttactacctgaaug

SEQ ID NO: 87343 - DNA, 21 bp, Artificial Sequence
  Synthetic
cagcttucaccgcttgggaua

SEQ ID NO: 87344 - DNA, 27 bp, Artificial Sequence
  Synthetic
tgcaagttaacacugattgaccaucat

SEQ ID NO: 87345 - DNA, 24 bp, Artificial Sequence
  Synthetic
aaagacagaacugggcaaagacut

SEQ ID NO: 87346 - DNA, 25 bp, Artificial Sequence
  Synthetic
agagcguacatctgaaatucaacca

SEQ ID NO: 87347 - DNA, 18 bp, Artificial Sequence
  Synthetic
ctgaagugcccccuggag

SEQ ID NO: 87348 - DNA, 22 bp, Artificial Sequence
  Synthetic
ctcatgacaautggcaugcact

SEQ ID NO: 87349 - DNA, 24 bp, Artificial Sequence
  Synthetic
caagtcattaagggugcagagcua

SEQ ID NO: 87350 - DNA, 24 bp, Artificial Sequence
  Synthetic
gggcuccaataatcaucaaaggga

SEQ ID NO: 87351 - DNA, 20 bp, Artificial Sequence
  Synthetic
ctcaagctcutgggccauct

SEQ ID NO: 87352 - DNA, 19 bp, Artificial Sequence
  Synthetic
gacuacacgggcagctuca

SEQ ID NO: 87353 - DNA, 19 bp, Artificial Sequence
  Synthetic
caagcgacucggguaagga

SEQ ID NO: 87354 - DNA, 22 bp, Artificial Sequence
  Synthetic
gcccatctcuctccctcctuat

SEQ ID NO: 87355 - DNA, 22 bp, Artificial Sequence
  Synthetic
ccctgggaacaacaucctagug

SEQ ID NO: 87356 - DNA, 17 bp, Artificial Sequence
  Synthetic
cgcccaccucacugacc

SEQ ID NO: 87357 - DNA, 19 bp, Artificial Sequence
  Synthetic
gggcttcuggctccttcuc

SEQ ID NO: 87358 - DNA, 18 bp, Artificial Sequence
  Synthetic
tgugaagcgccucaacga

SEQ ID NO: 87359 - DNA, 19 bp, Artificial Sequence
  Synthetic
gggacggaaaugactuggg

SEQ ID NO: 87360 - DNA, 20 bp, Artificial Sequence
  Synthetic
cgctacccacagugacacuc

SEQ ID NO: 87361 - DNA, 28 bp, Artificial Sequence
  Synthetic
ggaagtatagttuctttcagggcugaat

SEQ ID NO: 87362 - DNA, 32 bp, Artificial Sequence
  Synthetic
atgttacattggttuccttgacatttttctut

SEQ ID NO: 87363 - DNA, 26 bp, Artificial Sequence
  Synthetic
cacaacugcatcaugagaaaacaagt

SEQ ID NO: 87364 - DNA, 24 bp, Artificial Sequence
  Synthetic
tutttccucccacagaaccaaact

SEQ ID NO: 87365 - DNA, 21 bp, Artificial Sequence
  Synthetic
gtgccatugaggcatgatgug

SEQ ID NO: 87366 - DNA, 25 bp, Artificial Sequence
  Synthetic
ttgctgctuactcccaaatatugga

SEQ ID NO: 87367 - DNA, 21 bp, Artificial Sequence
  Synthetic
caggaggcaccuttctgacut

SEQ ID NO: 87368 - DNA, 21 bp, Artificial Sequence
  Synthetic
ggcccatcucaagtggatugt

SEQ ID NO: 87369 - DNA, 27 bp, Artificial Sequence
  Synthetic
ggataccttgcgaautagaaggaagug

SEQ ID NO: 87370 - DNA, 22 bp, Artificial Sequence
  Synthetic
gcagauccctugcaagcaaaaa

SEQ ID NO: 87371 - DNA, 27 bp, Artificial Sequence
  Synthetic
agcaaggtaauacggaacactugaaat

SEQ ID NO: 87372 - DNA, 21 bp, Artificial Sequence
  Synthetic
ccccagacccucagtuaccat

SEQ ID NO: 87373 - DNA, 28 bp, Artificial Sequence
  Synthetic
agaaaggttttccucactcaagacauac

SEQ ID NO: 87374 - DNA, 26 bp, Artificial Sequence
  Synthetic
caaggattugagcactttcauccaat

SEQ ID NO: 87375 - DNA, 23 bp, Artificial Sequence
  Synthetic
caacttcaucccaggatggucaa

SEQ ID NO: 87376 - DNA, 26 bp, Artificial Sequence
  Synthetic
cccacugagtagttttucaacaagga

SEQ ID NO: 87377 - DNA, 26 bp, Artificial Sequence
  Synthetic
ccatataaatcugctgatggcaugga

SEQ ID NO: 87378 - DNA, 27 bp, Artificial Sequence
  Synthetic
gtaagauaagagccagcaaaatcaugg

SEQ ID NO: 87379 - DNA, 22 bp, Artificial Sequence
  Synthetic
aaaggatctucgctgggatgut

SEQ ID NO: 87380 - DNA, 28 bp, Artificial Sequence
  Synthetic
caattacaatgacaucatctccttugcc

SEQ ID NO: 87381 - DNA, 22 bp, Artificial Sequence
  Synthetic
aagggagtuacccagggagaut

SEQ ID NO: 87382 - DNA, 28 bp, Artificial Sequence
  Synthetic
gtttcttcactgucttccataggtguat

SEQ ID NO: 87383 - DNA, 30 bp, Artificial Sequence
  Synthetic
gctgctagtccauaagtactcattattcut

SEQ ID NO: 87384 - DNA, 20 bp, Artificial Sequence
  Synthetic
ctcactgtcugggtgtgcuc

SEQ ID NO: 87385 - DNA, 20 bp, Artificial Sequence
  Synthetic
gccgtaccucttgggtcuct

SEQ ID NO: 87386 - DNA, 22 bp, Artificial Sequence
  Synthetic
gtagggttutccactgcuccaa

SEQ ID NO: 87387 - DNA, 22 bp, Artificial Sequence
  Synthetic
cccgcuccacttcataacugat

SEQ ID NO: 87388 - DNA, 25 bp, Artificial Sequence
  Synthetic
tgttcctttcuttacagcggaugag

SEQ ID NO: 87389 - DNA, 28 bp, Artificial Sequence
  Synthetic
acacagtucccttcattttauccaagat

SEQ ID NO: 87390 - DNA, 21 bp, Artificial Sequence
  Synthetic
gcccggaguactagtcucaac

SEQ ID NO: 87391 - DNA, 21 bp, Artificial Sequence
  Synthetic
cacaggacccauttccacuca

SEQ ID NO: 87392 - DNA, 22 bp, Artificial Sequence
  Synthetic
catagtcggaauggaagcguca

SEQ ID NO: 87393 - DNA, 26 bp, Artificial Sequence
  Synthetic
gggtttucaagattcatgcucagaag

SEQ ID NO: 87394 - DNA, 23 bp, Artificial Sequence
  Synthetic
acggaaggaautccaggacaauc

SEQ ID NO: 87395 - DNA, 19 bp, Artificial Sequence
  Synthetic
tgacgtccugtgcaccauc

SEQ ID NO: 87396 - DNA, 22 bp, Artificial Sequence
  Synthetic
cgaggtcacugaactgcatguc

SEQ ID NO: 87397 - DNA, 20 bp, Artificial Sequence
  Synthetic
tgacgatcugccgctgaauc

SEQ ID NO: 87398 - DNA, 21 bp, Artificial Sequence
  Synthetic
tgtgtgtaagucctggcctuc

SEQ ID NO: 87399 - DNA, 18 bp, Artificial Sequence
  Synthetic
aggccucgugcagaacac

SEQ ID NO: 87400 - DNA, 22 bp, Artificial Sequence
  Synthetic
ggaggtaguccatggtctuggt

SEQ ID NO: 87401 - DNA, 24 bp, Artificial Sequence
  Synthetic
gcaggtctaugatgatggcaagut

SEQ ID NO: 87402 - DNA, 21 bp, Artificial Sequence
  Synthetic
gcaggagutcgatcuggagaa

SEQ ID NO: 87403 - DNA, 22 bp, Artificial Sequence
  Synthetic
gcutgtucacaacagacacacc

SEQ ID NO: 87404 - DNA, 26 bp, Artificial Sequence
  Synthetic
gcatgggagagacugataauccaaga

SEQ ID NO: 87405 - DNA, 28 bp, Artificial Sequence
  Synthetic
caaatgcauctgattgugaaacaaaaac

SEQ ID NO: 87406 - DNA, 23 bp, Artificial Sequence
  Synthetic
tcagctccautaccagguacaca

SEQ ID NO: 87407 - DNA, 22 bp, Artificial Sequence
  Synthetic
cctctgactuccctctcctguc

SEQ ID NO: 87408 - DNA, 28 bp, Artificial Sequence
  Synthetic
tgtccctttuaagtaaacacaugacaca

SEQ ID NO: 87409 - DNA, 26 bp, Artificial Sequence
  Synthetic
aacctgttgtatugctcccattctua

SEQ ID NO: 87410 - DNA, 21 bp, Artificial Sequence
  Synthetic
actcccagaggcuggtuaaca

SEQ ID NO: 87411 - DNA, 21 bp, Artificial Sequence
  Synthetic
ccaagagggagautcgctucc

SEQ ID NO: 87412 - DNA, 20 bp, Artificial Sequence
  Synthetic
gctctggcaucccaagguaa

SEQ ID NO: 87413 - DNA, 20 bp, Artificial Sequence
  Synthetic
agcucaacagccagaaccuc

SEQ ID NO: 87414 - DNA, 23 bp, Artificial Sequence
  Synthetic
ggaggcaaccutctgtagctcua

SEQ ID NO: 87415 - DNA, 29 bp, Artificial Sequence
  Synthetic
tgcaaatcttuacaccttcttacuaacct

SEQ ID NO: 87416 - DNA, 21 bp, Artificial Sequence
  Synthetic
gccatcagcgutgatgcagua

SEQ ID NO: 87417 - DNA, 21 bp, Artificial Sequence
  Synthetic
gccatctucggttcagaggut

SEQ ID NO: 87418 - DNA, 21 bp, Artificial Sequence
  Synthetic
gggccaagacccuatcaccua

SEQ ID NO: 87419 - DNA, 20 bp, Artificial Sequence
  Synthetic
ggtggttcuctgccctcuct

SEQ ID NO: 87420 - DNA, 25 bp, Artificial Sequence
  Synthetic
acaaaacacaacuttgcagattgut

SEQ ID NO: 87421 - DNA, 27 bp, Artificial Sequence
  Synthetic
caacaggtgaugatggagatgaaguat

SEQ ID NO: 87422 - DNA, 20 bp, Artificial Sequence
  Synthetic
gccacacucctggcaaucat

SEQ ID NO: 87423 - DNA, 28 bp, Artificial Sequence
  Synthetic
ccautgagccttattugaagaagaagga

SEQ ID NO: 87424 - DNA, 22 bp, Artificial Sequence
  Synthetic
ccttcagautctgccuccacaa

SEQ ID NO: 87425 - DNA, 25 bp, Artificial Sequence
  Synthetic
ctgtatttacugagagcaccaccuc

SEQ ID NO: 87426 - DNA, 28 bp, Artificial Sequence
  Synthetic
aatcaaatcagtaucaatggctcctuca

SEQ ID NO: 87427 - DNA, 27 bp, Artificial Sequence
  Synthetic
gagtaugcacgaaacaaaaacauccat

SEQ ID NO: 87428 - DNA, 21 bp, Artificial Sequence
  Synthetic
ccccaactcugacccttcuga

SEQ ID NO: 87429 - DNA, 21 bp, Artificial Sequence
  Synthetic
tccaattccagaugcccacug

SEQ ID NO: 87430 - DNA, 26 bp, Artificial Sequence
  Synthetic
tugtgtcagtugaagaaacagaagga

SEQ ID NO: 87431 - DNA, 22 bp, Artificial Sequence
  Synthetic
ccatgtgcugtgtttgtuccag

SEQ ID NO: 87432 - DNA, 22 bp, Artificial Sequence
  Synthetic
ctgcttgccutcctgagatuca

SEQ ID NO: 87433 - DNA, 27 bp, Artificial Sequence
  Synthetic
aggtgatgatggaauctgatcctttuc

SEQ ID NO: 87434 - DNA, 20 bp, Artificial Sequence
  Synthetic
aggcatgtuccgaagcauca

SEQ ID NO: 87435 - DNA, 28 bp, Artificial Sequence
  Synthetic
ggcagataguaggttctgttttatuggt

SEQ ID NO: 87436 - DNA, 28 bp, Artificial Sequence
  Synthetic
catcattctucagggccatgaaatagua

SEQ ID NO: 87437 - DNA, 26 bp, Artificial Sequence
  Synthetic
tgctcctagguaggaagtgctattut

SEQ ID NO: 87438 - DNA, 17 bp, Artificial Sequence
  Synthetic
gccccugtctgctuggt

SEQ ID NO: 87439 - DNA, 18 bp, Artificial Sequence
  Synthetic
gggcaccaucaccaccuc

SEQ ID NO: 87440 - DNA, 19 bp, Artificial Sequence
  Synthetic
gggagaaguacgagcuggt

SEQ ID NO: 87441 - DNA, 20 bp, Artificial Sequence
  Synthetic
acctcctuccgcttgaacuc

SEQ ID NO: 87442 - DNA, 17 bp, Artificial Sequence
  Synthetic
ccctgcccugggtccua

SEQ ID NO: 87443 - DNA, 18 bp, Artificial Sequence
  Synthetic
cagccgagcuctggaguc

SEQ ID NO: 87444 - DNA, 18 bp, Artificial Sequence
  Synthetic
gtgctgcugcttccacug

SEQ ID NO: 87445 - DNA, 17 bp, Artificial Sequence
  Synthetic
acucggcccccacctua

SEQ ID NO: 87446 - DNA, 18 bp, Artificial Sequence
  Synthetic
actccagagcucggcuga

SEQ ID NO: 87447 - DNA, 18 bp, Artificial Sequence
  Synthetic
ccccagcagcaccuaucc

SEQ ID NO: 87448 - DNA, 20 bp, Artificial Sequence
  Synthetic
gtguacgacgaggacgacuc

SEQ ID NO: 87449 - DNA, 21 bp, Artificial Sequence
  Synthetic
ggtggcuacacggacacuaaa

SEQ ID NO: 87450 - DNA, 22 bp, Artificial Sequence
  Synthetic
caaacutgcacuggagggagat

SEQ ID NO: 87451 - DNA, 22 bp, Artificial Sequence
  Synthetic
gtagtgagguctgtgggcatut

SEQ ID NO: 87452 - DNA, 21 bp, Artificial Sequence
  Synthetic
gcatgugacaggagccuagaa

SEQ ID NO: 87453 - DNA, 21 bp, Artificial Sequence
  Synthetic
cugggtgacgugagagaaagt

SEQ ID NO: 87454 - DNA, 28 bp, Artificial Sequence
  Synthetic
tgacttggguactttttaacttgcucaa

SEQ ID NO: 87455 - DNA, 28 bp, Artificial Sequence
  Synthetic
ccagacaagcaaacucaaaauaaagaga

SEQ ID NO: 87456 - DNA, 27 bp, Artificial Sequence
  Synthetic
aaggcttcttuccatatacctugcaat

SEQ ID NO: 87457 - DNA, 28 bp, Artificial Sequence
  Synthetic
gcatctagtaagucaacagaaagaucca

SEQ ID NO: 87458 - DNA, 28 bp, Artificial Sequence
  Synthetic
gaaaggagctuccgatattcttctguat

SEQ ID NO: 87459 - DNA, 26 bp, Artificial Sequence
  Synthetic
tugattactttacaugcaggacacct

SEQ ID NO: 87460 - DNA, 23 bp, Artificial Sequence
  Synthetic
agaagagaucgagagaaggcugt

SEQ ID NO: 87461 - DNA, 21 bp, Artificial Sequence
  Synthetic
acutcctcctucccagcagaa

SEQ ID NO: 87462 - DNA, 23 bp, Artificial Sequence
  Synthetic
gagggagctucttcgtttcctut

SEQ ID NO: 87463 - DNA, 22 bp, Artificial Sequence
  Synthetic
gcaacugaacgaggaagggaug

SEQ ID NO: 87464 - DNA, 25 bp, Artificial Sequence
  Synthetic
aaaagcacacagutatgaccuagca

SEQ ID NO: 87465 - DNA, 28 bp, Artificial Sequence
  Synthetic
ttccatagaacuccactttgacaatuga

SEQ ID NO: 87466 - DNA, 29 bp, Artificial Sequence
  Synthetic
tgctatcgaguaggtaatttgcttttgut

SEQ ID NO: 87467 - DNA, 25 bp, Artificial Sequence
  Synthetic
ggacutagtgaucacagcagacaag

SEQ ID NO: 87468 - DNA, 27 bp, Artificial Sequence
  Synthetic
gcttcttgcaguttggaatgaaatuct

SEQ ID NO: 87469 - DNA, 28 bp, Artificial Sequence
  Synthetic
tggtttctgtcaguatgtttgcttgtua

SEQ ID NO: 87470 - DNA, 24 bp, Artificial Sequence
  Synthetic
gugtttgatctcugaagccaacag

SEQ ID NO: 87471 - DNA, 26 bp, Artificial Sequence
  Synthetic
cggaggaguccatagatacatttgut

SEQ ID NO: 87472 - DNA, 22 bp, Artificial Sequence
  Synthetic
atttgcggaaauttggcaucgt

SEQ ID NO: 87473 - DNA, 21 bp, Artificial Sequence
  Synthetic
ccttgccugagctgatgtucc

SEQ ID NO: 87474 - DNA, 24 bp, Artificial Sequence
  Synthetic
ctgatggaugacttttgguggact

SEQ ID NO: 87475 - DNA, 26 bp, Artificial Sequence
  Synthetic
agacatcatctuacctgatccacuga

SEQ ID NO: 87476 - DNA, 21 bp, Artificial Sequence
  Synthetic
gtgtcagguagggatgcucac

SEQ ID NO: 87477 - DNA, 22 bp, Artificial Sequence
  Synthetic
gcaggtagcucagaccattcuc

SEQ ID NO: 87478 - DNA, 21 bp, Artificial Sequence
  Synthetic
tcccugcccagcuaacaaaag

SEQ ID NO: 87479 - DNA, 21 bp, Artificial Sequence
  Synthetic
ccagcgaagguguggaagaag

SEQ ID NO: 87480 - DNA, 17 bp, Artificial Sequence
  Synthetic
ctucccccaccccacut

SEQ ID NO: 87481 - DNA, 17 bp, Artificial Sequence
  Synthetic
cucctuccgccagcact

SEQ ID NO: 87482 - DNA, 18 bp, Artificial Sequence
  Synthetic
cccugcacgacctcaugt

SEQ ID NO: 87483 - DNA, 17 bp, Artificial Sequence
  Synthetic
gccgagaagccggucug

SEQ ID NO: 87484 - DNA, 22 bp, Artificial Sequence
  Synthetic
ccttggcugtgacctgtuacac

SEQ ID NO: 87485 - DNA, 28 bp, Artificial Sequence
  Synthetic
agtcttgcugaagacaatctgaaactua

SEQ ID NO: 87486 - DNA, 24 bp, Artificial Sequence
  Synthetic
tgtactcacagcutgtctacucca

SEQ ID NO: 87487 - DNA, 20 bp, Artificial Sequence
  Synthetic
gcttggcagucctgcacaua

SEQ ID NO: 87488 - DNA, 28 bp, Artificial Sequence
  Synthetic
caccttttcttgacucagtaatgactuc

SEQ ID NO: 87489 - DNA, 27 bp, Artificial Sequence
  Synthetic
aaacacacaautgtatagatugccagc

SEQ ID NO: 87490 - DNA, 22 bp, Artificial Sequence
  Synthetic
ccatgatgugcagcttcuccaa

SEQ ID NO: 87491 - DNA, 25 bp, Artificial Sequence
  Synthetic
tcauctgatgaaugaggaacagcag

SEQ ID NO: 87492 - DNA, 21 bp, Artificial Sequence
  Synthetic
cactgccuggagacacaaugt

SEQ ID NO: 87493 - DNA, 21 bp, Artificial Sequence
  Synthetic
atgcccagcaugcactatcut

SEQ ID NO: 87494 - DNA, 21 bp, Artificial Sequence
  Synthetic
caccacctucccagagtccua

SEQ ID NO: 87495 - DNA, 27 bp, Artificial Sequence
  Synthetic
gttttctcagaacacaauggaacaguc

SEQ ID NO: 87496 - DNA, 21 bp, Artificial Sequence
  Synthetic
ccagtcttcugatgcccugat

SEQ ID NO: 87497 - DNA, 21 bp, Artificial Sequence
  Synthetic
catccaagacaaccugctgug

SEQ ID NO: 87498 - DNA, 23 bp, Artificial Sequence
  Synthetic
gaattcaacuagagggcagccut

SEQ ID NO: 87499 - DNA, 22 bp, Artificial Sequence
  Synthetic
cagaggttcugtctggcaaaug

SEQ ID NO: 87500 - DNA, 20 bp, Artificial Sequence
  Synthetic
ggcccuctgcacugagaaac

SEQ ID NO: 87501 - DNA, 21 bp, Artificial Sequence
  Synthetic
gtgggaccaacugtgacauca

SEQ ID NO: 87502 - DNA, 20 bp, Artificial Sequence
  Synthetic
gattcagcccucacgtcucc

SEQ ID NO: 87503 - DNA, 23 bp, Artificial Sequence
  Synthetic
aacctaccccauctgcttcttuc

SEQ ID NO: 87504 - DNA, 21 bp, Artificial Sequence
  Synthetic
gcugggaaaggatgauaggct

SEQ ID NO: 87505 - DNA, 21 bp, Artificial Sequence
  Synthetic
tgcccaccaugtaccagatuc

SEQ ID NO: 87506 - DNA, 25 bp, Artificial Sequence
  Synthetic
ggagaagagaggucattttgcauga

SEQ ID NO: 87507 - DNA, 26 bp, Artificial Sequence
  Synthetic
gcataugccaaagcactacacuacaa

SEQ ID NO: 87508 - DNA, 22 bp, Artificial Sequence
  Synthetic
gtctgccauggtaagaaaugcc

SEQ ID NO: 87509 - DNA, 27 bp, Artificial Sequence
  Synthetic
gaagtgtactacutgccttctttcuct

SEQ ID NO: 87510 - DNA, 24 bp, Artificial Sequence
  Synthetic
ggttggatucacactcattgtugt

SEQ ID NO: 87511 - DNA, 20 bp, Artificial Sequence
  Synthetic
cccauagggcatugcagacc

SEQ ID NO: 87512 - DNA, 19 bp, Artificial Sequence
  Synthetic
ggcaaacgggccauttcug

SEQ ID NO: 87513 - DNA, 23 bp, Artificial Sequence
  Synthetic
cccattgugactttccagcucat

SEQ ID NO: 87514 - DNA, 27 bp, Artificial Sequence
  Synthetic
agtattcaaaaucaagcgagtucgaga

SEQ ID NO: 87515 - DNA, 27 bp, Artificial Sequence
  Synthetic
cctgtattttgcaugcacttgattuca

SEQ ID NO: 87516 - DNA, 23 bp, Artificial Sequence
  Synthetic
gaagacttacuccctttgccugt

SEQ ID NO: 87517 - DNA, 28 bp, Artificial Sequence
  Synthetic
ggcttaccgtttucccattgtagtaaua

SEQ ID NO: 87518 - DNA, 22 bp, Artificial Sequence
  Synthetic
tgtctcctccugacacctgtut

SEQ ID NO: 87519 - DNA, 20 bp, Artificial Sequence
  Synthetic
tgtcctgtcgutccctccua

SEQ ID NO: 87520 - DNA, 23 bp, Artificial Sequence
  Synthetic
gtggguagaagactaggtuggaa

SEQ ID NO: 87521 - DNA, 27 bp, Artificial Sequence
  Synthetic
ccatttgaugaactccaaaggucagaa

SEQ ID NO: 87522 - DNA, 19 bp, Artificial Sequence
  Synthetic
gggaatgugggaggaggut

SEQ ID NO: 87523 - DNA, 19 bp, Artificial Sequence
  Synthetic
ctgaggcugcccacacuac

SEQ ID NO: 87524 - DNA, 22 bp, Artificial Sequence
  Synthetic
gtgcttaucctgtcccuggaat

SEQ ID NO: 87525 - DNA, 28 bp, Artificial Sequence
  Synthetic
aagcgagtaatguatactgctttcctut

SEQ ID NO: 87526 - DNA, 19 bp, Artificial Sequence
  Synthetic
ctctgagcuggacccgaug

SEQ ID NO: 87527 - DNA, 21 bp, Artificial Sequence
  Synthetic
acaguacctguccaccacact

SEQ ID NO: 87528 - DNA, 23 bp, Artificial Sequence
  Synthetic
cauagtcagaugcacaggccaat

SEQ ID NO: 87529 - DNA, 23 bp, Artificial Sequence
  Synthetic
tcaatgatgcucttttgcugcac

SEQ ID NO: 87530 - DNA, 18 bp, Artificial Sequence
  Synthetic
gccugggaagccagctug

SEQ ID NO: 87531 - DNA, 21 bp, Artificial Sequence
  Synthetic
caccccttugagtcctgtuct

SEQ ID NO: 87532 - DNA, 28 bp, Artificial Sequence
  Synthetic
cgtagaaatuccccttatagucagacca

SEQ ID NO: 87533 - DNA, 25 bp, Artificial Sequence
  Synthetic
gtgatgcaagtuttgggtcttgtut

SEQ ID NO: 87534 - DNA, 17 bp, Artificial Sequence
  Synthetic
gcggucucagggaggct

SEQ ID NO: 87535 - DNA, 19 bp, Artificial Sequence
  Synthetic
acgugagcaggaggugaac

SEQ ID NO: 87536 - DNA, 25 bp, Artificial Sequence
  Synthetic
aggctgcatutcatgaaggtuagaa

SEQ ID NO: 87537 - DNA, 22 bp, Artificial Sequence
  Synthetic
ctcacacguatgttuccgacac

SEQ ID NO: 87538 - DNA, 21 bp, Artificial Sequence
  Synthetic
tgtgtccuttggttgtugcct

SEQ ID NO: 87539 - DNA, 22 bp, Artificial Sequence
  Synthetic
gtatgcgauggtggugacaaac

SEQ ID NO: 87540 - DNA, 23 bp, Artificial Sequence
  Synthetic
cuctcattctctugccaaagcag

SEQ ID NO: 87541 - DNA, 28 bp, Artificial Sequence
  Synthetic
tttaaggcttacacuctgcaattctcut

SEQ ID NO: 87542 - DNA, 23 bp, Artificial Sequence
  Synthetic
tggttgggcaauactgccttuag

SEQ ID NO: 87543 - DNA, 26 bp, Artificial Sequence
  Synthetic
tgagacccaguacaatgagatgttug

SEQ ID NO: 87544 - DNA, 27 bp, Artificial Sequence
  Synthetic
gactaagtccautcctgataccaucac

SEQ ID NO: 87545 - DNA, 27 bp, Artificial Sequence
  Synthetic
gcttcccttcauacagggtattccaua

SEQ ID NO: 87546 - DNA, 23 bp, Artificial Sequence
  Synthetic
gttuccacaccaaccaugagagt

SEQ ID NO: 87547 - DNA, 19 bp, Artificial Sequence
  Synthetic
caacaugcaggcgcucaag

SEQ ID NO: 87548 - DNA, 22 bp, Artificial Sequence
  Synthetic
cctccagggucttctucaggat

SEQ ID NO: 87549 - DNA, 22 bp, Artificial Sequence
  Synthetic
ggtagaaaagcugcctggagug

SEQ ID NO: 87550 - DNA, 22 bp, Artificial Sequence
  Synthetic
tgaatgugaggcccagaaguca

SEQ ID NO: 87551 - DNA, 23 bp, Artificial Sequence
  Synthetic
cttcaggauagcgctcttctucc

SEQ ID NO: 87552 - DNA, 22 bp, Artificial Sequence
  Synthetic
gcctttcuggaactccagtuct

SEQ ID NO: 87553 - DNA, 22 bp, Artificial Sequence
  Synthetic
gctgtgaggutttgctcttcuc

SEQ ID NO: 87554 - DNA, 22 bp, Artificial Sequence
  Synthetic
ttttacuccagcttgcugacga

SEQ ID NO: 87555 - DNA, 26 bp, Artificial Sequence
  Synthetic
aagtaagucaagagaacctccctuct

SEQ ID NO: 87556 - DNA, 23 bp, Artificial Sequence
  Synthetic
gacauacagacugcagggacaat

SEQ ID NO: 87557 - DNA, 24 bp, Artificial Sequence
  Synthetic
gacccttcagaauctcttgctcut

SEQ ID NO: 87558 - DNA, 25 bp, Artificial Sequence
  Synthetic
ttgtcttagaugggacccacaatuc

SEQ ID NO: 87559 - DNA, 25 bp, Artificial Sequence
  Synthetic
accctagtcacgugttatagccuac

SEQ ID NO: 87560 - DNA, 26 bp, Artificial Sequence
  Synthetic
gggatgtaatcautggagaggatgug

SEQ ID NO: 87561 - DNA, 20 bp, Artificial Sequence
  Synthetic
tcccuaacctugccaaggag

SEQ ID NO: 87562 - DNA, 26 bp, Artificial Sequence
  Synthetic
gactacacaucctgaacttttugcag

SEQ ID NO: 87563 - DNA, 25 bp, Artificial Sequence
  Synthetic
tgacttctgcucctgttctugaaag

SEQ ID NO: 87564 - DNA, 22 bp, Artificial Sequence
  Synthetic
gcttggagaucccttucgaact

SEQ ID NO: 87565 - DNA, 21 bp, Artificial Sequence
  Synthetic
tccatgagcuggagaagucca

SEQ ID NO: 87566 - DNA, 20 bp, Artificial Sequence
  Synthetic
cctccacguacccctcucag

SEQ ID NO: 87567 - DNA, 20 bp, Artificial Sequence
  Synthetic
cgtccuggacgaugcagaag

SEQ ID NO: 87568 - DNA, 22 bp, Artificial Sequence
  Synthetic
tgtctgtccagacucccatcut

SEQ ID NO: 87569 - DNA, 21 bp, Artificial Sequence
  Synthetic
ggagtcccuggatttcacuga

SEQ ID NO: 87570 - DNA, 24 bp, Artificial Sequence
  Synthetic
ttgggttactgugtggcatatgut

SEQ ID NO: 87571 - DNA, 23 bp, Artificial Sequence
  Synthetic
ggautcaaauaagcagccggaag

SEQ ID NO: 87572 - DNA, 18 bp, Artificial Sequence
  Synthetic
acagagaacgccgugugt

SEQ ID NO: 87573 - DNA, 19 bp, Artificial Sequence
  Synthetic
gggaccaggguggaaaugg

SEQ ID NO: 87574 - DNA, 22 bp, Artificial Sequence
  Synthetic
accagagaaguttgcccugaag

SEQ ID NO: 87575 - DNA, 25 bp, Artificial Sequence
  Synthetic
ctcaaaacagttutgcagggagaug

SEQ ID NO: 87576 - DNA, 25 bp, Artificial Sequence
  Synthetic
atcccaaagcaagaucttctucaca

SEQ ID NO: 87577 - DNA, 25 bp, Artificial Sequence
  Synthetic
gcacaggaaaaacauttgcatggut

SEQ ID NO: 87578 - DNA, 24 bp, Artificial Sequence
  Synthetic
aatccaccugcaagctgtgauaat

SEQ ID NO: 87579 - DNA, 28 bp, Artificial Sequence
  Synthetic
ccctgacattucaacttttacttgctuc

SEQ ID NO: 87580 - DNA, 19 bp, Artificial Sequence
  Synthetic
agcuggagccaggaccaua

SEQ ID NO: 87581 - DNA, 22 bp, Artificial Sequence
  Synthetic
ctcagugagccagttgctaucc

SEQ ID NO: 87582 - DNA, 26 bp, Artificial Sequence
  Synthetic
atccagaaaaagutgctgaaaucaga

SEQ ID NO: 87583 - DNA, 22 bp, Artificial Sequence
  Synthetic
tgacagagucttcccgaugagt

SEQ ID NO: 87584 - DNA, 21 bp, Artificial Sequence
  Synthetic
agggacaggaaguctgacuga

SEQ ID NO: 87585 - DNA, 27 bp, Artificial Sequence
  Synthetic
cttgaggtgcuactgaattttcugaag

SEQ ID NO: 87586 - DNA, 22 bp, Artificial Sequence
  Synthetic
ctgcgtctucatctcctccauc

SEQ ID NO: 87587 - DNA, 23 bp, Artificial Sequence
  Synthetic
ggtgggttuctcaatcgtctuca

SEQ ID NO: 87588 - DNA, 22 bp, Artificial Sequence
  Synthetic
ctctacacuggaggtggacuct

SEQ ID NO: 87589 - DNA, 22 bp, Artificial Sequence
  Synthetic
tcaagttcaucaccccactcug

SEQ ID NO: 87590 - DNA, 25 bp, Artificial Sequence
  Synthetic
tcttattcccacagugtatcggcua

SEQ ID NO: 87591 - DNA, 25 bp, Artificial Sequence
  Synthetic
tgcctgtctcucatgagttcauact

SEQ ID NO: 87592 - DNA, 25 bp, Artificial Sequence
  Synthetic
ggctgtgcttugtcttttaaaggug

SEQ ID NO: 87593 - DNA, 22 bp, Artificial Sequence
  Synthetic
ccuggccaagaaucaagaacct

SEQ ID NO: 87594 - DNA, 24 bp, Artificial Sequence
  Synthetic
catcctcaacauagatgccauggt

SEQ ID NO: 87595 - DNA, 26 bp, Artificial Sequence
  Synthetic
cccctcctagutttgatcttcttugg

SEQ ID NO: 87596 - DNA, 22 bp, Artificial Sequence
  Synthetic
gccgctuaccaacctccttuaa

SEQ ID NO: 87597 - DNA, 23 bp, Artificial Sequence
  Synthetic
ggtagaugctagggugaaaaggg

SEQ ID NO: 87598 - DNA, 21 bp, Artificial Sequence
  Synthetic
ccccacagaccugacttcuct

SEQ ID NO: 87599 - DNA, 23 bp, Artificial Sequence
  Synthetic
gcuggaaaggaggtgtugaagaa

SEQ ID NO: 87600 - DNA, 21 bp, Artificial Sequence
  Synthetic
agtgttttgcucctgggtcug

SEQ ID NO: 87601 - DNA, 26 bp, Artificial Sequence
  Synthetic
cauaagacaagcucacagcaaacaaa

SEQ ID NO: 87602 - DNA, 27 bp, Artificial Sequence
  Synthetic
ttgggttttccutaactttaggtugga

SEQ ID NO: 87603 - DNA, 28 bp, Artificial Sequence
  Synthetic
ctgtcugcattatttcugaaaaccaaca

SEQ ID NO: 87604 - DNA, 22 bp, Artificial Sequence
  Synthetic
cttcttcacgcuccttcccuat

SEQ ID NO: 87605 - DNA, 20 bp, Artificial Sequence
  Synthetic
catgcugaaggacagcucct

SEQ ID NO: 87606 - DNA, 22 bp, Artificial Sequence
  Synthetic
gtgaatgauccgggaggcauag

SEQ ID NO: 87607 - DNA, 29 bp, Artificial Sequence
  Synthetic
cttccttggagautgtatgttagcagtua

SEQ ID NO: 87608 - DNA, 26 bp, Artificial Sequence
  Synthetic
ttgctcagcaaagguacttgauacat

SEQ ID NO: 87609 - DNA, 26 bp, Artificial Sequence
  Synthetic
cttctgtaagagaugccacctuagag

SEQ ID NO: 87610 - DNA, 26 bp, Artificial Sequence
  Synthetic
ccaagtggcacuctttcaaaagtuat

SEQ ID NO: 87611 - DNA, 21 bp, Artificial Sequence
  Synthetic
tgaucugaaggagcccagaga

SEQ ID NO: 87612 - DNA, 22 bp, Artificial Sequence
  Synthetic
gcttgtctccucgccttatucc

SEQ ID NO: 87613 - DNA, 26 bp, Artificial Sequence
  Synthetic
ctggtcctcaaugaagtcgtagauaa

SEQ ID NO: 87614 - DNA, 26 bp, Artificial Sequence
  Synthetic
gaacatatcatcuggaccctttucca

SEQ ID NO: 87615 - DNA, 28 bp, Artificial Sequence
  Synthetic
tcagutaacaagtaaguagggaggagag

SEQ ID NO: 87616 - DNA, 20 bp, Artificial Sequence
  Synthetic
tgtgcccgcguatacttcuc

SEQ ID NO: 87617 - DNA, 18 bp, Artificial Sequence
  Synthetic
caggcggaacugguggaa

SEQ ID NO: 87618 - DNA, 22 bp, Artificial Sequence
  Synthetic
tgccagcagutgaugagaaaca

SEQ ID NO: 87619 - DNA, 25 bp, Artificial Sequence
  Synthetic
gcagtgatgccucattacgtttuag

SEQ ID NO: 87620 - DNA, 22 bp, Artificial Sequence
  Synthetic
agatgatugccaaggccttcuc

SEQ ID NO: 87621 - DNA, 20 bp, Artificial Sequence
  Synthetic
gcugggagagacuagcacat

SEQ ID NO: 87622 - DNA, 23 bp, Artificial Sequence
  Synthetic
cctactacccutggcatccttug

SEQ ID NO: 87623 - DNA, 20 bp, Artificial Sequence
  Synthetic
aggcaccgugttgacttcug

SEQ ID NO: 87624 - DNA, 22 bp, Artificial Sequence
  Synthetic
ggtcacauctgaccagucagaa

SEQ ID NO: 87625 - DNA, 20 bp, Artificial Sequence
  Synthetic
aaaugctgcugagcgaacac

SEQ ID NO: 87626 - DNA, 19 bp, Artificial Sequence
  Synthetic
ccutccgcatucgggagaa

SEQ ID NO: 87627 - DNA, 19 bp, Artificial Sequence
  Synthetic
ccacaaggucggcacucac

SEQ ID NO: 87628 - DNA, 21 bp, Artificial Sequence
  Synthetic
tgtacccuggttctgcucagt

SEQ ID NO: 87629 - DNA, 23 bp, Artificial Sequence
  Synthetic
aatcgtgttcutgtgcctaucca

SEQ ID NO: 87630 - DNA, 27 bp, Artificial Sequence
  Synthetic
ccataaggcucttactctcaaaucaca

SEQ ID NO: 87631 - DNA, 23 bp, Artificial Sequence
  Synthetic
agctgttcttutggttggtguct

SEQ ID NO: 87632 - DNA, 23 bp, Artificial Sequence
  Synthetic
gaaggacacucaaaagcatgcug

SEQ ID NO: 87633 - DNA, 22 bp, Artificial Sequence
  Synthetic
cttgcatccaggutccacctua

SEQ ID NO: 87634 - DNA, 20 bp, Artificial Sequence
  Synthetic
cgacgccgagaccucuaaac

SEQ ID NO: 87635 - DNA, 20 bp, Artificial Sequence
  Synthetic
gctatgagcugcttgggcua

SEQ ID NO: 87636 - DNA, 25 bp, Artificial Sequence
  Synthetic
gagcagcaaacaacutctucagaaa

SEQ ID NO: 87637 - DNA, 24 bp, Artificial Sequence
  Synthetic
ggcactuacctacacatcugcaag

SEQ ID NO: 87638 - DNA, 28 bp, Artificial Sequence
  Synthetic
cctgtcaagacucaatatgattucccat

SEQ ID NO: 87639 - DNA, 27 bp, Artificial Sequence
  Synthetic
caaattgcugccagactcaagattuaa

SEQ ID NO: 87640 - DNA, 23 bp, Artificial Sequence
  Synthetic
gctaagtagcugcttctggtuga

SEQ ID NO: 87641 - DNA, 23 bp, Artificial Sequence
  Synthetic
tcttgttcaauggaagcctccug

SEQ ID NO: 87642 - DNA, 27 bp, Artificial Sequence
  Synthetic
tttucacaagcacatugacaaacaaga

SEQ ID NO: 87643 - DNA, 24 bp, Artificial Sequence
  Synthetic
cctgtgatugctcctgtgaucaaa

SEQ ID NO: 87644 - DNA, 23 bp, Artificial Sequence
  Synthetic
acgcacagtuagtgaaccttcuc

SEQ ID NO: 87645 - DNA, 27 bp, Artificial Sequence
  Synthetic
ttatcactcaaaucggagacattuggt

SEQ ID NO: 87646 - DNA, 27 bp, Artificial Sequence
  Synthetic
tctgttgagaugaactaaauggcaact

SEQ ID NO: 87647 - DNA, 23 bp, Artificial Sequence
  Synthetic
agaagagccauagagagcaugga

SEQ ID NO: 87648 - DNA, 27 bp, Artificial Sequence
  Synthetic
acggttaaccuatttacctgttgtucc

SEQ ID NO: 87649 - DNA, 28 bp, Artificial Sequence
  Synthetic
tgaagttcgttuaaaagagtcagcugaa

SEQ ID NO: 87650 - DNA, 26 bp, Artificial Sequence
  Synthetic
ttggatgctautcaaggttatuggct

SEQ ID NO: 87651 - DNA, 25 bp, Artificial Sequence
  Synthetic
accacattgaggucacaatctucaa

SEQ ID NO: 87652 - DNA, 21 bp, Artificial Sequence
  Synthetic
ttucaccaagcggaaucccat

SEQ ID NO: 87653 - DNA, 22 bp, Artificial Sequence
  Synthetic
gtgctccagcugtgttgtttuc

SEQ ID NO: 87654 - DNA, 28 bp, Artificial Sequence
  Synthetic
ggctcttctttuatcatcctgaagtuct

SEQ ID NO: 87655 - DNA, 22 bp, Artificial Sequence
  Synthetic
aaaggugacagaagaagugcgt

SEQ ID NO: 87656 - DNA, 20 bp, Artificial Sequence
  Synthetic
tctgccucccttctgacugt

SEQ ID NO: 87657 - DNA, 20 bp, Artificial Sequence
  Synthetic
gagaguccacccagcauagg

SEQ ID NO: 87658 - DNA, 26 bp, Artificial Sequence
  Synthetic
agtcccugaaaaacagctgaatgaua

SEQ ID NO: 87659 - DNA, 28 bp, Artificial Sequence
  Synthetic
agtacttacggtugtcataaattgggut

SEQ ID NO: 87660 - DNA, 20 bp, Artificial Sequence
  Synthetic
cctcccuacgccttcttcut

SEQ ID NO: 87661 - DNA, 18 bp, Artificial Sequence
  Synthetic
ccacccuccacaguccct

SEQ ID NO: 87662 - DNA, 20 bp, Artificial Sequence
  Synthetic
gcucggagaacacccttcug

SEQ ID NO: 87663 - DNA, 26 bp, Artificial Sequence
  Synthetic
acggtcctcautttctcgtatttugt

SEQ ID NO: 87664 - DNA, 20 bp, Artificial Sequence
  Synthetic
cauggagaagaaggcccuca

SEQ ID NO: 87665 - DNA, 23 bp, Artificial Sequence
  Synthetic
cttggcgaacuccacagtctuaa

SEQ ID NO: 87666 - DNA, 23 bp, Artificial Sequence
  Synthetic
gggctggatutggagctaaagua

SEQ ID NO: 87667 - DNA, 28 bp, Artificial Sequence
  Synthetic
gctgcaaataaaaguccagatacgttut

SEQ ID NO: 87668 - DNA, 20 bp, Artificial Sequence
  Synthetic
actcacuggctcctauggca

SEQ ID NO: 87669 - DNA, 27 bp, Artificial Sequence
  Synthetic
agtcacauagaagaatttgggttuggt

SEQ ID NO: 87670 - DNA, 20 bp, Artificial Sequence
  Synthetic
caggugccacctgataguga

SEQ ID NO: 87671 - DNA, 20 bp, Artificial Sequence
  Synthetic
cugagggagccccatatucc

SEQ ID NO: 87672 - DNA, 26 bp, Artificial Sequence
  Synthetic
acacccatttutacaatgacgugact

SEQ ID NO: 87673 - DNA, 22 bp, Artificial Sequence
  Synthetic
cagctacagugatgcccacuac

SEQ ID NO: 87674 - DNA, 22 bp, Artificial Sequence
  Synthetic
ctcccttaggutccctacucct

SEQ ID NO: 87675 - DNA, 21 bp, Artificial Sequence
  Synthetic
cagaggaaauggctccaggua

SEQ ID NO: 87676 - DNA, 20 bp, Artificial Sequence
  Synthetic
ctccuccaccgcttcttguc

SEQ ID NO: 87677 - DNA, 21 bp, Artificial Sequence
  Synthetic
ctacugggacggaacagctut

SEQ ID NO: 87678 - DNA, 22 bp, Artificial Sequence
  Synthetic
gaactcuccaccaagtgcauca

SEQ ID NO: 87679 - DNA, 21 bp, Artificial Sequence
  Synthetic
gacaucuacccaggacacagg

SEQ ID NO: 87680 - DNA, 27 bp, Artificial Sequence
  Synthetic
agtcaagcggacutaaaacttctuacc

SEQ ID NO: 87681 - DNA, 28 bp, Artificial Sequence
  Synthetic
gtctgctatacugattcctgacttgtut

SEQ ID NO: 87682 - DNA, 25 bp, Artificial Sequence
  Synthetic
ctaaccttccugtgattccactugt

SEQ ID NO: 87683 - DNA, 24 bp, Artificial Sequence
  Synthetic
gaaataagucaacacccagggcua

SEQ ID NO: 87684 - DNA, 21 bp, Artificial Sequence
  Synthetic
tgcgagagcagagugaggaua

SEQ ID NO: 87685 - DNA, 23 bp, Artificial Sequence
  Synthetic
ggaacaaccaautgtagcucgga

SEQ ID NO: 87686 - DNA, 28 bp, Artificial Sequence
  Synthetic
agaaggcaactugacaagagaaatgaua

SEQ ID NO: 87687 - DNA, 28 bp, Artificial Sequence
  Synthetic
aggtagatgtuaagaaacacctcucact

SEQ ID NO: 87688 - DNA, 24 bp, Artificial Sequence
  Synthetic
tgaaataccucagagcuagagcga

SEQ ID NO: 87689 - DNA, 23 bp, Artificial Sequence
  Synthetic
tguggacgtttucagcagaaaga

SEQ ID NO: 87690 - DNA, 29 bp, Artificial Sequence
  Synthetic
tgtttaaaugcagtctaactuggagaagt

SEQ ID NO: 87691 - DNA, 28 bp, Artificial Sequence
  Synthetic
cccaacatcugacagttctttctcttua

SEQ ID NO: 87692 - DNA, 22 bp, Artificial Sequence
  Synthetic
ggcttgatatuggctgttggug

SEQ ID NO: 87693 - DNA, 28 bp, Artificial Sequence
  Synthetic
attcaaaacagcuttaataaggctcuga

SEQ ID NO: 87694 - DNA, 20 bp, Artificial Sequence
  Synthetic
cucccaaggcaagctuacac

SEQ ID NO: 87695 - DNA, 23 bp, Artificial Sequence
  Synthetic
gtgaggguttttggaacuggaga

SEQ ID NO: 87696 - DNA, 21 bp, Artificial Sequence
  Synthetic
ggtccugaggtaagaccugct

SEQ ID NO: 87697 - DNA, 21 bp, Artificial Sequence
  Synthetic
gttgaaggtcugtgcgttcug

SEQ ID NO: 87698 - DNA, 27 bp, Artificial Sequence
  Synthetic
catctcattaucagctgtguagcaaac

SEQ ID NO: 87699 - DNA, 28 bp, Artificial Sequence
  Synthetic
ctcacctcauaactcttcttgguaacaa

SEQ ID NO: 87700 - DNA, 20 bp, Artificial Sequence
  Synthetic
gaaggacgucatgctccugt

SEQ ID NO: 87701 - DNA, 20 bp, Artificial Sequence
  Synthetic
cacagcuagcgggacttgut

SEQ ID NO: 87702 - DNA, 25 bp, Artificial Sequence
  Synthetic
gtggtctutctttctgauacagcca

SEQ ID NO: 87703 - DNA, 25 bp, Artificial Sequence
  Synthetic
cgatcaatgccutctctctctcuct

SEQ ID NO: 87704 - DNA, 25 bp, Artificial Sequence
  Synthetic
ggttctttcuctccaccttugaact

SEQ ID NO: 87705 - DNA, 23 bp, Artificial Sequence
  Synthetic
cagaaaggauaaaccagcaccug

SEQ ID NO: 87706 - DNA, 23 bp, Artificial Sequence
  Synthetic
gctgtgauttcacttucgcagaa

SEQ ID NO: 87707 - DNA, 22 bp, Artificial Sequence
  Synthetic
tttcctcctuggagacatgcug

SEQ ID NO: 87708 - DNA, 28 bp, Artificial Sequence
  Synthetic
gtccacacaacutgattttgatccauat

SEQ ID NO: 87709 - DNA, 27 bp, Artificial Sequence
  Synthetic
tgccagatatuaaatcgagacttugct

SEQ ID NO: 87710 - DNA, 28 bp, Artificial Sequence
  Synthetic
tgagctcagtauggaaagaaataacuct

SEQ ID NO: 87711 - DNA, 25 bp, Artificial Sequence
  Synthetic
tcactttgcauatgccatacaugga

SEQ ID NO: 87712 - DNA, 28 bp, Artificial Sequence
  Synthetic
catgtatggcauatgcaaagugaagaat

SEQ ID NO: 87713 - DNA, 33 bp, Artificial Sequence; identical to SEQ ID NO: 54143
  Synthetic

SEQ ID NO: 87714 - DNA, 21 bp, Artificial Sequence
  Synthetic
cagggcaugcatttcatugga

SEQ ID NO: 87715 - DNA, 23 bp, Artificial Sequence
  Synthetic
gcaggtattuctcgtactgguca

SEQ ID NO: 87716 - DNA, 23 bp, Artificial Sequence
  Synthetic
ggaggtccugttttcaagtucct

SEQ ID NO: 87717 - DNA, 17 bp, Artificial Sequence
  Synthetic
gtccacugcgacgccua

SEQ ID NO: 87718 - DNA, 20 bp, Artificial Sequence
  Synthetic
cccatggagugtccttcgug

SEQ ID NO: 87719 - DNA, 21 bp, Artificial Sequence
  Synthetic
tttccuggaagggaggugaga

SEQ ID NO: 87720 - DNA, 19 bp, Artificial Sequence
  Synthetic
acagttgugggtggctuca

SEQ ID NO: 87721 - DNA, 17 bp, Artificial Sequence
  Synthetic
gctccgccucgtgacuc

SEQ ID NO: 87722 - DNA, 24 bp, Artificial Sequence
  Synthetic
gcagcccaucatgaagttcaucaa

SEQ ID NO: 87723 - DNA, 18 bp, Artificial Sequence
  Synthetic
augaggacgccgacacug

SEQ ID NO: 87724 - DNA, 28 bp, Artificial Sequence
  Synthetic
tcctagataccutcattccttucccaaa

SEQ ID NO: 87725 - DNA, 20 bp, Artificial Sequence
  Synthetic
tgtgggcagcaucactctug

SEQ ID NO: 87726 - DNA, 17 bp, Artificial Sequence
  Synthetic
ccccagccugcagaguc

SEQ ID NO: 87727 - DNA, 22 bp, Artificial Sequence
  Synthetic
guggaggacgagaagaatucct

SEQ ID NO: 87728 - DNA, 23 bp, Artificial Sequence
  Synthetic
gtccatggutcatgcatctucct

SEQ ID NO: 87729 - DNA, 23 bp, Artificial Sequence
  Synthetic
caaaaaggacaaucaggcctgut

SEQ ID NO: 87730 - DNA, 20 bp, Artificial Sequence
  Synthetic
tgcttcuccaggttgtgcut

SEQ ID NO: 87731 - DNA, 19 bp, Artificial Sequence
  Synthetic
cctcucaacccgcgaguag

SEQ ID NO: 87732 - DNA, 21 bp, Artificial Sequence
  Synthetic
gtgccaccacautgcaguaac

SEQ ID NO: 87733 - DNA, 21 bp, Artificial Sequence
  Synthetic
gaggtuagccacgtactcguc

SEQ ID NO: 87734 - DNA, 20 bp, Artificial Sequence
  Synthetic
ccuacctctugcagcagaca

SEQ ID NO: 87735 - DNA, 18 bp, Artificial Sequence
  Synthetic
acgugaagacggctgcuc

SEQ ID NO: 87736 - DNA, 17 bp, Artificial Sequence
  Synthetic
gcugccaagcgtucgga

SEQ ID NO: 87737 - DNA, 24 bp, Artificial Sequence
  Synthetic
tcaagatgggcuactgaaaaugct

SEQ ID NO: 87738 - DNA, 22 bp, Artificial Sequence
  Synthetic
tctgctggagutcatcctgcua

SEQ ID NO: 87739 - DNA, 20 bp, Artificial Sequence
  Synthetic
gtcagaacugggatcugcga

SEQ ID NO: 87740 - DNA, 23 bp, Artificial Sequence
  Synthetic
actcactggucctttcactcuct

SEQ ID NO: 87741 - DNA, 20 bp, Artificial Sequence
  Synthetic
cagttgtcuggcctcuccat

SEQ ID NO: 87742 - DNA, 17 bp, Artificial Sequence
  Synthetic
ctccaccacgucgcuct

SEQ ID NO: 87743 - DNA, 17 bp, Artificial Sequence
  Synthetic
agcucgccctccuacca

SEQ ID NO: 87744 - DNA, 22 bp, Artificial Sequence
  Synthetic
guttgtgcauaaggaccaggga

SEQ ID NO: 87745 - DNA, 23 bp, Artificial Sequence
  Synthetic
cttcccaagaacagacugagugt

SEQ ID NO: 87746 - DNA, 20 bp, Artificial Sequence
  Synthetic
cccaccauggagaactggua

SEQ ID NO: 87747 - DNA, 18 bp, Artificial Sequence
  Synthetic
catcggcaucggcatguc

SEQ ID NO: 87748 - DNA, 18 bp, Artificial Sequence
  Synthetic
cggcagguaggtgtggua

SEQ ID NO: 87749 - DNA, 17 bp, Artificial Sequence
  Synthetic
ctgcccuccatcuccga

SEQ ID NO: 87750 - DNA, 26 bp, Artificial Sequence
  Synthetic
caaactttcucaccatggtttcagut

SEQ ID NO: 87751 - DNA, 26 bp, Artificial Sequence
  Synthetic
tccttttctttcugccttcttaggug

SEQ ID NO: 87752 - DNA, 19 bp, Artificial Sequence
  Synthetic
gtgaaggcgccuggauagt

SEQ ID NO: 87753 - DNA, 21 bp, Artificial Sequence
  Synthetic
ccgcaaccucctactcactuc

SEQ ID NO: 87754 - DNA, 33 bp, Artificial Sequence; identical to SEQ ID NO: 63628
  Synthetic

SEQ ID NO: 87755 - DNA, 28 bp, Artificial Sequence
  Synthetic
ggtacaagtuaaggcacacagaagatua

SEQ ID NO: 87756 - DNA, 28 bp, Artificial Sequence
  Synthetic
aacttcatttgtgutttctcctagguca

SEQ ID NO: 87757 - DNA, 25 bp, Artificial Sequence
  Synthetic
gtgttgtuggcagggatacauaaac

SEQ ID NO: 87758 - DNA, 27 bp, Artificial Sequence
  Synthetic
caccctacagaaautcagaactcugat

SEQ ID NO: 87759 - DNA, 24 bp, Artificial Sequence
  Synthetic
acuggagcgatcugaaacagaaac

SEQ ID NO: 87760 - DNA, 21 bp, Artificial Sequence
  Synthetic
gcggctcutcaaccttcugaa

SEQ ID NO: 87761 - DNA, 22 bp, Artificial Sequence
  Synthetic
ggagggaaugcacacagatguc

SEQ ID NO: 87762 - DNA, 27 bp, Artificial Sequence
  Synthetic
tctatctggcuactaagcctttgttug

SEQ ID NO: 87763 - DNA, 27 bp, Artificial Sequence
  Synthetic
ctgcttcatguagaaatgggttguaat

SEQ ID NO: 87764 - DNA, 18 bp, Artificial Sequence
  Synthetic
aggcccuaagccctcugt

SEQ ID NO: 87765 - DNA, 17 bp, Artificial Sequence
  Synthetic
ccggcaggaucagcuca

SEQ ID NO: 87766 - DNA, 23 bp, Artificial Sequence
  Synthetic
agccacaccucacgttagaatut

SEQ ID NO: 87767 - DNA, 31 bp, Artificial Sequence; identical to SEQ ID NO: 65237
  Synthetic

SEQ ID NO: 87768 - DNA, 22 bp, Artificial Sequence
  Synthetic
gttctuggagagcacatccuca

SEQ ID NO: 87769 - DNA, 17 bp, Artificial Sequence
  Synthetic
gtcgcccugggcctuac

SEQ ID NO: 87770 - DNA, 26 bp, Artificial Sequence
  Synthetic
tgagaaagccaautgagcactatcut

SEQ ID NO: 87771 - DNA, 20 bp, Artificial Sequence
  Synthetic
gccgagugctacaaccucag

SEQ ID NO: 87772 - DNA, 20 bp, Artificial Sequence
  Synthetic
gatgccagcucaccagauga

SEQ ID NO: 87773 - DNA, 28 bp, Artificial Sequence
  Synthetic
ctttcagtcacuctagtcaagcactuat

SEQ ID NO: 87774 - DNA, 25 bp, Artificial Sequence
  Synthetic
caaggagggagaucacattaguaca

SEQ ID NO: 87775 - DNA, 24 bp, Artificial Sequence
  Synthetic
gcaatggugtgttttaacuggcat

SEQ ID NO: 87776 - DNA, 28 bp, Artificial Sequence
  Synthetic
ccacatgctttugaagatgttcattuga

SEQ ID NO: 87777 - DNA, 26 bp, Artificial Sequence
  Synthetic
gggagttacutagcttttcctuagca

SEQ ID NO: 87778 - DNA, 28 bp, Artificial Sequence
  Synthetic
gaagcctcautcaactcaaauacaaacc

SEQ ID NO: 87779 - DNA, 23 bp, Artificial Sequence
  Synthetic
acgagcccuactacagcaacuat

SEQ ID NO: 87780 - DNA, 20 bp, Artificial Sequence
  Synthetic
tgccctuccaatggauccac

SEQ ID NO: 87781 - DNA, 22 bp, Artificial Sequence
  Synthetic
tcatgctggauccccactttuc

SEQ ID NO: 87782 - DNA, 22 bp, Artificial Sequence
  Synthetic
tccttcugcaggcctuaaacag

SEQ ID NO: 87783 - DNA, 21 bp, Artificial Sequence
  Synthetic
aagcautaaagccugcaggga

SEQ ID NO: 87784 - DNA, 17 bp, Artificial Sequence
  Synthetic
ccucgccgccacactut

SEQ ID NO: 87785 - DNA, 18 bp, Artificial Sequence
  Synthetic
aggcacucaggugagcag

SEQ ID NO: 87786 - DNA, 26 bp, Artificial Sequence
  Synthetic
agcttctgattucatctccctttucc

SEQ ID NO: 87787 - DNA, 23 bp, Artificial Sequence
  Synthetic
tgacccctugggaacatcauact

SEQ ID NO: 87788 - DNA, 20 bp, Artificial Sequence
  Synthetic
tcacutcgtguggagcacat

SEQ ID NO: 87789 - DNA, 28 bp, Artificial Sequence
  Synthetic
caagtcagacaguacaggtacatuaact

SEQ ID NO: 87790 - DNA, 17 bp, Artificial Sequence
  Synthetic
gccaguggcccgtctuc

SEQ ID NO: 87791 - DNA, 19 bp, Artificial Sequence
  Synthetic
cccuggccagcatcttgua

SEQ ID NO: 87792 - DNA, 28 bp, Artificial Sequence
  Synthetic
atttgtctgttccutaccttgacaauat

SEQ ID NO: 87793 - DNA, 23 bp, Artificial Sequence
  Synthetic
aggaaatuagcagagcgatuggt

SEQ ID NO: 87794 - DNA, 20 bp, Artificial Sequence
  Synthetic
gacctcgguttgcattugcc

SEQ ID NO: 87795 - DNA, 28 bp, Artificial Sequence
  Synthetic
gcgattctggcagaucaagtaatgauaa

SEQ ID NO: 87796 - DNA, 26 bp, Artificial Sequence
  Synthetic
gctttgaccuaaatctgttgcttugt

SEQ ID NO: 87797 - DNA, 24 bp, Artificial Sequence
  Synthetic
ccctatcuggccaagcaatactua

SEQ ID NO: 87798 - DNA, 27 bp, Artificial Sequence
  Synthetic
tcaattcaaacuatggaggaucaagcc

SEQ ID NO: 87799 - DNA, 25 bp, Artificial Sequence
  Synthetic
tcagtcttugccttccttucagaaa

SEQ ID NO: 87800 - DNA, 23 bp, Artificial Sequence
  Synthetic
tccaagtgugactcttgatgcug

SEQ ID NO: 87801 - DNA, 25 bp, Artificial Sequence
  Synthetic
cttgctaucgaaatgcacaucagaa

SEQ ID NO: 87802 - DNA, 23 bp, Artificial Sequence
  Synthetic
tgatgactgcucaaaacctgguc

SEQ ID NO: 87803 - DNA, 23 bp, Artificial Sequence
  Synthetic
ttctgagtgccauctccctttut

SEQ ID NO: 87804 - DNA, 24 bp, Artificial Sequence
  Synthetic
ctggagaacauggcttctgtttut

SEQ ID NO: 87805 - DNA, 28 bp, Artificial Sequence
  Synthetic
ccttctcagtccutcttacattgtctut

SEQ ID NO: 87806 - DNA, 26 bp, Artificial Sequence
  Synthetic
tgatgctcuctctccaaaatucaacc

SEQ ID NO: 87807 - DNA, 27 bp, Artificial Sequence
  Synthetic
tctgccataacuggattttctttgugt

SEQ ID NO: 87808 - DNA, 27 bp, Artificial Sequence
  Synthetic
acutataatgcaagtuggacaagggat

SEQ ID NO: 87809 - DNA, 25 bp, Artificial Sequence
  Synthetic
gaaactcacugccacaacucaaaag

SEQ ID NO: 87810 - DNA, 21 bp, Artificial Sequence
  Synthetic
ctgggccacggutaaatgtut

SEQ ID NO: 87811 - DNA, 28 bp, Artificial Sequence
  Synthetic
gacaatgtttaucagcactttcuccaat

SEQ ID NO: 87812 - DNA, 26 bp, Artificial Sequence
  Synthetic
ctagcttctcauttgctcctcucaaa

SEQ ID NO: 87813 - DNA, 28 bp, Artificial Sequence
  Synthetic
ccagttatgaaaugctgcaagataaugt

SEQ ID NO: 87814 - DNA, 28 bp, Artificial Sequence
  Synthetic
tttgtccagagaccuttctaacgtatuc

SEQ ID NO: 87815 - DNA, 25 bp, Artificial Sequence
  Synthetic
gcctctttuccacagaaacaacauc

SEQ ID NO: 87816 - DNA, 19 bp, Artificial Sequence
  Synthetic
ctcaggtcacucgggctua

SEQ ID NO: 87817 - DNA, 24 bp, Artificial Sequence
  Synthetic
gctcttagugtgcactttcugcat

SEQ ID NO: 87818 - DNA, 28 bp, Artificial Sequence
  Synthetic
ggaggaacaagaagaugaggaagaaauc

SEQ ID NO: 87819 - DNA, 22 bp, Artificial Sequence
  Synthetic
agttgtgcugatgtguggagac

SEQ ID NO: 87820 - DNA, 28 bp, Artificial Sequence
  Synthetic
tgcgattttctcucatacaaagatcuga

SEQ ID NO: 87821 - DNA, 22 bp, Artificial Sequence
  Synthetic
tggttcttugagcaacauggga

SEQ ID NO: 87822 - DNA, 25 bp, Artificial Sequence
  Synthetic
aacuctctattucccaaacaacgct

SEQ ID NO: 87823 - DNA, 26 bp, Artificial Sequence
  Synthetic
gaaccacaugcagacaaagatttcug

SEQ ID NO: 87824 - DNA, 21 bp, Artificial Sequence
  Synthetic
ccccctgcuaatgactccugt

SEQ ID NO: 87825 - DNA, 23 bp, Artificial Sequence
  Synthetic
cgccttcacagauccaaaccuaa

SEQ ID NO: 87826 - DNA, 21 bp, Artificial Sequence
  Synthetic
ttucgggacctcugaaccaac

SEQ ID NO: 87827 - DNA, 19 bp, Artificial Sequence
  Synthetic
gcgggacgaucgaguacat

SEQ ID NO: 87828 - DNA, 21 bp, Artificial Sequence
  Synthetic
cttgtctgccucagggaucag

SEQ ID NO: 87829 - DNA, 20 bp, Artificial Sequence
  Synthetic
cgugtacctguaggagccat

SEQ ID NO: 87830 - DNA, 17 bp, Artificial Sequence
  Synthetic
gggccucaaggcacuca

SEQ ID NO: 87831 - DNA, 18 bp, Artificial Sequence
  Synthetic
gtcaacggcuggacuggt

SEQ ID NO: 87832 - DNA, 18 bp, Artificial Sequence
  Synthetic
cauttccuccccggccaa

SEQ ID NO: 87833 - DNA, 21 bp, Artificial Sequence
  Synthetic
cttcgaaaucgcctgcuacaa

SEQ ID NO: 87834 - DNA, 20 bp, Artificial Sequence
  Synthetic
tcgccaucctgtccaaugag

SEQ ID NO: 87835 - DNA, 19 bp, Artificial Sequence
  Synthetic
ccucaccacacacguccag

SEQ ID NO: 87836 - DNA, 21 bp, Artificial Sequence
  Synthetic
gtttaccuggaccgaaagcug

SEQ ID NO: 87837 - DNA, 25 bp, Artificial Sequence
  Synthetic
catgtctagaaccugagctcatgug

SEQ ID NO: 87838 - DNA, 21 bp, Artificial Sequence
  Synthetic
tcacagagagcuttgccctut

SEQ ID NO: 87839 - DNA, 24 bp, Artificial Sequence
  Synthetic
gcatgaccuggaatcagaugaact

SEQ ID NO: 87840 - DNA, 19 bp, Artificial Sequence
  Synthetic
tgttctcgcugcagtccuc

SEQ ID NO: 87841 - DNA, 18 bp, Artificial Sequence
  Synthetic
ggccgacagcucctgtuc

SEQ ID NO: 87842 - DNA, 31 bp, Artificial Sequence; identical to SEQ ID NO: 64188
  Synthetic

SEQ ID NO: 87843 - DNA, 30 bp, Artificial Sequence; identical to SEQ ID NO: 64189
  Synthetic

SEQ ID NO: 87844 - DNA, 22 bp, Artificial Sequence
  Synthetic
aacugtatctucgggcaccaaa

SEQ ID NO: 87845 - DNA, 27 bp, Artificial Sequence
  Synthetic
atgccattutctctttaatuggaaagg

SEQ ID NO: 87846 - DNA, 18 bp, Artificial Sequence
  Synthetic
ccagccggacaaggugua

SEQ ID NO: 87847 - DNA, 20 bp, Artificial Sequence
  Synthetic
ggtagcaggacuggauggga

SEQ ID NO: 87848 - DNA, 27 bp, Artificial Sequence
  Synthetic
ggtattgaugaaagaggagguacaaca

SEQ ID NO: 87849 - DNA, 28 bp, Artificial Sequence
  Synthetic
cgtagtctgccaaautacagctttaauc

SEQ ID NO: 87850 - DNA, 20 bp, Artificial Sequence
  Synthetic
cccacuggtccucaagaggt

SEQ ID NO: 87851 - DNA, 22 bp, Artificial Sequence
  Synthetic
gctggtgcautttcggttgtug

SEQ ID NO: 87852 - DNA, 21 bp, Artificial Sequence
  Synthetic
cgagttgtcugcttcccuacc

SEQ ID NO: 87853 - DNA, 26 bp, Artificial Sequence
  Synthetic
tttacggtucactgtgttcttuacca

SEQ ID NO: 87854 - DNA, 25 bp, Artificial Sequence
  Synthetic
gtggttctaggguagaggtaaccut

SEQ ID NO: 87855 - DNA, 27 bp, Artificial Sequence
  Synthetic
aagaaaatacucaccccgaatgatuca

SEQ ID NO: 87856 - DNA, 21 bp, Artificial Sequence
  Synthetic
accccttuaaggtggctccua

SEQ ID NO: 87857 - DNA, 27 bp, Artificial Sequence
  Synthetic
ccattgctttugaagaaacagttgugt

SEQ ID NO: 87858 - DNA, 25 bp, Artificial Sequence
  Synthetic
gcagtaagccacutgtttttctugg

SEQ ID NO: 87859 - DNA, 28 bp, Artificial Sequence
  Synthetic
accgagaagggutaaactatatgguact

SEQ ID NO: 87860 - DNA, 33 bp, Artificial Sequence; identical to SEQ ID NO: 66630
  Synthetic

SEQ ID NO: 87861 - DNA, 28 bp, Artificial Sequence
  Synthetic
caactgctgcaauaaagatacagatucc

SEQ ID NO: 87862 - DNA, 28 bp, Artificial Sequence
  Synthetic
gctctgataauccaaaaaggactagugt

SEQ ID NO: 87863 - DNA, 28 bp, Artificial Sequence
  Synthetic
ggctatttgctaucctggaaagttcaut

SEQ ID NO: 87864 - DNA, 28 bp, Artificial Sequence
  Synthetic
catgcatatcagcuatttcctcatcuct

SEQ ID NO: 87865 - DNA, 25 bp, Artificial Sequence
  Synthetic
agaaggacatugcatcttgcaaaug

SEQ ID NO: 87866 - DNA, 22 bp, Artificial Sequence
  Synthetic
cgttuaaaccaaaggcgcacua

SEQ ID NO: 87867 - DNA, 25 bp, Artificial Sequence
  Synthetic
tcaagtatgctugctgaaggagtuc

SEQ ID NO: 87868 - DNA, 23 bp, Artificial Sequence
  Synthetic
tgtcagagucctgagacagauca

SEQ ID NO: 87869 - DNA, 22 bp, Artificial Sequence
  Synthetic
cgttttagcucgttcctccuct

SEQ ID NO: 87870 - DNA, 28 bp, Artificial Sequence
  Synthetic
cagaacacaaagaucatccttucagaga

SEQ ID NO: 87871 - DNA, 26 bp, Artificial Sequence
  Synthetic
catacuggatacagcuggacaagaag

SEQ ID NO: 87872 - DNA, 26 bp, Artificial Sequence
  Synthetic
ggttttccaauagttcggattuccca

SEQ ID NO: 87873 - DNA, 21 bp, Artificial Sequence
  Synthetic
cgccgctutcagtttccuagt

SEQ ID NO: 87874 - DNA, 20 bp, Artificial Sequence
  Synthetic
cgaacacacaacguctugga

SEQ ID NO: 87875 - DNA, 21 bp, Artificial Sequence
  Synthetic
cttttgcucctctgctuggac

SEQ ID NO: 87876 - DNA, 21 bp, Artificial Sequence
  Synthetic
ccttggccacautctguagca

SEQ ID NO: 87877 - DNA, 22 bp, Artificial Sequence
  Synthetic
tttcacaggugaagauggcgat

SEQ ID NO: 87878 - DNA, 17 bp, Artificial Sequence
  Synthetic
ggccuggaaggcugaca

SEQ ID NO: 87879 - DNA, 19 bp, Artificial Sequence
  Synthetic
aaauggccacauccccaca

SEQ ID NO: 87880 - DNA, 28 bp, Artificial Sequence
  Synthetic
ggttaaccaaacugaattatttgugcca

SEQ ID NO: 87881 - DNA, 28 bp, Artificial Sequence
  Synthetic
cctgtactuaccacaacaaccttatcut

SEQ ID NO: 87882 - DNA, 23 bp, Artificial Sequence
  Synthetic
gtcacttugttctgttugcaggt

SEQ ID NO: 87883 - DNA, 22 bp, Artificial Sequence
  Synthetic
tccaaccuccaatgacccatuc

SEQ ID NO: 87884 - DNA, 33 bp, Artificial Sequence
  Synthetic
tcttctattatcucaacagagcaaattatugaa

SEQ ID NO: 87885 - DNA, 25 bp, Artificial Sequence
  Synthetic
gtgcctttgcgutaattaccttuct

SEQ ID NO: 87886 - DNA, 21 bp, Artificial Sequence
  Synthetic
ccaagguacaguggaccaaca

SEQ ID NO: 87887 - DNA, 28 bp, Artificial Sequence
  Synthetic
ggacataagtttutcagtttgggaauct

SEQ ID NO: 87888 - DNA, 21 bp, Artificial Sequence
  Synthetic
cggacacugtcctccuagcat

SEQ ID NO: 87889 - DNA, 21 bp, Artificial Sequence
  Synthetic
aggcctucccagaaactugag

SEQ ID NO: 87890 - DNA, 22 bp, Artificial Sequence
  Synthetic
tggtctctcauggcactguact

SEQ ID NO: 87891 - DNA, 22 bp, Artificial Sequence
  Synthetic
gcattgcatuccctgtggttut

SEQ ID NO: 87892 - DNA, 26 bp, Artificial Sequence
  Synthetic
gtggcagcuattagagaaatcaugga

SEQ ID NO: 87893 - DNA, 28 bp, Artificial Sequence
  Synthetic
gcaaccctagaauagctaagcctacuaa

SEQ ID NO: 87894 - DNA, 21 bp, Artificial Sequence
  Synthetic
gtatgttggaguagggcuggt

SEQ ID NO: 87895 - DNA, 27 bp, Artificial Sequence
  Synthetic
gataaagcgttuctgtctctagctuca

SEQ ID NO: 87896 - DNA, 23 bp, Artificial Sequence
  Synthetic
tccacagugtctgaagcuagaga

SEQ ID NO: 87897 - DNA, 33 bp, Artificial Sequence
  Synthetic
agctttgatattattcutgttaaaaatctgcut

SEQ ID NO: 87898 - DNA, 24 bp, Artificial Sequence
  Synthetic
tgcagaacttutccagaatccuga

SEQ ID NO: 87899 - DNA, 21 bp, Artificial Sequence
  Synthetic
cattcccagaguggagtugga

SEQ ID NO: 87900 - DNA, 25 bp, Artificial Sequence
  Synthetic
aacatgtttuatccgagtugaagga

SEQ ID NO: 87901 - DNA, 28 bp, Artificial Sequence
  Synthetic
agcaatgtactgaauttgtagtctggut

SEQ ID NO: 87902 - DNA, 27 bp, Artificial Sequence
  Synthetic
ttgtagcctttaugtttcccatcacut

SEQ ID NO: 87903 - DNA, 27 bp, Artificial Sequence
  Synthetic
cggattccatcutcaaaatctgtcuga

SEQ ID NO: 87904 - DNA, 28 bp, Artificial Sequence
  Synthetic
acgaatacagccaaaugtaaaatccuca

SEQ ID NO: 87905 - DNA, 25 bp, Artificial Sequence
  Synthetic
ctaggacttccuacgttttgggtut

SEQ ID NO: 87906 - DNA, 26 bp, Artificial Sequence
  Synthetic
gaaataatggugcaagtctucaagca

SEQ ID NO: 87907 - DNA, 20 bp, Artificial Sequence
  Synthetic
ctccaccucagcatuaccgt

SEQ ID NO: 87908 - DNA, 25 bp, Artificial Sequence
  Synthetic
gtgtccagtatuctctccacagaug

SEQ ID NO: 87909 - DNA, 23 bp, Artificial Sequence
  Synthetic
cctggaaucaagctaggctuact

SEQ ID NO: 87910 - DNA, 18 bp, Artificial Sequence
  Synthetic
gaccugaagugcccccat

SEQ ID NO: 87911 - DNA, 23 bp, Artificial Sequence
  Synthetic
cagtctcctuactttgcctcgua

SEQ ID NO: 87912 - DNA, 23 bp, Artificial Sequence
  Synthetic
ccaatgaaguctacacgtugcac

SEQ ID NO: 87913 - DNA, 20 bp, Artificial Sequence
  Synthetic
gaaggaggtuccgctggtut

SEQ ID NO: 87914 - DNA, 28 bp, Artificial Sequence
  Synthetic
ttttgtggaugaagaaaaacaacctgut

SEQ ID NO: 87915 - DNA, 25 bp, Artificial Sequence
  Synthetic
gtcccttgaaugaaaggaagtcuca

SEQ ID NO: 87916 - DNA, 17 bp, Artificial Sequence
  Synthetic
cgucaugccgcccaaaa

SEQ ID NO: 87917 - DNA, 17 bp, Artificial Sequence
  Synthetic
cggctcugctcgcucac

SEQ ID NO: 87918 - DNA, 23 bp, Artificial Sequence
  Synthetic
ggctgtagcugaaaagaguacct

SEQ ID NO: 87919 - DNA, 23 bp, Artificial Sequence
  Synthetic
agtggaaaugcctctuccaaaga

SEQ ID NO: 87920 - DNA, 25 bp, Artificial Sequence
  Synthetic
aggaagtcacauatctggtcctuct

SEQ ID NO: 87921 - DNA, 21 bp, Artificial Sequence
  Synthetic
cctgcatcugacatgcttucc

SEQ ID NO: 87922 - DNA, 25 bp, Artificial Sequence
  Synthetic
aagcttgctgugagtaagacauaca

SEQ ID NO: 87923 - DNA, 24 bp, Artificial Sequence
  Synthetic
gguagcctauacagccaggaaaag

SEQ ID NO: 87924 - DNA, 21 bp, Artificial Sequence
  Synthetic
accaucagagagcctugagga

SEQ ID NO: 87925 - DNA, 24 bp, Artificial Sequence
  Synthetic
tggtataaacaguggcacacacut

SEQ ID NO: 87926 - DNA, 25 bp, Artificial Sequence
  Synthetic
cctacaggugtgacactttucaact

SEQ ID NO: 87927 - DNA, 22 bp, Artificial Sequence
  Synthetic
cagutcttcttugccaaagcgt

SEQ ID NO: 87928 - DNA, 28 bp, Artificial Sequence
  Synthetic
ttagctgttguttttcactgttuccaaa

SEQ ID NO: 87929 - DNA, 24 bp, Artificial Sequence
  Synthetic
accttgtcuatggcacaucaaact

SEQ ID NO: 87930 - DNA, 24 bp, Artificial Sequence
  Synthetic
gctatcctctucctcttcacgugt

SEQ ID NO: 87931 - DNA, 28 bp, Artificial Sequence
  Synthetic
ctgtgttcucctttagttaagugaccat

SEQ ID NO: 87932 - DNA, 24 bp, Artificial Sequence
  Synthetic
catcagttccucctcagaatuccc

SEQ ID NO: 87933 - DNA, 22 bp, Artificial Sequence
  Synthetic
acaccaucagcagctagaucct

SEQ ID NO: 87934 - DNA, 24 bp, Artificial Sequence
  Synthetic
caagaacgagaaacugaagtgugt

SEQ ID NO: 87935 - DNA, 23 bp, Artificial Sequence
  Synthetic
cccacttcccugctgggattaua

SEQ ID NO: 87936 - DNA, 22 bp, Artificial Sequence
  Synthetic
ccatuggagaggaaggtguagt

SEQ ID NO: 87937 - DNA, 23 bp, Artificial Sequence
  Synthetic
ccttgaccagauctcggtcucat

SEQ ID NO: 87938 - DNA, 22 bp, Artificial Sequence
  Synthetic
caaagaguacagctggccugaa

SEQ ID NO: 87939 - DNA, 24 bp, Artificial Sequence
  Synthetic
aactgttacacuggaagtcacugg

SEQ ID NO: 87940 - DNA, 18 bp, Artificial Sequence
  Synthetic
ccgtcuccctcuccacca

SEQ ID NO: 87941 - DNA, 23 bp, Artificial Sequence
  Synthetic
ctuccagagcagttucagaaacc

SEQ ID NO: 87942 - DNA, 27 bp, Artificial Sequence
  Synthetic
gcttgagttucaatttctctuaaagca

SEQ ID NO: 87943 - DNA, 23 bp, Artificial Sequence
  Synthetic
gcctctctuttctccccauacag

SEQ ID NO: 87944 - DNA, 22 bp, Artificial Sequence
  Synthetic
gggcaauggccatatcauccaa

SEQ ID NO: 87945 - DNA, 22 bp, Artificial Sequence
  Synthetic
cagagagccuttgcacucagaa

SEQ ID NO: 87946 - DNA, 29 bp, Artificial Sequence
  Synthetic
tggcacuagatttcatttucaacaaagag

SEQ ID NO: 87947 - DNA, 23 bp, Artificial Sequence
  Synthetic
actctgggauggttgtgtttgug

SEQ ID NO: 87948 - DNA, 21 bp, Artificial Sequence
  Synthetic
gcctgtcugagcattgugcat

SEQ ID NO: 87949 - DNA, 28 bp, Artificial Sequence
  Synthetic
gatgagctccauttgtagttatagcugt

SEQ ID NO: 87950 - DNA, 28 bp, Artificial Sequence
  Synthetic
aaaataccaaaaagutcatgggatugct

SEQ ID NO: 87951 - DNA, 18 bp, Artificial Sequence
  Synthetic
gccccaccucaggagtug

SEQ ID NO: 87952 - DNA, 28 bp, Artificial Sequence
  Synthetic
agtacttttaataccugaactggtgguc

SEQ ID NO: 87953 - DNA, 23 bp, Artificial Sequence
  Synthetic
acagccaucatcagcatcugaaa

SEQ ID NO: 87954 - DNA, 24 bp, Artificial Sequence
  Synthetic
cctaatcccutcctagtgguggat

SEQ ID NO: 87955 - DNA, 22 bp, Artificial Sequence
  Synthetic
ccccuacaacagcagacugaga

SEQ ID NO: 87956 - DNA, 21 bp, Artificial Sequence
  Synthetic
gcatgaauggtcagtctuggg

SEQ ID NO: 87957 - DNA, 24 bp, Artificial Sequence
  Synthetic
caggtgcugcagaatcttctttut

SEQ ID NO: 87958 - DNA, 28 bp, Artificial Sequence
  Synthetic
ctcaaataacggaguagaaattgcagut

SEQ ID NO: 87959 - DNA, 26 bp, Artificial Sequence
  Synthetic
ctgatgttccgutttctcttgcuaag

SEQ ID NO: 87960 - DNA, 25 bp, Artificial Sequence
  Synthetic
ctgttgttctcuagaaacctccuga

SEQ ID NO: 87961 - DNA, 24 bp, Artificial Sequence
  Synthetic
attcgtacggugaacattcctgut

SEQ ID NO: 87962 - DNA, 21 bp, Artificial Sequence
  Synthetic
ctgccagacuccttccttcuc

SEQ ID NO: 87963 - DNA, 21 bp, Artificial Sequence
  Synthetic
gaacaaccuctggcugagaca

SEQ ID NO: 87964 - DNA, 28 bp, Artificial Sequence
  Synthetic
tgattactatuaacacctccagccucat

SEQ ID NO: 87965 - DNA, 29 bp, Artificial Sequence
  Synthetic
gaaagtaguggccaagatatgttuagaga

SEQ ID NO: 87966 - DNA, 28 bp, Artificial Sequence
  Synthetic
ctgacttagtgcauctatttcgatguct

SEQ ID NO: 87967 - DNA, 23 bp, Artificial Sequence
  Synthetic
gatggauattgttgcugccaagg

SEQ ID NO: 87968 - DNA, 25 bp, Artificial Sequence
  Synthetic
tcttgcagttugataagagctgcut

SEQ ID NO: 87969 - DNA, 28 bp, Artificial Sequence
  Synthetic
ggcttatgctauggaaagagaaaaggua

SEQ ID NO: 87970 - DNA, 29 bp, Artificial Sequence
  Synthetic
catttttcctgtaucttgcatgtttcuca

SEQ ID NO: 87971 - DNA, 28 bp, Artificial Sequence
  Synthetic
agcagggaacaaucactaatacaacaut

SEQ ID NO: 87972 - DNA, 22 bp, Artificial Sequence
  Synthetic
agctcaucacactggttgtuga

SEQ ID NO: 87973 - DNA, 21 bp, Artificial Sequence
  Synthetic
gccaguattgugccgacaaag

SEQ ID NO: 87974 - DNA, 28 bp, Artificial Sequence
  Synthetic
ccttttgcaacauaagcctcauaaacag

SEQ ID NO: 87975 - DNA, 27 bp, Artificial Sequence
  Synthetic
tgatccttctctutgctgatcattgut

SEQ ID NO: 87976 - DNA, 26 bp, Artificial Sequence
  Synthetic
ggactgttgccuaagggatttauagt

SEQ ID NO: 87977 - DNA, 22 bp, Artificial Sequence
  Synthetic
tgauccaucaggcaaaagccat

SEQ ID NO: 87978 - DNA, 20 bp, Artificial Sequence
  Synthetic
ccuaucccacagcacagcat

SEQ ID NO: 87979 - DNA, 21 bp, Artificial Sequence
  Synthetic
gtggugacaagggugagacag

SEQ ID NO: 87980 - DNA, 21 bp, Artificial Sequence
  Synthetic
gcatggcagutcaaaggtugg

SEQ ID NO: 87981 - DNA, 25 bp, Artificial Sequence
  Synthetic
tgacauacacatcataugcgcagaa

SEQ ID NO: 87982 - DNA, 22 bp, Artificial Sequence
  Synthetic
ggtgaccctutatgcctctguc

SEQ ID NO: 87983 - DNA, 21 bp, Artificial Sequence
  Synthetic
gtgtcccccaugccttuagaa

SEQ ID NO: 87984 - DNA, 17 bp, Artificial Sequence
  Synthetic
ggctgucggcgcaguag

SEQ ID NO: 87985 - DNA, 19 bp, Artificial Sequence
  Synthetic
cacaggagcuggtgtucca

SEQ ID NO: 87986 - DNA, 19 bp, Artificial Sequence
  Synthetic
agccauggaacaccagcuc

SEQ ID NO: 87987 - DNA, 19 bp, Artificial Sequence
  Synthetic
ggaccuccttcugcacaca

SEQ ID NO: 87988 - DNA, 27 bp, Artificial Sequence
  Synthetic
gctttaggagagutgaaagatgccaut

SEQ ID NO: 87989 - DNA, 22 bp, Artificial Sequence
  Synthetic
ctugagggaacacatacucgct

SEQ ID NO: 87990 - DNA, 21 bp, Artificial Sequence
  Synthetic
ccctcggugtcctactucaaa

SEQ ID NO: 87991 - DNA, 25 bp, Artificial Sequence
  Synthetic
caagtugcagggaagtctuaagaga

SEQ ID NO: 87992 - DNA, 21 bp, Artificial Sequence
  Synthetic
ccaccacgacutgaccttcug

SEQ ID NO: 87993 - DNA, 22 bp, Artificial Sequence
  Synthetic
agcagggugaaagcaaaucagt

SEQ ID NO: 87994 - DNA, 24 bp, Artificial Sequence
  Synthetic
cgattatgugagcagttugaacca

SEQ ID NO: 87995 - DNA, 26 bp, Artificial Sequence
  Synthetic
ctttacctgtutccatctcagugagg

SEQ ID NO: 87996 - DNA, 31 bp, Artificial Sequence
  Synthetic
aaatacttaagaagaucgataactgccucac

SEQ ID NO: 87997 - DNA, 26 bp, Artificial Sequence
  Synthetic
tcgtggtaccaacautctctactgua

SEQ ID NO: 87998 - DNA, 25 bp, Artificial Sequence
  Synthetic
agctctacutcctgattugggagaa

SEQ ID NO: 87999 - DNA, 23 bp, Artificial Sequence
  Synthetic
cattaaugacaacccuccggagt

SEQ ID NO: 88000 - DNA, 21 bp, Artificial Sequence
  Synthetic
catgauaggtctcgugcagga

SEQ ID NO: 88001 - DNA, 22 bp, Artificial Sequence
  Synthetic
acattcaugccaccaagacgut

SEQ ID NO: 88002 - DNA, 23 bp, Artificial Sequence
  Synthetic
actctaggaaugaaggtgugggt

SEQ ID NO: 88003 - DNA, 23 bp, Artificial Sequence
  Synthetic
cttgtccucagacatucggaaca

SEQ ID NO: 88004 - DNA, 22 bp, Artificial Sequence
  Synthetic
gcgtuagagccaaggtttgcua

SEQ ID NO: 88005 - DNA, 17 bp, Artificial Sequence
  Synthetic
cgagtgcugtcccguct

SEQ ID NO: 88006 - DNA, 19 bp, Artificial Sequence
  Synthetic
gggcagutcttggtcucgt

SEQ ID NO: 88007 - DNA, 21 bp, Artificial Sequence
  Synthetic
ctacugacaacgcccctctuc

SEQ ID NO: 88008 - DNA, 26 bp, Artificial Sequence
  Synthetic
gaaagaaagccautgctuaacagact

SEQ ID NO: 88009 - DNA, 26 bp, Artificial Sequence
  Synthetic
gatcaagactugaccacttactugga

SEQ ID NO: 88010 - DNA, 22 bp, Artificial Sequence
  Synthetic
cactccaggcuctggaacttua

SEQ ID NO: 88011 - DNA, 26 bp, Artificial Sequence
  Synthetic
tgccacctacutaacctctttgttut

SEQ ID NO: 88012 - DNA, 21 bp, Artificial Sequence
  Synthetic
tgggctcuctcttctcgaucc

SEQ ID NO: 88013 - DNA, 28 bp, Artificial Sequence
  Synthetic
tgactctggtgaugggaacattaaauac

SEQ ID NO: 88014 - DNA, 21 bp, Artificial Sequence
  Synthetic
agctccutccccugagagaat

SEQ ID NO: 88015 - DNA, 23 bp, Artificial Sequence
  Synthetic
gtaagtgagttuccccactgcut

SEQ ID NO: 88016 - DNA, 21 bp, Artificial Sequence
  Synthetic
cgacataugcagctgctgtut

SEQ ID NO: 88017 - DNA, 28 bp, Artificial Sequence
  Synthetic
accagataaauaactgctcacattuccc

SEQ ID NO: 88018 - DNA, 26 bp, Artificial Sequence
  Synthetic
tgattaaccuttgttcttuccagcca

SEQ ID NO: 88019 - DNA, 22 bp, Artificial Sequence
  Synthetic
ggttgtuccaatggtgguccaa

SEQ ID NO: 88020 - DNA, 21 bp, Artificial Sequence
  Synthetic
cgaagccgaautcctggtcug

SEQ ID NO: 88021 - DNA, 20 bp, Artificial Sequence
  Synthetic
tccatcacucccacgtggua

SEQ ID NO: 88022 - DNA, 26 bp, Artificial Sequence
  Synthetic
gatatgcatgucagaggaaagucact

SEQ ID NO: 88023 - DNA, 25 bp, Artificial Sequence
  Synthetic
ttcttttaggccuctttttcgugga

SEQ ID NO: 88024 - DNA, 25 bp, Artificial Sequence
  Synthetic
ttgatcaacauctgaactuccacga

SEQ ID NO: 88025 - DNA, 28 bp, Artificial Sequence
  Synthetic
tttgcttcctgugaaacaatgataaugg

SEQ ID NO: 88026 - DNA, 22 bp, Artificial Sequence
  Synthetic
gttcagttugggttgcttguct

SEQ ID NO: 88027 - DNA, 19 bp, Artificial Sequence
  Synthetic
cctgcccaucatcgatgug

SEQ ID NO: 88028 - DNA, 21 bp, Artificial Sequence
  Synthetic
ccacctcccaauctcccagua

SEQ ID NO: 88029 - DNA, 21 bp, Artificial Sequence
  Synthetic
ctggagagcuctgacgttuga

SEQ ID NO: 88030 - DNA, 20 bp, Artificial Sequence
  Synthetic
cagcacucacaucgaagggt

SEQ ID NO: 88031 - DNA, 22 bp, Artificial Sequence
  Synthetic
ctcaccaacaccaccugatuct

SEQ ID NO: 88032 - DNA, 23 bp, Artificial Sequence
  Synthetic
cctaacttgguctcctgcttcut

SEQ ID NO: 88033 - DNA, 22 bp, Artificial Sequence
  Synthetic
gctgccagaguaaaatgctgut

SEQ ID NO: 88034 - DNA, 18 bp, Artificial Sequence
  Synthetic
ccccggaggucctgucat

SEQ ID NO: 88035 - DNA, 19 bp, Artificial Sequence
  Synthetic
agaatgguggctgcaggug

SEQ ID NO: 88036 - DNA, 21 bp, Artificial Sequence
  Synthetic
caagcctgguctacactgugg

SEQ ID NO: 88037 - DNA, 21 bp, Artificial Sequence
  Synthetic
actcactcugctctgggtuga

SEQ ID NO: 88038 - DNA, 21 bp, Artificial Sequence
  Synthetic
gcatcatugggtcctcaguca

SEQ ID NO: 88039 - DNA, 25 bp, Artificial Sequence
  Synthetic
ctgttcctaugttctctcctuccag

SEQ ID NO: 88040 - DNA, 23 bp, Artificial Sequence
  Synthetic
gggtcagauggtatcttctugct

SEQ ID NO: 88041 - DNA, 21 bp, Artificial Sequence
  Synthetic
ttcccttcaaucccagcctuc

SEQ ID NO: 88042 - DNA, 20 bp, Artificial Sequence
  Synthetic
cctgcacuccatggctcaua

SEQ ID NO: 88043 - DNA, 23 bp, Artificial Sequence
  Synthetic
gaaaaaugccagugacaagcgaa

SEQ ID NO: 88044 - DNA, 22 bp, Artificial Sequence
  Synthetic
cagatgcacuggaaacuaggca

SEQ ID NO: 88045 - DNA, 23 bp, Artificial Sequence
  Synthetic
gagcatguagaccaggaccuaag

SEQ ID NO: 88046 - DNA, 23 bp, Artificial Sequence
  Synthetic
ccgtgcucacttactttgtuggt

SEQ ID NO: 88047 - DNA, 27 bp, Artificial Sequence
  Synthetic
acatctcgttguttttctggtcauagt

SEQ ID NO: 88048 - DNA, 22 bp, Artificial Sequence
  Synthetic
gggtgcctugtccagatatguc

SEQ ID NO: 88049 - DNA, 28 bp, Artificial Sequence
  Synthetic
ggattgaaaagugagcatttactcuggt

SEQ ID NO: 88050 - DNA, 27 bp, Artificial Sequence
  Synthetic
gtaaggacaggacaaautttcctccua

SEQ ID NO: 88051 - DNA, 26 bp, Artificial Sequence
  Synthetic
aaaacgccgucctttgaataacaaut

SEQ ID NO: 88052 - DNA, 25 bp, Artificial Sequence
  Synthetic
ctgcttagugacagtgcaattucag

SEQ ID NO: 88053 - DNA, 28 bp, Artificial Sequence
  Synthetic
tgggtcctaaaaacucttacattgcaua

SEQ ID NO: 88054 - DNA, 18 bp, Artificial Sequence
  Synthetic
ctgtgcuccccaccgtut

SEQ ID NO: 88055 - DNA, 17 bp, Artificial Sequence
  Synthetic
gctgcuccgtgggagug

SEQ ID NO: 88056 - DNA, 25 bp, Artificial Sequence
  Synthetic
tccattgccacugtgatcttctaug

SEQ ID NO: 88057 - DNA, 27 bp, Artificial Sequence
  Synthetic
gagagctggtaauttggtcattgttut

SEQ ID NO: 88058 - DNA, 17 bp, Artificial Sequence
  Synthetic
ccccaggucccuccaca

SEQ ID NO: 88059 - DNA, 22 bp, Artificial Sequence
  Synthetic
ttuacccgggaggagauaacct

SEQ ID NO: 88060 - DNA, 21 bp, Artificial Sequence
  Synthetic
agggaggccutcaugcaaaat

SEQ ID NO: 88061 - DNA, 27 bp, Artificial Sequence
  Synthetic
gcatccaatttgguaaagaatcgtguc

SEQ ID NO: 88062 - DNA, 21 bp, Artificial Sequence
  Synthetic
gcagcggutggucaaaagaat

SEQ ID NO: 88063 - DNA, 28 bp, Artificial Sequence
  Synthetic
cacacctgatucatacaacttttctucc

SEQ ID NO: 88064 - DNA, 21 bp, Artificial Sequence
  Synthetic
ctcagtggcutcactggugat

SEQ ID NO: 88065 - DNA, 25 bp, Artificial Sequence
  Synthetic
acgaaggcaagcutaaaagaacuca

SEQ ID NO: 88066 - DNA, 22 bp, Artificial Sequence
  Synthetic
ctgauggactgacugaggagga

SEQ ID NO: 88067 - DNA, 20 bp, Artificial Sequence
  Synthetic
atgtccaucatggcctugct

SEQ ID NO: 88068 - DNA, 28 bp, Artificial Sequence
  Synthetic
ctcacctgcutatacttgtacaauagca

SEQ ID NO: 88069 - DNA, 21 bp, Artificial Sequence
  Synthetic
ctgctcacugctttgctucat

SEQ ID NO: 88070 - DNA, 19 bp, Artificial Sequence
  Synthetic
ccttcacgcccugcttcuc

SEQ ID NO: 88071 - DNA, 21 bp, Artificial Sequence
  Synthetic
cgtccttcaugagcccaauca

SEQ ID NO: 88072 - DNA, 21 bp, Artificial Sequence
  Synthetic
caacgugaagaagagctcugg

SEQ ID NO: 88073 - DNA, 23 bp, Artificial Sequence
  Synthetic
agcacttcuccaccatcttctug

SEQ ID NO: 88074 - DNA, 20 bp, Artificial Sequence
  Synthetic
ctcaugaaggacgcctucca

SEQ ID NO: 88075 - DNA, 17 bp, Artificial Sequence
  Synthetic
gcucagccggccttuca

SEQ ID NO: 88076 - DNA, 20 bp, Artificial Sequence
  Synthetic
gcacugcccccttaacucac

SEQ ID NO: 88077 - DNA, 24 bp, Artificial Sequence
  Synthetic
tcctgcttutccacatguaaccat

SEQ ID NO: 88078 - DNA, 21 bp, Artificial Sequence
  Synthetic
gggacugctgcaacucaaact

SEQ ID NO: 88079 - DNA, 19 bp, Artificial Sequence
  Synthetic
ctgccctutggccacauac

SEQ ID NO: 88080 - DNA, 18 bp, Artificial Sequence
  Synthetic
ggccaugctgaggguact

SEQ ID NO: 88081 - DNA, 22 bp, Artificial Sequence
  Synthetic
gcctgactcuttcttctcccut

SEQ ID NO: 88082 - DNA, 28 bp, Artificial Sequence
  Synthetic
gctgaatttgaaagaacutaggtccaut

SEQ ID NO: 88083 - DNA, 25 bp, Artificial Sequence
  Synthetic
gtgcacaaacuctcctactaugagt

SEQ ID NO: 88084 - DNA, 24 bp, Artificial Sequence
  Synthetic
aacttaccccacgutcaaagucat

SEQ ID NO: 88085 - DNA, 25 bp, Artificial Sequence
  Synthetic
acaggugaacuccagaaagaagaag

SEQ ID NO: 88086 - DNA, 22 bp, Artificial Sequence
  Synthetic
tcagtcttuggtggctgaaugg

SEQ ID NO: 88087 - DNA, 21 bp, Artificial Sequence
  Synthetic
ctgcugaacacatugcccaag

SEQ ID NO: 88088 - DNA, 19 bp, Artificial Sequence
  Synthetic
gugaggugccagagagcag

SEQ ID NO: 88089 - DNA, 20 bp, Artificial Sequence
  Synthetic
tggacgtccuggtgaagtug

SEQ ID NO: 88090 - DNA, 21 bp, Artificial Sequence
  Synthetic
tgaggccugtagagacguagg

SEQ ID NO: 88091 - DNA, 22 bp, Artificial Sequence
  Synthetic
actaggaccccugctauccaaa

SEQ ID NO: 88092 - DNA, 19 bp, Artificial Sequence
  Synthetic
ggaucctttcucgccagca

SEQ ID NO: 88093 - DNA, 21 bp, Artificial Sequence
  Synthetic
gagtcugacagcccctccuat

SEQ ID NO: 88094 - DNA, 20 bp, Artificial Sequence
  Synthetic
agggcuaagcagtgccttut

SEQ ID NO: 88095 - DNA, 22 bp, Artificial Sequence
  Synthetic
ggtcgatcutgagttcguccag

SEQ ID NO: 88096 - DNA, 19 bp, Artificial Sequence
  Synthetic
cctcgtcgugggttctgua

SEQ ID NO: 88097 - DNA, 23 bp, Artificial Sequence
  Synthetic
gcagtuacacgttttccuccaag

SEQ ID NO: 88098 - DNA, 19 bp, Artificial Sequence
  Synthetic
cgacuccgacagccagtut

SEQ ID NO: 88099 - DNA, 19 bp, Artificial Sequence
  Synthetic
ccatccggaaggugtccuc

SEQ ID NO: 88100 - DNA, 19 bp, Artificial Sequence
  Synthetic
caacgaccccgacauggut

SEQ ID NO: 88101 - DNA, 17 bp, Artificial Sequence
  Synthetic
tcacaagcucggccgut

SEQ ID NO: 88102 - DNA, 24 bp, Artificial Sequence
  Synthetic
ctgaacauagccctgtgtgtauga

SEQ ID NO: 88103 - DNA, 21 bp, Artificial Sequence
  Synthetic
ggacactcaugagggttggug

SEQ ID NO: 88104 - DNA, 23 bp, Artificial Sequence
  Synthetic
tgaagtgacucgtaacgacgtug

SEQ ID NO: 88105 - DNA, 24 bp, Artificial Sequence
  Synthetic
agcttagagaugagccatgcttug

SEQ ID NO: 88106 - DNA, 28 bp, Artificial Sequence
  Synthetic
atgaaagcaagaacaauatctctgugga

SEQ ID NO: 88107 - DNA, 24 bp, Artificial Sequence
  Synthetic
caagtucagcagcaaatcugacat

SEQ ID NO: 88108 - DNA, 27 bp, Artificial Sequence
  Synthetic
aaucttatccactuaccaaaagcccaa

SEQ ID NO: 88109 - DNA, 25 bp, Artificial Sequence
  Synthetic
tcctaatgcaacaagucctgaaucc

SEQ ID NO: 88110 - DNA, 20 bp, Artificial Sequence
  Synthetic
tcaacccgucaguacccaga

SEQ ID NO: 88111 - DNA, 22 bp, Artificial Sequence
  Synthetic
cgaagtagagcaucctggagut

SEQ ID NO: 88112 - DNA, 21 bp, Artificial Sequence
  Synthetic
acagacccutgggagagugat

SEQ ID NO: 88113 - DNA, 23 bp, Artificial Sequence
  Synthetic
ctgctcucagacagccaaaaaug

SEQ ID NO: 88114 - DNA, 21 bp, Artificial Sequence
  Synthetic
tggcgatccutcaccaatguc

SEQ ID NO: 88115 - DNA, 21 bp, Artificial Sequence
  Synthetic
aagcttcacugtcaccccauc

SEQ ID NO: 88116 - DNA, 23 bp, Artificial Sequence
  Synthetic
ctccaaaattuggcagcccauag

SEQ ID NO: 88117 - DNA, 26 bp, Artificial Sequence
  Synthetic
tgatctctctcutctttcctgcuaca

SEQ ID NO: 88118 - DNA, 23 bp, Artificial Sequence
  Synthetic
gagagagagagutcctccuggaa

SEQ ID NO: 88119 - DNA, 23 bp, Artificial Sequence
  Synthetic
actgccacautgtttcctucaca

SEQ ID NO: 88120 - DNA, 22 bp, Artificial Sequence
  Synthetic
caccgtttutgagctggugaat

SEQ ID NO: 88121 - DNA, 25 bp, Artificial Sequence
  Synthetic
ctgaatcctaacugctgaagtcugt

SEQ ID NO: 88122 - DNA, 20 bp, Artificial Sequence
  Synthetic
ggaccaugctgtggtgucaa

SEQ ID NO: 88123 - DNA, 19 bp, Artificial Sequence
  Synthetic
ccccugagggtgagacuga

SEQ ID NO: 88124 - DNA, 21 bp, Artificial Sequence
  Synthetic
gctgcaaaucccaagcaugag

SEQ ID NO: 88125 - DNA, 24 bp, Artificial Sequence
  Synthetic
gtcttcattacucactgccugaca

SEQ ID NO: 88126 - DNA, 24 bp, Artificial Sequence
  Synthetic
agggccagutactagagacaucag

SEQ ID NO: 88127 - DNA, 29 bp, Artificial Sequence
  Synthetic
ttgctaaauccagaaatacactctuccaa

SEQ ID NO: 88128 - DNA, 17 bp, Artificial Sequence
  Synthetic
ggctuggacccuggcaa

SEQ ID NO: 88129 - DNA, 20 bp, Artificial Sequence
  Synthetic
cgactugcaaacctgtuggt

SEQ ID NO: 88130 - DNA, 22 bp, Artificial Sequence
  Synthetic
ccacaagcaucttgtcctuggt

SEQ ID NO: 88131 - DNA, 22 bp, Artificial Sequence
  Synthetic
cctcctcttugtccccatccua

SEQ ID NO: 88132 - DNA, 28 bp, Artificial Sequence
  Synthetic
gataaattcaaguctctcttcctuccca

SEQ ID NO: 88133 - DNA, 23 bp, Artificial Sequence
  Synthetic
gggctgacautcatagcctucaa

SEQ ID NO: 88134 - DNA, 22 bp, Artificial Sequence
  Synthetic
cagaagcugacagtgucacaca

SEQ ID NO: 88135 - DNA, 21 bp, Artificial Sequence
  Synthetic
gcuagagagcaaggcugcaaa

SEQ ID NO: 88136 - DNA, 27 bp, Artificial Sequence
  Synthetic
tctgcttctagucagaatcacauacct

SEQ ID NO: 88137 - DNA, 20 bp, Artificial Sequence
  Synthetic
cgaccaggacuccgguaaga

SEQ ID NO: 88138 - DNA, 21 bp, Artificial Sequence
  Synthetic
ccagtgutggactugcagaac

SEQ ID NO: 88139 - DNA, 22 bp, Artificial Sequence
  Synthetic
gccagugattucaaacagccat

SEQ ID NO: 88140 - DNA, 20 bp, Artificial Sequence
  Synthetic
gugcuggacacgacaacaac

SEQ ID NO: 88141 - DNA, 22 bp, Artificial Sequence
  Synthetic
cccttatctcaugctcccacut

SEQ ID NO: 88142 - DNA, 22 bp, Artificial Sequence
  Synthetic
gaggcuccacacacaatucaga

SEQ ID NO: 88143 - DNA, 21 bp, Artificial Sequence
  Synthetic
ctcttgucggacaguaagcca

SEQ ID NO: 88144 - DNA, 28 bp, Artificial Sequence
  Synthetic
acttaacaagtgaagauggtgaccatut

SEQ ID NO: 88145 - DNA, 27 bp, Artificial Sequence
  Synthetic
ccattgagttcaucattctcactgtuc

SEQ ID NO: 88146 - DNA, 25 bp, Artificial Sequence
  Synthetic
gagtcagaacaugacctgttgctua

SEQ ID NO: 88147 - DNA, 27 bp, Artificial Sequence
  Synthetic
gcttcaaattgtaugtggcccttttuc

SEQ ID NO: 88148 - DNA, 20 bp, Artificial Sequence
  Synthetic
tcacguggcggctgaattua

SEQ ID NO: 88149 - DNA, 20 bp, Artificial Sequence
  Synthetic
cagccacacuctctggaguc

SEQ ID NO: 88150 - DNA, 25 bp, Artificial Sequence
  Synthetic
ttcaacccttcuccagtttgtcaut

SEQ ID NO: 88151 - DNA, 22 bp, Artificial Sequence
  Synthetic
gtcttctccugcctggatgaug

SEQ ID NO: 88152 - DNA, 21 bp, Artificial Sequence
  Synthetic
cccagagcuggactctguaat

SEQ ID NO: 88153 - DNA, 21 bp, Artificial Sequence
  Synthetic
tgttcatgcgcutacgaggut

SEQ ID NO: 88154 - DNA, 26 bp, Artificial Sequence
  Synthetic
cccaagtuccgaagtataaagugcaa

SEQ ID NO: 88155 - DNA, 25 bp, Artificial Sequence
  Synthetic
gttttagaccauccacttucccact

SEQ ID NO: 88156 - DNA, 21 bp, Artificial Sequence
  Synthetic
gagtctcguacaagcagugga

SEQ ID NO: 88157 - DNA, 20 bp, Artificial Sequence
  Synthetic
gcaucaaccacacgttucct

SEQ ID NO: 88158 - DNA, 22 bp, Artificial Sequence
  Synthetic
caagctacccuccagacucaag

SEQ ID NO: 88159 - DNA, 21 bp, Artificial Sequence
  Synthetic
tgctttuggagggctucaaca

SEQ ID NO: 88160 - DNA, 23 bp, Artificial Sequence
  Synthetic
ccucatcactuaacaggcccaat

SEQ ID NO: 88161 - DNA, 25 bp, Artificial Sequence
  Synthetic
tttccaagagtuctttgcagcaaug

SEQ ID NO: 88162 - DNA, 24 bp, Artificial Sequence
  Synthetic
tctccttuggccagcatttcuaaa

SEQ ID NO: 88163 - DNA, 26 bp, Artificial Sequence
  Synthetic
cctcaccuaaggatctguaagagagt

SEQ ID NO: 88164 - DNA, 21 bp, Artificial Sequence
  Synthetic
ccaagcaccugccccattaut

SEQ ID NO: 88165 - DNA, 22 bp, Artificial Sequence
  Synthetic
gcttctgagcugcctctgatug

SEQ ID NO: 88166 - DNA, 25 bp, Artificial Sequence
  Synthetic
ggatatatctgauacgcaggccuct

SEQ ID NO: 88167 - DNA, 25 bp, Artificial Sequence
  Synthetic
gcaagcccaauaaagagtcaccaut

SEQ ID NO: 88168 - DNA, 22 bp, Artificial Sequence
  Synthetic
cgggatgaguttccagagcaua

SEQ ID NO: 88169 - DNA, 24 bp, Artificial Sequence
  Synthetic
caatgcuggcactggatttaucac

SEQ ID NO: 88170 - DNA, 22 bp, Artificial Sequence
  Synthetic
cgagaugcttttucagcccaaa

SEQ ID NO: 88171 - DNA, 20 bp, Artificial Sequence
  Synthetic
ttctcggtcuccctgcagua

SEQ ID NO: 88172 - DNA, 27 bp, Artificial Sequence
  Synthetic
cattcctgaattauactgcgaggctua

SEQ ID NO: 88173 - DNA, 28 bp, Artificial Sequence
  Synthetic
ggatagaagagaaacugcaagaagttug

SEQ ID NO: 88174 - DNA, 20 bp, Artificial Sequence
  Synthetic
gtugcaggcctcaucacaga

SEQ ID NO: 88175 - DNA, 24 bp, Artificial Sequence
  Synthetic
ctccttattacucctgccagtgug

SEQ ID NO: 88176 - DNA, 18 bp, Artificial Sequence
  Synthetic
cggcuacccgagaauggt

SEQ ID NO: 88177 - DNA, 17 bp, Artificial Sequence
  Synthetic
tgcttcugccccagucc

SEQ ID NO: 88178 - DNA, 17 bp, Artificial Sequence
  Synthetic
ctgcaccccugcaccua

SEQ ID NO: 88179 - DNA, 20 bp, Artificial Sequence
  Synthetic
ctcacugccctgctctuacc

SEQ ID NO: 88180 - DNA, 20 bp, Artificial Sequence
  Synthetic
ctacuggcacagcctgacuc

SEQ ID NO: 88181 - DNA, 28 bp, Artificial Sequence
  Synthetic
gccatttttattucctcactgattucca

SEQ ID NO: 88182 - DNA, 21 bp, Artificial Sequence
  Synthetic
cgggtgauccccaaatctuca

SEQ ID NO: 88183 - DNA, 24 bp, Artificial Sequence
  Synthetic
gtgcaacataugcttctctcucag

SEQ ID NO: 88184 - DNA, 24 bp, Artificial Sequence
  Synthetic
gacagtgcauctacttctgtguca

SEQ ID NO: 88185 - DNA, 28 bp, Artificial Sequence
  Synthetic
gctcaggttuggagttgatcttaaauct

SEQ ID NO: 88186 - DNA, 21 bp, Artificial Sequence
  Synthetic
tgttctguaggcaactugcca

SEQ ID NO: 88187 - DNA, 28 bp, Artificial Sequence
  Synthetic
gaaggtcaaauaggctgaagtgaagaua

SEQ ID NO: 88188 - DNA, 29 bp, Artificial Sequence
  Synthetic
ataaacacaagaauttgcagcagaauaat

SEQ ID NO: 88189 - DNA, 26 bp, Artificial Sequence
  Synthetic
ggcaacatgtutgtgatttactcugt

SEQ ID NO: 88190 - DNA, 27 bp, Artificial Sequence
  Synthetic
catcagctccuacgctatctttuagat

SEQ ID NO: 88191 - DNA, 23 bp, Artificial Sequence
  Synthetic
gggttggguttgtattacaugga

SEQ ID NO: 88192 - DNA, 20 bp, Artificial Sequence
  Synthetic
atcccaagcccacgutagug

SEQ ID NO: 88193 - DNA, 26 bp, Artificial Sequence
  Synthetic
aattgaggaaaucctcaggcacauag

SEQ ID NO: 88194 - DNA, 26 bp, Artificial Sequence
  Synthetic
agattttgaagugacttgtgctguct

SEQ ID NO: 88195 - DNA, 22 bp, Artificial Sequence
  Synthetic
ggtcccccaagautttctccuc

SEQ ID NO: 88196 - DNA, 28 bp, Artificial Sequence
  Synthetic
tgaaaguggaaaagaaagaacagaugga

SEQ ID NO: 88197 - DNA, 22 bp, Artificial Sequence
  Synthetic
tctgugaagcaagcagtuaccc

SEQ ID NO: 88198 - DNA, 18 bp, Artificial Sequence
  Synthetic
ttuccttgccuggcaggt

SEQ ID NO: 88199 - DNA, 27 bp, Artificial Sequence
  Synthetic
ctcagaatctgauatgacccttcgtut

SEQ ID NO: 88200 - DNA, 24 bp, Artificial Sequence
  Synthetic
acacagtcagcacuacaagatcug

SEQ ID NO: 88201 - DNA, 27 bp, Artificial Sequence
  Synthetic
ctctctaguagggttccttcaguagaa

SEQ ID NO: 88202 - DNA, 27 bp, Artificial Sequence
  Synthetic
gctaatcucataaatgcugaagaacgg

SEQ ID NO: 88203 - DNA, 26 bp, Artificial Sequence
  Synthetic
cagcactacutatcaaagccugagaa

SEQ ID NO: 88204 - DNA, 24 bp, Artificial Sequence
  Synthetic
ccccgattutgatgcatcuacact

SEQ ID NO: 88205 - DNA, 24 bp, Artificial Sequence
  Synthetic
cactgacuccaataagagcaucca

SEQ ID NO: 88206 - DNA, 29 bp, Artificial Sequence
  Synthetic
gctctggaaggautcaaagtaatgtguaa

SEQ ID NO: 88207 - DNA, 20 bp, Artificial Sequence
  Synthetic
ggctgtaucccatcggtuca

SEQ ID NO: 88208 - DNA, 28 bp, Artificial Sequence
  Synthetic
caacttggagauttttctgaauggaaca

SEQ ID NO: 88209 - DNA, 27 bp, Artificial Sequence
  Synthetic
gtcttctatggcauctagacgatcaut

SEQ ID NO: 88210 - DNA, 22 bp, Artificial Sequence
  Synthetic
gcgaaguagccgccaaauaaaa

SEQ ID NO: 88211 - DNA, 21 bp, Artificial Sequence
  Synthetic
actctcactaucccccacucc

SEQ ID NO: 88212 - DNA, 26 bp, Artificial Sequence
  Synthetic
ccccactctguaaccattatgctaut

SEQ ID NO: 88213 - DNA, 25 bp, Artificial Sequence
  Synthetic
tgagtagccuctcaagatcuggaag

SEQ ID NO: 88214 - DNA, 27 bp, Artificial Sequence
  Synthetic
ctccgaagtugtagagcttcuaaagaa

SEQ ID NO: 88215 - DNA, 27 bp, Artificial Sequence
  Synthetic
tcttcatacattauagccctgctguct

SEQ ID NO: 88216 - DNA, 28 bp, Artificial Sequence
  Synthetic
ggtcgttttccugatttgactguagaat

SEQ ID NO: 88217 - DNA, 28 bp, Artificial Sequence
  Synthetic
ggaggctctgtucattttctcttatguc

SEQ ID NO: 88218 - DNA, 25 bp, Artificial Sequence
  Synthetic
gggaaatttuatgagctguaccaca

SEQ ID NO: 88219 - DNA, 21 bp, Artificial Sequence
  Synthetic
gtctgtuccactcgtgcuact

SEQ ID NO: 88220 - DNA, 21 bp, Artificial Sequence
  Synthetic
tccccugaagagucagaacca

SEQ ID NO: 88221 - DNA, 27 bp, Artificial Sequence
  Synthetic
tcagcaacttctuccatgatccctaua

SEQ ID NO: 88222 - DNA, 25 bp, Artificial Sequence
  Synthetic
aggaagcagugatgaaauaagcagt

SEQ ID NO: 88223 - DNA, 27 bp, Artificial Sequence
  Synthetic
cgtttccttccuagagcttttccttut

SEQ ID NO: 88224 - DNA, 22 bp, Artificial Sequence
  Synthetic
ggtgactggaaauggctctcut

SEQ ID NO: 88225 - DNA, 22 bp, Artificial Sequence
  Synthetic
cgactactgucatcaccaccuc

SEQ ID NO: 88226 - DNA, 28 bp, Artificial Sequence
  Synthetic
gggtgtaaaauaggtggaacucaaaagt

SEQ ID NO: 88227 - DNA, 23 bp, Artificial Sequence
  Synthetic
gccttcgtaautcattgcctcug

SEQ ID NO: 88228 - DNA, 25 bp, Artificial Sequence
  Synthetic
ctctgattaugaccaagctctugct

SEQ ID NO: 88229 - DNA, 22 bp, Artificial Sequence
  Synthetic
ggcaaatugcgagtggugaaat

SEQ ID NO: 88230 - DNA, 26 bp, Artificial Sequence
  Synthetic
aaaggatgagutgcacattgtugaag

SEQ ID NO: 88231 - DNA, 28 bp, Artificial Sequence
  Synthetic
ccttgacacaacauccaaagtatguaag

SEQ ID NO: 88232 - DNA, 20 bp, Artificial Sequence
  Synthetic
ggagaucgtggcucagcaag

SEQ ID NO: 88233 - DNA, 22 bp, Artificial Sequence
  Synthetic
cagctaccacuaccccattugt

SEQ ID NO: 88234 - DNA, 21 bp, Artificial Sequence
  Synthetic
cctggugcagaagggctauaa

SEQ ID NO: 88235 - DNA, 26 bp, Artificial Sequence
  Synthetic
gtgtaccctuggtaatgatccuacag

SEQ ID NO: 88236 - DNA, 22 bp, Artificial Sequence
  Synthetic
actgaaggcagcuctgaacauc

SEQ ID NO: 88237 - DNA, 22 bp, Artificial Sequence
  Synthetic
tgtgcaguaaagaauggccagt

SEQ ID NO: 88238 - DNA, 28 bp, Artificial Sequence
  Synthetic
tctattttguagcaaattccugagcact

SEQ ID NO: 88239 - DNA, 28 bp, Artificial Sequence
  Synthetic
cccaaaggaaguataagccaagtaauga

SEQ ID NO: 88240 - DNA, 24 bp, Artificial Sequence
  Synthetic
gttaccagcuggaaattccugaga

SEQ ID NO: 88241 - DNA, 24 bp, Artificial Sequence
  Synthetic
gcagtcctucaatgatacauccct

SEQ ID NO: 88242 - DNA, 24 bp, Artificial Sequence
  Synthetic
gaaaaaccuacagaccuggagaca

SEQ ID NO: 88243 - DNA, 22 bp, Artificial Sequence
  Synthetic
ggcgtttcagcuaaacccaaut

SEQ ID NO: 88244 - DNA, 23 bp, Artificial Sequence
  Synthetic
gauagagtggugaggagggagat

SEQ ID NO: 88245 - DNA, 20 bp, Artificial Sequence
  Synthetic
gcacacaccauaugcacgag

SEQ ID NO: 88246 - DNA, 23 bp, Artificial Sequence
  Synthetic
tgtctgtatgugtgtcccccuaa

SEQ ID NO: 88247 - DNA, 21 bp, Artificial Sequence
  Synthetic
cactgggugaggttgtctguc

SEQ ID NO: 88248 - DNA, 22 bp, Artificial Sequence
  Synthetic
tggttgcgcauttgtggaatut

SEQ ID NO: 88249 - DNA, 29 bp, Artificial Sequence
  Synthetic
aggatctcaacutaccagcttatuaacac

SEQ ID NO: 88250 - DNA, 19 bp, Artificial Sequence
  Synthetic
gcagccuggtagacacgua

SEQ ID NO: 88251 - DNA, 22 bp, Artificial Sequence
  Synthetic
gtctgagucatggtuagggcat

SEQ ID NO: 88252 - DNA, 28 bp, Artificial Sequence
  Synthetic
gtcttcaagttuaactcctcaaagctuc

SEQ ID NO: 88253 - DNA, 28 bp, Artificial Sequence
  Synthetic
gccaagtgagauaccattctatactuca

SEQ ID NO: 88254 - DNA, 19 bp, Artificial Sequence
  Synthetic
tcagagugaggtcggguca

SEQ ID NO: 88255 - DNA, 21 bp, Artificial Sequence
  Synthetic
acacacacacutggtgctcut

SEQ ID NO: 88256 - DNA, 25 bp, Artificial Sequence
  Synthetic
cagttucaaagcaacagguaaagca

SEQ ID NO: 88257 - DNA, 24 bp, Artificial Sequence
  Synthetic
aggaccaaguagtgtgtctgtuct

SEQ ID NO: 88258 - DNA, 24 bp, Artificial Sequence
  Synthetic
gcaucaaggagctatuaggagggt

SEQ ID NO: 88259 - DNA, 26 bp, Artificial Sequence
  Synthetic
agacagcttcuttttcgttgttucag

SEQ ID NO: 88260 - DNA, 26 bp, Artificial Sequence
  Synthetic
agtaactggcugttctctttttcucc

SEQ ID NO: 88261 - DNA, 25 bp, Artificial Sequence
  Synthetic
agcttcacacgaucttcttaaugct

SEQ ID NO: 88262 - DNA, 22 bp, Artificial Sequence
  Synthetic
cgctggcaguttcaaacguaat

SEQ ID NO: 88263 - DNA, 27 bp, Artificial Sequence
  Synthetic
gggttcattauaaaacaggaagugcag

SEQ ID NO: 88264 - DNA, 18 bp, Artificial Sequence
  Synthetic
gagccugcacuccacaga

SEQ ID NO: 88265 - DNA, 17 bp, Artificial Sequence
  Synthetic
cugaccacggccuggac

SEQ ID NO: 88266 - DNA, 17 bp, Artificial Sequence
  Synthetic
cacaggccgguggaaug

SEQ ID NO: 88267 - DNA, 20 bp, Artificial Sequence
  Synthetic
ctcctaccucccctcaccua

SEQ ID NO: 88268 - DNA, 22 bp, Artificial Sequence
  Synthetic
cactcatctucagccttgcugt

SEQ ID NO: 88269 - DNA, 21 bp, Artificial Sequence
  Synthetic
ggacagtgcuctggagacuct

SEQ ID NO: 88270 - DNA, 21 bp, Artificial Sequence
  Synthetic
ctggacacagaggaucgaugt

SEQ ID NO: 88271 - DNA, 20 bp, Artificial Sequence
  Synthetic
ctggaggugatgacugccaa

SEQ ID NO: 88272 - DNA, 21 bp, Artificial Sequence
  Synthetic
cctgggccutctcctcuaact

SEQ ID NO: 88273 - DNA, 18 bp, Artificial Sequence
  Synthetic
gcagaggugagcaagcug

SEQ ID NO: 88274 - DNA, 20 bp, Artificial Sequence
  Synthetic
ctgcttcuggcattgctgut

SEQ ID NO: 88275 - DNA, 22 bp, Artificial Sequence
  Synthetic
caaaccgugaagcaacugaagg

SEQ ID NO: 88276 - DNA, 21 bp, Artificial Sequence
  Synthetic
ttgacctuggcaccctcauac

SEQ ID NO: 88277 - DNA, 23 bp, Artificial Sequence
  Synthetic
agtttcuggaagtggagtuggac

SEQ ID NO: 88278 - DNA, 20 bp, Artificial Sequence
  Synthetic
cgctuctcctctucaaggct

SEQ ID NO: 88279 - DNA, 18 bp, Artificial Sequence
  Synthetic
gcccaggutgcagagcua

SEQ ID NO: 88280 - DNA, 21 bp, Artificial Sequence
  Synthetic
ggagctcagcuagttcgtuct

SEQ ID NO: 88281 - DNA, 22 bp, Artificial Sequence
  Synthetic
gtuccaggaacagctgaugact

SEQ ID NO: 88282 - DNA, 25 bp, Artificial Sequence
  Synthetic
tccttttctttcutagccagctgut

SEQ ID NO: 88283 - DNA, 20 bp, Artificial Sequence
  Synthetic
ggagtucgctacccugcaag

SEQ ID NO: 88284 - DNA, 23 bp, Artificial Sequence
  Synthetic
gctgccaacucttggacatacut

SEQ ID NO: 88285 - DNA, 20 bp, Artificial Sequence
  Synthetic
agagaaggccagcuaugcag

SEQ ID NO: 88286 - DNA, 20 bp, Artificial Sequence
  Synthetic
ctctgcauagctggcctuct

SEQ ID NO: 88287 - DNA, 17 bp, Artificial Sequence
  Synthetic
caccgugaggagcugga

SEQ ID NO: 88288 - DNA, 19 bp, Artificial Sequence
  Synthetic
ccutcugccgcagaggaat

SEQ ID NO: 88289 - DNA, 19 bp, Artificial Sequence
  Synthetic
cagcuaagcacctcugcca

SEQ ID NO: 88290 - DNA, 27 bp, Artificial Sequence
  Synthetic
gtaccttttggaucaaatgatgctugt

SEQ ID NO: 88291 - DNA, 25 bp, Artificial Sequence
  Synthetic
tggagaagucagaacgaagaucagt

SEQ ID NO: 88292 - DNA, 27 bp, Artificial Sequence
  Synthetic
tgtaacaaggguatacctgtatuggga

SEQ ID NO: 88293 - DNA, 22 bp, Artificial Sequence
  Synthetic
ggctgctcaacucttgtccaut

SEQ ID NO: 88294 - DNA, 17 bp, Artificial Sequence
  Synthetic
gaccgcagcugcaacuc

SEQ ID NO: 88295 - DNA, 19 bp, Artificial Sequence
  Synthetic
gcuaaugaagcccgggaca

SEQ ID NO: 88296 - DNA, 26 bp, Artificial Sequence
  Synthetic
tcttcgttctgacutctccaagttuc

SEQ ID NO: 88297 - DNA, 26 bp, Artificial Sequence
  Synthetic
tgtccacaaaggugctacaatuagat

SEQ ID NO: 88298 - DNA, 23 bp, Artificial Sequence
  Synthetic
gccttctcacautcctcctucaa

SEQ ID NO: 88299 - DNA, 23 bp, Artificial Sequence
  Synthetic
tgagcagcucgtcaaagaaguag

SEQ ID NO: 88300 - DNA, 18 bp, Artificial Sequence
  Synthetic
ctgggccugtgtcacuga

SEQ ID NO: 88301 - DNA, 20 bp, Artificial Sequence
  Synthetic
ggagcgagaggccucctuaa

SEQ ID NO: 88302 - DNA, 21 bp, Artificial Sequence
  Synthetic
ggctatccucataccgcucac

SEQ ID NO: 88303 - DNA, 21 bp, Artificial Sequence
  Synthetic
gaggctcgautacagcagcut

SEQ ID NO: 88304 - DNA, 18 bp, Artificial Sequence
  Synthetic
gcugctugagagccgcat

SEQ ID NO: 88305 - DNA, 19 bp, Artificial Sequence
  Synthetic
caccagguggagcagcuaa

SEQ ID NO: 88306 - DNA, 22 bp, Artificial Sequence
  Synthetic
aggacttcaguctcagccugat

SEQ ID NO: 88307 - DNA, 23 bp, Artificial Sequence
  Synthetic
gttgtatcuctgagcugaaggca

SEQ ID NO: 88308 - DNA, 21 bp, Artificial Sequence
  Synthetic
ctttcgtucccgcttatgcug

SEQ ID NO: 88309 - DNA, 24 bp, Artificial Sequence
  Synthetic
caaagaguccttgaaggucaccaa

SEQ ID NO: 88310 - DNA, 21 bp, Artificial Sequence
  Synthetic
gctaaagggcucagagugcag

SEQ ID NO: 88311 - DNA, 20 bp, Artificial Sequence
  Synthetic
tcctcacggugaacgtctug

SEQ ID NO: 88312 - DNA, 28 bp, Artificial Sequence
  Synthetic
ttcattgaccaucacatgctaatagugt

SEQ ID NO: 88313 - DNA, 27 bp, Artificial Sequence
  Synthetic
gcatcaucattatgctugcaaaaacga

SEQ ID NO: 88314 - DNA, 24 bp, Artificial Sequence
  Synthetic
gactccauggctgtcaaatcuagt

SEQ ID NO: 88315 - DNA, 22 bp, Artificial Sequence
  Synthetic
agcaaacucaataccugcccaa

SEQ ID NO: 88316 - DNA, 22 bp, Artificial Sequence
  Synthetic
gcagctggautttactgccaut

SEQ ID NO: 88317 - DNA, 19 bp, Artificial Sequence
  Synthetic
caggctgacugcctctuga

SEQ ID NO: 88318 - DNA, 27 bp, Artificial Sequence
  Synthetic
cctgctttttaauccaagtaagccaut

SEQ ID NO: 88319 - DNA, 25 bp, Artificial Sequence
  Synthetic
aaccaatgctcucaccttaaagugt

SEQ ID NO: 88320 - DNA, 24 bp, Artificial Sequence
  Synthetic
cguataagcccucacaacaaccaa

SEQ ID NO: 88321 - DNA, 31 bp, Artificial Sequence; identical to SEQ ID NO: 62433
  Synthetic

SEQ ID NO: 88322 - DNA, 25 bp, Artificial Sequence
  Synthetic
aagaaaaacaagucaggtgagguga

SEQ ID NO: 88323 - DNA, 21 bp, Artificial Sequence
  Synthetic
ctgcctccugtttggcttcua

SEQ ID NO: 88324 - DNA, 22 bp, Artificial Sequence
  Synthetic
aggcctguggatatagccucaa

SEQ ID NO: 88325 - DNA, 18 bp, Artificial Sequence
  Synthetic
gagtucccgtccgugacc

SEQ ID NO: 88326 - DNA, 21 bp, Artificial Sequence
  Synthetic
ccccgutttcctaauccacaa

SEQ ID NO: 88327 - DNA, 25 bp, Artificial Sequence
  Synthetic
cgcttcctuggcttgtcaaatauct

SEQ ID NO: 88328 - DNA, 20 bp, Artificial Sequence
  Synthetic
gcccaacgcugtagttccug

SEQ ID NO: 88329 - DNA, 26 bp, Artificial Sequence
  Synthetic
agtggcatgaguaacaagagagaaug

SEQ ID NO: 88330 - DNA, 26 bp, Artificial Sequence
  Synthetic
ctattttcctgucataggcacuacca

SEQ ID NO: 88331 - DNA, 28 bp, Artificial Sequence
  Synthetic
gaaggtgaaaagaucaggaactgaguaa

SEQ ID NO: 88332 - DNA, 17 bp, Artificial Sequence
  Synthetic
cgcugcccacggagaug

SEQ ID NO: 88333 - DNA, 18 bp, Artificial Sequence
  Synthetic
gccggucctggugaaaga

SEQ ID NO: 88334 - DNA, 17 bp, Artificial Sequence
  Synthetic
tggccuggcgcttcaut

SEQ ID NO: 88335 - DNA, 17 bp, Artificial Sequence
  Synthetic
cgggugctcttcucgca

SEQ ID NO: 88336 - DNA, 18 bp, Artificial Sequence
  Synthetic
gtcgcuccagctcguaca

SEQ ID NO: 88337 - DNA, 22 bp, Artificial Sequence
  Synthetic
cttacagtcucccgcttcaugg

SEQ ID NO: 88338 - DNA, 20 bp, Artificial Sequence
  Synthetic
cccaugccgctcatgtucat

SEQ ID NO: 88339 - DNA, 17 bp, Artificial Sequence
  Synthetic
ctaggcugcctggguca

SEQ ID NO: 88340 - DNA, 19 bp, Artificial Sequence
  Synthetic
ccuagcaaggcgaggctut

SEQ ID NO: 88341 - DNA, 21 bp, Artificial Sequence
  Synthetic
cctcccugttgactcaugcag

SEQ ID NO: 88342 - DNA, 29 bp, Artificial Sequence
  Synthetic
gatgctcatacugtcaatacaaaaucgaa

SEQ ID NO: 88343 - DNA, 28 bp, Artificial Sequence
  Synthetic
gccaaggauggatatagaaacaaaugac

SEQ ID NO: 88344 - DNA, 26 bp, Artificial Sequence
  Synthetic
ctactttctgguactgcttcaucact

SEQ ID NO: 88345 - DNA, 29 bp, Artificial Sequence
  Synthetic
gacacaaaaccagagutagaaattgaugt

SEQ ID NO: 88346 - DNA, 24 bp, Artificial Sequence
  Synthetic
ctagatgacaguacagggctagug

SEQ ID NO: 88347 - DNA, 21 bp, Artificial Sequence
  Synthetic
ttgactcugaggcctggagua

SEQ ID NO: 88348 - DNA, 28 bp, Artificial Sequence
  Synthetic
tgacatcttccucctgtttttgaactut

SEQ ID NO: 88349 - DNA, 28 bp, Artificial Sequence
  Synthetic
catgctgcagaaaagcuaagatcaaaua

SEQ ID NO: 88350 - DNA, 24 bp, Artificial Sequence
  Synthetic
tgggaauggcaagcagtaattuca

SEQ ID NO: 88351 - DNA, 23 bp, Artificial Sequence
  Synthetic
ccaatcatucgcattcaguccat

SEQ ID NO: 88352 - DNA, 23 bp, Artificial Sequence
  Synthetic
ggccacatcauccatttccctut

SEQ ID NO: 88353 - DNA, 28 bp, Artificial Sequence
  Synthetic
gtggaaaaauaaggagcagcatctauct

SEQ ID NO: 88354 - DNA, 23 bp, Artificial Sequence
  Synthetic
gtatgttgccutacctgtgtugg

SEQ ID NO: 88355 - DNA, 23 bp, Artificial Sequence
  Synthetic
agggcagtuacttgggaaactug

SEQ ID NO: 88356 - DNA, 24 bp, Artificial Sequence
  Synthetic
tgttctctugggagttggtaucct

SEQ ID NO: 88357 - DNA, 28 bp, Artificial Sequence
  Synthetic
caagacattcuaggttgtagtugaaggt

SEQ ID NO: 88358 - DNA, 22 bp, Artificial Sequence
  Synthetic
ttgtguccacaggctcattcuc

SEQ ID NO: 88359 - DNA, 28 bp, Artificial Sequence
  Synthetic
gtcttcatgcaaaucagcaagaauagaa

SEQ ID NO: 88360 - DNA, 24 bp, Artificial Sequence
  Synthetic
gtctcttaugcaggcactgaacut

SEQ ID NO: 88361 - DNA, 24 bp, Artificial Sequence
  Synthetic
aagcagaagtcuagaagggtggua

SEQ ID NO: 88362 - DNA, 27 bp, Artificial Sequence
  Synthetic
agcaggtugtgtttgttcuaaaagaga

SEQ ID NO: 88363 - DNA, 28 bp, Artificial Sequence
  Synthetic
gccaaactaaauggttacttagctgugt

SEQ ID NO: 88364 - DNA, 20 bp, Artificial Sequence
  Synthetic
tgactugcaaagacggugct

SEQ ID NO: 88365 - DNA, 28 bp, Artificial Sequence
  Synthetic
aggcagaacacuaaatcctttggtaaut

SEQ ID NO: 88366 - DNA, 21 bp, Artificial Sequence
  Synthetic
cccacacaucccacaaugact

SEQ ID NO: 88367 - DNA, 21 bp, Artificial Sequence
  Synthetic
tctagcaatgugagcgtccug

SEQ ID NO: 88368 - DNA, 23 bp, Artificial Sequence
  Synthetic
tttcctcatuccggctcttuagg

SEQ ID NO: 88369 - DNA, 24 bp, Artificial Sequence
  Synthetic
tctctcuaaagaaccucagggcaa

SEQ ID NO: 88370 - DNA, 23 bp, Artificial Sequence
  Synthetic
gtcatcttuaagcctcagugggt

SEQ ID NO: 88371 - DNA, 22 bp, Artificial Sequence
  Synthetic
acgtggccaucaagatgaucaa

SEQ ID NO: 88372 - DNA, 23 bp, Artificial Sequence
  Synthetic
catcttcagacauggagcctuct

SEQ ID NO: 88373 - DNA, 28 bp, Artificial Sequence
  Synthetic
ccaaagaaucacaccaagactttatugt

SEQ ID NO: 88374 - DNA, 20 bp, Artificial Sequence
  Synthetic
gctggcttugtaccggacut

SEQ ID NO: 88375 - DNA, 26 bp, Artificial Sequence
  Synthetic
acaacactcacuaccctagaaacuga

SEQ ID NO: 88376 - DNA, 19 bp, Artificial Sequence
  Synthetic
tcccuccagagccccttut

SEQ ID NO: 88377 - DNA, 20 bp, Artificial Sequence
  Synthetic
gcacacugggaaacgctuct

SEQ ID NO: 88378 - DNA, 19 bp, Artificial Sequence
  Synthetic
aggaaaugcuggacagcgt

SEQ ID NO: 88379 - DNA, 25 bp, Artificial Sequence
  Synthetic
aaaaacttgggccutcatgtcaaug

SEQ ID NO: 88380 - DNA, 24 bp, Artificial Sequence
  Synthetic
ggatgagccaaagaugaccaagut

SEQ ID NO: 88381 - DNA, 24 bp, Artificial Sequence
  Synthetic
tcccctttgcugatgtgaaaagut

SEQ ID NO: 88382 - DNA, 20 bp, Artificial Sequence
  Synthetic
caccttcugggcccaatcuc

SEQ ID NO: 88383 - DNA, 28 bp, Artificial Sequence
  Synthetic
tggcaatgcuaaccatctttaacatcua

SEQ ID NO: 88384 - DNA, 22 bp, Artificial Sequence
  Synthetic
agccagcacautgtcacagaua

SEQ ID NO: 88385 - DNA, 21 bp, Artificial Sequence
  Synthetic
tccacuctctcagugacagca

SEQ ID NO: 88386 - DNA, 23 bp, Artificial Sequence
  Synthetic
cctgttccatugggtctccatut

SEQ ID NO: 88387 - DNA, 23 bp, Artificial Sequence
  Synthetic
agatgctucaggatggacaugag

SEQ ID NO: 88388 - DNA, 28 bp, Artificial Sequence
  Synthetic
acaagaaagucattgtttucacaagcaa

SEQ ID NO: 88389 - DNA, 25 bp, Artificial Sequence
  Synthetic
cgttaaaggacuttgcaaucaagcc

SEQ ID NO: 88390 - DNA, 21 bp, Artificial Sequence
  Synthetic
gtggccugcagtcctactaug

SEQ ID NO: 88391 - DNA, 19 bp, Artificial Sequence
  Synthetic
caccaccugggaacaccug

SEQ ID NO: 88392 - DNA, 22 bp, Artificial Sequence
  Synthetic
gcccagugaggagtaaacugaa

SEQ ID NO: 88393 - DNA, 21 bp, Artificial Sequence
  Synthetic
tggcttaggucacggugaaac

SEQ ID NO: 88394 - DNA, 22 bp, Artificial Sequence
  Synthetic
cctgtcccagcauggaagtauc

SEQ ID NO: 88395 - DNA, 28 bp, Artificial Sequence
  Synthetic
gtaacttctttccugccttcttcttuct

SEQ ID NO: 88396 - DNA, 25 bp, Artificial Sequence
  Synthetic
gaagtaaatgatucgcttggctugt

SEQ ID NO: 88397 - DNA, 25 bp, Artificial Sequence
  Synthetic
tgaggtttcttutgttcctgtguca

SEQ ID NO: 88398 - DNA, 23 bp, Artificial Sequence
  Synthetic
gggaagaggcugtaaaaaucaca

SEQ ID NO: 88399 - DNA, 18 bp, Artificial Sequence
  Synthetic
cuggcccggaagacauct

SEQ ID NO: 88400 - DNA, 22 bp, Artificial Sequence
  Synthetic
accagcucagagctcagaucat

SEQ ID NO: 88401 - DNA, 17 bp, Artificial Sequence
  Synthetic
ccugtugcggacaccga

SEQ ID NO: 88402 - DNA, 19 bp, Artificial Sequence
  Synthetic
gcagaugccaacgcuacct

SEQ ID NO: 88403 - DNA, 20 bp, Artificial Sequence
  Synthetic
cagccautcgctcugagaca

SEQ ID NO: 88404 - DNA, 28 bp, Artificial Sequence
  Synthetic
tcactattccuctttaacttcucggact

SEQ ID NO: 88405 - DNA, 24 bp, Artificial Sequence
  Synthetic
gctgccaacaugtctgatgtauct

SEQ ID NO: 88406 - DNA, 24 bp, Artificial Sequence
  Synthetic
cggactaaccagutcatccaugat

SEQ ID NO: 88407 - DNA, 28 bp, Artificial Sequence
  Synthetic
ccagcaaatugtttatttctcugaagga

SEQ ID NO: 88408 - DNA, 21 bp, Artificial Sequence
  Synthetic
gccccaggucgtatgtttcut

SEQ ID NO: 88409 - DNA, 23 bp, Artificial Sequence
  Synthetic
agttctttgucttccagcgucag

SEQ ID NO: 88410 - DNA, 19 bp, Artificial Sequence
  Synthetic
cagccgacgaccutgttut

SEQ ID NO: 88411 - DNA, 17 bp, Artificial Sequence
  Synthetic
cgggucagccctggtuc

SEQ ID NO: 88412 - DNA, 17 bp, Artificial Sequence
  Synthetic
gtgtccucgccggtuca

SEQ ID NO: 88413 - DNA, 18 bp, Artificial Sequence
  Synthetic
tgaguguggacccccgaa

SEQ ID NO: 88414 - DNA, 28 bp, Artificial Sequence
  Synthetic
gttcccagggaggutatatucaaaagaa

SEQ ID NO: 88415 - DNA, 23 bp, Artificial Sequence
  Synthetic
cguttccttttauggcagaggct

SEQ ID NO: 88416 - DNA, 22 bp, Artificial Sequence
  Synthetic
cagtttcugcagatggctcugt

SEQ ID NO: 88417 - DNA, 22 bp, Artificial Sequence
  Synthetic
tggagaaccugagggtagaugg

SEQ ID NO: 88418 - DNA, 28 bp, Artificial Sequence
  Synthetic
acatcttgugaaaagacaaagaccacua

SEQ ID NO: 88419 - DNA, 23 bp, Artificial Sequence
  Synthetic
caaacctcacauggtatggcauc

SEQ ID NO: 88420 - DNA, 23 bp, Artificial Sequence
  Synthetic
tctcuggaaagaccacggtguat

SEQ ID NO: 88421 - DNA, 23 bp, Artificial Sequence
  Synthetic
aggatggagaccutcagcttcut

SEQ ID NO: 88422 - DNA, 17 bp, Artificial Sequence
  Synthetic
acugcgggaggguggat

SEQ ID NO: 88423 - DNA, 18 bp, Artificial Sequence
  Synthetic
gggactugaccgcugagg

SEQ ID NO: 88424 - DNA, 19 bp, Artificial Sequence
  Synthetic
ctgctccagugtgcatugt

SEQ ID NO: 88425 - DNA, 18 bp, Artificial Sequence
  Synthetic
gguggcacucaccacacc

SEQ ID NO: 88426 - DNA, 21 bp, Artificial Sequence
  Synthetic
ggguggccatuaacacacaat

SEQ ID NO: 88427 - DNA, 21 bp, Artificial Sequence
  Synthetic
ccacctugcatgggtacucac

SEQ ID NO: 88428 - DNA, 18 bp, Artificial Sequence
  Synthetic
cagcugctctgcucggat

SEQ ID NO: 88429 - DNA, 23 bp, Artificial Sequence
  Synthetic
caggcccggutctggttauaaaa

SEQ ID NO: 88430 - DNA, 20 bp, Artificial Sequence
  Synthetic
caaaagccgagcugtgcauc

SEQ ID NO: 88431 - DNA, 20 bp, Artificial Sequence
  Synthetic
attucccacagggacacgut

SEQ ID NO: 88432 - DNA, 20 bp, Artificial Sequence
  Synthetic
catggtcgcutgcttggaug

SEQ ID NO: 88433 - DNA, 22 bp, Artificial Sequence
  Synthetic
agtgactgaacugtgctggtut

SEQ ID NO: 88434 - DNA, 21 bp, Artificial Sequence
  Synthetic
cccaggugacaagctcactua

SEQ ID NO: 88435 - DNA, 24 bp, Artificial Sequence
  Synthetic
ggtcatcuagaccccaacactuac

SEQ ID NO: 88436 - DNA, 28 bp, Artificial Sequence
  Synthetic
gttuggtaaagaagcugaaggagaaaaa

SEQ ID NO: 88437 - DNA, 26 bp, Artificial Sequence
  Synthetic
aatctgccaccauagagggtauagaa

SEQ ID NO: 88438 - DNA, 21 bp, Artificial Sequence
  Synthetic
ccttactgtugcccaccctut

SEQ ID NO: 88439 - DNA, 25 bp, Artificial Sequence
  Synthetic
gggtgacagugcttauaaacgaaga

SEQ ID NO: 88440 - DNA, 20 bp, Artificial Sequence
  Synthetic
gcagcucagccaactcttug

SEQ ID NO: 88441 - DNA, 28 bp, Artificial Sequence
  Synthetic
cacttcaaaugcactgttaacattucct

SEQ ID NO: 88442 - DNA, 17 bp, Artificial Sequence
  Synthetic
gctgcgcuacaacgugt

SEQ ID NO: 88443 - DNA, 17 bp, Artificial Sequence
  Synthetic
gcuccgccgcactuacc

SEQ ID NO: 88444 - DNA, 17 bp, Artificial Sequence
  Synthetic
cggcaagcucgtgcuct

SEQ ID NO: 88445 - DNA, 17 bp, Artificial Sequence
  Synthetic
tccccgcccucuccaaa

SEQ ID NO: 88446 - DNA, 20 bp, Artificial Sequence
  Synthetic
ctccccuagacugagaccgt

SEQ ID NO: 88447 - DNA, 21 bp, Artificial Sequence
  Synthetic
cgggtcaccutgttgatgaug

SEQ ID NO: 88448 - DNA, 18 bp, Artificial Sequence
  Synthetic
ggagucagcagcagggut

SEQ ID NO: 88449 - DNA, 17 bp, Artificial Sequence
  Synthetic
ccggcugaggtgtucca

SEQ ID NO: 88450 - DNA, 19 bp, Artificial Sequence
  Synthetic
aggauccgcatgacugcac

SEQ ID NO: 88451 - DNA, 22 bp, Artificial Sequence
  Synthetic
gggtgacucaagtcatggugat

SEQ ID NO: 88452 - DNA, 23 bp, Artificial Sequence
  Synthetic
agcaagcucttctuggaaaacct

SEQ ID NO: 88453 - DNA, 22 bp, Artificial Sequence
  Synthetic
actctugagagaggtgccucat

SEQ ID NO: 88454 - DNA, 22 bp, Artificial Sequence
  Synthetic
cttcaacguacccaacccucat

SEQ ID NO: 88455 - DNA, 22 bp, Artificial Sequence
  Synthetic
ggtgagccgaaggutcactuac

SEQ ID NO: 88456 - DNA, 20 bp, Artificial Sequence
  Synthetic
tgucaccgggacaagaacug

SEQ ID NO: 88457 - DNA, 24 bp, Artificial Sequence
  Synthetic
cttggtcttuaggagcatcugaga

SEQ ID NO: 88458 - DNA, 17 bp, Artificial Sequence
  Synthetic
gcccccugccctgatug

SEQ ID NO: 88459 - DNA, 19 bp, Artificial Sequence
  Synthetic
cttgttcugcagcggtgug

SEQ ID NO: 88460 - DNA, 19 bp, Artificial Sequence
  Synthetic
gtacagccagugtguccga

SEQ ID NO: 88461 - DNA, 24 bp, Artificial Sequence
  Synthetic
gcaaaagtggucctctctgaauct

SEQ ID NO: 88462 - DNA, 21 bp, Artificial Sequence
  Synthetic
ctctgcuccggtttgggauat

SEQ ID NO: 88463 - DNA, 25 bp, Artificial Sequence
  Synthetic
ctctggagacauatagagtggtgug

SEQ ID NO: 88464 - DNA, 26 bp, Artificial Sequence
  Synthetic
ggaagggaaagaaugactgauggaat

SEQ ID NO: 88465 - DNA, 21 bp, Artificial Sequence
  Synthetic
ctgggaacccugatgacucac

SEQ ID NO: 88466 - DNA, 20 bp, Artificial Sequence
  Synthetic
gcucaacacgcactatgugg

SEQ ID NO: 88467 - DNA, 22 bp, Artificial Sequence
  Synthetic
cgtuaaaccactgcucgaaggt

SEQ ID NO: 88468 - DNA, 21 bp, Artificial Sequence
  Synthetic
gcugcccaccatctucaagag

SEQ ID NO: 88469 - DNA, 19 bp, Artificial Sequence
  Synthetic
agctggtgcucaacacgut

SEQ ID NO: 88470 - DNA, 24 bp, Artificial Sequence
  Synthetic
aaacaaatgcccugttggtagtua

SEQ ID NO: 88471 - DNA, 23 bp, Artificial Sequence
  Synthetic
gcagttucagacacacagucagg

SEQ ID NO: 88472 - DNA, 32 bp, Artificial Sequence; identical to SEQ ID NO: 59170
  Synthetic

SEQ ID NO: 88473 - DNA, 19 bp, Artificial Sequence
  Synthetic
ccgtgcacucctgttcuga

SEQ ID NO: 88474 - DNA, 23 bp, Artificial Sequence
  Synthetic
ccacaacaagcccauaactuacc

SEQ ID NO: 88475 - DNA, 27 bp, Artificial Sequence
  Synthetic
acaggaattucaggacagtatagcuct

SEQ ID NO: 88476 - DNA, 23 bp, Artificial Sequence
  Synthetic
gtcataggttuggaacccgtuct

SEQ ID NO: 88477 - DNA, 22 bp, Artificial Sequence
  Synthetic
agtaagagacccuagggcucac

SEQ ID NO: 88478 - DNA, 22 bp, Artificial Sequence
  Synthetic
tggtgcugacatccaucaaagg

SEQ ID NO: 88479 - DNA, 22 bp, Artificial Sequence
  Synthetic
ctgaccagcugaaagatgctug

SEQ ID NO: 88480 - DNA, 22 bp, Artificial Sequence
  Synthetic
cacataggccugcatgggauaa

SEQ ID NO: 88481 - DNA, 23 bp, Artificial Sequence
  Synthetic
ggaagttgttugagcaagaggug

SEQ ID NO: 88482 - DNA, 28 bp, Artificial Sequence
  Synthetic
caugaacagaccauaaagcagaaaagaa

SEQ ID NO: 88483 - DNA, 22 bp, Artificial Sequence
  Synthetic
ctgtcagtguacagcagcagua

SEQ ID NO: 88484 - DNA, 21 bp, Artificial Sequence
  Synthetic
ggaggcctugtcaccatccua

SEQ ID NO: 88485 - DNA, 24 bp, Artificial Sequence
  Synthetic
accttgtgtgutgactccactuac

SEQ ID NO: 88486 - DNA, 21 bp, Artificial Sequence
  Synthetic
gcaccccucccttctatgcua

SEQ ID NO: 88487 - DNA, 28 bp, Artificial Sequence
  Synthetic
gaacagagauagagggagacagattuct

SEQ ID NO: 88488 - DNA, 20 bp, Artificial Sequence
  Synthetic
gtttctgagccucccgtuga

SEQ ID NO: 88489 - DNA, 28 bp, Artificial Sequence
  Synthetic
tttgattgugtctatgattuagggagca

SEQ ID NO: 88490 - DNA, 21 bp, Artificial Sequence
  Synthetic
gcutgagactgugcaggagag

SEQ ID NO: 88491 - DNA, 20 bp, Artificial Sequence
  Synthetic
tggcccagagugatggtgua

SEQ ID NO: 88492 - DNA, 26 bp, Artificial Sequence
  Synthetic
cctcatcatcauacccttcaacaucc

SEQ ID NO: 88493 - DNA, 28 bp, Artificial Sequence
  Synthetic
gcctctgtattucaagatgagagcaaut

SEQ ID NO: 88494 - DNA, 21 bp, Artificial Sequence
  Synthetic
cattgugcgcaccacaucaat

SEQ ID NO: 88495 - DNA, 25 bp, Artificial Sequence
  Synthetic
cagaaggaugauaaagagccacagg

SEQ ID NO: 88496 - DNA, 21 bp, Artificial Sequence
  Synthetic
caacgctggagucttggtgua

SEQ ID NO: 88497 - DNA, 24 bp, Artificial Sequence
  Synthetic
tctcctgcuccttatgatcaugct

SEQ ID NO: 88498 - DNA, 21 bp, Artificial Sequence
  Synthetic
gctccucacagctcccauaac

SEQ ID NO: 88499 - DNA, 24 bp, Artificial Sequence
  Synthetic
tggaauaagacccaaacaacccut

SEQ ID NO: 88500 - DNA, 24 bp, Artificial Sequence
  Synthetic
gttcctgucactgtcttctucact

SEQ ID NO: 88501 - DNA, 21 bp, Artificial Sequence
  Synthetic
gccaugaagggcaagtgtcuc

SEQ ID NO: 88502 - DNA, 21 bp, Artificial Sequence
  Synthetic
tttgaatccauccctgugcgt

SEQ ID NO: 88503 - DNA, 27 bp, Artificial Sequence
  Synthetic
tttattuaccgccttttcuggaagagt

SEQ ID NO: 88504 - DNA, 25 bp, Artificial Sequence
  Synthetic
gcaguggaaatauccaagacagaca

SEQ ID NO: 88505 - DNA, 25 bp, Artificial Sequence
  Synthetic
gaattagaaagccuggacccaauga

SEQ ID NO: 88506 - DNA, 22 bp, Artificial Sequence
  Synthetic
ggttcugtagaatgucccacca

SEQ ID NO: 88507 - DNA, 22 bp, Artificial Sequence
  Synthetic
gcatcatcccuttgctggtuac

SEQ ID NO: 88508 - DNA, 23 bp, Artificial Sequence
  Synthetic
cacccagcauatcauaccacagt

SEQ ID NO: 88509 - DNA, 25 bp, Artificial Sequence
  Synthetic
gctgatgaugaaatcacgatgaugg

SEQ ID NO: 88510 - DNA, 25 bp, Artificial Sequence
  Synthetic
tctgaaugggaaggaaaggctttut

SEQ ID NO: 88511 - DNA, 24 bp, Artificial Sequence
  Synthetic
cctaacuccagaagggccaataug

SEQ ID NO: 88512 - DNA, 22 bp, Artificial Sequence
  Synthetic
catcctcagautctgcctgugt

SEQ ID NO: 88513 - DNA, 25 bp, Artificial Sequence
  Synthetic
gaccaagatgcuattacctgtgugt

SEQ ID NO: 88514 - DNA, 21 bp, Artificial Sequence
  Synthetic
gaatcctucaccacacccugt

SEQ ID NO: 88515 - DNA, 28 bp, Artificial Sequence
  Synthetic
cccagaagaagaaaaugaggaagattuc

SEQ ID NO: 88516 - DNA, 27 bp, Artificial Sequence
  Synthetic
ggtatcatacauatcaggaggcugaga

SEQ ID NO: 88517 - DNA, 25 bp, Artificial Sequence
  Synthetic
ttgugaacatctgtuaccagacaat

SEQ ID NO: 88518 - DNA, 22 bp, Artificial Sequence
  Synthetic
cacugatgtugccgaaaaggat

SEQ ID NO: 88519 - DNA, 27 bp, Artificial Sequence
  Synthetic
ctgttgttttauttccggtttaugcga

SEQ ID NO: 88520 - DNA, 28 bp, Artificial Sequence
  Synthetic
ggcggtaaauaaaaacctgtagaaaguc

SEQ ID NO: 88521 - DNA, 27 bp, Artificial Sequence
  Synthetic
acaagacagggutactatatucgggaa

SEQ ID NO: 88522 - DNA, 24 bp, Artificial Sequence
  Synthetic
gggaaaauttggacuccacaggaa

SEQ ID NO: 88523 - DNA, 21 bp, Artificial Sequence
  Synthetic
agcagauccaggagguggaat

SEQ ID NO: 88524 - DNA, 27 bp, Artificial Sequence
  Synthetic
gcaagatgatgucttctccacttucag

SEQ ID NO: 88525 - DNA, 28 bp, Artificial Sequence
  Synthetic
cctttaccacucggattatgaugaagat

SEQ ID NO: 88526 - DNA, 23 bp, Artificial Sequence
  Synthetic
tgttctccugaagcatgcugaag

SEQ ID NO: 88527 - DNA, 21 bp, Artificial Sequence
  Synthetic
augctgggagugacgaagaag

SEQ ID NO: 88528 - DNA, 21 bp, Artificial Sequence
  Synthetic
gctgtccgaguctgacaugat

SEQ ID NO: 88529 - DNA, 20 bp, Artificial Sequence
  Synthetic
cccccgccuttattcagcut

SEQ ID NO: 88530 - DNA, 26 bp, Artificial Sequence
  Synthetic
tggccaaccacaaaaauatccacuaa

SEQ ID NO: 88531 - DNA, 23 bp, Artificial Sequence
  Synthetic
ccaattacugcaggcactugaga

SEQ ID NO: 88532 - DNA, 28 bp, Artificial Sequence
  Synthetic
ctcaagttgagucaaatgctcatcauac

SEQ ID NO: 88533 - DNA, 27 bp, Artificial Sequence
  Synthetic
aagtatcagagucgggagagttttcua

SEQ ID NO: 88534 - DNA, 26 bp, Artificial Sequence
  Synthetic
cagcgtgaacutcatcatcaatctuc

SEQ ID NO: 88535 - DNA, 28 bp, Artificial Sequence
  Synthetic
tgtgcttattauagcatgatagcugcaa

SEQ ID NO: 88536 - DNA, 22 bp, Artificial Sequence
  Synthetic
acuggagcacgaaaaaggtugt

SEQ ID NO: 88537 - DNA, 27 bp, Artificial Sequence
  Synthetic
gcatggcaaccaagauaaagaactaut

SEQ ID NO: 88538 - DNA, 28 bp, Artificial Sequence
  Synthetic
actgttggcaagaauaaggtttacauca

SEQ ID NO: 88539 - DNA, 25 bp, Artificial Sequence
  Synthetic
agttccagatucttggccattucat

SEQ ID NO: 88540 - DNA, 20 bp, Artificial Sequence
  Synthetic
gccagcauccttcagtcgut

SEQ ID NO: 88541 - DNA, 21 bp, Artificial Sequence
  Synthetic
ctaaagctcugcgctgactuc

SEQ ID NO: 88542 - DNA, 25 bp, Artificial Sequence
  Synthetic
ctggctgacutctgattctacugag

SEQ ID NO: 88543 - DNA, 25 bp, Artificial Sequence
  Synthetic
cagaatttcgaccuggaaaagtgut

SEQ ID NO: 88544 - DNA, 24 bp, Artificial Sequence
  Synthetic
cagctggauagcagagaaaggaut

SEQ ID NO: 88545 - DNA, 26 bp, Artificial Sequence
  Synthetic
tgaagaggaaggaacuguacaacaac

SEQ ID NO: 88546 - DNA, 28 bp, Artificial Sequence
  Synthetic
caatgtcttcacaaucagcatcataguc

SEQ ID NO: 88547 - DNA, 26 bp, Artificial Sequence
  Synthetic
atgaaggguggattaggaguacagaa

SEQ ID NO: 88548 - DNA, 22 bp, Artificial Sequence
  Synthetic
cctcauacaggacactggctuc

SEQ ID NO: 88549 - DNA, 22 bp, Artificial Sequence
  Synthetic
gctgggugaggaagactcugat

SEQ ID NO: 88550 - DNA, 28 bp, Artificial Sequence
  Synthetic
tctatagctggaaaagucattcctcuca

SEQ ID NO: 88551 - DNA, 20 bp, Artificial Sequence
  Synthetic
ggtcgcggaucttcttcucc

SEQ ID NO: 88552 - DNA, 28 bp, Artificial Sequence
  Synthetic
ttggagatgttctuacgtatggtctcua

SEQ ID NO: 88553 - DNA, 23 bp, Artificial Sequence
  Synthetic
tcacccagaaaaugatggcagut

SEQ ID NO: 88554 - DNA, 22 bp, Artificial Sequence
  Synthetic
agactcugacagacgcugagat

SEQ ID NO: 88555 - DNA, 22 bp, Artificial Sequence
  Synthetic
ctgtcucagagaccaugggaga

SEQ ID NO: 88556 - DNA, 24 bp, Artificial Sequence
  Synthetic
gguccaaaaagatguaggaagcgt

SEQ ID NO: 88557 - DNA, 20 bp, Artificial Sequence
  Synthetic
agaugggaccucaggaagca

SEQ ID NO: 88558 - DNA, 25 bp, Artificial Sequence
  Synthetic
ggccccagacccautattttaauga

SEQ ID NO: 88559 - DNA, 25 bp, Artificial Sequence
  Synthetic
tccacuattcggugaaaaccaacaa

SEQ ID NO: 88560 - DNA, 23 bp, Artificial Sequence
  Synthetic
cactcaccugctgttttgtacuc

SEQ ID NO: 88561 - DNA, 26 bp, Artificial Sequence
  Synthetic
actattguggcagacaaatgtgugaa

SEQ ID NO: 88562 - DNA, 28 bp, Artificial Sequence
  Synthetic
ctcattgatguctgaatagtcuacagca

SEQ ID NO: 88563 - DNA, 26 bp, Artificial Sequence
  Synthetic
ttggatgatgagugtaagaagcacut

SEQ ID NO: 88564 - DNA, 24 bp, Artificial Sequence
  Synthetic
tgtactctugttggtttucaccga

SEQ ID NO: 88565 - DNA, 22 bp, Artificial Sequence
  Synthetic
acacacacaacuggagcagaug

SEQ ID NO: 88566 - DNA, 17 bp, Artificial Sequence
  Synthetic
accaacgcccucugcat

SEQ ID NO: 88567 - DNA, 17 bp, Artificial Sequence
  Synthetic
gguctcgtugggccagt

SEQ ID NO: 88568 - DNA, 21 bp, Artificial Sequence
  Synthetic
cagguggtgagaugccagaaa

SEQ ID NO: 88569 - DNA, 22 bp, Artificial Sequence
  Synthetic
tgacutcuacgacagacagcac

SEQ ID NO: 88570 - DNA, 28 bp, Artificial Sequence
  Synthetic
ccagttgtgtgugtctttctttatcuga

SEQ ID NO: 88571 - DNA, 31 bp, Artificial Sequence
  Synthetic
aggatgaaattuaattttctctccauccagt

SEQ ID NO: 88572 - DNA, 19 bp, Artificial Sequence
  Synthetic
cagaccutccggguggaac

SEQ ID NO: 88573 - DNA, 22 bp, Artificial Sequence
  Synthetic
tgaagagcgagcaccucattuc

SEQ ID NO: 88574 - DNA, 22 bp, Artificial Sequence
  Synthetic
ccgtgagutcagtgatuaggct

SEQ ID NO: 88575 - DNA, 21 bp, Artificial Sequence
  Synthetic
catctggagguggcccattua

SEQ ID NO: 88576 - DNA, 20 bp, Artificial Sequence
  Synthetic
cctacagcgaugcctgugaa

SEQ ID NO: 88577 - DNA, 24 bp, Artificial Sequence
  Synthetic
ctgatttccutttcggtgugagac

SEQ ID NO: 88578 - DNA, 33 bp, Artificial Sequence
  Synthetic
ttacttcatttcacautcaaaatgatagcuaca

SEQ ID NO: 88579 - DNA, 28 bp, Artificial Sequence
  Synthetic
cttggcugaatggaaauagagaagaaga

SEQ ID NO: 88580 - DNA, 21 bp, Artificial Sequence
  Synthetic
accctgtcccuctgatgtcut

SEQ ID NO: 88581 - DNA, 28 bp, Artificial Sequence
  Synthetic
gaatttcaauccagcaaggtgtttctut

SEQ ID NO: 88582 - DNA, 22 bp, Artificial Sequence
  Synthetic
ggtgtaaccautgggcggauac

SEQ ID NO: 88583 - DNA, 24 bp, Artificial Sequence
  Synthetic
tctataagugccagcacaucagac

SEQ ID NO: 88584 - DNA, 22 bp, Artificial Sequence
  Synthetic
tgcggagatuctcttcctcugt

SEQ ID NO: 88585 - DNA, 22 bp, Artificial Sequence
  Synthetic
aatgggacagguaggaccugat

SEQ ID NO: 88586 - DNA, 23 bp, Artificial Sequence
  Synthetic
cggatuacccaagacagagcauc

SEQ ID NO: 88587 - DNA, 21 bp, Artificial Sequence
  Synthetic
tuaagggccccaacgguaaaa

SEQ ID NO: 88588 - DNA, 26 bp, Artificial Sequence
  Synthetic
acagaagatagcucatgactcctgut

SEQ ID NO: 88589 - DNA, 24 bp, Artificial Sequence
  Synthetic
ggacttgctugattccaccctuac

SEQ ID NO: 88590 - DNA, 21 bp, Artificial Sequence
  Synthetic
gggatgugatgagagguggat

SEQ ID NO: 88591 - DNA, 23 bp, Artificial Sequence
  Synthetic
ccatcctcaccaucatcacacug

SEQ ID NO: 88592 - DNA, 28 bp, Artificial Sequence
  Synthetic
gtgaaataacagcutcgtaagtgcttua

SEQ ID NO: 88593 - DNA, 29 bp, Artificial Sequence
  Synthetic
gactggaagaacaaaugaatggctuaaaa

SEQ ID NO: 88594 - DNA, 20 bp, Artificial Sequence
  Synthetic
ggctccugacctggagtcut

SEQ ID NO: 88595 - DNA, 23 bp, Artificial Sequence
  Synthetic
ctcatctugggcctgtgttauct

SEQ ID NO: 88596 - DNA, 28 bp, Artificial Sequence
  Synthetic
aacgaaattgtguaaggatcatgtcuct

SEQ ID NO: 88597 - DNA, 24 bp, Artificial Sequence
  Synthetic
ccatccaactcugggtgtagatug

SEQ ID NO: 88598 - DNA, 18 bp, Artificial Sequence
  Synthetic
tctagguggctggucgga

SEQ ID NO: 88599 - DNA, 27 bp, Artificial Sequence
  Synthetic
aggtgatacaacucgttcgtagtgaua

SEQ ID NO: 88600 - DNA, 24 bp, Artificial Sequence
  Synthetic
ggtctgtttucagtgaccttggut

SEQ ID NO: 88601 - DNA, 20 bp, Artificial Sequence
  Synthetic
gcgagcuctctucaaacgga

SEQ ID NO: 88602 - DNA, 28 bp, Artificial Sequence
  Synthetic
aaaatgtgatagugtctgtgtgaaucca

SEQ ID NO: 88603 - DNA, 28 bp, Artificial Sequence
  Synthetic
tcgcgggctaucttccaaatttataaut

SEQ ID NO: 88604 - DNA, 20 bp, Artificial Sequence
  Synthetic
ggaatctuacccagccggut

SEQ ID NO: 88605 - DNA, 23 bp, Artificial Sequence
  Synthetic
ggccctcttuatagcttgtccut

SEQ ID NO: 88606 - DNA, 26 bp, Artificial Sequence
  Synthetic
aatctaacagaugccagcaauaacca

SEQ ID NO: 88607 - DNA, 20 bp, Artificial Sequence
  Synthetic
aggcaaacuggtggaagguc

SEQ ID NO: 88608 - DNA, 23 bp, Artificial Sequence
  Synthetic
ctgcagctgucctctgaaagaua

SEQ ID NO: 88609 - DNA, 25 bp, Artificial Sequence
  Synthetic
gaaagaccaccutctttuggaacag

SEQ ID NO: 88610 - DNA, 20 bp, Artificial Sequence
  Synthetic
ccaacgcacacuctctccuc

SEQ ID NO: 88611 - DNA, 21 bp, Artificial Sequence
  Synthetic
gctaaggccuatgccatcuca

SEQ ID NO: 88612 - DNA, 24 bp, Artificial Sequence
  Synthetic
agactggatgaugcaatccatgug

SEQ ID NO: 88613 - DNA, 21 bp, Artificial Sequence
  Synthetic
ctgaucgactgctugcaacaa

SEQ ID NO: 88614 - DNA, 25 bp, Artificial Sequence
  Synthetic
aaatttuggagaagggaagucggaa

SEQ ID NO: 88615 - DNA, 22 bp, Artificial Sequence
  Synthetic
ggtggaugaacgtgtccauacc

SEQ ID NO: 88616 - DNA, 18 bp, Artificial Sequence
  Synthetic
ggagggcgagcugatguc

SEQ ID NO: 88617 - DNA, 20 bp, Artificial Sequence
  Synthetic
gaguccagcacctcctucac

SEQ ID NO: 88618 - DNA, 27 bp, Artificial Sequence
  Synthetic
gcctggagttugacatcctctagauat

SEQ ID NO: 88619 - DNA, 22 bp, Artificial Sequence
  Synthetic
cgcctaucggaaagagcuagaa

SEQ ID NO: 88620 - DNA, 19 bp, Artificial Sequence
  Synthetic
gggaaggcuctuacggcaa

SEQ ID NO: 88621 - DNA, 21 bp, Artificial Sequence
  Synthetic
accccagcaagccauactuac

SEQ ID NO: 88622 - DNA, 20 bp, Artificial Sequence
  Synthetic
cuctuccacgaaagcgcaaa

SEQ ID NO: 88623 - DNA, 22 bp, Artificial Sequence
  Synthetic
gttgaccacutgtuccccaaga

SEQ ID NO: 88624 - DNA, 29 bp, Artificial Sequence
  Synthetic
gtcattgaaaggguattgaatcuaaacac

SEQ ID NO: 88625 - DNA, 23 bp, Artificial Sequence
  Synthetic
gccccaaaacauctctgtcacut

SEQ ID NO: 88626 - DNA, 27 bp, Artificial Sequence
  Synthetic
cagattttaaccccugtacctgttuca

SEQ ID NO: 88627 - DNA, 27 bp, Artificial Sequence
  Synthetic
tttagtucttggctagugaacaacact

SEQ ID NO: 88628 - DNA, 20 bp, Artificial Sequence
  Synthetic
caccggugtggctcttuaac

SEQ ID NO: 88629 - DNA, 22 bp, Artificial Sequence
  Synthetic
gctgtccgucaacatugagaga

SEQ ID NO: 88630 - DNA, 20 bp, Artificial Sequence
  Synthetic
gcagcaacutcacgagcaut

SEQ ID NO: 88631 - DNA, 28 bp, Artificial Sequence
  Synthetic
gatgggagtctguacagcttaaagatut

SEQ ID NO: 88632 - DNA, 25 bp, Artificial Sequence
  Synthetic
gtgctttcucaccatgtttcttugt

SEQ ID NO: 88633 - DNA, 27 bp, Artificial Sequence
  Synthetic
gcattttaacccagugctgagatgtua

SEQ ID NO: 88634 - DNA, 27 bp, Artificial Sequence
  Synthetic
catggcgtutatccagaatuagcaaat

SEQ ID NO: 88635 - DNA, 26 bp, Artificial Sequence
  Synthetic
cacaagcaucggtaactugacaaaaa

SEQ ID NO: 88636 - DNA, 24 bp, Artificial Sequence
  Synthetic
catccagaaugccatgcttuaact

SEQ ID NO: 88637 - DNA, 21 bp, Artificial Sequence
  Synthetic
gaaaggcgacguttttgtgug

SEQ ID NO: 88638 - DNA, 20 bp, Artificial Sequence
  Synthetic
cagaugagccucacgcacat

SEQ ID NO: 88639 - DNA, 23 bp, Artificial Sequence
  Synthetic
gggcaaguagagatggaacccua

SEQ ID NO: 88640 - DNA, 23 bp, Artificial Sequence
  Synthetic
gagatauccgtcccatucagcag

SEQ ID NO: 88641 - DNA, 24 bp, Artificial Sequence
  Synthetic
tgttgaggugcagatgtgattugt

SEQ ID NO: 88642 - DNA, 20 bp, Artificial Sequence
  Synthetic
ccgtggcauttagtcgugag

SEQ ID NO: 88643 - DNA, 21 bp, Artificial Sequence
  Synthetic
ccugaaaagacugcccccaaa

SEQ ID NO: 88644 - DNA, 21 bp, Artificial Sequence
  Synthetic
gagagcaggcacacuagtuga

SEQ ID NO: 88645 - DNA, 27 bp, Artificial Sequence
  Synthetic
cccctgtgttcutctcttccatttuag

SEQ ID NO: 88646 - DNA, 19 bp, Artificial Sequence
  Synthetic
cggcugaccccaaggtaug

SEQ ID NO: 88647 - DNA, 22 bp, Artificial Sequence
  Synthetic
caacttccttucctcccctgug

SEQ ID NO: 88648 - DNA, 22 bp, Artificial Sequence
  Synthetic
agacutttccucacccccaaag

SEQ ID NO: 88649 - DNA, 25 bp, Artificial Sequence
  Synthetic
tccagtcccauttggacattaugag

SEQ ID NO: 88650 - DNA, 28 bp, Artificial Sequence
  Synthetic
ggctattttcccuagtcttctcatucaa

SEQ ID NO: 88651 - DNA, 27 bp, Artificial Sequence
  Synthetic
agcagaaagattuggagatacaagcuc

SEQ ID NO: 88652 - DNA, 27 bp, Artificial Sequence
  Synthetic
cctgtctgaguagatctctgtgagtut

SEQ ID NO: 88653 - DNA, 28 bp, Artificial Sequence
  Synthetic
gtgaaggaataugcattaccaataggug

SEQ ID NO: 88654 - DNA, 22 bp, Artificial Sequence
  Synthetic
aggcaaggguctcctauacaca

SEQ ID NO: 88655 - DNA, 23 bp, Artificial Sequence
  Synthetic
gcctggaguccagttacaaugat

SEQ ID NO: 88656 - DNA, 18 bp, Artificial Sequence
  Synthetic
gcatgcgggutgttgugt

SEQ ID NO: 88657 - DNA, 19 bp, Artificial Sequence
  Synthetic
gggccaagcccuacaacug

SEQ ID NO: 88658 - DNA, 28 bp, Artificial Sequence
  Synthetic
tgggaagtugaagaaattctagcaugaa

SEQ ID NO: 88659 - DNA, 28 bp, Artificial Sequence
  Synthetic
gagcgagaacuggagattaaacttcuaa

SEQ ID NO: 88660 - DNA, 28 bp, Artificial Sequence
  Synthetic
ttcatctttggacaacugatcaatcugt

SEQ ID NO: 88661 - DNA, 28 bp, Artificial Sequence
  Synthetic
gcatgatutatctaaagcugaaacggaa

SEQ ID NO: 88662 - DNA, 20 bp, Artificial Sequence
  Synthetic
aggcctuctggcaguaggaa

SEQ ID NO: 88663 - DNA, 21 bp, Artificial Sequence
  Synthetic
ggcaggauccactccaagaug

SEQ ID NO: 88664 - DNA, 20 bp, Artificial Sequence
  Synthetic
ggcttgatgguctccgtgug

SEQ ID NO: 88665 - DNA, 22 bp, Artificial Sequence
  Synthetic
catccgucaagcaacgtcatut

SEQ ID NO: 88666 - DNA, 27 bp, Artificial Sequence
  Synthetic
auttaaagcacacauacacacacaaac

SEQ ID NO: 88667 - DNA, 26 bp, Artificial Sequence
  Synthetic
ggctattguagcagcaaagucaaaaa

SEQ ID NO: 88668 - DNA, 21 bp, Artificial Sequence
  Synthetic
gggcagauagctgagcattuc

SEQ ID NO: 88669 - DNA, 26 bp, Artificial Sequence
  Synthetic
cacattccccucccaaattcttcuaa

SEQ ID NO: 88670 - DNA, 17 bp, Artificial Sequence
  Synthetic
gcagccccguctgtguc

SEQ ID NO: 88671 - DNA, 18 bp, Artificial Sequence
  Synthetic
ggctcugagccacacuca

SEQ ID NO: 88672 - DNA, 21 bp, Artificial Sequence
  Synthetic
gcatgatcugggaagcgcaua

SEQ ID NO: 88673 - DNA, 28 bp, Artificial Sequence
  Synthetic
ctcaaattguagaaggagtgtgatucca

SEQ ID NO: 88674 - DNA, 21 bp, Artificial Sequence
  Synthetic
caggcataugctggtccctut

SEQ ID NO: 88675 - DNA, 22 bp, Artificial Sequence
  Synthetic
accaucatgaacugcacaagga

SEQ ID NO: 88676 - DNA, 20 bp, Artificial Sequence
  Synthetic
ccctacuctgggcuaacgct

SEQ ID NO: 88677 - DNA, 27 bp, Artificial Sequence
  Synthetic
aactctgtacctuttcctcttttcgut

SEQ ID NO: 88678 - DNA, 18 bp, Artificial Sequence
  Synthetic
gactcugcagcagcugga

SEQ ID NO: 88679 - DNA, 22 bp, Artificial Sequence
  Synthetic
ccatcuggagccccaagatuat

SEQ ID NO: 88680 - DNA, 18 bp, Artificial Sequence
  Synthetic
gccagggcaucucccaat

SEQ ID NO: 88681 - DNA, 18 bp, Artificial Sequence
  Synthetic
ccaaagggcugcaccuac

SEQ ID NO: 88682 - DNA, 28 bp, Artificial Sequence
  Synthetic
aacagatattuaccagctaagtgugcaa

SEQ ID NO: 88683 - DNA, 23 bp, Artificial Sequence
  Synthetic
ggaacagacugtgcaactucagt

SEQ ID NO: 88684 - DNA, 27 bp, Artificial Sequence
  Synthetic
cttgaagaacaaguggattggugaaat

SEQ ID NO: 88685 - DNA, 21 bp, Artificial Sequence
  Synthetic
gtagccctuggctctgacauc

SEQ ID NO: 88686 - DNA, 28 bp, Artificial Sequence
  Synthetic
cgctttgtgacutaactttttacaguga

SEQ ID NO: 88687 - DNA, 26 bp, Artificial Sequence
  Synthetic
cctcccctacuagaaaactctguacc

SEQ ID NO: 88688 - DNA, 28 bp, Artificial Sequence
  Synthetic
acctgaaaacaggaacugattttacugt

SEQ ID NO: 88689 - DNA, 25 bp, Artificial Sequence
  Synthetic
cttgtcttucaggagctgttuacct

SEQ ID NO: 88690 - DNA, 21 bp, Artificial Sequence
  Synthetic
cgtgaggagcauggttgttug

SEQ ID NO: 88691 - DNA, 24 bp, Artificial Sequence
  Synthetic
gccagatctcugtgcacaaaatug

SEQ ID NO: 88692 - DNA, 23 bp, Artificial Sequence
  Synthetic
acccatgguagctgtcactguat

SEQ ID NO: 88693 - DNA, 24 bp, Artificial Sequence
  Synthetic
gccaaaguacatctugaggcaagt

SEQ ID NO: 88694 - DNA, 23 bp, Artificial Sequence
  Synthetic
cctgacgaagucgtgaaagtuca

SEQ ID NO: 88695 - DNA, 32 bp, Artificial Sequence
  Synthetic
atattgaaatgattgaautccatggtgaauac

SEQ ID NO: 88696 - DNA, 27 bp, Artificial Sequence
  Synthetic
ccttaacagtcuggttaaacacctcut

SEQ ID NO: 88697 - DNA, 22 bp, Artificial Sequence
  Synthetic
acataagcaucagtggcugcat

SEQ ID NO: 88698 - DNA, 23 bp, Artificial Sequence
  Synthetic
tcaaugccauggaagggaagaaa

SEQ ID NO: 88699 - DNA, 22 bp, Artificial Sequence
  Synthetic
gaagagccuccttctgttucgt

SEQ ID NO: 88700 - DNA, 23 bp, Artificial Sequence
  Synthetic
tctcacugaggaccagaaacugt

SEQ ID NO: 88701 - DNA, 28 bp, Artificial Sequence
  Synthetic
aaatattttggtagaguttctgccacua

SEQ ID NO: 88702 - DNA, 22 bp, Artificial Sequence
  Synthetic
agcacccaaugaagagcaagut

SEQ ID NO: 88703 - DNA, 25 bp, Artificial Sequence
  Synthetic
caggttatttgccutttcccttgut

SEQ ID NO: 88704 - DNA, 22 bp, Artificial Sequence
  Synthetic
cctgtctacgutccctcacugt

SEQ ID NO: 88705 - DNA, 19 bp, Artificial Sequence
  Synthetic
cttgguccagacccaggug

SEQ ID NO: 88706 - DNA, 18 bp, Artificial Sequence
  Synthetic
cgtccgaacugccgucaa

SEQ ID NO: 88707 - DNA, 20 bp, Artificial Sequence
  Synthetic
caccaagcuttcctggctuc

SEQ ID NO: 88708 - DNA, 20 bp, Artificial Sequence
  Synthetic
cccacguacctuaggacagg

SEQ ID NO: 88709 - DNA, 24 bp, Artificial Sequence
  Synthetic
cagctaatcauccctggtttucca

SEQ ID NO: 88710 - DNA, 22 bp, Artificial Sequence
  Synthetic
ccacttgccaacutacccagua

SEQ ID NO: 88711 - DNA, 21 bp, Artificial Sequence
  Synthetic
ggtguacacagtguccaccaa

SEQ ID NO: 88712 - DNA, 18 bp, Artificial Sequence
  Synthetic
gtctgcagcucccgugaa

SEQ ID NO: 88713 - DNA, 17 bp, Artificial Sequence
  Synthetic
gggccccaucatgcugt

SEQ ID NO: 88714 - DNA, 19 bp, Artificial Sequence
  Synthetic
ggaactggcaucgccauga

SEQ ID NO: 88715 - DNA, 24 bp, Artificial Sequence
  Synthetic
ggacccgacaaaaccuaaagaugg

SEQ ID NO: 88716 - DNA, 17 bp, Artificial Sequence
  Synthetic
ccutccccuggagccat

SEQ ID NO: 88717 - DNA, 22 bp, Artificial Sequence
  Synthetic
ggatcccuaccttgtgcatcug

SEQ ID NO: 88718 - DNA, 20 bp, Artificial Sequence
  Synthetic
ggguacccucaggacaacat

SEQ ID NO: 88719 - DNA, 21 bp, Artificial Sequence
  Synthetic
acaccuccaacaagaaggcut

SEQ ID NO: 88720 - DNA, 23 bp, Artificial Sequence
  Synthetic
actguaggcaggatatuccagca

SEQ ID NO: 88721 - DNA, 22 bp, Artificial Sequence
  Synthetic
gacuttauacagccccgcagaa

SEQ ID NO: 88722 - DNA, 23 bp, Artificial Sequence
  Synthetic
ctgtttcucttgcaggugagact

SEQ ID NO: 88723 - DNA, 22 bp, Artificial Sequence
  Synthetic
cagaaacctggucaccctacuc

SEQ ID NO: 88724 - DNA, 19 bp, Artificial Sequence
  Synthetic
tgtgcacaccauaccucca

SEQ ID NO: 88725 - DNA, 21 bp, Artificial Sequence
  Synthetic
tgtguccagaccgtcctaugt

SEQ ID NO: 88726 - DNA, 23 bp, Artificial Sequence
  Synthetic
ggcaugaagtactuggaggagag

SEQ ID NO: 88727 - DNA, 28 bp, Artificial Sequence
  Synthetic
ctgctgctcugaatattagctaagtugt

SEQ ID NO: 88728 - DNA, 24 bp, Artificial Sequence
  Synthetic
gtctctcatcugactttaggcgut

SEQ ID NO: 88729 - DNA, 28 bp, Artificial Sequence
  Synthetic
gaaagcagtugcattgtacttugaagat

SEQ ID NO: 88730 - DNA, 26 bp, Artificial Sequence
  Synthetic
ctaggtatgtgugccatttacacugt

SEQ ID NO: 88731 - DNA, 25 bp, Artificial Sequence
  Synthetic
ctccctcagugatgtctttucaact

SEQ ID NO: 88732 - DNA, 17 bp, Artificial Sequence
  Synthetic
gagggccucagcacugg

SEQ ID NO: 88733 - DNA, 22 bp, Artificial Sequence
  Synthetic
ctcaccggagucattguagaca

SEQ ID NO: 88734 - DNA, 26 bp, Artificial Sequence
  Synthetic
ctgtcattcaagugaacagaggacut

SEQ ID NO: 88735 - DNA, 27 bp, Artificial Sequence
  Synthetic
aaacagctagugaaccaccatttauca

SEQ ID NO: 88736 - DNA, 24 bp, Artificial Sequence
  Synthetic
tcggaaaaugtactcagugaaggg

SEQ ID NO: 88737 - DNA, 24 bp, Artificial Sequence
  Synthetic
catcttctcugttgagccauccat

SEQ ID NO: 88738 - DNA, 20 bp, Artificial Sequence
  Synthetic
ggcaacgacuttgtguccat

SEQ ID NO: 88739 - DNA, 19 bp, Artificial Sequence
  Synthetic
ctcctcgugaccgaagcuc

SEQ ID NO: 88740 - DNA, 20 bp, Artificial Sequence
  Synthetic
caagcucttugcaccgacaa

SEQ ID NO: 88741 - DNA, 27 bp, Artificial Sequence
  Synthetic
ccccttcatucccagatttttcacuat

SEQ ID NO: 88742 - DNA, 24 bp, Artificial Sequence
  Synthetic
gattccccauggtttctactggut

SEQ ID NO: 88743 - DNA, 23 bp, Artificial Sequence
  Synthetic
gccutcagttgaauaggcacagg

SEQ ID NO: 88744 - DNA, 19 bp, Artificial Sequence
  Synthetic
ctcccgccgcugctaaaua

SEQ ID NO: 88745 - DNA, 24 bp, Artificial Sequence
  Synthetic
atgcttatucccccaggcauaaat

SEQ ID NO: 88746 - DNA, 20 bp, Artificial Sequence
  Synthetic
ccttcucaaggagcgtcugt

SEQ ID NO: 88747 - DNA, 18 bp, Artificial Sequence
  Synthetic
tcacguccccactcccut

SEQ ID NO: 88748 - DNA, 26 bp, Artificial Sequence
  Synthetic
ttggtgaaaaagauacgacactguca

SEQ ID NO: 88749 - DNA, 27 bp, Artificial Sequence
  Synthetic
gtaggaagacccagauttctttccaut

SEQ ID NO: 88750 - DNA, 21 bp, Artificial Sequence
  Synthetic
catctgggacucatgcctuca

SEQ ID NO: 88751 - DNA, 25 bp, Artificial Sequence
  Synthetic
gguggaatttagguggaacaaacct

SEQ ID NO: 88752 - DNA, 24 bp, Artificial Sequence
  Synthetic
guatatagcauccaaccgaaggca

SEQ ID NO: 88753 - DNA, 26 bp, Artificial Sequence
  Synthetic
ctacctgtcugcaaattgtgttgtut

SEQ ID NO: 88754 - DNA, 21 bp, Artificial Sequence
  Synthetic
cagaggcagcagcucttgaua

SEQ ID NO: 88755 - DNA, 23 bp, Artificial Sequence
  Synthetic
tgaactcactgugctctgtgtug

SEQ ID NO: 88756 - DNA, 28 bp, Artificial Sequence
  Synthetic
cggtagaaccaacucattctaaatgcut

SEQ ID NO: 88757 - DNA, 24 bp, Artificial Sequence
  Synthetic
tggtaggtaucacaggtgagucat

SEQ ID NO: 88758 - DNA, 28 bp, Artificial Sequence
  Synthetic
attttgttaacaccccautttcatgcut

SEQ ID NO: 88759 - DNA, 25 bp, Artificial Sequence
  Synthetic
ctctacctgugcctctactttucag

SEQ ID NO: 88760 - DNA, 24 bp, Artificial Sequence
  Synthetic
ggcctaaguttgtccctuaaggaa

SEQ ID NO: 88761 - DNA, 27 bp, Artificial Sequence
  Synthetic
cctgcggttauggtcattatcaaaauc

SEQ ID NO: 88762 - DNA, 21 bp, Artificial Sequence
  Synthetic
cacctgcuagagaccacugag

SEQ ID NO: 88763 - DNA, 24 bp, Artificial Sequence
  Synthetic
tccacagtgtcuttctccccatua

SEQ ID NO: 88764 - DNA, 21 bp, Artificial Sequence
  Synthetic
tcctcagacaucctcguccag

SEQ ID NO: 88765 - DNA, 26 bp, Artificial Sequence
  Synthetic
aaagaccatttugatgaggctguagt

SEQ ID NO: 88766 - DNA, 22 bp, Artificial Sequence
  Synthetic
ggagaggttucatgcctggaut

SEQ ID NO: 88767 - DNA, 29 bp, Artificial Sequence
  Synthetic
gttttgtccagguagttatgguaagagat

SEQ ID NO: 88768 - DNA, 21 bp, Artificial Sequence
  Synthetic
cggctgccuactcagatcuct

SEQ ID NO: 88769 - DNA, 22 bp, Artificial Sequence
  Synthetic
caccucatcuaacaccaccaca

SEQ ID NO: 88770 - DNA, 23 bp, Artificial Sequence
  Synthetic
actttgugccagggacttaagut

SEQ ID NO: 88771 - DNA, 24 bp, Artificial Sequence
  Synthetic
gacttggcgaaugtcagctttaut

SEQ ID NO: 88772 - DNA, 26 bp, Artificial Sequence
  Synthetic
ggaacaacugcagacatgatctacuc

SEQ ID NO: 88773 - DNA, 21 bp, Artificial Sequence
  Synthetic
gctggccauccaccataugat

SEQ ID NO: 88774 - DNA, 19 bp, Artificial Sequence
  Synthetic
ggaaggaccugcagcagua

SEQ ID NO: 88775 - DNA, 18 bp, Artificial Sequence
  Synthetic
ggcccagutggagaugcc

SEQ ID NO: 88776 - DNA, 24 bp, Artificial Sequence
  Synthetic
tcaatatacucacctgccucgact

SEQ ID NO: 88777 - DNA, 27 bp, Artificial Sequence
  Synthetic
gtgaccgguaggtagaattccaaauat

SEQ ID NO: 88778 - DNA, 21 bp, Artificial Sequence
  Synthetic
aattctucgggcttcgugact

SEQ ID NO: 88779 - DNA, 25 bp, Artificial Sequence
  Synthetic
ccagaaagaugtccaaagctuggat

SEQ ID NO: 88780 - DNA, 22 bp, Artificial Sequence
  Synthetic
gcauggaaacaggcaagauggt

SEQ ID NO: 88781 - DNA, 21 bp, Artificial Sequence
  Synthetic
tgacaaucaggcggaagtugg

SEQ ID NO: 88782 - DNA, 21 bp, Artificial Sequence
  Synthetic
gcaaagccutcacagaccuca

SEQ ID NO: 88783 - DNA, 24 bp, Artificial Sequence
  Synthetic
ccggatcacucaagcaataactuc

SEQ ID NO: 88784 - DNA, 22 bp, Artificial Sequence
  Synthetic
ggttccagugctgacagcatua

SEQ ID NO: 88785 - DNA, 28 bp, Artificial Sequence
  Synthetic
ggcagaaacucgtttatgagaaaaaugt

SEQ ID NO: 88786 - DNA, 19 bp, Artificial Sequence
  Synthetic
ggguagaagggcuggacga

SEQ ID NO: 88787 - DNA, 17 bp, Artificial Sequence
  Synthetic
gggaugcccucggcaaa

SEQ ID NO: 88788 - DNA, 28 bp, Artificial Sequence
  Synthetic
gutctctaaaaaccuaacccaggacaaa

SEQ ID NO: 88789 - DNA, 25 bp, Artificial Sequence
  Synthetic
caagtacaucacagactgttuccac

SEQ ID NO: 88790 - DNA, 24 bp, Artificial Sequence
  Synthetic
accatagctttuggaatgggcaut

SEQ ID NO: 88791 - DNA, 26 bp, Artificial Sequence
  Synthetic
gtgacaagaacuttgaagtccaucac

SEQ ID NO: 88792 - DNA, 20 bp, Artificial Sequence
  Synthetic
gggcttucctctgcttugga

SEQ ID NO: 88793 - DNA, 28 bp, Artificial Sequence
  Synthetic
cttataaagaggagagugggagtgauga

SEQ ID NO: 88794 - DNA, 24 bp, Artificial Sequence
  Synthetic
tcaauaacaggtacuggagcagga

SEQ ID NO: 88795 - DNA, 28 bp, Artificial Sequence
  Synthetic
gctgatttaugaaagccaacaaagcaut

SEQ ID NO: 88796 - DNA, 24 bp, Artificial Sequence
  Synthetic
ccacuggagagctcaaaaucagag

SEQ ID NO: 88797 - DNA, 20 bp, Artificial Sequence
  Synthetic
ccuccagcgaggaagaugag

SEQ ID NO: 88798 - DNA, 20 bp, Artificial Sequence
  Synthetic
cacaaaaaggucggctucgt

SEQ ID NO: 88799 - DNA, 21 bp, Artificial Sequence
  Synthetic
caaagtacccutggacucggt

SEQ ID NO: 88800 - DNA, 20 bp, Artificial Sequence
  Synthetic
ggugtccuagagcggagagt

SEQ ID NO: 88801 - DNA, 19 bp, Artificial Sequence
  Synthetic
tttccuaacgcgcccuacc

SEQ ID NO: 88802 - DNA, 21 bp, Artificial Sequence
  Synthetic
gttgccttcucctgcttguct

SEQ ID NO: 88803 - DNA, 21 bp, Artificial Sequence
  Synthetic
aaaccuttgcuaagggcacct

SEQ ID NO: 88804 - DNA, 22 bp, Artificial Sequence
  Synthetic
caggagattgguagagctgguc

SEQ ID NO: 88805 - DNA, 28 bp, Artificial Sequence
  Synthetic
ggatactggaaauagcctcaaacactut

SEQ ID NO: 88806 - DNA, 30 bp, Artificial Sequence
  Synthetic
gttatggcattauttagcatcacttugcat

SEQ ID NO: 88807 - DNA, 25 bp, Artificial Sequence
  Synthetic
cacaggaggaggcutcatttuagaa

SEQ ID NO: 88808 - DNA, 18 bp, Artificial Sequence
  Synthetic
gaatagcgggcuggcuct

SEQ ID NO: 88809 - DNA, 18 bp, Artificial Sequence
  Synthetic
cctgagcgccutcacugt

SEQ ID NO: 88810 - DNA, 28 bp, Artificial Sequence
  Synthetic
cctggttgaugaacaacttttccaatut

SEQ ID NO: 88811 - DNA, 27 bp, Artificial Sequence
  Synthetic
acaggcttaccuacttcaattgtugac

SEQ ID NO: 88812 - DNA, 22 bp, Artificial Sequence
  Synthetic
cagcctgtcuagtcagcaguaa

SEQ ID NO: 88813 - DNA, 24 bp, Artificial Sequence
  Synthetic
ggagaaagauggcctccugaaaaa

SEQ ID NO: 88814 - DNA, 20 bp, Artificial Sequence
  Synthetic
agugaacuggccggaaaagt

SEQ ID NO: 88815 - DNA, 18 bp, Artificial Sequence
  Synthetic
cggctuacgggtcgtugg

SEQ ID NO: 88816 - DNA, 23 bp, Artificial Sequence
  Synthetic
gctcctgttugatgaaggaguga

SEQ ID NO: 88817 - DNA, 17 bp, Artificial Sequence
  Synthetic
ctgtgcccugcctguga

SEQ ID NO: 88818 - DNA, 17 bp, Artificial Sequence
  Synthetic
gcacgucggagcccaut

SEQ ID NO: 88819 - DNA, 18 bp, Artificial Sequence
  Synthetic
gugccuacagcagccaga

SEQ ID NO: 88820 - DNA, 21 bp, Artificial Sequence
  Synthetic
gccacugacaaccaccctuaa

SEQ ID NO: 88821 - DNA, 26 bp, Artificial Sequence
  Synthetic
cgtgtggaguatttggaugacagaaa

SEQ ID NO: 88822 - DNA, 23 bp, Artificial Sequence
  Synthetic
ctcccttgtucctcttcccttug

SEQ ID NO: 88823 - DNA, 23 bp, Artificial Sequence
  Synthetic
ccaaggaaagautgacugcggat

SEQ ID NO: 88824 - DNA, 20 bp, Artificial Sequence
  Synthetic
gcgtcaaaugtcgggtucac

SEQ ID NO: 88825 - DNA, 21 bp, Artificial Sequence
  Synthetic
ccagcaccgugttgataucca

SEQ ID NO: 88826 - DNA, 22 bp, Artificial Sequence
  Synthetic
ggaacttcaguggcaaggauga

SEQ ID NO: 88827 - DNA, 23 bp, Artificial Sequence
  Synthetic
ccttcugagaaggcccaaagaug

SEQ ID NO: 88828 - DNA, 25 bp, Artificial Sequence
  Synthetic
agctgtaucaaagaagtcctgtgug

SEQ ID NO: 88829 - DNA, 25 bp, Artificial Sequence
  Synthetic
cgtctcctccauactaaccctguag

SEQ ID NO: 88830 - DNA, 22 bp, Artificial Sequence
  Synthetic
gaagtttcugaggagcctccug

SEQ ID NO: 88831 - DNA, 27 bp, Artificial Sequence
  Synthetic
ttctctagctggugacttaaccctaut

SEQ ID NO: 88832 - DNA, 24 bp, Artificial Sequence
  Synthetic
accaccacacuatgtcgaaaagug

SEQ ID NO: 88833 - DNA, 22 bp, Artificial Sequence
  Synthetic
aggcctcugattcctcacugat

SEQ ID NO: 88834 - DNA, 22 bp, Artificial Sequence
  Synthetic
ccagaguacacaggaaauccca

SEQ ID NO: 88835 - DNA, 25 bp, Artificial Sequence
  Synthetic
tctctgaaucaaggagtctcctgut

SEQ ID NO: 88836 - DNA, 22 bp, Artificial Sequence
  Synthetic
ccaugcagctgaucaaacagaa

SEQ ID NO: 88837 - DNA, 21 bp, Artificial Sequence
  Synthetic
aataatctccggcugctgguc

SEQ ID NO: 88838 - DNA, 24 bp, Artificial Sequence
  Synthetic
ccuataatatcagcugcacagcct

SEQ ID NO: 88839 - DNA, 27 bp, Artificial Sequence
  Synthetic
ttctggcaaacutacatccattguagt

SEQ ID NO: 88840 - DNA, 25 bp, Artificial Sequence
  Synthetic
tctctttuggttgttcauggagcat

SEQ ID NO: 88841 - DNA, 29 bp, Artificial Sequence
  Synthetic
gcgattatacaucaggaaguaaacaaacc

SEQ ID NO: 88842 - DNA, 23 bp, Artificial Sequence
  Synthetic
cttacgaaggaaggucttuggca

SEQ ID NO: 88843 - DNA, 25 bp, Artificial Sequence
  Synthetic
tttcagttcutctcggtguccaaat

SEQ ID NO: 88844 - DNA, 24 bp, Artificial Sequence
  Synthetic
ctgcatgcugttttctcugaaacc

SEQ ID NO: 88845 - DNA, 27 bp, Artificial Sequence
  Synthetic
aaagttactttggutcttttgctgcut

SEQ ID NO: 88846 - DNA, 26 bp, Artificial Sequence
  Synthetic
ctgcttcugctttttcttctucaagt

SEQ ID NO: 88847 - DNA, 28 bp, Artificial Sequence
  Synthetic
ctatattctggcuggtctgtatcttuca

SEQ ID NO: 88848 - DNA, 21 bp, Artificial Sequence
  Synthetic
ccgtttggagucagctggtut

SEQ ID NO: 88849 - DNA, 23 bp, Artificial Sequence
  Synthetic
tgtagagcttutcagcaacguca

SEQ ID NO: 88850 - DNA, 20 bp, Artificial Sequence
  Synthetic
ccggcuggagaagcactauc

SEQ ID NO: 88851 - DNA, 21 bp, Artificial Sequence
  Synthetic
cgagtgguagccgaugaagac

SEQ ID NO: 88852 - DNA, 21 bp, Artificial Sequence
  Synthetic
catggagcugacaggtgtcua

SEQ ID NO: 88853 - DNA, 21 bp, Artificial Sequence
  Synthetic
caggtugcactcgtaguccag

SEQ ID NO: 88854 - DNA, 23 bp, Artificial Sequence
  Synthetic
agatccugcagcagacattctuc

SEQ ID NO: 88855 - DNA, 22 bp, Artificial Sequence
  Synthetic
gutctgcaggtugagaagcaac

SEQ ID NO: 88856 - DNA, 19 bp, Artificial Sequence
  Synthetic
tgtccacgugatcgucacc

SEQ ID NO: 88857 - DNA, 17 bp, Artificial Sequence
  Synthetic
gcuctuggcgccacact

SEQ ID NO: 88858 - DNA, 23 bp, Artificial Sequence
  Synthetic
agctatgtgutatacccccucca

SEQ ID NO: 88859 - DNA, 21 bp, Artificial Sequence
  Synthetic
gggcaauccccaaagguacag

SEQ ID NO: 88860 - DNA, 20 bp, Artificial Sequence
  Synthetic
cctggacagucagcaccauc

SEQ ID NO: 88861 - DNA, 19 bp, Artificial Sequence
  Synthetic
aguatccgtuggccagcaa

SEQ ID NO: 88862 - DNA, 21 bp, Artificial Sequence
  Synthetic
ggtaacaagggucgttcuggt

SEQ ID NO: 88863 - DNA, 21 bp, Artificial Sequence
  Synthetic
agtgguccagaacgtccagua

SEQ ID NO: 88864 - DNA, 18 bp, Artificial Sequence
  Synthetic
ggtccacugccccctgua

SEQ ID NO: 88865 - DNA, 19 bp, Artificial Sequence
  Synthetic
ggcagtgguccagaacguc

SEQ ID NO: 88866 - DNA, 17 bp, Artificial Sequence
  Synthetic
gcccagcuccgggaaug

SEQ ID NO: 88867 - DNA, 19 bp, Artificial Sequence
  Synthetic
cctccaucctgcctgucct

SEQ ID NO: 88868 - DNA, 23 bp, Artificial Sequence
  Synthetic
agcuatcatgcugacccaaaaca

SEQ ID NO: 88869 - DNA, 28 bp, Artificial Sequence
  Synthetic
ccagttactcuatgagcgtttuaagagg

SEQ ID NO: 88870 - DNA, 20 bp, Artificial Sequence
  Synthetic
ggcacaaauacagccccuct

SEQ ID NO: 88871 - DNA, 22 bp, Artificial Sequence
  Synthetic
cagttcagcaggaucgattugg

SEQ ID NO: 88872 - DNA, 28 bp, Artificial Sequence
  Synthetic
tcccacaactcuttcatgtgtttaauct

SEQ ID NO: 88873 - DNA, 22 bp, Artificial Sequence
  Synthetic
caagcaagggaaaaugccaugt

SEQ ID NO: 88874 - DNA, 27 bp, Artificial Sequence
  Synthetic
agatcaaaguaacatggcatttuccct

SEQ ID NO: 88875 - DNA, 25 bp, Artificial Sequence
  Synthetic
gugagctucaggacagaaagaaagt

SEQ ID NO: 88876 - DNA, 22 bp, Artificial Sequence
  Synthetic
tgtgggacuttggacaacugag

SEQ ID NO: 88877 - DNA, 22 bp, Artificial Sequence
  Synthetic
ctgacaaagcugcactcatcut

SEQ ID NO: 88878 - DNA, 27 bp, Artificial Sequence
  Synthetic
tggttttgatuccaaatgcacatucat

SEQ ID NO: 88879 - DNA, 24 bp, Artificial Sequence
  Synthetic
gcugcaaaaccaaagatucagaca

SEQ ID NO: 88880 - DNA, 21 bp, Artificial Sequence
  Synthetic
gggacaggaaacucaggguct

SEQ ID NO: 88881 - DNA, 23 bp, Artificial Sequence
  Synthetic
gggtgacccauaactctctcugt

SEQ ID NO: 88882 - DNA, 22 bp, Artificial Sequence
  Synthetic
cttcaccagaaggugtcugagg

SEQ ID NO: 88883 - DNA, 25 bp, Artificial Sequence
  Synthetic
cctgaaggaaauctgcaaaggagut

SEQ ID NO: 88884 - DNA, 21 bp, Artificial Sequence
  Synthetic
cuttgatcacctugcggagga

SEQ ID NO: 88885 - DNA, 22 bp, Artificial Sequence
  Synthetic
cacccuccctctgcttuacaat

SEQ ID NO: 88886 - DNA, 19 bp, Artificial Sequence
  Synthetic
gacgtccuccaaggcuagg

SEQ ID NO: 88887 - DNA, 18 bp, Artificial Sequence
  Synthetic
agccgtgutcgtgctgut

SEQ ID NO: 88888 - DNA, 17 bp, Artificial Sequence
  Synthetic
cgcaccugagcagcuga

SEQ ID NO: 88889 - DNA, 18 bp, Artificial Sequence
  Synthetic
ccgggcgucatgtcucat

SEQ ID NO: 88890 - DNA, 18 bp, Artificial Sequence
  Synthetic
gccaucccgagctggtuc

SEQ ID NO: 88891 - DNA, 18 bp, Artificial Sequence
  Synthetic
gcgcagugctagcuccat

SEQ ID NO: 88892 - DNA, 20 bp, Artificial Sequence
  Synthetic
cuggagacccagcctttuct

SEQ ID NO: 88893 - DNA, 28 bp, Artificial Sequence
  Synthetic
cctttcaaaaccuatacccaagtcugat

SEQ ID NO: 88894 - DNA, 28 bp, Artificial Sequence
  Synthetic
gggttgctatcgutcaaagtacagtaua

SEQ ID NO: 88895 - DNA, 26 bp, Artificial Sequence
  Synthetic
tcaccacaccaagauaaactcatguc

SEQ ID NO: 88896 - DNA, 21 bp, Artificial Sequence
  Synthetic
gcagaggugttgctcagaugt

SEQ ID NO: 88897 - DNA, 28 bp, Artificial Sequence
  Synthetic
tcccaacagaaucttaaacttctcctuc

SEQ ID NO: 88898 - DNA, 28 bp, Artificial Sequence
  Synthetic
ctacctttugaacaaggtgtctguaaac

SEQ ID NO: 88899 - DNA, 26 bp, Artificial Sequence
  Synthetic
gacgagggucatcatattcuaagcat

SEQ ID NO: 88900 - DNA, 21 bp, Artificial Sequence
  Synthetic
ccctgctcuacctccactcua

SEQ ID NO: 88901 - DNA, 28 bp, Artificial Sequence
  Synthetic
ggacacttuagctgtgaaugaaaagaaa

SEQ ID NO: 88902 - DNA, 28 bp, Artificial Sequence
  Synthetic
gtagatttauaacgggaagcactacugt

SEQ ID NO: 88903 - DNA, 28 bp, Artificial Sequence
  Synthetic
acttagagauggaaagaagaggcaagua

SEQ ID NO: 88904 - DNA, 28 bp, Artificial Sequence
  Synthetic
ggaataatccacagucataactggcaua

SEQ ID NO: 88905 - DNA, 28 bp, Artificial Sequence
  Synthetic
gcatgctttcaucaaatggattucagaa

SEQ ID NO: 88906 - DNA, 21 bp, Artificial Sequence
  Synthetic
caaggccagcaaagguagtut

SEQ ID NO: 88907 - DNA, 23 bp, Artificial Sequence
  Synthetic
gcatgaccuctctctctgttuca

SEQ ID NO: 88908 - DNA, 28 bp, Artificial Sequence
  Synthetic
gggagaacaacaucttttaattgctuca

SEQ ID NO: 88909 - DNA, 27 bp, Artificial Sequence
  Synthetic
ttcctcttctuacagagaccuaaggac

SEQ ID NO: 88910 - DNA, 23 bp, Artificial Sequence
  Synthetic
cgcccatctutgtgagataccua

SEQ ID NO: 88911 - DNA, 23 bp, Artificial Sequence
  Synthetic
ccttcccccuatgagauggagat

SEQ ID NO: 88912 - DNA, 17 bp, Artificial Sequence
  Synthetic
ccctgcugcctctccut

SEQ ID NO: 88913 - DNA, 17 bp, Artificial Sequence
  Synthetic
cgctggcuggcatccut

SEQ ID NO: 88914 - DNA, 23 bp, Artificial Sequence
  Synthetic
ccaacaagcaaagautcaggcut

SEQ ID NO: 88915 - DNA, 23 bp, Artificial Sequence
  Synthetic
caaagacacagguagctcacuca

SEQ ID NO: 88916 - DNA, 26 bp, Artificial Sequence
  Synthetic
cactctctattucctgcctcctttut

SEQ ID NO: 88917 - DNA, 22 bp, Artificial Sequence
  Synthetic
gtgcaagcaccugaaauaagca

SEQ ID NO: 88918 - DNA, 28 bp, Artificial Sequence
  Synthetic
cacagctaaagugtccttaatggaatug

SEQ ID NO: 88919 - DNA, 27 bp, Artificial Sequence
  Synthetic
acaagtaccagautccctaacagauga

SEQ ID NO: 88920 - DNA, 20 bp, Artificial Sequence
  Synthetic
gggcagacucaccatcagua

SEQ ID NO: 88921 - DNA, 22 bp, Artificial Sequence
  Synthetic
ggatcttgtgauctgcccgtuc

SEQ ID NO: 88922 - DNA, 18 bp, Artificial Sequence
  Synthetic
acctcugccccctcctut

SEQ ID NO: 88923 - DNA, 18 bp, Artificial Sequence
  Synthetic
ggctguccgctcagagug

SEQ ID NO: 88924 - DNA, 28 bp, Artificial Sequence
  Synthetic
tccaagtcttttuctttgcacctacuaa

SEQ ID NO: 88925 - DNA, 20 bp, Artificial Sequence
  Synthetic
gggcagaauctgattuggca

SEQ ID NO: 88926 - DNA, 21 bp, Artificial Sequence
  Synthetic
tcagautcugccccaggagat

SEQ ID NO: 88927 - DNA, 29 bp, Artificial Sequence
  Synthetic
tccgaatttauaacacatgatagccauga

SEQ ID NO: 88928 - DNA, 28 bp, Artificial Sequence
  Synthetic
ctgccccaggagauccatttatattuaa

SEQ ID NO: 88929 - DNA, 30 bp, Artificial Sequence
  Synthetic
gctagatgaatugcctatttttaaguccga

SEQ ID NO: 88930 - DNA, 19 bp, Artificial Sequence
  Synthetic
agaacucagagggccugga

SEQ ID NO: 88931 - DNA, 19 bp, Artificial Sequence
  Synthetic
cgagggcugtgtccatgug

SEQ ID NO: 88932 - DNA, 20 bp, Artificial Sequence
  Synthetic
tgcccaatuccaccctugac

SEQ ID NO: 88933 - DNA, 25 bp, Artificial Sequence
  Synthetic
gcagaataggtutctcactgcacut

SEQ ID NO: 88934 - DNA, 25 bp, Artificial Sequence
  Synthetic
caccaccccutctaattgtgtuaca

SEQ ID NO: 88935 - DNA, 28 bp, Artificial Sequence
  Synthetic
agcaatgcaucaaccaataaccatttut

SEQ ID NO: 88936 - DNA, 29 bp, Artificial Sequence
  Synthetic
tcttggacttguaacatctaatggactuc

SEQ ID NO: 88937 - DNA, 24 bp, Artificial Sequence
  Synthetic
tggctagautcttctugggcaaaa

SEQ ID NO: 88938 - DNA, 28 bp, Artificial Sequence
  Synthetic
ggtctaaatacuagtgagttttcggugt

SEQ ID NO: 88939 - DNA, 20 bp, Artificial Sequence
  Synthetic
gaatggacggccutcctuca

SEQ ID NO: 88940 - DNA, 26 bp, Artificial Sequence
  Synthetic
agautgaataugaacacagagcacca

SEQ ID NO: 88941 - DNA, 20 bp, Artificial Sequence
  Synthetic
gctgtccucagcccaactua

SEQ ID NO: 88942 - DNA, 22 bp, Artificial Sequence
  Synthetic
cctgccaugctacctagauacc

SEQ ID NO: 88943 - DNA, 21 bp, Artificial Sequence
  Synthetic
gcactggccugaactgtugaa

SEQ ID NO: 88944 - DNA, 26 bp, Artificial Sequence
  Synthetic
gaaggtataguggagtaggguaagca

SEQ ID NO: 88945 - DNA, 27 bp, Artificial Sequence
  Synthetic
gaaataggucagaaaaccagtgtcuct

SEQ ID NO: 88946 - DNA, 26 bp, Artificial Sequence
  Synthetic
ggagtatcacuttgcttttcatugcc

SEQ ID NO: 88947 - DNA, 23 bp, Artificial Sequence
  Synthetic
gaccaatgtucaaaggtgtugct

SEQ ID NO: 88948 - DNA, 21 bp, Artificial Sequence
  Synthetic
caatcaugggagccgaaaugg

SEQ ID NO: 88949 - DNA, 29 bp, Artificial Sequence
  Synthetic
tgaaataggatuaggatcaggacugaaca

SEQ ID NO: 88950 - DNA, 23 bp, Artificial Sequence
  Synthetic
agcttcctugctttaagtugcct

SEQ ID NO: 88951 - DNA, 25 bp, Artificial Sequence
  Synthetic
catcttggaagcauaagctctcuca

SEQ ID NO: 88952 - DNA, 22 bp, Artificial Sequence
  Synthetic
gtgtaggaguctgcctgttuga

SEQ ID NO: 88953 - DNA, 29 bp, Artificial Sequence
  Synthetic
tctttggacacaautcttcattagctuga

SEQ ID NO: 88954 - DNA, 22 bp, Artificial Sequence
  Synthetic
gccagaccuaagagcaaucagt

SEQ ID NO: 88955 - DNA, 22 bp, Artificial Sequence
  Synthetic
ggccatcuacaagcagucacag

SEQ ID NO: 88956 - DNA, 25 bp, Artificial Sequence
  Synthetic
attctgtcagcautactctgtgucc

SEQ ID NO: 88957 - DNA, 27 bp, Artificial Sequence
  Synthetic
ggacucgccagagacatctauaaaaat

SEQ ID NO: 88958 - DNA, 24 bp, Artificial Sequence
  Synthetic
ccagaatgaggugcagaacaucaa

SEQ ID NO: 88959 - DNA, 21 bp, Artificial Sequence
  Synthetic
gatgtagctgugcatgtccug

SEQ ID NO: 88960 - DNA, 27 bp, Artificial Sequence
  Synthetic
ctgattaaatcuggctggtuccaaaac

SEQ ID NO: 88961 - DNA, 25 bp, Artificial Sequence
  Synthetic
tctgaaattucccagaatgcacuga

SEQ ID NO: 88962 - DNA, 20 bp, Artificial Sequence
  Synthetic
cccacauaccacacgtgcuc

SEQ ID NO: 88963 - DNA, 23 bp, Artificial Sequence
  Synthetic
gctacgagaucaaggaggacauc

SEQ ID NO: 88964 - DNA, 18 bp, Artificial Sequence
  Synthetic
ccagtguccccucggaga

SEQ ID NO: 88965 - DNA, 20 bp, Artificial Sequence
  Synthetic
tgcauggagcagaggugaac

SEQ ID NO: 88966 - DNA, 22 bp, Artificial Sequence
  Synthetic
gaggagaaggaggaugcagaug

SEQ ID NO: 88967 - DNA, 19 bp, Artificial Sequence
  Synthetic
ccagcacgagcguatggua

SEQ ID NO: 88968 - DNA, 26 bp, Artificial Sequence
  Synthetic
ttaguaaagaaggcaaaagaggugct

SEQ ID NO: 88969 - DNA, 27 bp, Artificial Sequence
  Synthetic
gactgccctugttcttttacatttuca

SEQ ID NO: 88970 - DNA, 23 bp, Artificial Sequence
  Synthetic
acagaatcucagagcctcaucct

SEQ ID NO: 88971 - DNA, 28 bp, Artificial Sequence
  Synthetic
acttgtgagaggccuataaactggtaua

SEQ ID NO: 88972 - DNA, 20 bp, Artificial Sequence
  Synthetic
cccugggauggaggacagat

SEQ ID NO: 88973 - DNA, 19 bp, Artificial Sequence
  Synthetic
ggagcgacutctcctccug

SEQ ID NO: 88974 - DNA, 24 bp, Artificial Sequence
  Synthetic
gccttugggcaaaaatcgacuaga

SEQ ID NO: 88975 - DNA, 28 bp, Artificial Sequence
  Synthetic
actgtgcaguccatttgaaagtaacuat

SEQ ID NO: 88976 - DNA, 24 bp, Artificial Sequence
  Synthetic
agaacagccgaccacuataguaca

SEQ ID NO: 88977 - DNA, 25 bp, Artificial Sequence
  Synthetic
accacuccagaaacacacactaaut

SEQ ID NO: 88978 - DNA, 20 bp, Artificial Sequence
  Synthetic
ctctucacagaggcugagca

SEQ ID NO: 88979 - DNA, 20 bp, Artificial Sequence
  Synthetic
cccttcccuctggctctcut

SEQ ID NO: 88980 - DNA, 23 bp, Artificial Sequence
  Synthetic
gactctttuctgttgcctugcag

SEQ ID NO: 88981 - DNA, 24 bp, Artificial Sequence
  Synthetic
tggacutttccttguacccaacaa

SEQ ID NO: 88982 - DNA, 24 bp, Artificial Sequence
  Synthetic
gtcctttctagucgtcctcaguct

SEQ ID NO: 88983 - DNA, 20 bp, Artificial Sequence
  Synthetic
agaggagcuggacttgcuca

SEQ ID NO: 88984 - DNA, 22 bp, Artificial Sequence
  Synthetic
cgtcatcguctgctgctgtuat

SEQ ID NO: 88985 - DNA, 26 bp, Artificial Sequence
  Synthetic
ttcagaattgcugacagagcauagaa

SEQ ID NO: 88986 - DNA, 21 bp, Artificial Sequence
  Synthetic
cctcacaaccuccgtcatgug

SEQ ID NO: 88987 - DNA, 25 bp, Artificial Sequence
  Synthetic
caactctgtcuccttcctcttccua

SEQ ID NO: 88988 - DNA, 20 bp, Artificial Sequence
  Synthetic
tctgtggaccuctcctucca

SEQ ID NO: 88989 - DNA, 18 bp, Artificial Sequence
  Synthetic
agcacttuccccguccag

SEQ ID NO: 88990 - DNA, 24 bp, Artificial Sequence
  Synthetic
caaagattacugggcagtcaggut

SEQ ID NO: 88991 - DNA, 22 bp, Artificial Sequence
  Synthetic
caggaggacacugauaaagcca

SEQ ID NO: 88992 - DNA, 18 bp, Artificial Sequence
  Synthetic
cccggucacagucaggga

SEQ ID NO: 88993 - DNA, 18 bp, Artificial Sequence
  Synthetic
tcttgccccugcgtgaug

SEQ ID NO: 88994 - DNA, 27 bp, Artificial Sequence
  Synthetic
ctctctcaaguacagatgattgctugt

SEQ ID NO: 88995 - DNA, 28 bp, Artificial Sequence
  Synthetic
tggtggtgttugagtattgtatgtctut

SEQ ID NO: 88996 - DNA, 22 bp, Artificial Sequence
  Synthetic
cgaggtuacaccatcuccgact

SEQ ID NO: 88997 - DNA, 17 bp, Artificial Sequence
  Synthetic
ccgcaggagagguguca

SEQ ID NO: 88998 - DNA, 21 bp, Artificial Sequence
  Synthetic
cgctugcacactgaguaggag

SEQ ID NO: 88999 - DNA, 21 bp, Artificial Sequence
  Synthetic
ccacattcugtgtgcgtguag

SEQ ID NO: 89000 - DNA, 28 bp, Artificial Sequence
  Synthetic
ggccttccccuctctttctatagtaauc

SEQ ID NO: 89001 - DNA, 22 bp, Artificial Sequence
  Synthetic
ggcagcuagaaattgccttgut

SEQ ID NO: 89002 - DNA, 22 bp, Artificial Sequence
  Synthetic
tcgagtgggaautcctggguaa

SEQ ID NO: 89003 - DNA, 22 bp, Artificial Sequence
  Synthetic
cagugactgatuccccagagag

SEQ ID NO: 89004 - DNA, 33 bp, Artificial Sequence
  Synthetic
tctatggctgttatucagatatttaagtagaug

SEQ ID NO: 89005 - DNA, 27 bp, Artificial Sequence
  Synthetic
tcaacagtatgugggttcaatuccaat

SEQ ID NO: 89006 - DNA, 24 bp, Artificial Sequence
  Synthetic
tggactgguatagtcttucacgga

SEQ ID NO: 89007 - DNA, 28 bp, Artificial Sequence
  Synthetic
acctactagggcuacttctttgattuct

SEQ ID NO: 89008 - DNA, 28 bp, Artificial Sequence
  Synthetic
ctctctgagguattgtaatgcttcauca

SEQ ID NO: 89009 - DNA, 26 bp, Artificial Sequence
  Synthetic
auactccaugaacagccaaaagagaa

SEQ ID NO: 89010 - DNA, 21 bp, Artificial Sequence
  Synthetic
ccagagacutgtggagctuca

SEQ ID NO: 89011 - DNA, 21 bp, Artificial Sequence
  Synthetic
acatguaagggagagctugga

SEQ ID NO: 89012 - DNA, 24 bp, Artificial Sequence
  Synthetic
gactacaguagatgtggtcauggg

SEQ ID NO: 89013 - DNA, 28 bp, Artificial Sequence
  Synthetic
actaaaatctcctutcacgtgatcagut

SEQ ID NO: 89014 - DNA, 22 bp, Artificial Sequence
  Synthetic
gaagagaauctgggugacagca

SEQ ID NO: 89015 - DNA, 26 bp, Artificial Sequence
  Synthetic
gtcaaaagctugtagagtctctucct

SEQ ID NO: 89016 - DNA, 26 bp, Artificial Sequence
  Synthetic
guggacacaaaacaagaaaucacagt

SEQ ID NO: 89017 - DNA, 29 bp, Artificial Sequence
  Synthetic
acatgtttaatgccauttcttacggttug

SEQ ID NO: 89018 - DNA, 21 bp, Artificial Sequence
  Synthetic
tcctctccaccuaaccagugt

SEQ ID NO: 89019 - DNA, 22 bp, Artificial Sequence
  Synthetic
cctgagagtuagtgctgacucc

SEQ ID NO: 89020 - DNA, 21 bp, Artificial Sequence
  Synthetic
ccaucaagagaucggcggaaa

SEQ ID NO: 89021 - DNA, 26 bp, Artificial Sequence
  Synthetic
atcatguggacaaaatugcccaaaat

SEQ ID NO: 89022 - DNA, 28 bp, Artificial Sequence
  Synthetic
ttcacactccaucataaatcatcaugct

SEQ ID NO: 89023 - DNA, 28 bp, Artificial Sequence
  Synthetic
cacttgctccaaugttaatctcctauct

SEQ ID NO: 89024 - DNA, 29 bp, Artificial Sequence
  Synthetic
aagaaacgaaccaaauctccaaaattgut

SEQ ID NO: 89025 - DNA, 28 bp, Artificial Sequence
  Synthetic
tccaatgtctugccgaattcttcaauat

SEQ ID NO: 89026 - DNA, 23 bp, Artificial Sequence
  Synthetic
gccagugagaaactatcctugct

SEQ ID NO: 89027 - DNA, 22 bp, Artificial Sequence
  Synthetic
aaagagcuggcaaccaaagtug

SEQ ID NO: 89028 - DNA, 22 bp, Artificial Sequence
  Synthetic
catatgcauggccccaatcuca

SEQ ID NO: 89029 - DNA, 25 bp, Artificial Sequence
  Synthetic
ggccttggugaaaatagcauagagg

SEQ ID NO: 89030 - DNA, 27 bp, Artificial Sequence
  Synthetic
gtacactguttaccagcugaaacaaat

SEQ ID NO: 89031 - DNA, 24 bp, Artificial Sequence
  Synthetic
ctccccttgagaugatcacaacuc

SEQ ID NO: 89032 - DNA, 27 bp, Artificial Sequence
  Synthetic
caagcatccacaaagucacatgaauat

SEQ ID NO: 89033 - DNA, 27 bp, Artificial Sequence
  Synthetic
cacttcattatttcutggtggcaacug

SEQ ID NO: 89034 - DNA, 28 bp, Artificial Sequence
  Synthetic
gttgttattucagaccaaaaccttgugt

SEQ ID NO: 89035 - DNA, 23 bp, Artificial Sequence
  Synthetic
gactaatcuggaaggcctugcat

SEQ ID NO: 89036 - DNA, 28 bp, Artificial Sequence
  Synthetic
tcttgacaatugttccaatgattugcat

SEQ ID NO: 89037 - DNA, 26 bp, Artificial Sequence
  Synthetic
caacatcttccucaatttgggtaugg

SEQ ID NO: 89038 - DNA, 26 bp, Artificial Sequence
  Synthetic
gctatgagctcugttgctactgauat

SEQ ID NO: 89039 - DNA, 27 bp, Artificial Sequence
  Synthetic
tggttgatcaccutcattgtgtauact

SEQ ID NO: 89040 - DNA, 22 bp, Artificial Sequence
  Synthetic
cccagaguccttaaccugcaat

SEQ ID NO: 89041 - DNA, 28 bp, Artificial Sequence
  Synthetic
atcacaatcaugttgcttttcuaaaccc

SEQ ID NO: 89042 - DNA, 22 bp, Artificial Sequence
  Synthetic
gaucattggtttuggccaggag

SEQ ID NO: 89043 - DNA, 28 bp, Artificial Sequence
  Synthetic
caattctcaggaacutgtagcccatuat

SEQ ID NO: 89044 - DNA, 29 bp, Artificial Sequence
  Synthetic
cgttcaaccaaguctcttatcgttaauga

SEQ ID NO: 89045 - DNA, 25 bp, Artificial Sequence
  Synthetic
agctattaagcaaacuggctgtuct

SEQ ID NO: 89046 - DNA, 27 bp, Artificial Sequence
  Synthetic
cagatgatctaucatgtcaggaugcaa

SEQ ID NO: 89047 - DNA, 24 bp, Artificial Sequence
  Synthetic
aggcttgtuggtgtacttucaact

SEQ ID NO: 89048 - DNA, 25 bp, Artificial Sequence
  Synthetic
gcgacatttggauagcatcgaaaut

SEQ ID NO: 89049 - DNA, 24 bp, Artificial Sequence
  Synthetic
ctgagtgaguggtggaaatacugt

SEQ ID NO: 89050 - DNA, 27 bp, Artificial Sequence
  Synthetic
cagttgacacaacutgcttcgataaut

SEQ ID NO: 89051 - DNA, 27 bp, Artificial Sequence
  Synthetic
acttgaaggtgguttctgttgtatugt

SEQ ID NO: 89052 - DNA, 26 bp, Artificial Sequence
  Synthetic
ggtatctctcaugaaacaccctuacc

SEQ ID NO: 89053 - DNA, 21 bp, Artificial Sequence
  Synthetic
tttctgtgcacugtccacugt

SEQ ID NO: 89054 - DNA, 24 bp, Artificial Sequence
  Synthetic
ccttcctgutcctccaaauccaat

SEQ ID NO: 89055 - DNA, 27 bp, Artificial Sequence
  Synthetic
ctgagtttgatgaugattgaggagugt

SEQ ID NO: 89056 - DNA, 21 bp, Artificial Sequence
  Synthetic
gggagtttugccaaggcctua

SEQ ID NO: 89057 - DNA, 22 bp, Artificial Sequence
  Synthetic
ccagtgttagugccatcagcuc

SEQ ID NO: 89058 - DNA, 22 bp, Artificial Sequence
  Synthetic
tgagtucaacccgtgugaagac

SEQ ID NO: 89059 - DNA, 23 bp, Artificial Sequence
  Synthetic
tgtagtggcuggtgaggagaaua

SEQ ID NO: 89060 - DNA, 28 bp, Artificial Sequence
  Synthetic
ccaaatccaaaaaggutccactttcuaa

SEQ ID NO: 89061 - DNA, 21 bp, Artificial Sequence
  Synthetic
aaggactugggtgtctugcat

SEQ ID NO: 89062 - DNA, 26 bp, Artificial Sequence
  Synthetic
cagcaaaaauacaaucaggagaaggg

SEQ ID NO: 89063 - DNA, 27 bp, Artificial Sequence
  Synthetic
ttgataacttacaacugtgggcttcut

SEQ ID NO: 89064 - DNA, 28 bp, Artificial Sequence
  Synthetic
ttttcctactcugtagctatgtcucgat

SEQ ID NO: 89065 - DNA, 24 bp, Artificial Sequence
  Synthetic
ttccagggcutaaagtcttgacug

SEQ ID NO: 89066 - DNA, 25 bp, Artificial Sequence
  Synthetic
gcactcagaaaaugattcggtucca

SEQ ID NO: 89067 - DNA, 26 bp, Artificial Sequence
  Synthetic
ccactgtggguagggatattgatcut

SEQ ID NO: 89068 - DNA, 23 bp, Artificial Sequence
  Synthetic
cgagguccattaugcaacccaaa

SEQ ID NO: 89069 - DNA, 24 bp, Artificial Sequence
  Synthetic
ttcccgtuggattccgtttuaaga

SEQ ID NO: 89070 - DNA, 24 bp, Artificial Sequence
  Synthetic
acttaactccugtgccaatccaut

SEQ ID NO: 89071 - DNA, 28 bp, Artificial Sequence
  Synthetic
gtgggtaacctuttgaacctgaatauca

SEQ ID NO: 89072 - DNA, 22 bp, Artificial Sequence
  Synthetic
cttgcaguccagggtgctauac

SEQ ID NO: 89073 - DNA, 23 bp, Artificial Sequence
  Synthetic
gtgttagcuggcaggaagctuat

SEQ ID NO: 89074 - DNA, 23 bp, Artificial Sequence
  Synthetic
gagccaacaaaaaugtggcauca

SEQ ID NO: 89075 - DNA, 21 bp, Artificial Sequence
  Synthetic
ctgcuccagctcttgucagaa

SEQ ID NO: 89076 - DNA, 25 bp, Artificial Sequence
  Synthetic
gttgggtucacgagtagaatctcut

SEQ ID NO: 89077 - DNA, 28 bp, Artificial Sequence
  Synthetic
tttattacagagguaggagacguagacc

SEQ ID NO: 89078 - DNA, 24 bp, Artificial Sequence
  Synthetic
agagaaggaugaggaaucagagca

SEQ ID NO: 89079 - DNA, 25 bp, Artificial Sequence
  Synthetic
cgtgttgcaugaactttgttttucc

SEQ ID NO: 89080 - DNA, 28 bp, Artificial Sequence
  Synthetic
gttcatccagttutggaacatcagaaut

SEQ ID NO: 89081 - DNA, 24 bp, Artificial Sequence
  Synthetic
agaacacaugcacacaagtacuca

SEQ ID NO: 89082 - DNA, 24 bp, Artificial Sequence
  Synthetic
ttggtcccaaagagutgaggatuc

SEQ ID NO: 89083 - DNA, 21 bp, Artificial Sequence
  Synthetic
cacacugtgtccugagcaaac

SEQ ID NO: 89084 - DNA, 19 bp, Artificial Sequence
  Synthetic
cuaaaccacccgugccagt

SEQ ID NO: 89085 - DNA, 22 bp, Artificial Sequence
  Synthetic
cttcguagcgccattguaaacc

SEQ ID NO: 89086 - DNA, 21 bp, Artificial Sequence
  Synthetic
agagtccugtaccacucacga

SEQ ID NO: 89087 - DNA, 24 bp, Artificial Sequence
  Synthetic
cccttgtgaguccattaccttuca

SEQ ID NO: 89088 - DNA, 21 bp, Artificial Sequence
  Synthetic
gggcaatguctttgtccugct

SEQ ID NO: 89089 - DNA, 24 bp, Artificial Sequence
  Synthetic
gcatggttguagtactcagaguga

SEQ ID NO: 89090 - DNA, 20 bp, Artificial Sequence
  Synthetic
cacttggcugccctguagag

SEQ ID NO: 89091 - DNA, 22 bp, Artificial Sequence
  Synthetic
ccaatcttcugagatgcuccgt

SEQ ID NO: 89092 - DNA, 20 bp, Artificial Sequence
  Synthetic
cagtgggaugggaccatgug

SEQ ID NO: 89093 - DNA, 28 bp, Artificial Sequence
  Synthetic
acctcgatuccattatcatttacugcaa

SEQ ID NO: 89094 - DNA, 27 bp, Artificial Sequence
  Synthetic
tctgagacaggaacugttaatgtccua

SEQ ID NO: 89095 - DNA, 26 bp, Artificial Sequence
  Synthetic
cauagaggacaacacaguaagaacca

SEQ ID NO: 89096 - DNA, 17 bp, Artificial Sequence
  Synthetic
gugcaggcaggtucgga

SEQ ID NO: 89097 - DNA, 19 bp, Artificial Sequence
  Synthetic
gctcctcaucaggcacugt

SEQ ID NO: 89098 - DNA, 21 bp, Artificial Sequence
  Synthetic
accaacugtggtgaaugcact

SEQ ID NO: 89099 - DNA, 21 bp, Artificial Sequence
  Synthetic
gcccctugactgtttgctuac

SEQ ID NO: 89100 - DNA, 24 bp, Artificial Sequence
  Synthetic
cacagatgugggaccuaggaaaag

SEQ ID NO: 89101 - DNA, 26 bp, Artificial Sequence
  Synthetic
tgacaaacagaaagaugggtgaaugt

SEQ ID NO: 89102 - DNA, 25 bp, Artificial Sequence
  Synthetic
aatgauaccagtggtuccccaaaaa

SEQ ID NO: 89103 - DNA, 27 bp, Artificial Sequence
  Synthetic
tgggatccagguaagaatcagauaact

SEQ ID NO: 89104 - DNA, 21 bp, Artificial Sequence
  Synthetic
ggutccuccaaagaacagcac

SEQ ID NO: 89105 - DNA, 23 bp, Artificial Sequence
  Synthetic
ttctgagattuggccttgctuct

SEQ ID NO: 89106 - DNA, 28 bp, Artificial Sequence
  Synthetic
caatgtagaaaaugagaagcaggtucat

SEQ ID NO: 89107 - DNA, 23 bp, Artificial Sequence
  Synthetic
ctctgtcugatttgcuaggacca

SEQ ID NO: 89108 - DNA, 21 bp, Artificial Sequence
  Synthetic
gaaactgctuggctcttggug

SEQ ID NO: 89109 - DNA, 22 bp, Artificial Sequence
  Synthetic
caaaggccugtccuaggaaaga

SEQ ID NO: 89110 - DNA, 28 bp, Artificial Sequence
  Synthetic
caccaaaacttaaucactgtccatctut

SEQ ID NO: 89111 - DNA, 23 bp, Artificial Sequence
  Synthetic
catgtgacttugtggatgctugg

SEQ ID NO: 89112 - DNA, 28 bp, Artificial Sequence
  Synthetic
ccaactcacataucaactcagctacuaa

SEQ ID NO: 89113 - DNA, 28 bp, Artificial Sequence
  Synthetic
tgagcaatacttutattggtgtcaauct

SEQ ID NO: 89114 - DNA, 20 bp, Artificial Sequence
  Synthetic
ctgtgtcaucgtgcctggua

SEQ ID NO: 89115 - DNA, 17 bp, Artificial Sequence
  Synthetic
gggtcucacaggccuct

SEQ ID NO: 89116 - DNA, 27 bp, Artificial Sequence
  Synthetic
accattggatucactcagcttattuca

SEQ ID NO: 89117 - DNA, 19 bp, Artificial Sequence
  Synthetic
tcgccugccatcacgtuag

SEQ ID NO: 89118 - DNA, 26 bp, Artificial Sequence
  Synthetic
gattgaaaacucccatcuaaccccaa

SEQ ID NO: 89119 - DNA, 28 bp, Artificial Sequence
  Synthetic
catgggatuggaatgcatatucaagaaa

SEQ ID NO: 89120 - DNA, 22 bp, Artificial Sequence
  Synthetic
tccttcaccaaguttgcauggt

SEQ ID NO: 89121 - DNA, 28 bp, Artificial Sequence
  Synthetic
gccaatcctaugcagtctcataacttua

SEQ ID NO: 89122 - DNA, 22 bp, Artificial Sequence
  Synthetic
agcaacggugtggtacttuagg

SEQ ID NO: 89123 - DNA, 28 bp, Artificial Sequence
  Synthetic
acccttcatctacuacactgatatggut

SEQ ID NO: 89124 - DNA, 28 bp, Artificial Sequence
  Synthetic
tctcatttgtatugttaccacggcuaaa

SEQ ID NO: 89125 - DNA, 27 bp, Artificial Sequence
  Synthetic
atgaaatagugaaagaaguggaagcca

SEQ ID NO: 89126 - DNA, 22 bp, Artificial Sequence
  Synthetic
ggtauagcccaactctcucagg

SEQ ID NO: 89127 - DNA, 25 bp, Artificial Sequence
  Synthetic
tcttctttuccaaagtcgguagcaa

SEQ ID NO: 89128 - DNA, 22 bp, Artificial Sequence
  Synthetic
tggcgttucaaaattggtgcut

SEQ ID NO: 89129 - DNA, 25 bp, Artificial Sequence
  Synthetic
acaaccctttguctactttcagcuc

SEQ ID NO: 89130 - DNA, 25 bp, Artificial Sequence
  Synthetic
gctactgcaaaucaacaggaagtut

SEQ ID NO: 89131 - DNA, 22 bp, Artificial Sequence
  Synthetic
agacctcuccttggacuggaat

SEQ ID NO: 89132 - DNA, 22 bp, Artificial Sequence
  Synthetic
gccctcucacccttcactguaa

SEQ ID NO: 89133 - DNA, 19 bp, Artificial Sequence
  Synthetic
ggtacttcuggcgguggaa

SEQ ID NO: 89134 - DNA, 19 bp, Artificial Sequence
  Synthetic
cctucacacgccugcagat

SEQ ID NO: 89135 - DNA, 22 bp, Artificial Sequence
  Synthetic
ggttcuggaaccaggtttugac

SEQ ID NO: 89136 - DNA, 23 bp, Artificial Sequence
  Synthetic
ccccagatcuaccagagatucct

SEQ ID NO: 89137 - DNA, 26 bp, Artificial Sequence
  Synthetic
atttggaaggagcautaaagguagca

SEQ ID NO: 89138 - DNA, 19 bp, Artificial Sequence
  Synthetic
gccaaggcgcucaaaauga

SEQ ID NO: 89139 - DNA, 20 bp, Artificial Sequence
  Synthetic
caaugaaccgagagcugcct

SEQ ID NO: 89140 - DNA, 26 bp, Artificial Sequence
  Synthetic
gtacctccucttcttcctauaccact

SEQ ID NO: 89141 - DNA, 25 bp, Artificial Sequence
  Synthetic
ggctgttcttuctgttcttgcagua

SEQ ID NO: 89142 - DNA, 21 bp, Artificial Sequence
  Synthetic
ccaaacggguctgaagcaugt

SEQ ID NO: 89143 - DNA, 28 bp, Artificial Sequence
  Synthetic
tccacaggauagattcagtttccuaagt

SEQ ID NO: 89144 - DNA, 27 bp, Artificial Sequence
  Synthetic
ctttaacattcuctctctttccuccca

SEQ ID NO: 89145 - DNA, 21 bp, Artificial Sequence
  Synthetic
ctgcatgcugctgatgtugaa

SEQ ID NO: 89146 - DNA, 27 bp, Artificial Sequence
  Synthetic
ttcaaggatauggaaagagtttgugct

SEQ ID NO: 89147 - DNA, 28 bp, Artificial Sequence
  Synthetic
aaagagggtgauattgtggcaatgauaa

SEQ ID NO: 89148 - DNA, 23 bp, Artificial Sequence
  Synthetic
ggtgtttgggauggaatggugat

SEQ ID NO: 89149 - DNA, 24 bp, Artificial Sequence
  Synthetic
guagagtttgucagccagagacag

SEQ ID NO: 89150 - DNA, 28 bp, Artificial Sequence
  Synthetic
gaaaaatgacacaacaagutacagguga

SEQ ID NO: 89151 - DNA, 23 bp, Artificial Sequence
  Synthetic
agcaacggagagcaaugatgaut

SEQ ID NO: 89152 - DNA, 21 bp, Artificial Sequence
  Synthetic
gctcctucgcagcttguagag

SEQ ID NO: 89153 - DNA, 27 bp, Artificial Sequence
  Synthetic
ccaatgtgtatcuttggacaagtgcua

SEQ ID NO: 89154 - DNA, 20 bp, Artificial Sequence
  Synthetic
gugacgggttuggacacact

SEQ ID NO: 89155 - DNA, 23 bp, Artificial Sequence
  Synthetic
gaatutgaccaagtucaccagca

SEQ ID NO: 89156 - DNA, 22 bp, Artificial Sequence
  Synthetic
catcctggtgugggaaggaauc

SEQ ID NO: 89157 - DNA, 21 bp, Artificial Sequence
  Synthetic
tutcctatcaguggccgcaaa

SEQ ID NO: 89158 - DNA, 25 bp, Artificial Sequence
  Synthetic
acctgtttttccutgttcagggaut

SEQ ID NO: 89159 - DNA, 25 bp, Artificial Sequence
  Synthetic
tttuaggtcagccuagcaacaaaga

SEQ ID NO: 89160 - DNA, 25 bp, Artificial Sequence
  Synthetic
gctgactcacaagaucatccacauc

SEQ ID NO: 89161 - DNA, 33 bp, Artificial Sequence
  Synthetic
tgtatttgaaccutaatgctaatttcauaagct

SEQ ID NO: 89162 - DNA, 22 bp, Artificial Sequence
  Synthetic
ttgtccucggaattccttcugg

SEQ ID NO: 89163 - DNA, 27 bp, Artificial Sequence
  Synthetic
aggaccattaucagaacaggatcucaa

SEQ ID NO: 89164 - DNA, 28 bp, Artificial Sequence
  Synthetic
cactgtctctaugcacataacatttguc

SEQ ID NO: 89165 - DNA, 28 bp, Artificial Sequence
  Synthetic
cactttaattgggutgcatttctgagut

SEQ ID NO: 89166 - DNA, 20 bp, Artificial Sequence
  Synthetic
ggagaaauagccccgagucc

SEQ ID NO: 89167 - DNA, 25 bp, Artificial Sequence
  Synthetic
gttgaatatccutgcaggtgacuct

SEQ ID NO: 89168 - DNA, 20 bp, Artificial Sequence
  Synthetic
gccaucaggaggaggactuc

SEQ ID NO: 89169 - DNA, 25 bp, Artificial Sequence
  Synthetic
gttattgagcugcttttgtgcacut

SEQ ID NO: 89170 - DNA, 23 bp, Artificial Sequence
  Synthetic
gtcaaugagccaaccaccctaut

SEQ ID NO: 89171 - DNA, 24 bp, Artificial Sequence
  Synthetic
gatcttcttctuccctgagcgtut

SEQ ID NO: 89172 - DNA, 21 bp, Artificial Sequence
  Synthetic
ggaccuagcccagctgauaag

SEQ ID NO: 89173 - DNA, 22 bp, Artificial Sequence
  Synthetic
tcagctguccacttgttcaugt

SEQ ID NO: 89174 - DNA, 28 bp, Artificial Sequence
  Synthetic
gagacttttacuaattcaggcctaugct

SEQ ID NO: 89175 - DNA, 28 bp, Artificial Sequence
  Synthetic
ttttcugatctagactuccaaagcacaa

SEQ ID NO: 89176 - DNA, 27 bp, Artificial Sequence
  Synthetic
gatcagagttatcugttccttgtgcut

SEQ ID NO: 89177 - DNA, 24 bp, Artificial Sequence
  Synthetic
cggaatctgugaaaatccccctut

SEQ ID NO: 89178 - DNA, 24 bp, Artificial Sequence
  Synthetic
ccaauacacacaaagcatcauggt

SEQ ID NO: 89179 - DNA, 28 bp, Artificial Sequence
  Synthetic
tgtacacaatguccacagaagttttuct

SEQ ID NO: 89180 - DNA, 21 bp, Artificial Sequence
  Synthetic
gcaccactuctcaccagucac

SEQ ID NO: 89181 - DNA, 26 bp, Artificial Sequence
  Synthetic
agttttcatggcuacccttgactuac

SEQ ID NO: 89182 - DNA, 18 bp, Artificial Sequence
  Synthetic
ccgtgutggcctucagag

SEQ ID NO: 89183 - DNA, 20 bp, Artificial Sequence
  Synthetic
atggcgaacacacuggcaua

SEQ ID NO: 89184 - DNA, 22 bp, Artificial Sequence
  Synthetic
attaccugcagctctgttugga

SEQ ID NO: 89185 - DNA, 29 bp, Artificial Sequence
  Synthetic
cggaaacaaaauaacccaagttcatcaut

SEQ ID NO: 89186 - DNA, 20 bp, Artificial Sequence
  Synthetic
ccgcaccuctacaggaacut

SEQ ID NO: 89187 - DNA, 18 bp, Artificial Sequence
  Synthetic
tttcugccgcaaggccua

SEQ ID NO: 89188 - DNA, 23 bp, Artificial Sequence
  Synthetic
gggactguagatgggugaaaaga

SEQ ID NO: 89189 - DNA, 22 bp, Artificial Sequence
  Synthetic
gggactgacuttctgctctugt

SEQ ID NO: 89190 - DNA, 26 bp, Artificial Sequence
  Synthetic
gtaatacccgtutgctttacctgaug

SEQ ID NO: 89191 - DNA, 21 bp, Artificial Sequence
  Synthetic
ttcagtuggaagatgcuggct

SEQ ID NO: 89192 - DNA, 29 bp, Artificial Sequence
  Synthetic
gattatctaaactacutgagccagcauct

SEQ ID NO: 89193 - DNA, 28 bp, Artificial Sequence
  Synthetic
ggctcagcttgauattggataatctgut

SEQ ID NO: 89194 - DNA, 22 bp, Artificial Sequence
  Synthetic
cccacaggauttcctctcccua

SEQ ID NO: 89195 - DNA, 27 bp, Artificial Sequence
  Synthetic
gagtgcaaugagaatgugaaacacaaa

SEQ ID NO: 89196 - DNA, 21 bp, Artificial Sequence
  Synthetic
tgcctggugctgcagtttaua

SEQ ID NO: 89197 - DNA, 25 bp, Artificial Sequence
  Synthetic
tggaaggutagtcugcagaaagaac

SEQ ID NO: 89198 - DNA, 22 bp, Artificial Sequence
  Synthetic
ggtagttgtuggcaaagccuct

SEQ ID NO: 89199 - DNA, 20 bp, Artificial Sequence
  Synthetic
gtagagcgaccugacgaugt

SEQ ID NO: 89200 - DNA, 25 bp, Artificial Sequence
  Synthetic
tcctggagcugattgtatctagcut

SEQ ID NO: 89201 - DNA, 28 bp, Artificial Sequence
  Synthetic
gttggaagacagcuaaaatgatgacaut

SEQ ID NO: 89202 - DNA, 28 bp, Artificial Sequence
  Synthetic
gcatgtacttcutaatgtactcctuggt

SEQ ID NO: 89203 - DNA, 28 bp, Artificial Sequence
  Synthetic
ccctcatataatutctgctctgatuggt

SEQ ID NO: 89204 - DNA, 23 bp, Artificial Sequence
  Synthetic
gcctgagaautacaggagacugg

SEQ ID NO: 89205 - DNA, 28 bp, Artificial Sequence
  Synthetic
caaaagctgagaugaaacagtgtaagut

SEQ ID NO: 89206 - DNA, 22 bp, Artificial Sequence
  Synthetic
aacagaaaugggctgagcacua

SEQ ID NO: 89207 - DNA, 29 bp, Artificial Sequence
  Synthetic
ggaagaautagaagcugagaaaagagact

SEQ ID NO: 89208 - DNA, 29 bp, Artificial Sequence
  Synthetic
gctacaagcacutcttcatacctgtuaag

SEQ ID NO: 89209 - DNA, 25 bp, Artificial Sequence
  Synthetic
tcgctttcctguattgctctactug

SEQ ID NO: 89210 - DNA, 25 bp, Artificial Sequence
  Synthetic
cacatggcugccattatcattagut

SEQ ID NO: 89211 - DNA, 28 bp, Artificial Sequence
  Synthetic
cagactacatuggaaaggagatttgcua

SEQ ID NO: 89212 - DNA, 22 bp, Artificial Sequence
  Synthetic
ggcatctctugcctcatgacua

SEQ ID NO: 89213 - DNA, 22 bp, Artificial Sequence
  Synthetic
acccgggaaggutttcaagtuc

SEQ ID NO: 89214 - DNA, 20 bp, Artificial Sequence
  Synthetic
gcaucgcacaccgaatucag

SEQ ID NO: 89215 - DNA, 21 bp, Artificial Sequence
  Synthetic
cagcagugttggugacaaagg

SEQ ID NO: 89216 - DNA, 25 bp, Artificial Sequence
  Synthetic
tcctcatcatcucgagcagaguaaa

SEQ ID NO: 89217 - DNA, 22 bp, Artificial Sequence
  Synthetic
acacaaggaaugcctgcttuct

SEQ ID NO: 89218 - DNA, 20 bp, Artificial Sequence
  Synthetic
gcuttgtcctcugagcacga

SEQ ID NO: 89219 - DNA, 21 bp, Artificial Sequence
  Synthetic
ccatccagutgggaagctuct

SEQ ID NO: 89220 - DNA, 31 bp, Artificial Sequence
  Synthetic
agtttatgcattaggaaucatctggtactug

SEQ ID NO: 89221 - DNA, 27 bp, Artificial Sequence
  Synthetic
ccattctagaggaugttaaacgtcuga

SEQ ID NO: 89222 - DNA, 22 bp, Artificial Sequence
  Synthetic
ggacaaacgcccuaataugcag

SEQ ID NO: 89223 - DNA, 28 bp, Artificial Sequence
  Synthetic
cgcttatcttggcugatgagattatuca

SEQ ID NO: 89224 - DNA, 21 bp, Artificial Sequence
  Synthetic
acutgcgtgugggagacaaat

SEQ ID NO: 89225 - DNA, 25 bp, Artificial Sequence
  Synthetic
gtctgtctccgucctagactcauag

SEQ ID NO: 89226 - DNA, 27 bp, Artificial Sequence
  Synthetic
gttcaccctttgutgtattgctttcut

SEQ ID NO: 89227 - DNA, 27 bp, Artificial Sequence
  Synthetic
cagctgtgcauactttgtatuaaaggt

SEQ ID NO: 89228 - DNA, 27 bp, Artificial Sequence
  Synthetic
tgtaaagccaucaacacagagtatcuc

SEQ ID NO: 89229 - DNA, 25 bp, Artificial Sequence
  Synthetic
accattuccaccctcactaauaacc

SEQ ID NO: 89230 - DNA, 19 bp, Artificial Sequence
  Synthetic
gggtggtuctgcttccuca

SEQ ID NO: 89231 - DNA, 23 bp, Artificial Sequence
  Synthetic
atgcttcgcaggucagtaatcut

SEQ ID NO: 89232 - DNA, 21 bp, Artificial Sequence
  Synthetic
cacctttguggccctctauga

SEQ ID NO: 89233 - DNA, 21 bp, Artificial Sequence
  Synthetic
ctgatgccagaucctgcauga

SEQ ID NO: 89234 - DNA, 24 bp, Artificial Sequence
  Synthetic
cacatgtuccccaagatgctaaug

SEQ ID NO: 89235 - DNA, 22 bp, Artificial Sequence
  Synthetic
tcguattgtccuggcacaaaga

SEQ ID NO: 89236 - DNA, 25 bp, Artificial Sequence
  Synthetic
catctagauaaaaccctucccacca

SEQ ID NO: 89237 - DNA, 26 bp, Artificial Sequence
  Synthetic
tcttttccugcagctccaaatctuag

SEQ ID NO: 89238 - DNA, 21 bp, Artificial Sequence
  Synthetic
ggaaaagtguggtccatugct

SEQ ID NO: 89239 - DNA, 22 bp, Artificial Sequence
  Synthetic
gagccacaguaagccagacaua

SEQ ID NO: 89240 - DNA, 26 bp, Artificial Sequence
  Synthetic
tgctacttcugaattgaaatggtuca

SEQ ID NO: 89241 - DNA, 27 bp, Artificial Sequence
  Synthetic
gattacctaccautactctgcagtgut

SEQ ID NO: 89242 - DNA, 26 bp, Artificial Sequence
  Synthetic
agatctcucaggattaacacugcaga

SEQ ID NO: 89243 - DNA, 17 bp, Artificial Sequence
  Synthetic
gccugccgcucacacaa

SEQ ID NO: 89244 - DNA, 28 bp, Artificial Sequence
  Synthetic
gctctcagucactatttgtctattucct

SEQ ID NO: 89245 - DNA, 22 bp, Artificial Sequence
  Synthetic
actccagtgucttgggaacuca

SEQ ID NO: 89246 - DNA, 25 bp, Artificial Sequence
  Synthetic
cttctccttuccttccttccatucc

SEQ ID NO: 89247 - DNA, 22 bp, Artificial Sequence
  Synthetic
actctcauacctggagtugcca

SEQ ID NO: 89248 - DNA, 22 bp, Artificial Sequence
  Synthetic
ctgccccaggauatttctguca

SEQ ID NO: 89249 - DNA, 21 bp, Artificial Sequence
  Synthetic
gccccacucttcagatccuct

SEQ ID NO: 89250 - DNA, 19 bp, Artificial Sequence
  Synthetic
aaacggautcgggcucaca

SEQ ID NO: 89251 - DNA, 22 bp, Artificial Sequence
  Synthetic
acacugaggaauccggagagaa

SEQ ID NO: 89252 - DNA, 17 bp, Artificial Sequence
  Synthetic
agcgcccgcauguacaa

SEQ ID NO: 89253 - DNA, 19 bp, Artificial Sequence
  Synthetic
gtccgggcugtttttcugg

SEQ ID NO: 89254 - DNA, 20 bp, Artificial Sequence
  Synthetic
gacagtuacgcgcacaugaa

SEQ ID NO: 89255 - DNA, 17 bp, Artificial Sequence
  Synthetic
gggcgcucacgtcguag

SEQ ID NO: 89256 - DNA, 22 bp, Artificial Sequence
  Synthetic
catgauggagacggagcugaag

SEQ ID NO: 89257 - DNA, 21 bp, Artificial Sequence
  Synthetic
ggaccacaccaugaaggcaut

SEQ ID NO: 89258 - DNA, 17 bp, Artificial Sequence
  Synthetic
cgucaagcggcccauga

SEQ ID NO: 89259 - DNA, 19 bp, Artificial Sequence
  Synthetic
gcttcuccgtcuccgacaa

SEQ ID NO: 89260 - DNA, 17 bp, Artificial Sequence
  Synthetic
gcacccgggccucaaug

SEQ ID NO: 89261 - DNA, 22 bp, Artificial Sequence
  Synthetic
cgagtaggacaugctgtaggug

SEQ ID NO: 89262 - DNA, 18 bp, Artificial Sequence
  Synthetic
ggcgccgaguggaaacut

SEQ ID NO: 89263 - DNA, 22 bp, Artificial Sequence
  Synthetic
gggcagcgugtacttatcctuc

SEQ ID NO: 89264 - DNA, 19 bp, Artificial Sequence
  Synthetic
ccagcucgcagaccuacat

SEQ ID NO: 89265 - DNA, 21 bp, Artificial Sequence
  Synthetic
agugggaggaagagguaacca

SEQ ID NO: 89266 - DNA, 22 bp, Artificial Sequence
  Synthetic
ggaaaaccaagacgcucaugaa

SEQ ID NO: 89267 - DNA, 18 bp, Artificial Sequence
  Synthetic
gtagcugccgttgcucca

SEQ ID NO: 89268 - DNA, 19 bp, Artificial Sequence
  Synthetic
gttcgguggtcaaguccga

SEQ ID NO: 89269 - DNA, 22 bp, Artificial Sequence
  Synthetic
gtagtgcugggacatgugaagt

SEQ ID NO: 89270 - DNA, 22 bp, Artificial Sequence
  Synthetic
ccgggacaugatcagcatguat

SEQ ID NO: 89271 - DNA, 17 bp, Artificial Sequence
  Synthetic
ccggcccucacatgugt

SEQ ID NO: 89272 - DNA, 19 bp, Artificial Sequence
  Synthetic
ggccatuaacggcacacug

SEQ ID NO: 89273 - DNA, 22 bp, Artificial Sequence
  Synthetic
tctttttgagcguaccgggtut

SEQ ID NO: 89274 - DNA, 19 bp, Artificial Sequence
  Synthetic
ttggucgagccaagctuga

SEQ ID NO: 89275 - DNA, 21 bp, Artificial Sequence
  Synthetic
ctcugaggaagcggacttgut

SEQ ID NO: 89276 - DNA, 25 bp, Artificial Sequence
  Synthetic
tcatcaatttccugacttcggtuct

SEQ ID NO: 89277 - DNA, 28 bp, Artificial Sequence
  Synthetic
tcagccttaacaugttctgagaattcut

SEQ ID NO: 89278 - DNA, 24 bp, Artificial Sequence
  Synthetic
cccaccaaggcacaautttaguag

SEQ ID NO: 89279 - DNA, 21 bp, Artificial Sequence
  Synthetic
cctctccucccctcuccaaag

SEQ ID NO: 89280 - DNA, 28 bp, Artificial Sequence
  Synthetic
agtgtctcuctttctgttuagagcaaaa

SEQ ID NO: 89281 - DNA, 18 bp, Artificial Sequence
  Synthetic
ccugaggccacgggttug

SEQ ID NO: 89282 - DNA, 22 bp, Artificial Sequence
  Synthetic
ccctgtcaccugactttgctut

SEQ ID NO: 89283 - DNA, 17 bp, Artificial Sequence
  Synthetic
gggctgucgccaaccuc

SEQ ID NO: 89284 - DNA, 21 bp, Artificial Sequence
  Synthetic
gctggugaaggccattcuagg

SEQ ID NO: 89285 - DNA, 21 bp, Artificial Sequence
  Synthetic
ccatctcucccggatgacuca

SEQ ID NO: 89286 - DNA, 17 bp, Artificial Sequence
  Synthetic
ggagggugacggccuct

SEQ ID NO: 89287 - DNA, 20 bp, Artificial Sequence
  Synthetic
tccgtgtggucctggaatug

SEQ ID NO: 89288 - DNA, 20 bp, Artificial Sequence
  Synthetic
ccacaggaagugaggcucag

SEQ ID NO: 89289 - DNA, 19 bp, Artificial Sequence
  Synthetic
ctccugggcagcatctuca

SEQ ID NO: 89290 - DNA, 20 bp, Artificial Sequence
  Synthetic
gauacggccaggcatugaag

SEQ ID NO: 89291 - DNA, 22 bp, Artificial Sequence
  Synthetic
tcatcttcugtccctucccaga

SEQ ID NO: 89292 - DNA, 24 bp, Artificial Sequence
  Synthetic
tttccttttggucttcaggtugga

SEQ ID NO: 89293 - DNA, 21 bp, Artificial Sequence
  Synthetic
cggaaggtuccatgggatuct

SEQ ID NO: 89294 - DNA, 22 bp, Artificial Sequence
  Synthetic
ttggagatccucaggctgguat

SEQ ID NO: 89295 - DNA, 24 bp, Artificial Sequence
  Synthetic
gtctccacaugccatttcuaggag

SEQ ID NO: 89296 - DNA, 20 bp, Artificial Sequence
  Synthetic
gtagctgcccuggtaggtut

SEQ ID NO: 89297 - DNA, 23 bp, Artificial Sequence
  Synthetic
aacaauggttcacugaagaccca

SEQ ID NO: 89298 - DNA, 26 bp, Artificial Sequence
  Synthetic
gaguacaagaaauggcaggaaaacag

SEQ ID NO: 89299 - DNA, 22 bp, Artificial Sequence
  Synthetic
gcataaaggcugggtgtucaca

SEQ ID NO: 89300 - DNA, 24 bp, Artificial Sequence
  Synthetic
cccggccaguttttcagatttuaa

SEQ ID NO: 89301 - DNA, 22 bp, Artificial Sequence
  Synthetic
ccutctccaatugaaccgagga

SEQ ID NO: 89302 - DNA, 27 bp, Artificial Sequence
  Synthetic
ttaattttccugagagaccaagaccug

SEQ ID NO: 89303 - DNA, 26 bp, Artificial Sequence
  Synthetic
ttgtgcaaaguactggtctttcugat

SEQ ID NO: 89304 - DNA, 22 bp, Artificial Sequence
  Synthetic
gctgttacagugcgaaguaccc

SEQ ID NO: 89305 - DNA, 21 bp, Artificial Sequence
  Synthetic
ggccctgaucatcatggtuca

SEQ ID NO: 89306 - DNA, 23 bp, Artificial Sequence
  Synthetic
cattcugggagcttcatcuggac

SEQ ID NO: 89307 - DNA, 22 bp, Artificial Sequence
  Synthetic
ggtcctcugactgctctttuca

SEQ ID NO: 89308 - DNA, 27 bp, Artificial Sequence
  Synthetic
gaggattaaaacugtaacaccuaccca

SEQ ID NO: 89309 - DNA, 23 bp, Artificial Sequence
  Synthetic
tcactggtcuctgtttgcacuac

SEQ ID NO: 89310 - DNA, 21 bp, Artificial Sequence
  Synthetic
acacugaatgugcagcacaac

SEQ ID NO: 89311 - DNA, 25 bp, Artificial Sequence
  Synthetic
tcctttugaagcaagtacugcagat

SEQ ID NO: 89312 - DNA, 21 bp, Artificial Sequence
  Synthetic
ccaacugccccttcttcaugt

SEQ ID NO: 89313 - DNA, 21 bp, Artificial Sequence
  Synthetic
ctcauaggcttcuccccgaga

SEQ ID NO: 89314 - DNA, 23 bp, Artificial Sequence
  Synthetic
aaactcccaaagcugaacuccaa

SEQ ID NO: 89315 - DNA, 23 bp, Artificial Sequence
  Synthetic
tgguctcacugaacagaaaaggg

SEQ ID NO: 89316 - DNA, 20 bp, Artificial Sequence
  Synthetic
ggaacccugaggaguccact

SEQ ID NO: 89317 - DNA, 22 bp, Artificial Sequence
  Synthetic
tgtggcaacgutcacaaaaucc

SEQ ID NO: 89318 - DNA, 26 bp, Artificial Sequence
  Synthetic
aggatgtuaccaggacatttaauggg

SEQ ID NO: 89319 - DNA, 22 bp, Artificial Sequence
  Synthetic
tttccagcuctguggcaagaat

SEQ ID NO: 89320 - DNA, 21 bp, Artificial Sequence
  Synthetic
gacagatucccgttgctucct

SEQ ID NO: 89321 - DNA, 22 bp, Artificial Sequence
  Synthetic
cctgagggacuaggauggacat

SEQ ID NO: 89322 - DNA, 21 bp, Artificial Sequence
  Synthetic
caccagcgutccaagucagat

SEQ ID NO: 89323 - DNA, 21 bp, Artificial Sequence
  Synthetic
gcttttcugcacttgctcguc

SEQ ID NO: 89324 - DNA, 19 bp, Artificial Sequence
  Synthetic
ctguctcaagcugcacgga

SEQ ID NO: 89325 - DNA, 20 bp, Artificial Sequence
  Synthetic
cagccgcugtgtuaggaagt

SEQ ID NO: 89326 - DNA, 23 bp, Artificial Sequence
  Synthetic
caaatctgcugttccccatcuca

SEQ ID NO: 89327 - DNA, 29 bp, Artificial Sequence
  Synthetic
ctccattttctucctcattctacttcuca

SEQ ID NO: 89328 - DNA, 27 bp, Artificial Sequence
  Synthetic
gcagccaagtuatctgtatagtctuct

SEQ ID NO: 89329 - DNA, 24 bp, Artificial Sequence
  Synthetic
caaaggtuaaagctgaaagugcca

SEQ ID NO: 89330 - DNA, 25 bp, Artificial Sequence
  Synthetic
gcttctacccaguatcacagggaut

SEQ ID NO: 89331 - DNA, 25 bp, Artificial Sequence
  Synthetic
gagctcautaactaccaucagcaca

SEQ ID NO: 89332 - DNA, 22 bp, Artificial Sequence
  Synthetic
ccatgtaccugccacguagaag

SEQ ID NO: 89333 - DNA, 18 bp, Artificial Sequence
  Synthetic
tgatcguggtcccuccgt

SEQ ID NO: 89334 - DNA, 21 bp, Artificial Sequence
  Synthetic
cctgguactcaccugcagagt

SEQ ID NO: 89335 - DNA, 28 bp, Artificial Sequence
  Synthetic
aagttactgacuaagcatccacttctuc

SEQ ID NO: 89336 - DNA, 23 bp, Artificial Sequence
  Synthetic
ctcttatcagagutcagccuggt

SEQ ID NO: 89337 - DNA, 20 bp, Artificial Sequence
  Synthetic
gcagaccucucgggagacaa

SEQ ID NO: 89338 - DNA, 17 bp, Artificial Sequence
  Synthetic
gcucaccuggcagggat

SEQ ID NO: 89339 - DNA, 21 bp, Artificial Sequence
  Synthetic
agcagcaccucatcgtaagug

SEQ ID NO: 89340 - DNA, 21 bp, Artificial Sequence
  Synthetic
aacctcatggutctgcctcuc

SEQ ID NO: 89341 - DNA, 20 bp, Artificial Sequence
  Synthetic
accagguccaagccaaaguc

SEQ ID NO: 89342 - DNA, 22 bp, Artificial Sequence
  Synthetic
gaagacuaccagctcgtcaugg

SEQ ID NO: 89343 - DNA, 20 bp, Artificial Sequence
  Synthetic
cggtagtgaccugccaggua

SEQ ID NO: 89344 - DNA, 21 bp, Artificial Sequence
  Synthetic
ctggcugtctacaugcaaacc

SEQ ID NO: 89345 - DNA, 21 bp, Artificial Sequence
  Synthetic
gtagcucagctgatcugcgaa

SEQ ID NO: 89346 - DNA, 18 bp, Artificial Sequence
  Synthetic
cccucgaggccauccaag

SEQ ID NO: 89347 - DNA, 18 bp, Artificial Sequence
  Synthetic
accctgccgcuctcctua

SEQ ID NO: 89348 - DNA, 19 bp, Artificial Sequence
  Synthetic
ggcacaaggucuacagcct

SEQ ID NO: 89349 - DNA, 19 bp, Artificial Sequence
  Synthetic
tcccaguccccaucacaga

SEQ ID NO: 89350 - DNA, 22 bp, Artificial Sequence
  Synthetic
atggucagaacagcaatcguga

SEQ ID NO: 89351 - DNA, 28 bp, Artificial Sequence
  Synthetic
ccagataauagatgccacucaaaaagga

SEQ ID NO: 89352 - DNA, 23 bp, Artificial Sequence
  Synthetic
ctaaggutttaccacugcagcct

SEQ ID NO: 89353 - DNA, 22 bp, Artificial Sequence
  Synthetic
ggagggaggagaccutctuact

SEQ ID NO: 89354 - DNA, 20 bp, Artificial Sequence
  Synthetic
agggtgtguccctccaaaug

SEQ ID NO: 89355 - DNA, 23 bp, Artificial Sequence
  Synthetic
aggtaaaagtgcuccattcgcut

SEQ ID NO: 89356 - DNA, 26 bp, Artificial Sequence
  Synthetic
ctgtgattcaugaaacgagagcaaut

SEQ ID NO: 89357 - DNA, 26 bp, Artificial Sequence
  Synthetic
gttaggttucgcagcacaatctttut

SEQ ID NO: 89358 - DNA, 20 bp, Artificial Sequence
  Synthetic
gcauccggagatgttuggct

SEQ ID NO: 89359 - DNA, 20 bp, Artificial Sequence
  Synthetic
caaacgucagcgggtucaaa

SEQ ID NO: 89360 - DNA, 22 bp, Artificial Sequence
  Synthetic
ccatccgggcuttacgcaaaua

SEQ ID NO: 89361 - DNA, 24 bp, Artificial Sequence
  Synthetic
atatcatccagccugtgtcttucc

SEQ ID NO: 89362 - DNA, 24 bp, Artificial Sequence
  Synthetic
ttgacagcuggaagagatttguga

SEQ ID NO: 89363 - DNA, 21 bp, Artificial Sequence
  Synthetic
ctcagggugcagttgctttug

SEQ ID NO: 89364 - DNA, 21 bp, Artificial Sequence
  Synthetic
cagctgtgugctcttgagtuc

SEQ ID NO: 89365 - DNA, 22 bp, Artificial Sequence
  Synthetic
gctgaggtcutgtgagtgtcut

SEQ ID NO: 89366 - DNA, 24 bp, Artificial Sequence
  Synthetic
agaaatcctcugtgacgatcugga

SEQ ID NO: 89367 - DNA, 20 bp, Artificial Sequence
  Synthetic
cagtgcugggtgagaaguca

SEQ ID NO: 89368 - DNA, 23 bp, Artificial Sequence
  Synthetic
gccctaacgaugctatcctucat

SEQ ID NO: 89369 - DNA, 23 bp, Artificial Sequence
  Synthetic
ccatgatgaucctcagcttgucc

SEQ ID NO: 89370 - DNA, 22 bp, Artificial Sequence
  Synthetic
gaucaaggaccgagucgaacag

SEQ ID NO: 89371 - DNA, 24 bp, Artificial Sequence
  Synthetic
ccacaguccccagcaaataactua

SEQ ID NO: 89372 - DNA, 21 bp, Artificial Sequence
  Synthetic
ggacttuggagtgctugcagt

SEQ ID NO: 89373 - DNA, 22 bp, Artificial Sequence
  Synthetic
tggctgtctcugagcaagtcua

SEQ ID NO: 89374 - DNA, 22 bp, Artificial Sequence
  Synthetic
gtccaagaaauggcugggaaga

SEQ ID NO: 89375 - DNA, 22 bp, Artificial Sequence
  Synthetic
agctcaaggaugtgcctttcug

SEQ ID NO: 89376 - DNA, 22 bp, Artificial Sequence
  Synthetic
cugagugagcccgaagaagaat

SEQ ID NO: 89377 - DNA, 27 bp, Artificial Sequence
  Synthetic
tcacaaagtccutgaagatgacaucaa

SEQ ID NO: 89378 - DNA, 28 bp, Artificial Sequence
  Synthetic
aggcttaaggautagaaaacttgtucca

SEQ ID NO: 89379 - DNA, 27 bp, Artificial Sequence
  Synthetic
ctagtagtagucaaccaaagccttuca

SEQ ID NO: 89380 - DNA, 27 bp, Artificial Sequence
  Synthetic
ctgaaaggcttuggttgactactacua

SEQ ID NO: 89381 - DNA, 33 bp, Artificial Sequence
  Synthetic
agaattgaaatcaaaugaacaagtctacatcut

SEQ ID NO: 89382 - DNA, 21 bp, Artificial Sequence
  Synthetic
cagagcaatuggaagcacgut

SEQ ID NO: 89383 - DNA, 26 bp, Artificial Sequence
  Synthetic
cacacatcgaauacccaaatttugga

SEQ ID NO: 89384 - DNA, 28 bp, Artificial Sequence
  Synthetic
acctgacagttautgacaaagatgcaut

SEQ ID NO: 89385 - DNA, 28 bp, Artificial Sequence
  Synthetic
tctccccttaaugtctccatttatucca

SEQ ID NO: 89386 - DNA, 20 bp, Artificial Sequence
  Synthetic
agaggucaccctugcagaga

SEQ ID NO: 89387 - DNA, 24 bp, Artificial Sequence
  Synthetic
gtgcaggtgauggtattcctugat

SEQ ID NO: 89388 - DNA, 27 bp, Artificial Sequence
  Synthetic
gtggttttcattuccatctttacgcut

SEQ ID NO: 89389 - DNA, 27 bp, Artificial Sequence
  Synthetic
ctctccttcuccctttctatcttcugt

SEQ ID NO: 89390 - DNA, 20 bp, Artificial Sequence
  Synthetic
ggtcacugggcgggaaauac

SEQ ID NO: 89391 - DNA, 22 bp, Artificial Sequence
  Synthetic
gcaattacguacggcucaacat

SEQ ID NO: 89392 - DNA, 21 bp, Artificial Sequence
  Synthetic
ccgacucaccagggaucagaa

SEQ ID NO: 89393 - DNA, 22 bp, Artificial Sequence
  Synthetic
ctccctagaucctggctggtua

SEQ ID NO: 89394 - DNA, 21 bp, Artificial Sequence
  Synthetic
accgauagagggaaccacugt

SEQ ID NO: 89395 - DNA, 26 bp, Artificial Sequence
  Synthetic
gccctgtctugctttccttgtatuaa

SEQ ID NO: 89396 - DNA, 21 bp, Artificial Sequence
  Synthetic
ctctgtccguccctctctuct

SEQ ID NO: 89397 - DNA, 19 bp, Artificial Sequence
  Synthetic
cctcccccgggutcactua

SEQ ID NO: 89398 - DNA, 29 bp, Artificial Sequence
  Synthetic
tttgctaattgtaugtgtgtgtgtttcug

SEQ ID NO: 89399 - DNA, 25 bp, Artificial Sequence
  Synthetic
accaaaggcuttatcaagucacact

SEQ ID NO: 89400 - DNA, 28 bp, Artificial Sequence
  Synthetic
ctaatgaagaugaggatttgaacccuga

SEQ ID NO: 89401 - DNA, 26 bp, Artificial Sequence
  Synthetic
gccaagctctutgaatgcttcatuaa

SEQ ID NO: 89402 - DNA, 17 bp, Artificial Sequence
  Synthetic
cggugccaagccucaca

SEQ ID NO: 89403 - DNA, 17 bp, Artificial Sequence
  Synthetic
ggguggcttgugggcaa

SEQ ID NO: 89404 - DNA, 21 bp, Artificial Sequence
  Synthetic
tctgggaccucactgugacat

SEQ ID NO: 89405 - DNA, 20 bp, Artificial Sequence
  Synthetic
ctgtccccuccttugcagaa

SEQ ID NO: 89406 - DNA, 19 bp, Artificial Sequence
  Synthetic
aggagcugggucggaaaac

SEQ ID NO: 89407 - DNA, 21 bp, Artificial Sequence
  Synthetic
caaguacggcaccacagucat

SEQ ID NO: 89408 - DNA, 20 bp, Artificial Sequence
  Synthetic
cgcacgtagugtttctgcut

SEQ ID NO: 89409 - DNA, 20 bp, Artificial Sequence
  Synthetic
caucgaaccccagguaccac

SEQ ID NO: 89410 - DNA, 18 bp, Artificial Sequence
  Synthetic
cctucccagccctagcut

SEQ ID NO: 89411 - DNA, 17 bp, Artificial Sequence
  Synthetic
gcuggacccccaucgga

SEQ ID NO: 89412 - DNA, 22 bp, Artificial Sequence
  Synthetic
gaagaaacaucctccggcugaa

SEQ ID NO: 89413 - DNA, 22 bp, Artificial Sequence
  Synthetic
accgtgaagucctgagtguaga

SEQ ID NO: 89414 - DNA, 21 bp, Artificial Sequence
  Synthetic
gcauccactgcuaccacaagt

SEQ ID NO: 89415 - DNA, 22 bp, Artificial Sequence
  Synthetic
tcaccaggaucttgaaggcauc

SEQ ID NO: 89416 - DNA, 22 bp, Artificial Sequence
  Synthetic
agggtctucctcaactgcuaca

SEQ ID NO: 89417 - DNA, 22 bp, Artificial Sequence
  Synthetic
gccttccaagaagucagcaucc

SEQ ID NO: 89418 - DNA, 17 bp, Artificial Sequence
  Synthetic
ccctcgcuggacuccat

SEQ ID NO: 89419 - DNA, 17 bp, Artificial Sequence
  Synthetic
ctcgtcugcccagcgut

SEQ ID NO: 89420 - DNA, 22 bp, Artificial Sequence
  Synthetic
gggtuccaggaattucccaacc

SEQ ID NO: 89421 - DNA, 25 bp, Artificial Sequence
  Synthetic
gagaagtugaaggcagaaagcauac

SEQ ID NO: 89422 - DNA, 22 bp, Artificial Sequence
  Synthetic
gtggaggcucatcactgactut

SEQ ID NO: 89423 - DNA, 22 bp, Artificial Sequence
  Synthetic
cctcctgcugttctgttgtucc

SEQ ID NO: 89424 - DNA, 21 bp, Artificial Sequence
  Synthetic
ctcgttccauctccgcttcuc

SEQ ID NO: 89425 - DNA, 25 bp, Artificial Sequence
  Synthetic
gatctaggcucagaggaaucacaac

SEQ ID NO: 89426 - DNA, 24 bp, Artificial Sequence
  Synthetic
agctagtgtguagacagacauggt

SEQ ID NO: 89427 - DNA, 28 bp, Artificial Sequence
  Synthetic
tggaagtccaaaaaccugaaaggaauat

SEQ ID NO: 89428 - DNA, 28 bp, Artificial Sequence
  Synthetic
ccaaaccctagautatttgcagctacua

SEQ ID NO: 89429 - DNA, 28 bp, Artificial Sequence
  Synthetic
acagaaccagaauttaaggtggaagaug

SEQ ID NO: 89430 - DNA, 18 bp, Artificial Sequence
  Synthetic
gcttacgcgugcgggaua

SEQ ID NO: 89431 - DNA, 28 bp, Artificial Sequence
  Synthetic
gttatacatcucggctgaacctactuac

SEQ ID NO: 89432 - DNA, 27 bp, Artificial Sequence
  Synthetic
aacactacugcaggatccattaaaugt

SEQ ID NO: 89433 - DNA, 28 bp, Artificial Sequence
  Synthetic
gcgttcagtcacuaagaagatctaugaa

SEQ ID NO: 89434 - DNA, 18 bp, Artificial Sequence
  Synthetic
gtgaguggcgccctctut

SEQ ID NO: 89435 - DNA, 19 bp, Artificial Sequence
  Synthetic
gaggccagcccaaguacuc

SEQ ID NO: 89436 - DNA, 26 bp, Artificial Sequence
  Synthetic
accacagaaaugaagcaguaagaaca

SEQ ID NO: 89437 - DNA, 23 bp, Artificial Sequence
  Synthetic
attaagugacaaggtcgtugcct

SEQ ID NO: 89438 - DNA, 24 bp, Artificial Sequence
  Synthetic
tttacaggtaucacgctcatugct

SEQ ID NO: 89439 - DNA, 24 bp, Artificial Sequence
  Synthetic
gacatcagacutggcaaagctuac

SEQ ID NO: 89440 - DNA, 23 bp, Artificial Sequence
  Synthetic
gaccttguacaccttcctucaca

SEQ ID NO: 89441 - DNA, 25 bp, Artificial Sequence
  Synthetic
attctgatagacucttggctugcag

SEQ ID NO: 89442 - DNA, 29 bp, Artificial Sequence
  Synthetic
caagttgaaaugaacaaaagatgctucct

SEQ ID NO: 89443 - DNA, 22 bp, Artificial Sequence
  Synthetic
tgaagaggagggugtgtcugat

SEQ ID NO: 89444 - DNA, 19 bp, Artificial Sequence
  Synthetic
agaucugcgaggaggacca

SEQ ID NO: 89445 - DNA, 19 bp, Artificial Sequence
  Synthetic
gggccucacctctctucac

SEQ ID NO: 89446 - DNA, 21 bp, Artificial Sequence
  Synthetic
cctgtgcgugggattctctuc

SEQ ID NO: 89447 - DNA, 19 bp, Artificial Sequence
  Synthetic
ggcucacccgacauggaac

SEQ ID NO: 89448 - DNA, 21 bp, Artificial Sequence
  Synthetic
gcaugugagacagaccaagga

SEQ ID NO: 89449 - DNA, 19 bp, Artificial Sequence
  Synthetic
cugaacacugggaccagca

SEQ ID NO: 89450 - DNA, 25 bp, Artificial Sequence
  Synthetic
aatactcaaacaaaucctgcccuga

SEQ ID NO: 89451 - DNA, 28 bp, Artificial Sequence
  Synthetic
caaaaatctacccucttccacacatgua

SEQ ID NO: 89452 - DNA, 23 bp, Artificial Sequence
  Synthetic
tgttcttggcucctttcactcuc

SEQ ID NO: 89453 - DNA, 27 bp, Artificial Sequence
  Synthetic
accaacauagaagctagtaagcuacct

SEQ ID NO: 89454 - DNA, 23 bp, Artificial Sequence
  Synthetic
gagcacgcgaugtattctcacua

SEQ ID NO: 89455 - DNA, 22 bp, Artificial Sequence
  Synthetic
agacttuggaacactugcccat

SEQ ID NO: 89456 - DNA, 19 bp, Artificial Sequence
  Synthetic
tgctggtucttggctgugt

SEQ ID NO: 89457 - DNA, 18 bp, Artificial Sequence
  Synthetic
ctggugctgccuacaggt

SEQ ID NO: 89458 - DNA, 20 bp, Artificial Sequence
  Synthetic
gctgguagcacagggactug

SEQ ID NO: 89459 - DNA, 20 bp, Artificial Sequence
  Synthetic
cagtcaugcggatcctguct

SEQ ID NO: 89460 - DNA, 19 bp, Artificial Sequence
  Synthetic
ctgtggctuaccccaggut

SEQ ID NO: 89461 - DNA, 18 bp, Artificial Sequence
  Synthetic
ggcctgugcccaaguacc

SEQ ID NO: 89462 - DNA, 25 bp, Artificial Sequence
  Synthetic
gacacagatgutgatcaccaugact

SEQ ID NO: 89463 - DNA, 21 bp, Artificial Sequence
  Synthetic
ggttcctucaccacaaccugt

SEQ ID NO: 89464 - DNA, 26 bp, Artificial Sequence
  Synthetic
tcatttgguaggcttgagttugaaga

SEQ ID NO: 89465 - DNA, 25 bp, Artificial Sequence
  Synthetic
tccacagaugaaactttcucccaag

SEQ ID NO: 89466 - DNA, 23 bp, Artificial Sequence
  Synthetic
caggcgccaautccaatacuact

SEQ ID NO: 89467 - DNA, 28 bp, Artificial Sequence
  Synthetic
catactgccaauacctgaatactgacua

SEQ ID NO: 89468 - DNA, 28 bp, Artificial Sequence
  Synthetic
tgagttugaagaaacagaagaaccugat

SEQ ID NO: 89469 - DNA, 28 bp, Artificial Sequence
  Synthetic
gaaaatcctuaccaatactccauccaca

SEQ ID NO: 89470 - DNA, 26 bp, Artificial Sequence
  Synthetic
tcutcattcattcatucccaccacaa

SEQ ID NO: 89471 - DNA, 28 bp, Artificial Sequence
  Synthetic
cttatcccggcuaatggttagaatugaa

SEQ ID NO: 89472 - DNA, 20 bp, Artificial Sequence
  Synthetic
cttggtggcuaagctgcuca

SEQ ID NO: 89473 - DNA, 20 bp, Artificial Sequence
  Synthetic
gctgugaagaggctgguaca

SEQ ID NO: 89474 - DNA, 25 bp, Artificial Sequence
  Synthetic
cacgggaacaagaucctttaucaca

SEQ ID NO: 89475 - DNA, 28 bp, Artificial Sequence
  Synthetic
ggatgtgttaaaugtgtgtctcttucag

SEQ ID NO: 89476 - DNA, 17 bp, Artificial Sequence
  Synthetic
gugcaggcugggaacac

SEQ ID NO: 89477 - DNA, 21 bp, Artificial Sequence
  Synthetic
caccccacccucatgaaagut

SEQ ID NO: 89478 - DNA, 21 bp, Artificial Sequence
  Synthetic
aggcacugctgaatcucagac

SEQ ID NO: 89479 - DNA, 26 bp, Artificial Sequence
  Synthetic
gaagagggtgtugattaaggtggaut

SEQ ID NO: 89480 - DNA, 18 bp, Artificial Sequence
  Synthetic
guagaguggcagcacggt

SEQ ID NO: 89481 - DNA, 20 bp, Artificial Sequence
  Synthetic
ttgtggccaguggttgtcut

SEQ ID NO: 89482 - DNA, 25 bp, Artificial Sequence
  Synthetic
gacagguaagtttctgcuccaaagt

SEQ ID NO: 89483 - DNA, 28 bp, Artificial Sequence
  Synthetic
ggtatttttattugctgtggtaggugga

SEQ ID NO: 89484 - DNA, 26 bp, Artificial Sequence
  Synthetic
ccaaacagucatggttttgtucaaga

SEQ ID NO: 89485 - DNA, 28 bp, Artificial Sequence
  Synthetic
tgctgcatcuatataggtggtaucaaga

SEQ ID NO: 89486 - DNA, 22 bp, Artificial Sequence
  Synthetic
cgtcagctuctggttcagaugt

SEQ ID NO: 89487 - DNA, 26 bp, Artificial Sequence
  Synthetic
ggatggcaaagaggaucttgaucaat

SEQ ID NO: 89488 - DNA, 17 bp, Artificial Sequence
  Synthetic
gcagagcggcutgggua

SEQ ID NO: 89489 - DNA, 18 bp, Artificial Sequence
  Synthetic
ctgaccgugcgtgaugga

SEQ ID NO: 89490 - DNA, 22 bp, Artificial Sequence
  Synthetic
aggttugggtcagtaucagcag

SEQ ID NO: 89491 - DNA, 27 bp, Artificial Sequence
  Synthetic
aatgaatagtatgcugtcccaggttut

SEQ ID NO: 89492 - DNA, 29 bp, Artificial Sequence
  Synthetic
acaagttttcttcucaatcaattgcctut

SEQ ID NO: 89493 - DNA, 22 bp, Artificial Sequence
  Synthetic
cctcagtgaugggctcctguat

SEQ ID NO: 89494 - DNA, 28 bp, Artificial Sequence
  Synthetic
gtgaatacautgactgtctugaaccaac

SEQ ID NO: 89495 - DNA, 27 bp, Artificial Sequence
  Synthetic
gacctgtucacaaagttatgctucaaa

SEQ ID NO: 89496 - DNA, 23 bp, Artificial Sequence
  Synthetic
ccagcacagcuatcttctucagg

SEQ ID NO: 89497 - DNA, 26 bp, Artificial Sequence
  Synthetic
atgggatttgtugtgtgatacacuca

SEQ ID NO: 89498 - DNA, 24 bp, Artificial Sequence
  Synthetic
caaattaacccaugtgggcctuaa

SEQ ID NO: 89499 - DNA, 27 bp, Artificial Sequence
  Synthetic
gccctuacaacaaaaacaagagctuac

SEQ ID NO: 89500 - DNA, 21 bp, Artificial Sequence
  Synthetic
cctgcagggutccaggttuaa

SEQ ID NO: 89501 - DNA, 26 bp, Artificial Sequence
  Synthetic
gctcggagttugggaagaattctauc

SEQ ID NO: 89502 - DNA, 22 bp, Artificial Sequence
  Synthetic
ggaugaggaacagcaacctuca

SEQ ID NO: 89503 - DNA, 18 bp, Artificial Sequence
  Synthetic
agggacaacguggauggg

SEQ ID NO: 89504 - DNA, 19 bp, Artificial Sequence
  Synthetic
autgcatguacgccccact

SEQ ID NO: 89505 - DNA, 21 bp, Artificial Sequence
  Synthetic
gccttcuagccctttggtgua

SEQ ID NO: 89506 - DNA, 19 bp, Artificial Sequence
  Synthetic
ccuccggacgaggaugact

SEQ ID NO: 89507 - DNA, 21 bp, Artificial Sequence
  Synthetic
ttcggatacugcttcctgcug

SEQ ID NO: 89508 - DNA, 18 bp, Artificial Sequence
  Synthetic
ccgccgcutcctcaucct

SEQ ID NO: 89509 - DNA, 17 bp, Artificial Sequence
  Synthetic
ggccgagugtagccgua

SEQ ID NO: 89510 - DNA, 27 bp, Artificial Sequence
  Synthetic
cctcttcctcuacagggacattttcua

SEQ ID NO: 89511 - DNA, 28 bp, Artificial Sequence
  Synthetic
caagaaactaaugtttcgcagacugaaa

SEQ ID NO: 89512 - DNA, 17 bp, Artificial Sequence
  Synthetic
cgaggcgggagcuguag

SEQ ID NO: 89513 - DNA, 24 bp, Artificial Sequence
  Synthetic
ccatttcgcutttgacacaagugg

SEQ ID NO: 89514 - DNA, 23 bp, Artificial Sequence
  Synthetic
aguattccccttucaagggaggt

SEQ ID NO: 89515 - DNA, 20 bp, Artificial Sequence
  Synthetic
ccagtgcuccggacttguag

SEQ ID NO: 89516 - DNA, 21 bp, Artificial Sequence
  Synthetic
ggguaagggaagtagguggaa

SEQ ID NO: 89517 - DNA, 17 bp, Artificial Sequence
  Synthetic
gcccgggutctggauca

SEQ ID NO: 89518 - DNA, 20 bp, Artificial Sequence
  Synthetic
cagagtgcccuatcccaguc

SEQ ID NO: 89519 - DNA, 21 bp, Artificial Sequence
  Synthetic
agguaggagccgctagauacc

SEQ ID NO: 89520 - DNA, 20 bp, Artificial Sequence
  Synthetic
agcagggugaggatggtuct

SEQ ID NO: 89521 - DNA, 19 bp, Artificial Sequence
  Synthetic
tcugggacgcaacctcuct

SEQ ID NO: 89522 - DNA, 21 bp, Artificial Sequence
  Synthetic
catgcaacucctucagcaaca

SEQ ID NO: 89523 - DNA, 21 bp, Artificial Sequence
  Synthetic
accgacacugcctuacacaac

SEQ ID NO: 89524 - DNA, 24 bp, Artificial Sequence
  Synthetic
gcctcggguaaatttgagcttcut

SEQ ID NO: 89525 - DNA, 21 bp, Artificial Sequence
  Synthetic
gcctcacuggctcatacucac

SEQ ID NO: 89526 - DNA, 19 bp, Artificial Sequence
  Synthetic
tgccgtcuaccctgtcuct

SEQ ID NO: 89527 - DNA, 17 bp, Artificial Sequence
  Synthetic
ccgtaguccagcgggut

SEQ ID NO: 89528 - DNA, 18 bp, Artificial Sequence
  Synthetic
gctcgcaucaagcuggag

SEQ ID NO: 89529 - DNA, 21 bp, Artificial Sequence
  Synthetic
cttcggcugtgaagagagugt

SEQ ID NO: 89530 - DNA, 21 bp, Artificial Sequence
  Synthetic
ctttcuccccaaaggccacut

SEQ ID NO: 89531 - DNA, 21 bp, Artificial Sequence
  Synthetic
cccacatutacaccttugcca

SEQ ID NO: 89532 - DNA, 22 bp, Artificial Sequence
  Synthetic
ccauttcugacaacgccaagga

SEQ ID NO: 89533 - DNA, 18 bp, Artificial Sequence
  Synthetic
gcggguggaacucccaaa

SEQ ID NO: 89534 - DNA, 28 bp, Artificial Sequence
  Synthetic
tgcactgtccaugctattttcacttaua

SEQ ID NO: 89535 - DNA, 25 bp, Artificial Sequence
  Synthetic
cgttgagugaaggagatgggtatuc

SEQ ID NO: 89536 - DNA, 27 bp, Artificial Sequence
  Synthetic
aaacagaggcucattttgcaattugat

SEQ ID NO: 89537 - DNA, 28 bp, Artificial Sequence
  Synthetic
actccaaauatacccaagugcagaaaaa

SEQ ID NO: 89538 - DNA, 19 bp, Artificial Sequence
  Synthetic
gagcgcgutccatcctcua

SEQ ID NO: 89539 - DNA, 17 bp, Artificial Sequence
  Synthetic
cctaccucggcctcguc

SEQ ID NO: 89540 - DNA, 21 bp, Artificial Sequence
  Synthetic
gaagaguacggcccugaagaa

SEQ ID NO: 89541 - DNA, 22 bp, Artificial Sequence
  Synthetic
gattgcagaagaugaccuggga

SEQ ID NO: 89542 - DNA, 21 bp, Artificial Sequence
  Synthetic
cccagcacugttgtcagguaa

SEQ ID NO: 89543 - DNA, 27 bp, Artificial Sequence
  Synthetic
ctgguagaagaacagatgtaaauccgt

SEQ ID NO: 89544 - DNA, 23 bp, Artificial Sequence
  Synthetic
cactgtctucaacagaccctuga

SEQ ID NO: 89545 - DNA, 19 bp, Artificial Sequence
  Synthetic
ccugucaccaacgggaagg

SEQ ID NO: 89546 - DNA, 17 bp, Artificial Sequence
  Synthetic
gctgcgcucggugaact

SEQ ID NO: 89547 - DNA, 21 bp, Artificial Sequence
  Synthetic
gtacctcgguagctgtggaug

SEQ ID NO: 89548 - DNA, 21 bp, Artificial Sequence
  Synthetic
cctaccugaacctccgaacug

SEQ ID NO: 89549 - DNA, 20 bp, Artificial Sequence
  Synthetic
ggttugaacccgggactgua

SEQ ID NO: 89550 - DNA, 29 bp, Artificial Sequence
  Synthetic
ggtttcattcatcuatgaagatgttgcut

SEQ ID NO: 89551 - DNA, 24 bp, Artificial Sequence
  Synthetic
gacttgtactaugtgtggccauga

SEQ ID NO: 89552 - DNA, 24 bp, Artificial Sequence
  Synthetic
ttcatatgucagttcauggccaca

SEQ ID NO: 89553 - DNA, 20 bp, Artificial Sequence
  Synthetic
gaatugcggcgagcaguaag

SEQ ID NO: 89554 - DNA, 21 bp, Artificial Sequence
  Synthetic
cccgtauggctcaactucgac

SEQ ID NO: 89555 - DNA, 19 bp, Artificial Sequence
  Synthetic
gggctucagaccgtgcuat

SEQ ID NO: 89556 - DNA, 25 bp, Artificial Sequence
  Synthetic
ccagctgggutaataagagguacag

SEQ ID NO: 89557 - DNA, 31 bp, Artificial Sequence
  Synthetic
cttctttgtgaaagauaggagactaaaucca

SEQ ID NO: 89558 - DNA, 25 bp, Artificial Sequence
  Synthetic
gatagcaggaaaaacaaugcctuca

SEQ ID NO: 89559 - DNA, 25 bp, Artificial Sequence
  Synthetic
cuaacagacagagaaugggcagaag

SEQ ID NO: 89560 - DNA, 25 bp, Artificial Sequence
  Synthetic
agcctttccuagaatgatccacuaa

SEQ ID NO: 89561 - DNA, 26 bp, Artificial Sequence
  Synthetic
cagctguagctaagatagugaaacct

SEQ ID NO: 89562 - DNA, 25 bp, Artificial Sequence
  Synthetic
gcaagctctucttcagacaataugg

SEQ ID NO: 89563 - DNA, 33 bp, Artificial Sequence
  Synthetic
tataatgtacagtacaugtcacttacctugaaa

SEQ ID NO: 89564 - DNA, 23 bp, Artificial Sequence
  Synthetic
ctgaacagccuatttccccauca

SEQ ID NO: 89565 - DNA, 23 bp, Artificial Sequence
  Synthetic
ggacaacugagggttgggtttut

SEQ ID NO: 89566 - DNA, 23 bp, Artificial Sequence
  Synthetic
acaatcguctccctttuccacac

SEQ ID NO: 89567 - DNA, 23 bp, Artificial Sequence
  Synthetic
atgtacatggcugaaagctugat

SEQ ID NO: 89568 - DNA, 29 bp, Artificial Sequence
  Synthetic
tgtgguttatcacattttuagccagaaga

SEQ ID NO: 89569 - DNA, 24 bp, Artificial Sequence
  Synthetic
tgttcccacuactccacuacaagt

SEQ ID NO: 89570 - DNA, 20 bp, Artificial Sequence
  Synthetic
gggctgcuacttgtagugga

SEQ ID NO: 89571 - DNA, 26 bp, Artificial Sequence
  Synthetic
ttctttcacauccctgacttgtugat

SEQ ID NO: 89572 - DNA, 27 bp, Artificial Sequence
  Synthetic
gtcttacatggucaagatgttuccact

SEQ ID NO: 89573 - DNA, 28 bp, Artificial Sequence
  Synthetic
gctttagggttatucagccttctctaut

SEQ ID NO: 89574 - DNA, 23 bp, Artificial Sequence
  Synthetic
ctgaaggaaccaguttggtggua

SEQ ID NO: 89575 - DNA, 28 bp, Artificial Sequence
  Synthetic
tgaugatctttatataugcgcacacaca

SEQ ID NO: 89576 - DNA, 21 bp, Artificial Sequence
  Synthetic
gtggaatagucccacgcugaa

SEQ ID NO: 89577 - DNA, 20 bp, Artificial Sequence
  Synthetic
aatagcagggaugcguagcc

SEQ ID NO: 89578 - DNA, 25 bp, Artificial Sequence
  Synthetic
agactctagtgugttcttagggcut

SEQ ID NO: 89579 - DNA, 27 bp, Artificial Sequence
  Synthetic
ccatatcatcacuggcttcttgtttug

SEQ ID NO: 89580 - DNA, 23 bp, Artificial Sequence
  Synthetic
gggagaaugacattgatguggac

SEQ ID NO: 89581 - DNA, 22 bp, Artificial Sequence
  Synthetic
agagcctuccacagcttttuca

SEQ ID NO: 89582 - DNA, 21 bp, Artificial Sequence
  Synthetic
gctcacatuccgtctctcugg

SEQ ID NO: 89583 - DNA, 23 bp, Artificial Sequence
  Synthetic
agaaaccgccutacctgguaaaa

SEQ ID NO: 89584 - DNA, 20 bp, Artificial Sequence
  Synthetic
tccaacaucccagcttgcut

SEQ ID NO: 89585 - DNA, 28 bp, Artificial Sequence
  Synthetic
acataaattacucacaacttccucagca

SEQ ID NO: 89586 - DNA, 24 bp, Artificial Sequence
  Synthetic
acatgttgggaaugaatgagcuct

SEQ ID NO: 89587 - DNA, 25 bp, Artificial Sequence
  Synthetic
ccagtacaggugatctgaggattuc

SEQ ID NO: 89588 - DNA, 21 bp, Artificial Sequence
  Synthetic
ccgacatcugtgttgccauca

SEQ ID NO: 89589 - DNA, 22 bp, Artificial Sequence
  Synthetic
ctggaaaggccuagaaaugcca

SEQ ID NO: 89590 - DNA, 22 bp, Artificial Sequence
  Synthetic
ctcagcctcugtcttgtgtuct

SEQ ID NO: 89591 - DNA, 21 bp, Artificial Sequence
  Synthetic
gagccaagugagtgaguagcc

SEQ ID NO: 89592 - DNA, 28 bp, Artificial Sequence
  Synthetic
gaagacattguacgttgcttaaatcuga

SEQ ID NO: 89593 - DNA, 24 bp, Artificial Sequence
  Synthetic
gttttgacaagaaauggcugcaga

SEQ ID NO: 89594 - DNA, 21 bp, Artificial Sequence
  Synthetic
ccttcaggauctgcagccaut

SEQ ID NO: 89595 - DNA, 29 bp, Artificial Sequence
  Synthetic
ccaaaactagguggaatttgaaatatgut

SEQ ID NO: 89596 - DNA, 24 bp, Artificial Sequence
  Synthetic
gacttcagugcattcaugaagcat

SEQ ID NO: 89597 - DNA, 21 bp, Artificial Sequence
  Synthetic
gccaccauttccacagucact

SEQ ID NO: 89598 - DNA, 22 bp, Artificial Sequence
  Synthetic
ccagtggtcutcctccttaucc

SEQ ID NO: 89599 - DNA, 24 bp, Artificial Sequence
  Synthetic
agaagcgaaagcaggutctuaact

SEQ ID NO: 89600 - DNA, 24 bp, Artificial Sequence
  Synthetic
gtgctugggtgtattugcaaagaa

SEQ ID NO: 89601 - DNA, 22 bp, Artificial Sequence
  Synthetic
tctgggcuttgaaatacuggct

SEQ ID NO: 89602 - DNA, 28 bp, Artificial Sequence
  Synthetic
cctaagcaaatgugattttacccagaug

SEQ ID NO: 89603 - DNA, 26 bp, Artificial Sequence
  Synthetic
cacaattccagaautctccagaggut

SEQ ID NO: 89604 - DNA, 21 bp, Artificial Sequence
  Synthetic
gaactgaccucacttgccuga

SEQ ID NO: 89605 - DNA, 21 bp, Artificial Sequence
  Synthetic
gtagttcauccgctccacgua

SEQ ID NO: 89606 - DNA, 17 bp, Artificial Sequence
  Synthetic
cgggcutgucgcgaaca

SEQ ID NO: 89607 - DNA, 19 bp, Artificial Sequence
  Synthetic
aacucccccaccaacaugg

SEQ ID NO: 89608 - DNA, 18 bp, Artificial Sequence
  Synthetic
agatcgccucaggcaugg

SEQ ID NO: 89609 - DNA, 17 bp, Artificial Sequence
  Synthetic
ccgcgccgugtacucat

SEQ ID NO: 89610 - DNA, 25 bp, Artificial Sequence
  Synthetic
catgccttugctaagctttctucaa

SEQ ID NO: 89611 - DNA, 25 bp, Artificial Sequence
  Synthetic
cuaagatguccacagcagacaaaag

SEQ ID NO: 89612 - DNA, 25 bp, Artificial Sequence
  Synthetic
ggactttgguccacaagcattuaag

SEQ ID NO: 89613 - DNA, 28 bp, Artificial Sequence
  Synthetic
actgcaaaccuctgaagaaaagtguaat

SEQ ID NO: 89614 - DNA, 28 bp, Artificial Sequence
  Synthetic
catgcagataacutgactttccttcuct

SEQ ID NO: 89615 - DNA, 27 bp, Artificial Sequence
  Synthetic
ggaatttaaagtugcgtgtgtctgtut

SEQ ID NO: 89616 - DNA, 21 bp, Artificial Sequence
  Synthetic
ggacaagggugctgtctuagg

SEQ ID NO: 89617 - DNA, 21 bp, Artificial Sequence
  Synthetic
ctgtgcttguagtggagcuga

SEQ ID NO: 89618 - DNA, 32 bp, Artificial Sequence
  Synthetic
agtattttctccutctaattcagtgtuccaag

SEQ ID NO: 89619 - DNA, 20 bp, Artificial Sequence
  Synthetic
ctgtcccugctgctaaugga

SEQ ID NO: 89620 - DNA, 28 bp, Artificial Sequence
  Synthetic
cctaaattgacuacattcttugcccaga

SEQ ID NO: 89621 - DNA, 28 bp, Artificial Sequence
  Synthetic
ctttaagattactutccagttgcgucat

SEQ ID NO: 89622 - DNA, 20 bp, Artificial Sequence
  Synthetic
gagaugctggucagccacat

SEQ ID NO: 89623 - DNA, 19 bp, Artificial Sequence
  Synthetic
tcugcagctuccaggaacc

SEQ ID NO: 89624 - DNA, 23 bp, Artificial Sequence
  Synthetic
ggatcacaccgugcttucaaaat

SEQ ID NO: 89625 - DNA, 28 bp, Artificial Sequence
  Synthetic
tgacactgtgggaauatatgtgctttut

SEQ ID NO: 89626 - DNA, 28 bp, Artificial Sequence
  Synthetic
caactactatgcaaugaaacagcaauct

SEQ ID NO: 89627 - DNA, 29 bp, Artificial Sequence
  Synthetic
aagcaaagugatactaugacagaaaagga

SEQ ID NO: 89628 - DNA, 27 bp, Artificial Sequence
  Synthetic
gagcatctcucagattttgctcuagaa

SEQ ID NO: 89629 - DNA, 20 bp, Artificial Sequence
  Synthetic
agacacugaggcgcatctug

SEQ ID NO: 89630 - DNA, 22 bp, Artificial Sequence
  Synthetic
tgatgcactcugggcaagaaut

SEQ ID NO: 89631 - DNA, 29 bp, Artificial Sequence
  Synthetic
gagaacaagaacagcuaaatguggaaaag

SEQ ID NO: 89632 - DNA, 24 bp, Artificial Sequence
  Synthetic
aaaggactttucccaccaagagut

SEQ ID NO: 89633 - DNA, 21 bp, Artificial Sequence
  Synthetic
gtauaagacggcggagcauca

SEQ ID NO: 89634 - DNA, 19 bp, Artificial Sequence
  Synthetic
ctgtucagcacgcucaagg

SEQ ID NO: 89635 - DNA, 28 bp, Artificial Sequence
  Synthetic
caccatggagcuctgttagtagataaut

SEQ ID NO: 89636 - DNA, 23 bp, Artificial Sequence
  Synthetic
tgacagugaggcagatgtcctua

SEQ ID NO: 89637 - DNA, 21 bp, Artificial Sequence
  Synthetic
caccaccacacutccagtcuc

SEQ ID NO: 89638 - DNA, 19 bp, Artificial Sequence
  Synthetic
ggautgctguccccaccac

SEQ ID NO: 89639 - DNA, 17 bp, Artificial Sequence
  Synthetic
ggccucccaggcaucac

SEQ ID NO: 89640 - DNA, 28 bp, Artificial Sequence
  Synthetic
cctgttttatagaaauactgtgcacugg

SEQ ID NO: 89641 - DNA, 28 bp, Artificial Sequence
  Synthetic
ttcatctaacutgtcatgtuccaacact

SEQ ID NO: 89642 - DNA, 21 bp, Artificial Sequence
  Synthetic
agcctctttcutgcgggtauc

SEQ ID NO: 89643 - DNA, 25 bp, Artificial Sequence
  Synthetic
ctccttgctucctttagtcacagua

SEQ ID NO: 89644 - DNA, 18 bp, Artificial Sequence
  Synthetic
cacagucaccgccgctua

SEQ ID NO: 89645 - DNA, 21 bp, Artificial Sequence
  Synthetic
ggaatcgttguggaggtgguc

SEQ ID NO: 89646 - DNA, 21 bp, Artificial Sequence
  Synthetic
aagaucaugcccaagaagcca

SEQ ID NO: 89647 - DNA, 27 bp, Artificial Sequence
  Synthetic
agagaagttgtucccaaatcattucct

SEQ ID NO: 89648 - DNA, 17 bp, Artificial Sequence
  Synthetic
cuccgggccgacaugag

SEQ ID NO: 89649 - DNA, 17 bp, Artificial Sequence
  Synthetic
ggcuccggcctgucaaa

SEQ ID NO: 89650 - DNA, 23 bp, Artificial Sequence
  Synthetic
ccctagccauccattcaccaaut

SEQ ID NO: 89651 - DNA, 19 bp, Artificial Sequence
  Synthetic
ccacaguggctcggaguag

SEQ ID NO: 89652 - DNA, 28 bp, Artificial Sequence
  Synthetic
gcugttgcuaaaacaaagaaaacagagt

SEQ ID NO: 89653 - DNA, 20 bp, Artificial Sequence
  Synthetic
gacccgaaggcaguctguag

SEQ ID NO: 89654 - DNA, 22 bp, Artificial Sequence
  Synthetic
ccaagaggguggagauccagat

SEQ ID NO: 89655 - DNA, 19 bp, Artificial Sequence
  Synthetic
gugtagccucagccacagg

SEQ ID NO: 89656 - DNA, 23 bp, Artificial Sequence
  Synthetic
agaccutggagaatucagagcct

SEQ ID NO: 89657 - DNA, 22 bp, Artificial Sequence
  Synthetic
cccatuaccacagcauccaaga

SEQ ID NO: 89658 - DNA, 21 bp, Artificial Sequence
  Synthetic
cccagcucagcugcaaagaat

SEQ ID NO: 89659 - DNA, 25 bp, Artificial Sequence
  Synthetic
cctacgatcagucctaccaauacct

SEQ ID NO: 89660 - DNA, 20 bp, Artificial Sequence
  Synthetic
agtcaacugaaggccacguc

SEQ ID NO: 89661 - DNA, 28 bp, Artificial Sequence
  Synthetic
gcagcgtaataagcugtatctgttgaua

SEQ ID NO: 89662 - DNA, 24 bp, Artificial Sequence
  Synthetic
cactggtaccutggaaagcuaagt

SEQ ID NO: 89663 - DNA, 25 bp, Artificial Sequence
  Synthetic
tggcaacaauaaagatgaugaccca

SEQ ID NO: 89664 - DNA, 20 bp, Artificial Sequence
  Synthetic
gucgagacacccaacuccac

SEQ ID NO: 89665 - DNA, 21 bp, Artificial Sequence
  Synthetic
gttggcutagggaguccacat

SEQ ID NO: 89666 - DNA, 19 bp, Artificial Sequence
  Synthetic
gcctcaccutccccuggat

SEQ ID NO: 89667 - DNA, 17 bp, Artificial Sequence
  Synthetic
aagagcugggcgaccug

SEQ ID NO: 89668 - DNA, 21 bp, Artificial Sequence
  Synthetic
ctgggcgugaagaacucagaa

SEQ ID NO: 89669 - DNA, 20 bp, Artificial Sequence
  Synthetic
cacctgctuggacgagaugt

SEQ ID NO: 89670 - DNA, 18 bp, Artificial Sequence
  Synthetic
tcagguagucgcggagga

SEQ ID NO: 89671 - DNA, 18 bp, Artificial Sequence
  Synthetic
cgagctgcuggagcacua

SEQ ID NO: 89672 - DNA, 18 bp, Artificial Sequence
  Synthetic
ggaugcgagccaggtuct

SEQ ID NO: 89673 - DNA, 18 bp, Artificial Sequence
  Synthetic
ccgcgagagcutcgacug

SEQ ID NO: 89674 - DNA, 18 bp, Artificial Sequence
  Synthetic
gcuccagcagcucgaaga

SEQ ID NO: 89675 - DNA, 17 bp, Artificial Sequence
  Synthetic
gtgggcaccutccuggt

SEQ ID NO: 89676 - DNA, 17 bp, Artificial Sequence
  Synthetic
ccagcauggagcaccug

SEQ ID NO: 89677 - DNA, 18 bp, Artificial Sequence
  Synthetic
agcagccaaggccguaut

SEQ ID NO: 89678 - DNA, 24 bp, Artificial Sequence
  Synthetic
gaaagaacccacacuccgtgaaua

SEQ ID NO: 89679 - DNA, 20 bp, Artificial Sequence
  Synthetic
ttgacccggcuggtattguc

SEQ ID NO: 89680 - DNA, 19 bp, Artificial Sequence
  Synthetic
cgcacugagctgtccatug

SEQ ID NO: 89681 - DNA, 17 bp, Artificial Sequence
  Synthetic
cggtgggcugactccug

SEQ ID NO: 89682 - DNA, 17 bp, Artificial Sequence
  Synthetic
gaccaggguggcugcat

SEQ ID NO: 89683 - DNA, 21 bp, Artificial Sequence
  Synthetic
ccgggaccuccagtaccauag

SEQ ID NO: 89684 - DNA, 21 bp, Artificial Sequence
  Synthetic
gcuaagggcgaaaaagcagut

SEQ ID NO: 89685 - DNA, 17 bp, Artificial Sequence
  Synthetic
cgtucgcacgccgatua

SEQ ID NO: 89686 - DNA, 20 bp, Artificial Sequence
  Synthetic
ctctgctgcugtggagacug

SEQ ID NO: 89687 - DNA, 21 bp, Artificial Sequence
  Synthetic
ccagctcaccuctttgtcuct

SEQ ID NO: 89688 - DNA, 17 bp, Artificial Sequence
  Synthetic
gcgtgaugcgccgguaa

SEQ ID NO: 89689 - DNA, 22 bp, Artificial Sequence
  Synthetic
cagaaccttccucctcttccuc

SEQ ID NO: 89690 - DNA, 22 bp, Artificial Sequence
  Synthetic
cggagaucaccatcgucaaacc

SEQ ID NO: 89691 - DNA, 18 bp, Artificial Sequence
  Synthetic
tcagcaggcutgggcauc

SEQ ID NO: 89692 - DNA, 19 bp, Artificial Sequence
  Synthetic
cggaggcgccuacactuac

SEQ ID NO: 89693 - DNA, 18 bp, Artificial Sequence
  Synthetic
gccugccaaggccatgut

SEQ ID NO: 89694 - DNA, 28 bp, Artificial Sequence
  Synthetic
gagagaatcatuaggaagctgaacauca

SEQ ID NO: 89695 - DNA, 26 bp, Artificial Sequence
  Synthetic
ccttcagaaacaccaucaatccttut

SEQ ID NO: 89696 - DNA, 20 bp, Artificial Sequence
  Synthetic
gaacggaaugtgcggaagug

SEQ ID NO: 89697 - DNA, 17 bp, Artificial Sequence
  Synthetic
gguggcagccgacaaug

SEQ ID NO: 89698 - DNA, 21 bp, Artificial Sequence
  Synthetic
gaaggagaggcaauggauccc

SEQ ID NO: 89699 - DNA, 28 bp, Artificial Sequence
  Synthetic
agggccacucatttcttatuaaaagaca

SEQ ID NO: 89700 - DNA, 25 bp, Artificial Sequence
  Synthetic
gagccattttucctctacagcucat

SEQ ID NO: 89701 - DNA, 27 bp, Artificial Sequence
  Synthetic
cccaactttcacaauaccaggtacaua

SEQ ID NO: 89702 - DNA, 22 bp, Artificial Sequence
  Synthetic
agacagcacaccagucttcaut

SEQ ID NO: 89703 - DNA, 28 bp, Artificial Sequence
  Synthetic
ccatgtgaaaatugaacctgcagataug

SEQ ID NO: 89704 - DNA, 21 bp, Artificial Sequence
  Synthetic
ccacatggtuccaggcaagua

SEQ ID NO: 89705 - DNA, 19 bp, Artificial Sequence
  Synthetic
cgagaaccuggctcgcauc

SEQ ID NO: 89706 - DNA, 24 bp, Artificial Sequence
  Synthetic
agaccaacuacggttgaaaacgua

SEQ ID NO: 89707 - DNA, 24 bp, Artificial Sequence
  Synthetic
agctccugcaaaccacagtattut

SEQ ID NO: 89708 - DNA, 28 bp, Artificial Sequence
  Synthetic
aatgcataggtcuactctgacttcatut

SEQ ID NO: 89709 - DNA, 21 bp, Artificial Sequence
  Synthetic
ttgugcaacccacucaacaga

SEQ ID NO: 89710 - DNA, 30 bp, Artificial Sequence
  Synthetic
aggaaaaatgtgguatctgaagctcuaaaa

SEQ ID NO: 89711 - DNA, 23 bp, Artificial Sequence
  Synthetic
gcatgtttcugcctagcttcuac

SEQ ID NO: 89712 - DNA, 26 bp, Artificial Sequence
  Synthetic
caataaaatggatgutcccccagcua

SEQ ID NO: 89713 - DNA, 28 bp, Artificial Sequence
  Synthetic
gacagtggaagcuatggtcatattauca

SEQ ID NO: 89714 - DNA, 27 bp, Artificial Sequence
  Synthetic
gtaatcatgtggauaggattgagccut

SEQ ID NO: 89715 - DNA, 24 bp, Artificial Sequence
  Synthetic
gtgatgccaggagutaagaggaut

SEQ ID NO: 89716 - DNA, 23 bp, Artificial Sequence
  Synthetic
cctgactgttugcagctttcaut

SEQ ID NO: 89717 - DNA, 28 bp, Artificial Sequence
  Synthetic
tttgtcatcgutttgttttagtugagca

SEQ ID NO: 89718 - DNA, 21 bp, Artificial Sequence
  Synthetic
gcaggcucaatctgaggauga

SEQ ID NO: 89719 - DNA, 24 bp, Artificial Sequence
  Synthetic
cagttttuggaagcacaaguggat

SEQ ID NO: 89720 - DNA, 26 bp, Artificial Sequence
  Synthetic
gggagtacaggauacattcaagctut

SEQ ID NO: 89721 - DNA, 26 bp, Artificial Sequence
  Synthetic
ggatgtugcaaaggacaaatatgugt

SEQ ID NO: 89722 - DNA, 20 bp, Artificial Sequence
  Synthetic
accucccaggccctaugaag

SEQ ID NO: 89723 - DNA, 21 bp, Artificial Sequence
  Synthetic
acagggcagcaaguaacucag

SEQ ID NO: 89724 - DNA, 26 bp, Artificial Sequence
  Synthetic
gacautaggactaguagaacgaacgg

SEQ ID NO: 89725 - DNA, 28 bp, Artificial Sequence
  Synthetic
tgacatgtaccacagaauaggaaggaua

SEQ ID NO: 89726 - DNA, 27 bp, Artificial Sequence
  Synthetic
cattttcactgaucacctttccagtuc

SEQ ID NO: 89727 - DNA, 24 bp, Artificial Sequence
  Synthetic
augttggcccugaaacaaaaacaa

SEQ ID NO: 89728 - DNA, 27 bp, Artificial Sequence
  Synthetic
ctcattctguagggcagtatttuccat

SEQ ID NO: 89729 - DNA, 28 bp, Artificial Sequence
  Synthetic
gcaagactggagagutaaatcagcttut

SEQ ID NO: 89730 - DNA, 22 bp, Artificial Sequence
  Synthetic
gaaagtcaccuaagggccucat

SEQ ID NO: 89731 - DNA, 23 bp, Artificial Sequence
  Synthetic
gctgtcauagccgagaacaaugg

SEQ ID NO: 89732 - DNA, 28 bp, Artificial Sequence
  Synthetic
cttctcctgcautgatttaactgcatut

SEQ ID NO: 89733 - DNA, 20 bp, Artificial Sequence
  Synthetic
tcgggaggcugccctattua

SEQ ID NO: 89734 - DNA, 22 bp, Artificial Sequence
  Synthetic
gcccaggaaugctacagauacc

SEQ ID NO: 89735 - DNA, 27 bp, Artificial Sequence
  Synthetic
aaaaccctgatguttcagtgtctagut

SEQ ID NO: 89736 - DNA, 28 bp, Artificial Sequence
  Synthetic
gacttcaguacaactcacuggaagaaat

SEQ ID NO: 89737 - DNA, 27 bp, Artificial Sequence
  Synthetic
gctgaaagcauttaagtacagauccgt

SEQ ID NO: 89738 - DNA, 21 bp, Artificial Sequence
  Synthetic
gggcutguggagaagagaagt

SEQ ID NO: 89739 - DNA, 28 bp, Artificial Sequence
  Synthetic
tctggattcuagccactctaacacttua

SEQ ID NO: 89740 - DNA, 25 bp, Artificial Sequence
  Synthetic
acttcacttgccuatttctgccaut

SEQ ID NO: 89741 - DNA, 20 bp, Artificial Sequence
  Synthetic
ctccacagaucaggcagguc

SEQ ID NO: 89742 - DNA, 28 bp, Artificial Sequence
  Synthetic
aaagtcactttuagagcccttaatgugt

SEQ ID NO: 89743 - DNA, 25 bp, Artificial Sequence
  Synthetic
ggacctgcucctagatgggtauaaa

SEQ ID NO: 89744 - DNA, 19 bp, Artificial Sequence
  Synthetic
gatggccaggcuctgtgut

SEQ ID NO: 89745 - DNA, 20 bp, Artificial Sequence
  Synthetic
gcagcaggautggcttgtut

SEQ ID NO: 89746 - DNA, 19 bp, Artificial Sequence
  Synthetic
cccutcttuggcgacgagt

SEQ ID NO: 89747 - DNA, 19 bp, Artificial Sequence
  Synthetic
gcugccacagggagctuag

SEQ ID NO: 89748 - DNA, 22 bp, Artificial Sequence
  Synthetic
cacctccttgucaaccctgtut

SEQ ID NO: 89749 - DNA, 22 bp, Artificial Sequence
  Synthetic
cagaaaggaucttgggcactug

SEQ ID NO: 89750 - DNA, 27 bp, Artificial Sequence
  Synthetic
cautgactattacttuccaccccagaa

SEQ ID NO: 89751 - DNA, 22 bp, Artificial Sequence
  Synthetic
gtgcatgugcaagacccttuac

SEQ ID NO: 89752 - DNA, 23 bp, Artificial Sequence
  Synthetic
cgaaagaagacaaaggugugcat

SEQ ID NO: 89753 - DNA, 22 bp, Artificial Sequence
  Synthetic
gugcaacaaggaatuccccaac

SEQ ID NO: 89754 - DNA, 27 bp, Artificial Sequence
  Synthetic
ctttcttctguacctaattctguccca

SEQ ID NO: 89755 - DNA, 28 bp, Artificial Sequence
  Synthetic
gcagtagaggaacuacacaaactttuga

SEQ ID NO: 89756 - DNA, 21 bp, Artificial Sequence
  Synthetic
atcgtgactgutgtgggacuc

SEQ ID NO: 89757 - DNA, 22 bp, Artificial Sequence
  Synthetic
gccttccaugcgatcatttugt

SEQ ID NO: 89758 - DNA, 25 bp, Artificial Sequence
  Synthetic
aaacacttacctucaccagcttcut

SEQ ID NO: 89759 - DNA, 28 bp, Artificial Sequence
  Synthetic
gttgcattgttgacugttaggtaactut

SEQ ID NO: 89760 - DNA, 23 bp, Artificial Sequence
  Synthetic
gtcagggaautcctcaagucagg

SEQ ID NO: 89761 - DNA, 27 bp, Artificial Sequence
  Synthetic
tccctcccutttaactcttacugaaca

SEQ ID NO: 89762 - DNA, 21 bp, Artificial Sequence
  Synthetic
catggttgagcugtccacuga

SEQ ID NO: 89763 - DNA, 26 bp, Artificial Sequence
  Synthetic
catttgtuctgagagttuccacacag

SEQ ID NO: 89764 - DNA, 22 bp, Artificial Sequence
  Synthetic
ccggaaatgauggcagagauca

SEQ ID NO: 89765 - DNA, 23 bp, Artificial Sequence
  Synthetic
tgcagaggaguagtgcagagtua

SEQ ID NO: 89766 - DNA, 28 bp, Artificial Sequence
  Synthetic
caatgaacctguctaatatgctctucca

SEQ ID NO: 89767 - DNA, 21 bp, Artificial Sequence
  Synthetic
ccgaagttgucaacgaccuca

SEQ ID NO: 89768 - DNA, 28 bp, Artificial Sequence
  Synthetic
cauataacccaatuagaagaggcaagca

SEQ ID NO: 89769 - DNA, 28 bp, Artificial Sequence
  Synthetic
atgtgcaacattuttcgtcttgtgauat

SEQ ID NO: 89770 - DNA, 28 bp, Artificial Sequence
  Synthetic
gtgcttctctuttgatttaacaagugct

SEQ ID NO: 89771 - DNA, 27 bp, Artificial Sequence
  Synthetic
cgttatcgacaaagggutgaactttua

SEQ ID NO: 89772 - DNA, 27 bp, Artificial Sequence
  Synthetic
cagcatttagacuatcttgcagtucct

SEQ ID NO: 89773 - DNA, 27 bp, Artificial Sequence
  Synthetic
acgacgagaaaaagaaautgcugaaac

SEQ ID NO: 89774 - DNA, 22 bp, Artificial Sequence
  Synthetic
cgauaacgcagactcucaacct

SEQ ID NO: 89775 - DNA, 33 bp, Artificial Sequence
  Synthetic
attaaagtcaatgauttttgtcatctuaccaaa

SEQ ID NO: 89776 - DNA, 25 bp, Artificial Sequence
  Synthetic
gtaacatgctucagcaaggattcut

SEQ ID NO: 89777 - DNA, 23 bp, Artificial Sequence
  Synthetic
tgcacgtcccacuggagaataua

SEQ ID NO: 89778 - DNA, 22 bp, Artificial Sequence
  Synthetic
cggatgtgtucctgaagagugt

SEQ ID NO: 89779 - DNA, 25 bp, Artificial Sequence
  Synthetic
catcttaagcaagugcatgaagcuc

SEQ ID NO: 89780 - DNA, 23 bp, Artificial Sequence
  Synthetic
catgtggcugtacagttccucaa

SEQ ID NO: 89781 - DNA, 21 bp, Artificial Sequence
  Synthetic
cagugtgtctacugccacgag

SEQ ID NO: 89782 - DNA, 33 bp, Artificial Sequence
  Synthetic
attcatcacctttucatatttttacagatcuga

SEQ ID NO: 89783 - DNA, 28 bp, Artificial Sequence
  Synthetic
cagcaatcuacaagttaccgaaaucaac

SEQ ID NO: 89784 - DNA, 25 bp, Artificial Sequence
  Synthetic
tttcggtaacutgtagattgcugct

SEQ ID NO: 89785 - DNA, 28 bp, Artificial Sequence
  Synthetic
cgtttttcataaugctgtgcacauaact

SEQ ID NO: 89786 - DNA, 27 bp, Artificial Sequence
  Synthetic
tcaagactcttacuatgcgtgacttug

SEQ ID NO: 89787 - DNA, 21 bp, Artificial Sequence
  Synthetic
ctctcgaaccutcttcuccga

SEQ ID NO: 89788 - DNA, 28 bp, Artificial Sequence
  Synthetic
cagtgtttttcucgcaagtgtttttcua

SEQ ID NO: 89789 - DNA, 26 bp, Artificial Sequence
  Synthetic
gaaaaccaagggaaagugcataagug

SEQ ID NO: 89790 - DNA, 22 bp, Artificial Sequence
  Synthetic
gaaacaaucagacctgggucct

SEQ ID NO: 89791 - DNA, 28 bp, Artificial Sequence
  Synthetic
gcagattcaccugaaaactatgcactua

SEQ ID NO: 89792 - DNA, 23 bp, Artificial Sequence
  Synthetic
tctcctgucccctatgcaatuct

SEQ ID NO: 89793 - DNA, 22 bp, Artificial Sequence
  Synthetic
acagggaagcguatttccucac

SEQ ID NO: 89794 - DNA, 21 bp, Artificial Sequence
  Synthetic
gggagguctcctcuacgaaga

SEQ ID NO: 89795 - DNA, 23 bp, Artificial Sequence
  Synthetic
aggacuggaagaugaaggacact

SEQ ID NO: 89796 - DNA, 28 bp, Artificial Sequence
  Synthetic
gtgtactuagcaccacattgatuacaga

SEQ ID NO: 89797 - DNA, 24 bp, Artificial Sequence
  Synthetic
aacattccctuggccctgaatuat

SEQ ID NO: 89798 - DNA, 23 bp, Artificial Sequence
  Synthetic
caaaggacucaccgcagaaaaug

SEQ ID NO: 89799 - DNA, 29 bp, Artificial Sequence
  Synthetic
agcacaguaacgaaaagaaagtctauagg

SEQ ID NO: 89800 - DNA, 24 bp, Artificial Sequence
  Synthetic
aatatgggccugttctggcttauc

SEQ ID NO: 89801 - DNA, 21 bp, Artificial Sequence
  Synthetic
acatgactgguccctcgagua

SEQ ID NO: 89802 - DNA, 24 bp, Artificial Sequence
  Synthetic
cctggattucttcccattguggat

SEQ ID NO: 89803 - DNA, 28 bp, Artificial Sequence
  Synthetic
ctcccaaagaaccaguagtagaagtcua

SEQ ID NO: 89804 - DNA, 22 bp, Artificial Sequence
  Synthetic
cctcacacugactgcacttcug

SEQ ID NO: 89805 - DNA, 21 bp, Artificial Sequence
  Synthetic
tcacacguccaacaagccaua

SEQ ID NO: 89806 - DNA, 22 bp, Artificial Sequence
  Synthetic
catatgtucccggaggccatut

SEQ ID NO: 89807 - DNA, 26 bp, Artificial Sequence
  Synthetic
ctatggaaactutgctgcagaaucac

SEQ ID NO: 89808 - DNA, 28 bp, Artificial Sequence
  Synthetic
tggcgaauttgtacaauaggaacaagaa

SEQ ID NO: 89809 - DNA, 22 bp, Artificial Sequence
  Synthetic
gggtttcucactgactctuccc

SEQ ID NO: 89810 - DNA, 26 bp, Artificial Sequence
  Synthetic
acagctgtagguaacttttgcttgut

SEQ ID NO: 89811 - DNA, 23 bp, Artificial Sequence
  Synthetic
gtacgacuccagattccaaccuc

SEQ ID NO: 89812 - DNA, 17 bp, Artificial Sequence
  Synthetic
cgggcucctccgtguag

SEQ ID NO: 89813 - DNA, 18 bp, Artificial Sequence
  Synthetic
acuggcaaggaccctgug

SEQ ID NO: 89814 - DNA, 21 bp, Artificial Sequence
  Synthetic
gtctugcaggaggtcatcugg

SEQ ID NO: 89815 - DNA, 21 bp, Artificial Sequence
  Synthetic
ccgccuggccatgaagtauat

SEQ ID NO: 89816 - DNA, 21 bp, Artificial Sequence
  Synthetic
cggaagucccagtugcaagat

SEQ ID NO: 89817 - DNA, 22 bp, Artificial Sequence
  Synthetic
cctucagaaacacctgcuggac

SEQ ID NO: 89818 - DNA, 21 bp, Artificial Sequence
  Synthetic
ctcctggtcautgagcagcut

SEQ ID NO: 89819 - DNA, 19 bp, Artificial Sequence
  Synthetic
ggcagcagaaugugaacgg

SEQ ID NO: 89820 - DNA, 25 bp, Artificial Sequence
  Synthetic
atctcattctugctgagcttctugt

SEQ ID NO: 89821 - DNA, 28 bp, Artificial Sequence
  Synthetic
ttctcctaactctugtcctcctaatcuc

SEQ ID NO: 89822 - DNA, 21 bp, Artificial Sequence
  Synthetic
gtctgatgutgtggtcucgga

SEQ ID NO: 89823 - DNA, 21 bp, Artificial Sequence
  Synthetic
gcagacuttgcugaccaacag

SEQ ID NO: 89824 - DNA, 28 bp, Artificial Sequence
  Synthetic
cacaaattaagugatgctaatggucagg

SEQ ID NO: 89825 - DNA, 25 bp, Artificial Sequence
  Synthetic
aatgagaatugacccatgagtugga

SEQ ID NO: 89826 - DNA, 27 bp, Artificial Sequence
  Synthetic
gauctgtataggtauccaagccaagac

SEQ ID NO: 89827 - DNA, 27 bp, Artificial Sequence
  Synthetic
atttggtctaauggtacaactgcugaa

SEQ ID NO: 89828 - DNA, 23 bp, Artificial Sequence
  Synthetic
gctttctggaucctgacatuggg

SEQ ID NO: 89829 - DNA, 23 bp, Artificial Sequence
  Synthetic
tggctcatucatgctcttaugct

SEQ ID NO: 89830 - DNA, 18 bp, Artificial Sequence
  Synthetic
gccctccuggctgaucct

SEQ ID NO: 89831 - DNA, 17 bp, Artificial Sequence
  Synthetic
cggcagcuccctggaug

SEQ ID NO: 89832 - DNA, 24 bp, Artificial Sequence
  Synthetic
aaccaaaataugcagggagauggt

SEQ ID NO: 89833 - DNA, 25 bp, Artificial Sequence
  Synthetic
ggattgctcagautgggtggtaauc

SEQ ID NO: 89834 - DNA, 23 bp, Artificial Sequence
  Synthetic
caggatcuccctcgtctttuacc

SEQ ID NO: 89835 - DNA, 24 bp, Artificial Sequence
  Synthetic
gggccatacutttcacactctucc

SEQ ID NO: 89836 - DNA, 21 bp, Artificial Sequence
  Synthetic
acttcaugggagccacctcua

SEQ ID NO: 89837 - DNA, 25 bp, Artificial Sequence
  Synthetic
agcatgtcatuctccttgtttugga

SEQ ID NO: 89838 - DNA, 23 bp, Artificial Sequence
  Synthetic
gcugaaaaagcccgugagaaaga

SEQ ID NO: 89839 - DNA, 23 bp, Artificial Sequence
  Synthetic
gtccttucggcaagagactugat

SEQ ID NO: 89840 - DNA, 21 bp, Artificial Sequence
  Synthetic
gctctcttcaugccctgcauc

SEQ ID NO: 89841 - DNA, 22 bp, Artificial Sequence
  Synthetic
actagtgccaauggctgcttut

SEQ ID NO: 89842 - DNA, 20 bp, Artificial Sequence
  Synthetic
agcccactuacctgcgttuc

SEQ ID NO: 89843 - DNA, 28 bp, Artificial Sequence
  Synthetic
gtctttucaagtgagguaaccaacaaaa

SEQ ID NO: 89844 - DNA, 21 bp, Artificial Sequence
  Synthetic
gggaaucttggctuccacacc

SEQ ID NO: 89845 - DNA, 22 bp, Artificial Sequence
  Synthetic
gggctcacutcccagtucaaaa

SEQ ID NO: 89846 - DNA, 26 bp, Artificial Sequence
  Synthetic
cgaaataactcucgagccttcauacc

SEQ ID NO: 89847 - DNA, 21 bp, Artificial Sequence
  Synthetic
gcgagcuttcuaccccagaga

SEQ ID NO: 89848 - DNA, 19 bp, Artificial Sequence
  Synthetic
cccaccgacugctgaaugg

SEQ ID NO: 89849 - DNA, 21 bp, Artificial Sequence
  Synthetic
ggcacaaugaagaggcatcug

SEQ ID NO: 89850 - DNA, 20 bp, Artificial Sequence
  Synthetic
tcttggtcucaccgttgugg

SEQ ID NO: 89851 - DNA, 25 bp, Artificial Sequence
  Synthetic
cagtgtgagugagtgtcagtguaat

SEQ ID NO: 89852 - DNA, 18 bp, Artificial Sequence
  Synthetic
ctgcuggcctuggagaca

SEQ ID NO: 89853 - DNA, 18 bp, Artificial Sequence
  Synthetic
cugggagacccctuccac

SEQ ID NO: 89854 - DNA, 22 bp, Artificial Sequence
  Synthetic
cctccaucagaatgtccuccag

SEQ ID NO: 89855 - DNA, 20 bp, Artificial Sequence
  Synthetic
cgcagcaacgutccatguag

SEQ ID NO: 89856 - DNA, 18 bp, Artificial Sequence
  Synthetic
ggagcautcugggcaggt

SEQ ID NO: 89857 - DNA, 19 bp, Artificial Sequence
  Synthetic
ctccagggcugctttccut

SEQ ID NO: 89858 - DNA, 20 bp, Artificial Sequence
  Synthetic
tgtcagaagccgaagucgug

SEQ ID NO: 89859 - DNA, 24 bp, Artificial Sequence
  Synthetic
ctgagggacuctgaaccctactua

SEQ ID NO: 89860 - DNA, 22 bp, Artificial Sequence
  Synthetic
tcatcctgacuggtcctcctut

SEQ ID NO: 89861 - DNA, 20 bp, Artificial Sequence
  Synthetic
ccctgctcucttcagtgucc

SEQ ID NO: 89862 - DNA, 24 bp, Artificial Sequence
  Synthetic
aagaaatccaggugaaagcaguca

SEQ ID NO: 89863 - DNA, 22 bp, Artificial Sequence
  Synthetic
tccccucctgctcatucagaat

SEQ ID NO: 89864 - DNA, 23 bp, Artificial Sequence
  Synthetic
tcctaggccaauccttcuaaggt

SEQ ID NO: 89865 - DNA, 21 bp, Artificial Sequence
  Synthetic
ctgagtacauggccaauggct

SEQ ID NO: 89866 - DNA, 22 bp, Artificial Sequence
  Synthetic
ggcctgaaaauccagagctuca

SEQ ID NO: 89867 - DNA, 22 bp, Artificial Sequence
  Synthetic
agttcaccaugtgtgtgtucca

SEQ ID NO: 89868 - DNA, 22 bp, Artificial Sequence
  Synthetic
tgctacagtutctgcctctucc

SEQ ID NO: 89869 - DNA, 26 bp, Artificial Sequence
  Synthetic
gacaactcattaguagcctgactgut

SEQ ID NO: 89870 - DNA, 26 bp, Artificial Sequence
  Synthetic
tgataatgccaguaaactagcugcaa

SEQ ID NO: 89871 - DNA, 25 bp, Artificial Sequence
  Synthetic
tggaaccugaacagaattctucacc

SEQ ID NO: 89872 - DNA, 22 bp, Artificial Sequence
  Synthetic
gcatctcccucaggtagtucag

SEQ ID NO: 89873 - DNA, 25 bp, Artificial Sequence
  Synthetic
gactagttcctugcctttcctguag

SEQ ID NO: 89874 - DNA, 28 bp, Artificial Sequence
  Synthetic
gaaaaccacatcucacataaatgccaut

SEQ ID NO: 89875 - DNA, 21 bp, Artificial Sequence
  Synthetic
tggaggcagcucagagtuaga

SEQ ID NO: 89876 - DNA, 21 bp, Artificial Sequence
  Synthetic
ggaaccacaaagcuagcguct

SEQ ID NO: 89877 - DNA, 25 bp, Artificial Sequence
  Synthetic
gtggcagaaaaggaauccttaguga

SEQ ID NO: 89878 - DNA, 22 bp, Artificial Sequence
  Synthetic
cctgacctgugtgtctgtguat

SEQ ID NO: 89879 - DNA, 23 bp, Artificial Sequence
  Synthetic
caccauguacaccagaaacacca

SEQ ID NO: 89880 - DNA, 21 bp, Artificial Sequence
  Synthetic
cagaucaatuccgcacagacc

SEQ ID NO: 89881 - DNA, 28 bp, Artificial Sequence
  Synthetic
ggtttcugaaaggaacaggtattuagca

SEQ ID NO: 89882 - DNA, 24 bp, Artificial Sequence
  Synthetic
cttactucaagcaaagctcagugt

SEQ ID NO: 89883 - DNA, 24 bp, Artificial Sequence
  Synthetic
caccattcagagugctttttccut

SEQ ID NO: 89884 - DNA, 22 bp, Artificial Sequence
  Synthetic
caggttccucagcttcctucag

SEQ ID NO: 89885 - DNA, 24 bp, Artificial Sequence
  Synthetic
ggctgcauacatgtgtagauggat

SEQ ID NO: 89886 - DNA, 22 bp, Artificial Sequence
  Synthetic
tccatgttugggtgctttguga

SEQ ID NO: 89887 - DNA, 24 bp, Artificial Sequence
  Synthetic
gcaaaccttugcacagtatcaucc

SEQ ID NO: 89888 - DNA, 27 bp, Artificial Sequence
  Synthetic
gagattttggaugatactgugcaaagg

SEQ ID NO: 89889 - DNA, 24 bp, Artificial Sequence
  Synthetic
caggacugctcagacatucaagaa

SEQ ID NO: 89890 - DNA, 23 bp, Artificial Sequence
  Synthetic
gccaaaautcacugacaaaggct

SEQ ID NO: 89891 - DNA, 22 bp, Artificial Sequence
  Synthetic
ggagcaucaagagagacaccut

SEQ ID NO: 89892 - DNA, 22 bp, Artificial Sequence
  Synthetic
cttgaggcucatctctctgcuc

SEQ ID NO: 89893 - DNA, 26 bp, Artificial Sequence
  Synthetic
gagccttagaucagcagaaagaugaa

SEQ ID NO: 89894 - DNA, 21 bp, Artificial Sequence
  Synthetic
ccagtcctcugccctcttcut

SEQ ID NO: 89895 - DNA, 21 bp, Artificial Sequence
  Synthetic
gucttctccugcacaggaacc

SEQ ID NO: 89896 - DNA, 20 bp, Artificial Sequence
  Synthetic
cgaaaccugagaaggccuca

SEQ ID NO: 89897 - DNA, 20 bp, Artificial Sequence
  Synthetic
ctgugggtgacuggcagaaa

SEQ ID NO: 89898 - DNA, 21 bp, Artificial Sequence
  Synthetic
cgcagtaaugcgaacauccaa

SEQ ID NO: 89899 - DNA, 26 bp, Artificial Sequence
  Synthetic
gtgccaattaagugcataaatgcugt

SEQ ID NO: 89900 - DNA, 25 bp, Artificial Sequence
  Synthetic
cgtgcaaagaguaaaacatgtuccc

SEQ ID NO: 89901 - DNA, 27 bp, Artificial Sequence
  Synthetic
aatcactgaagtutgttttccctcuct

SEQ ID NO: 89902 - DNA, 25 bp, Artificial Sequence
  Synthetic
cgaagaaagagacuctggaaacuca

SEQ ID NO: 89903 - DNA, 27 bp, Artificial Sequence
  Synthetic
cagagtcatcccugcttcataacatut

SEQ ID NO: 89904 - DNA, 21 bp, Artificial Sequence
  Synthetic
tgtccatcutgtcgtctucgg

SEQ ID NO: 89905 - DNA, 26 bp, Artificial Sequence
  Synthetic
cccutggaagcaucaaagaagaaaat

SEQ ID NO: 89906 - DNA, 28 bp, Artificial Sequence
  Synthetic
agccatgattuatgattcagttguacct

SEQ ID NO: 89907 - DNA, 25 bp, Artificial Sequence
  Synthetic
tgattttgguaagctacuggagcat

SEQ ID NO: 89908 - DNA, 23 bp, Artificial Sequence
  Synthetic
ctttcaccaucctcttccugaca

SEQ ID NO: 89909 - DNA, 20 bp, Artificial Sequence
  Synthetic
gtagucgcagacgcaguagg

SEQ ID NO: 89910 - DNA, 21 bp, Artificial Sequence
  Synthetic
cccaacaaggauggagtcgug

SEQ ID NO: 89911 - DNA, 21 bp, Artificial Sequence
  Synthetic
cctgggacaucccucagacat

SEQ ID NO: 89912 - DNA, 22 bp, Artificial Sequence
  Synthetic
agtactuggagggagagcaugt

SEQ ID NO: 89913 - DNA, 21 bp, Artificial Sequence
  Synthetic
catgguggagagcacgagaua

SEQ ID NO: 89914 - DNA, 21 bp, Artificial Sequence
  Synthetic
tggtgtggacucacccattut

SEQ ID NO: 89915 - DNA, 28 bp, Artificial Sequence
  Synthetic
gccctttatgatuacatgccaatgaaug

SEQ ID NO: 89916 - DNA, 23 bp, Artificial Sequence
  Synthetic
cttccgcagcugtagatcattug

SEQ ID NO: 89917 - DNA, 28 bp, Artificial Sequence
  Synthetic
ccctcctacctuttctcctaactacaua

SEQ ID NO: 89918 - DNA, 26 bp, Artificial Sequence
  Synthetic
cttttatugactcaaaguggcaggat

SEQ ID NO: 89919 - DNA, 23 bp, Artificial Sequence
  Synthetic
tcaactgttccuccagtctcuga

SEQ ID NO: 89920 - DNA, 26 bp, Artificial Sequence
  Synthetic
gtagtagagucaaagaagaaggcugt

SEQ ID NO: 89921 - DNA, 22 bp, Artificial Sequence
  Synthetic
ctcaaggagggcucaacactua

SEQ ID NO: 89922 - DNA, 22 bp, Artificial Sequence
  Synthetic
acaaatgcacagucccctucaa

SEQ ID NO: 89923 - DNA, 22 bp, Artificial Sequence
  Synthetic
gagugccactcaaugaaggaga

SEQ ID NO: 89924 - DNA, 21 bp, Artificial Sequence
  Synthetic
gcugtucaaaagcaagagcct

SEQ ID NO: 89925 - DNA, 28 bp, Artificial Sequence
  Synthetic
ggacautggcaaacuaaaaggagaaaat

SEQ ID NO: 89926 - DNA, 26 bp, Artificial Sequence
  Synthetic
tcctttccccugtatgtttccacuat

SEQ ID NO: 89927 - DNA, 28 bp, Artificial Sequence
  Synthetic
ccaaaagtgaucaactactttctuccaa

SEQ ID NO: 89928 - DNA, 27 bp, Artificial Sequence
  Synthetic
tcagacttactugctctaagacacuct

SEQ ID NO: 89929 - DNA, 22 bp, Artificial Sequence
  Synthetic
cacaagtucagcacagcatugg

SEQ ID NO: 89930 - DNA, 25 bp, Artificial Sequence
  Synthetic
gaagatccttgguattgcaaagcug

SEQ ID NO: 89931 - DNA, 28 bp, Artificial Sequence
  Synthetic
cacaggttttggutgacagtgataauaa

SEQ ID NO: 89932 - DNA, 28 bp, Artificial Sequence
  Synthetic
tgcctcaaaagtucgttttcatttacut

SEQ ID NO: 89933 - DNA, 26 bp, Artificial Sequence
  Synthetic
aacacgaacaaaccgautcagaaauc

SEQ ID NO: 89934 - DNA, 29 bp, Artificial Sequence
  Synthetic
agttctcgctcutttattcctttcacuaa

SEQ ID NO: 89935 - DNA, 26 bp, Artificial Sequence
  Synthetic
caaatcaaaacccagutgcaugaaga

SEQ ID NO: 89936 - DNA, 28 bp, Artificial Sequence
  Synthetic
cagagttatctguttgaatgtcctguct

SEQ ID NO: 89937 - DNA, 28 bp, Artificial Sequence
  Synthetic
gtttagataccagcaugagcaaaugaac

SEQ ID NO: 89938 - DNA, 26 bp, Artificial Sequence
  Synthetic
acatcttgtttcucctttagctgcut

SEQ ID NO: 89939 - DNA, 28 bp, Artificial Sequence
  Synthetic
tgcaacaautagaactcuccaggaaaat

SEQ ID NO: 89940 - DNA, 25 bp, Artificial Sequence
  Synthetic
cttctcuaaaaagagctgggtgugt

SEQ ID NO: 89941 - DNA, 28 bp, Artificial Sequence
  Synthetic
aagaucaaaaccagagtaagaugcaact

SEQ ID NO: 89942 - DNA, 25 bp, Artificial Sequence
  Synthetic
caatcgaaucagacaatctgtggut

SEQ ID NO: 89943 - DNA, 21 bp, Artificial Sequence
  Synthetic
tcattgctuactccccaguct

SEQ ID NO: 89944 - DNA, 29 bp, Artificial Sequence
  Synthetic
ggccagtataguccacttgtaattuagaa

SEQ ID NO: 89945 - DNA, 23 bp, Artificial Sequence
  Synthetic
gcaggtgaugaccacaguacaaa

SEQ ID NO: 89946 - DNA, 29 bp, Artificial Sequence
  Synthetic
catccatttcctucttttgctcttguaaa

SEQ ID NO: 89947 - DNA, 28 bp, Artificial Sequence
  Synthetic
agtgttactgaacuagcatctgagguat

SEQ ID NO: 89948 - DNA, 25 bp, Artificial Sequence
  Synthetic
tgttccttgaucgtgttcagtugag

SEQ ID NO: 89949 - DNA, 24 bp, Artificial Sequence
  Synthetic
caagaagaatuggaacgacucagg

SEQ ID NO: 89950 - DNA, 21 bp, Artificial Sequence
  Synthetic
gggctgacucgtgttgcauat

SEQ ID NO: 89951 - DNA, 26 bp, Artificial Sequence
  Synthetic
agttttacaaacauccagcactggua

SEQ ID NO: 89952 - DNA, 20 bp, Artificial Sequence
  Synthetic
gcggttcgacuctgctctuc

SEQ ID NO: 89953 - DNA, 28 bp, Artificial Sequence
  Synthetic
gctgcaggaggaautggataaatatuct

SEQ ID NO: 89954 - DNA, 28 bp, Artificial Sequence
  Synthetic
ggtctttttccuctatggtctgtctuaa

SEQ ID NO: 89955 - DNA, 27 bp, Artificial Sequence
  Synthetic
gucatctagttuagaagagcagaagca

SEQ ID NO: 89956 - DNA, 25 bp, Artificial Sequence
  Synthetic
atttatccaattccucctgcagcut

SEQ ID NO: 89957 - DNA, 27 bp, Artificial Sequence
  Synthetic
aactaaggacgutttgtcatctagtut

SEQ ID NO: 89958 - DNA, 22 bp, Artificial Sequence
  Synthetic
gtgtcaacugcttctgctctuc

SEQ ID NO: 89959 - DNA, 26 bp, Artificial Sequence
  Synthetic
ccttacagcuggaacatgagcattua

SEQ ID NO: 89960 - DNA, 28 bp, Artificial Sequence
  Synthetic
tgagttctgctauttccatgtctttcut

SEQ ID NO: 89961 - DNA, 21 bp, Artificial Sequence
  Synthetic
aggcagaatugtgttgggcua

SEQ ID NO: 89962 - DNA, 22 bp, Artificial Sequence
  Synthetic
tgcttctuccaacagcctctut

SEQ ID NO: 89963 - DNA, 27 bp, Artificial Sequence
  Synthetic
tgaggcatcagutagaagaatgtctug

SEQ ID NO: 89964 - DNA, 26 bp, Artificial Sequence
  Synthetic
tttccagagaaagcugattgtuacca

SEQ ID NO: 89965 - DNA, 30 bp, Artificial Sequence
  Synthetic
gcaaaatcttucagaattagaacagcucaa

SEQ ID NO: 89966 - DNA, 29 bp, Artificial Sequence
  Synthetic
gagctgttctaautctgaaagatttugct

SEQ ID NO: 89967 - DNA, 27 bp, Artificial Sequence
  Synthetic
ggagcauattagacaaaaugaggagga

SEQ ID NO: 89968 - DNA, 28 bp, Artificial Sequence
  Synthetic
tcattccttattcuagaaagctccucct

SEQ ID NO: 89969 - DNA, 28 bp, Artificial Sequence
  Synthetic
agcagaaactugaggacaaaguagaaaa

SEQ ID NO: 89970 - DNA, 28 bp, Artificial Sequence
  Synthetic
ctccttctggaugcttacattacttuct

SEQ ID NO: 89971 - DNA, 25 bp, Artificial Sequence
  Synthetic
gctaattcaaagugaagtggcccua

SEQ ID NO: 89972 - DNA, 28 bp, Artificial Sequence
  Synthetic
cagtttactgaugatgctatctcctuca

SEQ ID NO: 89973 - DNA, 33 bp, Artificial Sequence
  Synthetic
ttttctttgagtacuaaaatgagaacatgtugt

SEQ ID NO: 89974 - DNA, 27 bp, Artificial Sequence
  Synthetic
gacattcttcuaactgatgccucacat

SEQ ID NO: 89975 - DNA, 29 bp, Artificial Sequence
  Synthetic
gcaaaatcttucagaattagaacagcuca

SEQ ID NO: 89976 - DNA, 30 bp, Artificial Sequence
  Synthetic
tgtccattttatcaucttcaagttgaugaa

SEQ ID NO: 89977 - DNA, 27 bp, Artificial Sequence
  Synthetic
accatgcaaauttttcttucagcacat

SEQ ID NO: 89978 - DNA, 22 bp, Artificial Sequence
  Synthetic
gcagcgcucgttcagtttauct

SEQ ID NO: 89979 - DNA, 18 bp, Artificial Sequence
  Synthetic
gaggaugcggttcgctug

SEQ ID NO: 89980 - DNA, 18 bp, Artificial Sequence
  Synthetic
tggcagguaacggctugt

SEQ ID NO: 89981 - DNA, 19 bp, Artificial Sequence
  Synthetic
cgaagagcgacgagutgug

SEQ ID NO: 89982 - DNA, 17 bp, Artificial Sequence
  Synthetic
gctgacccuctgugcgt

SEQ ID NO: 89983 - DNA, 19 bp, Artificial Sequence
  Synthetic
ggucccacagggcagaaug

SEQ ID NO: 89984 - DNA, 21 bp, Artificial Sequence
  Synthetic
gcgtcucctgactgauggaag

SEQ ID NO: 89985 - DNA, 27 bp, Artificial Sequence
  Synthetic
ctggccagauatcaaacttuacaaagg

SEQ ID NO: 89986 - DNA, 20 bp, Artificial Sequence
  Synthetic
cgtgcccuccatcagcauat

SEQ ID NO: 89987 - DNA, 22 bp, Artificial Sequence
  Synthetic
gaccgggucgttctctaaacuc

SEQ ID NO: 89988 - DNA, 18 bp, Artificial Sequence
  Synthetic
cuggcagccaaggcctua

SEQ ID NO: 89989 - DNA, 19 bp, Artificial Sequence
  Synthetic
ggguccgagatgucacaca

SEQ ID NO: 89990 - DNA, 19 bp, Artificial Sequence
  Synthetic
gggtcuccacgattcgugt

SEQ ID NO: 89991 - DNA, 22 bp, Artificial Sequence
  Synthetic
cccgtgaaugagggtattguct

SEQ ID NO: 89992 - DNA, 21 bp, Artificial Sequence
  Synthetic
ggugaggccacagtcatugag

SEQ ID NO: 89993 - DNA, 21 bp, Artificial Sequence
  Synthetic
cagguggacagcctcttucag

SEQ ID NO: 89994 - DNA, 20 bp, Artificial Sequence
  Synthetic
tccagacugggtcgtaccuc

SEQ ID NO: 89995 - DNA, 23 bp, Artificial Sequence
  Synthetic
gutctgugagcaggaggaaaagt

SEQ ID NO: 89996 - DNA, 23 bp, Artificial Sequence
  Synthetic
cgtgcacacaguctacacauacc

SEQ ID NO: 89997 - DNA, 20 bp, Artificial Sequence
  Synthetic
guaaggacccaagctugcca

SEQ ID NO: 89998 - DNA, 26 bp, Artificial Sequence
  Synthetic
ttttactgcutgaagagctugaggat

SEQ ID NO: 89999 - DNA, 23 bp, Artificial Sequence
  Synthetic
ctctgatgaggautccgaaccug

SEQ ID NO: 90000 - DNA, 27 bp, Artificial Sequence
  Synthetic
gcagtgtttucacaaacaagtttgaug

SEQ ID NO: 90001 - DNA, 26 bp, Artificial Sequence
  Synthetic
cuagaaattgauagccagcaggaaga

SEQ ID NO: 90002 - DNA, 20 bp, Artificial Sequence
  Synthetic
cagatgctugaaccggcuct

SEQ ID NO: 90003 - DNA, 28 bp, Artificial Sequence
  Synthetic
agggagctcuggattacttaagtgauaa

SEQ ID NO: 90004 - DNA, 27 bp, Artificial Sequence
  Synthetic
aacagatttaaacuggacccacttcut

SEQ ID NO: 90005 - DNA, 27 bp, Artificial Sequence
  Synthetic
tttcaaaaucagaagggtgcaatugag

SEQ ID NO: 90006 - DNA, 26 bp, Artificial Sequence
  Synthetic
ttctcaagaagtutcgccagtagaut

SEQ ID NO: 90007 - DNA, 29 bp, Artificial Sequence
  Synthetic
gtttcaagattgacucatttagctgtuct

SEQ ID NO: 90008 - DNA, 26 bp, Artificial Sequence
  Synthetic
gggccaatcuctttttaccaatucaa

SEQ ID NO: 90009 - DNA, 24 bp, Artificial Sequence
  Synthetic
agaagaaagtaugggtggagguga

SEQ ID NO: 90010 - DNA, 27 bp, Artificial Sequence
  Synthetic
ccaacatattgugaaaactgtcaugct

SEQ ID NO: 90011 - DNA, 25 bp, Artificial Sequence
  Synthetic
tgggcagautagaaaatgcaugact

SEQ ID NO: 90012 - DNA, 24 bp, Artificial Sequence
  Synthetic
ccgaggaaaaacaaugatggtuga

SEQ ID NO: 90013 - DNA, 28 bp, Artificial Sequence
  Synthetic
gtgtcagatggutttctacaatgaaugg

SEQ ID NO: 90014 - DNA, 28 bp, Artificial Sequence
  Synthetic
ctgagaactatuccaagtcatgcattut

SEQ ID NO: 90015 - DNA, 31 bp, Artificial Sequence
  Synthetic
actgccattgauttatgcaagtataauacca

SEQ ID NO: 90016 - DNA, 24 bp, Artificial Sequence
  Synthetic
tgcaacaugaacctgaatauccca

SEQ ID NO: 90017 - DNA, 26 bp, Artificial Sequence
  Synthetic
gcaacatagguaagatcagcatcuca

SEQ ID NO: 90018 - DNA, 20 bp, Artificial Sequence
  Synthetic
cgcctaactuggcccagaug

SEQ ID NO: 90019 - DNA, 21 bp, Artificial Sequence
  Synthetic
gcgatccuggacttcctctug

SEQ ID NO: 90020 - DNA, 21 bp, Artificial Sequence
  Synthetic
ctccuctagggtugcgcaaat

SEQ ID NO: 90021 - DNA, 21 bp, Artificial Sequence
  Synthetic
gccctgtcutcactccttcug

SEQ ID NO: 90022 - DNA, 22 bp, Artificial Sequence
  Synthetic
aaggacggaaagagcaucucac

SEQ ID NO: 90023 - DNA, 21 bp, Artificial Sequence
  Synthetic
gcccaaguctguccagaacaa

SEQ ID NO: 90024 - DNA, 17 bp, Artificial Sequence
  Synthetic
tggatgucgccgtugct

SEQ ID NO: 90025 - DNA, 17 bp, Artificial Sequence
  Synthetic
cagccucgctccuggac

SEQ ID NO: 90026 - DNA, 19 bp, Artificial Sequence
  Synthetic
tgcaagcuctgcugacaca

SEQ ID NO: 90027 - DNA, 19 bp, Artificial Sequence
  Synthetic
ctcagugggcactggagut

SEQ ID NO: 90028 - DNA, 17 bp, Artificial Sequence
  Synthetic
cagguguccaggagcga

SEQ ID NO: 90029 - DNA, 17 bp, Artificial Sequence
  Synthetic
ggcccaggcugctucat

SEQ ID NO: 90030 - DNA, 28 bp, Artificial Sequence
  Synthetic
gaacagatacggaugcattatagugact

SEQ ID NO: 90031 - DNA, 28 bp, Artificial Sequence
  Synthetic
cagaaaagtaggaugggagaggattuaa

SEQ ID NO: 90032 - DNA, 26 bp, Artificial Sequence
  Synthetic
cagggattugcaataagtgucaaaaa

SEQ ID NO: 90033 - DNA, 26 bp, Artificial Sequence
  Synthetic
cacaccctuacagtaaagtcttuggt

SEQ ID NO: 90034 - DNA, 25 bp, Artificial Sequence
  Synthetic
ctgaucagcaaggaactttucaagt

SEQ ID NO: 90035 - DNA, 22 bp, Artificial Sequence
  Synthetic
gcctttctuctccgcttcuacc

SEQ ID NO: 90036 - DNA, 28 bp, Artificial Sequence
  Synthetic
tgtaactctaggcauacttgtcttugga

SEQ ID NO: 90037 - DNA, 25 bp, Artificial Sequence
  Synthetic
cttttcaagcccaucagaugagact

SEQ ID NO: 90038 - DNA, 22 bp, Artificial Sequence
  Synthetic
gctcactgccuctctgcattut

SEQ ID NO: 90039 - DNA, 25 bp, Artificial Sequence
  Synthetic
aaggaaacucaaggaaaguggaagt

SEQ ID NO: 90040 - DNA, 22 bp, Artificial Sequence
  Synthetic
cctggtattcuggcagcatuct

SEQ ID NO: 90041 - DNA, 28 bp, Artificial Sequence
  Synthetic
aatttctacttttugtagcctccucgat

SEQ ID NO: 90042 - DNA, 27 bp, Artificial Sequence
  Synthetic
ccaacctaagacauacataccagtugt

SEQ ID NO: 90043 - DNA, 28 bp, Artificial Sequence
  Synthetic
ccactgctgaugtactttattaactucc

SEQ ID NO: 90044 - DNA, 23 bp, Artificial Sequence
  Synthetic
ctcatcgccuctgtagacctcua

SEQ ID NO: 90045 - DNA, 21 bp, Artificial Sequence
  Synthetic
gcgaaggugatggcauaccag

SEQ ID NO: 90046 - DNA, 26 bp, Artificial Sequence
  Synthetic
gcaagaaacaccuggactctuaagaa

SEQ ID NO: 90047 - DNA, 24 bp, Artificial Sequence
  Synthetic
ccaaggtcutttgtcacttaugcc

SEQ ID NO: 90048 - DNA, 19 bp, Artificial Sequence
  Synthetic
tgacggucatcacccugga

SEQ ID NO: 90049 - DNA, 26 bp, Artificial Sequence
  Synthetic
cagatactgacuttggcatagcuact

SEQ ID NO: 90050 - DNA, 22 bp, Artificial Sequence
  Synthetic
cctgcttccuttggtgggaaua

SEQ ID NO: 90051 - DNA, 27 bp, Artificial Sequence
  Synthetic
atttcggactgugatgtagatctucac

SEQ ID NO: 90052 - DNA, 21 bp, Artificial Sequence
  Synthetic
cagaacaggcccucagtucaa

SEQ ID NO: 90053 - DNA, 23 bp, Artificial Sequence
  Synthetic
cttaugaccaggagccacucaag

SEQ ID NO: 90054 - DNA, 22 bp, Artificial Sequence
  Synthetic
cccattcugtcttcaucccaca

SEQ ID NO: 90055 - DNA, 22 bp, Artificial Sequence
  Synthetic
gagcttggugagctgguagaag

SEQ ID NO: 90056 - DNA, 22 bp, Artificial Sequence
  Synthetic
aatcccacaucctgcucaagac

SEQ ID NO: 90057 - DNA, 21 bp, Artificial Sequence
  Synthetic
ggaauggaagcaccucccaac

SEQ ID NO: 90058 - DNA, 26 bp, Artificial Sequence
  Synthetic
gcagaaataagcaaautccccaauga

SEQ ID NO: 90059 - DNA, 20 bp, Artificial Sequence
  Synthetic
aaaugggccagaagaucgca

SEQ ID NO: 90060 - DNA, 27 bp, Artificial Sequence
  Synthetic
ccttagggaaaggutagattcugaaca

SEQ ID NO: 90061 - DNA, 27 bp, Artificial Sequence
  Synthetic
gggactttuggagaatgataugggaac

SEQ ID NO: 90062 - DNA, 20 bp, Artificial Sequence
  Synthetic
gcctcagggcutgtacucat

SEQ ID NO: 90063 - DNA, 20 bp, Artificial Sequence
  Synthetic
gggcgcuaatcgtacugaaa

SEQ ID NO: 90064 - DNA, 28 bp, Artificial Sequence
  Synthetic
ttaatttcaacagaguaaggtgcgauct

SEQ ID NO: 90065 - DNA, 29 bp, Artificial Sequence
  Synthetic
gagtgactccucttacccatattuacaat

SEQ ID NO: 90066 - DNA, 19 bp, Artificial Sequence
  Synthetic
ccggaaggaguggcacauc

SEQ ID NO: 90067 - DNA, 20 bp, Artificial Sequence
  Synthetic
accctcugttctccuccaca

SEQ ID NO: 90068 - DNA, 19 bp, Artificial Sequence
  Synthetic
acaactguggcactccgut

SEQ ID NO: 90069 - DNA, 27 bp, Artificial Sequence
  Synthetic
cctggttgaauaacactccttgtttuc

SEQ ID NO: 90070 - DNA, 27 bp, Artificial Sequence
  Synthetic
ctatttctggaggutgttgaaagucct

SEQ ID NO: 90071 - DNA, 22 bp, Artificial Sequence
  Synthetic
gggatuggagacagacatcuga

SEQ ID NO: 90072 - DNA, 24 bp, Artificial Sequence
  Synthetic
gtgagatgtcuattcccagctgut

SEQ ID NO: 90073 - DNA, 20 bp, Artificial Sequence
  Synthetic
gcaacauccagggaccagug

SEQ ID NO: 90074 - DNA, 24 bp, Artificial Sequence
  Synthetic
ctgttctgauaccgtgugagagag

SEQ ID NO: 90075 - DNA, 22 bp, Artificial Sequence
  Synthetic
tgaagtacuccgggtucacaga

SEQ ID NO: 90076 - DNA, 27 bp, Artificial Sequence
  Synthetic
ttctcgttttcuaaaagacgtgacugt

SEQ ID NO: 90077 - DNA, 28 bp, Artificial Sequence
  Synthetic
ctttgcctcagagagaucatcaagatua

SEQ ID NO: 90078 - DNA, 23 bp, Artificial Sequence
  Synthetic
cccugtatggcucagaagagact

SEQ ID NO: 90079 - DNA, 23 bp, Artificial Sequence
  Synthetic
gcttctccccautcattgtcucc

SEQ ID NO: 90080 - DNA, 23 bp, Artificial Sequence
  Synthetic
ctcttcgucttctccaucagcat

SEQ ID NO: 90081 - DNA, 22 bp, Artificial Sequence
  Synthetic
ccagaaggtuccagcagaauct

SEQ ID NO: 90082 - DNA, 21 bp, Artificial Sequence
  Synthetic
gggaatggagugctgtaugcc

SEQ ID NO: 90083 - DNA, 27 bp, Artificial Sequence
  Synthetic
gtagctcaaaataaugcaaacctccut

SEQ ID NO: 90084 - DNA, 22 bp, Artificial Sequence
  Synthetic
tccauggccaccataaagtugt

SEQ ID NO: 90085 - DNA, 20 bp, Artificial Sequence
  Synthetic
ctcttttguaggcgggccut

SEQ ID NO: 90086 - DNA, 23 bp, Artificial Sequence
  Synthetic
ccagaaagttuccctcctccauc

SEQ ID NO: 90087 - DNA, 22 bp, Artificial Sequence
  Synthetic
tgcttctgcuggacacuaacac

SEQ ID NO: 90088 - DNA, 22 bp, Artificial Sequence
  Synthetic
gtctctcttccucctccaggua

SEQ ID NO: 90089 - DNA, 20 bp, Artificial Sequence
  Synthetic
acttgcagutgtccctgugg

SEQ ID NO: 90090 - DNA, 28 bp, Artificial Sequence
  Synthetic
tgatcaaaccugggatctaacaaaacut

SEQ ID NO: 90091 - DNA, 23 bp, Artificial Sequence
  Synthetic
agaaugggcaggaagaaaagugg

SEQ ID NO: 90092 - DNA, 24 bp, Artificial Sequence
  Synthetic
aacatacctucctccagcctuaga

SEQ ID NO: 90093 - DNA, 27 bp, Artificial Sequence
  Synthetic
ataaggatttccacuttctgtccucag

SEQ ID NO: 90094 - DNA, 28 bp, Artificial Sequence
  Synthetic
gacaaagtucagtaaaatctugcacagt

SEQ ID NO: 90095 - DNA, 24 bp, Artificial Sequence
  Synthetic
gcaaccagaacauagattgugcag

SEQ ID NO: 90096 - DNA, 18 bp, Artificial Sequence
  Synthetic
tctcugggcaagccgaug

SEQ ID NO: 90097 - DNA, 19 bp, Artificial Sequence
  Synthetic
caaggcgcaccagutccua

SEQ ID NO: 90098 - DNA, 23 bp, Artificial Sequence
  Synthetic
tgtgcagtaagutgaggatgcut

SEQ ID NO: 90099 - DNA, 22 bp, Artificial Sequence
  Synthetic
caacccagcuctctgtttucca

SEQ ID NO: 90100 - DNA, 25 bp, Artificial Sequence
  Synthetic
ctgcagtucttttcatcugaagcat

SEQ ID NO: 90101 - DNA, 28 bp, Artificial Sequence
  Synthetic
ccatctttgcauttgtttatgtaccugt

SEQ ID NO: 90102 - DNA, 25 bp, Artificial Sequence
  Synthetic
ccagactttucactgctttcucaca

SEQ ID NO: 90103 - DNA, 22 bp, Artificial Sequence
  Synthetic
gcttgcugcctttgguaagaac

SEQ ID NO: 90104 - DNA, 28 bp, Artificial Sequence
  Synthetic
ttaacataaacacugtagagcacauggt

SEQ ID NO: 90105 - DNA, 27 bp, Artificial Sequence
  Synthetic
actgtgaggauggattcgaaauaacag

SEQ ID NO: 90106 - DNA, 26 bp, Artificial Sequence
  Synthetic
cttacctttacagcutctcccatcut

SEQ ID NO: 90107 - DNA, 27 bp, Artificial Sequence
  Synthetic
tctctacagaacugttatccaatugcc

SEQ ID NO: 90108 - DNA, 22 bp, Artificial Sequence
  Synthetic
actgacaautcagctgtuggca

SEQ ID NO: 90109 - DNA, 28 bp, Artificial Sequence
  Synthetic
tctgggagaacaaucaagactatagugt

SEQ ID NO: 90110 - DNA, 21 bp, Artificial Sequence
  Synthetic
cctugggcaaagguaggacat

SEQ ID NO: 90111 - DNA, 20 bp, Artificial Sequence
  Synthetic
atccgaaggcaccucaacug

SEQ ID NO: 90112 - DNA, 23 bp, Artificial Sequence
  Synthetic
gcagtcacucaatcacacctgut

SEQ ID NO: 90113 - DNA, 22 bp, Artificial Sequence
  Synthetic
gugttgacaatcuccgcaaacc

SEQ ID NO: 90114 - DNA, 22 bp, Artificial Sequence
  Synthetic
ccatuggcagtctcucaaaggg

SEQ ID NO: 90115 - DNA, 25 bp, Artificial Sequence
  Synthetic
cccagccaaaggcaugtatttacua

SEQ ID NO: 90116 - DNA, 28 bp, Artificial Sequence
  Synthetic
tgaaaccacccuaatgcattttaugagt

SEQ ID NO: 90117 - DNA, 17 bp, Artificial Sequence
  Synthetic
ccgacccaauggcaguc

SEQ ID NO: 90118 - DNA, 17 bp, Artificial Sequence
  Synthetic
tgcgacugccatugggt

SEQ ID NO: 90119 - DNA, 28 bp, Artificial Sequence
  Synthetic
gaagacagtgatucctgtaaactccuaa

SEQ ID NO: 90120 - DNA, 20 bp, Artificial Sequence
  Synthetic
agctcatgcuggactgtugg

SEQ ID NO: 90121 - DNA, 27 bp, Artificial Sequence
  Synthetic
catgaaaccagccauatttagggauca

SEQ ID NO: 90122 - DNA, 24 bp, Artificial Sequence
  Synthetic
tctgcaatgcutgtctatgtuggt

SEQ ID NO: 90123 - DNA, 21 bp, Artificial Sequence
  Synthetic
accttgaccutgctcatcugg

SEQ ID NO: 90124 - DNA, 27 bp, Artificial Sequence
  Synthetic
ggtgugaaacagaaagauaaaaagcca

SEQ ID NO: 90125 - DNA, 28 bp, Artificial Sequence
  Synthetic
gaaaatgauaccatctacuggacagaca

SEQ ID NO: 90126 - DNA, 27 bp, Artificial Sequence
  Synthetic
ctctgctaatttuattgaagcccaugt

SEQ ID NO: 90127 - DNA, 28 bp, Artificial Sequence
  Synthetic
ctgttgcaatatgaucctaacaccgaua

SEQ ID NO: 90128 - DNA, 20 bp, Artificial Sequence
  Synthetic
gaaaatuccccggcaacucc

SEQ ID NO: 90129 - DNA, 23 bp, Artificial Sequence
  Synthetic
ggttactttccugtctgctcuct

SEQ ID NO: 90130 - DNA, 25 bp, Artificial Sequence
  Synthetic
tcttggttcucccaaacacattugt

SEQ ID NO: 90131 - DNA, 20 bp, Artificial Sequence
  Synthetic
tgaacuccagcgcacactua

SEQ ID NO: 90132 - DNA, 24 bp, Artificial Sequence
  Synthetic
attgttcaguccatcccttuccaa

SEQ ID NO: 90133 - DNA, 20 bp, Artificial Sequence
  Synthetic
cuccaugacgaagcgaagga

SEQ ID NO: 90134 - DNA, 19 bp, Artificial Sequence
  Synthetic
gggcutguccaacgagcaa

SEQ ID NO: 90135 - DNA, 28 bp, Artificial Sequence
  Synthetic
gtattugagaagagaacucagaagagca

SEQ ID NO: 90136 - DNA, 26 bp, Artificial Sequence
  Synthetic
gtagtttccucctatccctacaugct

SEQ ID NO: 90137 - DNA, 17 bp, Artificial Sequence
  Synthetic
gggccaauggaggcuca

SEQ ID NO: 90138 - DNA, 21 bp, Artificial Sequence
  Synthetic
gggccaccaucagctatatug

SEQ ID NO: 90139 - DNA, 27 bp, Artificial Sequence
  Synthetic
ccaaattcatccuggattctaggacut

SEQ ID NO: 90140 - DNA, 21 bp, Artificial Sequence
  Synthetic
ttgacugaaagggaccacguc

SEQ ID NO: 90141 - DNA, 28 bp, Artificial Sequence
  Synthetic
gctgtgtgtauagtcaccctctaauact

SEQ ID NO: 90142 - DNA, 27 bp, Artificial Sequence
  Synthetic
tgtcacaagaguacaaaaacagcauct

SEQ ID NO: 90143 - DNA, 21 bp, Artificial Sequence
  Synthetic
ggtcttggugcgataacuggt

SEQ ID NO: 90144 - DNA, 20 bp, Artificial Sequence
  Synthetic
gccccucctgtgtcugaaga

SEQ ID NO: 90145 - DNA, 28 bp, Artificial Sequence
  Synthetic
ctctatgactatuccaaagggcatctut

SEQ ID NO: 90146 - DNA, 21 bp, Artificial Sequence
  Synthetic
gccagggcautctctgcuaaa

SEQ ID NO: 90147 - DNA, 21 bp, Artificial Sequence
  Synthetic
caaacccccuacatcccucag

SEQ ID NO: 90148 - DNA, 21 bp, Artificial Sequence
  Synthetic
tggacacautgtggcauggaa

SEQ ID NO: 90149 - DNA, 23 bp, Artificial Sequence
  Synthetic
tguatacatucagccaggacaca

SEQ ID NO: 90150 - DNA, 22 bp, Artificial Sequence
  Synthetic
actgcaagauacatggcuccag

SEQ ID NO: 90151 - DNA, 22 bp, Artificial Sequence
  Synthetic
caatgatgcuggtccacaccua

SEQ ID NO: 90152 - DNA, 27 bp, Artificial Sequence
  Synthetic
agtttcccaagugtaatcctacaggua

SEQ ID NO: 90153 - DNA, 27 bp, Artificial Sequence
  Synthetic
ccaattttgttaugttggaagttugga

SEQ ID NO: 90154 - DNA, 20 bp, Artificial Sequence
  Synthetic
ctggcucacaagtccctcut

SEQ ID NO: 90155 - DNA, 20 bp, Artificial Sequence
  Synthetic
gacctgagcuggttccucac

SEQ ID NO: 90156 - DNA, 22 bp, Artificial Sequence
  Synthetic
ctcatctcacugggttggucaa

SEQ ID NO: 90157 - DNA, 23 bp, Artificial Sequence
  Synthetic
cccttcugcctcagcttauaacc

SEQ ID NO: 90158 - DNA, 21 bp, Artificial Sequence
  Synthetic
gctctgguggcagactttgua

SEQ ID NO: 90159 - DNA, 20 bp, Artificial Sequence
  Synthetic
ccgccagaucagagaaggug

SEQ ID NO: 90160 - DNA, 28 bp, Artificial Sequence
  Synthetic
cataagaaatgugcacttgguaaaaccc

SEQ ID NO: 90161 - DNA, 25 bp, Artificial Sequence
  Synthetic
ggtagtggttugaatctgacctuca

SEQ ID NO: 90162 - DNA, 21 bp, Artificial Sequence
  Synthetic
gcaaccccaaucaccccttua

SEQ ID NO: 90163 - DNA, 22 bp, Artificial Sequence
  Synthetic
ctttguttctgacgugccacag

SEQ ID NO: 90164 - DNA, 21 bp, Artificial Sequence
  Synthetic
cagagcaaugggcacgatuac

SEQ ID NO: 90165 - DNA, 27 bp, Artificial Sequence
  Synthetic
cctttgauaccacagacttcctctuac

SEQ ID NO: 90166 - DNA, 21 bp, Artificial Sequence
  Synthetic
gcctcccugtagaatcucgga

SEQ ID NO: 90167 - DNA, 19 bp, Artificial Sequence
  Synthetic
caccguggccgtgaaaaug

SEQ ID NO: 90168 - DNA, 22 bp, Artificial Sequence
  Synthetic
cagcuggagatgagtucgagac

SEQ ID NO: 90169 - DNA, 20 bp, Artificial Sequence
  Synthetic
gggcccccutgaaaaagtuc

SEQ ID NO: 90170 - DNA, 22 bp, Artificial Sequence
  Synthetic
ggcgtttaagucccctgacuat

SEQ ID NO: 90171 - DNA, 21 bp, Artificial Sequence
  Synthetic
ggacgtgauggagccactuac

SEQ ID NO: 90172 - DNA, 19 bp, Artificial Sequence
  Synthetic
ctucacccaggtcuccgat

SEQ ID NO: 90173 - DNA, 21 bp, Artificial Sequence
  Synthetic
ccatccacucctgcacttguc

SEQ ID NO: 90174 - DNA, 20 bp, Artificial Sequence
  Synthetic
gcugaccccacaccttucag

SEQ ID NO: 90175 - DNA, 18 bp, Artificial Sequence
  Synthetic
cacgcucaccccguacag

SEQ ID NO: 90176 - DNA, 27 bp, Artificial Sequence
  Synthetic
tgacatgtuaggacactttccaatgut

SEQ ID NO: 90177 - DNA, 18 bp, Artificial Sequence
  Synthetic
gggctuggcctaauggac

SEQ ID NO: 90178 - DNA, 27 bp, Artificial Sequence
  Synthetic
gcatgcaaagggaauttaattctgugt

SEQ ID NO: 90179 - DNA, 27 bp, Artificial Sequence
  Synthetic
ggacaactacgugtctctattugaagt

SEQ ID NO: 90180 - DNA, 25 bp, Artificial Sequence
  Synthetic
gtaaccccuagcaggaaagttugag

SEQ ID NO: 90181 - DNA, 22 bp, Artificial Sequence
  Synthetic
cagatcaaccutctccctcugg

SEQ ID NO: 90182 - DNA, 19 bp, Artificial Sequence
  Synthetic
gaccugccacuggagaagt

SEQ ID NO: 90183 - DNA, 27 bp, Artificial Sequence
  Synthetic
tgttacctugaaggaccttctttugaa

SEQ ID NO: 90184 - DNA, 26 bp, Artificial Sequence
  Synthetic
ccttttctcaaaguggtccacagtua

SEQ ID NO: 90185 - DNA, 25 bp, Artificial Sequence
  Synthetic
gaattcttttcuggacagacuggga

SEQ ID NO: 90186 - DNA, 23 bp, Artificial Sequence
  Synthetic
gtgucaacaaggagauggaacca

SEQ ID NO: 90187 - DNA, 21 bp, Artificial Sequence
  Synthetic
cuggagaccagcttugcagaa

SEQ ID NO: 90188 - DNA, 22 bp, Artificial Sequence
  Synthetic
cttctcctctugggacatggug

SEQ ID NO: 90189 - DNA, 26 bp, Artificial Sequence
  Synthetic
aagagcagttugggtttactcgtuaa

SEQ ID NO: 90190 - DNA, 22 bp, Artificial Sequence
  Synthetic
gugggcacaccacttuaacaag

SEQ ID NO: 90191 - DNA, 28 bp, Artificial Sequence
  Synthetic
tctgttctgtgtuatgtcgtctgattut

SEQ ID NO: 90192 - DNA, 20 bp, Artificial Sequence
  Synthetic
cacauagaacaggcccguct

SEQ ID NO: 90193 - DNA, 23 bp, Artificial Sequence
  Synthetic
cagttctgcuccatgctgtttut

SEQ ID NO: 90194 - DNA, 19 bp, Artificial Sequence
  Synthetic
agtgaccucgcctcctcuc

SEQ ID NO: 90195 - DNA, 18 bp, Artificial Sequence
  Synthetic
gctgccccugaaguggat

SEQ ID NO: 90196 - DNA, 24 bp, Artificial Sequence
  Synthetic
cccagtcguaaataccgacttcua

SEQ ID NO: 90197 - DNA, 28 bp, Artificial Sequence
  Synthetic
ggagcattgtcautcacatctaagacut

SEQ ID NO: 90198 - DNA, 23 bp, Artificial Sequence
  Synthetic
ccctctcccccucttctctatut

SEQ ID NO: 90199 - DNA, 28 bp, Artificial Sequence
  Synthetic
ccatatctgcatucggtaggaagttaut

SEQ ID NO: 90200 - DNA, 21 bp, Artificial Sequence
  Synthetic
ggtcuggtatggugagcgaaa

SEQ ID NO: 90201 - DNA, 21 bp, Artificial Sequence
  Synthetic
ggagactttuctgcggtccuc

SEQ ID NO: 90202 - DNA, 26 bp, Artificial Sequence
  Synthetic
cacagttccacaugtatattctugcc

SEQ ID NO: 90203 - DNA, 25 bp, Artificial Sequence
  Synthetic
ttcagtgaugaagcccagatcaaut

SEQ ID NO: 90204 - DNA, 28 bp, Artificial Sequence
  Synthetic
ccttctttagtacaautgatctgggcut

SEQ ID NO: 90205 - DNA, 28 bp, Artificial Sequence
  Synthetic
tgtgttcactcutgctttgataaucagt

SEQ ID NO: 90206 - DNA, 24 bp, Artificial Sequence
  Synthetic
ttggaagtgtucctgtcacaauca

SEQ ID NO: 90207 - DNA, 20 bp, Artificial Sequence
  Synthetic
ggtuaagcagagugcaccac

SEQ ID NO: 90208 - DNA, 26 bp, Artificial Sequence
  Synthetic
gctcaatttgcutcatttctcctgut

SEQ ID NO: 90209 - DNA, 24 bp, Artificial Sequence
  Synthetic
attttggcctgucccgagttauag

SEQ ID NO: 90210 - DNA, 22 bp, Artificial Sequence
  Synthetic
ggaggctggcuccaagatacua

SEQ ID NO: 90211 - DNA, 21 bp, Artificial Sequence
  Synthetic
gccttcucccaacaccttuca

SEQ ID NO: 90212 - DNA, 23 bp, Artificial Sequence
  Synthetic
guaaggaagaugcaaacccagga

SEQ ID NO: 90213 - DNA, 22 bp, Artificial Sequence
  Synthetic
cccacgccaguagagaaaagug

SEQ ID NO: 90214 - DNA, 17 bp, Artificial Sequence
  Synthetic
cccggccacugucacac

SEQ ID NO: 90215 - DNA, 18 bp, Artificial Sequence
  Synthetic
gctcacggcuccccttuc

SEQ ID NO: 90216 - DNA, 21 bp, Artificial Sequence
  Synthetic
gcatctgccacuggaacauct

SEQ ID NO: 90217 - DNA, 24 bp, Artificial Sequence
  Synthetic
atggttcagauttcactgccucat

SEQ ID NO: 90218 - DNA, 26 bp, Artificial Sequence
  Synthetic
tgtatagacagcutctggatcaucct

SEQ ID NO: 90219 - DNA, 28 bp, Artificial Sequence
  Synthetic
gctggaatgagauatttggctgataugg

SEQ ID NO: 90220 - DNA, 19 bp, Artificial Sequence
  Synthetic
gtgtgagcucgccgaugat

SEQ ID NO: 90221 - DNA, 23 bp, Artificial Sequence
  Synthetic
tgctcatguaaaccaacccctuc

SEQ ID NO: 90222 - DNA, 27 bp, Artificial Sequence
  Synthetic
aggattggtagugattttcatgaugct

SEQ ID NO: 90223 - DNA, 24 bp, Artificial Sequence
  Synthetic
aagagactuccaggacaugcaaaa

SEQ ID NO: 90224 - DNA, 27 bp, Artificial Sequence
  Synthetic
tcataatgcacugaaaggaatuccaga

SEQ ID NO: 90225 - DNA, 21 bp, Artificial Sequence
  Synthetic
acctgcaggauttgguaagca

SEQ ID NO: 90226 - DNA, 19 bp, Artificial Sequence
  Synthetic
caggctgugccagtccaua

SEQ ID NO: 90227 - DNA, 23 bp, Artificial Sequence
  Synthetic
tgacaggatuggagcaatgaugt

SEQ ID NO: 90228 - DNA, 24 bp, Artificial Sequence
  Synthetic
ccccttguactgagtatgcuaacc

SEQ ID NO: 90229 - DNA, 21 bp, Artificial Sequence
  Synthetic
acaccttcuacacctggcuga

SEQ ID NO: 90230 - DNA, 27 bp, Artificial Sequence
  Synthetic
ctaaactgacuccagctgtatccttuc

SEQ ID NO: 90231 - DNA, 23 bp, Artificial Sequence
  Synthetic
ggtgtttuggacaatggacuggt

SEQ ID NO: 90232 - DNA, 28 bp, Artificial Sequence
  Synthetic
tggtagctctatutagtaactgtccugt

SEQ ID NO: 90233 - DNA, 28 bp, Artificial Sequence
  Synthetic
ccccaagttcucatgattctcttcttut

SEQ ID NO: 90234 - DNA, 20 bp, Artificial Sequence
  Synthetic
ttcacagcugctuacagcga

SEQ ID NO: 90235 - DNA, 24 bp, Artificial Sequence
  Synthetic
gccattagcaugcaaagagacuga

SEQ ID NO: 90236 - DNA, 23 bp, Artificial Sequence
  Synthetic
gggtttttgcuagttcagctcut

SEQ ID NO: 90237 - DNA, 28 bp, Artificial Sequence
  Synthetic
ggcttctggcacauaaaacatataagut

SEQ ID NO: 90238 - DNA, 23 bp, Artificial Sequence
  Synthetic
tggcccagaaacauttguagcat

SEQ ID NO: 90239 - DNA, 20 bp, Artificial Sequence
  Synthetic
tgaccugcctccctaugacc

SEQ ID NO: 90240 - DNA, 23 bp, Artificial Sequence
  Synthetic
tgcaaggtcccugtgaacatauc

SEQ ID NO: 90241 - DNA, 28 bp, Artificial Sequence
  Synthetic
agttaactgggcutttatttttgtctuc

SEQ ID NO: 90242 - DNA, 20 bp, Artificial Sequence
  Synthetic
tgutcgagctguggcagaag

SEQ ID NO: 90243 - DNA, 26 bp, Artificial Sequence
  Synthetic
cactttgaacautgagtcaacctuga

SEQ ID NO: 90244 - DNA, 22 bp, Artificial Sequence
  Synthetic
tuacaccaagugagcacacagt

SEQ ID NO: 90245 - DNA, 23 bp, Artificial Sequence
  Synthetic
cctaggaugaggcgaaggtttut

SEQ ID NO: 90246 - DNA, 18 bp, Artificial Sequence
  Synthetic
caugaaagcccccgcuga

SEQ ID NO: 90247 - DNA, 18 bp, Artificial Sequence
  Synthetic
cagcgacagggucctcut

SEQ ID NO: 90248 - DNA, 18 bp, Artificial Sequence
  Synthetic
gtgccugggcacaugaac

SEQ ID NO: 90249 - DNA, 18 bp, Artificial Sequence
  Synthetic
ggauggagccgaucacca

SEQ ID NO: 90250 - DNA, 18 bp, Artificial Sequence
  Synthetic
gcccucggtctucgagaa

SEQ ID NO: 90251 - DNA, 17 bp, Artificial Sequence
  Synthetic
ccucgagccagctucgt

SEQ ID NO: 90252 - DNA, 21 bp, Artificial Sequence
  Synthetic
ctactctggaugccacacugt

SEQ ID NO: 90253 - DNA, 26 bp, Artificial Sequence
  Synthetic
cagtctcaatttuctcctttgtgcut

SEQ ID NO: 90254 - DNA, 29 bp, Artificial Sequence
  Synthetic
cctttaccttatugactggtttctacugt

SEQ ID NO: 90255 - DNA, 24 bp, Artificial Sequence
  Synthetic
gccagtggtucacctattcttcua

SEQ ID NO: 90256 - DNA, 21 bp, Artificial Sequence
  Synthetic
ccaagagcagggcuagtgtuc

SEQ ID NO: 90257 - DNA, 24 bp, Artificial Sequence
  Synthetic
gctgccaaaauttcatggagtgut

SEQ ID NO: 90258 - DNA, 21 bp, Artificial Sequence
  Synthetic
agctuccggaaagactcucct

SEQ ID NO: 90259 - DNA, 23 bp, Artificial Sequence
  Synthetic
ggtttggcugtggagttaauggt

SEQ ID NO: 90260 - DNA, 21 bp, Artificial Sequence
  Synthetic
ggacagcaccucgttcaaauc

SEQ ID NO: 90261 - DNA, 28 bp, Artificial Sequence
  Synthetic
gggtggtcttuatgctcatgatauaaat

SEQ ID NO: 90262 - DNA, 27 bp, Artificial Sequence
  Synthetic
tgtattctttcaagagugctgacctut

SEQ ID NO: 90263 - DNA, 20 bp, Artificial Sequence
  Synthetic
acatgcaaacggguctguca

SEQ ID NO: 90264 - DNA, 23 bp, Artificial Sequence
  Synthetic
ccttggtctccutgtccttccua

SEQ ID NO: 90265 - DNA, 25 bp, Artificial Sequence
  Synthetic
ctcagcaacacaguttcauaagcac

SEQ ID NO: 90266 - DNA, 21 bp, Artificial Sequence
  Synthetic
cctttgtgugcccagacauct

SEQ ID NO: 90267 - DNA, 23 bp, Artificial Sequence
  Synthetic
ctacagccacagcucagtactua

SEQ ID NO: 90268 - DNA, 21 bp, Artificial Sequence
  Synthetic
catcattcttguggcccctuc

SEQ ID NO: 90269 - DNA, 24 bp, Artificial Sequence
  Synthetic
tttctttcccutctgttgguccat

SEQ ID NO: 90270 - DNA, 18 bp, Artificial Sequence
  Synthetic
ggccucagaggctgugac

SEQ ID NO: 90271 - DNA, 22 bp, Artificial Sequence
  Synthetic
ttggcttugtagacgugaccat

SEQ ID NO: 90272 - DNA, 23 bp, Artificial Sequence
  Synthetic
ccaccuccagacagagtgtttuc

SEQ ID NO: 90273 - DNA, 22 bp, Artificial Sequence
  Synthetic
ccctcctctugcagacagguat

SEQ ID NO: 90274 - DNA, 26 bp, Artificial Sequence
  Synthetic
ccttacattttgutgctgttctgcut

SEQ ID NO: 90275 - DNA, 25 bp, Artificial Sequence
  Synthetic
ctgcttttctgugtagccaacttuc

SEQ ID NO: 90276 - DNA, 26 bp, Artificial Sequence
  Synthetic
agaaagaacacagcautcaugaacct

SEQ ID NO: 90277 - DNA, 27 bp, Artificial Sequence
  Synthetic
gaggacaagtutattgtgtgctugaac

SEQ ID NO: 90278 - DNA, 18 bp, Artificial Sequence
  Synthetic
aagtuggccgaggcacut

SEQ ID NO: 90279 - DNA, 17 bp, Artificial Sequence
  Synthetic
ctctcccuccgggcuac

SEQ ID NO: 90280 - DNA, 25 bp, Artificial Sequence
  Synthetic
tgaaaataaugccctcagatgucca

SEQ ID NO: 90281 - DNA, 24 bp, Artificial Sequence
  Synthetic
ggattgatgaaugcggtgacaaut

SEQ ID NO: 90282 - DNA, 20 bp, Artificial Sequence
  Synthetic
agctgtugggcctaaaccug

SEQ ID NO: 90283 - DNA, 26 bp, Artificial Sequence
  Synthetic
atgccattctugatagagttgcugat

SEQ ID NO: 90284 - DNA, 22 bp, Artificial Sequence
  Synthetic
tggttcuaaagcgctgcttuct

SEQ ID NO: 90285 - DNA, 23 bp, Artificial Sequence
  Synthetic
ccagagccacagacaugtacaut

SEQ ID NO: 90286 - DNA, 26 bp, Artificial Sequence
  Synthetic
gtacgaacucttctggtuacaacaga

SEQ ID NO: 90287 - DNA, 28 bp, Artificial Sequence
  Synthetic
tgaagttgatugattaagtcauggcgat

SEQ ID NO: 90288 - DNA, 21 bp, Artificial Sequence
  Synthetic
tcctggaaccccuccttctut

SEQ ID NO: 90289 - DNA, 21 bp, Artificial Sequence
  Synthetic
gtcatcacagcugcacactug

SEQ ID NO: 90290 - DNA, 19 bp, Artificial Sequence
  Synthetic
ggcacaaggacccuggtut

SEQ ID NO: 90291 - DNA, 21 bp, Artificial Sequence
  Synthetic
gaactcuccagcatccugacc

SEQ ID NO: 90292 - DNA, 21 bp, Artificial Sequence
  Synthetic
agcgaaguccccatgtgttut

SEQ ID NO: 90293 - DNA, 24 bp, Artificial Sequence
  Synthetic
aggtccctgcuatttcccatagut

SEQ ID NO: 90294 - DNA, 24 bp, Artificial Sequence
  Synthetic
gatttcaguggccatuaagaccct

SEQ ID NO: 90295 - DNA, 27 bp, Artificial Sequence
  Synthetic
cggaaacacaggucttatgactactut

SEQ ID NO: 90296 - DNA, 19 bp, Artificial Sequence
  Synthetic
gctggcugacgttguggat

SEQ ID NO: 90297 - DNA, 17 bp, Artificial Sequence
  Synthetic
ggaggugtgcctucggt

SEQ ID NO: 90298 - DNA, 20 bp, Artificial Sequence
  Synthetic
cttaggguggcccatucact

SEQ ID NO: 90299 - DNA, 26 bp, Artificial Sequence
  Synthetic
catctcaggtcuctgatgaaaaccut

SEQ ID NO: 90300 - DNA, 26 bp, Artificial Sequence
  Synthetic
tttaccaccacagugatcttcatcug

SEQ ID NO: 90301 - DNA, 26 bp, Artificial Sequence
  Synthetic
atgtactcgaaggagcutctttgtut

SEQ ID NO: 90302 - DNA, 28 bp, Artificial Sequence
  Synthetic
aggctattttctaucgtgaaagttgugt

SEQ ID NO: 90303 - DNA, 28 bp, Artificial Sequence
  Synthetic
tgctgaattggcautataggttgtgaua

SEQ ID NO: 90304 - DNA, 26 bp, Artificial Sequence
  Synthetic
catccaugatgtactcugagaacgac

SEQ ID NO: 90305 - DNA, 22 bp, Artificial Sequence
  Synthetic
gggauaccattccuggaacaga

SEQ ID NO: 90306 - DNA, 26 bp, Artificial Sequence
  Synthetic
acctattggguggtttacaacttcuc

SEQ ID NO: 90307 - DNA, 23 bp, Artificial Sequence
  Synthetic
aggaacuccgcggttcaataaut

SEQ ID NO: 90308 - DNA, 24 bp, Artificial Sequence
  Synthetic
tcttcccaauccttttggtgaucc

SEQ ID NO: 90309 - DNA, 20 bp, Artificial Sequence
  Synthetic
gaggautcucccagcagcaa

SEQ ID NO: 90310 - DNA, 20 bp, Artificial Sequence
  Synthetic
ggaatcccaccutggctgug

SEQ ID NO: 90311 - DNA, 21 bp, Artificial Sequence
  Synthetic
caaggagaccutcaccgtcut

SEQ ID NO: 90312 - DNA, 19 bp, Artificial Sequence
  Synthetic
cacaggcacacugaccauc

SEQ ID NO: 90313 - DNA, 20 bp, Artificial Sequence
  Synthetic
gggaaagcagccccutacuc

SEQ ID NO: 90314 - DNA, 27 bp, Artificial Sequence
  Synthetic
tgtcctacacaagaaugcagaaatuca

SEQ ID NO: 90315 - DNA, 22 bp, Artificial Sequence
  Synthetic
gtctttcauacagggcugcaca

SEQ ID NO: 90316 - DNA, 22 bp, Artificial Sequence
  Synthetic
tgtccgcaucgctctcatagua

SEQ ID NO: 90317 - DNA, 18 bp, Artificial Sequence
  Synthetic
gctucgcacaggtugggt

SEQ ID NO: 90318 - DNA, 26 bp, Artificial Sequence
  Synthetic
actaaccttuttcatgcaguccacat

SEQ ID NO: 90319 - DNA, 22 bp, Artificial Sequence
  Synthetic
gaggcagtcuggaggaactuag

SEQ ID NO: 90320 - DNA, 20 bp, Artificial Sequence
  Synthetic
gcagcaggautcacuccagt

SEQ ID NO: 90321 - DNA, 28 bp, Artificial Sequence
  Synthetic
agctgtctgatuatctgaaacacaaugt

SEQ ID NO: 90322 - DNA, 21 bp, Artificial Sequence
  Synthetic
cgaugagctgcuccagaacac

SEQ ID NO: 90323 - DNA, 27 bp, Artificial Sequence
  Synthetic
taagccataatucgtgcagtttctuat

SEQ ID NO: 90324 - DNA, 17 bp, Artificial Sequence
  Synthetic
cgtggcguacacgugga

SEQ ID NO: 90325 - DNA, 19 bp, Artificial Sequence
  Synthetic
cccttgcugacctcctuct

SEQ ID NO: 90326 - DNA, 24 bp, Artificial Sequence
  Synthetic
ggaaaccgucaaattgcttcgtut

SEQ ID NO: 90327 - DNA, 27 bp, Artificial Sequence
  Synthetic
gcaaccuaaaaacaagtaagacauggt

SEQ ID NO: 90328 - DNA, 23 bp, Artificial Sequence
  Synthetic
cctctacugaaggagttccucac

SEQ ID NO: 90329 - DNA, 26 bp, Artificial Sequence
  Synthetic
ttagctacagugtaggttgctcuaaa

SEQ ID NO: 90330 - DNA, 22 bp, Artificial Sequence
  Synthetic
ctccaagagagutgtagcccut

SEQ ID NO: 90331 - DNA, 23 bp, Artificial Sequence
  Synthetic
gggcagagucaatgtttccauca

SEQ ID NO: 90332 - DNA, 22 bp, Artificial Sequence
  Synthetic
ggaaugacgcugaaaacaggac

SEQ ID NO: 90333 - DNA, 28 bp, Artificial Sequence
  Synthetic
tccttcttctcguactaatgcttctuct

SEQ ID NO: 90334 - DNA, 28 bp, Artificial Sequence
  Synthetic
gcacaaaaccuatacatcctttctucct

SEQ ID NO: 90335 - DNA, 22 bp, Artificial Sequence
  Synthetic
gggataggcagcaugtggatug

SEQ ID NO: 90336 - DNA, 28 bp, Artificial Sequence
  Synthetic
cttctctggcagguaaaaggaaaauaac

SEQ ID NO: 90337 - DNA, 24 bp, Artificial Sequence
  Synthetic
gccgcagutcataggtauaggaat

SEQ ID NO: 90338 - DNA, 27 bp, Artificial Sequence
  Synthetic
aautttggaaaagtgucagaaggcaat

SEQ ID NO: 90339 - DNA, 24 bp, Artificial Sequence
  Synthetic
tggtgatggauctgatgaaccuga

SEQ ID NO: 90340 - DNA, 22 bp, Artificial Sequence
  Synthetic
gctttccaacagccaugagcua

SEQ ID NO: 90341 - DNA, 26 bp, Artificial Sequence
  Synthetic
guatccagauaacaaaagcaggagga

SEQ ID NO: 90342 - DNA, 23 bp, Artificial Sequence
  Synthetic
tgccagtatacucacgacaguca

SEQ ID NO: 90343 - DNA, 29 bp, Artificial Sequence
  Synthetic
tccattatataugcactgggttctucaac

SEQ ID NO: 90344 - DNA, 19 bp, Artificial Sequence
  Synthetic
ttacccccugactggguga

SEQ ID NO: 90345 - DNA, 24 bp, Artificial Sequence
  Synthetic
agtggattgggugtcacgtaatut

SEQ ID NO: 90346 - DNA, 22 bp, Artificial Sequence
  Synthetic
accugauaaagaggcccgagaa

SEQ ID NO: 90347 - DNA, 22 bp, Artificial Sequence
  Synthetic
cagacacaccuatgtgcagugt

SEQ ID NO: 90348 - DNA, 28 bp, Artificial Sequence
  Synthetic
gattgtccatucatctgttaatccucct

SEQ ID NO: 90349 - DNA, 28 bp, Artificial Sequence
  Synthetic
actctaagcucagtcaatggaaaugaaa

SEQ ID NO: 90350 - DNA, 27 bp, Artificial Sequence
  Synthetic
cagagtctgcugaatatgatgatguct

SEQ ID NO: 90351 - DNA, 28 bp, Artificial Sequence
  Synthetic
gtcgtacugaaccaattgtatcattugt

SEQ ID NO: 90352 - DNA, 22 bp, Artificial Sequence
  Synthetic
cctcatctccuttccagcgtuc

SEQ ID NO: 90353 - DNA, 23 bp, Artificial Sequence
  Synthetic
gcaacagtgcauggacaagatuc

SEQ ID NO: 90354 - DNA, 27 bp, Artificial Sequence
  Synthetic
cgtttcatcaaautctgagctaaucca

SEQ ID NO: 90355 - DNA, 27 bp, Artificial Sequence
  Synthetic
aaaataactactugcagagccaguaca

SEQ ID NO: 90356 - DNA, 28 bp, Artificial Sequence
  Synthetic
cctcctgctttugttatctggatacaut

SEQ ID NO: 90357 - DNA, 27 bp, Artificial Sequence
  Synthetic
tggaagtaaaauggcaactctaagcuc

SEQ ID NO: 90358 - DNA, 27 bp, Artificial Sequence
  Synthetic
tgagcttagagutgccattttactucc

SEQ ID NO: 90359 - DNA, 28 bp, Artificial Sequence
  Synthetic
agctttcaataacuagggcaaaactgua

SEQ ID NO: 90360 - DNA, 21 bp, Artificial Sequence
  Synthetic
ccugggaacccaaauccaact

SEQ ID NO: 90361 - DNA, 22 bp, Artificial Sequence
  Synthetic
tcaggtuccggccacttuaaaa

SEQ ID NO: 90362 - DNA, 28 bp, Artificial Sequence
  Synthetic
tgacacactcuaaaagataggctgaaug

SEQ ID NO: 90363 - DNA, 22 bp, Artificial Sequence
  Synthetic
cctaguccagccttcagaugga

SEQ ID NO: 90364 - DNA, 28 bp, Artificial Sequence
  Synthetic
tgaaacaaagucttcatttcuccacaga

SEQ ID NO: 90365 - DNA, 24 bp, Artificial Sequence
  Synthetic
ctctgggaacacaautccaccaua

SEQ ID NO: 90366 - DNA, 22 bp, Artificial Sequence
  Synthetic
ttagaggcuacagactcugcct

SEQ ID NO: 90367 - DNA, 22 bp, Artificial Sequence
  Synthetic
gcactagcugccattaaaugct

SEQ ID NO: 90368 - DNA, 21 bp, Artificial Sequence
  Synthetic
cagctuggtgagcaucacaac

SEQ ID NO: 90369 - DNA, 27 bp, Artificial Sequence
  Synthetic
gtgtgagcttutgcatgttctcuaaat

SEQ ID NO: 90370 - DNA, 23 bp, Artificial Sequence
  Synthetic
actttccccuaccctcaugaagt

SEQ ID NO: 90371 - DNA, 24 bp, Artificial Sequence
  Synthetic
tucttcttcaguacccaggacaga

SEQ ID NO: 90372 - DNA, 28 bp, Artificial Sequence
  Synthetic
cacaagtgtuagaatctgatctcugcat

SEQ ID NO: 90373 - DNA, 26 bp, Artificial Sequence
  Synthetic
gatgagaccaagaauaacugggaagt

SEQ ID NO: 90374 - DNA, 22 bp, Artificial Sequence
  Synthetic
cccgagaaagagcugacactuc

SEQ ID NO: 90375 - DNA, 33 bp, Artificial Sequence
  Synthetic
gtttctatttgacaauatagtttgttgcctcua

SEQ ID NO: 90376 - DNA, 22 bp, Artificial Sequence
  Synthetic
ccaaggccugaaaactccauct

SEQ ID NO: 90377 - DNA, 28 bp, Artificial Sequence
  Synthetic
catatgctgtcaauggatggaaguacat

SEQ ID NO: 90378 - DNA, 23 bp, Artificial Sequence
  Synthetic
actggaagcucatttcccactuc

SEQ ID NO: 90379 - DNA, 28 bp, Artificial Sequence
  Synthetic
ttgctaccauagggatatgtgtaaucct

SEQ ID NO: 90380 - DNA, 25 bp, Artificial Sequence
  Synthetic
tgatgactuggaggtatggtcucat

SEQ ID NO: 90381 - DNA, 27 bp, Artificial Sequence
  Synthetic
ccaatcaacuttctatcatcugcagga

SEQ ID NO: 90382 - DNA, 25 bp, Artificial Sequence
  Synthetic
gaaagguacattgctauggaggaca

SEQ ID NO: 90383 - DNA, 28 bp, Artificial Sequence
  Synthetic
atgatgctaccagaguctacctaatuct

SEQ ID NO: 90384 - DNA, 27 bp, Artificial Sequence
  Synthetic
aaaatctgcautaagctgcaugaaaca

SEQ ID NO: 90385 - DNA, 27 bp, Artificial Sequence
  Synthetic
cgctcagagaacaagutttacttucca

SEQ ID NO: 90386 - DNA, 22 bp, Artificial Sequence
  Synthetic
cctttctucagtgggtcucagt

SEQ ID NO: 90387 - DNA, 25 bp, Artificial Sequence
  Synthetic
catccatgtacucataacccagcuc

SEQ ID NO: 90388 - DNA, 24 bp, Artificial Sequence
  Synthetic
cctagggagaaugaccttaugcca

SEQ ID NO: 90389 - DNA, 26 bp, Artificial Sequence
  Synthetic
cggcatacagaauttccttcactuac

SEQ ID NO: 90390 - DNA, 21 bp, Artificial Sequence
  Synthetic
cgccauggcaactgtcaaauc

SEQ ID NO: 90391 - DNA, 27 bp, Artificial Sequence
  Synthetic
gttctttcctaauggtgactgttucct

SEQ ID NO: 90392 - DNA, 27 bp, Artificial Sequence
  Synthetic
gggccttatttaucatctgttctguct

SEQ ID NO: 90393 - DNA, 26 bp, Artificial Sequence
  Synthetic
tgatggtgtcuaacacaacctttgut

SEQ ID NO: 90394 - DNA, 24 bp, Artificial Sequence
  Synthetic
actgttccaaguggtgcatatucc

SEQ ID NO: 90395 - DNA, 28 bp, Artificial Sequence
  Synthetic
agctccaaaccaagugttagaatgttua

SEQ ID NO: 90396 - DNA, 23 bp, Artificial Sequence
  Synthetic
aatggccacacagutgaugagat

SEQ ID NO: 90397 - DNA, 29 bp, Artificial Sequence
  Synthetic
atgtgtccagtuttcttattttgcttuca

SEQ ID NO: 90398 - DNA, 21 bp, Artificial Sequence
  Synthetic
cctaggccaagutccctugag

SEQ ID NO: 90399 - DNA, 28 bp, Artificial Sequence
  Synthetic
ccatctcgtugccgattcatatatucat

SEQ ID NO: 90400 - DNA, 22 bp, Artificial Sequence
  Synthetic
cttctccccaacaugctctgut

SEQ ID NO: 90401 - DNA, 20 bp, Artificial Sequence
  Synthetic
gtcctgcacgaaugcaacuc

SEQ ID NO: 90402 - DNA, 21 bp, Artificial Sequence
  Synthetic
caaacagccgugcgtcauaaa

SEQ ID NO: 90403 - DNA, 24 bp, Artificial Sequence
  Synthetic
caaaacgggacuggctagtuaaac

SEQ ID NO: 90404 - DNA, 26 bp, Artificial Sequence
  Synthetic
ctgagttgcaggugaatttgtaaugt

SEQ ID NO: 90405 - DNA, 22 bp, Artificial Sequence
  Synthetic
gggtaaacccggucatcatcut

SEQ ID NO: 90406 - DNA, 21 bp, Artificial Sequence
  Synthetic
gtgaactgugacgctctcuca

SEQ ID NO: 90407 - DNA, 28 bp, Artificial Sequence
  Synthetic
ttcagatcctugaagctccatttgaaua

SEQ ID NO: 90408 - DNA, 24 bp, Artificial Sequence
  Synthetic
cctgaccctcugagtctttctcut

SEQ ID NO: 90409 - DNA, 22 bp, Artificial Sequence
  Synthetic
ctccattuctggccucagagac

SEQ ID NO: 90410 - DNA, 20 bp, Artificial Sequence
  Synthetic
ccguagaagcccacgatgua

SEQ ID NO: 90411 - DNA, 21 bp, Artificial Sequence
  Synthetic
cccaaatgccutcatcccgut

SEQ ID NO: 90412 - DNA, 22 bp, Artificial Sequence
  Synthetic
ggcacaacuccagaugaagact

SEQ ID NO: 90413 - DNA, 22 bp, Artificial Sequence
  Synthetic
gccccugaaaagctctcatcuc

SEQ ID NO: 90414 - DNA, 23 bp, Artificial Sequence
  Synthetic
gtatgccugccacagagatuacc

SEQ ID NO: 90415 - DNA, 22 bp, Artificial Sequence
  Synthetic
tcgatccccutcttccuaagca

SEQ ID NO: 90416 - DNA, 22 bp, Artificial Sequence
  Synthetic
accacucacctaggttugcaac

SEQ ID NO: 90417 - DNA, 27 bp, Artificial Sequence
  Synthetic
gacatgctcacutgtggtactatttuc

SEQ ID NO: 90418 - DNA, 23 bp, Artificial Sequence
  Synthetic
gggcgatcucaaaagttatcucc

SEQ ID NO: 90419 - DNA, 23 bp, Artificial Sequence
  Synthetic
agaaacacuggatgcuggaaagt

SEQ ID NO: 90420 - DNA, 21 bp, Artificial Sequence
  Synthetic
tgauccccacaccugacaaag

SEQ ID NO: 90421 - DNA, 23 bp, Artificial Sequence
  Synthetic
gtaagagaccuggaagccatgug

SEQ ID NO: 90422 - DNA, 23 bp, Artificial Sequence
  Synthetic
cagcatcugagcaagggtaugaa

SEQ ID NO: 90423 - DNA, 26 bp, Artificial Sequence
  Synthetic
gctatgccaguaatcagggttaucaa

SEQ ID NO: 90424 - DNA, 25 bp, Artificial Sequence
  Synthetic
cctagacctcaucctctttgagcut

SEQ ID NO: 90425 - DNA, 23 bp, Artificial Sequence
  Synthetic
tcaggtggaucaaagtgtctgug

SEQ ID NO: 90426 - DNA, 22 bp, Artificial Sequence
  Synthetic
ggcaaactuacccagcctctut

SEQ ID NO: 90427 - DNA, 27 bp, Artificial Sequence
  Synthetic
ggattgtgactcucatttcttttggug

SEQ ID NO: 90428 - DNA, 25 bp, Artificial Sequence
  Synthetic
gcuctgaaagtcuggaagagaaaga

SEQ ID NO: 90429 - DNA, 21 bp, Artificial Sequence
  Synthetic
tgacccttgugaacagctugg

SEQ ID NO: 90430 - DNA, 22 bp, Artificial Sequence
  Synthetic
ggcccagcacaugtaatttugt

SEQ ID NO: 90431 - DNA, 28 bp, Artificial Sequence
  Synthetic
cttggaaagtgaugcaaatacttcagut

SEQ ID NO: 90432 - DNA, 20 bp, Artificial Sequence
  Synthetic
caccgaguccuggacaagat

SEQ ID NO: 90433 - DNA, 25 bp, Artificial Sequence
  Synthetic
ctttatguctctcctguaggaagcc

SEQ ID NO: 90434 - DNA, 28 bp, Artificial Sequence
  Synthetic
caaaatgaccaaguaataagctgucagt

SEQ ID NO: 90435 - DNA, 26 bp, Artificial Sequence
  Synthetic
gacctttgctguaacatgctgtatut

SEQ ID NO: 90436 - DNA, 22 bp, Artificial Sequence
  Synthetic
cctcagccaugtttccucacat

SEQ ID NO: 90437 - DNA, 21 bp, Artificial Sequence
  Synthetic
cacggagaccutcctgacaut

SEQ ID NO: 90438 - DNA, 21 bp, Artificial Sequence
  Synthetic
cgacaagaccaaccuccaugt

SEQ ID NO: 90439 - DNA, 28 bp, Artificial Sequence
  Synthetic
ggtggctttgtucaaattaaaggttcut

SEQ ID NO: 90440 - DNA, 21 bp, Artificial Sequence
  Synthetic
ctgaggccagguggttuaagt

SEQ ID NO: 90441 - DNA, 23 bp, Artificial Sequence
  Synthetic
aatgctucacagcaaacctgtuc

SEQ ID NO: 90442 - DNA, 20 bp, Artificial Sequence
  Synthetic
atgaggcugctgtgctugat

SEQ ID NO: 90443 - DNA, 22 bp, Artificial Sequence
  Synthetic
agctcaugcacgactagttucc

SEQ ID NO: 90444 - DNA, 22 bp, Artificial Sequence
  Synthetic
caaugagccagactuggaagac

SEQ ID NO: 90445 - DNA, 23 bp, Artificial Sequence
  Synthetic
tgatgaatgtcugccaagcctut

SEQ ID NO: 90446 - DNA, 25 bp, Artificial Sequence
  Synthetic
gucttcaagtgttuagccacaaagg

SEQ ID NO: 90447 - DNA, 23 bp, Artificial Sequence
  Synthetic
gacctgcaugcttttctttcuca

SEQ ID NO: 90448 - DNA, 28 bp, Artificial Sequence
  Synthetic
caacagcctuagatgctcttaguaaaga

SEQ ID NO: 90449 - DNA, 27 bp, Artificial Sequence
  Synthetic
gccagcctaaautaattcactccatut

SEQ ID NO: 90450 - DNA, 28 bp, Artificial Sequence
  Synthetic
catcctttatautgccatttttguccca

SEQ ID NO: 90451 - DNA, 26 bp, Artificial Sequence
  Synthetic
gcacgatauaacaggccaagcattua

SEQ ID NO: 90452 - DNA, 26 bp, Artificial Sequence
  Synthetic
gatcccaatgcccuctatgtcttaut

SEQ ID NO: 90453 - DNA, 22 bp, Artificial Sequence
  Synthetic
tgcacaccaggutactgtugac

SEQ ID NO: 90454 - DNA, 28 bp, Artificial Sequence
  Synthetic
ccaagutttaggagatucagaaggcaaa

SEQ ID NO: 90455 - DNA, 22 bp, Artificial Sequence
  Synthetic
ctaacagaacutccgcctcugg

SEQ ID NO: 90456 - DNA, 29 bp, Artificial Sequence
  Synthetic
gttttctggaauggagtgagtatagucat

SEQ ID NO: 90457 - DNA, 28 bp, Artificial Sequence
  Synthetic
ctctttgccatuaacttggatttctuga

SEQ ID NO: 90458 - DNA, 18 bp, Artificial Sequence
  Synthetic
agaguccccgguccaaca

SEQ ID NO: 90459 - DNA, 20 bp, Artificial Sequence
  Synthetic
ccagggcagguggaagaauc

SEQ ID NO: 90460 - DNA, 25 bp, Artificial Sequence
  Synthetic
acaggattccugaaaaccaactgua

SEQ ID NO: 90461 - DNA, 20 bp, Artificial Sequence
  Synthetic
ctcgaucaccgtgcagtuct

SEQ ID NO: 90462 - DNA, 19 bp, Artificial Sequence
  Synthetic
gccacgguatgttccucgt

SEQ ID NO: 90463 - DNA, 25 bp, Artificial Sequence
  Synthetic
aaattcctgguccccgatctuaaaa

SEQ ID NO: 90464 - DNA, 27 bp, Artificial Sequence
  Synthetic
ggtcttcaccaguacatttcattcuca

SEQ ID NO: 90465 - DNA, 24 bp, Artificial Sequence
  Synthetic
cctccaccaguttctgtattucct

SEQ ID NO: 90466 - DNA, 26 bp, Artificial Sequence
  Synthetic
aagtcatgcuaacagagtgucaagag

SEQ ID NO: 90467 - DNA, 29 bp, Artificial Sequence
  Synthetic
ccgacagaaaauatgttacgcuaagagaa

SEQ ID NO: 90468 - DNA, 22 bp, Artificial Sequence
  Synthetic
caacgactaucagcagcugaag

SEQ ID NO: 90469 - DNA, 21 bp, Artificial Sequence
  Synthetic
cacucggaacagcagcaagua

SEQ ID NO: 90470 - DNA, 26 bp, Artificial Sequence
  Synthetic
gtatgttucactctatgucccccaaa

SEQ ID NO: 90471 - DNA, 22 bp, Artificial Sequence
  Synthetic
ttccttctugggttgctgtuga

SEQ ID NO: 90472 - DNA, 25 bp, Artificial Sequence
  Synthetic
tggtcaugagggaaaauaagaaccc

SEQ ID NO: 90473 - DNA, 28 bp, Artificial Sequence
  Synthetic
gcagaatgtuaaatgaacgaaucccaaa

SEQ ID NO: 90474 - DNA, 22 bp, Artificial Sequence
  Synthetic
cctggctgcuaggaacattcug

SEQ ID NO: 90475 - DNA, 26 bp, Artificial Sequence
  Synthetic
atgcttcuacttgagaaugccaagaa

SEQ ID NO: 90476 - DNA, 19 bp, Artificial Sequence
  Synthetic
catcaacucgcugcccaac

SEQ ID NO: 90477 - DNA, 19 bp, Artificial Sequence
  Synthetic
agacccggutctcgaccut

SEQ ID NO: 90478 - DNA, 28 bp, Artificial Sequence
  Synthetic
agatttacctcccaaaugtcagatgaug

SEQ ID NO: 90479 - DNA, 25 bp, Artificial Sequence
  Synthetic
ctgtgcugaaaacagtctctttgut

SEQ ID NO: 90480 - DNA, 24 bp, Artificial Sequence
  Synthetic
tggataaaagcggucaactuaccc

SEQ ID NO: 90481 - DNA, 26 bp, Artificial Sequence
  Synthetic
tgaaggagcugcataaagagucaaaa

SEQ ID NO: 90482 - DNA, 22 bp, Artificial Sequence
  Synthetic
ccctattuccctccucaaccaa

SEQ ID NO: 90483 - DNA, 24 bp, Artificial Sequence
  Synthetic
acaatgtagcugacagccaaauca

SEQ ID NO: 90484 - DNA, 21 bp, Artificial Sequence
  Synthetic
ctggatuggcacctgcuaact

SEQ ID NO: 90485 - DNA, 28 bp, Artificial Sequence
  Synthetic
gccgggaaaaucatgttcttttcttcua

SEQ ID NO: 90486 - DNA, 23 bp, Artificial Sequence
  Synthetic
gcagtccatuctgcctctgttut

SEQ ID NO: 90487 - DNA, 26 bp, Artificial Sequence
  Synthetic
agagttgcttuttgactgtctucaca

SEQ ID NO: 90488 - DNA, 21 bp, Artificial Sequence
  Synthetic
caagcucacggtcatuaccga

SEQ ID NO: 90489 - DNA, 21 bp, Artificial Sequence
  Synthetic
aagaugaccagggcgtagtug

SEQ ID NO: 90490 - DNA, 29 bp, Artificial Sequence
  Synthetic
tgtttaaagagaauacgaccaagccuaac

SEQ ID NO: 90491 - DNA, 21 bp, Artificial Sequence
  Synthetic
ggccagagacutgcagacaut

SEQ ID NO: 90492 - DNA, 21 bp, Artificial Sequence
  Synthetic
ccctgcagugattcugaggac

SEQ ID NO: 90493 - DNA, 23 bp, Artificial Sequence
  Synthetic
ggagcttgtgauggaggaaagut

SEQ ID NO: 90494 - DNA, 17 bp, Artificial Sequence
  Synthetic
gcagggagcggugagug

SEQ ID NO: 90495 - DNA, 17 bp, Artificial Sequence
  Synthetic
ccgccgucctcctucat

SEQ ID NO: 90496 - DNA, 19 bp, Artificial Sequence
  Synthetic
gguccacagggaugcgaag

SEQ ID NO: 90497 - DNA, 23 bp, Artificial Sequence
  Synthetic
ctccccaaccugtctcttttgua

SEQ ID NO: 90498 - DNA, 24 bp, Artificial Sequence
  Synthetic
cagttgcatugttccacaaaugga

SEQ ID NO: 90499 - DNA, 19 bp, Artificial Sequence
  Synthetic
tutcaggucccgaggaggt

SEQ ID NO: 90500 - DNA, 27 bp, Artificial Sequence
  Synthetic
aggagtggauacaggaaaucagaagat

SEQ ID NO: 90501 - DNA, 21 bp, Artificial Sequence
  Synthetic
gaacctgcautgtgactgcug

SEQ ID NO: 90502 - DNA, 19 bp, Artificial Sequence
  Synthetic
ccagccaaucgtctcuggt

SEQ ID NO: 90503 - DNA, 27 bp, Artificial Sequence
  Synthetic
ccaattagaaacutctgtcacttgugt

SEQ ID NO: 90504 - DNA, 21 bp, Artificial Sequence
  Synthetic
gaacgutcaucaggacaggga

SEQ ID NO: 90505 - DNA, 27 bp, Artificial Sequence
  Synthetic
tcctaagcaaggutctggtttgtttua

SEQ ID NO: 90506 - DNA, 20 bp, Artificial Sequence
  Synthetic
tcaaggctugccaggacuaa

SEQ ID NO: 90507 - DNA, 22 bp, Artificial Sequence
  Synthetic
gcgcagagagaucgaaauccag

SEQ ID NO: 90508 - DNA, 20 bp, Artificial Sequence
  Synthetic
cagtggcaguaaggctggut

SEQ ID NO: 90509 - DNA, 21 bp, Artificial Sequence
  Synthetic
tccaauagggagacccaccug

SEQ ID NO: 90510 - DNA, 20 bp, Artificial Sequence
  Synthetic
cgcggcuggaaactcttcua

SEQ ID NO: 90511 - DNA, 20 bp, Artificial Sequence
  Synthetic
ggaucagggaccaguccaca

SEQ ID NO: 90512 - DNA, 21 bp, Artificial Sequence
  Synthetic
catcaacccauactgcaggug

SEQ ID NO: 90513 - DNA, 22 bp, Artificial Sequence
  Synthetic
acutggcucgggagaagaaaag

SEQ ID NO: 90514 - DNA, 23 bp, Artificial Sequence
  Synthetic
gggcactaagutgccaataguag

SEQ ID NO: 90515 - DNA, 23 bp, Artificial Sequence
  Synthetic
cgaaugttgagtucgaccaccat

SEQ ID NO: 90516 - DNA, 24 bp, Artificial Sequence
  Synthetic
gggacaacuacctgtatgagaucc

SEQ ID NO: 90517 - DNA, 21 bp, Artificial Sequence
  Synthetic
tttgugggaagccacggatua

SEQ ID NO: 90518 - DNA, 27 bp, Artificial Sequence
  Synthetic
tgtttctguacctgctttaatuacggt

SEQ ID NO: 90519 - DNA, 20 bp, Artificial Sequence
  Synthetic
ggccactcuggtttcaggut

SEQ ID NO: 90520 - DNA, 24 bp, Artificial Sequence
  Synthetic
ccagagtucccacaacgaaattug

SEQ ID NO: 90521 - DNA, 23 bp, Artificial Sequence
  Synthetic
ctgaggaggaacuggcaucaaaa

SEQ ID NO: 90522 - DNA, 22 bp, Artificial Sequence
  Synthetic
ctgacctcugttacctcuccac

SEQ ID NO: 90523 - DNA, 26 bp, Artificial Sequence
  Synthetic
tgtactcattgtugatggtggtctuc

SEQ ID NO: 90524 - DNA, 20 bp, Artificial Sequence
  Synthetic
gttggtgggaaguccagcut

SEQ ID NO: 90525 - DNA, 21 bp, Artificial Sequence
  Synthetic
tctcccaccucagaagccaua

SEQ ID NO: 90526 - DNA, 21 bp, Artificial Sequence
  Synthetic
cttgagcgccacgaugaaaug

SEQ ID NO: 90527 - DNA, 27 bp, Artificial Sequence
  Synthetic
aacctcttaauaaccaaaaccggtuct

SEQ ID NO: 90528 - DNA, 26 bp, Artificial Sequence
  Synthetic
tgctattgugtttctcaauccaggaa

SEQ ID NO: 90529 - DNA, 28 bp, Artificial Sequence
  Synthetic
ccaagcatttcautaccagagttuacat

SEQ ID NO: 90530 - DNA, 23 bp, Artificial Sequence
  Synthetic
ccactgtgugcccctcttattuc

SEQ ID NO: 90531 - DNA, 23 bp, Artificial Sequence
  Synthetic
gccaagggautcaggtucagaat

SEQ ID NO: 90532 - DNA, 23 bp, Artificial Sequence
  Synthetic
caggttccutccactguaccaaa

SEQ ID NO: 90533 - DNA, 26 bp, Artificial Sequence
  Synthetic
ggattatgaatucagggttgttgcug

SEQ ID NO: 90534 - DNA, 22 bp, Artificial Sequence
  Synthetic
agacauggccaacaaugacaca

SEQ ID NO: 90535 - DNA, 29 bp, Artificial Sequence
  Synthetic
cgttttcctcctutcaactaacctaacut

SEQ ID NO: 90536 - DNA, 21 bp, Artificial Sequence
  Synthetic
ccaagcaagacaggugcttut

SEQ ID NO: 90537 - DNA, 20 bp, Artificial Sequence
  Synthetic
ggtaccggugccaggttaug

SEQ ID NO: 90538 - DNA, 24 bp, Artificial Sequence
  Synthetic
agaaatgaagcugttgctggaaug

SEQ ID NO: 90539 - DNA, 28 bp, Artificial Sequence
  Synthetic
gtgtgugaccagaatttucaagaaagaa

SEQ ID NO: 90540 - DNA, 26 bp, Artificial Sequence
  Synthetic
cttaccttctgcuatgcaggtgtuat

SEQ ID NO: 90541 - DNA, 28 bp, Artificial Sequence
  Synthetic
gggtatgatgaugctattttgagctcut

SEQ ID NO: 90542 - DNA, 20 bp, Artificial Sequence
  Synthetic
cccccgcccaaugttatuga

SEQ ID NO: 90543 - DNA, 28 bp, Artificial Sequence
  Synthetic
agcataaaccuaaaaactcugaggaact

SEQ ID NO: 90544 - DNA, 21 bp, Artificial Sequence
  Synthetic
ccaagggtguggtgaaagaug

SEQ ID NO: 90545 - DNA, 29 bp, Artificial Sequence
  Synthetic
cattttggctttucaggaactttctctua

SEQ ID NO: 90546 - DNA, 24 bp, Artificial Sequence
  Synthetic
gccaccccaucaatttctttguaa

SEQ ID NO: 90547 - DNA, 22 bp, Artificial Sequence
  Synthetic
atccaagccutacccaaaccuc

SEQ ID NO: 90548 - DNA, 22 bp, Artificial Sequence
  Synthetic
ccacgucgaagaatcgcaucat

SEQ ID NO: 90549 - DNA, 23 bp, Artificial Sequence
  Synthetic
caacagaauggcaucacccaaag

SEQ ID NO: 90550 - DNA, 26 bp, Artificial Sequence
  Synthetic
ctcacctgtgcutgaaagtatttcut

SEQ ID NO: 90551 - DNA, 22 bp, Artificial Sequence
  Synthetic
ttctccctccucttcggtctut

SEQ ID NO: 90552 - DNA, 23 bp, Artificial Sequence
  Synthetic
cacctgtgutttcagggauacga

SEQ ID NO: 90553 - DNA, 22 bp, Artificial Sequence
  Synthetic
caggcugttcttctuagagcgt

SEQ ID NO: 90554 - DNA, 20 bp, Artificial Sequence
  Synthetic
ccaagcccgcucatgaucaa

SEQ ID NO: 90555 - DNA, 25 bp, Artificial Sequence
  Synthetic
tgaagggtcuggtaggatcatacuc

SEQ ID NO: 90556 - DNA, 21 bp, Artificial Sequence
  Synthetic
agctgggagggacugagtuag

SEQ ID NO: 90557 - DNA, 18 bp, Artificial Sequence
  Synthetic
cccgacgcguacaggaug

SEQ ID NO: 90558 - DNA, 21 bp, Artificial Sequence
  Synthetic
cgaggccagguauacggacat

SEQ ID NO: 90559 - DNA, 18 bp, Artificial Sequence
  Synthetic
guacctgucgggccagag

SEQ ID NO: 90560 - DNA, 20 bp, Artificial Sequence
  Synthetic
gccactgugcagaagctcuc

SEQ ID NO: 90561 - DNA, 22 bp, Artificial Sequence
  Synthetic
gtaccagggaugagcttgacut

SEQ ID NO: 90562 - DNA, 22 bp, Artificial Sequence
  Synthetic
tgagcccccgauactctatucc

SEQ ID NO: 90563 - DNA, 20 bp, Artificial Sequence
  Synthetic
gctgcgcutcgcattctuac

SEQ ID NO: 90564 - DNA, 22 bp, Artificial Sequence
  Synthetic
tcaaccacagcaaugccatcua

SEQ ID NO: 90565 - DNA, 28 bp, Artificial Sequence
  Synthetic
gcaggagtatuaccatacaaggaaauct

SEQ ID NO: 90566 - DNA, 20 bp, Artificial Sequence
  Synthetic
gctcttgccucgatgtccua

SEQ ID NO: 90567 - DNA, 18 bp, Artificial Sequence
  Synthetic
tgctcucgcgccactuac

SEQ ID NO: 90568 - DNA, 17 bp, Artificial Sequence
  Synthetic
cccucagggcccaagut

SEQ ID NO: 90569 - DNA, 25 bp, Artificial Sequence
  Synthetic
ctccataacucatcactucccacat

SEQ ID NO: 90570 - DNA, 25 bp, Artificial Sequence
  Synthetic
tgaggacttugttaatgccaaugct

SEQ ID NO: 90571 - DNA, 29 bp, Artificial Sequence
  Synthetic
tgagattgtcacaaauttgctttctucaa

SEQ ID NO: 90572 - DNA, 24 bp, Artificial Sequence
  Synthetic
aaagccaaaaccccutcuaacaga

SEQ ID NO: 90573 - DNA, 19 bp, Artificial Sequence
  Synthetic
caccgttguggtccggaut

SEQ ID NO: 90574 - DNA, 27 bp, Artificial Sequence
  Synthetic
acaaaagagcugatgtttcaccauaca

SEQ ID NO: 90575 - DNA, 24 bp, Artificial Sequence
  Synthetic
cttgtgcatgucccactaactuct

SEQ ID NO: 90576 - DNA, 20 bp, Artificial Sequence
  Synthetic
gcctcuggaggaaccacuga

SEQ ID NO: 90577 - DNA, 19 bp, Artificial Sequence
  Synthetic
cttttgtugccggguggac

SEQ ID NO: 90578 - DNA, 23 bp, Artificial Sequence
  Synthetic
gcagcttcuccctctcattagug

SEQ ID NO: 90579 - DNA, 28 bp, Artificial Sequence
  Synthetic
agatttggagtgaugtcctcagttcuat

SEQ ID NO: 90580 - DNA, 31 bp, Artificial Sequence
  Synthetic
gcattgctaataugtaatcccttttucaact

SEQ ID NO: 90581 - DNA, 21 bp, Artificial Sequence
  Synthetic
cagaccggaauagcctgtuca

SEQ ID NO: 90582 - DNA, 22 bp, Artificial Sequence
  Synthetic
gcagagucgtggtaaacuccat

SEQ ID NO: 90583 - DNA, 25 bp, Artificial Sequence
  Synthetic
gaaagcattgccaugcatgacatua

SEQ ID NO: 90584 - DNA, 29 bp, Artificial Sequence
  Synthetic
acctacagtataugagaaatggagagcut

SEQ ID NO: 90585 - DNA, 22 bp, Artificial Sequence
  Synthetic
agautccucacacagccaacag

SEQ ID NO: 90586 - DNA, 28 bp, Artificial Sequence
  Synthetic
ccacctacaautaatgctggtttugaat

SEQ ID NO: 90587 - DNA, 27 bp, Artificial Sequence
  Synthetic
acttactagttatugctgtgccaaugt

SEQ ID NO: 90588 - DNA, 25 bp, Artificial Sequence
  Synthetic
caagtccuattatcagcugccagat

SEQ ID NO: 90589 - DNA, 29 bp, Artificial Sequence
  Synthetic
tcctgttttgttgutgttgtttctttcut

SEQ ID NO: 90590 - DNA, 24 bp, Artificial Sequence
  Synthetic
gatgtctggagcuttgggatacuc

SEQ ID NO: 90591 - DNA, 20 bp, Artificial Sequence
  Synthetic
tgutccaaccugggagggat

SEQ ID NO: 90592 - DNA, 20 bp, Artificial Sequence
  Synthetic
cctgaggcuggagctguact

SEQ ID NO: 90593 - DNA, 17 bp, Artificial Sequence
  Synthetic
cctccucccccagcauc

SEQ ID NO: 90594 - DNA, 25 bp, Artificial Sequence
  Synthetic
ggtgtcacuagaaacatcacaugct

SEQ ID NO: 90595 - DNA, 26 bp, Artificial Sequence
  Synthetic
ccattctgaugaagcaccttuaaacc

SEQ ID NO: 90596 - DNA, 22 bp, Artificial Sequence
  Synthetic
ccaaagcacutttctgctgcua

SEQ ID NO: 90597 - DNA, 28 bp, Artificial Sequence
  Synthetic
ttaaucttagtggagtugaaaggaagca

SEQ ID NO: 90598 - DNA, 17 bp, Artificial Sequence
  Synthetic
cggctgugacgcgagua

SEQ ID NO: 90599 - DNA, 21 bp, Artificial Sequence
  Synthetic
tggtgaauggtaggucaggga

SEQ ID NO: 90600 - DNA, 25 bp, Artificial Sequence
  Synthetic
ctgtaccugcacttttacacttugg

SEQ ID NO: 90601 - DNA, 25 bp, Artificial Sequence
  Synthetic
aggataucgacagtgtgguacagaa

SEQ ID NO: 90602 - DNA, 28 bp, Artificial Sequence
  Synthetic
ctcactgcccautatcttaagacauact

SEQ ID NO: 90603 - DNA, 30 bp, Artificial Sequence
  Synthetic
tcaatggaggaauaaatgtagaaatuggca

SEQ ID NO: 90604 - DNA, 17 bp, Artificial Sequence
  Synthetic
cgacccuccgggaguct

SEQ ID NO: 90605 - DNA, 22 bp, Artificial Sequence
  Synthetic
gacutttggcuacggagaagga

SEQ ID NO: 90606 - DNA, 18 bp, Artificial Sequence
  Synthetic
cctccccuccccctauct

SEQ ID NO: 90607 - DNA, 19 bp, Artificial Sequence
  Synthetic
ggcgacuggcaatgttugg

SEQ ID NO: 90608 - DNA, 27 bp, Artificial Sequence
  Synthetic
agtctataaactucacagggagaccut

SEQ ID NO: 90609 - DNA, 27 bp, Artificial Sequence
  Synthetic
tttacctcaaguttggctgcaauaaat

SEQ ID NO: 90610 - DNA, 19 bp, Artificial Sequence
  Synthetic
ccatuccccaacagctgug

SEQ ID NO: 90611 - DNA, 18 bp, Artificial Sequence
  Synthetic
caccgggaugccaggaua

SEQ ID NO: 90612 - DNA, 23 bp, Artificial Sequence
  Synthetic
cgcccaucagcacaactaaatuc

SEQ ID NO: 90613 - DNA, 26 bp, Artificial Sequence
  Synthetic
ggtgtagtguacattgaggagaugac

SEQ ID NO: 90614 - DNA, 24 bp, Artificial Sequence
  Synthetic
ggatcctgcuatgggagatctuca

SEQ ID NO: 90615 - DNA, 20 bp, Artificial Sequence
  Synthetic
ggaggaggacuggaaagugg

SEQ ID NO: 90616 - DNA, 28 bp, Artificial Sequence
  Synthetic
gcgacacaagaaaaugttgtaaaaacuc

SEQ ID NO: 90617 - DNA, 20 bp, Artificial Sequence
  Synthetic
gccaacctcutcccccaauc

SEQ ID NO: 90618 - DNA, 21 bp, Artificial Sequence
  Synthetic
gagcggagcauggtaactuct

SEQ ID NO: 90619 - DNA, 21 bp, Artificial Sequence
  Synthetic
aatcagtuccccgaagctguc

SEQ ID NO: 90620 - DNA, 23 bp, Artificial Sequence
  Synthetic
cgattaccgcguttctttugagg

SEQ ID NO: 90621 - DNA, 23 bp, Artificial Sequence
  Synthetic
cgcccuaaaaccgtgauaaagga

SEQ ID NO: 90622 - DNA, 22 bp, Artificial Sequence
  Synthetic
cccagaaacucaaugagcccaa

SEQ ID NO: 90623 - DNA, 22 bp, Artificial Sequence
  Synthetic
aacgtgtcugccatguacaagt

SEQ ID NO: 90624 - DNA, 20 bp, Artificial Sequence
  Synthetic
ccagguagaaagccgagugt

SEQ ID NO: 90625 - DNA, 19 bp, Artificial Sequence
  Synthetic
cctgctugacgctgtccuc

SEQ ID NO: 90626 - DNA, 20 bp, Artificial Sequence
  Synthetic
actcaguctcccctuggaca

SEQ ID NO: 90627 - DNA, 24 bp, Artificial Sequence
  Synthetic
guatctagggugaggagcagacaa

SEQ ID NO: 90628 - DNA, 17 bp, Artificial Sequence
  Synthetic
gccccagcuguggaagg

SEQ ID NO: 90629 - DNA, 18 bp, Artificial Sequence
  Synthetic
cgtugggcagggtauggt

SEQ ID NO: 90630 - DNA, 18 bp, Artificial Sequence
  Synthetic
gccaccgcuacctcgtut

SEQ ID NO: 90631 - DNA, 17 bp, Artificial Sequence
  Synthetic
aggucuacccccaggca

SEQ ID NO: 90632 - DNA, 22 bp, Artificial Sequence
  Synthetic
ccttctcagcugctctgttcuc

SEQ ID NO: 90633 - DNA, 21 bp, Artificial Sequence
  Synthetic
gctctatucggaggcacctuc

SEQ ID NO: 90634 - DNA, 25 bp, Artificial Sequence
  Synthetic
agaguctttaatgccugaaggagga

SEQ ID NO: 90635 - DNA, 26 bp, Artificial Sequence
  Synthetic
tgggcaatgguagagtagagaatuca

SEQ ID NO: 90636 - DNA, 21 bp, Artificial Sequence
  Synthetic
ccaccutgtuggagaccacac

SEQ ID NO: 90637 - DNA, 21 bp, Artificial Sequence
  Synthetic
gcgaccucctugcagaaagac

SEQ ID NO: 90638 - DNA, 26 bp, Artificial Sequence
  Synthetic
cacagctctacutcatttcctcugat

SEQ ID NO: 90639 - DNA, 21 bp, Artificial Sequence
  Synthetic
ggauccgaagacaagccctuc

SEQ ID NO: 90640 - DNA, 26 bp, Artificial Sequence
  Synthetic
gtactctacugaaccatggccaaaut

SEQ ID NO: 90641 - DNA, 31 bp, Artificial Sequence
  Synthetic
ctttcataacugcctttttaaaatuccaggt

SEQ ID NO: 90642 - DNA, 29 bp, Artificial Sequence
  Synthetic
aaattcctaucaagaaatggagaacugct

SEQ ID NO: 90643 - DNA, 24 bp, Artificial Sequence
  Synthetic
ttcctuccagacaaaagaccgtut

SEQ ID NO: 90644 - DNA, 23 bp, Artificial Sequence
  Synthetic
aaacggucttttgtcuggaagga

SEQ ID NO: 90645 - DNA, 32 bp, Artificial Sequence
  Synthetic
aacaattcttttcauctttcatgcttactaut

SEQ ID NO: 90646 - DNA, 17 bp, Artificial Sequence
  Synthetic
gcagcgcucccgctauc

SEQ ID NO: 90647 - DNA, 18 bp, Artificial Sequence
  Synthetic
aactgccuggagccgtut

SEQ ID NO: 90648 - DNA, 21 bp, Artificial Sequence
  Synthetic
ctatgtccucgtggccaugaa

SEQ ID NO: 90649 - DNA, 23 bp, Artificial Sequence
  Synthetic
cgtggcuggagttggtgttauag

SEQ ID NO: 90650 - DNA, 25 bp, Artificial Sequence
  Synthetic
ggctaagaugaagaggagacctuga

SEQ ID NO: 90651 - DNA, 22 bp, Artificial Sequence
  Synthetic
ggagaagtugtcctgguagcac

SEQ ID NO: 90652 - DNA, 24 bp, Artificial Sequence
  Synthetic
ctctaatggtgucctcctcctcut

SEQ ID NO: 90653 - DNA, 25 bp, Artificial Sequence
  Synthetic
acaacttctuaccatctccuaccca

SEQ ID NO: 90654 - DNA, 22 bp, Artificial Sequence
  Synthetic
cagcuggactggaauacaccat

SEQ ID NO: 90655 - DNA, 21 bp, Artificial Sequence
  Synthetic
ggaggcugctcttgucaaagg

SEQ ID NO: 90656 - DNA, 21 bp, Artificial Sequence
  Synthetic
ggcccttcuttgtctgccuac

SEQ ID NO: 90657 - DNA, 22 bp, Artificial Sequence
  Synthetic
aggaugacugggaagacagact

SEQ ID NO: 90658 - DNA, 21 bp, Artificial Sequence
  Synthetic
tgtgatcugagctctgcctug

SEQ ID NO: 90659 - DNA, 22 bp, Artificial Sequence
  Synthetic
cctcccagggacugacaattut

SEQ ID NO: 90660 - DNA, 21 bp, Artificial Sequence
  Synthetic
gctttcagccautggacugga

SEQ ID NO: 90661 - DNA, 22 bp, Artificial Sequence
  Synthetic
ttctccgagauccccaauacga

SEQ ID NO: 90662 - DNA, 27 bp, Artificial Sequence
  Synthetic
gataactgugagaagcaataccgucat

SEQ ID NO: 90663 - DNA, 26 bp, Artificial Sequence
  Synthetic
atgagttaaccaacuaggccactuac

SEQ ID NO: 90664 - DNA, 18 bp, Artificial Sequence
  Synthetic
aagcaccaugcgggauga

SEQ ID NO: 90665 - DNA, 29 bp, Artificial Sequence
  Synthetic
acttttggagaacucaacauaaacagact

SEQ ID NO: 90666 - DNA, 19 bp, Artificial Sequence
  Synthetic
gctcagtccuctcccccut

SEQ ID NO: 90667 - DNA, 20 bp, Artificial Sequence
  Synthetic
caaaggcacccucagagcua

SEQ ID NO: 90668 - DNA, 24 bp, Artificial Sequence
  Synthetic
gtttgccatcutcgtcatgtugaa

SEQ ID NO: 90669 - DNA, 21 bp, Artificial Sequence
  Synthetic
gtgagcagucttgggtcauca

SEQ ID NO: 90670 - DNA, 20 bp, Artificial Sequence
  Synthetic
ggacagagccuggagcuaat

SEQ ID NO: 90671 - DNA, 21 bp, Artificial Sequence
  Synthetic
gucaccaaaguccagcacaga

SEQ ID NO: 90672 - DNA, 23 bp, Artificial Sequence
  Synthetic
gtagtgtccacgugtgtgcttua

SEQ ID NO: 90673 - DNA, 27 bp, Artificial Sequence
  Synthetic
ttccttcaaggauacttctactgguca

SEQ ID NO: 90674 - DNA, 28 bp, Artificial Sequence
  Synthetic
aactgatugaggacagaagauacacaac

SEQ ID NO: 90675 - DNA, 29 bp, Artificial Sequence
  Synthetic
tgtttgtttcctagautcttcttgctcut

SEQ ID NO: 90676 - DNA, 18 bp, Artificial Sequence
  Synthetic
cgcagugctcacctucct

SEQ ID NO: 90677 - DNA, 20 bp, Artificial Sequence
  Synthetic
ggcuggaagcctttcucacc

SEQ ID NO: 90678 - DNA, 24 bp, Artificial Sequence
  Synthetic
cactgttttcugcatattgcugct

SEQ ID NO: 90679 - DNA, 28 bp, Artificial Sequence
  Synthetic
tcagtgtauaccagcaaaatggaaaugt

SEQ ID NO: 90680 - DNA, 20 bp, Artificial Sequence
  Synthetic
ctttgagtucgccgacctug

SEQ ID NO: 90681 - DNA, 22 bp, Artificial Sequence
  Synthetic
ccagatggaguctccctaggua

SEQ ID NO: 90682 - DNA, 28 bp, Artificial Sequence
  Synthetic
ctaccttgccacaaacuccttattctua

SEQ ID NO: 90683 - DNA, 27 bp, Artificial Sequence
  Synthetic
cactctguggaagaaatcactgauaac

SEQ ID NO: 90684 - DNA, 25 bp, Artificial Sequence
  Synthetic
catatttgcagucttcatggccauc

SEQ ID NO: 90685 - DNA, 28 bp, Artificial Sequence
  Synthetic
tgtcttttgagugtgtagaagtgttuct

SEQ ID NO: 90686 - DNA, 20 bp, Artificial Sequence
  Synthetic
ggtccaccucagaggtcugt

SEQ ID NO: 90687 - DNA, 21 bp, Artificial Sequence
  Synthetic
cccagccaauagccactcuaa

SEQ ID NO: 90688 - DNA, 28 bp, Artificial Sequence
  Synthetic
agcaacaagaaaaacuaagcaagtugac

SEQ ID NO: 90689 - DNA, 24 bp, Artificial Sequence
  Synthetic
agtttttgcugagtgcctaaguga

SEQ ID NO: 90690 - DNA, 23 bp, Artificial Sequence
  Synthetic
ggataaacaauagcctgcgggua

SEQ ID NO: 90691 - DNA, 27 bp, Artificial Sequence
  Synthetic
cagcattaagttucagctctctgttut

SEQ ID NO: 90692 - DNA, 18 bp, Artificial Sequence
  Synthetic
tgctgaccuctgcccuct

SEQ ID NO: 90693 - DNA, 19 bp, Artificial Sequence
  Synthetic
gactgcccuccttguacca

SEQ ID NO: 90694 - DNA, 22 bp, Artificial Sequence
  Synthetic
gctctgcacaaagautgcacua

SEQ ID NO: 90695 - DNA, 28 bp, Artificial Sequence
  Synthetic
tgcttccaaagucacactgaaataguaa

SEQ ID NO: 90696 - DNA, 17 bp, Artificial Sequence
  Synthetic
gcctgugcgtctgugct

SEQ ID NO: 90697 - DNA, 18 bp, Artificial Sequence
  Synthetic
ggccagcaucctcaggua

SEQ ID NO: 90698 - DNA, 27 bp, Artificial Sequence
  Synthetic
actaagaaatgtgutgcttgttgctut

SEQ ID NO: 90699 - DNA, 24 bp, Artificial Sequence
  Synthetic
cccaagcaauttgtttgugaccat

SEQ ID NO: 90700 - DNA, 20 bp, Artificial Sequence
  Synthetic
agacggcugatccaatggug

SEQ ID NO: 90701 - DNA, 27 bp, Artificial Sequence
  Synthetic
catgcttttgaugaatgctttctcuct

SEQ ID NO: 90702 - DNA, 22 bp, Artificial Sequence
  Synthetic
ttctttccutcagcccuaagcc

SEQ ID NO: 90703 - DNA, 22 bp, Artificial Sequence
  Synthetic
ggcaaagacugcaccagatgua

SEQ ID NO: 90704 - DNA, 21 bp, Artificial Sequence
  Synthetic
gccatcuccacagtcgtcauc

SEQ ID NO: 90705 - DNA, 28 bp, Artificial Sequence
  Synthetic
gggaagataacauatgtgctcatcuaac

SEQ ID NO: 90706 - DNA, 22 bp, Artificial Sequence
  Synthetic
cctgcagtucaggctgauaagg

SEQ ID NO: 90707 - DNA, 26 bp, Artificial Sequence
  Synthetic
agccttggagutctttgctatgaaut

SEQ ID NO: 90708 - DNA, 21 bp, Artificial Sequence
  Synthetic
gcctagagautgccagctucc

SEQ ID NO: 90709 - DNA, 24 bp, Artificial Sequence
  Synthetic
tcactcccugctagagtctctuac

SEQ ID NO: 90710 - DNA, 27 bp, Artificial Sequence
  Synthetic
agttaatgcauctcctttgtttugcag

SEQ ID NO: 90711 - DNA, 23 bp, Artificial Sequence
  Synthetic
atgtctgccagcaautcacctua

SEQ ID NO: 90712 - DNA, 33 bp, Artificial Sequence
  Synthetic
gaaaaagcaaauccaactattacuagaaaacat

SEQ ID NO: 90713 - DNA, 23 bp, Artificial Sequence
  Synthetic
gccaatgggaaucatagctgtug

SEQ ID NO: 90714 - DNA, 22 bp, Artificial Sequence
  Synthetic
acagctatuggtgtcatuggca

SEQ ID NO: 90715 - DNA, 28 bp, Artificial Sequence
  Synthetic
tcctcagtttggcugtttatgacaatua

SEQ ID NO: 90716 - DNA, 21 bp, Artificial Sequence
  Synthetic
agaatggccgugttcatgcua

SEQ ID NO: 90717 - DNA, 28 bp, Artificial Sequence
  Synthetic
gaatcatguagagttgctgaaucacaga

SEQ ID NO: 90718 - DNA, 33 bp, Artificial Sequence
  Synthetic
gaatgttactgaaagaugttaatgcatttaugg

SEQ ID NO: 90719 - DNA, 27 bp, Artificial Sequence
  Synthetic
cagacagactcucactgatttacucat

SEQ ID NO: 90720 - DNA, 23 bp, Artificial Sequence
  Synthetic
cacctggauatctgtgauggcat

SEQ ID NO: 90721 - DNA, 27 bp, Artificial Sequence
  Synthetic
ggtgattgcacuaacattgttugaaga

SEQ ID NO: 90722 - DNA, 22 bp, Artificial Sequence
  Synthetic
ccctccccucttcaacaacuct

SEQ ID NO: 90723 - DNA, 28 bp, Artificial Sequence
  Synthetic
ggccaactaacauttagcctttctttut

SEQ ID NO: 90724 - DNA, 21 bp, Artificial Sequence
  Synthetic
gaaggcaggcutggtacguaa

SEQ ID NO: 90725 - DNA, 26 bp, Artificial Sequence
  Synthetic
gggaaaatgguagaagaagtggaugg

SEQ ID NO: 90726 - DNA, 23 bp, Artificial Sequence
  Synthetic
ttccccaguccgaccagaataua

SEQ ID NO: 90727 - DNA, 28 bp, Artificial Sequence
  Synthetic
tgaagcaaaaauaggtgtggacgtauaa

SEQ ID NO: 90728 - DNA, 28 bp, Artificial Sequence
  Synthetic
agcattcagtaaucgatttcactugaca

SEQ ID NO: 90729 - DNA, 21 bp, Artificial Sequence
  Synthetic
accuggtttgagugcaggaaa

SEQ ID NO: 90730 - DNA, 25 bp, Artificial Sequence
  Synthetic
atttaatagtgccugcaagcttugg

SEQ ID NO: 90731 - DNA, 29 bp, Artificial Sequence
  Synthetic
aattccctgatacuctaataccaccugaa

SEQ ID NO: 90732 - DNA, 25 bp, Artificial Sequence
  Synthetic
gttgacaatuaacttctgtguggct

SEQ ID NO: 90733 - DNA, 27 bp, Artificial Sequence
  Synthetic
acattttccaaaagcuagtgcacatug

SEQ ID NO: 90734 - DNA, 27 bp, Artificial Sequence
  Synthetic
gttttcccatcaguccagtagatguag

SEQ ID NO: 90735 - DNA, 27 bp, Artificial Sequence
  Synthetic
tgtatctgucagcccatgtagtatuga

SEQ ID NO: 90736 - DNA, 23 bp, Artificial Sequence
  Synthetic
acauttaattgucccagcccagt

SEQ ID NO: 90737 - DNA, 25 bp, Artificial Sequence
  Synthetic
tgacatttugctgttttcucaagca

SEQ ID NO: 90738 - DNA, 33 bp, Artificial Sequence
  Synthetic
tcctcctatcatutcatgtaattaaattucact

SEQ ID NO: 90739 - DNA, 25 bp, Artificial Sequence
  Synthetic
tcgagtgcuggaaggattgtttauc

SEQ ID NO: 90740 - DNA, 21 bp, Artificial Sequence
  Synthetic
acaatcctuccagcacucgac

SEQ ID NO: 90741 - DNA, 28 bp, Artificial Sequence
  Synthetic
gtccctaaagaugaagtgttagcaaauc

SEQ ID NO: 90742 - DNA, 24 bp, Artificial Sequence
  Synthetic
gccggtgcuacttgttacaugaat

SEQ ID NO: 90743 - DNA, 26 bp, Artificial Sequence
  Synthetic
actcaaatttaccucattgtccugct

SEQ ID NO: 90744 - DNA, 24 bp, Artificial Sequence
  Synthetic
tcaaaaggaggcutcccaacuaaa

SEQ ID NO: 90745 - DNA, 22 bp, Artificial Sequence
  Synthetic
aacgagaagcacaucaaccuga

SEQ ID NO: 90746 - DNA, 24 bp, Artificial Sequence
  Synthetic
tttatgacucattgcagcucgact

SEQ ID NO: 90747 - DNA, 27 bp, Artificial Sequence
  Synthetic
tgggaguagtggactaucaaggaaaaa

SEQ ID NO: 90748 - DNA, 28 bp, Artificial Sequence
  Synthetic
gtctaaacacagcuctttttggaugaaa

SEQ ID NO: 90749 - DNA, 22 bp, Artificial Sequence
  Synthetic
tccagaatggaaugccgcauat

SEQ ID NO: 90750 - DNA, 21 bp, Artificial Sequence
  Synthetic
ccaagaugagccucagacact

SEQ ID NO: 90751 - DNA, 20 bp, Artificial Sequence
  Synthetic
ctacgaggcgcaugatgtuc

SEQ ID NO: 90752 - DNA, 27 bp, Artificial Sequence
  Synthetic
cctttaaacaaucacgugaaaccaaga

SEQ ID NO: 90753 - DNA, 29 bp, Artificial Sequence
  Synthetic
tggagcagtuttatggaatcaucagaaat

SEQ ID NO: 90754 - DNA, 21 bp, Artificial Sequence
  Synthetic
cggtctcauctccgtctcucc

SEQ ID NO: 90755 - DNA, 23 bp, Artificial Sequence
  Synthetic
acagacaccggcauagtaguagt

SEQ ID NO: 90756 - DNA, 21 bp, Artificial Sequence
  Synthetic
ctcccaggaaugcccttagug

SEQ ID NO: 90757 - DNA, 22 bp, Artificial Sequence
  Synthetic
ttcgttgggaucctcgtaagug

SEQ ID NO: 90758 - DNA, 28 bp, Artificial Sequence
  Synthetic
cggatagcaauagataactccttgtugt

SEQ ID NO: 90759 - DNA, 24 bp, Artificial Sequence
  Synthetic
gcaggttuctaatatgguggcgaa

SEQ ID NO: 90760 - DNA, 23 bp, Artificial Sequence
  Synthetic
auttctgcattttucgccaccat

SEQ ID NO: 90761 - DNA, 28 bp, Artificial Sequence
  Synthetic
agcaattgcgugtaactataacaguaca

SEQ ID NO: 90762 - DNA, 21 bp, Artificial Sequence
  Synthetic
gggaugagaagcaggacaaug

SEQ ID NO: 90763 - DNA, 21 bp, Artificial Sequence
  Synthetic
cggcccauccctaacttucaa

SEQ ID NO: 90764 - DNA, 24 bp, Artificial Sequence
  Synthetic
ccttgtcagtucaaatccctgtug

SEQ ID NO: 90765 - DNA, 23 bp, Artificial Sequence
  Synthetic
cacattcuagaaggtggaccuga

SEQ ID NO: 90766 - DNA, 19 bp, Artificial Sequence
  Synthetic
caacgacacggccugtgua

SEQ ID NO: 90767 - DNA, 21 bp, Artificial Sequence
  Synthetic
gatcacaaaccccucggaguc

SEQ ID NO: 90768 - DNA, 21 bp, Artificial Sequence
  Synthetic
attgtgcaucgcgacaucaag

SEQ ID NO: 90769 - DNA, 21 bp, Artificial Sequence
  Synthetic
ccaggtacucctcagucccat

SEQ ID NO: 90770 - DNA, 23 bp, Artificial Sequence
  Synthetic
gtaacatggutcctgcugggaat

SEQ ID NO: 90771 - DNA, 22 bp, Artificial Sequence
  Synthetic
tgatgtcutgcagagugaccag

SEQ ID NO: 90772 - DNA, 23 bp, Artificial Sequence
  Synthetic
tgatgagaagutcgtctcgguct

SEQ ID NO: 90773 - DNA, 23 bp, Artificial Sequence
  Synthetic
gagacauaactcctguggaagca

SEQ ID NO: 90774 - DNA, 21 bp, Artificial Sequence
  Synthetic
agcagtgaugactctcuggga

SEQ ID NO: 90775 - DNA, 21 bp, Artificial Sequence
  Synthetic
cctggagtuacgggattguga

SEQ ID NO: 90776 - DNA, 18 bp, Artificial Sequence
  Synthetic
tgguggaagcgcgagaug

SEQ ID NO: 90777 - DNA, 19 bp, Artificial Sequence
  Synthetic
cagagccccaagucacuga

SEQ ID NO: 90778 - DNA, 24 bp, Artificial Sequence
  Synthetic
ctgtgcagauaaagtgguaacaga

SEQ ID NO: 90779 - DNA, 25 bp, Artificial Sequence
  Synthetic
ctccctcctccuattcccatttcua

SEQ ID NO: 90780 - DNA, 19 bp, Artificial Sequence
  Synthetic
acttcugcgccaacaucct

SEQ ID NO: 90781 - DNA, 18 bp, Artificial Sequence
  Synthetic
ggcggguagugaccacac

SEQ ID NO: 90782 - DNA, 21 bp, Artificial Sequence
  Synthetic
gcaagggcutagcaggaucag

SEQ ID NO: 90783 - DNA, 21 bp, Artificial Sequence
  Synthetic
ctctcctggguctccgtgaua

SEQ ID NO: 90784 - DNA, 26 bp, Artificial Sequence
  Synthetic
cttacttgccacugaaaagttgtuga

SEQ ID NO: 90785 - DNA, 22 bp, Artificial Sequence
  Synthetic
catgcgtgcuttcctcatguag

SEQ ID NO: 90786 - DNA, 25 bp, Artificial Sequence
  Synthetic
ctgccttgaaugacagtgtgtcuat

SEQ ID NO: 90787 - DNA, 26 bp, Artificial Sequence
  Synthetic
atgggaugaaccgaacaaggataaut

SEQ ID NO: 90788 - DNA, 24 bp, Artificial Sequence
  Synthetic
ctttgtggattugaccctccauga

SEQ ID NO: 90789 - DNA, 22 bp, Artificial Sequence
  Synthetic
ctaagcuacagccaggtcacut

SEQ ID NO: 90790 - DNA, 21 bp, Artificial Sequence
  Synthetic
cctcuccagatgcucccaaaa

SEQ ID NO: 90791 - DNA, 22 bp, Artificial Sequence
  Synthetic
ggttactggaccuttggagcug

SEQ ID NO: 90792 - DNA, 25 bp, Artificial Sequence
  Synthetic
ggatgaagatcuacattgaccccut

SEQ ID NO: 90793 - DNA, 23 bp, Artificial Sequence
  Synthetic
agaugttuggacaccaggagaac

SEQ ID NO: 90794 - DNA, 22 bp, Artificial Sequence
  Synthetic
ccaaaugacatcaccucccaca

SEQ ID NO: 90795 - DNA, 25 bp, Artificial Sequence
  Synthetic
ccagctcaccutttctccttttuct

SEQ ID NO: 90796 - DNA, 22 bp, Artificial Sequence
  Synthetic
ctggctgcuctgtctttgaauc

SEQ ID NO: 90797 - DNA, 20 bp, Artificial Sequence
  Synthetic
tggctccaucaaacgtgcut

SEQ ID NO: 90798 - DNA, 21 bp, Artificial Sequence
  Synthetic
ccucatcaaacuccccaccaa

SEQ ID NO: 90799 - DNA, 20 bp, Artificial Sequence
  Synthetic
ttgaagguaggcctcuggga

SEQ ID NO: 90800 - DNA, 24 bp, Artificial Sequence
  Synthetic
caaatctagcuacaattgcgccut

SEQ ID NO: 90801 - DNA, 25 bp, Artificial Sequence
  Synthetic
aattcctuggcaaactcaugaacag

SEQ ID NO: 90802 - DNA, 26 bp, Artificial Sequence
  Synthetic
catttccagagacutcagaccaugat

SEQ ID NO: 90803 - DNA, 22 bp, Artificial Sequence
  Synthetic
ttgttcatgugatgtgctgcug

SEQ ID NO: 90804 - DNA, 18 bp, Artificial Sequence
  Synthetic
ggctgaugcgtgagugct

SEQ ID NO: 90805 - DNA, 17 bp, Artificial Sequence
  Synthetic
cgcggucaggccagaug

SEQ ID NO: 90806 - DNA, 20 bp, Artificial Sequence
  Synthetic
cagatgcucgcctccgtuaa

SEQ ID NO: 90807 - DNA, 27 bp, Artificial Sequence
  Synthetic
ctttccguattcatacttuaggaggga

SEQ ID NO: 90808 - DNA, 22 bp, Artificial Sequence
  Synthetic
tgcauggacagccatauacagg

SEQ ID NO: 90809 - DNA, 20 bp, Artificial Sequence
  Synthetic
cctgggugcacagtctugat

SEQ ID NO: 90810 - DNA, 24 bp, Artificial Sequence
  Synthetic
agctgcaataguggttctctctuc

SEQ ID NO: 90811 - DNA, 19 bp, Artificial Sequence
  Synthetic
agcagacagacuccuccgt

SEQ ID NO: 90812 - DNA, 21 bp, Artificial Sequence
  Synthetic
ggtgcagcautggtgaacaut

SEQ ID NO: 90813 - DNA, 26 bp, Artificial Sequence
  Synthetic
gcaaagcaagtutattctggctctua

SEQ ID NO: 90814 - DNA, 27 bp, Artificial Sequence
  Synthetic
tcagcttatuacagccaaactuacaca

SEQ ID NO: 90815 - DNA, 27 bp, Artificial Sequence
  Synthetic
tcaaaactgtauctactcaccacucca

SEQ ID NO: 90816 - DNA, 27 bp, Artificial Sequence
  Synthetic
ggttttctttgugagcacttgauaagt

SEQ ID NO: 90817 - DNA, 28 bp, Artificial Sequence
  Synthetic
tgaggatctucaccattcagctatttut

SEQ ID NO: 90818 - DNA, 24 bp, Artificial Sequence
  Synthetic
tcaacccccaaucaauacaaagca

SEQ ID NO: 90819 - DNA, 27 bp, Artificial Sequence
  Synthetic
gatcagttcagggaauggaaccauaaa

SEQ ID NO: 90820 - DNA, 24 bp, Artificial Sequence
  Synthetic
gcctattccugagatgcugaggat

SEQ ID NO: 90821 - DNA, 24 bp, Artificial Sequence
  Synthetic
gtttcacuaacacatgcccuacct

SEQ ID NO: 90822 - DNA, 23 bp, Artificial Sequence
  Synthetic
gccccgaacuttctctgaactua

SEQ ID NO: 90823 - DNA, 20 bp, Artificial Sequence
  Synthetic
cagggctucagcccatguag

SEQ ID NO: 90824 - DNA, 24 bp, Artificial Sequence
  Synthetic
gccctgauagctcttctgatucct

SEQ ID NO: 90825 - DNA, 28 bp, Artificial Sequence
  Synthetic
gttcaaaactgtauctactcaccacucc

SEQ ID NO: 90826 - DNA, 23 bp, Artificial Sequence
  Synthetic
cctgggttcugaaattgggaugt

SEQ ID NO: 90827 - DNA, 23 bp, Artificial Sequence
  Synthetic
ccagctggaaagutagcttgtug

SEQ ID NO: 90828 - DNA, 22 bp, Artificial Sequence
  Synthetic
ccagaacaaggaggcuguaagg

SEQ ID NO: 90829 - DNA, 24 bp, Artificial Sequence
  Synthetic
acgtaactuaaaacgaccgctuca

SEQ ID NO: 90830 - DNA, 27 bp, Artificial Sequence
  Synthetic
cacatacataugaagacccuacccaag

SEQ ID NO: 90831 - DNA, 27 bp, Artificial Sequence
  Synthetic
ctgagcaatcgugattcacatacagua

SEQ ID NO: 90832 - DNA, 27 bp, Artificial Sequence
  Synthetic
cagtgttttgatcutgtaaatcgccut

SEQ ID NO: 90833 - DNA, 28 bp, Artificial Sequence
  Synthetic
gaagttctaaaaguggaaaccagtctug

SEQ ID NO: 90834 - DNA, 27 bp, Artificial Sequence
  Synthetic
gactttaaaacugcataggccacaauc

SEQ ID NO: 90835 - DNA, 28 bp, Artificial Sequence
  Synthetic
catcagtggttuctacaaattgcttuct

SEQ ID NO: 90836 - DNA, 21 bp, Artificial Sequence
  Synthetic
ccaccauccaggttgcatcua

SEQ ID NO: 90837 - DNA, 28 bp, Artificial Sequence
  Synthetic
cagtggtgcuaggtggatattacaatut

SEQ ID NO: 90838 - DNA, 26 bp, Artificial Sequence
  Synthetic
ctgcaagaaagacucacctcgaaaua

SEQ ID NO: 90839 - DNA, 26 bp, Artificial Sequence
  Synthetic
tctcccugagaaacaagcagaattut

SEQ ID NO: 90840 - DNA, 28 bp, Artificial Sequence
  Synthetic
ttctccagcugagctttaaataacacut

SEQ ID NO: 90841 - DNA, 19 bp, Artificial Sequence
  Synthetic
ctaggaggcagugggctut

SEQ ID NO: 90842 - DNA, 18 bp, Artificial Sequence
  Synthetic
gtggagcccggcauctua

SEQ ID NO: 90843 - DNA, 26 bp, Artificial Sequence
  Synthetic
gtgcgaatguacaagatctcactcut

SEQ ID NO: 90844 - DNA, 26 bp, Artificial Sequence
  Synthetic
tgaaaatgaguacacccatggtucaa

SEQ ID NO: 90845 - DNA, 28 bp, Artificial Sequence
  Synthetic
gcttagttgtucgattatgtccctuaca

SEQ ID NO: 90846 - DNA, 21 bp, Artificial Sequence
  Synthetic
actcatcgtcuggtggagcua

SEQ ID NO: 90847 - DNA, 25 bp, Artificial Sequence
  Synthetic
caaagagttcaucttcaggcaacug

SEQ ID NO: 90848 - DNA, 21 bp, Artificial Sequence
  Synthetic
acuggatuacaggcaccagga

SEQ ID NO: 90849 - DNA, 28 bp, Artificial Sequence
  Synthetic
agcttctttctgcugctatgtctaatut

SEQ ID NO: 90850 - DNA, 21 bp, Artificial Sequence
  Synthetic
ctgtccacagccucttgtcua

SEQ ID NO: 90851 - DNA, 22 bp, Artificial Sequence
  Synthetic
tgttccttccccucagacacut

SEQ ID NO: 90852 - DNA, 23 bp, Artificial Sequence
  Synthetic
ggcgaccaauttcaaagtctucc

SEQ ID NO: 90853 - DNA, 28 bp, Artificial Sequence
  Synthetic
atgcatattgagugaagttggaauacga

SEQ ID NO: 90854 - DNA, 19 bp, Artificial Sequence
  Synthetic
ccaugguggagaacgacca

SEQ ID NO: 90855 - DNA, 23 bp, Artificial Sequence
  Synthetic
gctcactgcuaaccctacaauga

SEQ ID NO: 90856 - DNA, 22 bp, Artificial Sequence
  Synthetic
actgtccaugcatctcugcaat

SEQ ID NO: 90857 - DNA, 21 bp, Artificial Sequence
  Synthetic
ggaagctguccctgtacugga

SEQ ID NO: 90858 - DNA, 21 bp, Artificial Sequence
  Synthetic
ctggatgcucagcttctggut

SEQ ID NO: 90859 - DNA, 21 bp, Artificial Sequence
  Synthetic
guacaaagacgagaggcugct

SEQ ID NO: 90860 - DNA, 20 bp, Artificial Sequence
  Synthetic
ccuccagcuacaagcagcac

SEQ ID NO: 90861 - DNA, 28 bp, Artificial Sequence
  Synthetic
ggaggaggatcuacttgattctagagua

SEQ ID NO: 90862 - DNA, 26 bp, Artificial Sequence
  Synthetic
gtggagcatgutttatttggtagcut

SEQ ID NO: 90863 - DNA, 21 bp, Artificial Sequence
  Synthetic
acatgttccccugagttgucc

SEQ ID NO: 90864 - DNA, 26 bp, Artificial Sequence
  Synthetic
catgtgaatcaguttcctcaagtgut

SEQ ID NO: 90865 - DNA, 26 bp, Artificial Sequence
  Synthetic
cagatcacugaagattctgtgucaga

SEQ ID NO: 90866 - DNA, 28 bp, Artificial Sequence
  Synthetic
caatatctacctcutgtaacaaccccut

SEQ ID NO: 90867 - DNA, 26 bp, Artificial Sequence
  Synthetic
cagtagccauaaaaaccctgaaagut

SEQ ID NO: 90868 - DNA, 24 bp, Artificial Sequence
  Synthetic
catgaacaacccuctttcccacua

SEQ ID NO: 90869 - DNA, 22 bp, Artificial Sequence
  Synthetic
aggaggacucactggagaacug

SEQ ID NO: 90870 - DNA, 22 bp, Artificial Sequence
  Synthetic
ccctcccuaccagactttucct

SEQ ID NO: 90871 - DNA, 20 bp, Artificial Sequence
  Synthetic
cgcagaactugaccgaccuc

SEQ ID NO: 90872 - DNA, 24 bp, Artificial Sequence
  Synthetic
gcactcaccaucctttttcctuac

SEQ ID NO: 90873 - DNA, 21 bp, Artificial Sequence
  Synthetic
aatgaccugggctctgttucc

SEQ ID NO: 90874 - DNA, 23 bp, Artificial Sequence
  Synthetic
cttggaggaaacuggtaugccat

SEQ ID NO: 90875 - DNA, 26 bp, Artificial Sequence
  Synthetic
ggagacaagcagugaaaacagatuca

SEQ ID NO: 90876 - DNA, 22 bp, Artificial Sequence
  Synthetic
cctctcctugcctatccaggua

SEQ ID NO: 90877 - DNA, 22 bp, Artificial Sequence
  Synthetic
ggagcaacaucaccatggucaa

SEQ ID NO: 90878 - DNA, 19 bp, Artificial Sequence
  Synthetic
agtcgcucacgtucaccag

SEQ ID NO: 90879 - DNA, 21 bp, Artificial Sequence
  Synthetic
cacaaccccuaagtccagcut

SEQ ID NO: 90880 - DNA, 23 bp, Artificial Sequence
  Synthetic
ggttctcuccagcaguagaggaa

SEQ ID NO: 90881 - DNA, 25 bp, Artificial Sequence
  Synthetic
ccaaaaacguacattcttgctguga

SEQ ID NO: 90882 - DNA, 20 bp, Artificial Sequence
  Synthetic
ggcucagcgccatcaaaaug

SEQ ID NO: 90883 - DNA, 22 bp, Artificial Sequence
  Synthetic
accauctgcaauagcagggaag

SEQ ID NO: 90884 - DNA, 23 bp, Artificial Sequence
  Synthetic
ctcttcugcagctccttguagag

SEQ ID NO: 90885 - DNA, 27 bp, Artificial Sequence
  Synthetic
tcatcttttccagcucttttatgccut

SEQ ID NO: 90886 - DNA, 18 bp, Artificial Sequence
  Synthetic
ggugaaggtccugagcga

SEQ ID NO: 90887 - DNA, 28 bp, Artificial Sequence
  Synthetic
ggcttcgatcauatggaactacaugaat

SEQ ID NO: 90888 - DNA, 29 bp, Artificial Sequence
  Synthetic
aatactgaaaagaaauccaacagaccuca

SEQ ID NO: 90889 - DNA, 24 bp, Artificial Sequence
  Synthetic
gacaaaugccctgtatuggaaagg

SEQ ID NO: 90890 - DNA, 25 bp, Artificial Sequence
  Synthetic
tgatgcattgugtattctcctucgt

SEQ ID NO: 90891 - DNA, 19 bp, Artificial Sequence
  Synthetic
gcaaacgcaccccucacut

SEQ ID NO: 90892 - DNA, 28 bp, Artificial Sequence
  Synthetic
agtctctcctutgtttttctgtguaacc

SEQ ID NO: 90893 - DNA, 23 bp, Artificial Sequence
  Synthetic
tgcctgctugttctgttactuca

SEQ ID NO: 90894 - DNA, 22 bp, Artificial Sequence
  Synthetic
caaccttcuctgagccauccaa

SEQ ID NO: 90895 - DNA, 27 bp, Artificial Sequence
  Synthetic
gtaatgtctttutgcatagctcugcat

SEQ ID NO: 90896 - DNA, 25 bp, Artificial Sequence
  Synthetic
cttgtgcttttuggaggagtcttug

SEQ ID NO: 90897 - DNA, 23 bp, Artificial Sequence
  Synthetic
ctgggatcugctatttccuggag

SEQ ID NO: 90898 - DNA, 27 bp, Artificial Sequence
  Synthetic
ctattccagaaugtcaagaagtugcag

SEQ ID NO: 90899 - DNA, 28 bp, Artificial Sequence
  Synthetic
ccttttctagctutcttacgtagaguca

SEQ ID NO: 90900 - DNA, 19 bp, Artificial Sequence
  Synthetic
acgcutgctguccccaaaa

SEQ ID NO: 90901 - DNA, 20 bp, Artificial Sequence
  Synthetic
acctccccutcctgttguca

SEQ ID NO: 90902 - DNA, 22 bp, Artificial Sequence
  Synthetic
accatcgaccuccgatacauga

SEQ ID NO: 90903 - DNA, 22 bp, Artificial Sequence
  Synthetic
gtgccaaucagaggcttctuct

SEQ ID NO: 90904 - DNA, 23 bp, Artificial Sequence
  Synthetic
cgaataccttcuggagtgcccua

SEQ ID NO: 90905 - DNA, 28 bp, Artificial Sequence
  Synthetic
ctcatcattuagaaagaaagctgugcaa

SEQ ID NO: 90906 - DNA, 23 bp, Artificial Sequence
  Synthetic
actgggcuaatctggagugaagt

SEQ ID NO: 90907 - DNA, 29 bp, Artificial Sequence
  Synthetic
tgaacatagaauctaggaatgaugcacaa

SEQ ID NO: 90908 - DNA, 20 bp, Artificial Sequence
  Synthetic
ggaggtcugaggctggacut

SEQ ID NO: 90909 - DNA, 18 bp, Artificial Sequence
  Synthetic
gggccacacucaccttug

SEQ ID NO: 90910 - DNA, 22 bp, Artificial Sequence
  Synthetic
cacutccagcugaaggaaaacc

SEQ ID NO: 90911 - DNA, 28 bp, Artificial Sequence
  Synthetic
gattgtcctuatcattctcaucgacaca

SEQ ID NO: 90912 - DNA, 25 bp, Artificial Sequence
  Synthetic
tctagaagugcagaggagtcatuga

SEQ ID NO: 90913 - DNA, 20 bp, Artificial Sequence
  Synthetic
gcgggatucaaaggagccut

SEQ ID NO: 90914 - DNA, 18 bp, Artificial Sequence
  Synthetic
ctcugccacgcugagagt

SEQ ID NO: 90915 - DNA, 19 bp, Artificial Sequence
  Synthetic
cgacaggauctgctgcauc

SEQ ID NO: 90916 - DNA, 23 bp, Artificial Sequence
  Synthetic
tcactgtcucttccctuccacat

SEQ ID NO: 90917 - DNA, 22 bp, Artificial Sequence
  Synthetic
ccagtagugggaaagagggtug

SEQ ID NO: 90918 - DNA, 20 bp, Artificial Sequence
  Synthetic
cgutagggugcagagccaaa

SEQ ID NO: 90919 - DNA, 18 bp, Artificial Sequence
  Synthetic
ccucactgcuccgaggac

SEQ ID NO: 90920 - DNA, 19 bp, Artificial Sequence
  Synthetic
gacctgugggactcugcac

SEQ ID NO: 90921 - DNA, 19 bp, Artificial Sequence
  Synthetic
gcagtgccutgccctttut

SEQ ID NO: 90922 - DNA, 19 bp, Artificial Sequence
  Synthetic
agaugctuaccccgcaaca

SEQ ID NO: 90923 - DNA, 22 bp, Artificial Sequence
  Synthetic
gcccttggugaggtguaaacag

SEQ ID NO: 90924 - DNA, 21 bp, Artificial Sequence
  Synthetic
catcgggagggutacaggtut

SEQ ID NO: 90925 - DNA, 28 bp, Artificial Sequence
  Synthetic
gcttggaaaacagaauttcagctgauat

SEQ ID NO: 90926 - DNA, 19 bp, Artificial Sequence
  Synthetic
gaaaccugcgggagtucct

SEQ ID NO: 90927 - DNA, 21 bp, Artificial Sequence
  Synthetic
cttccgggacuccagatacug

SEQ ID NO: 90928 - DNA, 20 bp, Artificial Sequence
  Synthetic
tctcctucccagtcctgguc

SEQ ID NO: 90929 - DNA, 21 bp, Artificial Sequence
  Synthetic
agagggagaagucgggacaut

SEQ ID NO: 90930 - DNA, 22 bp, Artificial Sequence
  Synthetic
acaaacacaugcacacugcaaa

SEQ ID NO: 90931 - DNA, 28 bp, Artificial Sequence
  Synthetic
tgaaactactagguaaaggcactttugg

SEQ ID NO: 90932 - DNA, 24 bp, Artificial Sequence
  Synthetic
gagcaacauagtaaggcugaggaa

SEQ ID NO: 90933 - DNA, 25 bp, Artificial Sequence
  Synthetic
tttttatcaatggugcactggtugg

SEQ ID NO: 90934 - DNA, 27 bp, Artificial Sequence
  Synthetic
gccttctcucgaaccaaaataacttuc

SEQ ID NO: 90935 - DNA, 28 bp, Artificial Sequence
  Synthetic
ggttttgagtggauattgcaaacacaua

SEQ ID NO: 90936 - DNA, 29 bp, Artificial Sequence
  Synthetic
tttggttctatcaagutccatgttacugt

SEQ ID NO: 90937 - DNA, 22 bp, Artificial Sequence
  Synthetic
cacacgtaccuggtctgtaucc

SEQ ID NO: 90938 - DNA, 23 bp, Artificial Sequence
  Synthetic
tggtagcugggaauacagaccat

SEQ ID NO: 90939 - DNA, 23 bp, Artificial Sequence
  Synthetic
gggtaaaggautgtgctcacgua

SEQ ID NO: 90940 - DNA, 27 bp, Artificial Sequence
  Synthetic
gaagacaggcaaagutcttacatcuct

SEQ ID NO: 90941 - DNA, 26 bp, Artificial Sequence
  Synthetic
ggaaccattcuccatgtattctguga

SEQ ID NO: 90942 - DNA, 27 bp, Artificial Sequence
  Synthetic
ctaggtaagccagutatgattgucaca

SEQ ID NO: 90943 - DNA, 29 bp, Artificial Sequence
  Synthetic
agggtgtctctaaugttttcagcaattua

SEQ ID NO: 90944 - DNA, 20 bp, Artificial Sequence
  Synthetic
ccucaggccagctgttucat

SEQ ID NO: 90945 - DNA, 21 bp, Artificial Sequence
  Synthetic
tctagcaccccuccatctucc

SEQ ID NO: 90946 - DNA, 18 bp, Artificial Sequence
  Synthetic
cctcgcugtgctggugac

SEQ ID NO: 90947 - DNA, 19 bp, Artificial Sequence
  Synthetic
gggagucgctgtacaucct

SEQ ID NO: 90948 - DNA, 17 bp, Artificial Sequence
  Synthetic
acaggcgucctcuccct

SEQ ID NO: 90949 - DNA, 18 bp, Artificial Sequence
  Synthetic
cgtuccccgcaggatcuc

SEQ ID NO: 90950 - DNA, 20 bp, Artificial Sequence
  Synthetic
gtaugcccggacaccaugaa

SEQ ID NO: 90951 - DNA, 22 bp, Artificial Sequence
  Synthetic
caggtagguatggtcagauggg

SEQ ID NO: 90952 - DNA, 28 bp, Artificial Sequence
  Synthetic
gcaacacacacaaaauagttactuacca

SEQ ID NO: 90953 - DNA, 23 bp, Artificial Sequence
  Synthetic
gcaaucatctaaagugcagccaa

SEQ ID NO: 90954 - DNA, 24 bp, Artificial Sequence
  Synthetic
ggagaagautgcugagacgaagac

SEQ ID NO: 90955 - DNA, 19 bp, Artificial Sequence
  Synthetic
cctcctcugtcgccaacut

SEQ ID NO: 90956 - DNA, 23 bp, Artificial Sequence
  Synthetic
catcccucatgccauacagacat

SEQ ID NO: 90957 - DNA, 21 bp, Artificial Sequence
  Synthetic
ttccagaaacugggagcctug

SEQ ID NO: 90958 - DNA, 21 bp, Artificial Sequence
  Synthetic
ccugtcccatucagacaacga

SEQ ID NO: 90959 - DNA, 25 bp, Artificial Sequence
  Synthetic
acacccattgucaatgcaacauagt

SEQ ID NO: 90960 - DNA, 17 bp, Artificial Sequence
  Synthetic
ccccaaggcucccagut

SEQ ID NO: 90961 - DNA, 28 bp, Artificial Sequence
  Synthetic
actgttgcuggacttagaaagtuaaagt

SEQ ID NO: 90962 - DNA, 24 bp, Artificial Sequence
  Synthetic
tgacggattaucaagaatgcgugt

SEQ ID NO: 90963 - DNA, 27 bp, Artificial Sequence
  Synthetic
gcaccatctccauccacaatagtauat

SEQ ID NO: 90964 - DNA, 26 bp, Artificial Sequence
  Synthetic
cagaactaaaaatugccatcctgcut

SEQ ID NO: 90965 - DNA, 28 bp, Artificial Sequence
  Synthetic
cctcatgaautccagtguaaaaacaaca

SEQ ID NO: 90966 - DNA, 25 bp, Artificial Sequence
  Synthetic
tgatgatctctcugaggcaaagcua

SEQ ID NO: 90967 - DNA, 29 bp, Artificial Sequence
  Synthetic
cgtgtgaatauaaagattggcugacaaaa

SEQ ID NO: 90968 - DNA, 20 bp, Artificial Sequence
  Synthetic
cctgccccucttggacctua

SEQ ID NO: 90969 - DNA, 23 bp, Artificial Sequence
  Synthetic
caagtcctuggagacctacugac

SEQ ID NO: 90970 - DNA, 21 bp, Artificial Sequence
  Synthetic
gctgcaaagaauccctucacc

SEQ ID NO: 90971 - DNA, 21 bp, Artificial Sequence
  Synthetic
tcttcctcuccgcccttttuc

SEQ ID NO: 90972 - DNA, 25 bp, Artificial Sequence
  Synthetic
ctccaacaucatgttttccugacat

SEQ ID NO: 90973 - DNA, 26 bp, Artificial Sequence
  Synthetic
cttggtgatcuttgcctttgaaauca

SEQ ID NO: 90974 - DNA, 21 bp, Artificial Sequence
  Synthetic
gtgcttgugctgctcacauac

SEQ ID NO: 90975 - DNA, 21 bp, Artificial Sequence
  Synthetic
aggctguagcaaccactgtuc

SEQ ID NO: 90976 - DNA, 27 bp, Artificial Sequence
  Synthetic
cactataaaatcaggutgacctgggua

SEQ ID NO: 90977 - DNA, 24 bp, Artificial Sequence
  Synthetic
agacgauacagcagactcucaaga

SEQ ID NO: 90978 - DNA, 28 bp, Artificial Sequence
  Synthetic
caaaagaaaacuccaagacccaauacag

SEQ ID NO: 90979 - DNA, 20 bp, Artificial Sequence
  Synthetic
ggagagaugcggaaccagua

SEQ ID NO: 90980 - DNA, 25 bp, Artificial Sequence
  Synthetic
cataacgacuatatgtguccagcca

SEQ ID NO: 90981 - DNA, 21 bp, Artificial Sequence
  Synthetic
ccccugggagagatgtaccua

SEQ ID NO: 90982 - DNA, 25 bp, Artificial Sequence
  Synthetic
actgaguttcccattuaagcaccat

SEQ ID NO: 90983 - DNA, 29 bp, Artificial Sequence
  Synthetic
gcctcaaataatgugggagaaataagugt

SEQ ID NO: 90984 - DNA, 21 bp, Artificial Sequence
  Synthetic
gccagtgaucgggaauacagt

SEQ ID NO: 90985 - DNA, 25 bp, Artificial Sequence
  Synthetic
gttgtgagggaugtcttcauggaaa

SEQ ID NO: 90986 - DNA, 25 bp, Artificial Sequence
  Synthetic
gacaautcctctuccaggaacaaca

SEQ ID NO: 90987 - DNA, 28 bp, Artificial Sequence
  Synthetic
tgtagtatcctggcuaattgtaggctua

SEQ ID NO: 90988 - DNA, 28 bp, Artificial Sequence
  Synthetic
acttgatgttcauaatactgcagtgucc

SEQ ID NO: 90989 - DNA, 23 bp, Artificial Sequence
  Synthetic
tgtctgccuacgatacucacagt

SEQ ID NO: 90990 - DNA, 24 bp, Artificial Sequence
  Synthetic
tgaaggcaucaatgcagagaugaa

SEQ ID NO: 90991 - DNA, 24 bp, Artificial Sequence
  Synthetic
agcacccaugaaagtggttuagaa

SEQ ID NO: 90992 - DNA, 20 bp, Artificial Sequence
  Synthetic
ggctgcgccaugaatacugt

SEQ ID NO: 90993 - DNA, 26 bp, Artificial Sequence
  Synthetic
cagagtcgauatcttgaugcaggaat

SEQ ID NO: 90994 - DNA, 24 bp, Artificial Sequence
  Synthetic
ggtagctgcuggcaaatgtttuat

SEQ ID NO: 90995 - DNA, 24 bp, Artificial Sequence
  Synthetic
catctgtctacucagcagcagtua

SEQ ID NO: 90996 - DNA, 23 bp, Artificial Sequence
  Synthetic
gcaaaactgugagtctgguggat

SEQ ID NO: 90997 - DNA, 28 bp, Artificial Sequence
  Synthetic
cctgtgacagcuattgtttcctctaaua

SEQ ID NO: 90998 - DNA, 21 bp, Artificial Sequence
  Synthetic
cagcgacaaguccgagtttug

SEQ ID NO: 90999 - DNA, 26 bp, Artificial Sequence
  Synthetic
acttgaattucacgcatgctgtttut

SEQ ID NO: 91000 - DNA, 28 bp, Artificial Sequence
  Synthetic
aatttgttagutcatgcauccaagcaaa

SEQ ID NO: 91001 - DNA, 27 bp, Artificial Sequence
  Synthetic
cctcccaaccutcttattctcaaucag

SEQ ID NO: 91002 - DNA, 20 bp, Artificial Sequence
  Synthetic
accccugacagtctccaugt

SEQ ID NO: 91003 - DNA, 20 bp, Artificial Sequence
  Synthetic
acaactcgcugcaggatguc

SEQ ID NO: 91004 - DNA, 25 bp, Artificial Sequence
  Synthetic
actctauacaaccaggtagccucaa

SEQ ID NO: 91005 - DNA, 21 bp, Artificial Sequence
  Synthetic
ctcactgugtgttcugccaac

SEQ ID NO: 91006 - DNA, 24 bp, Artificial Sequence
  Synthetic
aaatgcaatgtuttgtggtcctut

SEQ ID NO: 91007 - DNA, 25 bp, Artificial Sequence
  Synthetic
gccaaattugttgagaagauccact

SEQ ID NO: 91008 - DNA, 22 bp, Artificial Sequence
  Synthetic
ggcaaagagccagucaaagcua

SEQ ID NO: 91009 - DNA, 26 bp, Artificial Sequence
  Synthetic
acaaattttcugctcgaaaugaccag

SEQ ID NO: 91010 - DNA, 20 bp, Artificial Sequence
  Synthetic
gaccagutcttugcggagac

SEQ ID NO: 91011 - DNA, 21 bp, Artificial Sequence
  Synthetic
gctgcttggguagagaaggut

SEQ ID NO: 91012 - DNA, 26 bp, Artificial Sequence
  Synthetic
tcattaattgugttacagggtuggct

SEQ ID NO: 91013 - DNA, 26 bp, Artificial Sequence
  Synthetic
tctacggtgcacuaaccattgattut

SEQ ID NO: 91014 - DNA, 22 bp, Artificial Sequence
  Synthetic
cattagacccgucgcataucca

SEQ ID NO: 91015 - DNA, 27 bp, Artificial Sequence
  Synthetic
ccttcttctagauaacacagacugcac

SEQ ID NO: 91016 - DNA, 24 bp, Artificial Sequence
  Synthetic
catgaccaaccutctcaguaacga

SEQ ID NO: 91017 - DNA, 22 bp, Artificial Sequence
  Synthetic
aagcuacagacauggaaggcaa

SEQ ID NO: 91018 - DNA, 27 bp, Artificial Sequence
  Synthetic
actccaagcutatagaaatgtgugcag

SEQ ID NO: 91019 - DNA, 26 bp, Artificial Sequence
  Synthetic
ccctgttgtgugggataattacguat

SEQ ID NO: 91020 - DNA, 25 bp, Artificial Sequence
  Synthetic
ccacaaauccccaaataaccacaut

SEQ ID NO: 91021 - DNA, 27 bp, Artificial Sequence
  Synthetic
gcautatggtggattuacaaacaagca

SEQ ID NO: 91022 - DNA, 20 bp, Artificial Sequence
  Synthetic
gtttacucagggccccucaa

SEQ ID NO: 91023 - DNA, 21 bp, Artificial Sequence
  Synthetic
gaccggccuctcagttctuag

SEQ ID NO: 91024 - DNA, 23 bp, Artificial Sequence
  Synthetic
gggtttggauaatctgggcucat

SEQ ID NO: 91025 - DNA, 24 bp, Artificial Sequence
  Synthetic
ggagccaugaaactaggttaccut

SEQ ID NO: 91026 - DNA, 29 bp, Artificial Sequence
  Synthetic
aattcctucaaaacacattctacugacct

SEQ ID NO: 91027 - DNA, 27 bp, Artificial Sequence
  Synthetic
tgctccaaucaaaactgaaaatgctut

SEQ ID NO: 91028 - DNA, 23 bp, Artificial Sequence
  Synthetic
tgttugaaaggccatatguggga

SEQ ID NO: 91029 - DNA, 28 bp, Artificial Sequence
  Synthetic
cttgcattauaaagagccgttuacagaa

SEQ ID NO: 91030 - DNA, 21 bp, Artificial Sequence
  Synthetic
gcaaccgguccaaggtattug

SEQ ID NO: 91031 - DNA, 24 bp, Artificial Sequence
  Synthetic
gcacattcttucccatttgccaut

SEQ ID NO: 91032 - DNA, 22 bp, Artificial Sequence
  Synthetic
ccaaaagaccugcaucacaagt

SEQ ID NO: 91033 - DNA, 24 bp, Artificial Sequence
  Synthetic
ggcaucttcacauccaagacagat

SEQ ID NO: 91034 - DNA, 28 bp, Artificial Sequence
  Synthetic
gaagacatatucttgaccacttuggagt

SEQ ID NO: 91035 - DNA, 24 bp, Artificial Sequence
  Synthetic
ggagauatcuaggaagcgcagaag

SEQ ID NO: 91036 - DNA, 23 bp, Artificial Sequence
  Synthetic
ccaagatggguattggaggaugg

SEQ ID NO: 91037 - DNA, 26 bp, Artificial Sequence
  Synthetic
cctgcttccucacctaaaacatctut

SEQ ID NO: 91038 - DNA, 25 bp, Artificial Sequence
  Synthetic
ctctatacuccgagggttgtcaaug

SEQ ID NO: 91039 - DNA, 23 bp, Artificial Sequence
  Synthetic
catacagcucccaagacccuaga

SEQ ID NO: 91040 - DNA, 21 bp, Artificial Sequence
  Synthetic
ggaagggugttaucaccagga

SEQ ID NO: 91041 - DNA, 25 bp, Artificial Sequence
  Synthetic
ccttggtggugaacaactcatcaut

SEQ ID NO: 91042 - DNA, 26 bp, Artificial Sequence
  Synthetic
attcaacttctcucccataacggaug

SEQ ID NO: 91043 - DNA, 26 bp, Artificial Sequence
  Synthetic
ttgggttgtucccagttctgaatuaa

SEQ ID NO: 91044 - DNA, 21 bp, Artificial Sequence
  Synthetic
tgcggtaauaactggcccuac

SEQ ID NO: 91045 - DNA, 22 bp, Artificial Sequence
  Synthetic
gactttgggauggcacgagaua

SEQ ID NO: 91046 - DNA, 25 bp, Artificial Sequence
  Synthetic
gagtttgctaautttcctccccuca

SEQ ID NO: 91047 - DNA, 26 bp, Artificial Sequence
  Synthetic
cctgttgcaatguctagtgctgtaua

SEQ ID NO: 91048 - DNA, 27 bp, Artificial Sequence
  Synthetic
aatggagtaagucactgtggaattuga

SEQ ID NO: 91049 - DNA, 27 bp, Artificial Sequence
  Synthetic
gctcagacuattacaauaacaccacct

SEQ ID NO: 91050 - DNA, 21 bp, Artificial Sequence
  Synthetic
cacagggcaucaggtactgut

SEQ ID NO: 91051 - DNA, 24 bp, Artificial Sequence
  Synthetic
gcgaagttgccaucgaagaagaua

SEQ ID NO: 91052 - DNA, 19 bp, Artificial Sequence
  Synthetic
cacccgucuccgaaaacga

SEQ ID NO: 91053 - DNA, 26 bp, Artificial Sequence
  Synthetic
agatggtcctucctatatgtctuccc

SEQ ID NO: 91054 - DNA, 24 bp, Artificial Sequence
  Synthetic
gggtactguctgccaaataugaca

SEQ ID NO: 91055 - DNA, 27 bp, Artificial Sequence
  Synthetic
tcactggcttgaugaaaaccttagaut

SEQ ID NO: 91056 - DNA, 25 bp, Artificial Sequence
  Synthetic
cataccccgutgatuaaaacaagcc

SEQ ID NO: 91057 - DNA, 28 bp, Artificial Sequence
  Synthetic
gtatgagtgaaguttttggagggaatut

SEQ ID NO: 91058 - DNA, 27 bp, Artificial Sequence
  Synthetic
caacccauacattaagaaacaugcact

SEQ ID NO: 91059 - DNA, 25 bp, Artificial Sequence
  Synthetic
caaattgcagtcugtacaggcttua

SEQ ID NO: 91060 - DNA, 26 bp, Artificial Sequence
  Synthetic
gtttctucccctagaatugagcacat

SEQ ID NO: 91061 - DNA, 28 bp, Artificial Sequence
  Synthetic
ctgctaaaggcutcaaaggtgaatuaaa

SEQ ID NO: 91062 - DNA, 28 bp, Artificial Sequence
  Synthetic
tctagtttguggcagttttaagcaaaug

SEQ ID NO: 91063 - DNA, 28 bp, Artificial Sequence
  Synthetic
tccacactuccacagatgttgatttuat

SEQ ID NO: 91064 - DNA, 26 bp, Artificial Sequence
  Synthetic
aagctgatgaacucctgaatttcugt

SEQ ID NO: 91065 - DNA, 28 bp, Artificial Sequence
  Synthetic
cacagcttgautgatttataacauggca

SEQ ID NO: 91066 - DNA, 28 bp, Artificial Sequence
  Synthetic
acctggauacatccaaauaaaagcacaa

SEQ ID NO: 91067 - DNA, 27 bp, Artificial Sequence
  Synthetic
agagtagtacaaaugcttggatctcua

SEQ ID NO: 91068 - DNA, 23 bp, Artificial Sequence
  Synthetic
ttgtccucctagagauccaagca

SEQ ID NO: 91069 - DNA, 22 bp, Artificial Sequence
  Synthetic
caagtggguggcaaagagttut

SEQ ID NO: 91070 - DNA, 24 bp, Artificial Sequence
  Synthetic
aacacaaccacauctauggaagca

SEQ ID NO: 91071 - DNA, 28 bp, Artificial Sequence
  Synthetic
gggtgaagttcaucctagtgagatgaua

SEQ ID NO: 91072 - DNA, 20 bp, Artificial Sequence
  Synthetic
acatgggcuttgcccgatua

SEQ ID NO: 91073 - DNA, 26 bp, Artificial Sequence
  Synthetic
caatagcttuggtataatgcctugct

SEQ ID NO: 91074 - DNA, 21 bp, Artificial Sequence
  Synthetic
ctccttgagutccacccucat

SEQ ID NO: 91075 - DNA, 25 bp, Artificial Sequence
  Synthetic
gaggttgtctgucaagaagaactug

SEQ ID NO: 91076 - DNA, 24 bp, Artificial Sequence
  Synthetic
gcggaacaggutttctgcattaut

SEQ ID NO: 91077 - DNA, 25 bp, Artificial Sequence
  Synthetic
gtagtttgaggccutcacttgtcua

SEQ ID NO: 91078 - DNA, 28 bp, Artificial Sequence
  Synthetic
gggaagctgtugataccaaaaataaugt

SEQ ID NO: 91079 - DNA, 27 bp, Artificial Sequence
  Synthetic
ttgccaatccaguaatttcaggtagut

SEQ ID NO: 91080 - DNA, 28 bp, Artificial Sequence
  Synthetic
tgagtttttcaagugtggtttctucaac

SEQ ID NO: 91081 - DNA, 25 bp, Artificial Sequence
  Synthetic
agagtgagaaacucatagcatugcc

SEQ ID NO: 91082 - DNA, 21 bp, Artificial Sequence
  Synthetic
tcagaccauttgggcaaugct

SEQ ID NO: 91083 - DNA, 28 bp, Artificial Sequence
  Synthetic
tcatttttggctucattctttgcttcut

SEQ ID NO: 91084 - DNA, 17 bp, Artificial Sequence
  Synthetic
ccgagcggutcuccagt

SEQ ID NO: 91085 - DNA, 17 bp, Artificial Sequence
  Synthetic
gggcgcutccuggaaca

SEQ ID NO: 91086 - DNA, 23 bp, Artificial Sequence
  Synthetic
gcatgcuctttctcuaggcagaa

SEQ ID NO: 91087 - DNA, 19 bp, Artificial Sequence
  Synthetic
ggccagggutgcttccuac

SEQ ID NO: 91088 - DNA, 25 bp, Artificial Sequence
  Synthetic
ggcaatgctaugagtttctcacuct

SEQ ID NO: 91089 - DNA, 27 bp, Artificial Sequence
  Synthetic
attgaaagagcaucatttttggctuca

SEQ ID NO: 91090 - DNA, 27 bp, Artificial Sequence
  Synthetic
aagccaaaaatgaugctctttcaauga

SEQ ID NO: 91091 - DNA, 31 bp, Artificial Sequence
  Synthetic
tcggcattaacaautatttcaagagguaagt

SEQ ID NO: 91092 - DNA, 26 bp, Artificial Sequence
  Synthetic
tttcatatgguaggcactcagttguc

SEQ ID NO: 91093 - DNA, 28 bp, Artificial Sequence
  Synthetic
gcacctgtugtaatgtcaacauagaaaa

SEQ ID NO: 91094 - DNA, 20 bp, Artificial Sequence
  Synthetic
guatccacucccggcaagat

SEQ ID NO: 91095 - DNA, 21 bp, Artificial Sequence
  Synthetic
ggctctgaaagucgcatcuca

SEQ ID NO: 91096 - DNA, 22 bp, Artificial Sequence
  Synthetic
gggctgagucctgctctaatuc

SEQ ID NO: 91097 - DNA, 22 bp, Artificial Sequence
  Synthetic
gcaccuagaatccttcugccat

SEQ ID NO: 91098 - DNA, 18 bp, Artificial Sequence
  Synthetic
gcguccagaccggaagut

SEQ ID NO: 91099 - DNA, 19 bp, Artificial Sequence
  Synthetic
cgtcggaagguaccccauc

SEQ ID NO: 91100 - DNA, 19 bp, Artificial Sequence
  Synthetic
cucccagagcctuccacag

SEQ ID NO: 91101 - DNA, 22 bp, Artificial Sequence
  Synthetic
cacgagaccauctgggaaugag

SEQ ID NO: 91102 - DNA, 22 bp, Artificial Sequence
  Synthetic
gctccucctcattcuccaaggt

SEQ ID NO: 91103 - DNA, 22 bp, Artificial Sequence
  Synthetic
gaacttgucactgcttcuccga

SEQ ID NO: 91104 - DNA, 20 bp, Artificial Sequence
  Synthetic
cccctgcgcugtaatgagut

SEQ ID NO: 91105 - DNA, 21 bp, Artificial Sequence
  Synthetic
caccugagaacaggcagaguc

SEQ ID NO: 91106 - DNA, 17 bp, Artificial Sequence
  Synthetic
ctgccuccctgcauggt

SEQ ID NO: 91107 - DNA, 22 bp, Artificial Sequence
  Synthetic
gagacaggcagaggaugaggua

SEQ ID NO: 91108 - DNA, 21 bp, Artificial Sequence
  Synthetic
aagatggccuccagctcttug

SEQ ID NO: 91109 - DNA, 19 bp, Artificial Sequence
  Synthetic
tctgggcuctttccuccct

SEQ ID NO: 91110 - DNA, 21 bp, Artificial Sequence
  Synthetic
gaagcagugacccuggaagat

SEQ ID NO: 91111 - DNA, 26 bp, Artificial Sequence
  Synthetic
ggagaccaacutactgtgctactuac

SEQ ID NO: 91112 - DNA, 20 bp, Artificial Sequence
  Synthetic
gcacguacccggaaaacgua

SEQ ID NO: 91113 - DNA, 18 bp, Artificial Sequence
  Synthetic
ggagagccagcucgtcug

SEQ ID NO: 91114 - DNA, 20 bp, Artificial Sequence
  Synthetic
ctctucaacggcucgagact

SEQ ID NO: 91115 - DNA, 17 bp, Artificial Sequence
  Synthetic
agcgugctttccucggt

SEQ ID NO: 91116 - DNA, 21 bp, Artificial Sequence
  Synthetic
ccacgttcccuctcctcaaug

SEQ ID NO: 91117 - DNA, 22 bp, Artificial Sequence
  Synthetic
ggaacautctgctgucggaaag

SEQ ID NO: 91118 - DNA, 23 bp, Artificial Sequence
  Synthetic
ccaaagucacagatctucaccac

SEQ ID NO: 91119 - DNA, 21 bp, Artificial Sequence
  Synthetic
ggagtttcgggugtgggtaut

SEQ ID NO: 91120 - DNA, 21 bp, Artificial Sequence
  Synthetic
gcccuactaccuggagaacga

SEQ ID NO: 91121 - DNA, 17 bp, Artificial Sequence
  Synthetic
gctcccgcagcucccua

SEQ ID NO: 91122 - DNA, 27 bp, Artificial Sequence
  Synthetic
tcatttgttuaaggaccgtgauacaca

SEQ ID NO: 91123 - DNA, 26 bp, Artificial Sequence
  Synthetic
gcgctucaccaaacaaactacaaaut

SEQ ID NO: 91124 - DNA, 25 bp, Artificial Sequence
  Synthetic
ttcccgcacugaaacaaatuagaga

SEQ ID NO: 91125 - DNA, 28 bp, Artificial Sequence
  Synthetic
ccagccaataugctgtttcttttcaaua

SEQ ID NO: 91126 - DNA, 21 bp, Artificial Sequence
  Synthetic
ggtttgaaugcgcccctttut

SEQ ID NO: 91127 - DNA, 27 bp, Artificial Sequence
  Synthetic
actggaaatgcaucatatcgctctuac

SEQ ID NO: 91128 - DNA, 27 bp, Artificial Sequence
  Synthetic
tgattagaucctatcctuccccaaaca

SEQ ID NO: 91129 - DNA, 26 bp, Artificial Sequence
  Synthetic
ctaaatgtaaaautccagcccuggac

SEQ ID NO: 91130 - DNA, 24 bp, Artificial Sequence
  Synthetic
tgcccaaaccacutattctgtuct

SEQ ID NO: 91131 - DNA, 24 bp, Artificial Sequence
  Synthetic
acttgtcaccgutgacatacauga

SEQ ID NO: 91132 - DNA, 19 bp, Artificial Sequence
  Synthetic
agaagguccagggcuggaa

SEQ ID NO: 91133 - DNA, 27 bp, Artificial Sequence
  Synthetic
gagaagtagttucaggtattgcugagt

SEQ ID NO: 91134 - DNA, 29 bp, Artificial Sequence
  Synthetic
ctttcctcatcaugtaaatttcctugcat

SEQ ID NO: 91135 - DNA, 21 bp, Artificial Sequence
  Synthetic
ctcagccucagagcctgtuac

SEQ ID NO: 91136 - DNA, 21 bp, Artificial Sequence
  Synthetic
cggcgaauggatcttugagca

SEQ ID NO: 91137 - DNA, 24 bp, Artificial Sequence
  Synthetic
acatctcatugctggtcugaacac

SEQ ID NO: 91138 - DNA, 21 bp, Artificial Sequence
  Synthetic
atgcctggcaucagagtcauc

SEQ ID NO: 91139 - DNA, 22 bp, Artificial Sequence
  Synthetic
gtaacaggagucagcagacugt

SEQ ID NO: 91140 - DNA, 26 bp, Artificial Sequence
  Synthetic
cactataagcaauggcaacagtgtuc

SEQ ID NO: 91141 - DNA, 24 bp, Artificial Sequence
  Synthetic
gatgtcattgcuatgctgctuacc

SEQ ID NO: 91142 - DNA, 27 bp, Artificial Sequence
  Synthetic
tgcttcacaaguactacctgttttuga

SEQ ID NO: 91143 - DNA, 27 bp, Artificial Sequence
  Synthetic
tctacagccaguatagacagugagaac

SEQ ID NO: 91144 - DNA, 28 bp, Artificial Sequence
  Synthetic
acctgataaaatggutcactccagatut

SEQ ID NO: 91145 - DNA, 24 bp, Artificial Sequence
  Synthetic
ccgagaaggauttttgggaactug

SEQ ID NO: 91146 - DNA, 21 bp, Artificial Sequence
  Synthetic
gagatagcgccuaccatuccc

SEQ ID NO: 91147 - DNA, 27 bp, Artificial Sequence
  Synthetic
gaaaaatugaggaaagcccuaggaaga

SEQ ID NO: 91148 - DNA, 18 bp, Artificial Sequence
  Synthetic
ggagcagccuggcagtua

SEQ ID NO: 91149 - DNA, 18 bp, Artificial Sequence
  Synthetic
gugaaggguggcgaggac

SEQ ID NO: 91150 - DNA, 24 bp, Artificial Sequence
  Synthetic
ggtggttguaacagtcaagggaug

SEQ ID NO: 91151 - DNA, 28 bp, Artificial Sequence
  Synthetic
cgtgttctcautggtattcttuccaact

SEQ ID NO: 91152 - DNA, 24 bp, Artificial Sequence
  Synthetic
gatcccautcatgaccuggaagag

SEQ ID NO: 91153 - DNA, 28 bp, Artificial Sequence
  Synthetic
ccctgagaugacattctgattttugaag

SEQ ID NO: 91154 - DNA, 28 bp, Artificial Sequence
  Synthetic
ggcacacauagagaaattagtagucagt

SEQ ID NO: 91155 - DNA, 24 bp, Artificial Sequence
  Synthetic
ctaatgctacagugtctgcctuca

SEQ ID NO: 91156 - DNA, 23 bp, Artificial Sequence
  Synthetic
gtggcatcuttactcaccaucca

SEQ ID NO: 91157 - DNA, 22 bp, Artificial Sequence
  Synthetic
gtgttuggagcgggattttcuc

SEQ ID NO: 91158 - DNA, 22 bp, Artificial Sequence
  Synthetic
gccugccttcaaucagaaacct

SEQ ID NO: 91159 - DNA, 22 bp, Artificial Sequence
  Synthetic
atgactucccacatgacgaucc

SEQ ID NO: 91160 - DNA, 21 bp, Artificial Sequence
  Synthetic
acacagcagcugagacatucc

SEQ ID NO: 91161 - DNA, 23 bp, Artificial Sequence
  Synthetic
gaagaaugggtagugaggaagca

SEQ ID NO: 91162 - DNA, 27 bp, Artificial Sequence
  Synthetic
gcctttctucagattcattctcaugac

SEQ ID NO: 91163 - DNA, 22 bp, Artificial Sequence
  Synthetic
gcaccgttgutgtcagtgacua

SEQ ID NO: 91164 - DNA, 28 bp, Artificial Sequence
  Synthetic
tctctctccucagttaataacgacauga

SEQ ID NO: 91165 - DNA, 22 bp, Artificial Sequence
  Synthetic
ctcacagauggaggtgatgcug

SEQ ID NO: 91166 - DNA, 20 bp, Artificial Sequence
  Synthetic
cagcgacguttggagctaug

SEQ ID NO: 91167 - DNA, 22 bp, Artificial Sequence
  Synthetic
tgcctttgggaucccttcaaug

SEQ ID NO: 91168 - DNA, 23 bp, Artificial Sequence
  Synthetic
cagaaatccugcatgagcaacug

SEQ ID NO: 91169 - DNA, 28 bp, Artificial Sequence
  Synthetic
agagatacacugactgtgtgtactauga

SEQ ID NO: 91170 - DNA, 22 bp, Artificial Sequence
  Synthetic
gggattgagugacgaagtggut

SEQ ID NO: 91171 - DNA, 21 bp, Artificial Sequence
  Synthetic
tgtttccgtcugactgccauc

SEQ ID NO: 91172 - DNA, 28 bp, Artificial Sequence
  Synthetic
ccacattcaucagtaattcacuaagcgt

SEQ ID NO: 91173 - DNA, 26 bp, Artificial Sequence
  Synthetic
accaggaccaugagaaacttttugaa

SEQ ID NO: 91174 - DNA, 29 bp, Artificial Sequence
  Synthetic
agatgttacuaggtgttataugccacaga

SEQ ID NO: 91175 - DNA, 28 bp, Artificial Sequence
  Synthetic
catggcaagttaugtgatggagaaaaug

SEQ ID NO: 91176 - DNA, 19 bp, Artificial Sequence
  Synthetic
gccagauggcatgccugaa

SEQ ID NO: 91177 - DNA, 19 bp, Artificial Sequence
  Synthetic
tctgcaggutgagcaggug

SEQ ID NO: 91178 - DNA, 21 bp, Artificial Sequence
  Synthetic
gctcctgcaaaugcaacagut

SEQ ID NO: 91179 - DNA, 18 bp, Artificial Sequence
  Synthetic
cguacaggcagggctgug

SEQ ID NO: 91180 - DNA, 24 bp, Artificial Sequence
  Synthetic
gggacacugtcacaaaagugaaaa

SEQ ID NO: 91181 - DNA, 24 bp, Artificial Sequence
  Synthetic
accaaugaaagaaacgggcctuat

SEQ ID NO: 91182 - DNA, 22 bp, Artificial Sequence
  Synthetic
cagagcagaautgggaagcugt

SEQ ID NO: 91183 - DNA, 24 bp, Artificial Sequence
  Synthetic
agcatcaccuagatcttccaucca

SEQ ID NO: 91184 - DNA, 27 bp, Artificial Sequence
  Synthetic
catctgaagagagugttcgaggaaaut

SEQ ID NO: 91185 - DNA, 24 bp, Artificial Sequence
  Synthetic
gaagauaatgactauggccgagca

SEQ ID NO: 91186 - DNA, 20 bp, Artificial Sequence
  Synthetic
ccuaggccccaccagtcuac

SEQ ID NO: 91187 - DNA, 28 bp, Artificial Sequence
  Synthetic
tctcagactaccuaggctttgaaagtua

SEQ ID NO: 91188 - DNA, 19 bp, Artificial Sequence
  Synthetic
aggcccagcagccutatut

SEQ ID NO: 91189 - DNA, 19 bp, Artificial Sequence
  Synthetic
ggtccugcctctuggaacc

SEQ ID NO: 91190 - DNA, 21 bp, Artificial Sequence
  Synthetic
catcagagutgtcuccgcagt

SEQ ID NO: 91191 - DNA, 28 bp, Artificial Sequence
  Synthetic
tgatctctggtugtgtgtttctacttut

SEQ ID NO: 91192 - DNA, 24 bp, Artificial Sequence
  Synthetic
ccccactgaaccuctcttacatut

SEQ ID NO: 91193 - DNA, 22 bp, Artificial Sequence
  Synthetic
gagggaaggcaggauctcuaac

SEQ ID NO: 91194 - DNA, 31 bp, Artificial Sequence
  Synthetic
tgattttgtcucagacattacagcuaaaagt

SEQ ID NO: 91195 - DNA, 22 bp, Artificial Sequence
  Synthetic
caaggccuggaucaaccaagat

SEQ ID NO: 91196 - DNA, 21 bp, Artificial Sequence
  Synthetic
ctttctctgggugcacagcua

SEQ ID NO: 91197 - DNA, 31 bp, Artificial Sequence
  Synthetic
cctaggtaacatauattggacagatcauggt

SEQ ID NO: 91198 - DNA, 22 bp, Artificial Sequence
  Synthetic
ccucaaggccaacaagcatuct

SEQ ID NO: 91199 - DNA, 22 bp, Artificial Sequence
  Synthetic
gaatcaguctctgtggugggat

SEQ ID NO: 91200 - DNA, 21 bp, Artificial Sequence
  Synthetic
tgcgtgtaccaugatgctgua

SEQ ID NO: 91201 - DNA, 24 bp, Artificial Sequence
  Synthetic
catttgtgcucggtacttugagag

SEQ ID NO: 91202 - DNA, 21 bp, Artificial Sequence
  Synthetic
caggaggugacactguagacc

SEQ ID NO: 91203 - DNA, 23 bp, Artificial Sequence
  Synthetic
ttccaacugggatttuccacaca

SEQ ID NO: 91204 - DNA, 29 bp, Artificial Sequence
  Synthetic
tcaagggucataacaaaucaaaacagagt

SEQ ID NO: 91205 - DNA, 28 bp, Artificial Sequence
  Synthetic
caggctttggugaataatatgtccttug

SEQ ID NO: 91206 - DNA, 28 bp, Artificial Sequence
  Synthetic
gcagcggcauacacttctttatatctua

SEQ ID NO: 91207 - DNA, 28 bp, Artificial Sequence
  Synthetic
ggctgucaatatgacaugagaaggaaaa

SEQ ID NO: 91208 - DNA, 28 bp, Artificial Sequence
  Synthetic
ggtacgaatgugaagaatctttuacgac

SEQ ID NO: 91209 - DNA, 27 bp, Artificial Sequence
  Synthetic
agcccgtaccuttttattgcattttuc

SEQ ID NO: 91210 - DNA, 28 bp, Artificial Sequence
  Synthetic
actagaaggugcaaatgcatatcatugt

SEQ ID NO: 91211 - DNA, 25 bp, Artificial Sequence
  Synthetic
ggtgacutgtgaggaugaaccaaaa

SEQ ID NO: 91212 - DNA, 26 bp, Artificial Sequence
  Synthetic
aaagattctaucctctgcctcuagca

SEQ ID NO: 91213 - DNA, 25 bp, Artificial Sequence
  Synthetic
gtgatggaatucatgactgtgugga

SEQ ID NO: 91214 - DNA, 29 bp, Artificial Sequence
  Synthetic
tgatgaacctaautgtacaacttguggat

SEQ ID NO: 91215 - DNA, 25 bp, Artificial Sequence
  Synthetic
catcaaaccccacaugaatcgtaug

SEQ ID NO: 91216 - DNA, 26 bp, Artificial Sequence
  Synthetic
gtttaggguttgaagaatugccaagt

SEQ ID NO: 91217 - DNA, 25 bp, Artificial Sequence
  Synthetic
accaaaugcagagaacagtggaaut

SEQ ID NO: 91218 - DNA, 22 bp, Artificial Sequence
  Synthetic
tctctgcugttattgggugcat

SEQ ID NO: 91219 - DNA, 28 bp, Artificial Sequence
  Synthetic
cgatatttgtggcuggtggtttatauga

SEQ ID NO: 91220 - DNA, 26 bp, Artificial Sequence
  Synthetic
aattgagcugtacaacttcugggaaa

SEQ ID NO: 91221 - DNA, 25 bp, Artificial Sequence
  Synthetic
caataaggagauccctucacaccac

SEQ ID NO: 91222 - DNA, 27 bp, Artificial Sequence
  Synthetic
gtagaaacaguaacaagaccctaccug

SEQ ID NO: 91223 - DNA, 21 bp, Artificial Sequence
  Synthetic
ctttgugcagccagtgguaat

SEQ ID NO: 91224 - DNA, 27 bp, Artificial Sequence
  Synthetic
gagatctctctuccttcagacttugag

SEQ ID NO: 91225 - DNA, 28 bp, Artificial Sequence
  Synthetic
acatggcaattcutgcttgaaaactaut

SEQ ID NO: 91226 - DNA, 21 bp, Artificial Sequence
  Synthetic
cttcctuagggactgctgcug

SEQ ID NO: 91227 - DNA, 22 bp, Artificial Sequence
  Synthetic
cttcgcccugctctctatgaug

SEQ ID NO: 91228 - DNA, 23 bp, Artificial Sequence
  Synthetic
cacagttcucttcatcacugcca

SEQ ID NO: 91229 - DNA, 26 bp, Artificial Sequence
  Synthetic
ctgcagtguccatttgtattugaaca

SEQ ID NO: 91230 - DNA, 29 bp, Artificial Sequence
  Synthetic
tccacagguaagaaatcttuaaaccaagt

SEQ ID NO: 91231 - DNA, 21 bp, Artificial Sequence
  Synthetic
gggctuccctaccatugacat

SEQ ID NO: 91232 - DNA, 24 bp, Artificial Sequence
  Synthetic
gcacauggagacagaaatgucaca

SEQ ID NO: 91233 - DNA, 20 bp, Artificial Sequence
  Synthetic
ctgatgaacaugggccugga

SEQ ID NO: 91234 - DNA, 23 bp, Artificial Sequence
  Synthetic
ctcagttcuacagggtctgtugg

SEQ ID NO: 91235 - DNA, 26 bp, Artificial Sequence
  Synthetic
aggtgcaattcuctgcttttctauct

SEQ ID NO: 91236 - DNA, 22 bp, Artificial Sequence
  Synthetic
gtacgcucaaccacctucaact

SEQ ID NO: 91237 - DNA, 26 bp, Artificial Sequence
  Synthetic
gttctcaacaagcacugagtaaggua

SEQ ID NO: 91238 - DNA, 26 bp, Artificial Sequence
  Synthetic
cctacaauaacaatagugcacaccgt

SEQ ID NO: 91239 - DNA, 22 bp, Artificial Sequence
  Synthetic
agcatacaacugcgccatauct

SEQ ID NO: 91240 - DNA, 26 bp, Artificial Sequence
  Synthetic
ctgcaaacaaaaccacucattauggt

SEQ ID NO: 91241 - DNA, 21 bp, Artificial Sequence
  Synthetic
ggaggcagugattccaagcug

SEQ ID NO: 91242 - DNA, 21 bp, Artificial Sequence
  Synthetic
augggaagagcuacgaggagt

SEQ ID NO: 91243 - DNA, 22 bp, Artificial Sequence
  Synthetic
cagtgtgaaucgagcctugaca

SEQ ID NO: 91244 - DNA, 24 bp, Artificial Sequence
  Synthetic
acctgtctgugctttgttguagaa

SEQ ID NO: 91245 - DNA, 19 bp, Artificial Sequence
  Synthetic
ggutaacgacuggcaccac

SEQ ID NO: 91246 - DNA, 25 bp, Artificial Sequence
  Synthetic
actcatugaagacacagcagaugac

SEQ ID NO: 91247 - DNA, 27 bp, Artificial Sequence
  Synthetic
tgattgccatgutgtgtgaattgatut

SEQ ID NO: 91248 - DNA, 25 bp, Artificial Sequence
  Synthetic
cctgttcacuctcttttctcuccaa

SEQ ID NO: 91249 - DNA, 20 bp, Artificial Sequence
  Synthetic
caagtgccugtgtggacuca

SEQ ID NO: 91250 - DNA, 20 bp, Artificial Sequence
  Synthetic
cctactccucccgtgctuag

SEQ ID NO: 91251 - DNA, 26 bp, Artificial Sequence
  Synthetic
cattcaacctaccugttctctcctua

SEQ ID NO: 91252 - DNA, 21 bp, Artificial Sequence
  Synthetic
ggcatccauctcagcgttcut

SEQ ID NO: 91253 - DNA, 23 bp, Artificial Sequence
  Synthetic
catgcacuggaaagccaactuac

SEQ ID NO: 91254 - DNA, 33 bp, Artificial Sequence
  Synthetic
actgaataacaaacacutttaaagttguaacat

SEQ ID NO: 91255 - DNA, 27 bp, Artificial Sequence
  Synthetic
cgatgcatcugaggaacgtttatacug

SEQ ID NO: 91256 - DNA, 28 bp, Artificial Sequence
  Synthetic
ccagttccgtuaataaaagctcgttuaa

SEQ ID NO: 91257 - DNA, 28 bp, Artificial Sequence
  Synthetic
gttctgaaaucagaggagtggatatuga

SEQ ID NO: 91258 - DNA, 23 bp, Artificial Sequence
  Synthetic
aaaaggcaucaagcacaaaccuc

SEQ ID NO: 91259 - DNA, 17 bp, Artificial Sequence
  Synthetic
ggccaucggcccatcuc

SEQ ID NO: 91260 - DNA, 27 bp, Artificial Sequence
  Synthetic
gccgtgatgaagutaaagtatggatug

SEQ ID NO: 91261 - DNA, 28 bp, Artificial Sequence
  Synthetic
gcutgccaacttcauaagagaaaagaat

SEQ ID NO: 91262 - DNA, 21 bp, Artificial Sequence
  Synthetic
ccctaacagccaugctttcuc

SEQ ID NO: 91263 - DNA, 23 bp, Artificial Sequence
  Synthetic
ccaggcaauggaaagggtacaua

SEQ ID NO: 91264 - DNA, 22 bp, Artificial Sequence
  Synthetic
ccatggccucattctggttcuc

SEQ ID NO: 91265 - DNA, 22 bp, Artificial Sequence
  Synthetic
gcatgguacaaggtcacuccaa

SEQ ID NO: 91266 - DNA, 24 bp, Artificial Sequence
  Synthetic
ggattcagagugcataggttcuca

SEQ ID NO: 91267 - DNA, 20 bp, Artificial Sequence
  Synthetic
cgaaccuctgccaucaggac

SEQ ID NO: 91268 - DNA, 21 bp, Artificial Sequence
  Synthetic
gcctcacugcttccaacagut

SEQ ID NO: 91269 - DNA, 28 bp, Artificial Sequence
  Synthetic
cctcctgtatuaaaattgagcgtgugat

SEQ ID NO: 91270 - DNA, 21 bp, Artificial Sequence
  Synthetic
tgactguggatctcuggagca

SEQ ID NO: 91271 - DNA, 17 bp, Artificial Sequence
  Synthetic
ccaguccgccccatucc

SEQ ID NO: 91272 - DNA, 23 bp, Artificial Sequence
  Synthetic
cccaccuggcaataatagggaut

SEQ ID NO: 91273 - DNA, 20 bp, Artificial Sequence
  Synthetic
tggagggugtgccgttatuc

SEQ ID NO: 91274 - DNA, 28 bp, Artificial Sequence
  Synthetic
tgaaagcaaatcuctctcttcaaagucc

SEQ ID NO: 91275 - DNA, 22 bp, Artificial Sequence
  Synthetic
gcuacctaaugcagccagacaa

SEQ ID NO: 91276 - DNA, 28 bp, Artificial Sequence
  Synthetic
cttaccaatttuagccttgcaagatcug

SEQ ID NO: 91277 - DNA, 28 bp, Artificial Sequence
  Synthetic
agataaagcugcttagaaatgaugccaa

SEQ ID NO: 91278 - DNA, 23 bp, Artificial Sequence
  Synthetic
cacctcaatugcagtggatcuct

SEQ ID NO: 91279 - DNA, 24 bp, Artificial Sequence
  Synthetic
ccaaagagcagcaaguctgaucat

SEQ ID NO: 91280 - DNA, 25 bp, Artificial Sequence
  Synthetic
ttgtgctgauatgatcagactugct

SEQ ID NO: 91281 - DNA, 27 bp, Artificial Sequence
  Synthetic
ggctttgttatucgctgatctgtttug

SEQ ID NO: 91282 - DNA, 23 bp, Artificial Sequence
  Synthetic
ctacaauagccttaccugcacca

SEQ ID NO: 91283 - DNA, 28 bp, Artificial Sequence
  Synthetic
tcatcacagtcaugctttcttacaucat

SEQ ID NO: 91284 - DNA, 22 bp, Artificial Sequence
  Synthetic
caagcaugtgcatuggcaagat

SEQ ID NO: 91285 - DNA, 28 bp, Artificial Sequence
  Synthetic
tgggagtatugcacaattatctcttguc

SEQ ID NO: 91286 - DNA, 24 bp, Artificial Sequence
  Synthetic
aaagguaatgggcauagcacaact

SEQ ID NO: 91287 - DNA, 28 bp, Artificial Sequence
  Synthetic
caagtattccaugactacccatagtuca

SEQ ID NO: 91288 - DNA, 26 bp, Artificial Sequence
  Synthetic
aacccatcgauttgaatcctttcuca

SEQ ID NO: 91289 - DNA, 28 bp, Artificial Sequence
  Synthetic
cccaauaggttcctauggaaagaaagaa

SEQ ID NO: 91290 - DNA, 28 bp, Artificial Sequence
  Synthetic
tctctggcttcuttcctaatttcaaugt

SEQ ID NO: 91291 - DNA, 29 bp, Artificial Sequence
  Synthetic
ttgccagautgctacuaaaacagaaaaag

SEQ ID NO: 91292 - DNA, 26 bp, Artificial Sequence
  Synthetic
tcttgttatagcuacttggtggguga

SEQ ID NO: 91293 - DNA, 28 bp, Artificial Sequence
  Synthetic
ggtcttctcagcuagaaatgctctatut

SEQ ID NO: 91294 - DNA, 25 bp, Artificial Sequence
  Synthetic
gtacagttgucaagtccacttucct

SEQ ID NO: 91295 - DNA, 21 bp, Artificial Sequence
  Synthetic
gacaucaacctccauggcaac

SEQ ID NO: 91296 - DNA, 28 bp, Artificial Sequence
  Synthetic
ccatgtcttacutgtttttaggtugcat

SEQ ID NO: 91297 - DNA, 27 bp, Artificial Sequence
  Synthetic
tgtttccagucacaaaaagagtaucca

SEQ ID NO: 91298 - DNA, 25 bp, Artificial Sequence
  Synthetic
ttttggtatgcguctcaacttcuct

SEQ ID NO: 91299 - DNA, 25 bp, Artificial Sequence
  Synthetic
gtgaagauggagaaacaagugacca

SEQ ID NO: 91300 - DNA, 23 bp, Artificial Sequence
  Synthetic
gcacaggaacaucacccaatcuc

SEQ ID NO: 91301 - DNA, 22 bp, Artificial Sequence
  Synthetic
gctccgctuctttccttcacuc

SEQ ID NO: 91302 - DNA, 27 bp, Artificial Sequence
  Synthetic
cctgtgtccauactttgattcaacugt

SEQ ID NO: 91303 - DNA, 25 bp, Artificial Sequence
  Synthetic
ggtagtgagautatgttgcagcugt

SEQ ID NO: 91304 - DNA, 29 bp, Artificial Sequence
  Synthetic
tatgaaaacagtuaaaattgtgccaccut

SEQ ID NO: 91305 - DNA, 20 bp, Artificial Sequence
  Synthetic
gtaagcacaguggccaccua

SEQ ID NO: 91306 - DNA, 19 bp, Artificial Sequence
  Synthetic
gacacacaggcagcucuct

SEQ ID NO: 91307 - DNA, 18 bp, Artificial Sequence
  Synthetic
ccagggutcagcaugcca

SEQ ID NO: 91308 - DNA, 19 bp, Artificial Sequence
  Synthetic
agctuccccctccucaaca

SEQ ID NO: 91309 - DNA, 17 bp, Artificial Sequence
  Synthetic
gtccgtgcugtgtgcuc

SEQ ID NO: 91310 - DNA, 25 bp, Artificial Sequence
  Synthetic
ctggtacaagaaugtgcaatgtuct

SEQ ID NO: 91311 - DNA, 25 bp, Artificial Sequence
  Synthetic
ttccagcaaccutatcatacauggg

SEQ ID NO: 91312 - DNA, 22 bp, Artificial Sequence
  Synthetic
acccagtctcucttctgcctut

SEQ ID NO: 91313 - DNA, 28 bp, Artificial Sequence
  Synthetic
tgtttcctagtacucaggaatgtctuct

SEQ ID NO: 91314 - DNA, 28 bp, Artificial Sequence
  Synthetic
gcacagcauagaacataagtaagcuaca

SEQ ID NO: 91315 - DNA, 22 bp, Artificial Sequence
  Synthetic
acccttatttugcccccaaucc

SEQ ID NO: 91316 - DNA, 29 bp, Artificial Sequence
  Synthetic
attttggtattauccactgaagacugcat

SEQ ID NO: 91317 - DNA, 20 bp, Artificial Sequence
  Synthetic
ggcagcgucatccacttcuc

SEQ ID NO: 91318 - DNA, 22 bp, Artificial Sequence
  Synthetic
agttcccaguctcttgcaggua

SEQ ID NO: 91319 - DNA, 21 bp, Artificial Sequence
  Synthetic
cccccaccagutgatgaaugg

SEQ ID NO: 91320 - DNA, 22 bp, Artificial Sequence
  Synthetic
gtctcuctgatccugccacaac

SEQ ID NO: 91321 - DNA, 20 bp, Artificial Sequence
  Synthetic
cagcuggccatggcauagat

SEQ ID NO: 91322 - DNA, 23 bp, Artificial Sequence
  Synthetic
acagaccgacuaaagagcaguct

SEQ ID NO: 91323 - DNA, 21 bp, Artificial Sequence
  Synthetic
cccacccauttcctctccuca

SEQ ID NO: 91324 - DNA, 25 bp, Artificial Sequence
  Synthetic
cccttcttctuggcgaatgatctua

SEQ ID NO: 91325 - DNA, 21 bp, Artificial Sequence
  Synthetic
gctgcagaaaaucaagugcca

SEQ ID NO: 91326 - DNA, 23 bp, Artificial Sequence
  Synthetic
ggctaacuttccttcuggacact

SEQ ID NO: 91327 - DNA, 29 bp, Artificial Sequence
  Synthetic
gtcagaaatgcuaagtatgcaaaatgugt

SEQ ID NO: 91328 - DNA, 28 bp, Artificial Sequence
  Synthetic
tgttgatcgtttcugagaacaagctaua

SEQ ID NO: 91329 - DNA, 22 bp, Artificial Sequence
  Synthetic
gatgtgccccagutatgguact

SEQ ID NO: 91330 - DNA, 22 bp, Artificial Sequence
  Synthetic
ggtgctgaautcccttggcuaa

SEQ ID NO: 91331 - DNA, 27 bp, Artificial Sequence
  Synthetic
atgcaagcautcttatttccugcaaaa

SEQ ID NO: 91332 - DNA, 23 bp, Artificial Sequence
  Synthetic
caaatgtggccuttctcttugct

SEQ ID NO: 91333 - DNA, 21 bp, Artificial Sequence
  Synthetic
cagctcugatcctgcuaagcc

SEQ ID NO: 91334 - DNA, 24 bp, Artificial Sequence
  Synthetic
gacagtataggccugaccctcuaa

SEQ ID NO: 91335 - DNA, 27 bp, Artificial Sequence
  Synthetic
ttgaatucagtaatgtgucagcaggat

SEQ ID NO: 91336 - DNA, 24 bp, Artificial Sequence
  Synthetic
gcttactcaauagtcatccuggct

SEQ ID NO: 91337 - DNA, 28 bp, Artificial Sequence
  Synthetic
acactcctgattucactaccttttgtuc

SEQ ID NO: 91338 - DNA, 26 bp, Artificial Sequence
  Synthetic
tggtgcagaguagatgatatgaucca

SEQ ID NO: 91339 - DNA, 23 bp, Artificial Sequence
  Synthetic
gggaagaggaaaguacctgauga

SEQ ID NO: 91340 - DNA, 28 bp, Artificial Sequence
  Synthetic
cttaatagctugtagccattcuccaact

SEQ ID NO: 91341 - DNA, 28 bp, Artificial Sequence
  Synthetic
tctttggtattucaggataatgtucgct

SEQ ID NO: 91342 - DNA, 21 bp, Artificial Sequence
  Synthetic
gagttggcuggaaccaggaut

SEQ ID NO: 91343 - DNA, 24 bp, Artificial Sequence
  Synthetic
tctgcttccaaguctaggtcuagg

SEQ ID NO: 91344 - DNA, 23 bp, Artificial Sequence
  Synthetic
tgtgattgtgtuttctccgccut

SEQ ID NO: 91345 - DNA, 23 bp, Artificial Sequence
  Synthetic
tcttatagcucaggccggattug

SEQ ID NO: 91346 - DNA, 20 bp, Artificial Sequence
  Synthetic
caaggatggguccccttguc

SEQ ID NO: 91347 - DNA, 22 bp, Artificial Sequence
  Synthetic
aagagagtgcaugtctgctugt

SEQ ID NO: 91348 - DNA, 21 bp, Artificial Sequence
  Synthetic
ctgagcacacagcagugtcua

SEQ ID NO: 91349 - DNA, 27 bp, Artificial Sequence
  Synthetic
gctttgagagaautcttcagcacaaut

SEQ ID NO: 91350 - DNA, 23 bp, Artificial Sequence
  Synthetic
gtagagcuggagccagaacuaga

SEQ ID NO: 91351 - DNA, 26 bp, Artificial Sequence
  Synthetic
ggtgcaaagugttgggtaatuagaag

SEQ ID NO: 91352 - DNA, 24 bp, Artificial Sequence
  Synthetic
caaaattgcaaagauctgcccugt

SEQ ID NO: 91353 - DNA, 27 bp, Artificial Sequence
  Synthetic
gccccactguagctttaactagtauct

SEQ ID NO: 91354 - DNA, 22 bp, Artificial Sequence
  Synthetic
ccttgcaagutcccagtacucc

SEQ ID NO: 91355 - DNA, 21 bp, Artificial Sequence
  Synthetic
acataccaggugtgccaaguc

SEQ ID NO: 91356 - DNA, 22 bp, Artificial Sequence
  Synthetic
ccaataggcccaugctcatcuc

SEQ ID NO: 91357 - DNA, 20 bp, Artificial Sequence
  Synthetic
gggcaagugaaccugacgaa

SEQ ID NO: 91358 - DNA, 24 bp, Artificial Sequence
  Synthetic
agtgggugatgaaugaagagcaat

SEQ ID NO: 91359 - DNA, 20 bp, Artificial Sequence
  Synthetic
agggcacuttguagcaccac

SEQ ID NO: 91360 - DNA, 22 bp, Artificial Sequence
  Synthetic
tctagcctcacuggaccttcut

SEQ ID NO: 91361 - DNA, 21 bp, Artificial Sequence
  Synthetic
ccggcacuttttgcagaugat

SEQ ID NO: 91362 - DNA, 24 bp, Artificial Sequence
  Synthetic
aaccaagtuacccatgaucaagca

SEQ ID NO: 91363 - DNA, 29 bp, Artificial Sequence
  Synthetic
gcctaggaaagutaaaattgugacagaag

SEQ ID NO: 91364 - DNA, 21 bp, Artificial Sequence
  Synthetic
gttgtttuggttgggcuccat

SEQ ID NO: 91365 - DNA, 28 bp, Artificial Sequence
  Synthetic
agtacttgcacuttcaaaagcaaaaugt

SEQ ID NO: 91366 - DNA, 21 bp, Artificial Sequence
  Synthetic
cacaucaatggcauccaccac

SEQ ID NO: 91367 - DNA, 20 bp, Artificial Sequence
  Synthetic
ggccttcuggaaagcgtgua

SEQ ID NO: 91368 - DNA, 22 bp, Artificial Sequence
  Synthetic
gcgggaugatgtgaccuacaac

SEQ ID NO: 91369 - DNA, 21 bp, Artificial Sequence
  Synthetic
ggcctggaugtcaaaggtgua

SEQ ID NO: 91370 - DNA, 24 bp, Artificial Sequence
  Synthetic
gggtcatccutcctgaacattuca

SEQ ID NO: 91371 - DNA, 27 bp, Artificial Sequence
  Synthetic
gcactcauaaagttcctctucaaagca

SEQ ID NO: 91372 - DNA, 21 bp, Artificial Sequence
  Synthetic
ccccugagcctgaaugaagaa

SEQ ID NO: 91373 - DNA, 26 bp, Artificial Sequence
  Synthetic
gagugaagagtcugaccaaggaaaat

SEQ ID NO: 91374 - DNA, 19 bp, Artificial Sequence
  Synthetic
gtctccaucagcagccugt

SEQ ID NO: 91375 - DNA, 20 bp, Artificial Sequence
  Synthetic
gcacagaagccuccagacut

SEQ ID NO: 91376 - DNA, 22 bp, Artificial Sequence
  Synthetic
tgaattgcgcutctgguacaga

SEQ ID NO: 91377 - DNA, 26 bp, Artificial Sequence
  Synthetic
ccattggaaaaugtatcugcaaagca

SEQ ID NO: 91378 - DNA, 29 bp, Artificial Sequence
  Synthetic
aggagttcaaaagutgtgtcaaagauaca

SEQ ID NO: 91379 - DNA, 20 bp, Artificial Sequence
  Synthetic
agcaaaagggccagutcuca

SEQ ID NO: 91380 - DNA, 21 bp, Artificial Sequence
  Synthetic
tgttgguggcaacacacucat

SEQ ID NO: 91381 - DNA, 28 bp, Artificial Sequence
  Synthetic
ctttgcagggcutttcatattgtuaaga

SEQ ID NO: 91382 - DNA, 27 bp, Artificial Sequence
  Synthetic
acttacccacaguactaatgcaatucc

SEQ ID NO: 91383 - DNA, 26 bp, Artificial Sequence
  Synthetic
agatagacaguttcccacaguacagt

SEQ ID NO: 91384 - DNA, 22 bp, Artificial Sequence
  Synthetic
tgtctcctutttgctgguagcc

SEQ ID NO: 91385 - DNA, 26 bp, Artificial Sequence
  Synthetic
agtgactggtucagaattttcctcut

SEQ ID NO: 91386 - DNA, 25 bp, Artificial Sequence
  Synthetic
gacctgagcuctgcagtaattuagt

SEQ ID NO: 91387 - DNA, 25 bp, Artificial Sequence
  Synthetic
ccacaagaggagugaaaggtuacag

SEQ ID NO: 91388 - DNA, 24 bp, Artificial Sequence
  Synthetic
tcctcaauagctctcugaccaaga

SEQ ID NO: 91389 - DNA, 27 bp, Artificial Sequence
  Synthetic
aactatgaacuggtctacaaagauggg

SEQ ID NO: 91390 - DNA, 21 bp, Artificial Sequence
  Synthetic
acacaccagcugcattttugg

SEQ ID NO: 91391 - DNA, 28 bp, Artificial Sequence
  Synthetic
cctctaactcacgguttgctgattatut

SEQ ID NO: 91392 - DNA, 21 bp, Artificial Sequence
  Synthetic
atgtcccucgaacctcgacua

SEQ ID NO: 91393 - DNA, 26 bp, Artificial Sequence
  Synthetic
cttgcatagcuttggtttctgucaaa

SEQ ID NO: 91394 - DNA, 21 bp, Artificial Sequence
  Synthetic
cactgactucaagggtgcuct

SEQ ID NO: 91395 - DNA, 23 bp, Artificial Sequence
  Synthetic
cctgacctcuctgattgcatguc

SEQ ID NO: 91396 - DNA, 28 bp, Artificial Sequence
  Synthetic
acttaagagaccuaacattttgccauca

SEQ ID NO: 91397 - DNA, 23 bp, Artificial Sequence
  Synthetic
ggacaugcacggagatgagauat

SEQ ID NO: 91398 - DNA, 22 bp, Artificial Sequence
  Synthetic
caugaattgccucccaggagat

SEQ ID NO: 91399 - DNA, 23 bp, Artificial Sequence
  Synthetic
cacccaaagaaguagtgtugcag

SEQ ID NO: 91400 - DNA, 24 bp, Artificial Sequence
  Synthetic
ggaccagcacutcttgtaguacac

SEQ ID NO: 91401 - DNA, 28 bp, Artificial Sequence
  Synthetic
ccttggugaaagaaagatgaagctuaac

SEQ ID NO: 91402 - DNA, 23 bp, Artificial Sequence
  Synthetic
agtcttaccucctctccatgcuc

SEQ ID NO: 91403 - DNA, 22 bp, Artificial Sequence
  Synthetic
ttcaatccatugcctccctgut

SEQ ID NO: 91404 - DNA, 22 bp, Artificial Sequence
  Synthetic
accatcatcuggtcagagcuca

SEQ ID NO: 91405 - DNA, 22 bp, Artificial Sequence
  Synthetic
ggcccugagtctgaatcugaag

SEQ ID NO: 91406 - DNA, 26 bp, Artificial Sequence
  Synthetic
tcattcttcacugttgccatugagat

SEQ ID NO: 91407 - DNA, 22 bp, Artificial Sequence
  Synthetic
gagctggccacauattgtgtuc

SEQ ID NO: 91408 - DNA, 31 bp, Artificial Sequence
  Synthetic
cttactttcaacaautacttgtctgtctucc

SEQ ID NO: 91409 - DNA, 25 bp, Artificial Sequence
  Synthetic
agaatgtcauagccttggctttuga

SEQ ID NO: 91410 - DNA, 23 bp, Artificial Sequence
  Synthetic
ggtccaatcuctctcaccucagt

SEQ ID NO: 91411 - DNA, 27 bp, Artificial Sequence
  Synthetic
ctggcaggaauataagagaaaaccuct

SEQ ID NO: 91412 - DNA, 21 bp, Artificial Sequence
  Synthetic
ccagttcugacttccccugaa

SEQ ID NO: 91413 - DNA, 23 bp, Artificial Sequence
  Synthetic
gtctcctaugggtggcagttuaa

SEQ ID NO: 91414 - DNA, 27 bp, Artificial Sequence
  Synthetic
ccaaagtgtgcaucactgtaaaagaut

SEQ ID NO: 91415 - DNA, 28 bp, Artificial Sequence
  Synthetic
atttaaattccccaauaaggccatauga

SEQ ID NO: 91416 - DNA, 26 bp, Artificial Sequence
  Synthetic
gcaaaccttguaaagtgcaaatgtuc

SEQ ID NO: 91417 - DNA, 24 bp, Artificial Sequence
  Synthetic
gccctgaatgugtcacttgttuct

SEQ ID NO: 91418 - DNA, 21 bp, Artificial Sequence
  Synthetic
ctggctugtgcagguagacat

SEQ ID NO: 91419 - DNA, 27 bp, Artificial Sequence
  Synthetic
aaactcggtacccutcatggattatut

SEQ ID NO: 91420 - DNA, 28 bp, Artificial Sequence
  Synthetic
ggctatgacatucttgaaataacgugga

SEQ ID NO: 91421 - DNA, 22 bp, Artificial Sequence
  Synthetic
gcccauggatattuggcagaag

SEQ ID NO: 91422 - DNA, 21 bp, Artificial Sequence
  Synthetic
gccucaggcaagtaacuccat

SEQ ID NO: 91423 - DNA, 20 bp, Artificial Sequence
  Synthetic
agggaccaaugtttgugcca

SEQ ID NO: 91424 - DNA, 27 bp, Artificial Sequence
  Synthetic
ctgcagcaauggtgtctattttuacat

SEQ ID NO: 91425 - DNA, 25 bp, Artificial Sequence
  Synthetic
cctgagggautgtaacagtctucct

SEQ ID NO: 91426 - DNA, 21 bp, Artificial Sequence
  Synthetic
ggagcagccagaugtagcaua

SEQ ID NO: 91427 - DNA, 28 bp, Artificial Sequence
  Synthetic
acaaacagcattuaaaaatccacgacuc

SEQ ID NO: 91428 - DNA, 23 bp, Artificial Sequence
  Synthetic
gatagtgacccuttcccttgcut

SEQ ID NO: 91429 - DNA, 20 bp, Artificial Sequence
  Synthetic
tgccacugaacttgccguag

SEQ ID NO: 91430 - DNA, 20 bp, Artificial Sequence
  Synthetic
ccguactcguccagggacat

SEQ ID NO: 91431 - DNA, 17 bp, Artificial Sequence
  Synthetic
ctcccugtcguccagca

SEQ ID NO: 91432 - DNA, 17 bp, Artificial Sequence
  Synthetic
cugcuggacgacaggga

SEQ ID NO: 91433 - DNA, 17 bp, Artificial Sequence
  Synthetic
cgcucgcacacccugag

SEQ ID NO: 91434 - DNA, 26 bp, Artificial Sequence
  Synthetic
agtaggaauccaaaccaaaggcauaa

SEQ ID NO: 91435 - DNA, 26 bp, Artificial Sequence
  Synthetic
gaaaccaggaacagugtatgtttucc

SEQ ID NO: 91436 - DNA, 21 bp, Artificial Sequence
  Synthetic
ccttttaccugcccctttgug

SEQ ID NO: 91437 - DNA, 24 bp, Artificial Sequence
  Synthetic
ccttacctaugacacccagctuct

SEQ ID NO: 91438 - DNA, 22 bp, Artificial Sequence
  Synthetic
ggtatatguggtacaggugcgt

SEQ ID NO: 91439 - DNA, 23 bp, Artificial Sequence
  Synthetic
catttttggcuagtgcagcauct

SEQ ID NO: 91440 - DNA, 28 bp, Artificial Sequence
  Synthetic
gtagctcatttguagtgcctctttuagt

SEQ ID NO: 91441 - DNA, 27 bp, Artificial Sequence
  Synthetic
cagcttcuaaaagcacttctaatuccc

SEQ ID NO: 91442 - DNA, 22 bp, Artificial Sequence
  Synthetic
gcagcaguaaaagcccgaauct

SEQ ID NO: 91443 - DNA, 26 bp, Artificial Sequence
  Synthetic
gtcaaattguctggttgcaaucacaa

SEQ ID NO: 91444 - DNA, 23 bp, Artificial Sequence
  Synthetic
tggtggtggutggttaaaaguca

SEQ ID NO: 91445 - DNA, 24 bp, Artificial Sequence
  Synthetic
gtggagtucttccatguagaggac

SEQ ID NO: 91446 - DNA, 22 bp, Artificial Sequence
  Synthetic
gtggutccagtttugccgaaag

SEQ ID NO: 91447 - DNA, 22 bp, Artificial Sequence
  Synthetic
ccacttcauccgctttugggat

SEQ ID NO: 91448 - DNA, 23 bp, Artificial Sequence
  Synthetic
cacattcctgaugccaccttcua

SEQ ID NO: 91449 - DNA, 29 bp, Artificial Sequence
  Synthetic
ccttctctcuggatagtagtgttguaaga

SEQ ID NO: 91450 - DNA, 20 bp, Artificial Sequence
  Synthetic
gtccugggactcgtucacac

SEQ ID NO: 91451 - DNA, 24 bp, Artificial Sequence
  Synthetic
gacaggcaaucatatctggaggut

SEQ ID NO: 91452 - DNA, 20 bp, Artificial Sequence
  Synthetic
ggcaggaacggagcucauaa

SEQ ID NO: 91453 - DNA, 25 bp, Artificial Sequence
  Synthetic
cgattttggccauttcttcatcugg

SEQ ID NO: 91454 - DNA, 18 bp, Artificial Sequence
  Synthetic
gggaagcuccagctcuca

SEQ ID NO: 91455 - DNA, 18 bp, Artificial Sequence
  Synthetic
ggtagcugcgtgguggat

SEQ ID NO: 91456 - DNA, 20 bp, Artificial Sequence
  Synthetic
ccatccucacggcaguagag

SEQ ID NO: 91457 - DNA, 24 bp, Artificial Sequence
  Synthetic
cccugcacctcttcuacaaaaagt

SEQ ID NO: 91458 - DNA, 23 bp, Artificial Sequence
  Synthetic
aatcgagucaggttcacagucag

SEQ ID NO: 91459 - DNA, 19 bp, Artificial Sequence
  Synthetic
ccaccgggaaggugaaugt

SEQ ID NO: 91460 - DNA, 25 bp, Artificial Sequence
  Synthetic
ggcttcaugttagttttugcaggat

SEQ ID NO: 91461 - DNA, 21 bp, Artificial Sequence
  Synthetic
acagcaugaaaccccatguga

SEQ ID NO: 91462 - DNA, 17 bp, Artificial Sequence
  Synthetic
cccagacgcagcgucut

SEQ ID NO: 91463 - DNA, 20 bp, Artificial Sequence
  Synthetic
ggugagcugggaagaacaca

SEQ ID NO: 91464 - DNA, 17 bp, Artificial Sequence
  Synthetic
tgaccccugcccacuca

SEQ ID NO: 91465 - DNA, 17 bp, Artificial Sequence
  Synthetic
cctaugggccccggcua

SEQ ID NO: 91466 - DNA, 27 bp, Artificial Sequence
  Synthetic
cccaagagggaacaaugttacaaucat

SEQ ID NO: 91467 - DNA, 21 bp, Artificial Sequence
  Synthetic
tgtcccaugcaacatctggug

SEQ ID NO: 91468 - DNA, 25 bp, Artificial Sequence
  Synthetic
gcacaggagcagutctttttaaugt

SEQ ID NO: 91469 - DNA, 28 bp, Artificial Sequence
  Synthetic
tgcaagcuaaaaccacaaatttcugaat

SEQ ID NO: 91470 - DNA, 24 bp, Artificial Sequence
  Synthetic
gtctgcttgcugtgcaaataacut

SEQ ID NO: 91471 - DNA, 26 bp, Artificial Sequence
  Synthetic
ctgtcttgggagautccagagaatua

SEQ ID NO: 91472 - DNA, 21 bp, Artificial Sequence
  Synthetic
ccccatucagacccattggut

SEQ ID NO: 91473 - DNA, 21 bp, Artificial Sequence
  Synthetic
caagcttcttutgggcctgug

SEQ ID NO: 91474 - DNA, 24 bp, Artificial Sequence
  Synthetic
aatcaggcatugctggttagacut

SEQ ID NO: 91475 - DNA, 21 bp, Artificial Sequence
  Synthetic
cctgttcuggcaggatgtcug

SEQ ID NO: 91476 - DNA, 21 bp, Artificial Sequence
  Synthetic
ttgaaaggcauggcggagtua

SEQ ID NO: 91477 - DNA, 28 bp, Artificial Sequence
  Synthetic
ggaaaggacaggucatctgtttuaagaa

SEQ ID NO: 91478 - DNA, 21 bp, Artificial Sequence
  Synthetic
cccaccccaaccuacaccuat

SEQ ID NO: 91479 - DNA, 19 bp, Artificial Sequence
  Synthetic
cuggaacugacccagcact

SEQ ID NO: 91480 - DNA, 27 bp, Artificial Sequence
  Synthetic
gtagtagaaaacagaagugaggcucat

SEQ ID NO: 91481 - DNA, 20 bp, Artificial Sequence
  Synthetic
aacatcttuccggcctccug

SEQ ID NO: 91482 - DNA, 19 bp, Artificial Sequence
  Synthetic
gcctgcagaugacctucct

SEQ ID NO: 91483 - DNA, 18 bp, Artificial Sequence
  Synthetic
cacccaggcuggacugac

SEQ ID NO: 91484 - DNA, 18 bp, Artificial Sequence
  Synthetic
ccagcgaguccaggtuga

SEQ ID NO: 91485 - DNA, 18 bp, Artificial Sequence
  Synthetic
ggctcugctggaauggca

SEQ ID NO: 91486 - DNA, 17 bp, Artificial Sequence
  Synthetic
gctccggcugccatucc

SEQ ID NO: 91487 - DNA, 22 bp, Artificial Sequence
  Synthetic
gcagcaugtcucgaaggaagat

SEQ ID NO: 91488 - DNA, 25 bp, Artificial Sequence
  Synthetic
ctgttagagatuggctttggtgcua

SEQ ID NO: 91489 - DNA, 21 bp, Artificial Sequence
  Synthetic
ggccggaaaautcacuggaac

SEQ ID NO: 91490 - DNA, 19 bp, Artificial Sequence
  Synthetic
gcugaaggacucggacgaa

SEQ ID NO: 91491 - DNA, 20 bp, Artificial Sequence
  Synthetic
gcttaacgutgtcgctugcc

SEQ ID NO: 91492 - DNA, 21 bp, Artificial Sequence
  Synthetic
cagaagugaggacaaccccut

SEQ ID NO: 91493 - DNA, 28 bp, Artificial Sequence
  Synthetic
tccatagatgtggutgtgtttttctcut

SEQ ID NO: 91494 - DNA, 24 bp, Artificial Sequence
  Synthetic
cctcagttatccuggactggagut

SEQ ID NO: 91495 - DNA, 21 bp, Artificial Sequence
  Synthetic
tgaguccaaactgucgaggga

SEQ ID NO: 91496 - DNA, 26 bp, Artificial Sequence
  Synthetic
tcagtttuccaggcaattgagtttug

SEQ ID NO: 91497 - DNA, 28 bp, Artificial Sequence
  Synthetic
ccgagaaucaccaaatgugaaaaacaat

SEQ ID NO: 91498 - DNA, 27 bp, Artificial Sequence
  Synthetic
gaatataaaacagugtgagccaugcag

SEQ ID NO: 91499 - DNA, 22 bp, Artificial Sequence
  Synthetic
ctcagctcugacaccccatuaa

SEQ ID NO: 91500 - DNA, 28 bp, Artificial Sequence
  Synthetic
cataccattgucagaagcaaggaaagua

SEQ ID NO: 91501 - DNA, 28 bp, Artificial Sequence
  Synthetic
ccaattggcuaaaaatagatcctgugaa

SEQ ID NO: 91502 - DNA, 26 bp, Artificial Sequence
  Synthetic
gataacagtcacauaagagccacuca

SEQ ID NO: 91503 - DNA, 29 bp, Artificial Sequence
  Synthetic
ggcttactctttcutatctctctctguca

SEQ ID NO: 91504 - DNA, 28 bp, Artificial Sequence
  Synthetic
cggtccaaaacagcaautgtagttatut

SEQ ID NO: 91505 - DNA, 24 bp, Artificial Sequence
  Synthetic
gccagtugcatttggaacuaaacc

SEQ ID NO: 91506 - DNA, 27 bp, Artificial Sequence
  Synthetic
actaactacaccuttgagattgaugcc

SEQ ID NO: 91507 - DNA, 23 bp, Artificial Sequence
  Synthetic
tttuccacccagagucaaaacca

SEQ ID NO: 91508 - DNA, 26 bp, Artificial Sequence
  Synthetic
catacatgggcacaaaauaaccacut

SEQ ID NO: 91509 - DNA, 23 bp, Artificial Sequence
  Synthetic
ctaauagcaggagccauggaaca

SEQ ID NO: 91510 - DNA, 24 bp, Artificial Sequence
  Synthetic
cccauatcttggguccaaagcaat

SEQ ID NO: 91511 - DNA, 22 bp, Artificial Sequence
  Synthetic
agucgactggauagcaggaaac

SEQ ID NO: 91512 - DNA, 23 bp, Artificial Sequence
  Synthetic
tccatuggcaggagtgaatucag

SEQ ID NO: 91513 - DNA, 24 bp, Artificial Sequence
  Synthetic
cccgaccuaatctaacatccuggt

SEQ ID NO: 91514 - DNA, 28 bp, Artificial Sequence
  Synthetic
tgggcttatttuaactggcttttctuct

SEQ ID NO: 91515 - DNA, 24 bp, Artificial Sequence
  Synthetic
gaccagauatcaacttucggacca

SEQ ID NO: 91516 - DNA, 27 bp, Artificial Sequence
  Synthetic
ccaactgctuacaatttattgccauca

SEQ ID NO: 91517 - DNA, 28 bp, Artificial Sequence
  Synthetic
tacatgtatatggcuggattatcacugg

SEQ ID NO: 91518 - DNA, 29 bp, Artificial Sequence
  Synthetic
aaagtttccaatcutccagtgataaucca

SEQ ID NO: 91519 - DNA, 25 bp, Artificial Sequence
  Synthetic
atgacctgcttugccatattgagua

SEQ ID NO: 91520 - DNA, 30 bp, Artificial Sequence
  Synthetic
tgaagcacauaaaattaacttttcaugcca

SEQ ID NO: 91521 - DNA, 28 bp, Artificial Sequence
  Synthetic
gcttttgatctucctttatctccaguga

SEQ ID NO: 91522 - DNA, 26 bp, Artificial Sequence
  Synthetic
tgagaatttcugcacacttacacgut

SEQ ID NO: 91523 - DNA, 27 bp, Artificial Sequence
  Synthetic
tgaagttucccagagacttgtcttuag

SEQ ID NO: 91524 - DNA, 24 bp, Artificial Sequence
  Synthetic
cccacaagaccaggaugttagaut

SEQ ID NO: 91525 - DNA, 20 bp, Artificial Sequence
  Synthetic
ggcatgaacucctgcctcuc

SEQ ID NO: 91526 - DNA, 26 bp, Artificial Sequence
  Synthetic
agcctcttctugttaatttccctgut

SEQ ID NO: 91527 - DNA, 22 bp, Artificial Sequence
  Synthetic
tggcaaacugcagcttgtttut

SEQ ID NO: 91528 - DNA, 28 bp, Artificial Sequence
  Synthetic
gtctgtggagaaacugaaatacagtuct

SEQ ID NO: 91529 - DNA, 24 bp, Artificial Sequence
  Synthetic
gaaaaucgcacagaggttgtugac

SEQ ID NO: 91530 - DNA, 26 bp, Artificial Sequence
  Synthetic
agttttuacaaacccagctugaggat

SEQ ID NO: 91531 - DNA, 23 bp, Artificial Sequence
  Synthetic
acttgctgucgattggatuggaa

SEQ ID NO: 91532 - DNA, 29 bp, Artificial Sequence
  Synthetic
ccgagtgatgguccaatttctcttaauag

SEQ ID NO: 91533 - DNA, 21 bp, Artificial Sequence
  Synthetic
tgacaatgccccucaagtgut

SEQ ID NO: 91534 - DNA, 28 bp, Artificial Sequence
  Synthetic
tgtcccuatagtctcugcaaaaacaaat

SEQ ID NO: 91535 - DNA, 22 bp, Artificial Sequence
  Synthetic
cacacguttctatggugcagaa

SEQ ID NO: 91536 - DNA, 26 bp, Artificial Sequence
  Synthetic
tguagataguccaaggcagagacaat

SEQ ID NO: 91537 - DNA, 27 bp, Artificial Sequence
  Synthetic
attattacaatccugtccctgctgtut

SEQ ID NO: 91538 - DNA, 23 bp, Artificial Sequence
  Synthetic
gaggtggtgacucgaaaagctua

SEQ ID NO: 91539 - DNA, 28 bp, Artificial Sequence
  Synthetic
gggaataaagtaccugacttctcttcug

SEQ ID NO: 91540 - DNA, 28 bp, Artificial Sequence
  Synthetic
ttttctgtgucagaccaatagaggttut

SEQ ID NO: 91541 - DNA, 27 bp, Artificial Sequence
  Synthetic
gcaattgcucacttcttatttuaggga

SEQ ID NO: 91542 - DNA, 28 bp, Artificial Sequence
  Synthetic
ggtccagattgcugtctatccagtauat

SEQ ID NO: 91543 - DNA, 28 bp, Artificial Sequence
  Synthetic
gcacatgttggutttccttcttttguag

SEQ ID NO: 91544 - DNA, 21 bp, Artificial Sequence
  Synthetic
caagtctcugcctctugaggt

SEQ ID NO: 91545 - DNA, 25 bp, Artificial Sequence
  Synthetic
ggagagaactgutcagcatcattug

SEQ ID NO: 91546 - DNA, 28 bp, Artificial Sequence
  Synthetic
gaaaaagcccuaagttactctcatucct

SEQ ID NO: 91547 - DNA, 28 bp, Artificial Sequence
  Synthetic
ggctttcattccuctgaaggattttuct

SEQ ID NO: 91548 - DNA, 20 bp, Artificial Sequence
  Synthetic
caagagcaccugaccucaca

SEQ ID NO: 91549 - DNA, 17 bp, Artificial Sequence
  Synthetic
ttgccuggccagccuac

SEQ ID NO: 91550 - DNA, 28 bp, Artificial Sequence
  Synthetic
cttgtcattcugcttcatatttuagcgt

SEQ ID NO: 91551 - DNA, 20 bp, Artificial Sequence
  Synthetic
ctctgacccgcuctctucag

SEQ ID NO: 91552 - DNA, 20 bp, Artificial Sequence
  Synthetic
cactctccuctgcctccuca

SEQ ID NO: 91553 - DNA, 19 bp, Artificial Sequence
  Synthetic
cctcuggtgggucggaact

SEQ ID NO: 91554 - DNA, 21 bp, Artificial Sequence
  Synthetic
cacctgcaccaaucacctcut

SEQ ID NO: 91555 - DNA, 23 bp, Artificial Sequence
  Synthetic
ccgagtccagugggagttaatuc

SEQ ID NO: 91556 - DNA, 19 bp, Artificial Sequence
  Synthetic
ccucctcuagcaggcggat

SEQ ID NO: 91557 - DNA, 23 bp, Artificial Sequence
  Synthetic
ctccttgugaagacatgguccaa

SEQ ID NO: 91558 - DNA, 24 bp, Artificial Sequence
  Synthetic
ctgagtaacuccttcccattugct

SEQ ID NO: 91559 - DNA, 24 bp, Artificial Sequence
  Synthetic
ccagaattccuatgggtcacucac

SEQ ID NO: 91560 - DNA, 19 bp, Artificial Sequence
  Synthetic
ctgccuggagggcttcuac

SEQ ID NO: 91561 - DNA, 26 bp, Artificial Sequence
  Synthetic
ggaaaaacaagucactccaaaugcaa

SEQ ID NO: 91562 - DNA, 27 bp, Artificial Sequence
  Synthetic
aatttcagtgaugtgtgtggaattugg

SEQ ID NO: 91563 - DNA, 24 bp, Artificial Sequence
  Synthetic
attattgaauggaggctgccauga

SEQ ID NO: 91564 - DNA, 26 bp, Artificial Sequence
  Synthetic
tcccaguatcactatuccagaaacca

SEQ ID NO: 91565 - DNA, 25 bp, Artificial Sequence
  Synthetic
gacttcaaaguggagttccugagaa

SEQ ID NO: 91566 - DNA, 27 bp, Artificial Sequence
  Synthetic
acattatgtttcugcacctagttgugt

SEQ ID NO: 91567 - DNA, 21 bp, Artificial Sequence
  Synthetic
ttccaggaagcautgccauca

SEQ ID NO: 91568 - DNA, 23 bp, Artificial Sequence
  Synthetic
ccautgggagtuaaaaggcacaa

SEQ ID NO: 91569 - DNA, 29 bp, Artificial Sequence
  Synthetic
agagattgaggcaguctaatagttuacga

SEQ ID NO: 91570 - DNA, 20 bp, Artificial Sequence
  Synthetic
accgggaauctccagcucat

SEQ ID NO: 91571 - DNA, 28 bp, Artificial Sequence
  Synthetic
ggttctaaactacugagaatgaagcuca

SEQ ID NO: 91572 - DNA, 21 bp, Artificial Sequence
  Synthetic
gggaagtgacugtagcctgug

SEQ ID NO: 91573 - DNA, 25 bp, Artificial Sequence
  Synthetic
aggctgaagcucttgccatttauag

SEQ ID NO: 91574 - DNA, 25 bp, Artificial Sequence
  Synthetic
ctaaggcuccaaacaataagugcaa

SEQ ID NO: 91575 - DNA, 22 bp, Artificial Sequence
  Synthetic
cagtgtaccucatcctgtcucc

SEQ ID NO: 91576 - DNA, 24 bp, Artificial Sequence
  Synthetic
gctcacgucacctcttcttttcua

SEQ ID NO: 91577 - DNA, 21 bp, Artificial Sequence
  Synthetic
agcagtgagguggtactcuga

SEQ ID NO: 91578 - DNA, 27 bp, Artificial Sequence
  Synthetic
aggagtcacuccaggaatauacaagaa

SEQ ID NO: 91579 - DNA, 28 bp, Artificial Sequence
  Synthetic
ctcttggcacuctcttaacttgttuact

SEQ ID NO: 91580 - DNA, 26 bp, Artificial Sequence
  Synthetic
catgttggtaaugtcgttgaagucac

SEQ ID NO: 91581 - DNA, 28 bp, Artificial Sequence
  Synthetic
tccaaagtccaaacuaaacatcagtcut

SEQ ID NO: 91582 - DNA, 21 bp, Artificial Sequence
  Synthetic
ggagaggagcagccutgaauc

SEQ ID NO: 91583 - DNA, 23 bp, Artificial Sequence
  Synthetic
ggaggtgtcuctctttctcccua

SEQ ID NO: 91584 - DNA, 21 bp, Artificial Sequence
  Synthetic
tcaccagcuacatggcctcua

SEQ ID NO: 91585 - DNA, 23 bp, Artificial Sequence
  Synthetic
ctgctcttuccagtaccuccaag

SEQ ID NO: 91586 - DNA, 28 bp, Artificial Sequence
  Synthetic
acaaggctcucattttacatugcaaaaa

SEQ ID NO: 91587 - DNA, 25 bp, Artificial Sequence
  Synthetic
ttcatggaaaauggagccctagaug

SEQ ID NO: 91588 - DNA, 25 bp, Artificial Sequence
  Synthetic
cttgctcttutgggtgttatucagt

SEQ ID NO: 91589 - DNA, 25 bp, Artificial Sequence
  Synthetic
ggtcttgtguccttcaaattctucc

SEQ ID NO: 91590 - DNA, 21 bp, Artificial Sequence
  Synthetic
tgaaugggaccaucaccaacc

SEQ ID NO: 91591 - DNA, 25 bp, Artificial Sequence
  Synthetic
gcggcatugctggtttaatttugaa

SEQ ID NO: 91592 - DNA, 28 bp, Artificial Sequence
  Synthetic
atcactttggtacutaccctgagaaaug

SEQ ID NO: 91593 - DNA, 21 bp, Artificial Sequence
  Synthetic
cctccagcucaggtuacgact

SEQ ID NO: 91594 - DNA, 28 bp, Artificial Sequence
  Synthetic
ttggagaaugacaggaucaagaaaaaga

SEQ ID NO: 91595 - DNA, 21 bp, Artificial Sequence
  Synthetic
aattcgagucgggaagucacc

SEQ ID NO: 91596 - DNA, 26 bp, Artificial Sequence
  Synthetic
cctatugaaagacagcagaucaagac

SEQ ID NO: 91597 - DNA, 24 bp, Artificial Sequence
  Synthetic
gaacagcuggaaaaatggacugaa

SEQ ID NO: 91598 - DNA, 22 bp, Artificial Sequence
  Synthetic
aagtggtugggctgacatugat

SEQ ID NO: 91599 - DNA, 24 bp, Artificial Sequence
  Synthetic
tgaggauaggaattcacucaggct

SEQ ID NO: 91600 - DNA, 21 bp, Artificial Sequence
  Synthetic
caggcatcucaccatgcucat

SEQ ID NO: 91601 - DNA, 22 bp, Artificial Sequence
  Synthetic
tcgatctcucaacacgttgucc

SEQ ID NO: 91602 - DNA, 23 bp, Artificial Sequence
  Synthetic
ttgcccttcacutcttccatgut

SEQ ID NO: 91603 - DNA, 21 bp, Artificial Sequence
  Synthetic
cugaggaaagctucccacaga

SEQ ID NO: 91604 - DNA, 20 bp, Artificial Sequence
  Synthetic
ggcuggaccgggagaatauc

SEQ ID NO: 91605 - DNA, 20 bp, Artificial Sequence
  Synthetic
gaacaaccgaugcgugaaca

SEQ ID NO: 91606 - DNA, 26 bp, Artificial Sequence
  Synthetic
tttttctggtguggtctctgaaugaa

SEQ ID NO: 91607 - DNA, 25 bp, Artificial Sequence
  Synthetic
ggaaacaccaaucatgugaaacagt

SEQ ID NO: 91608 - DNA, 21 bp, Artificial Sequence
  Synthetic
gcaaaaucctgugacacagca

SEQ ID NO: 91609 - DNA, 20 bp, Artificial Sequence
  Synthetic
accccagugacaggauggaa

SEQ ID NO: 91610 - DNA, 21 bp, Artificial Sequence
  Synthetic
aauggacacagggagtugacc

SEQ ID NO: 91611 - DNA, 28 bp, Artificial Sequence
  Synthetic
gcttgggagcacutcacatatacttuat

SEQ ID NO: 91612 - DNA, 21 bp, Artificial Sequence
  Synthetic
gtctgugccaagccatgatut

SEQ ID NO: 91613 - DNA, 24 bp, Artificial Sequence
  Synthetic
gaatacagcugacagtctcucagg

SEQ ID NO: 91614 - DNA, 23 bp, Artificial Sequence
  Synthetic
aagcutttgtgctugcaaaggaa

SEQ ID NO: 91615 - DNA, 24 bp, Artificial Sequence
  Synthetic
ctcttccattcuaggctacagcuc

SEQ ID NO: 91616 - DNA, 19 bp, Artificial Sequence
  Synthetic
ctccgaggcccagaugtug

SEQ ID NO: 91617 - DNA, 20 bp, Artificial Sequence
  Synthetic
agutcggatccuacccgagt

SEQ ID NO: 91618 - DNA, 26 bp, Artificial Sequence
  Synthetic
tgactttggagggaauttgacatcut

SEQ ID NO: 91619 - DNA, 23 bp, Artificial Sequence
  Synthetic
cacccctattugggcttcagaut

SEQ ID NO: 91620 - DNA, 24 bp, Artificial Sequence
  Synthetic
accttgttgcuttcgtggatcaua

SEQ ID NO: 91621 - DNA, 29 bp, Artificial Sequence
  Synthetic
tcatggaaattatgugttctggactgaut

SEQ ID NO: 91622 - DNA, 25 bp, Artificial Sequence
  Synthetic
tgatatcttcutcctgctctugcac

SEQ ID NO: 91623 - DNA, 24 bp, Artificial Sequence
  Synthetic
agcttcctatucctgagtctguga

SEQ ID NO: 91624 - DNA, 23 bp, Artificial Sequence
  Synthetic
agutcatgacgugaacgacaact

SEQ ID NO: 91625 - DNA, 22 bp, Artificial Sequence
  Synthetic
cagtgaaguggctgatgugaga

SEQ ID NO: 91626 - DNA, 25 bp, Artificial Sequence
  Synthetic
gctggcgaauacacttattactucc

SEQ ID NO: 91627 - DNA, 25 bp, Artificial Sequence
  Synthetic
aggaaaacgacaaacaaugguacct

SEQ ID NO: 91628 - DNA, 21 bp, Artificial Sequence
  Synthetic
cacgtttuggacctccaacug

SEQ ID NO: 91629 - DNA, 28 bp, Artificial Sequence
  Synthetic
ccttccatctcutatcagtgacatucat

SEQ ID NO: 91630 - DNA, 22 bp, Artificial Sequence
  Synthetic
tggaacuccagagcuccagaat

SEQ ID NO: 91631 - DNA, 27 bp, Artificial Sequence
  Synthetic
ggaaaagctgaguataatgcctctcut

SEQ ID NO: 91632 - DNA, 27 bp, Artificial Sequence
  Synthetic
tgcaagaagacagacucaattatgugt

SEQ ID NO: 91633 - DNA, 22 bp, Artificial Sequence
  Synthetic
tgaagatggugcatcctuggag

SEQ ID NO: 91634 - DNA, 20 bp, Artificial Sequence
  Synthetic
gctgtcacagugatccggua

SEQ ID NO: 91635 - DNA, 24 bp, Artificial Sequence
  Synthetic
ccaguggaaaaacagaatggcaut

SEQ ID NO: 91636 - DNA, 21 bp, Artificial Sequence
  Synthetic
cgcagggauttcacaaagugg

SEQ ID NO: 91637 - DNA, 26 bp, Artificial Sequence
  Synthetic
cactcaugtttctgacucaagggaaa

SEQ ID NO: 91638 - DNA, 28 bp, Artificial Sequence
  Synthetic
caatgtcaccucacttgttatcaaauct

SEQ ID NO: 91639 - DNA, 27 bp, Artificial Sequence
  Synthetic
ggtcagttcugatttttcacaatgugt

SEQ ID NO: 91640 - DNA, 21 bp, Artificial Sequence
  Synthetic
cccctgtgucgaaagcaugaa

SEQ ID NO: 91641 - DNA, 27 bp, Artificial Sequence
  Synthetic
acttggttgaaucttactgaccttugt

SEQ ID NO: 91642 - DNA, 28 bp, Artificial Sequence
  Synthetic
ccattgattcugttacttctgcucagat

SEQ ID NO: 91643 - DNA, 22 bp, Artificial Sequence
  Synthetic
cgggagcaugaaaagcaucaac

SEQ ID NO: 91644 - DNA, 25 bp, Artificial Sequence
  Synthetic
agaataaugaagagagggcttgcug

SEQ ID NO: 91645 - DNA, 23 bp, Artificial Sequence
  Synthetic
acagacaccucctcggctauaat

SEQ ID NO: 91646 - DNA, 28 bp, Artificial Sequence
  Synthetic
cagtgtacttgauggagtattcagugat

SEQ ID NO: 91647 - DNA, 28 bp, Artificial Sequence
  Synthetic
cctgtcctttcacutaaatcctccttua

SEQ ID NO: 91648 - DNA, 21 bp, Artificial Sequence
  Synthetic
gtcagtgcutgtcctgucgaa

SEQ ID NO: 91649 - DNA, 22 bp, Artificial Sequence
  Synthetic
caccugaacagttccatugcag

SEQ ID NO: 91650 - DNA, 28 bp, Artificial Sequence
  Synthetic
acaatgtaaugctttctatcugcagact

SEQ ID NO: 91651 - DNA, 21 bp, Artificial Sequence
  Synthetic
gaaccagagagugggcttuca

SEQ ID NO: 91652 - DNA, 28 bp, Artificial Sequence
  Synthetic
tgtgataccuctatctttaauccgcaga

SEQ ID NO: 91653 - DNA, 22 bp, Artificial Sequence
  Synthetic
atgguagagagggcauccagat

SEQ ID NO: 91654 - DNA, 22 bp, Artificial Sequence
  Synthetic
cagccucagggugaagagaaac

SEQ ID NO: 91655 - DNA, 22 bp, Artificial Sequence
  Synthetic
tcagaaacugtgccctttucct

SEQ ID NO: 91656 - DNA, 26 bp, Artificial Sequence
  Synthetic
accttgggaauggttaatttccugaa

SEQ ID NO: 91657 - DNA, 22 bp, Artificial Sequence
  Synthetic
agcgaggugtagttgaaaugct

SEQ ID NO: 91658 - DNA, 23 bp, Artificial Sequence
  Synthetic
aggcacttcacutgagtctctuc

SEQ ID NO: 91659 - DNA, 27 bp, Artificial Sequence
  Synthetic
acatgctttgtgutttctgtgtttgut

SEQ ID NO: 91660 - DNA, 27 bp, Artificial Sequence
  Synthetic
gaaagaaaaggauccaaaaagccucat

SEQ ID NO: 91661 - DNA, 21 bp, Artificial Sequence
  Synthetic
caccagguttggaaugggaca

SEQ ID NO: 91662 - DNA, 20 bp, Artificial Sequence
  Synthetic
ggacccguacttuggagcat

SEQ ID NO: 91663 - DNA, 22 bp, Artificial Sequence
  Synthetic
cccagaaggagaacuccuaccc

SEQ ID NO: 91664 - DNA, 18 bp, Artificial Sequence
  Synthetic
acgcacccgagugaauga

SEQ ID NO: 91665 - DNA, 19 bp, Artificial Sequence
  Synthetic
ggagcccaggaccucauct

SEQ ID NO: 91666 - DNA, 21 bp, Artificial Sequence
  Synthetic
aggctutgatcccucaggaac

SEQ ID NO: 91667 - DNA, 25 bp, Artificial Sequence
  Synthetic
gttgagggcacaugcagtagataut

SEQ ID NO: 91668 - DNA, 21 bp, Artificial Sequence
  Synthetic
gggttatgccugagcagttug

SEQ ID NO: 91669 - DNA, 27 bp, Artificial Sequence
  Synthetic
aaacagaatggguagtcaaggaagaug

SEQ ID NO: 91670 - DNA, 21 bp, Artificial Sequence
  Synthetic
gtacuccttgctuagcggaca

SEQ ID NO: 91671 - DNA, 22 bp, Artificial Sequence
  Synthetic
gtctagccutggctcacuaacc

SEQ ID NO: 91672 - DNA, 19 bp, Artificial Sequence
  Synthetic
gaagggccutaccgtcugt

SEQ ID NO: 91673 - DNA, 17 bp, Artificial Sequence
  Synthetic
cttccggcucgaucggt

SEQ ID NO: 91674 - DNA, 23 bp, Artificial Sequence
  Synthetic
gggttctccacutgatttccaut

SEQ ID NO: 91675 - DNA, 28 bp, Artificial Sequence
  Synthetic
gtttttcagcugtgagtttattctugct

SEQ ID NO: 91676 - DNA, 24 bp, Artificial Sequence
  Synthetic
tgttcccttcuccctctgttctua

SEQ ID NO: 91677 - DNA, 25 bp, Artificial Sequence
  Synthetic
gtccgatcuttcttaatcgucagga

SEQ ID NO: 91678 - DNA, 17 bp, Artificial Sequence
  Synthetic
cccgccuccaagtcuca

SEQ ID NO: 91679 - DNA, 18 bp, Artificial Sequence
  Synthetic
caggcccuacugcaaggt

SEQ ID NO: 91680 - DNA, 25 bp, Artificial Sequence
  Synthetic
agacaccucacttaggtagucacat

SEQ ID NO: 91681 - DNA, 26 bp, Artificial Sequence
  Synthetic
gctagcccacgcuaattatactttug

SEQ ID NO: 91682 - DNA, 23 bp, Artificial Sequence
  Synthetic
tttgttctcccuctgagcugaac

SEQ ID NO: 91683 - DNA, 24 bp, Artificial Sequence
  Synthetic
aggtagtgguaggaggaacaacuc

SEQ ID NO: 91684 - DNA, 17 bp, Artificial Sequence
  Synthetic
accucgugcagcagcaa

SEQ ID NO: 91685 - DNA, 19 bp, Artificial Sequence
  Synthetic
ccaccugaccactcctguc

SEQ ID NO: 91686 - DNA, 24 bp, Artificial Sequence
  Synthetic
gcacacaauacacacacatgcaut

SEQ ID NO: 91687 - DNA, 28 bp, Artificial Sequence
  Synthetic
atccctuagaaaaggaacaaaagctuct

SEQ ID NO: 91688 - DNA, 28 bp, Artificial Sequence
  Synthetic
ggagaatcagaagcutttgttcctttuc

SEQ ID NO: 91689 - DNA, 28 bp, Artificial Sequence
  Synthetic
gactcctccauatagtctactucacagt

SEQ ID NO: 91690 - DNA, 21 bp, Artificial Sequence
  Synthetic
gacccccgutgaagaaaguga

SEQ ID NO: 91691 - DNA, 28 bp, Artificial Sequence
  Synthetic
catatgtaaacacugacatgcagucaat

SEQ ID NO: 91692 - DNA, 23 bp, Artificial Sequence
  Synthetic
tgaatgctgugctgggaauaagt

SEQ ID NO: 91693 - DNA, 23 bp, Artificial Sequence
  Synthetic
gacagaagcuatccaggctguag

SEQ ID NO: 91694 - DNA, 20 bp, Artificial Sequence
  Synthetic
cttgcctcugcagtctguct

SEQ ID NO: 91695 - DNA, 25 bp, Artificial Sequence
  Synthetic
tgtgttgagtgugtttgatctcuga

SEQ ID NO: 91696 - DNA, 28 bp, Artificial Sequence
  Synthetic
ggtaaaccaaacaacutccacctcuaaa

SEQ ID NO: 91697 - DNA, 28 bp, Artificial Sequence
  Synthetic
ctgtcttactgucattcgaagagagtua

SEQ ID NO: 91698 - DNA, 28 bp, Artificial Sequence
  Synthetic
tcagaaactccauttacagcttcaacut

SEQ ID NO: 91699 - DNA, 25 bp, Artificial Sequence
  Synthetic
agaatattgtguaagcggtgcagut

SEQ ID NO: 91700 - DNA, 17 bp, Artificial Sequence
  Synthetic
cctuccccaggcucacc

SEQ ID NO: 91701 - DNA, 17 bp, Artificial Sequence
  Synthetic
agcgugcggttccugaa

SEQ ID NO: 91702 - DNA, 24 bp, Artificial Sequence
  Synthetic
ctctctttacagcuccatcaccug

SEQ ID NO: 91703 - DNA, 23 bp, Artificial Sequence
  Synthetic
acagcccaacccutaaacatugt

SEQ ID NO: 91704 - DNA, 20 bp, Artificial Sequence
  Synthetic
gcagcaaauccatgccacua

SEQ ID NO: 91705 - DNA, 21 bp, Artificial Sequence
  Synthetic
ccgaugacttcacauccaggt

SEQ ID NO: 91706 - DNA, 19 bp, Artificial Sequence
  Synthetic
ctcugcccggttttcugac

SEQ ID NO: 91707 - DNA, 20 bp, Artificial Sequence
  Synthetic
ttgcaaggcaggcuagugat

SEQ ID NO: 91708 - DNA, 28 bp, Artificial Sequence
  Synthetic
gatccaagaaguaagttctctggctuaa

SEQ ID NO: 91709 - DNA, 24 bp, Artificial Sequence
  Synthetic
tgtgttccttucggaagagatguc

SEQ ID NO: 91710 - DNA, 31 bp, Artificial Sequence
  Synthetic
ttttcctgtggautttaatagaacatcuggt

SEQ ID NO: 91711 - DNA, 28 bp, Artificial Sequence
  Synthetic
ccagtcatagucaaatcgctttagtugt

SEQ ID NO: 91712 - DNA, 21 bp, Artificial Sequence
  Synthetic
gataccguaaagcgcttgcug

SEQ ID NO: 91713 - DNA, 22 bp, Artificial Sequence
  Synthetic
acacctgcaacugtgtaaggut

SEQ ID NO: 91714 - DNA, 21 bp, Artificial Sequence
  Synthetic
ctgctctagccugccttctua

SEQ ID NO: 91715 - DNA, 21 bp, Artificial Sequence
  Synthetic
ccuccccacuccaaaccaaac

SEQ ID NO: 91716 - DNA, 20 bp, Artificial Sequence
  Synthetic
ccgtctucccctatggtcug

SEQ ID NO: 91717 - DNA, 20 bp, Artificial Sequence
  Synthetic
caggagacgagcuggugaag

SEQ ID NO: 91718 - DNA, 24 bp, Artificial Sequence
  Synthetic
caacacaacaaggcuctgugaaaa

SEQ ID NO: 91719 - DNA, 26 bp, Artificial Sequence
  Synthetic
tctggacttucacaccaacacatuat

SEQ ID NO: 91720 - DNA, 29 bp, Artificial Sequence
  Synthetic
acccaactuatatgttttatgugccagaa

SEQ ID NO: 91721 - DNA, 25 bp, Artificial Sequence
  Synthetic
agtaagttggaucaaggaggaguga

SEQ ID NO: 91722 - DNA, 28 bp, Artificial Sequence
  Synthetic
accttaaagagcagutcaggatuagaga

SEQ ID NO: 91723 - DNA, 33 bp, Artificial Sequence
  Synthetic
tattgatttttggaagauatttgattgccuaaa

SEQ ID NO: 91724 - DNA, 23 bp, Artificial Sequence
  Synthetic
gttacucccacagggaacacaut

SEQ ID NO: 91725 - DNA, 22 bp, Artificial Sequence
  Synthetic
catcugcaccacagaaccucat

SEQ ID NO: 91726 - DNA, 27 bp, Artificial Sequence
  Synthetic
cctaaccccaggauggtataattggua

SEQ ID NO: 91727 - DNA, 21 bp, Artificial Sequence
  Synthetic
gtgtgauggagaggacgacug

SEQ ID NO: 91728 - DNA, 21 bp, Artificial Sequence
  Synthetic
gggctgtuaccactggaacuc

SEQ ID NO: 91729 - DNA, 21 bp, Artificial Sequence
  Synthetic
gacgggtcagucctggattua

SEQ ID NO: 91730 - DNA, 27 bp, Artificial Sequence
  Synthetic
tuttgagcaacaucaacaacagacaat

SEQ ID NO: 91731 - DNA, 21 bp, Artificial Sequence
  Synthetic
gaacucaccccatgtgaugga

SEQ ID NO: 91732 - DNA, 22 bp, Artificial Sequence
  Synthetic
gtgaagucactggcatugaggt

SEQ ID NO: 91733 - DNA, 28 bp, Artificial Sequence
  Synthetic
gaggatgaaacuctgtaaggtggatuaa

SEQ ID NO: 91734 - DNA, 23 bp, Artificial Sequence
  Synthetic
gaatttccucgagagcuggacat

SEQ ID NO: 91735 - DNA, 24 bp, Artificial Sequence
  Synthetic
agtctgtattutgtgcttccugct

SEQ ID NO: 91736 - DNA, 24 bp, Artificial Sequence
  Synthetic
gatcguaataggcaucacaccagt

SEQ ID NO: 91737 - DNA, 22 bp, Artificial Sequence
  Synthetic
gattgagaaggccuggauggat

SEQ ID NO: 91738 - DNA, 21 bp, Artificial Sequence
  Synthetic
ggagctgggcuggatctctua

SEQ ID NO: 91739 - DNA, 27 bp, Artificial Sequence
  Synthetic
gtcaccagaaguacaagagttctctut

SEQ ID NO: 91740 - DNA, 27 bp, Artificial Sequence
  Synthetic
cttactgtgguttggttgatgtugaaa

SEQ ID NO: 91741 - DNA, 21 bp, Artificial Sequence
  Synthetic
gccccacacagaucctttugt

SEQ ID NO: 91742 - DNA, 25 bp, Artificial Sequence
  Synthetic
aggtatcagugatgtctgcattucc

SEQ ID NO: 91743 - DNA, 28 bp, Artificial Sequence
  Synthetic
acttgggaacatucaaacttggaaguaa

SEQ ID NO: 91744 - DNA, 22 bp, Artificial Sequence
  Synthetic
ggcttcaucagagttgtcucca

SEQ ID NO: 91745 - DNA, 28 bp, Artificial Sequence
  Synthetic
ggcactgattacuctgaatctctttgut

SEQ ID NO: 91746 - DNA, 26 bp, Artificial Sequence
  Synthetic
gatttctcttugggacaacagucaag

SEQ ID NO: 91747 - DNA, 28 bp, Artificial Sequence
  Synthetic
ccacagtataucctaagggaatucaagg

SEQ ID NO: 91748 - DNA, 27 bp, Artificial Sequence
  Synthetic
cattcgcgtauctattctttggttugt

SEQ ID NO: 91749 - DNA, 28 bp, Artificial Sequence
  Synthetic
ctggtggtttucagtattgattttgugt

SEQ ID NO: 91750 - DNA, 24 bp, Artificial Sequence
  Synthetic
agagtgagcaguctgaaagugaga

SEQ ID NO: 91751 - DNA, 27 bp, Artificial Sequence
  Synthetic
tcaccaucatcaaatttauaccagcga

SEQ ID NO: 91752 - DNA, 22 bp, Artificial Sequence
  Synthetic
tgcaatguccattggtguccaa

SEQ ID NO: 91753 - DNA, 24 bp, Artificial Sequence
  Synthetic
gaaggaccaaaaugtgaggtugac

SEQ ID NO: 91754 - DNA, 25 bp, Artificial Sequence
  Synthetic
tcacaaaaatcugccgattgaaucc

SEQ ID NO: 91755 - DNA, 28 bp, Artificial Sequence
  Synthetic
ggctggttgtaauaacatgtatgcatut

SEQ ID NO: 91756 - DNA, 24 bp, Artificial Sequence
  Synthetic
tcccattucagcatgctcaauaca

SEQ ID NO: 91757 - DNA, 22 bp, Artificial Sequence
  Synthetic
gtctgccugtaaacagctucac

SEQ ID NO: 91758 - DNA, 22 bp, Artificial Sequence
  Synthetic
caacttacccuggcatctguga

SEQ ID NO: 91759 - DNA, 20 bp, Artificial Sequence
  Synthetic
gucaccaatacuggccagca

SEQ ID NO: 91760 - DNA, 27 bp, Artificial Sequence
  Synthetic
tgtacaagtacagguttgtcacatuga

SEQ ID NO: 91761 - DNA, 28 bp, Artificial Sequence
  Synthetic
aattaagaaaactcuactggaccgaugg

SEQ ID NO: 91762 - DNA, 26 bp, Artificial Sequence
  Synthetic
aatatattaugcagaagcccagcuct

SEQ ID NO: 91763 - DNA, 28 bp, Artificial Sequence
  Synthetic
agctcacctaauttactgttttgucaca

SEQ ID NO: 91764 - DNA, 23 bp, Artificial Sequence
  Synthetic
ggaatgguggagatggugagaga

SEQ ID NO: 91765 - DNA, 20 bp, Artificial Sequence
  Synthetic
ccttttcuggcgcctgtaug

SEQ ID NO: 91766 - DNA, 22 bp, Artificial Sequence
  Synthetic
attgtgttuccatcgguccagt

SEQ ID NO: 91767 - DNA, 28 bp, Artificial Sequence
  Synthetic
ggacaatttuggagttttcugaaaagaa

SEQ ID NO: 91768 - DNA, 21 bp, Artificial Sequence
  Synthetic
cccatggcaccutacacacut

SEQ ID NO: 91769 - DNA, 27 bp, Artificial Sequence
  Synthetic
gccaccactautgtgtgaattcugaat

SEQ ID NO: 91770 - DNA, 25 bp, Artificial Sequence
  Synthetic
attcaacacutccatcauccccaat

SEQ ID NO: 91771 - DNA, 31 bp, Artificial Sequence
  Synthetic
aaatgaaagggucaccttaattatgacugaa

SEQ ID NO: 91772 - DNA, 19 bp, Artificial Sequence
  Synthetic
ggtggacgcccugaagaug

SEQ ID NO: 91773 - DNA, 21 bp, Artificial Sequence
  Synthetic
tctctatggcagguctgggut

SEQ ID NO: 91774 - DNA, 21 bp, Artificial Sequence
  Synthetic
tgctggacuggtgagctctua

SEQ ID NO: 91775 - DNA, 21 bp, Artificial Sequence
  Synthetic
tgcggatggugttcaggttut

SEQ ID NO: 91776 - DNA, 27 bp, Artificial Sequence
  Synthetic
tccacaacaacacutgtcatactucaa

SEQ ID NO: 91777 - DNA, 27 bp, Artificial Sequence
  Synthetic
tgtaattccaacggutctgtatgtguc

SEQ ID NO: 91778 - DNA, 22 bp, Artificial Sequence
  Synthetic
gaagcuccagatcaaucagggt

SEQ ID NO: 91779 - DNA, 28 bp, Artificial Sequence
  Synthetic
gcacctgtgatucaatgattttgtguat

SEQ ID NO: 91780 - DNA, 28 bp, Artificial Sequence
  Synthetic
cttaatgagccuttacctacatgtucca

SEQ ID NO: 91781 - DNA, 28 bp, Artificial Sequence
  Synthetic
tcatgtgggaagutatgtcttauggaga

SEQ ID NO: 91782 - DNA, 28 bp, Artificial Sequence
  Synthetic
ttgatttgacatgucccaataaggtcut

SEQ ID NO: 91783 - DNA, 22 bp, Artificial Sequence
  Synthetic
autccagtaagguggacagcac

SEQ ID NO: 91784 - DNA, 21 bp, Artificial Sequence
  Synthetic
gctaccuccccagctttucaa

SEQ ID NO: 91785 - DNA, 21 bp, Artificial Sequence
  Synthetic
ccatuacaggacccggatgug

SEQ ID NO: 91786 - DNA, 23 bp, Artificial Sequence
  Synthetic
ttcctgatcauccaatggcaugt

SEQ ID NO: 91787 - DNA, 24 bp, Artificial Sequence
  Synthetic
cauttcagttggucagaggaacca

SEQ ID NO: 91788 - DNA, 22 bp, Artificial Sequence
  Synthetic
ggaagaagucagtggcuacgat

SEQ ID NO: 91789 - DNA, 22 bp, Artificial Sequence
  Synthetic
gctgcaguctctcacagugaag

SEQ ID NO: 91790 - DNA, 22 bp, Artificial Sequence
  Synthetic
atttccggtacuggatggctuc

SEQ ID NO: 91791 - DNA, 22 bp, Artificial Sequence
  Synthetic
gtagaccugatgctgcugaact

SEQ ID NO: 91792 - DNA, 28 bp, Artificial Sequence
  Synthetic
atgagaagacagugaataccttagucct

SEQ ID NO: 91793 - DNA, 27 bp, Artificial Sequence
  Synthetic
ggttactcttgcutgactctatgtuct

SEQ ID NO: 91794 - DNA, 26 bp, Artificial Sequence
  Synthetic
gtgtatgtgaaccugttggtttccua

SEQ ID NO: 91795 - DNA, 21 bp, Artificial Sequence
  Synthetic
acaugauccagcagagaaccc

SEQ ID NO: 91796 - DNA, 26 bp, Artificial Sequence
  Synthetic
ctggcctaattuctttggttgaaguc

SEQ ID NO: 91797 - DNA, 26 bp, Artificial Sequence
  Synthetic
tgactatatctacutcccagccucac

SEQ ID NO: 91798 - DNA, 26 bp, Artificial Sequence
  Synthetic
accaugaagattaugacccacaaact

SEQ ID NO: 91799 - DNA, 27 bp, Artificial Sequence
  Synthetic
ccaacaaagaccaagcuatacagtcua

SEQ ID NO: 91800 - DNA, 29 bp, Artificial Sequence
  Synthetic
ctgatagcctgacucttaagttcattuca

SEQ ID NO: 91801 - DNA, 24 bp, Artificial Sequence
  Synthetic
gcgcacaatguagtaactcaggut

SEQ ID NO: 91802 - DNA, 28 bp, Artificial Sequence
  Synthetic
tcaactggctautttgaaattcctugat

SEQ ID NO: 91803 - DNA, 28 bp, Artificial Sequence
  Synthetic
cagtctaggaaaaautgaaaggtgugaa

SEQ ID NO: 91804 - DNA, 22 bp, Artificial Sequence
  Synthetic
cccaucgcatcuacacagagat

SEQ ID NO: 91805 - DNA, 21 bp, Artificial Sequence
  Synthetic
ccucagaccagaaggcugact

SEQ ID NO: 91806 - DNA, 25 bp, Artificial Sequence
  Synthetic
agctcttgggucagtccttatttuc

SEQ ID NO: 91807 - DNA, 24 bp, Artificial Sequence
  Synthetic
gcctgggcauagagtaccattcua

SEQ ID NO: 91808 - DNA, 23 bp, Artificial Sequence
  Synthetic
acatgtctcugggatccatcgua

SEQ ID NO: 91809 - DNA, 28 bp, Artificial Sequence
  Synthetic
tcatgagatcuactctgacugggaaaaa

SEQ ID NO: 91810 - DNA, 25 bp, Artificial Sequence
  Synthetic
agcttgtcacucaatatttgccuct

SEQ ID NO: 91811 - DNA, 23 bp, Artificial Sequence
  Synthetic
agaattccuccaggcttctcuca

SEQ ID NO: 91812 - DNA, 23 bp, Artificial Sequence
  Synthetic
cctaaagguaaaaggugcaccct

SEQ ID NO: 91813 - DNA, 22 bp, Artificial Sequence
  Synthetic
ggacctccaccuctgagctaut

SEQ ID NO: 91814 - DNA, 21 bp, Artificial Sequence
  Synthetic
gtacugaccaccactugagca

SEQ ID NO: 91815 - DNA, 27 bp, Artificial Sequence
  Synthetic
atagcttggtatugccatgtttctaut

SEQ ID NO: 91816 - DNA, 32 bp, Artificial Sequence
  Synthetic
gttttaaaagaagagaaucatgagaactuggg

SEQ ID NO: 91817 - DNA, 26 bp, Artificial Sequence
  Synthetic
tctttcaagttcauctccaagccaut

SEQ ID NO: 91818 - DNA, 20 bp, Artificial Sequence
  Synthetic
caggtgcgcuaacatcgaut

SEQ ID NO: 91819 - DNA, 28 bp, Artificial Sequence
  Synthetic
atgcggtaaattucggaaacacataaut

SEQ ID NO: 91820 - DNA, 27 bp, Artificial Sequence
  Synthetic
agcuattcccactauaagggagaaagg

SEQ ID NO: 91821 - DNA, 24 bp, Artificial Sequence
  Synthetic
agcttctacaacutggcagtctug

SEQ ID NO: 91822 - DNA, 21 bp, Artificial Sequence
  Synthetic
ccuaagaagcucacacccagt

SEQ ID NO: 91823 - DNA, 23 bp, Artificial Sequence
  Synthetic
gctcgcaacaucctagucaacag

SEQ ID NO: 91824 - DNA, 20 bp, Artificial Sequence
  Synthetic
caccccagacugcagacauc

SEQ ID NO: 91825 - DNA, 18 bp, Artificial Sequence
  Synthetic
gcatctccuggccctuca

SEQ ID NO: 91826 - DNA, 21 bp, Artificial Sequence
  Synthetic
gugccagttugacccagagat

SEQ ID NO: 91827 - DNA, 28 bp, Artificial Sequence
  Synthetic
agaagacatgaagacautgttcgagaut

SEQ ID NO: 91828 - DNA, 21 bp, Artificial Sequence
  Synthetic
tgaagtggaacccuccctcuc

SEQ ID NO: 91829 - DNA, 24 bp, Artificial Sequence
  Synthetic
gcacatuacaaccacaggaaugaa

SEQ ID NO: 91830 - DNA, 22 bp, Artificial Sequence
  Synthetic
gacuctgtcatugccaccaaga

SEQ ID NO: 91831 - DNA, 22 bp, Artificial Sequence
  Synthetic
autccgaguaagaggcccaaag

SEQ ID NO: 91832 - DNA, 27 bp, Artificial Sequence
  Synthetic
cagggcaauggagatctuaaaagaaag

SEQ ID NO: 91833 - DNA, 24 bp, Artificial Sequence
  Synthetic
accattggacguttcattgcttug

SEQ ID NO: 91834 - DNA, 21 bp, Artificial Sequence
  Synthetic
agacacttugcagacgaggut

SEQ ID NO: 91835 - DNA, 20 bp, Artificial Sequence
  Synthetic
ccacccuatctgctcuccag

SEQ ID NO: 91836 - DNA, 27 bp, Artificial Sequence
  Synthetic
aacacagagacaaaaccutttcaggua

SEQ ID NO: 91837 - DNA, 22 bp, Artificial Sequence
  Synthetic
gaggatccagacugtgcagaug

SEQ ID NO: 91838 - DNA, 28 bp, Artificial Sequence
  Synthetic
aatcctcaguacacttacaacaatuggt

SEQ ID NO: 91839 - DNA, 25 bp, Artificial Sequence
  Synthetic
ctcttccatutctatctgcugcaca

SEQ ID NO: 91840 - DNA, 24 bp, Artificial Sequence
  Synthetic
caactcaccugatttcatguccct

SEQ ID NO: 91841 - DNA, 24 bp, Artificial Sequence
  Synthetic
atagccaaccauccacctgatuac

SEQ ID NO: 91842 - DNA, 17 bp, Artificial Sequence
  Synthetic
tcccugaucggccacct

SEQ ID NO: 91843 - DNA, 24 bp, Artificial Sequence
  Synthetic
gggtgacaccuacttgataaacug

SEQ ID NO: 91844 - DNA, 26 bp, Artificial Sequence
  Synthetic
atgaagguaaacacagaagucaggag

SEQ ID NO: 91845 - DNA, 26 bp, Artificial Sequence
  Synthetic
tcatagtctcuggaaacacugcaaaa

SEQ ID NO: 91846 - DNA, 23 bp, Artificial Sequence
  Synthetic
agcagggaaaaugtactttgcut

SEQ ID NO: 91847 - DNA, 21 bp, Artificial Sequence
  Synthetic
acggtgtttuggatgctguca

SEQ ID NO: 91848 - DNA, 22 bp, Artificial Sequence
  Synthetic
ctgugagaccctgtgugaagac

SEQ ID NO: 91849 - DNA, 21 bp, Artificial Sequence
  Synthetic
agaacccuctggagugaggac

SEQ ID NO: 91850 - DNA, 25 bp, Artificial Sequence
  Synthetic
tgaactctguccagaggagguaaaa

SEQ ID NO: 91851 - DNA, 27 bp, Artificial Sequence
  Synthetic
ccagccgaauaaacattttucaaaacc

SEQ ID NO: 91852 - DNA, 20 bp, Artificial Sequence
  Synthetic
gcagttggccucgtctgaug

SEQ ID NO: 91853 - DNA, 28 bp, Artificial Sequence
  Synthetic
ctccaaagctacautttaatggcagtut

SEQ ID NO: 91854 - DNA, 28 bp, Artificial Sequence
  Synthetic
gactcaaagcaguctttcctactuaaca

SEQ ID NO: 91855 - DNA, 20 bp, Artificial Sequence
  Synthetic
gggttggtaucggaggcauc

SEQ ID NO: 91856 - DNA, 24 bp, Artificial Sequence
  Synthetic
tgctgugagaaaacaagugacagt

SEQ ID NO: 91857 - DNA, 27 bp, Artificial Sequence
  Synthetic
tgtataccctaaauttcagccacctug

SEQ ID NO: 91858 - DNA, 21 bp, Artificial Sequence
  Synthetic
gggcuactuagacccagagaa

SEQ ID NO: 91859 - DNA, 20 bp, Artificial Sequence
  Synthetic
ggcttggugaggagtgtguc

SEQ ID NO: 91860 - DNA, 28 bp, Artificial Sequence
  Synthetic
acatgtaaatgcauctcacctgtatcug

SEQ ID NO: 91861 - DNA, 28 bp, Artificial Sequence
  Synthetic
cccgcactacautgatgtactaattugt

SEQ ID NO: 91862 - DNA, 23 bp, Artificial Sequence
  Synthetic
gccagtgacautatcccaaggug

SEQ ID NO: 91863 - DNA, 28 bp, Artificial Sequence
  Synthetic
agattccatctaccutcattctcccuaa

SEQ ID NO: 91864 - DNA, 24 bp, Artificial Sequence
  Synthetic
atgagacacguttcaacacugact

SEQ ID NO: 91865 - DNA, 20 bp, Artificial Sequence
  Synthetic
gagacctuacgacgggtugg

SEQ ID NO: 91866 - DNA, 20 bp, Artificial Sequence
  Synthetic
cttacctuggaaggccguct

SEQ ID NO: 91867 - DNA, 22 bp, Artificial Sequence
  Synthetic
gcagtcgcuggagattatcuct

SEQ ID NO: 91868 - DNA, 23 bp, Artificial Sequence
  Synthetic
gcccaatacutcaagaaggugct

SEQ ID NO: 91869 - DNA, 20 bp, Artificial Sequence
  Synthetic
ggcaaggcacugagaagugt

SEQ ID NO: 91870 - DNA, 25 bp, Artificial Sequence
  Synthetic
tgaggcttaugatgagagugaggat

SEQ ID NO: 91871 - DNA, 26 bp, Artificial Sequence
  Synthetic
ctccaccctuggatttgtcatactua

SEQ ID NO: 91872 - DNA, 26 bp, Artificial Sequence
  Synthetic
ctttgtgagtucctttttgtgaccut

SEQ ID NO: 91873 - DNA, 27 bp, Artificial Sequence
  Synthetic
aatgtggatatgutttcagttgcaguc

SEQ ID NO: 91874 - DNA, 27 bp, Artificial Sequence
  Synthetic
acaatacattgacuccacactcttucc

SEQ ID NO: 91875 - DNA, 22 bp, Artificial Sequence
  Synthetic
agagggtggugtgacctcttua

SEQ ID NO: 91876 - DNA, 27 bp, Artificial Sequence
  Synthetic
tttatgttacuggaccaacctttgugt

SEQ ID NO: 91877 - DNA, 28 bp, Artificial Sequence
  Synthetic
ggaaccaaucagagtgttgtcauagaaa

SEQ ID NO: 91878 - DNA, 29 bp, Artificial Sequence
  Synthetic
acccggcctatuatttcatttcttacauc

SEQ ID NO: 91879 - DNA, 28 bp, Artificial Sequence
  Synthetic
acttgcatccagcuaaacctaaagatut

SEQ ID NO: 91880 - DNA, 23 bp, Artificial Sequence
  Synthetic
ccaccaggutaaugaaagccgaa

SEQ ID NO: 91881 - DNA, 28 bp, Artificial Sequence
  Synthetic
agtgattcgtgautgaatggtacaaugt

SEQ ID NO: 91882 - DNA, 21 bp, Artificial Sequence
  Synthetic
tgctucaccagcaguaccaaa

SEQ ID NO: 91883 - DNA, 28 bp, Artificial Sequence
  Synthetic
cgtguagaaagtaatcauggcaagaagt

SEQ ID NO: 91884 - DNA, 23 bp, Artificial Sequence
  Synthetic
gaccaguagatguaagccccaaa

SEQ ID NO: 91885 - DNA, 29 bp, Artificial Sequence
  Synthetic
aggaaaataaattguactggtgtgaugct

SEQ ID NO: 91886 - DNA, 23 bp, Artificial Sequence
  Synthetic
gttagctgucggtgaagttucca

SEQ ID NO: 91887 - DNA, 27 bp, Artificial Sequence
  Synthetic
tgatatugttagcccaucacggaaaaa

SEQ ID NO: 91888 - DNA, 18 bp, Artificial Sequence
  Synthetic
tgugcgagcaucacacca

SEQ ID NO: 91889 - DNA, 28 bp, Artificial Sequence
  Synthetic
actatgaggtcugttggatttctttuca

SEQ ID NO: 91890 - DNA, 20 bp, Artificial Sequence
  Synthetic
tctgggtgucagagccctua

SEQ ID NO: 91891 - DNA, 22 bp, Artificial Sequence
  Synthetic
cctgaucagcagcctttcctuc

SEQ ID NO: 91892 - DNA, 28 bp, Artificial Sequence
  Synthetic
gttagtgccauaggtctagaaatctugg

SEQ ID NO: 91893 - DNA, 28 bp, Artificial Sequence
  Synthetic
ctcccagagaauctgtaaacaaaaucag

SEQ ID NO: 91894 - DNA, 24 bp, Artificial Sequence
  Synthetic
gttaaaagugaagcatgucagcga

SEQ ID NO: 91895 - DNA, 28 bp, Artificial Sequence
  Synthetic
ctcacaggcaucactatgtaaatcugat

SEQ ID NO: 91896 - DNA, 28 bp, Artificial Sequence
  Synthetic
attaacacagagaaacutacttgggcut

SEQ ID NO: 91897 - DNA, 22 bp, Artificial Sequence
  Synthetic
gggtggcauatttaggctgcua

SEQ ID NO: 91898 - DNA, 21 bp, Artificial Sequence
  Synthetic
gtgagggccaagugaauggaa

SEQ ID NO: 91899 - DNA, 22 bp, Artificial Sequence
  Synthetic
actctggtucagtcagctucct

SEQ ID NO: 91900 - DNA, 24 bp, Artificial Sequence
  Synthetic
actcttttcucaatgtggctcucc

SEQ ID NO: 91901 - DNA, 21 bp, Artificial Sequence
  Synthetic
actgugcgccacattagugat

SEQ ID NO: 91902 - DNA, 23 bp, Artificial Sequence
  Synthetic
ctttggcaagutgcagactuagg

SEQ ID NO: 91903 - DNA, 28 bp, Artificial Sequence
  Synthetic
acggtccattuagaaacagaatttgcua

SEQ ID NO: 91904 - DNA, 25 bp, Artificial Sequence
  Synthetic
agacctggcacaaautcattagugt

SEQ ID NO: 91905 - DNA, 23 bp, Artificial Sequence
  Synthetic
gataagaaacugtggugggcaga

SEQ ID NO: 91906 - DNA, 25 bp, Artificial Sequence
  Synthetic
cacutcaacaccauacaaaagcaca

SEQ ID NO: 91907 - DNA, 28 bp, Artificial Sequence
  Synthetic
ccgatttaaugggactgatattcacuca

SEQ ID NO: 91908 - DNA, 28 bp, Artificial Sequence
  Synthetic
ggattccccaagcautctcaatttuaat

SEQ ID NO: 91909 - DNA, 29 bp, Artificial Sequence
  Synthetic
gttttgccctcuttataggttagacauct

SEQ ID NO: 91910 - DNA, 24 bp, Artificial Sequence
  Synthetic
aaatcagcccucatttggatguga

SEQ ID NO: 91911 - DNA, 23 bp, Artificial Sequence
  Synthetic
catcgagucatcactgcucaaca

SEQ ID NO: 91912 - DNA, 24 bp, Artificial Sequence
  Synthetic
gtggattttgaggauggacgtgua

SEQ ID NO: 91913 - DNA, 28 bp, Artificial Sequence
  Synthetic
cattattgagaagaacutcagcatuggg

SEQ ID NO: 91914 - DNA, 17 bp, Artificial Sequence
  Synthetic
agucccgcaccgguaga

SEQ ID NO: 91915 - DNA, 27 bp, Artificial Sequence
  Synthetic
caagaacttcuagattctggcagugat

SEQ ID NO: 91916 - DNA, 26 bp, Artificial Sequence
  Synthetic
auttccttctgtaauacacgagccat

SEQ ID NO: 91917 - DNA, 28 bp, Artificial Sequence
  Synthetic
caaatcaccaagaagaugggctactaua

SEQ ID NO: 91918 - DNA, 27 bp, Artificial Sequence
  Synthetic
tggcaccaatagautcattcagcaaua

SEQ ID NO: 91919 - DNA, 24 bp, Artificial Sequence
  Synthetic
aactcctcaagutttgcgctttut

SEQ ID NO: 91920 - DNA, 28 bp, Artificial Sequence
  Synthetic
cacgagccauggaaaacttgattaatut

SEQ ID NO: 91921 - DNA, 31 bp, Artificial Sequence
  Synthetic
cctttttgaagcuaaatgaatctaccttuga

SEQ ID NO: 91922 - DNA, 26 bp, Artificial Sequence
  Synthetic
gcccatcttcutggtgatttgaguat

SEQ ID NO: 91923 - DNA, 31 bp, Artificial Sequence
  Synthetic
gcatttttgactgutaaaattctgtctguct

SEQ ID NO: 91924 - DNA, 20 bp, Artificial Sequence
  Synthetic
gatgcacccutttcccguct

SEQ ID NO: 91925 - DNA, 19 bp, Artificial Sequence
  Synthetic
cacctggcuccactgtgua

SEQ ID NO: 91926 - DNA, 31 bp, Artificial Sequence
  Synthetic
gttttgcattcucacttttatatatgugcct

SEQ ID NO: 91927 - DNA, 27 bp, Artificial Sequence
  Synthetic
acaacacatccauggacttactugaat

SEQ ID NO: 91928 - DNA, 23 bp, Artificial Sequence
  Synthetic
gcccaggaacuaggaaagcaaug

SEQ ID NO: 91929 - DNA, 22 bp, Artificial Sequence
  Synthetic
tggugaaagggactguccagat

SEQ ID NO: 91930 - DNA, 25 bp, Artificial Sequence
  Synthetic
ggaattccagauctcagtgacugat

SEQ ID NO: 91931 - DNA, 21 bp, Artificial Sequence
  Synthetic
aatctgccaccugaaccugac

SEQ ID NO: 91932 - DNA, 21 bp, Artificial Sequence
  Synthetic
gcccacctutcgatctgacug

SEQ ID NO: 91933 - DNA, 21 bp, Artificial Sequence
  Synthetic
tcuaatccccugcacccaaga

SEQ ID NO: 91934 - DNA, 22 bp, Artificial Sequence
  Synthetic
tgggtcuaagggtacgtgugat

SEQ ID NO: 91935 - DNA, 20 bp, Artificial Sequence
  Synthetic
tggugtcctctuaccaggca

SEQ ID NO: 91936 - DNA, 26 bp, Artificial Sequence
  Synthetic
tcagaacattctcuagtaccccaguc

SEQ ID NO: 91937 - DNA, 23 bp, Artificial Sequence
  Synthetic
gaaautggtgatucgccaacagt

SEQ ID NO: 91938 - DNA, 21 bp, Artificial Sequence
  Synthetic
ctcgccagcccaucatgatua

SEQ ID NO: 91939 - DNA, 27 bp, Artificial Sequence
  Synthetic
tttaattcgcttuaggcattccatgug

SEQ ID NO: 91940 - DNA, 21 bp, Artificial Sequence
  Synthetic
gcctagauggaggtaccugga

SEQ ID NO: 91941 - DNA, 21 bp, Artificial Sequence
  Synthetic
caccggguctctgctttcuac

SEQ ID NO: 91942 - DNA, 28 bp, Artificial Sequence
  Synthetic
agttgctaatgggucagttttgtagaut

SEQ ID NO: 91943 - DNA, 24 bp, Artificial Sequence
  Synthetic
cgactcatgtucatctggagcauc

SEQ ID NO: 91944 - DNA, 21 bp, Artificial Sequence
  Synthetic
acacuacgagacccaggtuca

SEQ ID NO: 91945 - DNA, 23 bp, Artificial Sequence
  Synthetic
gcuggagatuaaaaacgccaaca

SEQ ID NO: 91946 - DNA, 23 bp, Artificial Sequence
  Synthetic
agtattgtttccutcgccctugt

SEQ ID NO: 91947 - DNA, 17 bp, Artificial Sequence
  Synthetic
ccuccuccggagccaga

SEQ ID NO: 91948 - DNA, 26 bp, Artificial Sequence
  Synthetic
ttcaaaatuaggagccagaugaccaa

SEQ ID NO: 91949 - DNA, 27 bp, Artificial Sequence
  Synthetic
gggataaaagcauaaactgactccugt

SEQ ID NO: 91950 - DNA, 27 bp, Artificial Sequence
  Synthetic
agagagagugtaagaaugaggaaacca

SEQ ID NO: 91951 - DNA, 20 bp, Artificial Sequence
  Synthetic
ctgggucctcttgauagcga

SEQ ID NO: 91952 - DNA, 28 bp, Artificial Sequence
  Synthetic
acacatugaacactcatuacagagacaa

SEQ ID NO: 91953 - DNA, 27 bp, Artificial Sequence
  Synthetic
ggagaacccuatgctattgcaguaaat

SEQ ID NO: 91954 - DNA, 28 bp, Artificial Sequence
  Synthetic
ctaagccatuaacctaccctctttuagg

SEQ ID NO: 91955 - DNA, 22 bp, Artificial Sequence
  Synthetic
ctcactggaccaguctgaggua

SEQ ID NO: 91956 - DNA, 28 bp, Artificial Sequence
  Synthetic
catcccaaauaaaaggaatgaagtcugg

SEQ ID NO: 91957 - DNA, 17 bp, Artificial Sequence
  Synthetic
cggcgggcacauacuca

SEQ ID NO: 91958 - DNA, 21 bp, Artificial Sequence
  Synthetic
tgtggaaagcucatcgctucc

SEQ ID NO: 91959 - DNA, 27 bp, Artificial Sequence
  Synthetic
tggacacagaguaatcttaatggcaut

SEQ ID NO: 91960 - DNA, 28 bp, Artificial Sequence
  Synthetic
gagaaagaaacaugagaaagtccuaggt

SEQ ID NO: 91961 - DNA, 22 bp, Artificial Sequence
  Synthetic
cgutcagtcctucccagaagag

SEQ ID NO: 91962 - DNA, 25 bp, Artificial Sequence
  Synthetic
ggaggtacttutgttccccaauaga

SEQ ID NO: 91963 - DNA, 28 bp, Artificial Sequence
  Synthetic
ggttttgttgatguctttagcagtguaa

SEQ ID NO: 91964 - DNA, 25 bp, Artificial Sequence
  Synthetic
ggatgaaatcatuccagtgctccut

SEQ ID NO: 91965 - DNA, 26 bp, Artificial Sequence
  Synthetic
cctactgtgacutgcactagtcatua

SEQ ID NO: 91966 - DNA, 20 bp, Artificial Sequence
  Synthetic
cgtgcuactcaagucaccca

SEQ ID NO: 91967 - DNA, 21 bp, Artificial Sequence
  Synthetic
tccctauccccatgctucact

SEQ ID NO: 91968 - DNA, 21 bp, Artificial Sequence
  Synthetic
cgcctccucagggcttattua

SEQ ID NO: 91969 - DNA, 22 bp, Artificial Sequence
  Synthetic
cgtccaagguttcctgactgug

SEQ ID NO: 91970 - DNA, 22 bp, Artificial Sequence
  Synthetic
cagctgcccuacgttgauagag

SEQ ID NO: 91971 - DNA, 26 bp, Artificial Sequence
  Synthetic
tggtgtgttgutttgtttccttguag

SEQ ID NO: 91972 - DNA, 28 bp, Artificial Sequence
  Synthetic
acctttaaatguagatccagctttgugt

SEQ ID NO: 91973 - DNA, 28 bp, Artificial Sequence
  Synthetic
aaatgtgtcctguttttcttttcctucc

SEQ ID NO: 91974 - DNA, 20 bp, Artificial Sequence
  Synthetic
ccgaugacgcagagggauaa

SEQ ID NO: 91975 - DNA, 18 bp, Artificial Sequence
  Synthetic
agcttcucgcaggtgucc

SEQ ID NO: 91976 - DNA, 21 bp, Artificial Sequence
  Synthetic
gaagaccucacgggacttuga

SEQ ID NO: 91977 - DNA, 21 bp, Artificial Sequence
  Synthetic
cctcuacccccttaacuccca

SEQ ID NO: 91978 - DNA, 20 bp, Artificial Sequence
  Synthetic
cuccatatcctugcggccaa

SEQ ID NO: 91979 - DNA, 23 bp, Artificial Sequence
  Synthetic
gtcttaccacuccatcccatgug

SEQ ID NO: 91980 - DNA, 23 bp, Artificial Sequence
  Synthetic
cctgtcactuctttccctaccuc

SEQ ID NO: 91981 - DNA, 23 bp, Artificial Sequence
  Synthetic
gcaatcttgaucacggccactua

SEQ ID NO: 91982 - DNA, 19 bp, Artificial Sequence
  Synthetic
cgatgtguagggccauggt

SEQ ID NO: 91983 - DNA, 19 bp, Artificial Sequence
  Synthetic
agtggcuggtggtttcugg

SEQ ID NO: 91984 - DNA, 21 bp, Artificial Sequence
  Synthetic
cactccctucaactggaccug

SEQ ID NO: 91985 - DNA, 26 bp, Artificial Sequence
  Synthetic
ctacatgcttuaggttctctggacut

SEQ ID NO: 91986 - DNA, 21 bp, Artificial Sequence
  Synthetic
cgcctgccugaggcttttuat

SEQ ID NO: 91987 - DNA, 22 bp, Artificial Sequence
  Synthetic
cggaggaugcggtcttattucc

SEQ ID NO: 91988 - DNA, 23 bp, Artificial Sequence
  Synthetic
gcctacgtugaccaactcttcua

SEQ ID NO: 91989 - DNA, 24 bp, Artificial Sequence
  Synthetic
gattggccaaaaccaaaucaggut

SEQ ID NO: 91990 - DNA, 21 bp, Artificial Sequence
  Synthetic
catggcaguaatggcctcuct

SEQ ID NO: 91991 - DNA, 19 bp, Artificial Sequence
  Synthetic
ggatgccgugaaccccauc

SEQ ID NO: 91992 - DNA, 25 bp, Artificial Sequence
  Synthetic
gaaguagagcagggaatatuggcat

SEQ ID NO: 91993 - DNA, 25 bp, Artificial Sequence
  Synthetic
gatgcaaggautcatcugcaaacag

SEQ ID NO: 91994 - DNA, 29 bp, Artificial Sequence
  Synthetic
tgaatcaatcaacugttccatgtagaugt

SEQ ID NO: 91995 - DNA, 24 bp, Artificial Sequence
  Synthetic
agaataattgcuactgccgcugaa

SEQ ID NO: 91996 - DNA, 20 bp, Artificial Sequence
  Synthetic
gccttucacaacacgcucat

SEQ ID NO: 91997 - DNA, 26 bp, Artificial Sequence
  Synthetic
tcccaatgaccucctcaatcttgaua

SEQ ID NO: 91998 - DNA, 21 bp, Artificial Sequence
  Synthetic
gtacgaccugactggccuaag

SEQ ID NO: 91999 - DNA, 24 bp, Artificial Sequence
  Synthetic
aaugaacagacgccaaucaagaga

SEQ ID NO: 92000 - DNA, 22 bp, Artificial Sequence
  Synthetic
ctccaaaggutatccgtguggt

SEQ ID NO: 92001 - DNA, 23 bp, Artificial Sequence
  Synthetic
gaattcccuccagtatgcucact

SEQ ID NO: 92002 - DNA, 21 bp, Artificial Sequence
  Synthetic
ccaaguggtcatgaucgccat

SEQ ID NO: 92003 - DNA, 22 bp, Artificial Sequence
  Synthetic
caaucaguggcagcaaacaaag

SEQ ID NO: 92004 - DNA, 28 bp, Artificial Sequence
  Synthetic
gtaccttattcttuccctccacaaacuc

SEQ ID NO: 92005 - DNA, 20 bp, Artificial Sequence
  Synthetic
tgtatcccugacctgcccut

SEQ ID NO: 92006 - DNA, 25 bp, Artificial Sequence
  Synthetic
caagaatuaggaccacttggucagt

SEQ ID NO: 92007 - DNA, 28 bp, Artificial Sequence
  Synthetic
gatggcaagagugatggattacaaauaa

SEQ ID NO: 92008 - DNA, 20 bp, Artificial Sequence
  Synthetic
ggccaggcauctcgtgaaua

SEQ ID NO: 92009 - DNA, 23 bp, Artificial Sequence
  Synthetic
cccattgaaauacgctcaggugt

SEQ ID NO: 92010 - DNA, 20 bp, Artificial Sequence
  Synthetic
cgggaagucgatcctgctua

SEQ ID NO: 92011 - DNA, 21 bp, Artificial Sequence
  Synthetic
tgtgtttggaugggactcugg

SEQ ID NO: 92012 - DNA, 20 bp, Artificial Sequence
  Synthetic
tgagccaggacugctccuaa

SEQ ID NO: 92013 - DNA, 22 bp, Artificial Sequence
  Synthetic
gagacctacauggactgaugcc

SEQ ID NO: 92014 - DNA, 25 bp, Artificial Sequence
  Synthetic
agaaagagguaatgctgaugccaaa

SEQ ID NO: 92015 - DNA, 27 bp, Artificial Sequence
  Synthetic
tgaaaggaaagaacugctuccaaagaa

SEQ ID NO: 92016 - DNA, 24 bp, Artificial Sequence
  Synthetic
gggaaaagccuaacaagactggut

SEQ ID NO: 92017 - DNA, 18 bp, Artificial Sequence
  Synthetic
tgtctgccaucgctggug

SEQ ID NO: 92018 - DNA, 29 bp, Artificial Sequence
  Synthetic
gccactgtctcucttataccaatttcuat

SEQ ID NO: 92019 - DNA, 28 bp, Artificial Sequence
  Synthetic
acaaattactccaauccggtataugcaa

SEQ ID NO: 92020 - DNA, 29 bp, Artificial Sequence
  Synthetic
tcgacagtttugcccatccatatataaut

SEQ ID NO: 92021 - DNA, 28 bp, Artificial Sequence
  Synthetic
cgattaggagauggacattcuaggaagt

SEQ ID NO: 92022 - DNA, 24 bp, Artificial Sequence
  Synthetic
tggaatggcugaaacatgttcuct

SEQ ID NO: 92023 - DNA, 20 bp, Artificial Sequence
  Synthetic
gatgtgtucctgccucgagt

SEQ ID NO: 92024 - DNA, 21 bp, Artificial Sequence
  Synthetic
gctgtgagcgcuaattctgug

SEQ ID NO: 92025 - DNA, 23 bp, Artificial Sequence
  Synthetic
acagtcacgucctcagaugagat

SEQ ID NO: 92026 - DNA, 23 bp, Artificial Sequence
  Synthetic
ccttctggaauacgtgaaugggt

SEQ ID NO: 92027 - DNA, 22 bp, Artificial Sequence
  Synthetic
acataaggcaacgcucagucaa

SEQ ID NO: 92028 - DNA, 27 bp, Artificial Sequence
  Synthetic
tcaatatctaugggaatccctgagugt

SEQ ID NO: 92029 - DNA, 25 bp, Artificial Sequence
  Synthetic
gaggtaactgaacuggcttcttgut

SEQ ID NO: 92030 - DNA, 22 bp, Artificial Sequence
  Synthetic
ccaggccacauagctcttcauc

SEQ ID NO: 92031 - DNA, 28 bp, Artificial Sequence
  Synthetic
agctggcatuagaaatgttttgattugt

SEQ ID NO: 92032 - DNA, 26 bp, Artificial Sequence
  Synthetic
tcaagttucacagagcttcuaaagca

SEQ ID NO: 92033 - DNA, 22 bp, Artificial Sequence
  Synthetic
aaauctctgugcaacacccagt

SEQ ID NO: 92034 - DNA, 23 bp, Artificial Sequence
  Synthetic
agaggtcaugagaagctggauga

SEQ ID NO: 92035 - DNA, 20 bp, Artificial Sequence
  Synthetic
ccugcccccatcuacagaca

SEQ ID NO: 92036 - DNA, 25 bp, Artificial Sequence
  Synthetic
gatggtattcacuacctgcatgcua

SEQ ID NO: 92037 - DNA, 28 bp, Artificial Sequence
  Synthetic
cactggtatcuacagacgacuagaaaag

SEQ ID NO: 92038 - DNA, 21 bp, Artificial Sequence
  Synthetic
gctgaaagaggcaaucgccut

SEQ ID NO: 92039 - DNA, 23 bp, Artificial Sequence
  Synthetic
ctgtacttggucatccggttcug

SEQ ID NO: 92040 - DNA, 22 bp, Artificial Sequence
  Synthetic
caccagaauaaggcaaggguga

SEQ ID NO: 92041 - DNA, 17 bp, Artificial Sequence
  Synthetic
cccagcccacccuctug

SEQ ID NO: 92042 - DNA, 28 bp, Artificial Sequence
  Synthetic
tgctgctttcutatttctcatctugact

SEQ ID NO: 92043 - DNA, 28 bp, Artificial Sequence
  Synthetic
gctttgatgccuatatcaggaactucat

SEQ ID NO: 92044 - DNA, 23 bp, Artificial Sequence
  Synthetic
auggaaatctatucccacggcaa

SEQ ID NO: 92045 - DNA, 22 bp, Artificial Sequence
  Synthetic
ttatctccggcccugcattuag

SEQ ID NO: 92046 - DNA, 21 bp, Artificial Sequence
  Synthetic
gggagtcacuaaaggcaacuc

SEQ ID NO: 92047 - DNA, 26 bp, Artificial Sequence
  Synthetic
tttcaggacaautatgccatctcucc

SEQ ID NO: 92048 - DNA, 23 bp, Artificial Sequence
  Synthetic
aagtcacttcuttgtctgcguga

SEQ ID NO: 92049 - DNA, 28 bp, Artificial Sequence
  Synthetic
accacaatcaucaccatctgaauaagag

SEQ ID NO: 92050 - DNA, 19 bp, Artificial Sequence
  Synthetic
ctgaauggcccccgaagua

SEQ ID NO: 92051 - DNA, 25 bp, Artificial Sequence
  Synthetic
aaaggcaacagaucccctaattugt

SEQ ID NO: 92052 - DNA, 25 bp, Artificial Sequence
  Synthetic
aaaacagacacugagaaaggccuaa

SEQ ID NO: 92053 - DNA, 24 bp, Artificial Sequence
  Synthetic
caccatcattucctttgcaggtuc

SEQ ID NO: 92054 - DNA, 25 bp, Artificial Sequence
  Synthetic
cctugagaacatcttucagccacaa

SEQ ID NO: 92055 - DNA, 29 bp, Artificial Sequence
  Synthetic
cagtgaaacaagutgaatgcgtaguaaaa

SEQ ID NO: 92056 - DNA, 22 bp, Artificial Sequence
  Synthetic
accaggguaaccggaatcauct

SEQ ID NO: 92057 - DNA, 28 bp, Artificial Sequence
  Synthetic
agccacaatguatagtgaattctguaaa

SEQ ID NO: 92058 - DNA, 23 bp, Artificial Sequence
  Synthetic
tgtttgtugaggacccagaugag

SEQ ID NO: 92059 - DNA, 20 bp, Artificial Sequence
  Synthetic
cccaagccucacgttugaca

SEQ ID NO: 92060 - DNA, 28 bp, Artificial Sequence
  Synthetic
ccaugaaagagaaaggaaacatucaact

SEQ ID NO: 92061 - DNA, 25 bp, Artificial Sequence
  Synthetic
gatatgaagaaugcaggacctcugg

SEQ ID NO: 92062 - DNA, 20 bp, Artificial Sequence
  Synthetic
gguaagggacggaccucagt

SEQ ID NO: 92063 - DNA, 21 bp, Artificial Sequence
  Synthetic
gcagaaggugcaggaacaguc

SEQ ID NO: 92064 - DNA, 28 bp, Artificial Sequence
  Synthetic
gtagacaaggtucaatgctaaaagcuac

SEQ ID NO: 92065 - DNA, 24 bp, Artificial Sequence
  Synthetic
gattgtcctgauggctctgaugaa

SEQ ID NO: 92066 - DNA, 27 bp, Artificial Sequence
  Synthetic
ctcatcagaaggacuttagccaatgua

SEQ ID NO: 92067 - DNA, 28 bp, Artificial Sequence
  Synthetic
ccaagtggaatgcuttactatctggtut

SEQ ID NO: 92068 - DNA, 24 bp, Artificial Sequence
  Synthetic
acatgcaauaccacagagauagcc

SEQ ID NO: 92069 - DNA, 27 bp, Artificial Sequence
  Synthetic
gattgcgaagaucagtcagaugaagat

SEQ ID NO: 92070 - DNA, 29 bp, Artificial Sequence
  Synthetic
aactgcagccutatcaagtatauggaaaa

SEQ ID NO: 92071 - DNA, 25 bp, Artificial Sequence
  Synthetic
actctgagugctagctaaguaacca

SEQ ID NO: 92072 - DNA, 28 bp, Artificial Sequence
  Synthetic
tctttttcttaugatcagcgttttugcc

SEQ ID NO: 92073 - DNA, 27 bp, Artificial Sequence
  Synthetic
gaaacaagaagcugctaacagtactut

SEQ ID NO: 92074 - DNA, 21 bp, Artificial Sequence
  Synthetic
tgttggagggcutcacatcug

SEQ ID NO: 92075 - DNA, 19 bp, Artificial Sequence
  Synthetic
tggcguaccuccgagagaa

SEQ ID NO: 92076 - DNA, 20 bp, Artificial Sequence
  Synthetic
gccttaccucggtgcaugat

SEQ ID NO: 92077 - DNA, 21 bp, Artificial Sequence
  Synthetic
ctctgacugctcagctcugac

SEQ ID NO: 92078 - DNA, 23 bp, Artificial Sequence
  Synthetic
augacaugagacacacagcacat

SEQ ID NO: 92079 - DNA, 24 bp, Artificial Sequence
  Synthetic
cgcaagugagtggagtaaugaagg

SEQ ID NO: 92080 - DNA, 28 bp, Artificial Sequence
  Synthetic
ctccagaataugcaagaatgcaaugaaa

SEQ ID NO: 92081 - DNA, 28 bp, Artificial Sequence
  Synthetic
gaatgtgcaccauaagaatgagtttugt

SEQ ID NO: 92082 - DNA, 22 bp, Artificial Sequence
  Synthetic
gtattctgcuccccacccttuc

SEQ ID NO: 92083 - DNA, 26 bp, Artificial Sequence
  Synthetic
agatctucaacaaccaggaattugct

SEQ ID NO: 92084 - DNA, 23 bp, Artificial Sequence
  Synthetic
agaagagcagcaaautcctggut

SEQ ID NO: 92085 - DNA, 28 bp, Artificial Sequence
  Synthetic
ggaatcagtagaugattgcatgctcaua

SEQ ID NO: 92086 - DNA, 21 bp, Artificial Sequence
  Synthetic
ccactccccuccctcatttut

SEQ ID NO: 92087 - DNA, 28 bp, Artificial Sequence
  Synthetic
caccatcatttagucttgtctgtctuga

SEQ ID NO: 92088 - DNA, 17 bp, Artificial Sequence
  Synthetic
tccugcggaugcacgaa

SEQ ID NO: 92089 - DNA, 21 bp, Artificial Sequence
  Synthetic
ggagtuctgcaaguacggcaa

SEQ ID NO: 92090 - DNA, 20 bp, Artificial Sequence
  Synthetic
gtggtgtgugctcaacucca

SEQ ID NO: 92091 - DNA, 26 bp, Artificial Sequence
  Synthetic
gcaatcttcaucacattgtccucagt

SEQ ID NO: 92092 - DNA, 24 bp, Artificial Sequence
  Synthetic
tccacacaagaaacugtcacaguc

SEQ ID NO: 92093 - DNA, 25 bp, Artificial Sequence
  Synthetic
actgaagacaauaatggccacucat

SEQ ID NO: 92094 - DNA, 27 bp, Artificial Sequence
  Synthetic
aagagatatguccccttccctauaacc

SEQ ID NO: 92095 - DNA, 20 bp, Artificial Sequence
  Synthetic
atgcctcaaagguccgaguc

SEQ ID NO: 92096 - DNA, 24 bp, Artificial Sequence
  Synthetic
caccuaaggacagcagaacaauga

SEQ ID NO: 92097 - DNA, 21 bp, Artificial Sequence
  Synthetic
tgtaggucctgtcctugcagt

SEQ ID NO: 92098 - DNA, 19 bp, Artificial Sequence
  Synthetic
agugtauccaccgggacct

SEQ ID NO: 92099 - DNA, 21 bp, Artificial Sequence
  Synthetic
catccagttcugccccatcuc

SEQ ID NO: 92100 - DNA, 20 bp, Artificial Sequence
  Synthetic
augacccaaggguaggaggt

SEQ ID NO: 92101 - DNA, 21 bp, Artificial Sequence
  Synthetic
gcccagcccucatgattacuc

SEQ ID NO: 92102 - DNA, 25 bp, Artificial Sequence
  Synthetic
ccutacttctcucacaaaagcccaa

SEQ ID NO: 92103 - DNA, 20 bp, Artificial Sequence
  Synthetic
ccaguggcagggcagauaag

SEQ ID NO: 92104 - DNA, 22 bp, Artificial Sequence
  Synthetic
cccaagacuggtacctcctuga

SEQ ID NO: 92105 - DNA, 21 bp, Artificial Sequence
  Synthetic
gutcctttcccuggagcagat

SEQ ID NO: 92106 - DNA, 23 bp, Artificial Sequence
  Synthetic
atgggaaccccuaccaaaggaua

SEQ ID NO: 92107 - DNA, 23 bp, Artificial Sequence
  Synthetic
ggttgaccauctcttccacguag

SEQ ID NO: 92108 - DNA, 20 bp, Artificial Sequence
  Synthetic
actccgcugcagtactcuct

SEQ ID NO: 92109 - DNA, 24 bp, Artificial Sequence
  Synthetic
accutaatgaaacuggcacagcat

SEQ ID NO: 92110 - DNA, 18 bp, Artificial Sequence
  Synthetic
gutcuggacgaccagcga

SEQ ID NO: 92111 - DNA, 23 bp, Artificial Sequence
  Synthetic
acagagaaguggagtcgaatgug

SEQ ID NO: 92112 - DNA, 25 bp, Artificial Sequence
  Synthetic
agtgtgaauaattacccuggaggga

SEQ ID NO: 92113 - DNA, 26 bp, Artificial Sequence
  Synthetic
cagtactacugctggattcuaaagca

SEQ ID NO: 92114 - DNA, 26 bp, Artificial Sequence
  Synthetic
ggaaatccacuccaactctgtttgut

SEQ ID NO: 92115 - DNA, 33 bp, Artificial Sequence
  Synthetic
tatgaaaagattcaccutaaaaatgtctacaug

SEQ ID NO: 92116 - DNA, 21 bp, Artificial Sequence
  Synthetic
gcagctguggttcccaucaaa

SEQ ID NO: 92117 - DNA, 23 bp, Artificial Sequence
  Synthetic
gccaaggagaauctgggaauagg

SEQ ID NO: 92118 - DNA, 24 bp, Artificial Sequence
  Synthetic
caattggtugcagacacacttugt

SEQ ID NO: 92119 - DNA, 19 bp, Artificial Sequence
  Synthetic
ctcctcagccugacgguag

SEQ ID NO: 92120 - DNA, 22 bp, Artificial Sequence
  Synthetic
tgtgtcagugtgaagtcaugct

SEQ ID NO: 92121 - DNA, 24 bp, Artificial Sequence
  Synthetic
ccattgattcugattggcgttucc

SEQ ID NO: 92122 - DNA, 22 bp, Artificial Sequence
  Synthetic
gtactucggaaacgccaaucag

SEQ ID NO: 92123 - DNA, 28 bp, Artificial Sequence
  Synthetic
ttcagctgcauatgaagttatgguacaa

SEQ ID NO: 92124 - DNA, 22 bp, Artificial Sequence
  Synthetic
ggatgggctutctagaggcaut

SEQ ID NO: 92125 - DNA, 23 bp, Artificial Sequence
  Synthetic
gctatgucaacactgggtgucat

SEQ ID NO: 92126 - DNA, 27 bp, Artificial Sequence
  Synthetic
gcaatgacaaugcagatgauaaagacc

SEQ ID NO: 92127 - DNA, 28 bp, Artificial Sequence
  Synthetic
gaaatagacuctgcttttccucagaaga

SEQ ID NO: 92128 - DNA, 21 bp, Artificial Sequence
  Synthetic
ccgggagaccutcacccttua

SEQ ID NO: 92129 - DNA, 20 bp, Artificial Sequence
  Synthetic
ggagggaaagcuctcgtcug

SEQ ID NO: 92130 - DNA, 22 bp, Artificial Sequence
  Synthetic
gagtaagggcuggttgcauaca

SEQ ID NO: 92131 - DNA, 28 bp, Artificial Sequence
  Synthetic
ctgttttgcuaatattgcaucacacact

SEQ ID NO: 92132 - DNA, 21 bp, Artificial Sequence
  Synthetic
tggaccaagguggacacaaut

SEQ ID NO: 92133 - DNA, 20 bp, Artificial Sequence
  Synthetic
ccaaagcuccgctcttugac

SEQ ID NO: 92134 - DNA, 25 bp, Artificial Sequence
  Synthetic
cacggtaagtuctgaaacaagctut

SEQ ID NO: 92135 - DNA, 24 bp, Artificial Sequence
  Synthetic
ccagaatcuccaaccccatcauac

SEQ ID NO: 92136 - DNA, 28 bp, Artificial Sequence
  Synthetic
cagtagcatgtucctgtcaggttataug

SEQ ID NO: 92137 - DNA, 21 bp, Artificial Sequence
  Synthetic
caccccuggaucacagcaaat

SEQ ID NO: 92138 - DNA, 23 bp, Artificial Sequence
  Synthetic
gaaagcuggttttacugcacaca

SEQ ID NO: 92139 - DNA, 25 bp, Artificial Sequence
  Synthetic
ggttctgctuaggtttactcuccaa

SEQ ID NO: 92140 - DNA, 22 bp, Artificial Sequence
  Synthetic
agagtucaagccgaatgccaut

SEQ ID NO: 92141 - DNA, 22 bp, Artificial Sequence
  Synthetic
ccatgacaaggugatgctccuc

SEQ ID NO: 92142 - DNA, 29 bp, Artificial Sequence
  Synthetic
cagctgacaaugttttgtataaaauccct

SEQ ID NO: 92143 - DNA, 25 bp, Artificial Sequence
  Synthetic
gattgtgaggauggacgtgaugaat

SEQ ID NO: 92144 - DNA, 23 bp, Artificial Sequence
  Synthetic
acagtggaautcatcacguccat

SEQ ID NO: 92145 - DNA, 27 bp, Artificial Sequence
  Synthetic
cacagtucaaaacaaacacaaatguga

SEQ ID NO: 92146 - DNA, 28 bp, Artificial Sequence
  Synthetic
aatgcatctuccactaggacaacuaaaa

SEQ ID NO: 92147 - DNA, 33 bp, Artificial Sequence
  Synthetic
agcttacttgttatutatctctttcagttuagg

SEQ ID NO: 92148 - DNA, 22 bp, Artificial Sequence
  Synthetic
cctgacccugtgtgactgttut

SEQ ID NO: 92149 - DNA, 24 bp, Artificial Sequence
  Synthetic
cggtatagcgggugtttctcauag

SEQ ID NO: 92150 - DNA, 21 bp, Artificial Sequence
  Synthetic
cttcgactucctgacggacug

SEQ ID NO: 92151 - DNA, 21 bp, Artificial Sequence
  Synthetic
cggagaacguctggattugga

SEQ ID NO: 92152 - DNA, 26 bp, Artificial Sequence
  Synthetic
aaaggttaaaguaaagccacgacuca

SEQ ID NO: 92153 - DNA, 24 bp, Artificial Sequence
  Synthetic
gccagctagaaacutgtatgccua

SEQ ID NO: 92154 - DNA, 24 bp, Artificial Sequence
  Synthetic
acagtgatcugtgctattgctuca

SEQ ID NO: 92155 - DNA, 25 bp, Artificial Sequence
  Synthetic
gtcaccaaugccttatgtaaagugg

SEQ ID NO: 92156 - DNA, 20 bp, Artificial Sequence
  Synthetic
gggauagcagtacccugcca

SEQ ID NO: 92157 - DNA, 19 bp, Artificial Sequence
  Synthetic
gccctgguacagcccctua

SEQ ID NO: 92158 - DNA, 28 bp, Artificial Sequence
  Synthetic
tgttttggcaatutgatggttttgauga

SEQ ID NO: 92159 - DNA, 28 bp, Artificial Sequence
  Synthetic
catttgttgtacuccaggttgaatucac

SEQ ID NO: 92160 - DNA, 21 bp, Artificial Sequence
  Synthetic
accgtggcauttcggtuaaca

SEQ ID NO: 92161 - DNA, 28 bp, Artificial Sequence
  Synthetic
ctgcattttggugttcgatagcatatua

SEQ ID NO: 92162 - DNA, 22 bp, Artificial Sequence
  Synthetic
gccttgtugacctcatcagcua

SEQ ID NO: 92163 - DNA, 24 bp, Artificial Sequence
  Synthetic
tggtaagattcugggtctctccug

SEQ ID NO: 92164 - DNA, 24 bp, Artificial Sequence
  Synthetic
ccctcugttacaaagucagggaat

SEQ ID NO: 92165 - DNA, 27 bp, Artificial Sequence
  Synthetic
tggaattcttuccttatcagccugaac

SEQ ID NO: 92166 - DNA, 26 bp, Artificial Sequence
  Synthetic
tgtagacucagcaaagaacaauggaa

SEQ ID NO: 92167 - DNA, 23 bp, Artificial Sequence
  Synthetic
cctccacagucaggttauaccag

SEQ ID NO: 92168 - DNA, 21 bp, Artificial Sequence
  Synthetic
cagaucttcugcccccaacat

SEQ ID NO: 92169 - DNA, 28 bp, Artificial Sequence
  Synthetic
gttatcatttcccutgtgttttgtucca

SEQ ID NO: 92170 - DNA, 26 bp, Artificial Sequence
  Synthetic
atggctaatttguttcatgagcaugg

SEQ ID NO: 92171 - DNA, 26 bp, Artificial Sequence
  Synthetic
cctgaagatgttuacagtgcagtcut

SEQ ID NO: 92172 - DNA, 28 bp, Artificial Sequence
  Synthetic
cgtttctatttgugtcagcttctgaaug

SEQ ID NO: 92173 - DNA, 26 bp, Artificial Sequence
  Synthetic
ccaugtaactttaaugagagcccaga

SEQ ID NO: 92174 - DNA, 24 bp, Artificial Sequence
  Synthetic
cacaatatggugagggtggaagua

SEQ ID NO: 92175 - DNA, 22 bp, Artificial Sequence
  Synthetic
gtggcacttugcaggactttut

SEQ ID NO: 92176 - DNA, 21 bp, Artificial Sequence
  Synthetic
gcaccaagucagtgccacuat

SEQ ID NO: 92177 - DNA, 23 bp, Artificial Sequence
  Synthetic
ctagcaaccauccauggaacagt

SEQ ID NO: 92178 - DNA, 28 bp, Artificial Sequence
  Synthetic
aaggtttcuccaaccctctgatttaaut

SEQ ID NO: 92179 - DNA, 23 bp, Artificial Sequence
  Synthetic
ttggcttgaautgttcacgcaut

SEQ ID NO: 92180 - DNA, 24 bp, Artificial Sequence
  Synthetic
cagggagacaccuagaaaccaauc

SEQ ID NO: 92181 - DNA, 29 bp, Artificial Sequence
  Synthetic
ggcttggataaucacttcgtagtattcut

SEQ ID NO: 92182 - DNA, 24 bp, Artificial Sequence
  Synthetic
agaacuggacagagaagtcuaccc

SEQ ID NO: 92183 - DNA, 27 bp, Artificial Sequence
  Synthetic
agutttggaagaaugagggaaaaggaa

SEQ ID NO: 92184 - DNA, 28 bp, Artificial Sequence
  Synthetic
tggtcttctgtutgaaccatatagtucc

SEQ ID NO: 92185 - DNA, 28 bp, Artificial Sequence
  Synthetic
ttgggcttttcutctctattttccucat

SEQ ID NO: 92186 - DNA, 23 bp, Artificial Sequence
  Synthetic
ccaacaaagcaucaaagccgtua

SEQ ID NO: 92187 - DNA, 27 bp, Artificial Sequence
  Synthetic
actaacatttgcutcccatttaccuct

SEQ ID NO: 92188 - DNA, 23 bp, Artificial Sequence
  Synthetic
gtccttcaugcacatcctucgat

SEQ ID NO: 92189 - DNA, 26 bp, Artificial Sequence
  Synthetic
aggtagcaatcautgcacacatttut

SEQ ID NO: 92190 - DNA, 23 bp, Artificial Sequence
  Synthetic
caugaacauggacagagaagcca

SEQ ID NO: 92191 - DNA, 23 bp, Artificial Sequence
  Synthetic
tgtgctctcutgggttagguact

SEQ ID NO: 92192 - DNA, 28 bp, Artificial Sequence
  Synthetic
gagagagagagagaaaauttgtgtcuga

SEQ ID NO: 92193 - DNA, 25 bp, Artificial Sequence
  Synthetic
ctgtgauggagagaatgattgugga

SEQ ID NO: 92194 - DNA, 25 bp, Artificial Sequence
  Synthetic
gggctauaaaccaaattgctucaga

SEQ ID NO: 92195 - DNA, 21 bp, Artificial Sequence
  Synthetic
cauccaaacgccgagaaucac

SEQ ID NO: 92196 - DNA, 26 bp, Artificial Sequence
  Synthetic
ccacagttgagutcatcagaattguc

SEQ ID NO: 92197 - DNA, 28 bp, Artificial Sequence
  Synthetic
accattccacaauatctatgctttcucc

SEQ ID NO: 92198 - DNA, 28 bp, Artificial Sequence
  Synthetic
cctacagagauctaaccattagcaugaa

SEQ ID NO: 92199 - DNA, 21 bp, Artificial Sequence
  Synthetic
cctgtgggaauccgacgaaug

SEQ ID NO: 92200 - DNA, 20 bp, Artificial Sequence
  Synthetic
gacgtggtgugtcactgcua

SEQ ID NO: 92201 - DNA, 23 bp, Artificial Sequence
  Synthetic
cucacttcaucaggacagacgac

SEQ ID NO: 92202 - DNA, 23 bp, Artificial Sequence
  Synthetic
gctttcagutagagtgtgugcca

SEQ ID NO: 92203 - DNA, 27 bp, Artificial Sequence
  Synthetic
ctgggcttaaccucttccaatttuaga

SEQ ID NO: 92204 - DNA, 20 bp, Artificial Sequence
  Synthetic
ggcgtggaugggtcttucat

SEQ ID NO: 92205 - DNA, 29 bp, Artificial Sequence
  Synthetic
gttgtaattttctauctttgtgcccauct

SEQ ID NO: 92206 - DNA, 23 bp, Artificial Sequence
  Synthetic
tcccaccacagugtcttctttut

SEQ ID NO: 92207 - DNA, 22 bp, Artificial Sequence
  Synthetic
tgctgatggucccactuacaac

SEQ ID NO: 92208 - DNA, 23 bp, Artificial Sequence
  Synthetic
tcuaagatucgacagagggcaga

SEQ ID NO: 92209 - DNA, 27 bp, Artificial Sequence
  Synthetic
ccatgcttccaugttcacatcaattut

SEQ ID NO: 92210 - DNA, 28 bp, Artificial Sequence
  Synthetic
caaacatatttugaacacactgggctua

SEQ ID NO: 92211 - DNA, 23 bp, Artificial Sequence
  Synthetic
gcctggauggataccugaagact

SEQ ID NO: 92212 - DNA, 23 bp, Artificial Sequence
  Synthetic
ctcaggattgcauccagccttua

SEQ ID NO: 92213 - DNA, 23 bp, Artificial Sequence
  Synthetic
agaaaaatauggctggcccugaa

SEQ ID NO: 92214 - DNA, 27 bp, Artificial Sequence
  Synthetic
cttctaaacatuacctgacaaggcuga

SEQ ID NO: 92215 - DNA, 26 bp, Artificial Sequence
  Synthetic
cctgaatgcuctagaagaatggucaa

SEQ ID NO: 92216 - DNA, 25 bp, Artificial Sequence
  Synthetic
gagacaccugcaagtgacatatgua

SEQ ID NO: 92217 - DNA, 21 bp, Artificial Sequence
  Synthetic
gagacagtguctgccttcuct

SEQ ID NO: 92218 - DNA, 26 bp, Artificial Sequence
  Synthetic
cttaaaagccacauttctctccucct

SEQ ID NO: 92219 - DNA, 22 bp, Artificial Sequence
  Synthetic
ggtactctguctccagctctuc

SEQ ID NO: 92220 - DNA, 29 bp, Artificial Sequence
  Synthetic
aggctgcattacaugtctgtcaatauaaa

SEQ ID NO: 92221 - DNA, 26 bp, Artificial Sequence
  Synthetic
tcctgcgttucagtttaacttgttug

SEQ ID NO: 92222 - DNA, 22 bp, Artificial Sequence
  Synthetic
tgtgttcgaaugggagacucct

SEQ ID NO: 92223 - DNA, 19 bp, Artificial Sequence
  Synthetic
cccagggugaacgcatuac

SEQ ID NO: 92224 - DNA, 17 bp, Artificial Sequence
  Synthetic
gagagcuggcuggcaga

SEQ ID NO: 92225 - DNA, 19 bp, Artificial Sequence
  Synthetic
ccauggccaactcctucgt

SEQ ID NO: 92226 - DNA, 23 bp, Artificial Sequence
  Synthetic
gggatgcugaaagttgactcuct

SEQ ID NO: 92227 - DNA, 28 bp, Artificial Sequence
  Synthetic
aaacgttccaagutttcttactttgugt

SEQ ID NO: 92228 - DNA, 21 bp, Artificial Sequence
  Synthetic
ccagggtggugtacagcatuc

SEQ ID NO: 92229 - DNA, 28 bp, Artificial Sequence
  Synthetic
gggtctgtcauagcagcagttataaaut

SEQ ID NO: 92230 - DNA, 19 bp, Artificial Sequence
  Synthetic
cgaaggagutggccaugga

SEQ ID NO: 92231 - DNA, 17 bp, Artificial Sequence
  Synthetic
cggcaggcaacugtugg

SEQ ID NO: 92232 - DNA, 21 bp, Artificial Sequence
  Synthetic
cgcagacaccuacaacaucac

SEQ ID NO: 92233 - DNA, 21 bp, Artificial Sequence
  Synthetic
gctgtggataucgatgcggua

SEQ ID NO: 92234 - DNA, 22 bp, Artificial Sequence
  Synthetic
cagctgctuacaactgagguct

SEQ ID NO: 92235 - DNA, 25 bp, Artificial Sequence
  Synthetic
gcatttcagtgutggcttcctttua

SEQ ID NO: 92236 - DNA, 26 bp, Artificial Sequence
  Synthetic
tgaatcattctgugcttagctacgut

SEQ ID NO: 92237 - DNA, 26 bp, Artificial Sequence
  Synthetic
ctcaagtagctuttcacgttgcttut

SEQ ID NO: 92238 - DNA, 22 bp, Artificial Sequence
  Synthetic
gtgaggctguttttcccatcug

SEQ ID NO: 92239 - DNA, 20 bp, Artificial Sequence
  Synthetic
cattccccacccucctccua

SEQ ID NO: 92240 - DNA, 20 bp, Artificial Sequence
  Synthetic
tgcagttcuccctggaguca

SEQ ID NO: 92241 - DNA, 21 bp, Artificial Sequence
  Synthetic
aactcccauagtgggucgaga

SEQ ID NO: 92242 - DNA, 26 bp, Artificial Sequence
  Synthetic
aggtttttagaccucttctcccucaa

SEQ ID NO: 92243 - DNA, 24 bp, Artificial Sequence
  Synthetic
gctgaagaaucccggttgttacua

SEQ ID NO: 92244 - DNA, 23 bp, Artificial Sequence
  Synthetic
ggcctcgugagtctagatcuacc

SEQ ID NO: 92245 - DNA, 21 bp, Artificial Sequence
  Synthetic
tggagaaaguccagccucaga

SEQ ID NO: 92246 - DNA, 24 bp, Artificial Sequence
  Synthetic
gautttaaaaccttuggcgcagac

SEQ ID NO: 92247 - DNA, 28 bp, Artificial Sequence
  Synthetic
gcatgtacatauccccttgtgtagtaut

SEQ ID NO: 92248 - DNA, 22 bp, Artificial Sequence
  Synthetic
gccagtuggacaaatgcgagua

SEQ ID NO: 92249 - DNA, 22 bp, Artificial Sequence
  Synthetic
atcactgugagccagatuccac

SEQ ID NO: 92250 - DNA, 23 bp, Artificial Sequence
  Synthetic
ctaacctucggcctttcacatug

SEQ ID NO: 92251 - DNA, 21 bp, Artificial Sequence
  Synthetic
ggccagcuggatcataccaua

SEQ ID NO: 92252 - DNA, 20 bp, Artificial Sequence
  Synthetic
gggccaaaggccauaguaga

SEQ ID NO: 92253 - DNA, 17 bp, Artificial Sequence
  Synthetic
gcagcccacgugaucct

SEQ ID NO: 92254 - DNA, 21 bp, Artificial Sequence
  Synthetic
ggctccuccactgaggaugaa

SEQ ID NO: 92255 - DNA, 21 bp, Artificial Sequence
  Synthetic
gcccggccacugatacttuac

SEQ ID NO: 92256 - DNA, 20 bp, Artificial Sequence
  Synthetic
ccucccaggaaaagggtcug

SEQ ID NO: 92257 - DNA, 24 bp, Artificial Sequence
  Synthetic
cctacacaaggugaaagctcctua

SEQ ID NO: 92258 - DNA, 23 bp, Artificial Sequence
  Synthetic
gtttgagccuatagcccaacuga

SEQ ID NO: 92259 - DNA, 29 bp, Artificial Sequence
  Synthetic
tggcatggtcuaaacaaatagctctuaat

SEQ ID NO: 92260 - DNA, 19 bp, Artificial Sequence
  Synthetic
ccaggccautgctgacuca

SEQ ID NO: 92261 - DNA, 20 bp, Artificial Sequence
  Synthetic
ctctctucctcaccugcaca

SEQ ID NO: 92262 - DNA, 27 bp, Artificial Sequence
  Synthetic
caaagcaagaauacttttctgggtcut

SEQ ID NO: 92263 - DNA, 26 bp, Artificial Sequence
  Synthetic
gctaggaacuactggattgggauaca

SEQ ID NO: 92264 - DNA, 17 bp, Artificial Sequence
  Synthetic
ccagcccccaagucuca

SEQ ID NO: 92265 - DNA, 17 bp, Artificial Sequence
  Synthetic
gccctggguggtggtuc

SEQ ID NO: 92266 - DNA, 21 bp, Artificial Sequence
  Synthetic
gacagcaaacaguctgccuct

SEQ ID NO: 92267 - DNA, 23 bp, Artificial Sequence
  Synthetic
cccacttttuggtgttggaacug

SEQ ID NO: 92268 - DNA, 26 bp, Artificial Sequence
  Synthetic
cctccagauagcacaacgauagaaaa

SEQ ID NO: 92269 - DNA, 27 bp, Artificial Sequence
  Synthetic
cctctgttagauatagcacttgugagg

SEQ ID NO: 92270 - DNA, 27 bp, Artificial Sequence
  Synthetic
agcctcacaagugctatatcuaacaga

SEQ ID NO: 92271 - DNA, 29 bp, Artificial Sequence
  Synthetic
acccaaatcatucaccttaccataugaaa

SEQ ID NO: 92272 - DNA, 26 bp, Artificial Sequence
  Synthetic
ttttgtgttagaucaggttctgccut

SEQ ID NO: 92273 - DNA, 24 bp, Artificial Sequence
  Synthetic
tctctagcagguctggtactucag

SEQ ID NO: 92274 - DNA, 20 bp, Artificial Sequence
  Synthetic
ccgctugaccatggtgaugt

SEQ ID NO: 92275 - DNA, 19 bp, Artificial Sequence
  Synthetic
tcatccagccuccgacuca

SEQ ID NO: 92276 - DNA, 26 bp, Artificial Sequence
  Synthetic
aaaggtataggugaagtcaggacgua

SEQ ID NO: 92277 - DNA, 18 bp, Artificial Sequence
  Synthetic
ggaguctgguggccgaga

SEQ ID NO: 92278 - DNA, 17 bp, Artificial Sequence
  Synthetic
tccucucggccaccaga

SEQ ID NO: 92279 - DNA, 18 bp, Artificial Sequence
  Synthetic
gctgctggugcctccaut

SEQ ID NO: 92280 - DNA, 23 bp, Artificial Sequence
  Synthetic
gcacacaaagugttgaacctuct

SEQ ID NO: 92281 - DNA, 25 bp, Artificial Sequence
  Synthetic
agtgagcaaagcaguacactctuac

SEQ ID NO: 92282 - DNA, 26 bp, Artificial Sequence
  Synthetic
gaagtctugggaatcttcauaaccca

SEQ ID NO: 92283 - DNA, 27 bp, Artificial Sequence
  Synthetic
gtgaatccatguggagatgatgcauat

SEQ ID NO: 92284 - DNA, 23 bp, Artificial Sequence
  Synthetic
tcgaaaaccucagcaacatucct

SEQ ID NO: 92285 - DNA, 29 bp, Artificial Sequence
  Synthetic
tttcagtgcaucagggtttaatcagaaua

SEQ ID NO: 92286 - DNA, 21 bp, Artificial Sequence
  Synthetic
aaauccaggctuacagcgaca

SEQ ID NO: 92287 - DNA, 27 bp, Artificial Sequence
  Synthetic
agttaactccccacutcaggaatuaga

SEQ ID NO: 92288 - DNA, 23 bp, Artificial Sequence
  Synthetic
ggaaggaccacuggttuagaaca

SEQ ID NO: 92289 - DNA, 26 bp, Artificial Sequence
  Synthetic
aattgagagguaaagttgggtuccaa

SEQ ID NO: 92290 - DNA, 23 bp, Artificial Sequence
  Synthetic
ccatcccaggutgtccttcatua

SEQ ID NO: 92291 - DNA, 24 bp, Artificial Sequence
  Synthetic
caacagtgtugtgatgccatugat

SEQ ID NO: 92292 - DNA, 23 bp, Artificial Sequence
  Synthetic
tcctgttcaguttcttcctugct

SEQ ID NO: 92293 - DNA, 22 bp, Artificial Sequence
  Synthetic
ttaacacaggcguattccgugt

SEQ ID NO: 92294 - DNA, 24 bp, Artificial Sequence
  Synthetic
gcttcttttcaaugatgcggcaua

SEQ ID NO: 92295 - DNA, 33 bp, Artificial Sequence
  Synthetic
aaaattaccttutcagttaaaaatuaggccaac

SEQ ID NO: 92296 - DNA, 24 bp, Artificial Sequence
  Synthetic
cctcatagcauggacgcattctua

SEQ ID NO: 92297 - DNA, 22 bp, Artificial Sequence
  Synthetic
gcauttttggcugcagaagagg

SEQ ID NO: 92298 - DNA, 25 bp, Artificial Sequence
  Synthetic
tgtccagaccccaauacagtuaaga

SEQ ID NO: 92299 - DNA, 24 bp, Artificial Sequence
  Synthetic
gtcatcatcaguggaacaggtgut

SEQ ID NO: 92300 - DNA, 21 bp, Artificial Sequence
  Synthetic
tgtgtgcugtacagucacagg

SEQ ID NO: 92301 - DNA, 20 bp, Artificial Sequence
  Synthetic
caccgtgugggctgagttua

SEQ ID NO: 92302 - DNA, 21 bp, Artificial Sequence
  Synthetic
cctatgcagggcuacgatugg

SEQ ID NO: 92303 - DNA, 20 bp, Artificial Sequence
  Synthetic
gttgggcucagcagguaact

SEQ ID NO: 92304 - DNA, 22 bp, Artificial Sequence
  Synthetic
ccagtcaaaggugacaccugag

SEQ ID NO: 92305 - DNA, 20 bp, Artificial Sequence
  Synthetic
tcactgugtgcgtgucaaca

SEQ ID NO: 92306 - DNA, 28 bp, Artificial Sequence
  Synthetic
tctgactatgugctctcaaaacatucat

SEQ ID NO: 92307 - DNA, 22 bp, Artificial Sequence
  Synthetic
gccttacccugacatcctccua

SEQ ID NO: 92308 - DNA, 21 bp, Artificial Sequence
  Synthetic
ccatgcccuctctacacugga

SEQ ID NO: 92309 - DNA, 26 bp, Artificial Sequence
  Synthetic
tcaagagacucgccacagaaaatuac

SEQ ID NO: 92310 - DNA, 22 bp, Artificial Sequence
  Synthetic
tgcacctacutcttcacauggg

SEQ ID NO: 92311 - DNA, 24 bp, Artificial Sequence
  Synthetic
tgttccaugagcatgtggacuaag

SEQ ID NO: 92312 - DNA, 22 bp, Artificial Sequence
  Synthetic
aggcagcuactgcuagaagaga

SEQ ID NO: 92313 - DNA, 19 bp, Artificial Sequence
  Synthetic
ccacgcucagcctgaguat

SEQ ID NO: 92314 - DNA, 24 bp, Artificial Sequence
  Synthetic
agctgcaaggacutaagttucaca

SEQ ID NO: 92315 - DNA, 23 bp, Artificial Sequence
  Synthetic
gtttctccucgccttactcacuc

SEQ ID NO: 92316 - DNA, 26 bp, Artificial Sequence
  Synthetic
agcagugcagccaaaatatauacaca

SEQ ID NO: 92317 - DNA, 24 bp, Artificial Sequence
  Synthetic
tttctgttctcauagccttggugg

SEQ ID NO: 92318 - DNA, 20 bp, Artificial Sequence
  Synthetic
gcactucgcacacatagugg

SEQ ID NO: 92319 - DNA, 19 bp, Artificial Sequence
  Synthetic
cgcttcugctcgacugcaa

SEQ ID NO: 92320 - DNA, 20 bp, Artificial Sequence
  Synthetic
tccatcgguttggcacctut

SEQ ID NO: 92321 - DNA, 22 bp, Artificial Sequence
  Synthetic
acttttccucgggctgcttuag

SEQ ID NO: 92322 - DNA, 19 bp, Artificial Sequence
  Synthetic
ggcgaacagaugcacgtuc

SEQ ID NO: 92323 - DNA, 21 bp, Artificial Sequence
  Synthetic
aagccauccgaggagctacua

SEQ ID NO: 92324 - DNA, 22 bp, Artificial Sequence
  Synthetic
gcaaucggcaataaucccgaga

SEQ ID NO: 92325 - DNA, 20 bp, Artificial Sequence
  Synthetic
tgtaaaugacgccgcucgat

SEQ ID NO: 92326 - DNA, 25 bp, Artificial Sequence
  Synthetic
acaactttgtgutctaccttcuccc

SEQ ID NO: 92327 - DNA, 22 bp, Artificial Sequence
  Synthetic
gctacagcugtctccagugaac

SEQ ID NO: 92328 - DNA, 20 bp, Artificial Sequence
  Synthetic
gtggtcagggutgactguct

SEQ ID NO: 92329 - DNA, 20 bp, Artificial Sequence
  Synthetic
tgtgctucagccactggaug

SEQ ID NO: 92330 - DNA, 21 bp, Artificial Sequence
  Synthetic
cgtacttguagctgtcggcut

SEQ ID NO: 92331 - DNA, 19 bp, Artificial Sequence
  Synthetic
agtgccacagggcutctuc

SEQ ID NO: 92332 - DNA, 20 bp, Artificial Sequence
  Synthetic
gtgcaaggugtacagcgaug

SEQ ID NO: 92333 - DNA, 22 bp, Artificial Sequence
  Synthetic
aacccaaggugggagaagaaug

SEQ ID NO: 92334 - DNA, 24 bp, Artificial Sequence
  Synthetic
gatcagcacuttctugagcaacac

SEQ ID NO: 92335 - DNA, 28 bp, Artificial Sequence
  Synthetic
aggtcctaauacacaaaaatgcuggaaa

SEQ ID NO: 92336 - DNA, 20 bp, Artificial Sequence
  Synthetic
cccactcgacucccacauct

SEQ ID NO: 92337 - DNA, 29 bp, Artificial Sequence
  Synthetic
ggttccttactaaaugagcactattgugt

SEQ ID NO: 92338 - DNA, 28 bp, Artificial Sequence
  Synthetic
caaccacagcaaugataataacaggaut

SEQ ID NO: 92339 - DNA, 33 bp, Artificial Sequence
  Synthetic
actctaattttattuaacctttcaagttctugc

SEQ ID NO: 92340 - DNA, 26 bp, Artificial Sequence
  Synthetic
gaagacaaaagcacutcacaaaccut

SEQ ID NO: 92341 - DNA, 25 bp, Artificial Sequence
  Synthetic
tgtcttgtgugtgttgatttugcag

SEQ ID NO: 92342 - DNA, 21 bp, Artificial Sequence
  Synthetic
ccagaagucccactcctcuca

SEQ ID NO: 92343 - DNA, 21 bp, Artificial Sequence
  Synthetic
actccctuccaacgtgtctuc

SEQ ID NO: 92344 - DNA, 26 bp, Artificial Sequence
  Synthetic
gacttgaaacgggauctcattuagga

SEQ ID NO: 92345 - DNA, 23 bp, Artificial Sequence
  Synthetic
gctcattcuaccagaaguccaca

SEQ ID NO: 92346 - DNA, 27 bp, Artificial Sequence
  Synthetic
gtctttaaccuctaactuccaagggaa

SEQ ID NO: 92347 - DNA, 26 bp, Artificial Sequence
  Synthetic
gtctccacagaauttccgtctctauc

SEQ ID NO: 92348 - DNA, 21 bp, Artificial Sequence
  Synthetic
acagctucgggtgttaauggt

SEQ ID NO: 92349 - DNA, 28 bp, Artificial Sequence
  Synthetic
gatcagtgcuaaacaggatcttttccua

SEQ ID NO: 92350 - DNA, 25 bp, Artificial Sequence
  Synthetic
ggatagtaccugagtgtgtctggua

SEQ ID NO: 92351 - DNA, 21 bp, Artificial Sequence
  Synthetic
ccttucaggcagccgacuaaa

SEQ ID NO: 92352 - DNA, 22 bp, Artificial Sequence
  Synthetic
gtgagtgaaugctgaccccaut

SEQ ID NO: 92353 - DNA, 23 bp, Artificial Sequence
  Synthetic
cgaggcugatgaactauacggat

SEQ ID NO: 92354 - DNA, 22 bp, Artificial Sequence
  Synthetic
ttctgaaaaccuggcaauccca

SEQ ID NO: 92355 - DNA, 21 bp, Artificial Sequence
  Synthetic
gcttgtcugacaggagtgcut

SEQ ID NO: 92356 - DNA, 28 bp, Artificial Sequence
  Synthetic
tcatttgttcaauaactgcttggcatut

SEQ ID NO: 92357 - DNA, 28 bp, Artificial Sequence
  Synthetic
gctggtttaucttcaaattgtugaggat

SEQ ID NO: 92358 - DNA, 21 bp, Artificial Sequence
  Synthetic
gacgtggacutccacauccaa

SEQ ID NO: 92359 - DNA, 24 bp, Artificial Sequence
  Synthetic
gaauagatggtugagcccacaaac

SEQ ID NO: 92360 - DNA, 24 bp, Artificial Sequence
  Synthetic
caatgttgaucccagggatgaugt

SEQ ID NO: 92361 - DNA, 23 bp, Artificial Sequence
  Synthetic
gggcacauagtattgcagucgag

SEQ ID NO: 92362 - DNA, 23 bp, Artificial Sequence
  Synthetic
cgctgccauttggactaaatugt

SEQ ID NO: 92363 - DNA, 26 bp, Artificial Sequence
  Synthetic
cagccaatuaccgtcaagattacuga

SEQ ID NO: 92364 - DNA, 26 bp, Artificial Sequence
  Synthetic
ccatattcuccacatctctcttuggt

SEQ ID NO: 92365 - DNA, 29 bp, Artificial Sequence
  Synthetic
accacuccaacaaagaagaaatugaagat

SEQ ID NO: 92366 - DNA, 22 bp, Artificial Sequence
  Synthetic
ggcatccutttgaacgtugaca

SEQ ID NO: 92367 - DNA, 22 bp, Artificial Sequence
  Synthetic
tgaaaugggcccaagtucagaa

SEQ ID NO: 92368 - DNA, 25 bp, Artificial Sequence
  Synthetic
gtcatctttggucatttagctgcut

SEQ ID NO: 92369 - DNA, 27 bp, Artificial Sequence
  Synthetic
agatgcctuccaacatgtctttuagag

SEQ ID NO: 92370 - DNA, 19 bp, Artificial Sequence
  Synthetic
gccccagcguttccgtauc

SEQ ID NO: 92371 - DNA, 24 bp, Artificial Sequence
  Synthetic
catttaaccucccctctcgttuca

SEQ ID NO: 92372 - DNA, 26 bp, Artificial Sequence
  Synthetic
gcagtacacugaagaattccugagac

SEQ ID NO: 92373 - DNA, 23 bp, Artificial Sequence
  Synthetic
tgcatucgcagatgcttucaaaa

SEQ ID NO: 92374 - DNA, 23 bp, Artificial Sequence
  Synthetic
cccaacaccacaaggugaatuag

SEQ ID NO: 92375 - DNA, 26 bp, Artificial Sequence
  Synthetic
cgggtcatttcuacttggcatttcut

SEQ ID NO: 92376 - DNA, 22 bp, Artificial Sequence
  Synthetic
acaggaaacaaaucaggcugct

SEQ ID NO: 92377 - DNA, 18 bp, Artificial Sequence
  Synthetic
gggacaggcccaguccua

SEQ ID NO: 92378 - DNA, 20 bp, Artificial Sequence
  Synthetic
agatggcaaagccugacucc

SEQ ID NO: 92379 - DNA, 22 bp, Artificial Sequence
  Synthetic
gacttggcaucccattgtcuga

SEQ ID NO: 92380 - DNA, 19 bp, Artificial Sequence
  Synthetic
ggaaggagggcccautcuc

SEQ ID NO: 92381 - DNA, 19 bp, Artificial Sequence
  Synthetic
cctcccuccaccagcucat

SEQ ID NO: 92382 - DNA, 23 bp, Artificial Sequence
  Synthetic
caatcctcaccuagagatgcgut

SEQ ID NO: 92383 - DNA, 20 bp, Artificial Sequence
  Synthetic
cucaggcaccuccacaaagt

SEQ ID NO: 92384 - DNA, 21 bp, Artificial Sequence
  Synthetic
gcagctgutggagagaucagt

SEQ ID NO: 92385 - DNA, 23 bp, Artificial Sequence
  Synthetic
cctggaacgcagugtacagaauc

SEQ ID NO: 92386 - DNA, 28 bp, Artificial Sequence
  Synthetic
cttagtgagaguaaagagatgcgaauga

SEQ ID NO: 92387 - DNA, 24 bp, Artificial Sequence
  Synthetic
gcattaagugctccatagcugagg

SEQ ID NO: 92388 - DNA, 21 bp, Artificial Sequence
  Synthetic
gggtucagaagttcucggagt

SEQ ID NO: 92389 - DNA, 25 bp, Artificial Sequence
  Synthetic
gcctgtcauactttgaaagugcaat

SEQ ID NO: 92390 - DNA, 22 bp, Artificial Sequence
  Synthetic
gtaagttggcuttccagugcat

SEQ ID NO: 92391 - DNA, 23 bp, Artificial Sequence
  Synthetic
cgtctcccutataaccauggcaa

SEQ ID NO: 92392 - DNA, 22 bp, Artificial Sequence
  Synthetic
ggtctttcugccaacaguccag

SEQ ID NO: 92393 - DNA, 21 bp, Artificial Sequence
  Synthetic
cctgggccugttagcatctut

SEQ ID NO: 92394 - DNA, 24 bp, Artificial Sequence
  Synthetic
accctggugaagaacatgatcuct

SEQ ID NO: 92395 - DNA, 25 bp, Artificial Sequence
  Synthetic
ggguctcttgtaugagaaagcaagg

SEQ ID NO: 92396 - DNA, 21 bp, Artificial Sequence
  Synthetic
cacttccuacccgtggtcauc

SEQ ID NO: 92397 - DNA, 22 bp, Artificial Sequence
  Synthetic
agtaagauggctaccacugcct

SEQ ID NO: 92398 - DNA, 24 bp, Artificial Sequence
  Synthetic
tgcatacccautaactggauccac

SEQ ID NO: 92399 - DNA, 24 bp, Artificial Sequence
  Synthetic
gaccaaugatggccauaggaaaac

SEQ ID NO: 92400 - DNA, 22 bp, Artificial Sequence
  Synthetic
cctgtgttugaacctggcttut

SEQ ID NO: 92401 - DNA, 26 bp, Artificial Sequence
  Synthetic
gaagggaagautccagcatauaagga

SEQ ID NO: 92402 - DNA, 27 bp, Artificial Sequence
  Synthetic
agaaattctguccggtttcagattaug

SEQ ID NO: 92403 - DNA, 22 bp, Artificial Sequence
  Synthetic
cgtgaactugcggtaggctaua

SEQ ID NO: 92404 - DNA, 23 bp, Artificial Sequence
  Synthetic
aaacaccaccacutatcacugct

SEQ ID NO: 92405 - DNA, 26 bp, Artificial Sequence
  Synthetic
ggauttattgacttcaucggccaagt

SEQ ID NO: 92406 - DNA, 28 bp, Artificial Sequence
  Synthetic
gatgagacauttcaccctcuaaaagagt

SEQ ID NO: 92407 - DNA, 24 bp, Artificial Sequence
  Synthetic
ctggataatguagagggcatugct

SEQ ID NO: 92408 - DNA, 23 bp, Artificial Sequence
  Synthetic
aatcagguggacaucaccagaag

SEQ ID NO: 92409 - DNA, 24 bp, Artificial Sequence
  Synthetic
tcctgattggacauctcccaguat

SEQ ID NO: 92410 - DNA, 23 bp, Artificial Sequence
  Synthetic
gagttcacctuctgcgaggauat

SEQ ID NO: 92411 - DNA, 22 bp, Artificial Sequence
  Synthetic
cttccacccacugtgtcttcuc

SEQ ID NO: 92412 - DNA, 26 bp, Artificial Sequence
  Synthetic
tgtcacaacaguacaaatgaguggaa

SEQ ID NO: 92413 - DNA, 24 bp, Artificial Sequence
  Synthetic
ccagatgugaatgtgaagaugggt

SEQ ID NO: 92414 - DNA, 20 bp, Artificial Sequence
  Synthetic
ccaguaggatcuccgccact

SEQ ID NO: 92415 - DNA, 25 bp, Artificial Sequence
  Synthetic
cctctgacugaggtttgtctttcuc

SEQ ID NO: 92416 - DNA, 19 bp, Artificial Sequence
  Synthetic
cctgccutgcctacugaca

SEQ ID NO: 92417 - DNA, 20 bp, Artificial Sequence
  Synthetic
ggacacagaggugacccuca

SEQ ID NO: 92418 - DNA, 26 bp, Artificial Sequence
  Synthetic
gcgggcaccutattctttatctuagg

SEQ ID NO: 92419 - DNA, 21 bp, Artificial Sequence
  Synthetic
catcgcugtcttcttcugggt

SEQ ID NO: 92420 - DNA, 21 bp, Artificial Sequence
  Synthetic
ccgacaccaggaguacctcut

SEQ ID NO: 92421 - DNA, 19 bp, Artificial Sequence
  Synthetic
cccagguggctctacucac

SEQ ID NO: 92422 - DNA, 19 bp, Artificial Sequence
  Synthetic
gctacagggccutgtgugt

SEQ ID NO: 92423 - DNA, 27 bp, Artificial Sequence
  Synthetic
ccutactctcttcaucaaagggaacag

SEQ ID NO: 92424 - DNA, 25 bp, Artificial Sequence
  Synthetic
augttacagaagaugaggaggagga

SEQ ID NO: 92425 - DNA, 19 bp, Artificial Sequence
  Synthetic
gcaggugcacgctctuaca

SEQ ID NO: 92426 - DNA, 25 bp, Artificial Sequence
  Synthetic
ggaagauaauggaacggaggaagaa

SEQ ID NO: 92427 - DNA, 26 bp, Artificial Sequence
  Synthetic
cuaaatactcttttugcacccaccag

SEQ ID NO: 92428 - DNA, 27 bp, Artificial Sequence
  Synthetic
tggccaaacugttcttttgttttaugg

SEQ ID NO: 92429 - DNA, 25 bp, Artificial Sequence
  Synthetic
cgggtatguggctttccttcuaaag

SEQ ID NO: 92430 - DNA, 23 bp, Artificial Sequence
  Synthetic
ctgtgtcaaguggatggtuccat

SEQ ID NO: 92431 - DNA, 25 bp, Artificial Sequence
  Synthetic
gaattuggccaagaaggacugaaag

SEQ ID NO: 92432 - DNA, 22 bp, Artificial Sequence
  Synthetic
accatcacugaccatctccugt

SEQ ID NO: 92433 - DNA, 25 bp, Artificial Sequence
  Synthetic
gcccagcugaactgattacttugat

SEQ ID NO: 92434 - DNA, 21 bp, Artificial Sequence
  Synthetic
ggtcagauggagccctguaat

SEQ ID NO: 92435 - DNA, 28 bp, Artificial Sequence
  Synthetic
gctctcatgtcucaatttttgctttcut

SEQ ID NO: 92436 - DNA, 25 bp, Artificial Sequence
  Synthetic
aggugatgtcttauggagagagacc

SEQ ID NO: 92437 - DNA, 24 bp, Artificial Sequence
  Synthetic
gccacccagutacattatgtucca

SEQ ID NO: 92438 - DNA, 26 bp, Artificial Sequence
  Synthetic
accatcaguatttgaaagtcugcact

SEQ ID NO: 92439 - DNA, 28 bp, Artificial Sequence
  Synthetic
cgatttgtaacaggcutcttggtattuc

SEQ ID NO: 92440 - DNA, 28 bp, Artificial Sequence
  Synthetic
ttcatcauaaaaggtgacuaaaccagca

SEQ ID NO: 92441 - DNA, 22 bp, Artificial Sequence
  Synthetic
ttccatccaggucagcaaucag

SEQ ID NO: 92442 - DNA, 21 bp, Artificial Sequence
  Synthetic
gctcctgcuacatgggactut

SEQ ID NO: 92443 - DNA, 22 bp, Artificial Sequence
  Synthetic
gaatccugatgtggucaccact

SEQ ID NO: 92444 - DNA, 21 bp, Artificial Sequence
  Synthetic
agtuacccagcaugccacaat

SEQ ID NO: 92445 - DNA, 18 bp, Artificial Sequence
  Synthetic
ggaaggtcguggtgcgut

SEQ ID NO: 92446 - DNA, 20 bp, Artificial Sequence
  Synthetic
tggtgcttcucccgtaggua

SEQ ID NO: 92447 - DNA, 21 bp, Artificial Sequence
  Synthetic
gcagaagacucccaagtugga

SEQ ID NO: 92448 - DNA, 22 bp, Artificial Sequence
  Synthetic
guagtacatggcuccacccaac

SEQ ID NO: 92449 - DNA, 24 bp, Artificial Sequence
  Synthetic
gcctggaagcugcatagtatugat

SEQ ID NO: 92450 - DNA, 24 bp, Artificial Sequence
  Synthetic
tctgcctcacuctctgtttctcut

SEQ ID NO: 92451 - DNA, 27 bp, Artificial Sequence
  Synthetic
acataaatcttcugagctgagttccug

SEQ ID NO: 92452 - DNA, 24 bp, Artificial Sequence
  Synthetic
atcaggtttgaguggttcactgut

SEQ ID NO: 92453 - DNA, 21 bp, Artificial Sequence
  Synthetic
tgtcaggcutgaggctacuga

SEQ ID NO: 92454 - DNA, 28 bp, Artificial Sequence
  Synthetic
aacttgagttcuggttaaagctagtcug

SEQ ID NO: 92455 - DNA, 21 bp, Artificial Sequence
  Synthetic
ccuaatuggccggcagaagat

SEQ ID NO: 92456 - DNA, 26 bp, Artificial Sequence
  Synthetic
aagtgcccatutacagtgaagaauct

SEQ ID NO: 92457 - DNA, 22 bp, Artificial Sequence
  Synthetic
ggaacactugccaatggguaca

SEQ ID NO: 92458 - DNA, 22 bp, Artificial Sequence
  Synthetic
gcaagaggcacaaaugtuacca

SEQ ID NO: 92459 - DNA, 27 bp, Artificial Sequence
  Synthetic
ccctcctcuagactgcattgaaauaat

SEQ ID NO: 92460 - DNA, 28 bp, Artificial Sequence
  Synthetic
aattgaagaugacagtgaaguagcagaa

SEQ ID NO: 92461 - DNA, 28 bp, Artificial Sequence
  Synthetic
attaaaauagatgtttccugcccacaga

SEQ ID NO: 92462 - DNA, 24 bp, Artificial Sequence
  Synthetic
ggaagaaccuctcccttucaaact

SEQ ID NO: 92463 - DNA, 28 bp, Artificial Sequence
  Synthetic
tctttgtctcaacuttataggcaccaut

SEQ ID NO: 92464 - DNA, 21 bp, Artificial Sequence
  Synthetic
caguacagaaggcgaauggct

SEQ ID NO: 92465 - DNA, 28 bp, Artificial Sequence
  Synthetic
tgagttgagacugagtgcatttcattua

SEQ ID NO: 92466 - DNA, 28 bp, Artificial Sequence
  Synthetic
gggttttctttugacttatcacctcuca

SEQ ID NO: 92467 - DNA, 22 bp, Artificial Sequence
  Synthetic
gaagctacutgccttttugcca

SEQ ID NO: 92468 - DNA, 20 bp, Artificial Sequence
  Synthetic
cctgucagccagacucagga

SEQ ID NO: 92469 - DNA, 28 bp, Artificial Sequence
  Synthetic
gcaatgacattaagugagaacacaccua

SEQ ID NO: 92470 - DNA, 29 bp, Artificial Sequence
  Synthetic
gaaatttaccauagcaggtcttcttguct

SEQ ID NO: 92471 - DNA, 22 bp, Artificial Sequence
  Synthetic
gtgcagcuaatgauggcaaagg

SEQ ID NO: 92472 - DNA, 26 bp, Artificial Sequence
  Synthetic
agaacaaaugagaatgcagcauacca

SEQ ID NO: 92473 - DNA, 27 bp, Artificial Sequence
  Synthetic
acaaccactgucaattatgtacgugat

SEQ ID NO: 92474 - DNA, 22 bp, Artificial Sequence
  Synthetic
ggtttctctcuctgtgccauct

SEQ ID NO: 92475 - DNA, 29 bp, Artificial Sequence
  Synthetic
gctgatgaauacatgatccccauagaaaa

SEQ ID NO: 92476 - DNA, 27 bp, Artificial Sequence
  Synthetic
tgattgatuagacacatgugagagcag

SEQ ID NO: 92477 - DNA, 24 bp, Artificial Sequence
  Synthetic
tgaataaccccugtcaaccucaga

SEQ ID NO: 92478 - DNA, 21 bp, Artificial Sequence
  Synthetic
ccagggacucctatccccaua

SEQ ID NO: 92479 - DNA, 22 bp, Artificial Sequence
  Synthetic
ggatgttcccautggtctgguc

SEQ ID NO: 92480 - DNA, 22 bp, Artificial Sequence
  Synthetic
aagtttgacaggcacuggctua

SEQ ID NO: 92481 - DNA, 22 bp, Artificial Sequence
  Synthetic
cggcatcatucccaggaaaauc

SEQ ID NO: 92482 - DNA, 21 bp, Artificial Sequence
  Synthetic
tgacctugagggccactguat

SEQ ID NO: 92483 - DNA, 27 bp, Artificial Sequence
  Synthetic
ctgaaagacgaauggtttgatacucac

SEQ ID NO: 92484 - DNA, 18 bp, Artificial Sequence
  Synthetic
gggcaucaggatgugggt

SEQ ID NO: 92485 - DNA, 28 bp, Artificial Sequence
  Synthetic
accacatgcacaautaagaaacattugt

SEQ ID NO: 92486 - DNA, 21 bp, Artificial Sequence
  Synthetic
gccacgagggutagacaaugt

SEQ ID NO: 92487 - DNA, 28 bp, Artificial Sequence
  Synthetic
aggaatgtatuggattcagaaugagcaa

SEQ ID NO: 92488 - DNA, 28 bp, Artificial Sequence
  Synthetic
agagaagcucacaaaaatttgtcttugg

SEQ ID NO: 92489 - DNA, 19 bp, Artificial Sequence
  Synthetic
agctgtcuggtgtgctgut

SEQ ID NO: 92490 - DNA, 26 bp, Artificial Sequence
  Synthetic
acttctgctuttgcttctttuaagcc

SEQ ID NO: 92491 - DNA, 23 bp, Artificial Sequence
  Synthetic
atttgctgtctugcctgtgacua

SEQ ID NO: 92492 - DNA, 23 bp, Artificial Sequence
  Synthetic
gcutctttuaagccaacagcaca

SEQ ID NO: 92493 - DNA, 19 bp, Artificial Sequence
  Synthetic
cccgccacaggagucaaut

SEQ ID NO: 92494 - DNA, 19 bp, Artificial Sequence
  Synthetic
caacagcaucacggtgucc

SEQ ID NO: 92495 - DNA, 21 bp, Artificial Sequence
  Synthetic
tgtgaggccuatgagctccua

SEQ ID NO: 92496 - DNA, 23 bp, Artificial Sequence
  Synthetic
cttgcaautgcttttguccggat

SEQ ID NO: 92497 - DNA, 28 bp, Artificial Sequence
  Synthetic
gtcattcttaccucagtttgtctttucc

SEQ ID NO: 92498 - DNA, 22 bp, Artificial Sequence
  Synthetic
attggcugagaacaaacugggt

SEQ ID NO: 92499 - DNA, 23 bp, Artificial Sequence
  Synthetic
gctctcgaaauttcaccccauga

SEQ ID NO: 92500 - DNA, 33 bp, Artificial Sequence
  Synthetic
atgatacttagguaagatacttacctctugaaa

SEQ ID NO: 92501 - DNA, 27 bp, Artificial Sequence
  Synthetic
cttcattcagugcattcatcttuccat

SEQ ID NO: 92502 - DNA, 27 bp, Artificial Sequence
  Synthetic
caatggaaagaugaatgcactgaauga

SEQ ID NO: 92503 - DNA, 22 bp, Artificial Sequence
  Synthetic
tgaaagacucactgccatucgt

SEQ ID NO: 92504 - DNA, 27 bp, Artificial Sequence
  Synthetic
ggaaagatgaaugcactgaatgaagut

SEQ ID NO: 92505 - DNA, 29 bp, Artificial Sequence
  Synthetic
tcctatgaagaagaacugaaagacucact

SEQ ID NO: 92506 - DNA, 23 bp, Artificial Sequence
  Synthetic
cuaaagcacgagggttuaccaga

SEQ ID NO: 92507 - DNA, 27 bp, Artificial Sequence
  Synthetic
gcagcatcagutgtttgtgtttguaat

SEQ ID NO: 92508 - DNA, 26 bp, Artificial Sequence
  Synthetic
acctggaatatguacggactctguat

SEQ ID NO: 92509 - DNA, 24 bp, Artificial Sequence
  Synthetic
caagcutttcgacauaagggacag

SEQ ID NO: 92510 - DNA, 27 bp, Artificial Sequence
  Synthetic
ggagucaaagtuaagacaagacagagt

SEQ ID NO: 92511 - DNA, 27 bp, Artificial Sequence
  Synthetic
ccaagaaccagaaaugtatcccaguaa

SEQ ID NO: 92512 - DNA, 21 bp, Artificial Sequence
  Synthetic
ctggttugcaggtgacatugg

SEQ ID NO: 92513 - DNA, 23 bp, Artificial Sequence
  Synthetic
gaccaggagaagcucagttugat

SEQ ID NO: 92514 - DNA, 24 bp, Artificial Sequence
  Synthetic
actccaagucaccttucaaaacca

SEQ ID NO: 92515 - DNA, 23 bp, Artificial Sequence
  Synthetic
agtccaguaaacaccaaaucgct

SEQ ID NO: 92516 - DNA, 32 bp, Artificial Sequence
  Synthetic
gaaatgattgcatucaatgtacatatcuaaca

SEQ ID NO: 92517 - DNA, 27 bp, Artificial Sequence
  Synthetic
ggagaatatgatugtgctgatggtuca

SEQ ID NO: 92518 - DNA, 28 bp, Artificial Sequence
  Synthetic
cagtcatctugcccattacatctuaagt

SEQ ID NO: 92519 - DNA, 28 bp, Artificial Sequence
  Synthetic
cacaaattttctcuctctctctcctuct

SEQ ID NO: 92520 - DNA, 20 bp, Artificial Sequence
  Synthetic
ccctctctgucccacccaua

SEQ ID NO: 92521 - DNA, 20 bp, Artificial Sequence
  Synthetic
caggaacucatccucaggca

SEQ ID NO: 92522 - DNA, 26 bp, Artificial Sequence
  Synthetic
acacagaattaucagctggtuggaat

SEQ ID NO: 92523 - DNA, 21 bp, Artificial Sequence
  Synthetic
actgcgguacagtgtaacugg

SEQ ID NO: 92524 - DNA, 21 bp, Artificial Sequence
  Synthetic
gagaagcuggcccagattuga

SEQ ID NO: 92525 - DNA, 22 bp, Artificial Sequence
  Synthetic
ctgagtcacggguatcgtcaut

SEQ ID NO: 92526 - DNA, 20 bp, Artificial Sequence
  Synthetic
agcccugagaatgccttugg

SEQ ID NO: 92527 - DNA, 24 bp, Artificial Sequence
  Synthetic
ggaatgatuagcaggagucagaca

SEQ ID NO: 92528 - DNA, 26 bp, Artificial Sequence
  Synthetic
gataatgaagauaccagtuggaggct

SEQ ID NO: 92529 - DNA, 21 bp, Artificial Sequence
  Synthetic
gaagtgtgaugtgccccauct

SEQ ID NO: 92530 - DNA, 19 bp, Artificial Sequence
  Synthetic
ggccgggutgggatgatuc

SEQ ID NO: 92531 - DNA, 21 bp, Artificial Sequence
  Synthetic
tgcagguagaggagttguggt

SEQ ID NO: 92532 - DNA, 28 bp, Artificial Sequence
  Synthetic
ttttctccagttcucctctacaaatgug

SEQ ID NO: 92533 - DNA, 28 bp, Artificial Sequence
  Synthetic
ccgttttgaagautgttgagaaatugga

SEQ ID NO: 92534 - DNA, 24 bp, Artificial Sequence
  Synthetic
ccagattccatucccttaggcaut

SEQ ID NO: 92535 - DNA, 18 bp, Artificial Sequence
  Synthetic
ccagcuggcctucaccag

SEQ ID NO: 92536 - DNA, 28 bp, Artificial Sequence
  Synthetic
cccaacagtcugtatttcaagtguaaga

SEQ ID NO: 92537 - DNA, 27 bp, Artificial Sequence
  Synthetic
gcagatgaagcauttttctctgugaat

SEQ ID NO: 92538 - DNA, 28 bp, Artificial Sequence
  Synthetic
gtaaatgatucagactttcacuggagga

SEQ ID NO: 92539 - DNA, 23 bp, Artificial Sequence
  Synthetic
aaaccggcacauacatctgtgua

SEQ ID NO: 92540 - DNA, 21 bp, Artificial Sequence
  Synthetic
aaaccggagccaacuttcuct

SEQ ID NO: 92541 - DNA, 19 bp, Artificial Sequence
  Synthetic
gtcccuccccagcatctuc

SEQ ID NO: 92542 - DNA, 21 bp, Artificial Sequence
  Synthetic
gcaacgccutttctggcauac

SEQ ID NO: 92543 - DNA, 22 bp, Artificial Sequence
  Synthetic
aacccgaggugaaaaugaacca

SEQ ID NO: 92544 - DNA, 26 bp, Artificial Sequence
  Synthetic
tccttttgccaacaauccaacatuag

SEQ ID NO: 92545 - DNA, 26 bp, Artificial Sequence
  Synthetic
cattttgccuaccaggaaatttggut

SEQ ID NO: 92546 - DNA, 24 bp, Artificial Sequence
  Synthetic
gcaaggctauaaagtcgctugaaa

SEQ ID NO: 92547 - DNA, 27 bp, Artificial Sequence
  Synthetic
gaccctgtugacagtacttuaagagat

SEQ ID NO: 92548 - DNA, 27 bp, Artificial Sequence
  Synthetic
cctgtactacauggagtctgatgauga

SEQ ID NO: 92549 - DNA, 27 bp, Artificial Sequence
  Synthetic
acaggacctacutctctaatctcagug

SEQ ID NO: 92550 - DNA, 22 bp, Artificial Sequence
  Synthetic
tcatgcauacgctcaaccucag

SEQ ID NO: 92551 - DNA, 23 bp, Artificial Sequence
  Synthetic
ctctaaugccaaggcagtctugt

SEQ ID NO: 92552 - DNA, 20 bp, Artificial Sequence
  Synthetic
cccagggcugtctgtagaug

SEQ ID NO: 92553 - DNA, 20 bp, Artificial Sequence
  Synthetic
ttctgggcgcugtacaugag

SEQ ID NO: 92554 - DNA, 24 bp, Artificial Sequence
  Synthetic
gtttgtatggcucttaccgtcuga

SEQ ID NO: 92555 - DNA, 23 bp, Artificial Sequence
  Synthetic
ggaggcutttctcaatuccgact

SEQ ID NO: 92556 - DNA, 17 bp, Artificial Sequence
  Synthetic
ggcugaccagctccgut

SEQ ID NO: 92557 - DNA, 20 bp, Artificial Sequence
  Synthetic
ggaaggagcuggaucccaat

SEQ ID NO: 92558 - DNA, 20 bp, Artificial Sequence
  Synthetic
gcagtttgcucagctguacc

SEQ ID NO: 92559 - DNA, 22 bp, Artificial Sequence
  Synthetic
acuggagaaauggcacccaaaa

SEQ ID NO: 92560 - DNA, 26 bp, Artificial Sequence
  Synthetic
ccagaaaagaguaccctgtgcttaug

SEQ ID NO: 92561 - DNA, 28 bp, Artificial Sequence
  Synthetic
aatcatccagugctctaattccaugaat

SEQ ID NO: 92562 - DNA, 21 bp, Artificial Sequence
  Synthetic
cgautctgtctucagccacga

SEQ ID NO: 92563 - DNA, 21 bp, Artificial Sequence
  Synthetic
gctatcaaggucgagcacugt

SEQ ID NO: 92564 - DNA, 24 bp, Artificial Sequence
  Synthetic
tuctcgaauacaccgaccacaaaa

SEQ ID NO: 92565 - DNA, 28 bp, Artificial Sequence
  Synthetic
caagggtattcagutgtcagtggttaua

SEQ ID NO: 92566 - DNA, 22 bp, Artificial Sequence
  Synthetic
gggaccguattctgaagcucaa

SEQ ID NO: 92567 - DNA, 21 bp, Artificial Sequence
  Synthetic
accgtguctggaaacauagcc

SEQ ID NO: 92568 - DNA, 22 bp, Artificial Sequence
  Synthetic
cucaagaatuggaagccagcaa

SEQ ID NO: 92569 - DNA, 21 bp, Artificial Sequence
  Synthetic
accagggcccuttttagcuac

SEQ ID NO: 92570 - DNA, 27 bp, Artificial Sequence
  Synthetic
ttcagcagaaaacaaaagugtugaagt

SEQ ID NO: 92571 - DNA, 28 bp, Artificial Sequence
  Synthetic
tutaccagtgagauaggaacaaagcaaa

SEQ ID NO: 92572 - DNA, 27 bp, Artificial Sequence
  Synthetic
cttctgctaataaugcactctgaguga

SEQ ID NO: 92573 - DNA, 28 bp, Artificial Sequence
  Synthetic
agtgttcattgatutggcctttttgaut

SEQ ID NO: 92574 - DNA, 24 bp, Artificial Sequence
  Synthetic
gautaactacucaaaggcccccat

SEQ ID NO: 92575 - DNA, 23 bp, Artificial Sequence
  Synthetic
agcctcucagcaacagaactuac

SEQ ID NO: 92576 - DNA, 23 bp, Artificial Sequence
  Synthetic
gcugaacatccuagaagccaaga

SEQ ID NO: 92577 - DNA, 21 bp, Artificial Sequence
  Synthetic
gtttgccagugtgacuccaac

SEQ ID NO: 92578 - DNA, 22 bp, Artificial Sequence
  Synthetic
ccacaatccugtccacatcugt

SEQ ID NO: 92579 - DNA, 27 bp, Artificial Sequence
  Synthetic
cttgaagctgguatctatgaagtuccc

SEQ ID NO: 92580 - DNA, 24 bp, Artificial Sequence
  Synthetic
agtccacagaugttuccaaacaca

SEQ ID NO: 92581 - DNA, 27 bp, Artificial Sequence
  Synthetic
tgctaacttcccucctttcttttucag

SEQ ID NO: 92582 - DNA, 29 bp, Artificial Sequence
  Synthetic
cctttagtttctuctgcttctagtctuca

SEQ ID NO: 92583 - DNA, 25 bp, Artificial Sequence
  Synthetic
gtgcttgugccgataatcaacttut

SEQ ID NO: 92584 - DNA, 24 bp, Artificial Sequence
  Synthetic
gtgcaagttgucccattttcaucc

SEQ ID NO: 92585 - DNA, 26 bp, Artificial Sequence
  Synthetic
tctgacacattugctttcttcctcut

SEQ ID NO: 92586 - DNA, 23 bp, Artificial Sequence
  Synthetic
ggacttgaauggctcagtgtuct

SEQ ID NO: 92587 - DNA, 21 bp, Artificial Sequence
  Synthetic
tgcttcaggaugcctcatgug

SEQ ID NO: 92588 - DNA, 21 bp, Artificial Sequence
  Synthetic
gacccgaaccaaaccutgtut

SEQ ID NO: 92589 - DNA, 24 bp, Artificial Sequence
  Synthetic
cagtagaagaagauggctguggag

SEQ ID NO: 92590 - DNA, 28 bp, Artificial Sequence
  Synthetic
actaaagtgactucttttctggctctut

SEQ ID NO: 92591 - DNA, 22 bp, Artificial Sequence
  Synthetic
tccuctcctuccccaagaaaca

SEQ ID NO: 92592 - DNA, 21 bp, Artificial Sequence
  Synthetic
ggauctcugaccagaggccaa

SEQ ID NO: 92593 - DNA, 22 bp, Artificial Sequence
  Synthetic
cgtagacaaggagaugcaggua

SEQ ID NO: 92594 - DNA, 22 bp, Artificial Sequence
  Synthetic
ccaucaccccagaagcactuag

SEQ ID NO: 92595 - DNA, 27 bp, Artificial Sequence
  Synthetic
tgctggataccaaugaacatgatuaca

SEQ ID NO: 92596 - DNA, 26 bp, Artificial Sequence
  Synthetic
gggacactugccataaggtttaucag

SEQ ID NO: 92597 - DNA, 24 bp, Artificial Sequence
  Synthetic
ctaatatgaucccagcagccugag

SEQ ID NO: 92598 - DNA, 25 bp, Artificial Sequence
  Synthetic
gcaggaacaucaaatgtcaagtuca

SEQ ID NO: 92599 - DNA, 28 bp, Artificial Sequence
  Synthetic
gggagcttguaggtaaatgaaacauagg

SEQ ID NO: 92600 - DNA, 26 bp, Artificial Sequence
  Synthetic
gucaagtttctttuggagaaggcaaa

SEQ ID NO: 92601 - DNA, 28 bp, Artificial Sequence
  Synthetic
gatgcttttuaagcccaataactgtuga

SEQ ID NO: 92602 - DNA, 19 bp, Artificial Sequence
  Synthetic
ctgcgauccgacucaccaa

SEQ ID NO: 92603 - DNA, 28 bp, Artificial Sequence
  Synthetic
catatcagagcuttgaacaggtagugaa

SEQ ID NO: 92604 - DNA, 21 bp, Artificial Sequence
  Synthetic
ccttgtctgacuctgctgcuc

SEQ ID NO: 92605 - DNA, 21 bp, Artificial Sequence
  Synthetic
gtagctgguggtgtccatcuc

SEQ ID NO: 92606 - DNA, 21 bp, Artificial Sequence
  Synthetic
gggacccagguttaagaugct

SEQ ID NO: 92607 - DNA, 21 bp, Artificial Sequence
  Synthetic
gggagtcacugccattttugg

SEQ ID NO: 92608 - DNA, 18 bp, Artificial Sequence
  Synthetic
gcagcuggtcaccuacga

SEQ ID NO: 92609 - DNA, 18 bp, Artificial Sequence
  Synthetic
cctcgguggcttcugcac

SEQ ID NO: 92610 - DNA, 19 bp, Artificial Sequence
  Synthetic
cccaucccggaagagtuca

SEQ ID NO: 92611 - DNA, 18 bp, Artificial Sequence
  Synthetic
ccgggaggugauccccat

SEQ ID NO: 92612 - DNA, 25 bp, Artificial Sequence
  Synthetic
gtagccugagaagggttctuaacaa

SEQ ID NO: 92613 - DNA, 24 bp, Artificial Sequence
  Synthetic
agtgattucttctgctucaggcaa

SEQ ID NO: 92614 - DNA, 18 bp, Artificial Sequence
  Synthetic
gcccggccutccctcuat

SEQ ID NO: 92615 - DNA, 18 bp, Artificial Sequence
  Synthetic
ggagcccucgtagccgua

SEQ ID NO: 92616 - DNA, 21 bp, Artificial Sequence
  Synthetic
gcaagatcaccugttgccuga

SEQ ID NO: 92617 - DNA, 27 bp, Artificial Sequence
  Synthetic
ggaatgaaaauccaaagcaatguacca

SEQ ID NO: 92618 - DNA, 27 bp, Artificial Sequence
  Synthetic
tccttactttcuccactttgctttuca

SEQ ID NO: 92619 - DNA, 23 bp, Artificial Sequence
  Synthetic
cttucaggagccgguaaaacaag

SEQ ID NO: 92620 - DNA, 17 bp, Artificial Sequence
  Synthetic
gctgaccuggcctucct

SEQ ID NO: 92621 - DNA, 18 bp, Artificial Sequence
  Synthetic
cagcagggucccacucac

SEQ ID NO: 92622 - DNA, 20 bp, Artificial Sequence
  Synthetic
gggagggcaacaucgauacc

SEQ ID NO: 92623 - DNA, 18 bp, Artificial Sequence
  Synthetic
cccacagccuggcttguc

SEQ ID NO: 92624 - DNA, 18 bp, Artificial Sequence
  Synthetic
ggcttgugcagcctcuct

SEQ ID NO: 92625 - DNA, 17 bp, Artificial Sequence
  Synthetic
caccacgcugacccugt

SEQ ID NO: 92626 - DNA, 19 bp, Artificial Sequence
  Synthetic
ccuacgacacgcugcacat

SEQ ID NO: 92627 - DNA, 17 bp, Artificial Sequence
  Synthetic
ggguccgagccguacag

SEQ ID NO: 92628 - DNA, 22 bp, Artificial Sequence
  Synthetic
cactgtctgucctggcttctua

SEQ ID NO: 92629 - DNA, 19 bp, Artificial Sequence
  Synthetic
acagcaugcccgtcaugat

SEQ ID NO: 92630 - DNA, 20 bp, Artificial Sequence
  Synthetic
ccctcagcgcutgcttuact

SEQ ID NO: 92631 - DNA, 22 bp, Artificial Sequence
  Synthetic
gactgaaucggagauggagacc

SEQ ID NO: 92632 - DNA, 23 bp, Artificial Sequence
  Synthetic
cgttctccaugaactctgugaga

SEQ ID NO: 92633 - DNA, 22 bp, Artificial Sequence
  Synthetic
tgtggcaaucaagacccugaag

SEQ ID NO: 92634 - DNA, 20 bp, Artificial Sequence
  Synthetic
ccaggaugggttgccatuga

SEQ ID NO: 92635 - DNA, 24 bp, Artificial Sequence
  Synthetic
ctttctctccuacaagcttuccca

SEQ ID NO: 92636 - DNA, 25 bp, Artificial Sequence
  Synthetic
aacuaattttuggcaacagcaacct

SEQ ID NO: 92637 - DNA, 28 bp, Artificial Sequence
  Synthetic
gtagatactgaucactggagtctucaga

SEQ ID NO: 92638 - DNA, 20 bp, Artificial Sequence
  Synthetic
ggcctcgcucagaaacucac

SEQ ID NO: 92639 - DNA, 21 bp, Artificial Sequence
  Synthetic
gatgacctcugcgtccttgut

SEQ ID NO: 92640 - DNA, 22 bp, Artificial Sequence
  Synthetic
ggccugaaatuccaggacaaca

SEQ ID NO: 92641 - DNA, 20 bp, Artificial Sequence
  Synthetic
gacgtccaggutatggcuca

SEQ ID NO: 92642 - DNA, 18 bp, Artificial Sequence
  Synthetic
ggugucccagccaggaga

SEQ ID NO: 92643 - DNA, 18 bp, Artificial Sequence
  Synthetic
ccucacccagcagctuga

SEQ ID NO: 92644 - DNA, 20 bp, Artificial Sequence
  Synthetic
tggttgugaaggaccuccct

SEQ ID NO: 92645 - DNA, 24 bp, Artificial Sequence
  Synthetic
ggagatcttcucactgggcuacat

SEQ ID NO: 92646 - DNA, 21 bp, Artificial Sequence
  Synthetic
gcctgaacacugcacatugaa

SEQ ID NO: 92647 - DNA, 22 bp, Artificial Sequence
  Synthetic
tcatagcgaaugctcucagcag

SEQ ID NO: 92648 - DNA, 22 bp, Artificial Sequence
  Synthetic
cctcgccaaacucacctucaaa

SEQ ID NO: 92649 - DNA, 24 bp, Artificial Sequence
  Synthetic
tcgatgtctccuacgtcaagatug

SEQ ID NO: 92650 - DNA, 20 bp, Artificial Sequence
  Synthetic
tgaccucgtaguccagcaca

SEQ ID NO: 92651 - DNA, 22 bp, Artificial Sequence
  Synthetic
ggacagagcuaccaugcacaag

SEQ ID NO: 92652 - DNA, 17 bp, Artificial Sequence
  Synthetic
ggcgauggccctggaut

SEQ ID NO: 92653 - DNA, 18 bp, Artificial Sequence
  Synthetic
gaugccugcaccgcaaag

SEQ ID NO: 92654 - DNA, 24 bp, Artificial Sequence
  Synthetic
gtcaccaatucaaaaagcggtuca

SEQ ID NO: 92655 - DNA, 25 bp, Artificial Sequence
  Synthetic
gucataggaaggaugaaaggagcaa

SEQ ID NO: 92656 - DNA, 18 bp, Artificial Sequence
  Synthetic
gttggugcgcccaggaua

SEQ ID NO: 92657 - DNA, 23 bp, Artificial Sequence
  Synthetic
cctgaggcuaatcctgtccttuc

SEQ ID NO: 92658 - DNA, 22 bp, Artificial Sequence
  Synthetic
tgtccucctcgattucagcaag

SEQ ID NO: 92659 - DNA, 24 bp, Artificial Sequence
  Synthetic
ccaacagaugagaacaacgtguca

SEQ ID NO: 92660 - DNA, 27 bp, Artificial Sequence
  Synthetic
atcagatucacacaaacaucaggaaga

SEQ ID NO: 92661 - DNA, 26 bp, Artificial Sequence
  Synthetic
tggctgacgaagugtttttaucaaac

SEQ ID NO: 92662 - DNA, 22 bp, Artificial Sequence
  Synthetic
gttcctgccgaugttagtguca

SEQ ID NO: 92663 - DNA, 23 bp, Artificial Sequence
  Synthetic
ccagacaccautaagccagucac

SEQ ID NO: 92664 - DNA, 22 bp, Artificial Sequence
  Synthetic
ctctcggucactacaggagtuc

SEQ ID NO: 92665 - DNA, 33 bp, Artificial Sequence
  Synthetic
aatcttcagtagauacataatcctgtcatttuc

SEQ ID NO: 92666 - DNA, 20 bp, Artificial Sequence
  Synthetic
ccctctccuccctcagttuc

SEQ ID NO: 92667 - DNA, 24 bp, Artificial Sequence
  Synthetic
gactctgtcuctctgtctgtcuca

SEQ ID NO: 92668 - DNA, 21 bp, Artificial Sequence
  Synthetic
aagucagcaaccccaggatuc

SEQ ID NO: 92669 - DNA, 23 bp, Artificial Sequence
  Synthetic
tgtccaggagugttagucacaca

SEQ ID NO: 92670 - DNA, 26 bp, Artificial Sequence
  Synthetic
acuttcctattaauggaaccgaagcc

SEQ ID NO: 92671 - DNA, 24 bp, Artificial Sequence
  Synthetic
gctggacaaagauggccacauaaa

SEQ ID NO: 92672 - DNA, 25 bp, Artificial Sequence
  Synthetic
ctattaauggaaccgaagccuacct

SEQ ID NO: 92673 - DNA, 25 bp, Artificial Sequence
  Synthetic
cacagttggagaauctaatgcugga

SEQ ID NO: 92674 - DNA, 28 bp, Artificial Sequence
  Synthetic
ccagaaaaggagaauaauagaacaggga

SEQ ID NO: 92675 - DNA, 25 bp, Artificial Sequence
  Synthetic
gctgtcagttaugtgatggctacug

SEQ ID NO: 92676 - DNA, 25 bp, Artificial Sequence
  Synthetic
tcctcttatgtgutcgctttcctug

SEQ ID NO: 92677 - DNA, 26 bp, Artificial Sequence
  Synthetic
agcuaaaacggugaagcaaaacaaaa

SEQ ID NO: 92678 - DNA, 21 bp, Artificial Sequence
  Synthetic
tcacuacctuccgcacaacag

SEQ ID NO: 92679 - DNA, 27 bp, Artificial Sequence
  Synthetic
gccaagaaagtucaaaagaatcctuca

SEQ ID NO: 92680 - DNA, 19 bp, Artificial Sequence
  Synthetic
tggccauctttguccagca

SEQ ID NO: 92681 - DNA, 28 bp, Artificial Sequence
  Synthetic
ttccaaaataccutactcagcatucagt

SEQ ID NO: 92682 - DNA, 21 bp, Artificial Sequence
  Synthetic
tggcatgugccaccattguaa

SEQ ID NO: 92683 - DNA, 27 bp, Artificial Sequence
  Synthetic
agctttcagcaauaatgttgccaauaa

SEQ ID NO: 92684 - DNA, 18 bp, Artificial Sequence
  Synthetic
ccactgugccccagagut

SEQ ID NO: 92685 - DNA, 20 bp, Artificial Sequence
  Synthetic
gtcttcctcugcctctgcug

SEQ ID NO: 92686 - DNA, 19 bp, Artificial Sequence
  Synthetic
ccaccaggugcaggugaag

SEQ ID NO: 92687 - DNA, 17 bp, Artificial Sequence
  Synthetic
cccugccggtcacuaca

SEQ ID NO: 92688 - DNA, 24 bp, Artificial Sequence
  Synthetic
agcaagcaaguaacguagaaacca

SEQ ID NO: 92689 - DNA, 22 bp, Artificial Sequence
  Synthetic
gttgccuctttcatcugccaag

SEQ ID NO: 92690 - DNA, 19 bp, Artificial Sequence
  Synthetic
ggccctuggactgccauat

SEQ ID NO: 92691 - DNA, 19 bp, Artificial Sequence
  Synthetic
gcctucacactcctugcac

SEQ ID NO: 92692 - DNA, 25 bp, Artificial Sequence
  Synthetic
aaautatccacguaaaccacaccga

SEQ ID NO: 92693 - DNA, 28 bp, Artificial Sequence
  Synthetic
tgatggcattccucactgtaaagauaaa

SEQ ID NO: 92694 - DNA, 21 bp, Artificial Sequence
  Synthetic
ggacctgcucttcaatgucgt

SEQ ID NO: 92695 - DNA, 22 bp, Artificial Sequence
  Synthetic
actaacacucggctctcaguca

SEQ ID NO: 92696 - DNA, 22 bp, Artificial Sequence
  Synthetic
tttaggtctugggtctcccgua

SEQ ID NO: 92697 - DNA, 23 bp, Artificial Sequence
  Synthetic
ggagagcagcgguagtaggauaa

SEQ ID NO: 92698 - DNA, 21 bp, Artificial Sequence
  Synthetic
gucctcctuaagcacccaact

SEQ ID NO: 92699 - DNA, 24 bp, Artificial Sequence
  Synthetic
ggaacttucagaagaggtgcugac

SEQ ID NO: 92700 - DNA, 20 bp, Artificial Sequence
  Synthetic
gcagggaugaggtccactuc

SEQ ID NO: 92701 - DNA, 20 bp, Artificial Sequence
  Synthetic
tgagcucagacaccccatua

SEQ ID NO: 92702 - DNA, 20 bp, Artificial Sequence
  Synthetic
gaggagaagccgaugtguga

SEQ ID NO: 92703 - DNA, 21 bp, Artificial Sequence
  Synthetic
cggaacucgtgcacucagaag

SEQ ID NO: 92704 - DNA, 26 bp, Artificial Sequence
  Synthetic
ccacaguagagcagtttttcatcuga

SEQ ID NO: 92705 - DNA, 26 bp, Artificial Sequence
  Synthetic
ttgccatugcacaaaagtattgacut

SEQ ID NO: 92706 - DNA, 21 bp, Artificial Sequence
  Synthetic
catcttagaggugcaggcugt

SEQ ID NO: 92707 - DNA, 22 bp, Artificial Sequence
  Synthetic
ccaggcuggagatcaggaguag

SEQ ID NO: 92708 - DNA, 22 bp, Artificial Sequence
  Synthetic
ctgaatcggucttccaucaggt

SEQ ID NO: 92709 - DNA, 27 bp, Artificial Sequence
  Synthetic
cgtttgcattugatttgtctgatugct

SEQ ID NO: 92710 - DNA, 22 bp, Artificial Sequence
  Synthetic
cagcaagcacugtgctaguaga

SEQ ID NO: 92711 - DNA, 23 bp, Artificial Sequence
  Synthetic
acggtucaagaaacttgcugaca

SEQ ID NO: 92712 - DNA, 17 bp, Artificial Sequence
  Synthetic
gcctgcucccgaaggua

SEQ ID NO: 92713 - DNA, 18 bp, Artificial Sequence
  Synthetic
ccgctgcuggagttgguc

SEQ ID NO: 92714 - DNA, 23 bp, Artificial Sequence
  Synthetic
acccgtccguactggtgttatua

SEQ ID NO: 92715 - DNA, 20 bp, Artificial Sequence
  Synthetic
cgcutgaggagauggaagcc

SEQ ID NO: 92716 - DNA, 23 bp, Artificial Sequence
  Synthetic
cctagaacugatgguacgcaagt

SEQ ID NO: 92717 - DNA, 26 bp, Artificial Sequence
  Synthetic
cttgtgaaaauggaggaagatgcaut

SEQ ID NO: 92718 - DNA, 23 bp, Artificial Sequence
  Synthetic
ccattcuggcagtagttgcuaca

SEQ ID NO: 92719 - DNA, 27 bp, Artificial Sequence
  Synthetic
agtuaacttgtgaaaauggaggaagat

SEQ ID NO: 92720 - DNA, 28 bp, Artificial Sequence
  Synthetic
tgcatcttccuccattttcacaagtuaa

SEQ ID NO: 92721 - DNA, 31 bp, Artificial Sequence
  Synthetic
gggttaattattttauggaaacacaagaucc

SEQ ID NO: 92722 - DNA, 19 bp, Artificial Sequence
  Synthetic
cctctucgggcgacaugat

SEQ ID NO: 92723 - DNA, 18 bp, Artificial Sequence
  Synthetic
cacccucacgccagacuc

SEQ ID NO: 92724 - DNA, 25 bp, Artificial Sequence
  Synthetic
tcagattgucacaaactgcctugat

SEQ ID NO: 92725 - DNA, 22 bp, Artificial Sequence
  Synthetic
ctgtauccaagctcgguggaaa

SEQ ID NO: 92726 - DNA, 23 bp, Artificial Sequence
  Synthetic
tcagtcaucacctccaccauaca

SEQ ID NO: 92727 - DNA, 25 bp, Artificial Sequence
  Synthetic
caccatatgacuccctgttagtgut

SEQ ID NO: 92728 - DNA, 23 bp, Artificial Sequence
  Synthetic
atgaaggucaggacttggaagug

SEQ ID NO: 92729 - DNA, 27 bp, Artificial Sequence
  Synthetic
cttggagatccuggtgctactagtaua

SEQ ID NO: 92730 - DNA, 20 bp, Artificial Sequence
  Synthetic
ggagagccuttctgctcuga

SEQ ID NO: 92731 - DNA, 21 bp, Artificial Sequence
  Synthetic
cctaccacaccacuggctuac

SEQ ID NO: 92732 - DNA, 22 bp, Artificial Sequence
  Synthetic
gggcagcuattgatacctugct

SEQ ID NO: 92733 - DNA, 22 bp, Artificial Sequence
  Synthetic
cccctucaggagtggttctuac

SEQ ID NO: 92734 - DNA, 24 bp, Artificial Sequence
  Synthetic
accttccttauctgtctccuagcc

SEQ ID NO: 92735 - DNA, 23 bp, Artificial Sequence
  Synthetic
tgccagttcuccatttgggttut

SEQ ID NO: 92736 - DNA, 20 bp, Artificial Sequence
  Synthetic
cagtcaucgtcgccaucaca

SEQ ID NO: 92737 - DNA, 29 bp, Artificial Sequence
  Synthetic
tggactgactguagctagcattattcaua

SEQ ID NO: 92738 - DNA, 20 bp, Artificial Sequence
  Synthetic
ccccucagacagggtcttug

SEQ ID NO: 92739 - DNA, 20 bp, Artificial Sequence
  Synthetic
acctccuacccttgggucat

SEQ ID NO: 92740 - DNA, 19 bp, Artificial Sequence
  Synthetic
gaggtggutgccgatguga

SEQ ID NO: 92741 - DNA, 19 bp, Artificial Sequence
  Synthetic
gtaacccucccccucccaa

SEQ ID NO: 92742 - DNA, 21 bp, Artificial Sequence
  Synthetic
gagccacugccttcataguca

SEQ ID NO: 92743 - DNA, 27 bp, Artificial Sequence
  Synthetic
tggttttgtaaagugtaaccctctcut

SEQ ID NO: 92744 - DNA, 27 bp, Artificial Sequence
  Synthetic
cccaaatauaagaccattagtgccuga

SEQ ID NO: 92745 - DNA, 28 bp, Artificial Sequence
  Synthetic
caatcggctutcaaaacatgguaaagaa

SEQ ID NO: 92746 - DNA, 22 bp, Artificial Sequence
  Synthetic
aaaggttguccttcctgugacc

SEQ ID NO: 92747 - DNA, 25 bp, Artificial Sequence
  Synthetic
gccctgtaaugtttatgcgatcuac

SEQ ID NO: 92748 - DNA, 28 bp, Artificial Sequence
  Synthetic
gcaaccuccatcaaatttuaaagacaca

SEQ ID NO: 92749 - DNA, 24 bp, Artificial Sequence
  Synthetic
gcaacacuggaagaagtgtgatuc

SEQ ID NO: 92750 - DNA, 20 bp, Artificial Sequence
  Synthetic
gggaaucttuggcccaccat

SEQ ID NO: 92751 - DNA, 26 bp, Artificial Sequence
  Synthetic
cttcacucacaacgaaattgtcucag

SEQ ID NO: 92752 - DNA, 25 bp, Artificial Sequence
  Synthetic
tgctacaatuaaatcagccatugcc

SEQ ID NO: 92753 - DNA, 28 bp, Artificial Sequence
  Synthetic
agacgaucaaaacaagactgaaugaagt

SEQ ID NO: 92754 - DNA, 23 bp, Artificial Sequence
  Synthetic
cagcccuaaagccatatucggat

SEQ ID NO: 92755 - DNA, 23 bp, Artificial Sequence
  Synthetic
ctgagcaugccaagttcctgaua

SEQ ID NO: 92756 - DNA, 28 bp, Artificial Sequence
  Synthetic
ctgatatttgtagguggtgatccaugaa

SEQ ID NO: 92757 - DNA, 21 bp, Artificial Sequence
  Synthetic
cgaaccatucgaacagctucc

SEQ ID NO: 92758 - DNA, 21 bp, Artificial Sequence
  Synthetic
agactccagucacaggtggua

SEQ ID NO: 92759 - DNA, 28 bp, Artificial Sequence
  Synthetic
aactgaaggactuatttggtgtccauag

SEQ ID NO: 92760 - DNA, 21 bp, Artificial Sequence
  Synthetic
ccccacccutcatgtgaagua

SEQ ID NO: 92761 - DNA, 23 bp, Artificial Sequence
  Synthetic
caccutctgatttcuccccacag

SEQ ID NO: 92762 - DNA, 27 bp, Artificial Sequence
  Synthetic
caaagacagugttaattgugcaagaca

SEQ ID NO: 92763 - DNA, 26 bp, Artificial Sequence
  Synthetic
gttattcacaaaccucgacauaggga

SEQ ID NO: 92764 - DNA, 22 bp, Artificial Sequence
  Synthetic
gggtctcttugtcttgggcaua

SEQ ID NO: 92765 - DNA, 28 bp, Artificial Sequence
  Synthetic
cttttacagugaagtttagcaacugcaa

SEQ ID NO: 92766 - DNA, 22 bp, Artificial Sequence
  Synthetic
ccaagccccuattcccaucaaa

SEQ ID NO: 92767 - DNA, 23 bp, Artificial Sequence
  Synthetic
ttttgttccttucccatcggcua

SEQ ID NO: 92768 - DNA, 22 bp, Artificial Sequence
  Synthetic
tggacacuggccaagatttuct

SEQ ID NO: 92769 - DNA, 25 bp, Artificial Sequence
  Synthetic
gcttttctgautggcttacaaucct

SEQ ID NO: 92770 - DNA, 18 bp, Artificial Sequence
  Synthetic
ccacucugccccggaaaa

SEQ ID NO: 92771 - DNA, 18 bp, Artificial Sequence
  Synthetic
gucactcuggcgggacac

SEQ ID NO: 92772 - DNA, 27 bp, Artificial Sequence
  Synthetic
gggcataatguagaagtgtcuggaaac

SEQ ID NO: 92773 - DNA, 28 bp, Artificial Sequence
  Synthetic
gatgatcaactuccttgcaatgtaacut

SEQ ID NO: 92774 - DNA, 21 bp, Artificial Sequence
  Synthetic
tggcttuggaccagtcctuac

SEQ ID NO: 92775 - DNA, 29 bp, Artificial Sequence
  Synthetic
gcctacttgattcaugtgctctgtattut

SEQ ID NO: 92776 - DNA, 23 bp, Artificial Sequence
  Synthetic
ccagaagugaaaggagcuaccaa

SEQ ID NO: 92777 - DNA, 19 bp, Artificial Sequence
  Synthetic
gggaguaccacgucagagg

SEQ ID NO: 92778 - DNA, 26 bp, Artificial Sequence
  Synthetic
agggcacatguaaatatcaaggctut

SEQ ID NO: 92779 - DNA, 25 bp, Artificial Sequence
  Synthetic
catatgaauccacaagggtaugcct

SEQ ID NO: 92780 - DNA, 24 bp, Artificial Sequence
  Synthetic
acacaacguggcttgcatuaaaaa

SEQ ID NO: 92781 - DNA, 21 bp, Artificial Sequence
  Synthetic
gccutguccacaaacaccagt

SEQ ID NO: 92782 - DNA, 28 bp, Artificial Sequence
  Synthetic
gtaatcagatcctuctactccacggaua

SEQ ID NO: 92783 - DNA, 22 bp, Artificial Sequence
  Synthetic
cctatucaacagcgtcuagcca

SEQ ID NO: 92784 - DNA, 24 bp, Artificial Sequence
  Synthetic
ccggccauggaatgtattctctut

SEQ ID NO: 92785 - DNA, 22 bp, Artificial Sequence
  Synthetic
gcacctccuactccctacucac

SEQ ID NO: 92786 - DNA, 26 bp, Artificial Sequence
  Synthetic
gaagattggcacugataaacctugag

SEQ ID NO: 92787 - DNA, 22 bp, Artificial Sequence
  Synthetic
gggtacacugcattcaaacugt

SEQ ID NO: 92788 - DNA, 22 bp, Artificial Sequence
  Synthetic
agtuaagaagcaacccccucac

SEQ ID NO: 92789 - DNA, 21 bp, Artificial Sequence
  Synthetic
agtctggaggcuggcatcuat

SEQ ID NO: 92790 - DNA, 20 bp, Artificial Sequence
  Synthetic
cgagguccccagctaggtua

SEQ ID NO: 92791 - DNA, 21 bp, Artificial Sequence
  Synthetic
gagcctcaugaagcagagguc

SEQ ID NO: 92792 - DNA, 22 bp, Artificial Sequence
  Synthetic
ccaccctcugatgcagtcauag

SEQ ID NO: 92793 - DNA, 25 bp, Artificial Sequence
  Synthetic
caggagcugcaaacattgacattut

SEQ ID NO: 92794 - DNA, 23 bp, Artificial Sequence
  Synthetic
ggttcagccugtctgtgatucat

SEQ ID NO: 92795 - DNA, 23 bp, Artificial Sequence
  Synthetic
ctctgccccugaatcagcttuaa

SEQ ID NO: 92796 - DNA, 23 bp, Artificial Sequence
  Synthetic
ctaaucagcacagtggucagaga

SEQ ID NO: 92797 - DNA, 21 bp, Artificial Sequence
  Synthetic
gtcacagucctggtcaauggg

SEQ ID NO: 92798 - DNA, 21 bp, Artificial Sequence
  Synthetic
cutgggcactuacgacaaggt

SEQ ID NO: 92799 - DNA, 22 bp, Artificial Sequence
  Synthetic
ggaacaccugcaggagtcttut

SEQ ID NO: 92800 - DNA, 24 bp, Artificial Sequence
  Synthetic
gctctgcugaccactgaatuagac

SEQ ID NO: 92801 - DNA, 21 bp, Artificial Sequence
  Synthetic
cccacccaugtaccagctcua

SEQ ID NO: 92802 - DNA, 24 bp, Artificial Sequence
  Synthetic
cccacacagggugacattcctaua

SEQ ID NO: 92803 - DNA, 26 bp, Artificial Sequence
  Synthetic
tggactttgguatcacataggaguca

SEQ ID NO: 92804 - DNA, 22 bp, Artificial Sequence
  Synthetic
catgttucagggagggaccaut

SEQ ID NO: 92805 - DNA, 26 bp, Artificial Sequence
  Synthetic
gaggtgaaaauaccactagcatccua

SEQ ID NO: 92806 - DNA, 20 bp, Artificial Sequence
  Synthetic
tgtugacacgcacacaguga

SEQ ID NO: 92807 - DNA, 18 bp, Artificial Sequence
  Synthetic
gcagugcgagaccaccug

SEQ ID NO: 92808 - DNA, 21 bp, Artificial Sequence
  Synthetic
ggtuggaaaggaagtccuggt

SEQ ID NO: 92809 - DNA, 20 bp, Artificial Sequence
  Synthetic
gcaatgatgguggccttguc

SEQ ID NO: 92810 - DNA, 20 bp, Artificial Sequence
  Synthetic
gcacaggaaacguccgctua

SEQ ID NO: 92811 - DNA, 21 bp, Artificial Sequence
  Synthetic
gctgaccucctggtctgttut

SEQ ID NO: 92812 - DNA, 20 bp, Artificial Sequence
  Synthetic
ccctgacacucgctggtuag

SEQ ID NO: 92813 - DNA, 24 bp, Artificial Sequence
  Synthetic
tgautttgagttugggagaccaca

SEQ ID NO: 92814 - DNA, 27 bp, Artificial Sequence
  Synthetic
tgaagagcaauatttccauccagaaca

SEQ ID NO: 92815 - DNA, 23 bp, Artificial Sequence
  Synthetic
gatctccagugtgatcgactuga

SEQ ID NO: 92816 - DNA, 27 bp, Artificial Sequence
  Synthetic
tctagggtgaauttcagtcattuagcc

SEQ ID NO: 92817 - DNA, 21 bp, Artificial Sequence
  Synthetic
tgggtccuctgaagccuagaa

SEQ ID NO: 92818 - DNA, 24 bp, Artificial Sequence
  Synthetic
gcccttgacutctttcacagugag

SEQ ID NO: 92819 - DNA, 25 bp, Artificial Sequence
  Synthetic
ccaatgccautgttatgctgtuaca

SEQ ID NO: 92820 - DNA, 23 bp, Artificial Sequence
  Synthetic
catctgctuctgacgtactugga

SEQ ID NO: 92821 - DNA, 22 bp, Artificial Sequence
  Synthetic
catgugggaggaagtaaccuct

SEQ ID NO: 92822 - DNA, 20 bp, Artificial Sequence
  Synthetic
ctgaaccauctccgcaguca

SEQ ID NO: 92823 - DNA, 28 bp, Artificial Sequence
  Synthetic
agagtgttttgatuctgtgaagcacuaa

SEQ ID NO: 92824 - DNA, 24 bp, Artificial Sequence
  Synthetic
ggguaaaggccttgttauaaccaa

SEQ ID NO: 92825 - DNA, 21 bp, Artificial Sequence
  Synthetic
ggacagaacaccacgucaguc

SEQ ID NO: 92826 - DNA, 21 bp, Artificial Sequence
  Synthetic
ggctaaccuggcagagaaugg

SEQ ID NO: 92827 - DNA, 23 bp, Artificial Sequence
  Synthetic
catgtggugggaccatactuact

SEQ ID NO: 92828 - DNA, 26 bp, Artificial Sequence
  Synthetic
ggacaccatagcaugatagtcccuaa

SEQ ID NO: 92829 - DNA, 26 bp, Artificial Sequence
  Synthetic
catgcttccucaactcttcaucaaac

SEQ ID NO: 92830 - DNA, 26 bp, Artificial Sequence
  Synthetic
gtgctatacagugagcatttgguact

SEQ ID NO: 92831 - DNA, 28 bp, Artificial Sequence
  Synthetic
cgaattatgtcaugcacagtcaauaaca

SEQ ID NO: 92832 - DNA, 23 bp, Artificial Sequence
  Synthetic
gaattaggugctttcctcuccca

SEQ ID NO: 92833 - DNA, 21 bp, Artificial Sequence
  Synthetic
cctctgaauggcgtggatguc

SEQ ID NO: 92834 - DNA, 19 bp, Artificial Sequence
  Synthetic
tggaagagguccgugcaga

SEQ ID NO: 92835 - DNA, 21 bp, Artificial Sequence
  Synthetic
tcactccttgugtgccctcua

SEQ ID NO: 92836 - DNA, 27 bp, Artificial Sequence
  Synthetic
agattcttgtgcautgtgatttcgtut

SEQ ID NO: 92837 - DNA, 27 bp, Artificial Sequence
  Synthetic
gatcaagttgtucaggagaaaaauccc

SEQ ID NO: 92838 - DNA, 19 bp, Artificial Sequence
  Synthetic
gctgacgguccctttgcut

SEQ ID NO: 92839 - DNA, 22 bp, Artificial Sequence
  Synthetic
gcagtgttuctgcggaaauagg

SEQ ID NO: 92840 - DNA, 22 bp, Artificial Sequence
  Synthetic
ggcaggtcugctggtcaataua

SEQ ID NO: 92841 - DNA, 27 bp, Artificial Sequence
  Synthetic
agaaatgggtaugcttgttctgguaat

SEQ ID NO: 92842 - DNA, 22 bp, Artificial Sequence
  Synthetic
tccccagaaggaugactgagut

SEQ ID NO: 92843 - DNA, 18 bp, Artificial Sequence
  Synthetic
ggttctucgcccgtgguc

SEQ ID NO: 92844 - DNA, 23 bp, Artificial Sequence
  Synthetic
ttggcatgggauttttctccuga

SEQ ID NO: 92845 - DNA, 28 bp, Artificial Sequence
  Synthetic
caccacagactguttaatgggatttcua

SEQ ID NO: 92846 - DNA, 21 bp, Artificial Sequence
  Synthetic
cttccaggugccatgctaugt

SEQ ID NO: 92847 - DNA, 22 bp, Artificial Sequence
  Synthetic
ccucagccccacaaagatucat

SEQ ID NO: 92848 - DNA, 27 bp, Artificial Sequence
  Synthetic
ccatgttaacugcaatgatacccaaut

SEQ ID NO: 92849 - DNA, 29 bp, Artificial Sequence
  Synthetic
gtcgacacaaauccattgaactctttuat

SEQ ID NO: 92850 - DNA, 19 bp, Artificial Sequence
  Synthetic
caucgacgacaccacugga

SEQ ID NO: 92851 - DNA, 28 bp, Artificial Sequence
  Synthetic
ggctcattgtcautgatgtcttgaatut

SEQ ID NO: 92852 - DNA, 24 bp, Artificial Sequence
  Synthetic
tgttgtttgtggucttgttgctut

SEQ ID NO: 92853 - DNA, 19 bp, Artificial Sequence
  Synthetic
gcatcgugttgtucacgca

SEQ ID NO: 92854 - DNA, 21 bp, Artificial Sequence
  Synthetic
ggtgagccugttaatcugcgt

SEQ ID NO: 92855 - DNA, 26 bp, Artificial Sequence
  Synthetic
cagcaaaggaaccucctaagacttua

SEQ ID NO: 92856 - DNA, 21 bp, Artificial Sequence
  Synthetic
tggcugccacacttccatuaa

SEQ ID NO: 92857 - DNA, 21 bp, Artificial Sequence
  Synthetic
cggtaauaaccgguccgacag

SEQ ID NO: 92858 - DNA, 21 bp, Artificial Sequence
  Synthetic
gcccataugcctctcuccaac

SEQ ID NO: 92859 - DNA, 25 bp, Artificial Sequence
  Synthetic
gccatttccuccataccctttacuc

SEQ ID NO: 92860 - DNA, 24 bp, Artificial Sequence
  Synthetic
cgtgaacaacacgaugcttuagaa

SEQ ID NO: 92861 - DNA, 21 bp, Artificial Sequence
  Synthetic
acutacctatgugggcagcct

SEQ ID NO: 92862 - DNA, 28 bp, Artificial Sequence
  Synthetic
gatctataactggutcaccaggatgtuc

SEQ ID NO: 92863 - DNA, 24 bp, Artificial Sequence
  Synthetic
gcaggacuaatggttuagggaact

SEQ ID NO: 92864 - DNA, 22 bp, Artificial Sequence
  Synthetic
cccgagucagagttcatcauca

SEQ ID NO: 92865 - DNA, 22 bp, Artificial Sequence
  Synthetic
aatcagcgagucaccacctuac

SEQ ID NO: 92866 - DNA, 24 bp, Artificial Sequence
  Synthetic
agcctgcuagaagctacctauacc

SEQ ID NO: 92867 - DNA, 20 bp, Artificial Sequence
  Synthetic
ctcaccgucacagccuacac

SEQ ID NO: 92868 - DNA, 20 bp, Artificial Sequence
  Synthetic
gugaagccttuccccaccaa

SEQ ID NO: 92869 - DNA, 22 bp, Artificial Sequence
  Synthetic
tcggtccugtgacattgugaac

SEQ ID NO: 92870 - DNA, 27 bp, Artificial Sequence
  Synthetic
catacctggcaauaaaggaacgaatut

SEQ ID NO: 92871 - DNA, 25 bp, Artificial Sequence
  Synthetic
agggactaaugacagtatgctguct

SEQ ID NO: 92872 - DNA, 26 bp, Artificial Sequence
  Synthetic
tgctgacataauggaacactagctut

SEQ ID NO: 92873 - DNA, 18 bp, Artificial Sequence
  Synthetic
cctcccucctggagcugt

SEQ ID NO: 92874 - DNA, 18 bp, Artificial Sequence
  Synthetic
ggcgtcucccatcugcac

SEQ ID NO: 92875 - DNA, 20 bp, Artificial Sequence
  Synthetic
tugcaccaucagggaaccaa

SEQ ID NO: 92876 - DNA, 20 bp, Artificial Sequence
  Synthetic
ctccccucgcttccaaugaa

SEQ ID NO: 92877 - DNA, 24 bp, Artificial Sequence
  Synthetic
ggagaagcagcaucttccagaaua

SEQ ID NO: 92878 - DNA, 24 bp, Artificial Sequence
  Synthetic
gcttcagagggucagacatacugt

SEQ ID NO: 92879 - DNA, 23 bp, Artificial Sequence
  Synthetic
ctgttggaaugcatcggatctug

SEQ ID NO: 92880 - DNA, 21 bp, Artificial Sequence
  Synthetic
cgagcaccauctcctttggut

SEQ ID NO: 92881 - DNA, 27 bp, Artificial Sequence
  Synthetic
ccagagcatuagtagcatgtttugaat

SEQ ID NO: 92882 - DNA, 23 bp, Artificial Sequence
  Synthetic
gcgtcatguaagcatcaaucacc

SEQ ID NO: 92883 - DNA, 23 bp, Artificial Sequence
  Synthetic
gcttcagtcaugctcatgggtut

SEQ ID NO: 92884 - DNA, 21 bp, Artificial Sequence
  Synthetic
caagctccccuaccatgacut

SEQ ID NO: 92885 - DNA, 26 bp, Artificial Sequence
  Synthetic
ccacaccctuaagagaagaaaacuca

SEQ ID NO: 92886 - DNA, 21 bp, Artificial Sequence
  Synthetic
accagagggucucaccaacat

SEQ ID NO: 92887 - DNA, 23 bp, Artificial Sequence
  Synthetic
gtttctctggugactcccagtuc

SEQ ID NO: 92888 - DNA, 23 bp, Artificial Sequence
  Synthetic
agtccaugtaggtcucagacaca

SEQ ID NO: 92889 - DNA, 24 bp, Artificial Sequence
  Synthetic
cctcattctgcuggaactgatguc

SEQ ID NO: 92890 - DNA, 28 bp, Artificial Sequence
  Synthetic
gagtttgaaacuagtccagactgtaugt

SEQ ID NO: 92891 - DNA, 28 bp, Artificial Sequence
  Synthetic
tgcaatgucccaagcaatatacctuaaa

SEQ ID NO: 92892 - DNA, 24 bp, Artificial Sequence
  Synthetic
cgttttgtucactgtaaccugcaa

SEQ ID NO: 92893 - DNA, 26 bp, Artificial Sequence
  Synthetic
ttgatgatagugagaggtctcucaaa

SEQ ID NO: 92894 - DNA, 28 bp, Artificial Sequence
  Synthetic
aggatccatatguataactgaggtugga

SEQ ID NO: 92895 - DNA, 24 bp, Artificial Sequence
  Synthetic
ccagcaaugcatcaatacauacgg

SEQ ID NO: 92896 - DNA, 22 bp, Artificial Sequence
  Synthetic
gaaactctucatgtccccucca

SEQ ID NO: 92897 - DNA, 22 bp, Artificial Sequence
  Synthetic
cctcctgguaacgggatatguc

SEQ ID NO: 92898 - DNA, 23 bp, Artificial Sequence
  Synthetic
gcaggttugcttattggugaagg

SEQ ID NO: 92899 - DNA, 24 bp, Artificial Sequence
  Synthetic
ctgggtgctuctactgcagaaaua

SEQ ID NO: 92900 - DNA, 24 bp, Artificial Sequence
  Synthetic
ccuatggtaatugaagcccaagga

SEQ ID NO: 92901 - DNA, 25 bp, Artificial Sequence
  Synthetic
gagaggagaagcccuattttgtuca

SEQ ID NO: 92902 - DNA, 23 bp, Artificial Sequence
  Synthetic
gcacctugttgtctgtugaccat

SEQ ID NO: 92903 - DNA, 20 bp, Artificial Sequence
  Synthetic
caatgucagcccagccauac

SEQ ID NO: 92904 - DNA, 23 bp, Artificial Sequence
  Synthetic
cgagcaaagaaagccaugttguc

SEQ ID NO: 92905 - DNA, 24 bp, Artificial Sequence
  Synthetic
caacugtctttgguggagaaggat

SEQ ID NO: 92906 - DNA, 23 bp, Artificial Sequence
  Synthetic
ctgtacagaggcacutgtaaguc

SEQ ID NO: 92907 - DNA, 25 bp, Artificial Sequence
  Synthetic
gctcattttucttttcccagugcaa

SEQ ID NO: 92908 - DNA, 23 bp, Artificial Sequence
  Synthetic
tcaagagucucaacacgggaaac

SEQ ID NO: 92909 - DNA, 28 bp, Artificial Sequence
  Synthetic
gttgcttcaagacutcaatcgttttcut

SEQ ID NO: 92910 - DNA, 22 bp, Artificial Sequence
  Synthetic
catttcccacugtccctuccaa

SEQ ID NO: 92911 - DNA, 21 bp, Artificial Sequence
  Synthetic
cauaaaagcaaccgcctuccc

SEQ ID NO: 92912 - DNA, 23 bp, Artificial Sequence
  Synthetic
cttgactgcauggttctagcuga

SEQ ID NO: 92913 - DNA, 26 bp, Artificial Sequence
  Synthetic
atgaccacatuctcttattgctucca

SEQ ID NO: 92914 - DNA, 28 bp, Artificial Sequence
  Synthetic
gtattacctgcauaaaactctgaaugcc

SEQ ID NO: 92915 - DNA, 24 bp, Artificial Sequence
  Synthetic
gaccagtcccugctgacatttaut

SEQ ID NO: 92916 - DNA, 24 bp, Artificial Sequence
  Synthetic
cgtcatccutcagttggaauccag

SEQ ID NO: 92917 - DNA, 24 bp, Artificial Sequence
  Synthetic
aaatgcugggagacagaaagacut

SEQ ID NO: 92918 - DNA, 24 bp, Artificial Sequence
  Synthetic
gggcattaacauatcccattgugt

SEQ ID NO: 92919 - DNA, 20 bp, Artificial Sequence
  Synthetic
ccagcutcctaugcccagag

SEQ ID NO: 92920 - DNA, 23 bp, Artificial Sequence
  Synthetic
gguggaaagaaagagaagguggt

SEQ ID NO: 92921 - DNA, 25 bp, Artificial Sequence
  Synthetic
gagggacccaauaatugcaaaacag

SEQ ID NO: 92922 - DNA, 28 bp, Artificial Sequence
  Synthetic
tttcaaaatuccagaaaacaagctgcua

SEQ ID NO: 92923 - DNA, 28 bp, Artificial Sequence
  Synthetic
gatgtgttugcaacagtttgtatttucc

SEQ ID NO: 92924 - DNA, 20 bp, Artificial Sequence
  Synthetic
tccccgugcatagctttguc

SEQ ID NO: 92925 - DNA, 27 bp, Artificial Sequence
  Synthetic
tcaaattggccutctgtagtuacaagt

SEQ ID NO: 92926 - DNA, 20 bp, Artificial Sequence
  Synthetic
ccuacacuccccagcaaaca

SEQ ID NO: 92927 - DNA, 22 bp, Artificial Sequence
  Synthetic
tggacgaauttgcacuccaact

SEQ ID NO: 92928 - DNA, 21 bp, Artificial Sequence
  Synthetic
tgtgggcaggaugaggatcua

SEQ ID NO: 92929 - DNA, 22 bp, Artificial Sequence
  Synthetic
tctcuaccaggcaggtgtaugt

SEQ ID NO: 92930 - DNA, 22 bp, Artificial Sequence
  Synthetic
gtgcaccagugttgagaactuc

SEQ ID NO: 92931 - DNA, 25 bp, Artificial Sequence
  Synthetic
agtggtuccaagtcacatuaaagca

SEQ ID NO: 92932 - DNA, 24 bp, Artificial Sequence
  Synthetic
tgaccttgggauctgattctucct

SEQ ID NO: 92933 - DNA, 24 bp, Artificial Sequence
  Synthetic
gccgacattcautctgaacatcug

SEQ ID NO: 92934 - DNA, 20 bp, Artificial Sequence
  Synthetic
cactggaguctcgtgaugga

SEQ ID NO: 92935 - DNA, 21 bp, Artificial Sequence
  Synthetic
aactgagcccaaaauggguca

SEQ ID NO: 92936 - DNA, 19 bp, Artificial Sequence
  Synthetic
cagctccugccactgctua

SEQ ID NO: 92937 - DNA, 19 bp, Artificial Sequence
  Synthetic
ctcacacccuctccuggac

SEQ ID NO: 92938 - DNA, 23 bp, Artificial Sequence
  Synthetic
aaaagttguctgcccuccaaaga

SEQ ID NO: 92939 - DNA, 22 bp, Artificial Sequence
  Synthetic
ctgaagtucacatgcugagggt

SEQ ID NO: 92940 - DNA, 21 bp, Artificial Sequence
  Synthetic
gggacucacaacagcgaugaa

SEQ ID NO: 92941 - DNA, 24 bp, Artificial Sequence
  Synthetic
agguggcagttaaaaugaagcagt

SEQ ID NO: 92942 - DNA, 23 bp, Artificial Sequence
  Synthetic
cggugcccagatugaacaaagat

SEQ ID NO: 92943 - DNA, 20 bp, Artificial Sequence
  Synthetic
catgccguctgcaatctcuc

SEQ ID NO: 92944 - DNA, 22 bp, Artificial Sequence
  Synthetic
ccaaaagcugagtagugaggct

SEQ ID NO: 92945 - DNA, 23 bp, Artificial Sequence
  Synthetic
agaagtgtccgutcattggtgut

SEQ ID NO: 92946 - DNA, 23 bp, Artificial Sequence
  Synthetic
caagggcccaauctacaaguacc

SEQ ID NO: 92947 - DNA, 23 bp, Artificial Sequence
  Synthetic
tgcttcccucactctagttcugt

SEQ ID NO: 92948 - DNA, 21 bp, Artificial Sequence
  Synthetic
acagccucctccugcaaaaag

SEQ ID NO: 92949 - DNA, 27 bp, Artificial Sequence
  Synthetic
ctcatccaaaacutcaatgtggactug

SEQ ID NO: 92950 - DNA, 25 bp, Artificial Sequence
  Synthetic
caagaggccaaaagutcatcttugt

SEQ ID NO: 92951 - DNA, 28 bp, Artificial Sequence
  Synthetic
caataaaggctacgugccaatttttgua

SEQ ID NO: 92952 - DNA, 29 bp, Artificial Sequence
  Synthetic
agaaagtaagcaagaugagagagauaggt

SEQ ID NO: 92953 - DNA, 28 bp, Artificial Sequence
  Synthetic
cctgagttaatgugtgtttctttgtgut

SEQ ID NO: 92954 - DNA, 22 bp, Artificial Sequence
  Synthetic
ggatttcccaguttgccaugga

SEQ ID NO: 92955 - DNA, 29 bp, Artificial Sequence
  Synthetic
tgtcttactttguccttgttttcccauaa

SEQ ID NO: 92956 - DNA, 24 bp, Artificial Sequence
  Synthetic
cccacaggaaaagaauccattgug

SEQ ID NO: 92957 - DNA, 20 bp, Artificial Sequence
  Synthetic
ccucccaccugaaccagact

SEQ ID NO: 92958 - DNA, 24 bp, Artificial Sequence
  Synthetic
gcctgagcaagaugattcagaugg

SEQ ID NO: 92959 - DNA, 21 bp, Artificial Sequence
  Synthetic
cccagaccuggaaagcuaagg

SEQ ID NO: 92960 - DNA, 26 bp, Artificial Sequence
  Synthetic
ctctcctgatauccctttctcctuct

SEQ ID NO: 92961 - DNA, 17 bp, Artificial Sequence
  Synthetic
cccccgucagcactguc

SEQ ID NO: 92962 - DNA, 27 bp, Artificial Sequence
  Synthetic
gtgaagtaaaugaaccagagguaaggt

SEQ ID NO: 92963 - DNA, 25 bp, Artificial Sequence
  Synthetic
gcaattccugccaactaaacaaugg

SEQ ID NO: 92964 - DNA, 21 bp, Artificial Sequence
  Synthetic
gggaaagucagagctgctcut

SEQ ID NO: 92965 - DNA, 20 bp, Artificial Sequence
  Synthetic
cgttcugacagccccttgug

SEQ ID NO: 92966 - DNA, 20 bp, Artificial Sequence
  Synthetic
gggaacugggcatcagugag

SEQ ID NO: 92967 - DNA, 24 bp, Artificial Sequence
  Synthetic
ccaagggcatutctctgttctgut

SEQ ID NO: 92968 - DNA, 25 bp, Artificial Sequence
  Synthetic
tggtaaacaaagutgagagcaucca

SEQ ID NO: 92969 - DNA, 29 bp, Artificial Sequence
  Synthetic
gaaacagctgcauttagaaatcaauagca

SEQ ID NO: 92970 - DNA, 20 bp, Artificial Sequence
  Synthetic
ggcttugacagcgagaaucc

SEQ ID NO: 92971 - DNA, 17 bp, Artificial Sequence
  Synthetic
cccugccacccgctuac

SEQ ID NO: 92972 - DNA, 29 bp, Artificial Sequence
  Synthetic
cactgtttctuacttttgacattcaucca

SEQ ID NO: 92973 - DNA, 22 bp, Artificial Sequence
  Synthetic
agctctaccaccucatccauca

SEQ ID NO: 92974 - DNA, 26 bp, Artificial Sequence
  Synthetic
ttccttacaagcaugtataacggcut

SEQ ID NO: 92975 - DNA, 21 bp, Artificial Sequence
  Synthetic
ccaccacacaccucagtctug

SEQ ID NO: 92976 - DNA, 21 bp, Artificial Sequence
  Synthetic
gtctgguccacagtgtgtcug

SEQ ID NO: 92977 - DNA, 28 bp, Artificial Sequence
  Synthetic
tttttctttttctucccccactagaugt

SEQ ID NO: 92978 - DNA, 21 bp, Artificial Sequence
  Synthetic
gcaagucctuccacagaaccc

SEQ ID NO: 92979 - DNA, 28 bp, Artificial Sequence
  Synthetic
gagattttguggagaaatggttgaugaa

SEQ ID NO: 92980 - DNA, 19 bp, Artificial Sequence
  Synthetic
ggctcgggutggctcuaaa

SEQ ID NO: 92981 - DNA, 19 bp, Artificial Sequence
  Synthetic
gctagugggcgcatguagg

SEQ ID NO: 92982 - DNA, 20 bp, Artificial Sequence
  Synthetic
cacgtgguctctgctgtuga

SEQ ID NO: 92983 - DNA, 20 bp, Artificial Sequence
  Synthetic
agctgagggcuttcacugac

SEQ ID NO: 92984 - DNA, 23 bp, Artificial Sequence
  Synthetic
cautgaggaggucacagagaacc

SEQ ID NO: 92985 - DNA, 24 bp, Artificial Sequence
  Synthetic
atggagttgugcaggaaattcuca

SEQ ID NO: 92986 - DNA, 25 bp, Artificial Sequence
  Synthetic
ccaaaugactgauaacaggagggaa

SEQ ID NO: 92987 - DNA, 25 bp, Artificial Sequence
  Synthetic
tgaugaagaagguggaggagaagaa

SEQ ID NO: 92988 - DNA, 22 bp, Artificial Sequence
  Synthetic
aggctgaauaccgcaaagtcut

SEQ ID NO: 92989 - DNA, 23 bp, Artificial Sequence
  Synthetic
gctgctgacutacacactaccug

SEQ ID NO: 92990 - DNA, 23 bp, Artificial Sequence
  Synthetic
gagaacggccauatuaccaccaa

SEQ ID NO: 92991 - DNA, 20 bp, Artificial Sequence
  Synthetic
cctgaagggcautgctcugt

SEQ ID NO: 92992 - DNA, 19 bp, Artificial Sequence
  Synthetic
aagcactgcucacctgguc

SEQ ID NO: 92993 - DNA, 24 bp, Artificial Sequence
  Synthetic
tgtgctgaugtttgtggtauggat

SEQ ID NO: 92994 - DNA, 20 bp, Artificial Sequence
  Synthetic
cctcgggcugtgctctttut

SEQ ID NO: 92995 - DNA, 22 bp, Artificial Sequence
  Synthetic
ccttggauctgatgcaguaggg

SEQ ID NO: 92996 - DNA, 22 bp, Artificial Sequence
  Synthetic
tctatgaccugctgcuggagat

SEQ ID NO: 92997 - DNA, 21 bp, Artificial Sequence
  Synthetic
tgcctcccccgugatgtaaua

SEQ ID NO: 92998 - DNA, 21 bp, Artificial Sequence
  Synthetic
acaccaaagcauctgggaugg

SEQ ID NO: 92999 - DNA, 20 bp, Artificial Sequence
  Synthetic
cttgctgcugtccagguaca

SEQ ID NO: 93000 - DNA, 18 bp, Artificial Sequence
  Synthetic
ccguccgcagcucaagat

SEQ ID NO: 93001 - DNA, 17 bp, Artificial Sequence
  Synthetic
cgtagaccugcgcgtug

SEQ ID NO: 93002 - DNA, 18 bp, Artificial Sequence
  Synthetic
cgccgccuacgagtucaa

SEQ ID NO: 93003 - DNA, 19 bp, Artificial Sequence
  Synthetic
gcgggugcagtagcaucag

SEQ ID NO: 93004 - DNA, 21 bp, Artificial Sequence
  Synthetic
cgttctttaucccggcgttuc

SEQ ID NO: 93005 - DNA, 28 bp, Artificial Sequence
  Synthetic
gcatttcaggccutcagttcatauaagt

SEQ ID NO: 93006 - DNA, 19 bp, Artificial Sequence
  Synthetic
ctcaacagcgugtcuccga

SEQ ID NO: 93007 - DNA, 17 bp, Artificial Sequence
  Synthetic
ccucgcgcaccgtguag

SEQ ID NO: 93008 - DNA, 24 bp, Artificial Sequence
  Synthetic
acttcaucgcattcctugcaaaag

SEQ ID NO: 93009 - DNA, 24 bp, Artificial Sequence
  Synthetic
catgaugagggtaaaaugcagcag

SEQ ID NO: 93010 - DNA, 20 bp, Artificial Sequence
  Synthetic
gcucccacccagugagaaac

SEQ ID NO: 93011 - DNA, 20 bp, Artificial Sequence
  Synthetic
gucgtcauggaaggacacca

SEQ ID NO: 93012 - DNA, 21 bp, Artificial Sequence
  Synthetic
aagacagugagcuccaccaag

SEQ ID NO: 93013 - DNA, 27 bp, Artificial Sequence
  Synthetic
atcatcgaguggaagtcttatttggut

SEQ ID NO: 93014 - DNA, 20 bp, Artificial Sequence
  Synthetic
cucagggacugcggaagaag

SEQ ID NO: 93015 - DNA, 20 bp, Artificial Sequence
  Synthetic
ctgacaaccuctgggcugat

SEQ ID NO: 93016 - DNA, 28 bp, Artificial Sequence
  Synthetic
caggtagttcuacagctctaacacauac

SEQ ID NO: 93017 - DNA, 28 bp, Artificial Sequence
  Synthetic
gtgttggtgttuagatgaagaaccttut

SEQ ID NO: 93018 - DNA, 22 bp, Artificial Sequence
  Synthetic
cctggcuacatcttcctugact

SEQ ID NO: 93019 - DNA, 22 bp, Artificial Sequence
  Synthetic
gagagugcaucacacaacgaga

SEQ ID NO: 93020 - DNA, 19 bp, Artificial Sequence
  Synthetic
ctcaccucctgcttugcca

SEQ ID NO: 93021 - DNA, 18 bp, Artificial Sequence
  Synthetic
cgaggcuccagggtcugt

SEQ ID NO: 93022 - DNA, 26 bp, Artificial Sequence
  Synthetic
gggtgtatgaaggauactccatctuc

SEQ ID NO: 93023 - DNA, 20 bp, Artificial Sequence
  Synthetic
gggattuccaccgggagaut

SEQ ID NO: 93024 - DNA, 22 bp, Artificial Sequence
  Synthetic
ggccagggucacagtatcttug

SEQ ID NO: 93025 - DNA, 24 bp, Artificial Sequence
  Synthetic
ctcgatgcaguactcaguaagcag

SEQ ID NO: 93026 - DNA, 29 bp, Artificial Sequence
  Synthetic
gccatcagtgcuaattttccttatcucat

SEQ ID NO: 93027 - DNA, 23 bp, Artificial Sequence
  Synthetic
accagaucagcactgcattugaa

SEQ ID NO: 93028 - DNA, 18 bp, Artificial Sequence
  Synthetic
tgacgaugcggcgauagg

SEQ ID NO: 93029 - DNA, 21 bp, Artificial Sequence
  Synthetic
ctgcccccagagaugatugag

SEQ ID NO: 93030 - DNA, 23 bp, Artificial Sequence
  Synthetic
caaaaatccacacuggtggucaa

SEQ ID NO: 93031 - DNA, 24 bp, Artificial Sequence
  Synthetic
caggccagaaaguttgatgatguc

SEQ ID NO: 93032 - DNA, 17 bp, Artificial Sequence
  Synthetic
cgugacgggcgucacat

SEQ ID NO: 93033 - DNA, 21 bp, Artificial Sequence
  Synthetic
gtguacacacgctgacugaac

SEQ ID NO: 93034 - DNA, 24 bp, Artificial Sequence
  Synthetic
tttcagaggacautgattgcccut

SEQ ID NO: 93035 - DNA, 28 bp, Artificial Sequence
  Synthetic
ccagagcatttacauatgtctcttccut

SEQ ID NO: 93036 - DNA, 20 bp, Artificial Sequence
  Synthetic
gggagugggacatgtgcuaa

SEQ ID NO: 93037 - DNA, 23 bp, Artificial Sequence
  Synthetic
caatgttctgguggttcagctuc

SEQ ID NO: 93038 - DNA, 28 bp, Artificial Sequence
  Synthetic
gcttatgtttctgcucagagtcacaaua

SEQ ID NO: 93039 - DNA, 23 bp, Artificial Sequence
  Synthetic
ggaaagauggacgcattgugaat

SEQ ID NO: 93040 - DNA, 25 bp, Artificial Sequence
  Synthetic
agaatagtccccuctgatcacaguc

SEQ ID NO: 93041 - DNA, 25 bp, Artificial Sequence
  Synthetic
tggagttctcutcccttaagucagt

SEQ ID NO: 93042 - DNA, 24 bp, Artificial Sequence
  Synthetic
cagatccaccutctcattgugcat

SEQ ID NO: 93043 - DNA, 24 bp, Artificial Sequence
  Synthetic
cagggaaaggagagutcctatguc

SEQ ID NO: 93044 - DNA, 25 bp, Artificial Sequence
  Synthetic
caacaatgtcugaaaagagcauggt

SEQ ID NO: 93045 - DNA, 26 bp, Artificial Sequence
  Synthetic
aggcaactutagaaagaacucaccag

SEQ ID NO: 93046 - DNA, 21 bp, Artificial Sequence
  Synthetic
cguacgcttgtaugcgggaaa

SEQ ID NO: 93047 - DNA, 22 bp, Artificial Sequence
  Synthetic
caggaaggaaggccucatctug

SEQ ID NO: 93048 - DNA, 22 bp, Artificial Sequence
  Synthetic
ggtttgaacugatgcgcatgug

SEQ ID NO: 93049 - DNA, 21 bp, Artificial Sequence
  Synthetic
cagcttgttcucctcgctgua

SEQ ID NO: 93050 - DNA, 21 bp, Artificial Sequence
  Synthetic
gtgagggaguttgaggtccug

SEQ ID NO: 93051 - DNA, 27 bp, Artificial Sequence
  Synthetic
aaatctctgttaucatgtggcctgaut

SEQ ID NO: 93052 - DNA, 21 bp, Artificial Sequence
  Synthetic
ttccgggagguctccttcuac

SEQ ID NO: 93053 - DNA, 19 bp, Artificial Sequence
  Synthetic
gttcucggccttgtgucct

SEQ ID NO: 93054 - DNA, 27 bp, Artificial Sequence
  Synthetic
ccactgtctuctttttctcttctucca

SEQ ID NO: 93055 - DNA, 26 bp, Artificial Sequence
  Synthetic
gctacatctcucagacatccctaucc

SEQ ID NO: 93056 - DNA, 18 bp, Artificial Sequence
  Synthetic
acugcccgacagacacuc

SEQ ID NO: 93057 - DNA, 17 bp, Artificial Sequence
  Synthetic
aaggcccgcucgttcut

SEQ ID NO: 93058 - DNA, 19 bp, Artificial Sequence
  Synthetic
ctuacgcccacaugaacgg

SEQ ID NO: 93059 - DNA, 23 bp, Artificial Sequence
  Synthetic
aggaggcttgugaatggattgut

SEQ ID NO: 93060 - DNA, 20 bp, Artificial Sequence
  Synthetic
gacatcucgggtggcaucat

SEQ ID NO: 93061 - DNA, 27 bp, Artificial Sequence
  Synthetic
tgatccatgtuccagaatcaaatucca

SEQ ID NO: 93062 - DNA, 26 bp, Artificial Sequence
  Synthetic
cacacauggagagcccaaaaauaaaa

SEQ ID NO: 93063 - DNA, 28 bp, Artificial Sequence
  Synthetic
tgtgaacctacuatgtgaagagtacuga

SEQ ID NO: 93064 - DNA, 27 bp, Artificial Sequence
  Synthetic
cactgtgaguatattgtgatguggaga

SEQ ID NO: 93065 - DNA, 28 bp, Artificial Sequence
  Synthetic
tcacccaacatguttacaatcaacaaug

SEQ ID NO: 93066 - DNA, 22 bp, Artificial Sequence
  Synthetic
gatacagautcagccugagcca

SEQ ID NO: 93067 - DNA, 28 bp, Artificial Sequence
  Synthetic
gagaaaaagactgugaagatggtaguga

SEQ ID NO: 93068 - DNA, 23 bp, Artificial Sequence
  Synthetic
cactgtgatgaugtcaccaguct

SEQ ID NO: 93069 - DNA, 24 bp, Artificial Sequence
  Synthetic
caattgatgcugacgatcccaaug

SEQ ID NO: 93070 - DNA, 24 bp, Artificial Sequence
  Synthetic
cttacaaucaagccactgttugct

SEQ ID NO: 93071 - DNA, 29 bp, Artificial Sequence
  Synthetic
tggcgatcaucaacaaatttctcatatug

SEQ ID NO: 93072 - DNA, 26 bp, Artificial Sequence
  Synthetic
gattctgtaccucaacatcccatuga

SEQ ID NO: 93073 - DNA, 21 bp, Artificial Sequence
  Synthetic
ggtcccuggaatgaaggguaa

SEQ ID NO: 93074 - DNA, 28 bp, Artificial Sequence
  Synthetic
gcctggattaaacugagtactccaaaua

SEQ ID NO: 93075 - DNA, 26 bp, Artificial Sequence
  Synthetic
gctaatgacacugatatcctgggtut

SEQ ID NO: 93076 - DNA, 27 bp, Artificial Sequence
  Synthetic
ctttctggguggttaatccataaguga

SEQ ID NO: 93077 - DNA, 23 bp, Artificial Sequence
  Synthetic
caataaguggacagggcagaaug

SEQ ID NO: 93078 - DNA, 23 bp, Artificial Sequence
  Synthetic
tggtaccatugcaaccttttuca

SEQ ID NO: 93079 - DNA, 28 bp, Artificial Sequence
  Synthetic
tctgcttctctcutcctcatttcaaaut

SEQ ID NO: 93080 - DNA, 22 bp, Artificial Sequence
  Synthetic
ctgaccaaaguatggctuccct

SEQ ID NO: 93081 - DNA, 24 bp, Artificial Sequence
  Synthetic
acacagauacacaaccgctttcuc

SEQ ID NO: 93082 - DNA, 19 bp, Artificial Sequence
  Synthetic
cttctgguggccacgacut

SEQ ID NO: 93083 - DNA, 19 bp, Artificial Sequence
  Synthetic
gaggaugcgggacgctauc

SEQ ID NO: 93084 - DNA, 17 bp, Artificial Sequence
  Synthetic
cgcuggcggaggagtug

SEQ ID NO: 93085 - DNA, 19 bp, Artificial Sequence
  Synthetic
acgaucccaaacccaggug

SEQ ID NO: 93086 - DNA, 25 bp, Artificial Sequence
  Synthetic
gcactggtttuctgaatcacacuga

SEQ ID NO: 93087 - DNA, 25 bp, Artificial Sequence
  Synthetic
gtcatgaataccuttcccatcccut

SEQ ID NO: 93088 - DNA, 21 bp, Artificial Sequence
  Synthetic
gggtgaaaccuccaacuagca

SEQ ID NO: 93089 - DNA, 21 bp, Artificial Sequence
  Synthetic
cccacacagacacaaugugac

SEQ ID NO: 93090 - DNA, 17 bp, Artificial Sequence
  Synthetic
acagcugcacgcctcuc

SEQ ID NO: 93091 - DNA, 22 bp, Artificial Sequence
  Synthetic
gggtctuggctgttttcuacct

SEQ ID NO: 93092 - DNA, 26 bp, Artificial Sequence
  Synthetic
agaaatactgggaacautctgcctut

SEQ ID NO: 93093 - DNA, 22 bp, Artificial Sequence
  Synthetic
tgagtaagcaaaguggcagcut

SEQ ID NO: 93094 - DNA, 21 bp, Artificial Sequence
  Synthetic
cgtcacatugtgtctgtgugg

SEQ ID NO: 93095 - DNA, 22 bp, Artificial Sequence
  Synthetic
ctttagacgccuccttcctcut

SEQ ID NO: 93096 - DNA, 24 bp, Artificial Sequence
  Synthetic
tcacucccatauagagacacagca

SEQ ID NO: 93097 - DNA, 28 bp, Artificial Sequence
  Synthetic
gtctctggacuagttgaatgagtttuga

SEQ ID NO: 93098 - DNA, 24 bp, Artificial Sequence
  Synthetic
tcuataagccucgacagccagaat

SEQ ID NO: 93099 - DNA, 23 bp, Artificial Sequence
  Synthetic
ccctttcagcutcttgtttgguc

SEQ ID NO: 93100 - DNA, 22 bp, Artificial Sequence
  Synthetic
cctggtgggugcaaaaagagua

SEQ ID NO: 93101 - DNA, 21 bp, Artificial Sequence
  Synthetic
ttggttuccgggaaggaugac

SEQ ID NO: 93102 - DNA, 23 bp, Artificial Sequence
  Synthetic
cctcagguctttgcugagagaaa

SEQ ID NO: 93103 - DNA, 21 bp, Artificial Sequence
  Synthetic
gctctcggugtgtgtcttuca

SEQ ID NO: 93104 - DNA, 23 bp, Artificial Sequence
  Synthetic
ggaggcuttcttctctugggaaa

SEQ ID NO: 93105 - DNA, 23 bp, Artificial Sequence
  Synthetic
caagagcagutgctcagauacca

SEQ ID NO: 93106 - DNA, 20 bp, Artificial Sequence
  Synthetic
ggcggcacacccuauaacaa

SEQ ID NO: 93107 - DNA, 22 bp, Artificial Sequence
  Synthetic
gcgcgaugaggaacaaacatuc

SEQ ID NO: 93108 - DNA, 22 bp, Artificial Sequence
  Synthetic
caacccgaccaaagcutgaaut

SEQ ID NO: 93109 - DNA, 25 bp, Artificial Sequence
  Synthetic
catttcctcaugcagcaatttugga

SEQ ID NO: 93110 - DNA, 19 bp, Artificial Sequence
  Synthetic
gugcttgcuaccgggacat

SEQ ID NO: 93111 - DNA, 22 bp, Artificial Sequence
  Synthetic
ccacaugggcaaaggatcguag

SEQ ID NO: 93112 - DNA, 22 bp, Artificial Sequence
  Synthetic
catagcagcagcagcugattut

SEQ ID NO: 93113 - DNA, 23 bp, Artificial Sequence
  Synthetic
cctggtactacuggcatcacauc

SEQ ID NO: 93114 - DNA, 27 bp, Artificial Sequence
  Synthetic
ctgcattcaugggaaattgacatguat

SEQ ID NO: 93115 - DNA, 21 bp, Artificial Sequence
  Synthetic
gatctguccacgacccatucc

SEQ ID NO: 93116 - DNA, 26 bp, Artificial Sequence
  Synthetic
tgaatgtgaacccuttcatgtctugt

SEQ ID NO: 93117 - DNA, 22 bp, Artificial Sequence
  Synthetic
ccagcagcaugtcgaagatcuc

SEQ ID NO: 93118 - DNA, 22 bp, Artificial Sequence
  Synthetic
agacagagacccauccaaguct

SEQ ID NO: 93119 - DNA, 28 bp, Artificial Sequence
  Synthetic
aatttagttgctauttgtgccattgugt

SEQ ID NO: 93120 - DNA, 20 bp, Artificial Sequence
  Synthetic
cagcgacuggattccuccaa

SEQ ID NO: 93121 - DNA, 25 bp, Artificial Sequence
  Synthetic
gcagattatggugtattccagucca

SEQ ID NO: 93122 - DNA, 23 bp, Artificial Sequence
  Synthetic
gaaaatgtguagagggcatggug

SEQ ID NO: 93123 - DNA, 27 bp, Artificial Sequence
  Synthetic
tcatccagcatugagttatcttgtgut

SEQ ID NO: 93124 - DNA, 22 bp, Artificial Sequence
  Synthetic
ccacccuctuacccaacaaagt

SEQ ID NO: 93125 - DNA, 28 bp, Artificial Sequence
  Synthetic
gccaagtguccaacataagtagatguaa

SEQ ID NO: 93126 - DNA, 32 bp, Artificial Sequence
  Synthetic
tgaattaacatutaggaatggauacagcagaa

SEQ ID NO: 93127 - DNA, 25 bp, Artificial Sequence
  Synthetic
gctgcccagauattatcaagaucct

SEQ ID NO: 93128 - DNA, 20 bp, Artificial Sequence
  Synthetic
cctgccaguaaggacacuct

SEQ ID NO: 93129 - DNA, 20 bp, Artificial Sequence
  Synthetic
gtucgcggcattcuacaagg

SEQ ID NO: 93130 - DNA, 23 bp, Artificial Sequence
  Synthetic
gattcaggccacauctctctcug

SEQ ID NO: 93131 - DNA, 27 bp, Artificial Sequence
  Synthetic
acagaaaauaagacagccaugaacact

SEQ ID NO: 93132 - DNA, 28 bp, Artificial Sequence
  Synthetic
gtcatcaaagaaaaagcuctgacctuac

SEQ ID NO: 93133 - DNA, 24 bp, Artificial Sequence
  Synthetic
tgcatccattucatgacagcuact

SEQ ID NO: 93134 - DNA, 17 bp, Artificial Sequence
  Synthetic
gaggugggcaccgucat

SEQ ID NO: 93135 - DNA, 19 bp, Artificial Sequence
  Synthetic
caggaagugggcgcactua

SEQ ID NO: 93136 - DNA, 28 bp, Artificial Sequence
  Synthetic
ggtactaaatgcaauagagcaggagtuc

SEQ ID NO: 93137 - DNA, 21 bp, Artificial Sequence
  Synthetic
ggtatctggcutgcggaucat

SEQ ID NO: 93138 - DNA, 22 bp, Artificial Sequence
  Synthetic
tguaacgcacacagaacacuga

SEQ ID NO: 93139 - DNA, 29 bp, Artificial Sequence
  Synthetic
gctttattgttttcutaggtgaggttucc

SEQ ID NO: 93140 - DNA, 21 bp, Artificial Sequence
  Synthetic
ctgguggctgcattugacaag

SEQ ID NO: 93141 - DNA, 27 bp, Artificial Sequence
  Synthetic
tctcctcagutttctttaggttugcat

SEQ ID NO: 93142 - DNA, 28 bp, Artificial Sequence
  Synthetic
tgtatgaaauggcactgcctagauaaaa

SEQ ID NO: 93143 - DNA, 22 bp, Artificial Sequence
  Synthetic
ctgtggccugtattcaccucag

SEQ ID NO: 93144 - DNA, 27 bp, Artificial Sequence
  Synthetic
gttgcagagaaaugctaactttgtcut

SEQ ID NO: 93145 - DNA, 24 bp, Artificial Sequence
  Synthetic
ctcgttttcauctgggtttugagg

SEQ ID NO: 93146 - DNA, 27 bp, Artificial Sequence
  Synthetic
ctaagtgacacutcctgaaaactucct

SEQ ID NO: 93147 - DNA, 23 bp, Artificial Sequence
  Synthetic
caaacttggguctgttgttccug

SEQ ID NO: 93148 - DNA, 21 bp, Artificial Sequence
  Synthetic
cctgaggccacugatttggut

SEQ ID NO: 93149 - DNA, 22 bp, Artificial Sequence
  Synthetic
ccaccagcucttcttttgacug

SEQ ID NO: 93150 - DNA, 23 bp, Artificial Sequence
  Synthetic
ccctttacgcacgucaaaatcut

SEQ ID NO: 93151 - DNA, 20 bp, Artificial Sequence
  Synthetic
gacttcggcaaugcagtgug

SEQ ID NO: 93152 - DNA, 20 bp, Artificial Sequence
  Synthetic
cuggactgcuggcagaaaga

SEQ ID NO: 93153 - DNA, 29 bp, Artificial Sequence
  Synthetic
agtgaatgccagauaacaaattgaatgug

SEQ ID NO: 93154 - DNA, 24 bp, Artificial Sequence
  Synthetic
tgccagtuccatgtaaatguagca

SEQ ID NO: 93155 - DNA, 29 bp, Artificial Sequence
  Synthetic
gacagtttagugccacatttattcttugt

SEQ ID NO: 93156 - DNA, 22 bp, Artificial Sequence
  Synthetic
cggcttcacuttgtcctgaaug

SEQ ID NO: 93157 - DNA, 26 bp, Artificial Sequence
  Synthetic
agcgtggagauagagaacattacuct

SEQ ID NO: 93158 - DNA, 27 bp, Artificial Sequence
  Synthetic
catcttcucagacatcaatcugaagca

SEQ ID NO: 93159 - DNA, 19 bp, Artificial Sequence
  Synthetic
ggtccucccagctgaugac

SEQ ID NO: 93160 - DNA, 18 bp, Artificial Sequence
  Synthetic
gaguaccugacgcggcat

SEQ ID NO: 93161 - DNA, 24 bp, Artificial Sequence
  Synthetic
gttaggtcgtucttcacgaggaua

SEQ ID NO: 93162 - DNA, 26 bp, Artificial Sequence
  Synthetic
tcctgacagtacutacctaccacauc

SEQ ID NO: 93163 - DNA, 26 bp, Artificial Sequence
  Synthetic
ggtagcaguagaagatgatgaugaca

SEQ ID NO: 93164 - DNA, 22 bp, Artificial Sequence
  Synthetic
gaaggacccaggacaucactug

SEQ ID NO: 93165 - DNA, 25 bp, Artificial Sequence
  Synthetic
agcautcagactaugagagcacaaa

SEQ ID NO: 93166 - DNA, 20 bp, Artificial Sequence
  Synthetic
agggaccucaagagcuccaa

SEQ ID NO: 93167 - DNA, 26 bp, Artificial Sequence
  Synthetic
gggatctagcacuagctctaactuac

SEQ ID NO: 93168 - DNA, 28 bp, Artificial Sequence
  Synthetic
tgccaaaagaccaauagtattgtcuacc

SEQ ID NO: 93169 - DNA, 28 bp, Artificial Sequence
  Synthetic
tcaagtcttcauggccttcatctctaua

SEQ ID NO: 93170 - DNA, 21 bp, Artificial Sequence
  Synthetic
accactgggagutgccatauc

SEQ ID NO: 93171 - DNA, 20 bp, Artificial Sequence
  Synthetic
gctgatgucagagcggucat

SEQ ID NO: 93172 - DNA, 26 bp, Artificial Sequence
  Synthetic
tgagcaaattgtucacctggtgauat

SEQ ID NO: 93173 - DNA, 26 bp, Artificial Sequence
  Synthetic
ctttgcacatcacugacctctttcua

SEQ ID NO: 93174 - DNA, 24 bp, Artificial Sequence
  Synthetic
ggtgattatgcugtacgtctucca

SEQ ID NO: 93175 - DNA, 28 bp, Artificial Sequence
  Synthetic
gaagaacatttgaugggaaaatcaggut

SEQ ID NO: 93176 - DNA, 21 bp, Artificial Sequence
  Synthetic
cactgugccatcatccuggaa

SEQ ID NO: 93177 - DNA, 25 bp, Artificial Sequence
  Synthetic
tctcaaactgcuctgaagtgttcug

SEQ ID NO: 93178 - DNA, 23 bp, Artificial Sequence
  Synthetic
gggcaccautgttctccatuaga

SEQ ID NO: 93179 - DNA, 21 bp, Artificial Sequence
  Synthetic
tgatggccacguagattuccc

SEQ ID NO: 93180 - DNA, 24 bp, Artificial Sequence
  Synthetic
tgaggtctauaaggccaagcugaa

SEQ ID NO: 93181 - DNA, 24 bp, Artificial Sequence
  Synthetic
gtcaggaacuggagtatgttcuca

SEQ ID NO: 93182 - DNA, 21 bp, Artificial Sequence
  Synthetic
guttgaaacugccaggcaaga

SEQ ID NO: 93183 - DNA, 22 bp, Artificial Sequence
  Synthetic
ccctccaggcgaaugatgtuag

SEQ ID NO: 93184 - DNA, 21 bp, Artificial Sequence
  Synthetic
ctcgcugcttttccugagaga

SEQ ID NO: 93185 - DNA, 19 bp, Artificial Sequence
  Synthetic
gccacagtuccgagaccut

SEQ ID NO: 93186 - DNA, 22 bp, Artificial Sequence
  Synthetic
cccaaaaagugggagcagugaa

SEQ ID NO: 93187 - DNA, 21 bp, Artificial Sequence
  Synthetic
cttgucccaccactugaagga

SEQ ID NO: 93188 - DNA, 18 bp, Artificial Sequence
  Synthetic
gcccggcutaggagacut

SEQ ID NO: 93189 - DNA, 17 bp, Artificial Sequence
  Synthetic
gcctcgucctccucgct

SEQ ID NO: 93190 - DNA, 17 bp, Artificial Sequence
  Synthetic
accgucgtgguggagga

SEQ ID NO: 93191 - DNA, 17 bp, Artificial Sequence
  Synthetic
acgucgggcgugaagag

SEQ ID NO: 93192 - DNA, 21 bp, Artificial Sequence
  Synthetic
ctcctcaccuttcacgauggt

SEQ ID NO: 93193 - DNA, 18 bp, Artificial Sequence
  Synthetic
gggtctcaucagcgcugt

SEQ ID NO: 93194 - DNA, 17 bp, Artificial Sequence
  Synthetic
gcugcuggcggacaaga

SEQ ID NO: 93195 - DNA, 18 bp, Artificial Sequence
  Synthetic
cacgaguacccacugcca

SEQ ID NO: 93196 - DNA, 18 bp, Artificial Sequence
  Synthetic
caccugctccaugaggct

SEQ ID NO: 93197 - DNA, 17 bp, Artificial Sequence
  Synthetic
cgccgccucatcgtugt

SEQ ID NO: 93198 - DNA, 17 bp, Artificial Sequence
  Synthetic
gcccacagcgcugauga

SEQ ID NO: 93199 - DNA, 24 bp, Artificial Sequence
  Synthetic
ggcttccagaauggtctcaacuac

SEQ ID NO: 93200 - DNA, 24 bp, Artificial Sequence
  Synthetic
cgccaaagucgatgttgatguact

SEQ ID NO: 93201 - DNA, 17 bp, Artificial Sequence
  Synthetic
gcccggagggcutctug

SEQ ID NO: 93202 - DNA, 17 bp, Artificial Sequence
  Synthetic
ccgguguccgaggacaa

SEQ ID NO: 93203 - DNA, 18 bp, Artificial Sequence
  Synthetic
aggcctccuccccgtauc

SEQ ID NO: 93204 - DNA, 19 bp, Artificial Sequence
  Synthetic
tgggtacucgtgcatgcug

SEQ ID NO: 93205 - DNA, 18 bp, Artificial Sequence
  Synthetic
agcccccucaccctguag

SEQ ID NO: 93206 - DNA, 17 bp, Artificial Sequence
  Synthetic
tggccugaggcuccaga

SEQ ID NO: 93207 - DNA, 19 bp, Artificial Sequence
  Synthetic
gctgctgcuacagctccut

SEQ ID NO: 93208 - DNA, 18 bp, Artificial Sequence
  Synthetic
cctcacgucgauggcgat

SEQ ID NO: 93209 - DNA, 18 bp, Artificial Sequence
  Synthetic
caccuccccacgacagut

SEQ ID NO: 93210 - DNA, 18 bp, Artificial Sequence
  Synthetic
gcacgtacuggtcgcugt

SEQ ID NO: 93211 - DNA, 18 bp, Artificial Sequence
  Synthetic
cccgcccgacutcttcuc

SEQ ID NO: 93212 - DNA, 19 bp, Artificial Sequence
  Synthetic
gcaaggagcuguagcagca

SEQ ID NO: 93213 - DNA, 20 bp, Artificial Sequence
  Synthetic
ccaagcugtccauggagcat

SEQ ID NO: 93214 - DNA, 19 bp, Artificial Sequence
  Synthetic
gggcugcggagaagaaguc

SEQ ID NO: 93215 - DNA, 19 bp, Artificial Sequence
  Synthetic
cccgaggacaguggguaca

SEQ ID NO: 93216 - DNA, 17 bp, Artificial Sequence
  Synthetic
ggcgagcuggccttgua

SEQ ID NO: 93217 - DNA, 19 bp, Artificial Sequence
  Synthetic
cgcccccaagcagauctug

SEQ ID NO: 93218 - DNA, 17 bp, Artificial Sequence
  Synthetic
tcgccgggaaugtccug

SEQ ID NO: 93219 - DNA, 21 bp, Artificial Sequence
  Synthetic
cgacgacuacatgcccaugag

SEQ ID NO: 93220 - DNA, 17 bp, Artificial Sequence
  Synthetic
ccggcugcaactgucgt

SEQ ID NO: 93221 - DNA, 17 bp, Artificial Sequence
  Synthetic
ccgucctucgcccacaa

SEQ ID NO: 93222 - DNA, 17 bp, Artificial Sequence
  Synthetic
cggcacgagcugcacut

SEQ ID NO: 93223 - DNA, 20 bp, Artificial Sequence
  Synthetic
cgcaguaagagccaatcguc

SEQ ID NO: 93224 - DNA, 19 bp, Artificial Sequence
  Synthetic
tgggcugcaagatctgcut

SEQ ID NO: 93225 - DNA, 18 bp, Artificial Sequence
  Synthetic
gagaucggcucccacagg

SEQ ID NO: 93226 - DNA, 19 bp, Artificial Sequence
  Synthetic
ggttgaccagguggtggug

SEQ ID NO: 93227 - DNA, 19 bp, Artificial Sequence
  Synthetic
ccatccuggaggccaugaa

SEQ ID NO: 93228 - DNA, 19 bp, Artificial Sequence
  Synthetic
atgggccagutcgaccauc

SEQ ID NO: 93229 - DNA, 23 bp, Artificial Sequence
  Synthetic
gcatccaagugcatcaucaaacc

SEQ ID NO: 93230 - DNA, 20 bp, Artificial Sequence
  Synthetic
cggaacucgaagagctccut

SEQ ID NO: 93231 - DNA, 18 bp, Artificial Sequence
  Synthetic
gccacucggacagctuct

SEQ ID NO: 93232 - DNA, 18 bp, Artificial Sequence
  Synthetic
cccaggutgctgcuggag

SEQ ID NO: 93233 - DNA, 18 bp, Artificial Sequence
  Synthetic
ctctgccucgctggauga

SEQ ID NO: 93234 - DNA, 17 bp, Artificial Sequence
  Synthetic
caccagcccguagcugt

SEQ ID NO: 93235 - DNA, 18 bp, Artificial Sequence
  Synthetic
ggagcaggagggcuggua

SEQ ID NO: 93236 - DNA, 18 bp, Artificial Sequence
  Synthetic
gctgaccaggucggugag

SEQ ID NO: 93237 - DNA, 22 bp, Artificial Sequence
  Synthetic
ctgcugcctgaacaucaacaag

SEQ ID NO: 93238 - DNA, 18 bp, Artificial Sequence
  Synthetic
gcccgcaucagggtguat

SEQ ID NO: 93239 - DNA, 17 bp, Artificial Sequence
  Synthetic
cactguggccgctccua

SEQ ID NO: 93240 - DNA, 21 bp, Artificial Sequence
  Synthetic
gagggcgaucaggtacttgug

SEQ ID NO: 93241 - DNA, 22 bp, Artificial Sequence
  Synthetic
tcgaguacuacgagagcgagaa

SEQ ID NO: 93242 - DNA, 18 bp, Artificial Sequence
  Synthetic
ggcccaccucgaugaaga

SEQ ID NO: 93243 - DNA, 20 bp, Artificial Sequence
  Synthetic
gtaccgtcugtgcctgtcug

SEQ ID NO: 93244 - DNA, 22 bp, Artificial Sequence
  Synthetic
ggtcagggaguaggtcctctug

SEQ ID NO: 93245 - DNA, 17 bp, Artificial Sequence
  Synthetic
cgaguccaucgcggaga

SEQ ID NO: 93246 - DNA, 18 bp, Artificial Sequence
  Synthetic
gccttgcuccgccactut

SEQ ID NO: 93247 - DNA, 17 bp, Artificial Sequence
  Synthetic
cgcaagugcggcuacct

SEQ ID NO: 93248 - DNA, 23 bp, Artificial Sequence
  Synthetic
tggtcatguacccgtagaacuca

SEQ ID NO: 93249 - DNA, 18 bp, Artificial Sequence
  Synthetic
cgaccccggcutcatguc

SEQ ID NO: 93250 - DNA, 20 bp, Artificial Sequence
  Synthetic
tcgcagutgagctucacgaa

SEQ ID NO: 93251 - DNA, 17 bp, Artificial Sequence
  Synthetic
gacagcuacgggcuggt

SEQ ID NO: 93252 - DNA, 26 bp, Artificial Sequence
  Synthetic
gtgcaagtttugaaaatggagggaut

SEQ ID NO: 93253 - DNA, 22 bp, Artificial Sequence
  Synthetic
aggagcaaugcgaatacctguc

SEQ ID NO: 93254 - DNA, 19 bp, Artificial Sequence
  Synthetic
ccactggcuggcatcguag

SEQ ID NO: 93255 - DNA, 22 bp, Artificial Sequence
  Synthetic
acagtgguatggccaaaucagt

SEQ ID NO: 93256 - DNA, 26 bp, Artificial Sequence
  Synthetic
ggataguaaacagtccauagggacca

SEQ ID NO: 93257 - DNA, 21 bp, Artificial Sequence
  Synthetic
tggacctcuacagtggtugga

SEQ ID NO: 93258 - DNA, 22 bp, Artificial Sequence
  Synthetic
atgaagggagaugggcagacua

SEQ ID NO: 93259 - DNA, 24 bp, Artificial Sequence
  Synthetic
accggaagtugtaggtggagtuat

SEQ ID NO: 93260 - DNA, 24 bp, Artificial Sequence
  Synthetic
ccacaaaacugaaatgcgtauggt

SEQ ID NO: 93261 - DNA, 27 bp, Artificial Sequence
  Synthetic
atgcattggaatuatctcaaagcccua

SEQ ID NO: 93262 - DNA, 24 bp, Artificial Sequence
  Synthetic
cctccctcttucctctgtgctaut

SEQ ID NO: 93263 - DNA, 29 bp, Artificial Sequence
  Synthetic
ctcatcctagacutcttgaactgtttgua

SEQ ID NO: 93264 - DNA, 26 bp, Artificial Sequence
  Synthetic
acaactaaucgatgggaguaagagga

SEQ ID NO: 93265 - DNA, 26 bp, Artificial Sequence
  Synthetic
ggcaactgtaugagccactagttaug

SEQ ID NO: 93266 - DNA, 23 bp, Artificial Sequence
  Synthetic
gttcccaacagugcctacacuaa

SEQ ID NO: 93267 - DNA, 23 bp, Artificial Sequence
  Synthetic
gtgacgaccgugtttatcagaug

SEQ ID NO: 93268 - DNA, 26 bp, Artificial Sequence
  Synthetic
gggatcccauctgagttaatacttug

SEQ ID NO: 93269 - DNA, 27 bp, Artificial Sequence
  Synthetic
cctgcctguggacttgaatttcauaat

SEQ ID NO: 93270 - DNA, 25 bp, Artificial Sequence
  Synthetic
tgctgttuggacaagatgaactuca

SEQ ID NO: 93271 - DNA, 23 bp, Artificial Sequence
  Synthetic
gguagcaccagugaaaaggaaga

SEQ ID NO: 93272 - DNA, 27 bp, Artificial Sequence
  Synthetic
cttgttgttagugaaccagtgaaucag

SEQ ID NO: 93273 - DNA, 24 bp, Artificial Sequence
  Synthetic
atggaacccuttacagcguaacat

SEQ ID NO: 93274 - DNA, 21 bp, Artificial Sequence
  Synthetic
ctgccguggatuaggaagagg

SEQ ID NO: 93275 - DNA, 22 bp, Artificial Sequence
  Synthetic
cauctguaccaggccaaaaaca

SEQ ID NO: 93276 - DNA, 21 bp, Artificial Sequence
  Synthetic
aacagacuggaggaagctugg

SEQ ID NO: 93277 - DNA, 28 bp, Artificial Sequence
  Synthetic
tgcaaggttauaaacgcaaaagatgtug

SEQ ID NO: 93278 - DNA, 28 bp, Artificial Sequence
  Synthetic
cagattgccttuccggataaaaatuaca

SEQ ID NO: 93279 - DNA, 26 bp, Artificial Sequence
  Synthetic
cttaaaacaggcutcacgaucacaaa

SEQ ID NO: 93280 - DNA, 25 bp, Artificial Sequence
  Synthetic
tgaatgagcucaacgtacaugaagt

SEQ ID NO: 93281 - DNA, 28 bp, Artificial Sequence
  Synthetic
tcacatggctuaacatgacacctuaaat

SEQ ID NO: 93282 - DNA, 28 bp, Artificial Sequence
  Synthetic
gaaatgcttagcugagaatgcagttuac

SEQ ID NO: 93283 - DNA, 25 bp, Artificial Sequence
  Synthetic
agaaggatcaagcugaagcacatua

SEQ ID NO: 93284 - DNA, 28 bp, Artificial Sequence
  Synthetic
gggatgaaccagacutagatcctgauat

SEQ ID NO: 93285 - DNA, 28 bp, Artificial Sequence
  Synthetic
tgctactagtttuccttctcgacaatuc

SEQ ID NO: 93286 - DNA, 27 bp, Artificial Sequence
  Synthetic
tgtttgatcacaugatgaagcgtaugt

SEQ ID NO: 93287 - DNA, 27 bp, Artificial Sequence
  Synthetic
tggctgatggcauaataatctgaugag

SEQ ID NO: 93288 - DNA, 27 bp, Artificial Sequence
  Synthetic
ggaatgaagtgtuttgagcgattctuc

SEQ ID NO: 93289 - DNA, 28 bp, Artificial Sequence
  Synthetic
acatcagacaccauttacagagttccua

SEQ ID NO: 93290 - DNA, 28 bp, Artificial Sequence
  Synthetic
catcgtgcaaautgtgctaatugaaaat

SEQ ID NO: 93291 - DNA, 28 bp, Artificial Sequence
  Synthetic
cattctttgatugcgtttctagagctut

SEQ ID NO: 93292 - DNA, 21 bp, Artificial Sequence
  Synthetic
agcutgctaucaccaccagac

SEQ ID NO: 93293 - DNA, 27 bp, Artificial Sequence
  Synthetic
ggagggttuaagtaaacgccatuacat

SEQ ID NO: 93294 - DNA, 27 bp, Artificial Sequence
  Synthetic
ccacagaagaagaucatcagtagcaut

SEQ ID NO: 93295 - DNA, 26 bp, Artificial Sequence
  Synthetic
ccagaattautgtctgtcugcaggat

SEQ ID NO: 93296 - DNA, 28 bp, Artificial Sequence
  Synthetic
ccgaatgcaguacagtatggagtattut

SEQ ID NO: 93297 - DNA, 26 bp, Artificial Sequence
  Synthetic
tgaacttaaacaugttgacgccuact

SEQ ID NO: 93298 - DNA, 22 bp, Artificial Sequence
  Synthetic
gaagucugcagagagggaagag

SEQ ID NO: 93299 - DNA, 24 bp, Artificial Sequence
  Synthetic
cgugactttctucacagacaacag

SEQ ID NO: 93300 - DNA, 23 bp, Artificial Sequence
  Synthetic
tcttgtccgaugctgcttaguag

SEQ ID NO: 93301 - DNA, 21 bp, Artificial Sequence
  Synthetic
gaggaggccaggugtttuaca

SEQ ID NO: 93302 - DNA, 23 bp, Artificial Sequence
  Synthetic
agtctttccauttggtccaugct

SEQ ID NO: 93303 - DNA, 29 bp, Artificial Sequence
  Synthetic
gccttcaatgtcugactaaagtacttcug

SEQ ID NO: 93304 - DNA, 19 bp, Artificial Sequence
  Synthetic
agctccccauactcgcugt

SEQ ID NO: 93305 - DNA, 23 bp, Artificial Sequence
  Synthetic
ctaacaccaccutccctgtctug

SEQ ID NO: 93306 - DNA, 20 bp, Artificial Sequence
  Synthetic
tgcctcaguccttacccuca

SEQ ID NO: 93307 - DNA, 22 bp, Artificial Sequence
  Synthetic
ccaggaacugaguccagagaag

SEQ ID NO: 93308 - DNA, 21 bp, Artificial Sequence
  Synthetic
cacaccagcaauguagcaaca

SEQ ID NO: 93309 - DNA, 25 bp, Artificial Sequence
  Synthetic
ccactattcttucatggacaggcut

SEQ ID NO: 93310 - DNA, 21 bp, Artificial Sequence
  Synthetic
gtgucccagcattgugcaaaa

SEQ ID NO: 93311 - DNA, 22 bp, Artificial Sequence
  Synthetic
ccaauaggcaccatccatuccc

SEQ ID NO: 93312 - DNA, 23 bp, Artificial Sequence
  Synthetic
ctttggatcuctttcccgcuaca

SEQ ID NO: 93313 - DNA, 21 bp, Artificial Sequence
  Synthetic
aggaaucttctccuccgagca

SEQ ID NO: 93314 - DNA, 26 bp, Artificial Sequence
  Synthetic
ccttgttgcugtaaaacaggtaaugt

SEQ ID NO: 93315 - DNA, 27 bp, Artificial Sequence
  Synthetic
tacaaacaggtugaaatactgctguaa

SEQ ID NO: 93316 - DNA, 22 bp, Artificial Sequence
  Synthetic
gcccaucaaactctacugcaac

SEQ ID NO: 93317 - DNA, 22 bp, Artificial Sequence
  Synthetic
gaagcagaggcuccaaagctua

SEQ ID NO: 93318 - DNA, 27 bp, Artificial Sequence
  Synthetic
gttatattaacaguggtcacucaccca

SEQ ID NO: 93319 - DNA, 22 bp, Artificial Sequence
  Synthetic
ggatcttacucgtgtgccauca

SEQ ID NO: 93320 - DNA, 25 bp, Artificial Sequence
  Synthetic
gcatcaatccutactgttggagugg

SEQ ID NO: 93321 - DNA, 23 bp, Artificial Sequence
  Synthetic
ctcttgtagguctttcgccctua

SEQ ID NO: 93322 - DNA, 21 bp, Artificial Sequence
  Synthetic
ttcagtgagcuggagcatcug

SEQ ID NO: 93323 - DNA, 22 bp, Artificial Sequence
  Synthetic
ctgcctcugttctttggugaga

SEQ ID NO: 93324 - DNA, 22 bp, Artificial Sequence
  Synthetic
gagggaagcucttggtcactut

SEQ ID NO: 93325 - DNA, 27 bp, Artificial Sequence
  Synthetic
gcttaacctacauttccacttttgugt

SEQ ID NO: 93326 - DNA, 18 bp, Artificial Sequence
  Synthetic
gggcuaagccagtgctuc

SEQ ID NO: 93327 - DNA, 21 bp, Artificial Sequence
  Synthetic
gcttaccucgcttttggctut

SEQ ID NO: 93328 - DNA, 23 bp, Artificial Sequence
  Synthetic
gcttgaautgcttguagcgacat

SEQ ID NO: 93329 - DNA, 28 bp, Artificial Sequence
  Synthetic
ggtgatcccatutgaatatgctgtttut

SEQ ID NO: 93330 - DNA, 21 bp, Artificial Sequence
  Synthetic
ggcagaugggctgagaattug

SEQ ID NO: 93331 - DNA, 23 bp, Artificial Sequence
  Synthetic
cgtagagctugtacagtgtcugg

SEQ ID NO: 93332 - DNA, 28 bp, Artificial Sequence
  Synthetic
cttttatcatttugaaaccaggtcguga

SEQ ID NO: 93333 - DNA, 28 bp, Artificial Sequence
  Synthetic
gggccgaaagaautatatatggaagtut

SEQ ID NO: 93334 - DNA, 21 bp, Artificial Sequence
  Synthetic
cctgacuggaggcttctcuca

SEQ ID NO: 93335 - DNA, 19 bp, Artificial Sequence
  Synthetic
ggtgaaacaucgggcucac

SEQ ID NO: 93336 - DNA, 27 bp, Artificial Sequence
  Synthetic
gtgaatttctuacctttcctcuggagt

SEQ ID NO: 93337 - DNA, 27 bp, Artificial Sequence
  Synthetic
gaaugccagttaaugaaaacagaacga

SEQ ID NO: 93338 - DNA, 28 bp, Artificial Sequence
  Synthetic
gattataaatgtguttggctttggucgt

SEQ ID NO: 93339 - DNA, 24 bp, Artificial Sequence
  Synthetic
gagttcgcacugggttttgttuaa

SEQ ID NO: 93340 - DNA, 17 bp, Artificial Sequence
  Synthetic
tgggagggucggaugct

SEQ ID NO: 93341 - DNA, 21 bp, Artificial Sequence
  Synthetic
acagcttgcuccctctccaua

SEQ ID NO: 93342 - DNA, 21 bp, Artificial Sequence
  Synthetic
cggcgatgcugagaaccaaua

SEQ ID NO: 93343 - DNA, 25 bp, Artificial Sequence
  Synthetic
gaauaaagaggagcaggtugaggaa

SEQ ID NO: 93344 - DNA, 23 bp, Artificial Sequence
  Synthetic
aagcaaccugcttgatgauacca

SEQ ID NO: 93345 - DNA, 23 bp, Artificial Sequence
  Synthetic
ccttagacutccctguggacaga

SEQ ID NO: 93346 - DNA, 21 bp, Artificial Sequence
  Synthetic
ggccccuggagaggtttuaat

SEQ ID NO: 93347 - DNA, 24 bp, Artificial Sequence
  Synthetic
cagaaaatctgcucttagggcuca

SEQ ID NO: 93348 - DNA, 19 bp, Artificial Sequence
  Synthetic
ctctcccguccctgaccua

SEQ ID NO: 93349 - DNA, 22 bp, Artificial Sequence
  Synthetic
acaaggauggaaaggcactguc

SEQ ID NO: 93350 - DNA, 18 bp, Artificial Sequence
  Synthetic
ccgtcugctgccctuaca

SEQ ID NO: 93351 - DNA, 17 bp, Artificial Sequence
  Synthetic
ccuaacggcccgugcag

SEQ ID NO: 93352 - DNA, 24 bp, Artificial Sequence
  Synthetic
caactatggcuggcaattgaauca

SEQ ID NO: 93353 - DNA, 25 bp, Artificial Sequence
  Synthetic
cctgtgacguctttcctgttttcut

SEQ ID NO: 93354 - DNA, 22 bp, Artificial Sequence
  Synthetic
tgtguctcctcttuccccagat

SEQ ID NO: 93355 - DNA, 17 bp, Artificial Sequence
  Synthetic
cagcaggcugtgggugt

SEQ ID NO: 93356 - DNA, 20 bp, Artificial Sequence
  Synthetic
ctctgucacctcctugagca

SEQ ID NO: 93357 - DNA, 22 bp, Artificial Sequence
  Synthetic
cctccctccucccaactgtaut

SEQ ID NO: 93358 - DNA, 21 bp, Artificial Sequence
  Synthetic
gtgggaacacacggucatuct

SEQ ID NO: 93359 - DNA, 20 bp, Artificial Sequence
  Synthetic
ccaucctuaagccagcggat

SEQ ID NO: 93360 - DNA, 21 bp, Artificial Sequence
  Synthetic
cagcaatcutcagctcuccct

SEQ ID NO: 93361 - DNA, 23 bp, Artificial Sequence
  Synthetic
tggaggtccauccttgtctgaut

SEQ ID NO: 93362 - DNA, 19 bp, Artificial Sequence
  Synthetic
cgtcaagutccgctgucca

SEQ ID NO: 93363 - DNA, 22 bp, Artificial Sequence
  Synthetic
ggtctuggaacccagagacuca

SEQ ID NO: 93364 - DNA, 18 bp, Artificial Sequence
  Synthetic
gcuaacccugcccaacgg

SEQ ID NO: 93365 - DNA, 19 bp, Artificial Sequence
  Synthetic
ccagctgcugatggctuct

SEQ ID NO: 93366 - DNA, 21 bp, Artificial Sequence
  Synthetic
tgccacacucagaacatugct

SEQ ID NO: 93367 - DNA, 27 bp, Artificial Sequence
  Synthetic
gagaaccccagaauaaacacgtaatuc

SEQ ID NO: 93368 - DNA, 27 bp, Artificial Sequence
  Synthetic
gccagtttttcuaacagcattgaucat

SEQ ID NO: 93369 - DNA, 24 bp, Artificial Sequence
  Synthetic
gttttaacaccutcagugggcaag

SEQ ID NO: 93370 - DNA, 22 bp, Artificial Sequence
  Synthetic
ggccguaagcagacaaatccua

SEQ ID NO: 93371 - DNA, 23 bp, Artificial Sequence
  Synthetic
cttatugttccagcugacaccac

SEQ ID NO: 93372 - DNA, 21 bp, Artificial Sequence
  Synthetic
catgucaccacaggcaaaucc

SEQ ID NO: 93373 - DNA, 26 bp, Artificial Sequence
  Synthetic
gcctgagatttcuttcccttgtgtua

SEQ ID NO: 93374 - DNA, 25 bp, Artificial Sequence
  Synthetic
attcaagaaccacugctaucaaggt

SEQ ID NO: 93375 - DNA, 29 bp, Artificial Sequence
  Synthetic
ggaaaatatttgautaatggcaccugcaa

SEQ ID NO: 93376 - DNA, 18 bp, Artificial Sequence
  Synthetic
gggcucggtctaugacga

SEQ ID NO: 93377 - DNA, 21 bp, Artificial Sequence
  Synthetic
ccacucacccgacttcugaac

SEQ ID NO: 93378 - DNA, 18 bp, Artificial Sequence
  Synthetic
gcguaucgccagcacgat

SEQ ID NO: 93379 - DNA, 17 bp, Artificial Sequence
  Synthetic
cgggcccgacugucaag

SEQ ID NO: 93380 - DNA, 25 bp, Artificial Sequence
  Synthetic
aaagcctcccugtaaataactgugt

SEQ ID NO: 93381 - DNA, 22 bp, Artificial Sequence
  Synthetic
gaagagataugctgtgcccuca

SEQ ID NO: 93382 - DNA, 21 bp, Artificial Sequence
  Synthetic
ccaccuaacaggctgtcauca

SEQ ID NO: 93383 - DNA, 25 bp, Artificial Sequence
  Synthetic
cttttgttucaccagtacccaaucc

SEQ ID NO: 93384 - DNA, 23 bp, Artificial Sequence
  Synthetic
gttgacctgucccagattcaguc

SEQ ID NO: 93385 - DNA, 24 bp, Artificial Sequence
  Synthetic
gcctctaugcctctaauccaaggt

SEQ ID NO: 93386 - DNA, 22 bp, Artificial Sequence
  Synthetic
attcatgaagcccutgccauct

SEQ ID NO: 93387 - DNA, 29 bp, Artificial Sequence
  Synthetic
ggaccttcatcuaaagacacaagcauaaa

SEQ ID NO: 93388 - DNA, 20 bp, Artificial Sequence
  Synthetic
ccugagggcacagcatauct

SEQ ID NO: 93389 - DNA, 28 bp, Artificial Sequence
  Synthetic
gcaattcgtccucaggtaggattaauat

SEQ ID NO: 93390 - DNA, 27 bp, Artificial Sequence
  Synthetic
acactaaaatuttcctgggucacaaga

SEQ ID NO: 93391 - DNA, 26 bp, Artificial Sequence
  Synthetic
acccttaccacuatcagagagtugag

SEQ ID NO: 93392 - DNA, 26 bp, Artificial Sequence
  Synthetic
aaacttgcaatautcctacctggugt

SEQ ID NO: 93393 - DNA, 22 bp, Artificial Sequence
  Synthetic
ggcctgatcutcacagtcauca

SEQ ID NO: 93394 - DNA, 19 bp, Artificial Sequence
  Synthetic
cuccagaacgacucgggaa

SEQ ID NO: 93395 - DNA, 18 bp, Artificial Sequence
  Synthetic
ggcugcaggagacctugt

SEQ ID NO: 93396 - DNA, 20 bp, Artificial Sequence
  Synthetic
gcctcugagctcctctucac

SEQ ID NO: 93397 - DNA, 20 bp, Artificial Sequence
  Synthetic
tccagctcuggacccacaua

SEQ ID NO: 93398 - DNA, 21 bp, Artificial Sequence
  Synthetic
ctgaagccutttgtcgtugcc

SEQ ID NO: 93399 - DNA, 25 bp, Artificial Sequence
  Synthetic
agccaggaaautctggtcacuaaac

SEQ ID NO: 93400 - DNA, 20 bp, Artificial Sequence
  Synthetic
ctgcacacacuaacgcgtut

SEQ ID NO: 93401 - DNA, 29 bp, Artificial Sequence
  Synthetic
tgaagccagatugaagtttcctagatuac

SEQ ID NO: 93402 - DNA, 26 bp, Artificial Sequence
  Synthetic
ctggttttaagccagugagtgtcaua

SEQ ID NO: 93403 - DNA, 20 bp, Artificial Sequence
  Synthetic
cactucaacctccguccagt

SEQ ID NO: 93404 - DNA, 27 bp, Artificial Sequence
  Synthetic
cttctgaaatugagtgtacctgcuact

SEQ ID NO: 93405 - DNA, 27 bp, Artificial Sequence
  Synthetic
accattgatugaagactgcattctuga

SEQ ID NO: 93406 - DNA, 23 bp, Artificial Sequence
  Synthetic
atccgaatggcaugagaacctut

SEQ ID NO: 93407 - DNA, 24 bp, Artificial Sequence
  Synthetic
gtgatccuggtgaatttcttugcc

SEQ ID NO: 93408 - DNA, 27 bp, Artificial Sequence
  Synthetic
aaaatgtcaggauaaagtggatcugct

SEQ ID NO: 93409 - DNA, 23 bp, Artificial Sequence
  Synthetic
agccatactucccttgtcatugg

SEQ ID NO: 93410 - DNA, 28 bp, Artificial Sequence
  Synthetic
ctctttaccuccctttcataagcuagac

SEQ ID NO: 93411 - DNA, 26 bp, Artificial Sequence
  Synthetic
tcagaagttugaaaggccagtaacuc

SEQ ID NO: 93412 - DNA, 25 bp, Artificial Sequence
  Synthetic
gcagttttcaautgccttgagtuca

SEQ ID NO: 93413 - DNA, 21 bp, Artificial Sequence
  Synthetic
cttttccccutgctucccaac

SEQ ID NO: 93414 - DNA, 20 bp, Artificial Sequence
  Synthetic
gccaccutggagugacaaag

SEQ ID NO: 93415 - DNA, 29 bp, Artificial Sequence
  Synthetic
tgauatgtagctuacaaccaagaacacag

SEQ ID NO: 93416 - DNA, 21 bp, Artificial Sequence
  Synthetic
ggacagguggttgccaagaua

SEQ ID NO: 93417 - DNA, 22 bp, Artificial Sequence
  Synthetic
gagcatcauacgtctucaggct

SEQ ID NO: 93418 - DNA, 22 bp, Artificial Sequence
  Synthetic
gagacacaagucacgtgaucgt

SEQ ID NO: 93419 - DNA, 27 bp, Artificial Sequence
  Synthetic
catttcatgtttguactgctcgttcug

SEQ ID NO: 93420 - DNA, 29 bp, Artificial Sequence
  Synthetic
ctcctctggauaccgttctataatcugaa

SEQ ID NO: 93421 - DNA, 27 bp, Artificial Sequence
  Synthetic
tgctttcttcttuggtgtccttgauag

SEQ ID NO: 93422 - DNA, 24 bp, Artificial Sequence
  Synthetic
cutcgtggtgtaugaggaagacat

SEQ ID NO: 93423 - DNA, 19 bp, Artificial Sequence
  Synthetic
cacccugccagcaagatug

SEQ ID NO: 93424 - DNA, 28 bp, Artificial Sequence
  Synthetic
cagaggtacauaatttcagaggctuacc

SEQ ID NO: 93425 - DNA, 22 bp, Artificial Sequence
  Synthetic
gttaaagtcucatggcgcucac

SEQ ID NO: 93426 - DNA, 22 bp, Artificial Sequence
  Synthetic
ggcagagaaagautggccagua

SEQ ID NO: 93427 - DNA, 25 bp, Artificial Sequence
  Synthetic
acaggaccagacuccataatgguag

SEQ ID NO: 93428 - DNA, 33 bp, Artificial Sequence
  Synthetic
ttcaaaatatatcttaautcaaaagggctgcut

SEQ ID NO: 93429 - DNA, 25 bp, Artificial Sequence
  Synthetic
ctggagagaggcutggctaatttua

SEQ ID NO: 93430 - DNA, 20 bp, Artificial Sequence
  Synthetic
gggcuggactgcaacugaac

SEQ ID NO: 93431 - DNA, 20 bp, Artificial Sequence
  Synthetic
ccugcgtctcuggaaaggaa

SEQ ID NO: 93432 - DNA, 23 bp, Artificial Sequence
  Synthetic
tccttcctttugcagcatccaut

SEQ ID NO: 93433 - DNA, 27 bp, Artificial Sequence
  Synthetic
tctttccugcagcagagttttattuca

SEQ ID NO: 93434 - DNA, 18 bp, Artificial Sequence
  Synthetic
ccgtgcuccgatccttug

SEQ ID NO: 93435 - DNA, 17 bp, Artificial Sequence
  Synthetic
cacttgcccuccccgut

SEQ ID NO: 93436 - DNA, 23 bp, Artificial Sequence
  Synthetic
gtgtgcaaugactatgctucagg

SEQ ID NO: 93437 - DNA, 24 bp, Artificial Sequence
  Synthetic
tggctctuaggatctgctcauagg

SEQ ID NO: 93438 - DNA, 21 bp, Artificial Sequence
  Synthetic
gagccagaggaggauggagua

SEQ ID NO: 93439 - DNA, 19 bp, Artificial Sequence
  Synthetic
gcaagugcaagacgagugg

SEQ ID NO: 93440 - DNA, 25 bp, Artificial Sequence
  Synthetic
tcgacactcuccattcaattcgtut

SEQ ID NO: 93441 - DNA, 25 bp, Artificial Sequence
  Synthetic
ggatgttcucaagactgucaagacc

SEQ ID NO: 93442 - DNA, 23 bp, Artificial Sequence
  Synthetic
agtttgatgctutccccacagua

SEQ ID NO: 93443 - DNA, 28 bp, Artificial Sequence
  Synthetic
tccagacugtcaaaatgtuaagaacaca

SEQ ID NO: 93444 - DNA, 27 bp, Artificial Sequence
  Synthetic
gagtaccuaccttataacugaccggaa

SEQ ID NO: 93445 - DNA, 25 bp, Artificial Sequence
  Synthetic
aggtcttugcgacaataaggaugac

SEQ ID NO: 93446 - DNA, 25 bp, Artificial Sequence
  Synthetic
cttatctggccaugctgtttatugg

SEQ ID NO: 93447 - DNA, 21 bp, Artificial Sequence
  Synthetic
gctcugatagggugggacaag

SEQ ID NO: 93448 - DNA, 21 bp, Artificial Sequence
  Synthetic
cccacttugtttctggcugag

SEQ ID NO: 93449 - DNA, 24 bp, Artificial Sequence
  Synthetic
ctcttcagggcuaccgtcuaaaat

SEQ ID NO: 93450 - DNA, 21 bp, Artificial Sequence
  Synthetic
ctcauctgaaccaucgccaca

SEQ ID NO: 93451 - DNA, 23 bp, Artificial Sequence
  Synthetic
ggcatgcccuttatgttccatut

SEQ ID NO: 93452 - DNA, 23 bp, Artificial Sequence
  Synthetic
tatttgtcccaugcacacggaua

SEQ ID NO: 93453 - DNA, 23 bp, Artificial Sequence
  Synthetic
aagagaaacagaugggagcucac

SEQ ID NO: 93454 - DNA, 22 bp, Artificial Sequence
  Synthetic
tgtctgtaccauagctggucgt

SEQ ID NO: 93455 - DNA, 21 bp, Artificial Sequence
  Synthetic
acccaguaacatcgccttugt

SEQ ID NO: 93456 - DNA, 28 bp, Artificial Sequence
  Synthetic
ctgattgagaaagaacuttatgcccuct

SEQ ID NO: 93457 - DNA, 26 bp, Artificial Sequence
  Synthetic
ccaatcctgaaaugttgacaccauct

SEQ ID NO: 93458 - DNA, 25 bp, Artificial Sequence
  Synthetic
tcggtaaacacacuctccttttugt

SEQ ID NO: 93459 - DNA, 18 bp, Artificial Sequence
  Synthetic
gatgucgaaggccucggt

SEQ ID NO: 93460 - DNA, 23 bp, Artificial Sequence
  Synthetic
acatccagggaccaguaatctuc

SEQ ID NO: 93461 - DNA, 26 bp, Artificial Sequence
  Synthetic
gcttctggcuctgaaaauaaagacaa

SEQ ID NO: 93462 - DNA, 20 bp, Artificial Sequence
  Synthetic
gagaacaucgtccgcuacga

SEQ ID NO: 93463 - DNA, 18 bp, Artificial Sequence
  Synthetic
gcacgtcugaggcacgua

SEQ ID NO: 93464 - DNA, 18 bp, Artificial Sequence
  Synthetic
gcugcccgagaucgagag

SEQ ID NO: 93465 - DNA, 17 bp, Artificial Sequence
  Synthetic
ccgucccccucgaacat

SEQ ID NO: 93466 - DNA, 23 bp, Artificial Sequence
  Synthetic
gtgggacugcagatatagaugcc

SEQ ID NO: 93467 - DNA, 23 bp, Artificial Sequence
  Synthetic
gtggatccccuggatttgtugaa

SEQ ID NO: 93468 - DNA, 21 bp, Artificial Sequence
  Synthetic
ttcgactcccuccagacguat

SEQ ID NO: 93469 - DNA, 19 bp, Artificial Sequence
  Synthetic
gtagagcucggccagctuc

SEQ ID NO: 93470 - DNA, 23 bp, Artificial Sequence
  Synthetic
ggtagagtggauggtcagtguct

SEQ ID NO: 93471 - DNA, 24 bp, Artificial Sequence
  Synthetic
ctgcaggatacutttgtggaacuc

SEQ ID NO: 93472 - DNA, 26 bp, Artificial Sequence
  Synthetic
ggaaagaaccacuttatttugcacct

SEQ ID NO: 93473 - DNA, 28 bp, Artificial Sequence
  Synthetic
acagtgaaatatuggttctgacgtuagt

SEQ ID NO: 93474 - DNA, 27 bp, Artificial Sequence
  Synthetic
gggctauagggtgtatattugcagaac

SEQ ID NO: 93475 - DNA, 22 bp, Artificial Sequence
  Synthetic
atgtgtaccugcaggaaauccc

SEQ ID NO: 93476 - DNA, 25 bp, Artificial Sequence
  Synthetic
ccatctcaaguccatagcactuacc

SEQ ID NO: 93477 - DNA, 23 bp, Artificial Sequence
  Synthetic
tgacacucacaaagtgcucaagt

SEQ ID NO: 93478 - DNA, 21 bp, Artificial Sequence
  Synthetic
gccacctuaaagtgggacgug

SEQ ID NO: 93479 - DNA, 28 bp, Artificial Sequence
  Synthetic
ctcatagatauctcgcgtcauaccaaaa

SEQ ID NO: 93480 - DNA, 28 bp, Artificial Sequence
  Synthetic
accagcuggacagaatattcaatguaat

SEQ ID NO: 93481 - DNA, 29 bp, Artificial Sequence
  Synthetic
aacaaagactcaaguaaaagtagctucca

SEQ ID NO: 93482 - DNA, 27 bp, Artificial Sequence
  Synthetic
gctattcatuaggatccctttcucgga

SEQ ID NO: 93483 - DNA, 28 bp, Artificial Sequence
  Synthetic
ccagcagaactauctcctactactctut

SEQ ID NO: 93484 - DNA, 27 bp, Artificial Sequence
  Synthetic
gcaactuacccaagctatgatuaacag

SEQ ID NO: 93485 - DNA, 33 bp, Artificial Sequence
  Synthetic
taaagctagtttuatgattacttgaucagaagt

SEQ ID NO: 93486 - DNA, 20 bp, Artificial Sequence
  Synthetic
gctgctgcautgttcccaua

SEQ ID NO: 93487 - DNA, 25 bp, Artificial Sequence
  Synthetic
gtttttcacaucaccaaggccauag

SEQ ID NO: 93488 - DNA, 22 bp, Artificial Sequence
  Synthetic
acagttgggauttctgggtguc

SEQ ID NO: 93489 - DNA, 28 bp, Artificial Sequence
  Synthetic
ggactgtugacccgaaatatacaaatuc

SEQ ID NO: 93490 - DNA, 24 bp, Artificial Sequence
  Synthetic
cagguaagatgagugggaaaagca

SEQ ID NO: 93491 - DNA, 21 bp, Artificial Sequence
  Synthetic
gtgcatgaugatgtgcuggag

SEQ ID NO: 93492 - DNA, 27 bp, Artificial Sequence
  Synthetic
agatcaacttcuaagacaccacucact

SEQ ID NO: 93493 - DNA, 28 bp, Artificial Sequence
  Synthetic
gctgatatcacaaaguaccatttcucca

SEQ ID NO: 93494 - DNA, 25 bp, Artificial Sequence
  Synthetic
gatacaatcucgaagcagtccucaa

SEQ ID NO: 93495 - DNA, 23 bp, Artificial Sequence
  Synthetic
cggaccucagaattagcaucaac

SEQ ID NO: 93496 - DNA, 28 bp, Artificial Sequence
  Synthetic
tcatttgctuctgtaaattctuggagga

SEQ ID NO: 93497 - DNA, 24 bp, Artificial Sequence
  Synthetic
ccatccaaugccttguagaaacct

SEQ ID NO: 93498 - DNA, 25 bp, Artificial Sequence
  Synthetic
cattttgttugtagcttgucgacca

SEQ ID NO: 93499 - DNA, 28 bp, Artificial Sequence
  Synthetic
aagtaattattcucacacctgcagtuca

SEQ ID NO: 93500 - DNA, 23 bp, Artificial Sequence
  Synthetic
tgcacactguttcgttgacugat

SEQ ID NO: 93501 - DNA, 19 bp, Artificial Sequence
  Synthetic
tggcgtugagaatcgcuct

SEQ ID NO: 93502 - DNA, 22 bp, Artificial Sequence
  Synthetic
cccctacaugatacgucaggct

SEQ ID NO: 93503 - DNA, 28 bp, Artificial Sequence
  Synthetic
ccagctagtgauttttgaaacaggttut

SEQ ID NO: 93504 - DNA, 21 bp, Artificial Sequence
  Synthetic
cgccctcucttccctuacaga

SEQ ID NO: 93505 - DNA, 25 bp, Artificial Sequence
  Synthetic
ggcaatgcaguaaaggttctcauac

SEQ ID NO: 93506 - DNA, 22 bp, Artificial Sequence
  Synthetic
gattgagcucgtccatcuccag

SEQ ID NO: 93507 - DNA, 24 bp, Artificial Sequence
  Synthetic
tuatatgctgtugccccagaaaga

SEQ ID NO: 93508 - DNA, 27 bp, Artificial Sequence
  Synthetic
gcaaacttttuagaccgtaaggagcua

SEQ ID NO: 93509 - DNA, 25 bp, Artificial Sequence
  Synthetic
tggaagaagaugguggaagaaacag

SEQ ID NO: 93510 - DNA, 26 bp, Artificial Sequence
  Synthetic
cagttctacucaggaagatggtucaa

SEQ ID NO: 93511 - DNA, 22 bp, Artificial Sequence
  Synthetic
aaaacaaacauggaggcauggg

SEQ ID NO: 93512 - DNA, 23 bp, Artificial Sequence
  Synthetic
agtaaaaggccugaagacaggug

SEQ ID NO: 93513 - DNA, 22 bp, Artificial Sequence
  Synthetic
tccaggtccucactgtagtugt

SEQ ID NO: 93514 - DNA, 22 bp, Artificial Sequence
  Synthetic
aagggaaggcucuacagaaggt

SEQ ID NO: 93515 - DNA, 28 bp, Artificial Sequence
  Synthetic
caaatgagaagcuatgctctgatgttuc

SEQ ID NO: 93516 - DNA, 25 bp, Artificial Sequence
  Synthetic
gccatatctuctgcctctttuacct

SEQ ID NO: 93517 - DNA, 24 bp, Artificial Sequence
  Synthetic
tgaccagacagaugaaatggcauc

SEQ ID NO: 93518 - DNA, 23 bp, Artificial Sequence
  Synthetic
gugcggaaaggauaagaccaagt

SEQ ID NO: 93519 - DNA, 24 bp, Artificial Sequence
  Synthetic
ctaagctuccggatgtcatacuca

SEQ ID NO: 93520 - DNA, 18 bp, Artificial Sequence
  Synthetic
ggcctgacuctgcctgut

SEQ ID NO: 93521 - DNA, 17 bp, Artificial Sequence
  Synthetic
cagugccacaccccuca

SEQ ID NO: 93522 - DNA, 23 bp, Artificial Sequence
  Synthetic
cttctcuccccacccatctctua

SEQ ID NO: 93523 - DNA, 27 bp, Artificial Sequence
  Synthetic
cagaaacccaagcucttactgaattut

SEQ ID NO: 93524 - DNA, 24 bp, Artificial Sequence
  Synthetic
gatacagagcagugccttugaaga

SEQ ID NO: 93525 - DNA, 25 bp, Artificial Sequence
  Synthetic
caatgactccuctgcacttcuagag

SEQ ID NO: 93526 - DNA, 23 bp, Artificial Sequence
  Synthetic
ccttcttgcugctgctttcttua

SEQ ID NO: 93527 - DNA, 25 bp, Artificial Sequence
  Synthetic
cactcaaagtagugcacacattcug

SEQ ID NO: 93528 - DNA, 26 bp, Artificial Sequence
  Synthetic
catgtctcacucacaactuaccacaa

SEQ ID NO: 93529 - DNA, 24 bp, Artificial Sequence
  Synthetic
tgatcatcauagccagaacaugcc

SEQ ID NO: 93530 - DNA, 26 bp, Artificial Sequence
  Synthetic
gggaactccugaatttgtaacugcaa

SEQ ID NO: 93531 - DNA, 29 bp, Artificial Sequence
  Synthetic
ttccccagagtauacttcataagcatgua

SEQ ID NO: 93532 - DNA, 28 bp, Artificial Sequence
  Synthetic
tgacaaggtggaauttgtagaactacug

SEQ ID NO: 93533 - DNA, 25 bp, Artificial Sequence
  Synthetic
atgcaagttguggcttttggtatut

SEQ ID NO: 93534 - DNA, 22 bp, Artificial Sequence
  Synthetic
acagctacaautgcctgggtut

SEQ ID NO: 93535 - DNA, 23 bp, Artificial Sequence
  Synthetic
ctgaagguactctcatgcuccac

SEQ ID NO: 93536 - DNA, 27 bp, Artificial Sequence
  Synthetic
gaggagatutacgtgtatauccaagca

SEQ ID NO: 93537 - DNA, 20 bp, Artificial Sequence
  Synthetic
ccctcccucccagtcaauca

SEQ ID NO: 93538 - DNA, 27 bp, Artificial Sequence
  Synthetic
cttgagtgctuaggactaaagtgtgua

SEQ ID NO: 93539 - DNA, 22 bp, Artificial Sequence
  Synthetic
catccccacuagctgaaugaca

SEQ ID NO: 93540 - DNA, 28 bp, Artificial Sequence
  Synthetic
gcatttaaactgaucatcaggacagcua

SEQ ID NO: 93541 - DNA, 27 bp, Artificial Sequence
  Synthetic
ggcaatgaaugacagactctaugacat

SEQ ID NO: 93542 - DNA, 23 bp, Artificial Sequence
  Synthetic
cagaaacacgaugcccagttuac

SEQ ID NO: 93543 - DNA, 19 bp, Artificial Sequence
  Synthetic
aagaugtuccgagcagcga

SEQ ID NO: 93544 - DNA, 23 bp, Artificial Sequence
  Synthetic
gggaggattcuaatgcctcttuc

SEQ ID NO: 93545 - DNA, 22 bp, Artificial Sequence
  Synthetic
gcaagtgagaguggaggaccua

SEQ ID NO: 93546 - DNA, 23 bp, Artificial Sequence
  Synthetic
agtacctgucagacatgggcuat

SEQ ID NO: 93547 - DNA, 25 bp, Artificial Sequence
  Synthetic
ttgtataagcagcutctgggtcauc

SEQ ID NO: 93548 - DNA, 27 bp, Artificial Sequence
  Synthetic
gtgtaaggtttcugatttcggacttuc

SEQ ID NO: 93549 - DNA, 23 bp, Artificial Sequence
  Synthetic
gacaacacgutttgggtcaugat

SEQ ID NO: 93550 - DNA, 26 bp, Artificial Sequence
  Synthetic
gttcccttaguagtctctcctcucat

SEQ ID NO: 93551 - DNA, 27 bp, Artificial Sequence
  Synthetic
cagagctgccuattggcacttatauag

SEQ ID NO: 93552 - DNA, 23 bp, Artificial Sequence
  Synthetic
gcagatcacagcaaucactccut

SEQ ID NO: 93553 - DNA, 22 bp, Artificial Sequence
  Synthetic
ctcgacaccutgtccttacucc

SEQ ID NO: 93554 - DNA, 21 bp, Artificial Sequence
  Synthetic
gctgttgtcugctgtgcagua

SEQ ID NO: 93555 - DNA, 20 bp, Artificial Sequence
  Synthetic
gauggacgaaggcaaagcug

SEQ ID NO: 93556 - DNA, 20 bp, Artificial Sequence
  Synthetic
cagggagugagtggctgtua

SEQ ID NO: 93557 - DNA, 23 bp, Artificial Sequence
  Synthetic
ggaaatagactutgcccccguag

SEQ ID NO: 93558 - DNA, 18 bp, Artificial Sequence
  Synthetic
ggctgcugccatgcagua

SEQ ID NO: 93559 - DNA, 18 bp, Artificial Sequence
  Synthetic
ctgtguccccaaggcugt

SEQ ID NO: 93560 - DNA, 23 bp, Artificial Sequence
  Synthetic
aaggaaattagugctgggcguat

SEQ ID NO: 93561 - DNA, 21 bp, Artificial Sequence
  Synthetic
ctagcagacccuttcccucac

SEQ ID NO: 93562 - DNA, 22 bp, Artificial Sequence
  Synthetic
ctggccacauctatggttucca

SEQ ID NO: 93563 - DNA, 20 bp, Artificial Sequence
  Synthetic
cctgggccuctcctcacuac

SEQ ID NO: 93564 - DNA, 22 bp, Artificial Sequence
  Synthetic
tgatctagccgauagccctuct

SEQ ID NO: 93565 - DNA, 27 bp, Artificial Sequence
  Synthetic
gcctgcctttcuattttatctgaacug

SEQ ID NO: 93566 - DNA, 31 bp, Artificial Sequence
  Synthetic
aaaggacagtcaugagttggtaatattaauc

SEQ ID NO: 93567 - DNA, 22 bp, Artificial Sequence
  Synthetic
tggaaggccgagagaucattuc

SEQ ID NO: 93568 - DNA, 28 bp, Artificial Sequence
  Synthetic
gccttccactcuagcatagtaatctuca

SEQ ID NO: 93569 - DNA, 33 bp, Artificial Sequence
  Synthetic
ttcttatgtatguttaattctgtacaugagcat

SEQ ID NO: 93570 - DNA, 23 bp, Artificial Sequence
  Synthetic
tgcatcaacacutgagtctugga

SEQ ID NO: 93571 - DNA, 21 bp, Artificial Sequence
  Synthetic
gcccttgutgcaagtcugaca

SEQ ID NO: 93572 - DNA, 20 bp, Artificial Sequence
  Synthetic
cugaagcttcugagccccaa

SEQ ID NO: 93573 - DNA, 20 bp, Artificial Sequence
  Synthetic
cactgccccuctgctcauag

SEQ ID NO: 93574 - DNA, 21 bp, Artificial Sequence
  Synthetic
cctctgatuccctctgcctuc

SEQ ID NO: 93575 - DNA, 20 bp, Artificial Sequence
  Synthetic
accaggugcgaguacaggat

SEQ ID NO: 93576 - DNA, 21 bp, Artificial Sequence
  Synthetic
ccucaacaagaaggaccugct

SEQ ID NO: 93577 - DNA, 23 bp, Artificial Sequence
  Synthetic
tgtatgagccccuctcccatauc

SEQ ID NO: 93578 - DNA, 23 bp, Artificial Sequence
  Synthetic
ggutttcucaagaaggaggagca

SEQ ID NO: 93579 - DNA, 25 bp, Artificial Sequence
  Synthetic
ctgtactctcuctttgggacatuct

SEQ ID NO: 93580 - DNA, 27 bp, Artificial Sequence
  Synthetic
aaaacccttauacacaaagagguacgg

SEQ ID NO: 93581 - DNA, 23 bp, Artificial Sequence
  Synthetic
tgggtttcucctggcattuacag

SEQ ID NO: 93582 - DNA, 25 bp, Artificial Sequence
  Synthetic
gtttgtgacauaagcagaacgctut

SEQ ID NO: 93583 - DNA, 25 bp, Artificial Sequence
  Synthetic
cttcagaatcucttgcgtttccuac

SEQ ID NO: 93584 - DNA, 29 bp, Artificial Sequence
  Synthetic
gcatttgcuaaaaacattcaaauacacaa

SEQ ID NO: 93585 - DNA, 24 bp, Artificial Sequence
  Synthetic
cacuactgcacagucaaggaagaa

SEQ ID NO: 93586 - DNA, 28 bp, Artificial Sequence
  Synthetic
tcatcattaaattcutcagcccactuct

SEQ ID NO: 93587 - DNA, 28 bp, Artificial Sequence
  Synthetic
tgttcttaccaguaagcagagcgataua

SEQ ID NO: 93588 - DNA, 27 bp, Artificial Sequence
  Synthetic
tcaacttgcttcuttatgtcactguct

SEQ ID NO: 93589 - DNA, 25 bp, Artificial Sequence
  Synthetic
ggcaagaagauggtggtgttaugat

SEQ ID NO: 93590 - DNA, 21 bp, Artificial Sequence
  Synthetic
gctcagggaagguctctccuc

SEQ ID NO: 93591 - DNA, 21 bp, Artificial Sequence
  Synthetic
tgctcaucctccuaccccaat

SEQ ID NO: 93592 - DNA, 28 bp, Artificial Sequence
  Synthetic
acattccttcctugagcaagatttcuat

SEQ ID NO: 93593 - DNA, 28 bp, Artificial Sequence
  Synthetic
ccacaaaaggttuctgaattagcaacug

SEQ ID NO: 93594 - DNA, 22 bp, Artificial Sequence
  Synthetic
cttctctccugaggacgttuca

SEQ ID NO: 93595 - DNA, 27 bp, Artificial Sequence
  Synthetic
ccagtgatgcauatttcagtgggaaua

SEQ ID NO: 93596 - DNA, 25 bp, Artificial Sequence
  Synthetic
cctgacaaucagcacctttaatugg

SEQ ID NO: 93597 - DNA, 23 bp, Artificial Sequence
  Synthetic
agcaguggaacugaacaagaagt

SEQ ID NO: 93598 - DNA, 21 bp, Artificial Sequence
  Synthetic
aguggagaacggccttucaaa

SEQ ID NO: 93599 - DNA, 27 bp, Artificial Sequence
  Synthetic
gtcagaaggtcuacccagaaaatacug

SEQ ID NO: 93600 - DNA, 26 bp, Artificial Sequence
  Synthetic
gatgaactcuccacttcttgtucagt

SEQ ID NO: 93601 - DNA, 24 bp, Artificial Sequence
  Synthetic
acctgccaacacutctgaagatut

SEQ ID NO: 93602 - DNA, 26 bp, Artificial Sequence
  Synthetic
aaaccaaagtgguatgagaaagcuct

SEQ ID NO: 93603 - DNA, 22 bp, Artificial Sequence
  Synthetic
aagactccugctgtgtgaugac

SEQ ID NO: 93604 - DNA, 28 bp, Artificial Sequence
  Synthetic
cctttgagtcaautagtcaggtaaguga

SEQ ID NO: 93605 - DNA, 26 bp, Artificial Sequence
  Synthetic
tgtggaugaaacaggaaacaatccut

SEQ ID NO: 93606 - DNA, 27 bp, Artificial Sequence
  Synthetic
attcutaacatccaguagggcaaaaca

SEQ ID NO: 93607 - DNA, 21 bp, Artificial Sequence
  Synthetic
ctgguccccagacattucaga

SEQ ID NO: 93608 - DNA, 23 bp, Artificial Sequence
  Synthetic
cccttgtcauctgttccagaaug

SEQ ID NO: 93609 - DNA, 28 bp, Artificial Sequence
  Synthetic
tcgaacaagcttuacaccttcttcatua

SEQ ID NO: 93610 - DNA, 25 bp, Artificial Sequence
  Synthetic
actgagaaaaaugaactcugcccaa

SEQ ID NO: 93611 - DNA, 22 bp, Artificial Sequence
  Synthetic
ggctcccacgucttctaaaguc

SEQ ID NO: 93612 - DNA, 28 bp, Artificial Sequence
  Synthetic
aggcaacattcautagactcactttcut

SEQ ID NO: 93613 - DNA, 28 bp, Artificial Sequence
  Synthetic
aaaaagatagtagcucaagtggaagugg

SEQ ID NO: 93614 - DNA, 24 bp, Artificial Sequence
  Synthetic
acttcaacaucattgtcacugcca

SEQ ID NO: 93615 - DNA, 28 bp, Artificial Sequence
  Synthetic
tgctgattgaccucttataattgacgut

SEQ ID NO: 93616 - DNA, 21 bp, Artificial Sequence
  Synthetic
ccaactuggcctgttccauct

SEQ ID NO: 93617 - DNA, 23 bp, Artificial Sequence
  Synthetic
tttggttatgcugtcaccagugt

SEQ ID NO: 93618 - DNA, 29 bp, Artificial Sequence
  Synthetic
tcacgatgttcuaaaatgaaggaagagut

SEQ ID NO: 93619 - DNA, 28 bp, Artificial Sequence
  Synthetic
gagtgttaaaaucgctttccttcttgut

SEQ ID NO: 93620 - DNA, 18 bp, Artificial Sequence
  Synthetic
ccccctccuggtggctut

SEQ ID NO: 93621 - DNA, 18 bp, Artificial Sequence
  Synthetic
ggcagguagcccaaggug

SEQ ID NO: 93622 - DNA, 23 bp, Artificial Sequence
  Synthetic
cuggaacugaggaaggaacagac

SEQ ID NO: 93623 - DNA, 25 bp, Artificial Sequence
  Synthetic
gcaucagaatgtuccaacagaggaa

SEQ ID NO: 93624 - DNA, 21 bp, Artificial Sequence
  Synthetic
caagccucaccccaggtaaua

SEQ ID NO: 93625 - DNA, 25 bp, Artificial Sequence
  Synthetic
tgtcacagaaugttgactttuccca

SEQ ID NO: 93626 - DNA, 27 bp, Artificial Sequence
  Synthetic
acggcataaatguagtcttttcccaut

SEQ ID NO: 93627 - DNA, 27 bp, Artificial Sequence
  Synthetic
atagctattgtugcagaaacatgtuca

SEQ ID NO: 93628 - DNA, 17 bp, Artificial Sequence
  Synthetic
ccgacgtugaccgcauc

SEQ ID NO: 93629 - DNA, 20 bp, Artificial Sequence
  Synthetic
gggcaaaugagcctcucagt

SEQ ID NO: 93630 - DNA, 21 bp, Artificial Sequence
  Synthetic
ggcagggaguactguaaaggg

SEQ ID NO: 93631 - DNA, 25 bp, Artificial Sequence
  Synthetic
acagcttgtugacccatttgtttut

SEQ ID NO: 93632 - DNA, 28 bp, Artificial Sequence
  Synthetic
caccaccgguacttttatttgttcttug

SEQ ID NO: 93633 - DNA, 28 bp, Artificial Sequence
  Synthetic
accttgtgcttuggaaaagaaggataut

SEQ ID NO: 93634 - DNA, 24 bp, Artificial Sequence
  Synthetic
ctcacaucagaaaaggaccucgat

SEQ ID NO: 93635 - DNA, 20 bp, Artificial Sequence
  Synthetic
gggagcgagugatgtacgug

SEQ ID NO: 93636 - DNA, 27 bp, Artificial Sequence
  Synthetic
gtaagcacauccgattttccaataugg

SEQ ID NO: 93637 - DNA, 28 bp, Artificial Sequence
  Synthetic
cagtgctgaaugaagacaaagatgatut

SEQ ID NO: 93638 - DNA, 21 bp, Artificial Sequence
  Synthetic
ccctaactuggcgcatgacut

SEQ ID NO: 93639 - DNA, 28 bp, Artificial Sequence
  Synthetic
tgccttacctcucttcagagttauagag

SEQ ID NO: 93640 - DNA, 29 bp, Artificial Sequence
  Synthetic
ctgttttctugaaagtttagcttcugact

SEQ ID NO: 93641 - DNA, 25 bp, Artificial Sequence
  Synthetic
cgauggatgctguaaacaaagagaa

SEQ ID NO: 93642 - DNA, 22 bp, Artificial Sequence
  Synthetic
gtcttcuaggttcccuccccat

SEQ ID NO: 93643 - DNA, 25 bp, Artificial Sequence
  Synthetic
gaaggugagaaaaacagcaacacut

SEQ ID NO: 93644 - DNA, 26 bp, Artificial Sequence
  Synthetic
ttctgcttctaaautcaggcccttua

SEQ ID NO: 93645 - DNA, 28 bp, Artificial Sequence
  Synthetic
ggctttatcugaactgaagtcttguact

SEQ ID NO: 93646 - DNA, 19 bp, Artificial Sequence
  Synthetic
ccuacgggaucgagagacc

SEQ ID NO: 93647 - DNA, 19 bp, Artificial Sequence
  Synthetic
agtcccggugctctugaga

SEQ ID NO: 93648 - DNA, 28 bp, Artificial Sequence
  Synthetic
cgtgcttttgttucaaacttagcatcua

SEQ ID NO: 93649 - DNA, 23 bp, Artificial Sequence
  Synthetic
gcttttaagtcugtgttggcuga

SEQ ID NO: 93650 - DNA, 23 bp, Artificial Sequence
  Synthetic
cccagcuggcacttaacattuaa

SEQ ID NO: 93651 - DNA, 26 bp, Artificial Sequence
  Synthetic
gctgcagcucagagtttttaucaaac

SEQ ID NO: 93652 - DNA, 28 bp, Artificial Sequence
  Synthetic
tcacaacagaaaagauatgcuggagaat

SEQ ID NO: 93653 - DNA, 26 bp, Artificial Sequence
  Synthetic
actatcatgagugctgtcagtctgua

SEQ ID NO: 93654 - DNA, 19 bp, Artificial Sequence
  Synthetic
ggaatacggugtccccugt

SEQ ID NO: 93655 - DNA, 20 bp, Artificial Sequence
  Synthetic
gggtagugagcgttguacga

SEQ ID NO: 93656 - DNA, 24 bp, Artificial Sequence
  Synthetic
atgtttgctgugctgtttttcugt

SEQ ID NO: 93657 - DNA, 26 bp, Artificial Sequence
  Synthetic
ggaagatggaautgcaccaauaggaa

SEQ ID NO: 93658 - DNA, 24 bp, Artificial Sequence
  Synthetic
agtgtcatgucacaaactcugcat

SEQ ID NO: 93659 - DNA, 24 bp, Artificial Sequence
  Synthetic
tgactggauccactgaauggagaa

SEQ ID NO: 93660 - DNA, 21 bp, Artificial Sequence
  Synthetic
guaccaccaggcaauccaaag

SEQ ID NO: 93661 - DNA, 27 bp, Artificial Sequence
  Synthetic
attcaaaacugcggacatatatccugt

SEQ ID NO: 93662 - DNA, 22 bp, Artificial Sequence
  Synthetic
cacctucaccagctguacaagt

SEQ ID NO: 93663 - DNA, 24 bp, Artificial Sequence
  Synthetic
tuttacaagacugccacagacaca

SEQ ID NO: 93664 - DNA, 26 bp, Artificial Sequence
  Synthetic
aatgagaaaaccuggacagaactuca

SEQ ID NO: 93665 - DNA, 32 bp, Artificial Sequence
  Synthetic
aaaattttcaugcaactatagaugacagaaac

SEQ ID NO: 93666 - DNA, 21 bp, Artificial Sequence
  Synthetic
tcagtcaguccccaccactua

SEQ ID NO: 93667 - DNA, 22 bp, Artificial Sequence
  Synthetic
caacucggagtggttugagaac

SEQ ID NO: 93668 - DNA, 21 bp, Artificial Sequence
  Synthetic
acagcggugacagagagagua

SEQ ID NO: 93669 - DNA, 22 bp, Artificial Sequence
  Synthetic
gctgtcugaccaatgcctgtut

SEQ ID NO: 93670 - DNA, 28 bp, Artificial Sequence
  Synthetic
tgaaaattcctaggaugccatcttctut

SEQ ID NO: 93671 - DNA, 28 bp, Artificial Sequence
  Synthetic
cttatccactucaggttttagggcttua

SEQ ID NO: 93672 - DNA, 17 bp, Artificial Sequence
  Synthetic
cgacucagacggugcct

SEQ ID NO: 93673 - DNA, 25 bp, Artificial Sequence
  Synthetic
actccagugcatttctatcguaacc

SEQ ID NO: 93674 - DNA, 28 bp, Artificial Sequence
  Synthetic
gcaatgaacaagacutaggaatccagua

SEQ ID NO: 93675 - DNA, 29 bp, Artificial Sequence
  Synthetic
ggtacttucagaaaacacacagaaugagt

SEQ ID NO: 93676 - DNA, 28 bp, Artificial Sequence
  Synthetic
gatgtagutttgttgttttuccaagcct

SEQ ID NO: 93677 - DNA, 27 bp, Artificial Sequence
  Synthetic
cagtcttctcuttccattcttcuccaa

SEQ ID NO: 93678 - DNA, 29 bp, Artificial Sequence
  Synthetic
agctttaggatccutttccactgtattug

SEQ ID NO: 93679 - DNA, 26 bp, Artificial Sequence
  Synthetic
tctattgttggcutagctgcatguaa

SEQ ID NO: 93680 - DNA, 21 bp, Artificial Sequence
  Synthetic
cgtcctgggautgcagatugg

SEQ ID NO: 93681 - DNA, 22 bp, Artificial Sequence
  Synthetic
tcacgttcucaaagcaguggat

SEQ ID NO: 93682 - DNA, 18 bp, Artificial Sequence
  Synthetic
gucggagcggaggaagug

SEQ ID NO: 93683 - DNA, 17 bp, Artificial Sequence
  Synthetic
cccaggcutggcaggug

SEQ ID NO: 93684 - DNA, 21 bp, Artificial Sequence
  Synthetic
gacagttuccagccuccaaca

SEQ ID NO: 93685 - DNA, 26 bp, Artificial Sequence
  Synthetic
tccagatatugcagatgaagaauccc

SEQ ID NO: 93686 - DNA, 27 bp, Artificial Sequence
  Synthetic
gcaataccatuggttgttttcauccat

SEQ ID NO: 93687 - DNA, 19 bp, Artificial Sequence
  Synthetic
tttcagguggtgugcggaa

SEQ ID NO: 93688 - DNA, 21 bp, Artificial Sequence
  Synthetic
tcacctggugtatcggcttug

SEQ ID NO: 93689 - DNA, 22 bp, Artificial Sequence
  Synthetic
cctgttcugggcatcagatgua

SEQ ID NO: 93690 - DNA, 22 bp, Artificial Sequence
  Synthetic
ggcgctttuaaaacaccgauct

SEQ ID NO: 93691 - DNA, 17 bp, Artificial Sequence
  Synthetic
ccccggutctgctcuca

SEQ ID NO: 93692 - DNA, 22 bp, Artificial Sequence
  Synthetic
ccutgttcgtctaucccccaga

SEQ ID NO: 93693 - DNA, 23 bp, Artificial Sequence
  Synthetic
cttctgcaaccuctgcctttcua

SEQ ID NO: 93694 - DNA, 28 bp, Artificial Sequence
  Synthetic
cacaaatggcuataggctatcatuaggt

SEQ ID NO: 93695 - DNA, 25 bp, Artificial Sequence
  Synthetic
gcactttcauccagattacctguct

SEQ ID NO: 93696 - DNA, 20 bp, Artificial Sequence
  Synthetic
agaccagggacutgcguaga

SEQ ID NO: 93697 - DNA, 28 bp, Artificial Sequence
  Synthetic
tgtgaaaatccaucctttctctcaauaa

SEQ ID NO: 93698 - DNA, 21 bp, Artificial Sequence
  Synthetic
cctatuccccagccuacacct

SEQ ID NO: 93699 - DNA, 24 bp, Artificial Sequence
  Synthetic
tggacatttggguttctctgtgut

SEQ ID NO: 93700 - DNA, 23 bp, Artificial Sequence
  Synthetic
tcacucaacattucacccacaca

SEQ ID NO: 93701 - DNA, 21 bp, Artificial Sequence
  Synthetic
ctggacgaggugauacaccag

SEQ ID NO: 93702 - DNA, 26 bp, Artificial Sequence
  Synthetic
aaugcataugaggccaaacaaaaaca

SEQ ID NO: 93703 - DNA, 22 bp, Artificial Sequence
  Synthetic
cttagttcaucctcggcuccaa

SEQ ID NO: 93704 - DNA, 27 bp, Artificial Sequence
  Synthetic
tctacataccgugagttccagatttug

SEQ ID NO: 93705 - DNA, 23 bp, Artificial Sequence
  Synthetic
gtcagaagauggagctcagctut

SEQ ID NO: 93706 - DNA, 25 bp, Artificial Sequence
  Synthetic
gaaggauccaagaaacctgtgtuca

SEQ ID NO: 93707 - DNA, 28 bp, Artificial Sequence
  Synthetic
tgtgcttatcttcauctaggaagcttuc

SEQ ID NO: 93708 - DNA, 28 bp, Artificial Sequence
  Synthetic
tgagctccatctuctgacagattatcua

SEQ ID NO: 93709 - DNA, 25 bp, Artificial Sequence
  Synthetic
tctgcttcctugtcaaaaaccauga

SEQ ID NO: 93710 - DNA, 27 bp, Artificial Sequence
  Synthetic
tcttctctctcauacttacagctcugg

SEQ ID NO: 93711 - DNA, 21 bp, Artificial Sequence
  Synthetic
ttttccgguggtccactgtut

SEQ ID NO: 93712 - DNA, 20 bp, Artificial Sequence
  Synthetic
ccacccacuagaggacugct

SEQ ID NO: 93713 - DNA, 21 bp, Artificial Sequence
  Synthetic
agaccaagcacuaggcccuaa

SEQ ID NO: 93714 - DNA, 25 bp, Artificial Sequence
  Synthetic
tctgttttuacgagcactggaagut

SEQ ID NO: 93715 - DNA, 23 bp, Artificial Sequence
  Synthetic
gcaaccccaggcucaaaaataug

SEQ ID NO: 93716 - DNA, 27 bp, Artificial Sequence
  Synthetic
gaagctgtaagauggtagagcaaauga

SEQ ID NO: 93717 - DNA, 27 bp, Artificial Sequence
  Synthetic
ttaccaacagcaggauaacttatgucc

SEQ ID NO: 93718 - DNA, 26 bp, Artificial Sequence
  Synthetic
ctggagccaautcgaauaaaacaaga

SEQ ID NO: 93719 - DNA, 28 bp, Artificial Sequence
  Synthetic
cataggaatagcautgcaagcattcaua

SEQ ID NO: 93720 - DNA, 21 bp, Artificial Sequence
  Synthetic
gtgtguggctaggtguaggat

SEQ ID NO: 93721 - DNA, 29 bp, Artificial Sequence
  Synthetic
tttctaattatttcugtgtgggtgtguga

SEQ ID NO: 93722 - DNA, 25 bp, Artificial Sequence
  Synthetic
ctggaugataacactucccacagaa

SEQ ID NO: 93723 - DNA, 28 bp, Artificial Sequence
  Synthetic
aattgcagaataugtatagagtguggca

SEQ ID NO: 93724 - DNA, 22 bp, Artificial Sequence
  Synthetic
gtggtgccacugagaacuagac

SEQ ID NO: 93725 - DNA, 33 bp, Artificial Sequence
  Synthetic
aaaagcttaatgtauaatccacaaatgatucat

SEQ ID NO: 93726 - DNA, 19 bp, Artificial Sequence
  Synthetic
gggagcucaccctcatcuc

SEQ ID NO: 93727 - DNA, 28 bp, Artificial Sequence
  Synthetic
ctcaagaatugccaagaagatgctttua

SEQ ID NO: 93728 - DNA, 22 bp, Artificial Sequence
  Synthetic
ccatgctuccccaacactcaut

SEQ ID NO: 93729 - DNA, 21 bp, Artificial Sequence
  Synthetic
catgtgggagagguctctguc

SEQ ID NO: 93730 - DNA, 27 bp, Artificial Sequence
  Synthetic
tcatcatctgaagauccatcctcauca

SEQ ID NO: 93731 - DNA, 28 bp, Artificial Sequence
  Synthetic
tggtgtattucacccccagatatauagt

SEQ ID NO: 93732 - DNA, 29 bp, Artificial Sequence
  Synthetic
ttcaactaaacutctaagatguggcaaga

SEQ ID NO: 93733 - DNA, 25 bp, Artificial Sequence
  Synthetic
tctuaaaagctgtgugcaaaagcaa

SEQ ID NO: 93734 - DNA, 19 bp, Artificial Sequence
  Synthetic
cccactguccccattugct

SEQ ID NO: 93735 - DNA, 18 bp, Artificial Sequence
  Synthetic
ctcuggccccaggagtuc

SEQ ID NO: 93736 - DNA, 20 bp, Artificial Sequence
  Synthetic
agcttgatcugggcgaucac

SEQ ID NO: 93737 - DNA, 20 bp, Artificial Sequence
  Synthetic
ggaaggccuggatgggagua

SEQ ID NO: 93738 - DNA, 27 bp, Artificial Sequence
  Synthetic
caatcttaataccagugtgtctcgcut

SEQ ID NO: 93739 - DNA, 26 bp, Artificial Sequence
  Synthetic
ggatgaguatgtccguaacacaacag

SEQ ID NO: 93740 - DNA, 21 bp, Artificial Sequence
  Synthetic
gcctgggacucccagaacuaa

SEQ ID NO: 93741 - DNA, 22 bp, Artificial Sequence
  Synthetic
cgtctggugagtggactttgug

SEQ ID NO: 93742 - DNA, 24 bp, Artificial Sequence
  Synthetic
aaaagcaaatucagaagcaugcca

SEQ ID NO: 93743 - DNA, 20 bp, Artificial Sequence
  Synthetic
cccagagcgucttgatccut

SEQ ID NO: 93744 - DNA, 20 bp, Artificial Sequence
  Synthetic
tcagggaagaggutgugggt

SEQ ID NO: 93745 - DNA, 25 bp, Artificial Sequence
  Synthetic
tgattctgcccucttctctttucag

SEQ ID NO: 93746 - DNA, 25 bp, Artificial Sequence
  Synthetic
agtgggaaagaautaccatcugcaa

SEQ ID NO: 93747 - DNA, 22 bp, Artificial Sequence
  Synthetic
gauccatttgcugagcacagac

SEQ ID NO: 93748 - DNA, 23 bp, Artificial Sequence
  Synthetic
aggcuacaacagcaaaagctcua

SEQ ID NO: 93749 - DNA, 26 bp, Artificial Sequence
  Synthetic
accaactcatgacugtcctttcttug

SEQ ID NO: 93750 - DNA, 20 bp, Artificial Sequence
  Synthetic
cccggtcugcaatcttugga

SEQ ID NO: 93751 - DNA, 29 bp, Artificial Sequence
  Synthetic
acatttgtgctttauggtgttctgattut

SEQ ID NO: 93752 - DNA, 25 bp, Artificial Sequence
  Synthetic
tgtacaacatgugttcaccagugat

SEQ ID NO: 93753 - DNA, 25 bp, Artificial Sequence
  Synthetic
tggaacttgggugttcaatgagtut

SEQ ID NO: 93754 - DNA, 20 bp, Artificial Sequence
  Synthetic
gcatcgcccauttgccatuc

SEQ ID NO: 93755 - DNA, 25 bp, Artificial Sequence
  Synthetic
ggtaaggcacacutttgtcagtuac

SEQ ID NO: 93756 - DNA, 28 bp, Artificial Sequence
  Synthetic
gcatattccauaaaacacagcaucaaca

SEQ ID NO: 93757 - DNA, 27 bp, Artificial Sequence
  Synthetic
gtatgcgaactguaaaaagggaaacut

SEQ ID NO: 93758 - DNA, 21 bp, Artificial Sequence
  Synthetic
cctcccgtuggcaactctuaa

SEQ ID NO: 93759 - DNA, 22 bp, Artificial Sequence
  Synthetic
gcacacctugcattggtauggt

SEQ ID NO: 93760 - DNA, 23 bp, Artificial Sequence
  Synthetic
ggtacaacaaucttccccgcuaa

SEQ ID NO: 93761 - DNA, 20 bp, Artificial Sequence
  Synthetic
cagaagccccuagctccuct

SEQ ID NO: 93762 - DNA, 24 bp, Artificial Sequence
  Synthetic
ggcucacccaaccagatatuaact

SEQ ID NO: 93763 - DNA, 28 bp, Artificial Sequence
  Synthetic
aatggaattgcauctaatgtacaccuga

SEQ ID NO: 93764 - DNA, 20 bp, Artificial Sequence
  Synthetic
ctgatgcacuagctgcggua

SEQ ID NO: 93765 - DNA, 26 bp, Artificial Sequence
  Synthetic
acactcguaaccacacugaaaaagaa

SEQ ID NO: 93766 - DNA, 23 bp, Artificial Sequence
  Synthetic
cccagctctguttccctcttcua

SEQ ID NO: 93767 - DNA, 27 bp, Artificial Sequence
  Synthetic
gacctagauatgctgtttucccaaaag

SEQ ID NO: 93768 - DNA, 23 bp, Artificial Sequence
  Synthetic
cttgacggtguctttctctgtuc

SEQ ID NO: 93769 - DNA, 22 bp, Artificial Sequence
  Synthetic
gtaagtguggaggtgggttucc

SEQ ID NO: 93770 - DNA, 21 bp, Artificial Sequence
  Synthetic
ccgaactacugcttcctcugg

SEQ ID NO: 93771 - DNA, 20 bp, Artificial Sequence
  Synthetic
accgcuaacagcatcaucgt

SEQ ID NO: 93772 - DNA, 28 bp, Artificial Sequence
  Synthetic
tuctcaccttgaauaaagaagggaacag

SEQ ID NO: 93773 - DNA, 20 bp, Artificial Sequence
  Synthetic
caucaaggcagccccacuaa

SEQ ID NO: 93774 - DNA, 23 bp, Artificial Sequence
  Synthetic
tgtttccaaggutgcatguacaa

SEQ ID NO: 93775 - DNA, 27 bp, Artificial Sequence
  Synthetic
tttagcatgugcaatgaattcucacag

SEQ ID NO: 93776 - DNA, 23 bp, Artificial Sequence
  Synthetic
atgtatggugtgtacttgugcaa

SEQ ID NO: 93777 - DNA, 27 bp, Artificial Sequence
  Synthetic
acaaacttgaugacttagttcguccat

SEQ ID NO: 93778 - DNA, 25 bp, Artificial Sequence
  Synthetic
gctgcttcaucttcgtcatcaucat

SEQ ID NO: 93779 - DNA, 22 bp, Artificial Sequence
  Synthetic
aatgtgtgaggugaagggaugg

SEQ ID NO: 93780 - DNA, 24 bp, Artificial Sequence
  Synthetic
tcacgtacagcaaugaacactuca

SEQ ID NO: 93781 - DNA, 20 bp, Artificial Sequence
  Synthetic
ctgtggaggccucaaaggut

SEQ ID NO: 93782 - DNA, 23 bp, Artificial Sequence
  Synthetic
tccactgcauacaggaactccua

SEQ ID NO: 93783 - DNA, 28 bp, Artificial Sequence
  Synthetic
accttcacacauatattgctcttuccaa

SEQ ID NO: 93784 - DNA, 20 bp, Artificial Sequence
  Synthetic
aggataggguccacgcugat

SEQ ID NO: 93785 - DNA, 18 bp, Artificial Sequence
  Synthetic
ccgcagugcctcauccag

SEQ ID NO: 93786 - DNA, 27 bp, Artificial Sequence
  Synthetic
ggagaacaaaccutatgcacataugga

SEQ ID NO: 93787 - DNA, 27 bp, Artificial Sequence
  Synthetic
ggagctggtccuttgtttaatcagaut

SEQ ID NO: 93788 - DNA, 20 bp, Artificial Sequence
  Synthetic
ggagcgtcuggaaagcauca

SEQ ID NO: 93789 - DNA, 29 bp, Artificial Sequence
  Synthetic
cttacttcaaagaaaagcugtcaaacuca

SEQ ID NO: 93790 - DNA, 21 bp, Artificial Sequence
  Synthetic
gcgacuccattcuggagagaa

SEQ ID NO: 93791 - DNA, 22 bp, Artificial Sequence
  Synthetic
caggtgaaccutgaggcuacag

SEQ ID NO: 93792 - DNA, 22 bp, Artificial Sequence
  Synthetic
cgtggagguaaagtgccugaat

SEQ ID NO: 93793 - DNA, 27 bp, Artificial Sequence
  Synthetic
ttttgcaggtuagactcttttcuccaa

SEQ ID NO: 93794 - DNA, 28 bp, Artificial Sequence
  Synthetic
tggaaagagcaauatatgtgtgaaggut

SEQ ID NO: 93795 - DNA, 24 bp, Artificial Sequence
  Synthetic
ttttcagguagcccaaaagugaca

SEQ ID NO: 93796 - DNA, 23 bp, Artificial Sequence
  Synthetic
tguaggagacaucagcagaggaa

SEQ ID NO: 93797 - DNA, 27 bp, Artificial Sequence
  Synthetic
aaagaaaccacaccuattactctgcuc

SEQ ID NO: 93798 - DNA, 28 bp, Artificial Sequence
  Synthetic
cactgaaataugcatcactggtuaaaaa

SEQ ID NO: 93799 - DNA, 26 bp, Artificial Sequence
  Synthetic
tggatgaaugaatttgagaaguggca

SEQ ID NO: 93800 - DNA, 27 bp, Artificial Sequence
  Synthetic
catcttttaatcccucttgccactuct

SEQ ID NO: 93801 - DNA, 28 bp, Artificial Sequence
  Synthetic
ggtgacaatcugttttcttatagguggt

SEQ ID NO: 93802 - DNA, 21 bp, Artificial Sequence
  Synthetic
gggagacagugcacauccaaa

SEQ ID NO: 93803 - DNA, 28 bp, Artificial Sequence
  Synthetic
ttctttgtcauggtttctttatgtugcc

SEQ ID NO: 93804 - DNA, 21 bp, Artificial Sequence
  Synthetic
gagccttacuctgttccccut

SEQ ID NO: 93805 - DNA, 23 bp, Artificial Sequence
  Synthetic
gctcctttucatgtcccugaaga

SEQ ID NO: 93806 - DNA, 28 bp, Artificial Sequence
  Synthetic
tgaaauccagtttgucacacaaaagaac

SEQ ID NO: 93807 - DNA, 26 bp, Artificial Sequence
  Synthetic
tggaaattcuggccgtttattgttua

SEQ ID NO: 93808 - DNA, 25 bp, Artificial Sequence
  Synthetic
ctttttgucccttcaacaucaacca

SEQ ID NO: 93809 - DNA, 28 bp, Artificial Sequence
  Synthetic
gatgccgttucgagaattttattcacut

SEQ ID NO: 93810 - DNA, 22 bp, Artificial Sequence
  Synthetic
tctggtugccagtgtugaagag

SEQ ID NO: 93811 - DNA, 28 bp, Artificial Sequence
  Synthetic
ccattaattaccacaaaucccagtgaut

SEQ ID NO: 93812 - DNA, 28 bp, Artificial Sequence
  Synthetic
actcaggtctttuagaaagcctagaugt

SEQ ID NO: 93813 - DNA, 25 bp, Artificial Sequence
  Synthetic
aatgucaatcagagtucacgaccat

SEQ ID NO: 93814 - DNA, 26 bp, Artificial Sequence
  Synthetic
atgactatccauccctccataguagg

SEQ ID NO: 93815 - DNA, 27 bp, Artificial Sequence
  Synthetic
acgaagagaagcaauctacaatgaugt

SEQ ID NO: 93816 - DNA, 29 bp, Artificial Sequence
  Synthetic
cagttgagttcugttaagtcattgatucc

SEQ ID NO: 93817 - DNA, 21 bp, Artificial Sequence
  Synthetic
gtaugcagccaccaccatuac

SEQ ID NO: 93818 - DNA, 28 bp, Artificial Sequence
  Synthetic
acgtcagaattcutaccatctgttgtut

SEQ ID NO: 93819 - DNA, 26 bp, Artificial Sequence
  Synthetic
agtggaaggagaacaugaatctcuca

SEQ ID NO: 93820 - DNA, 24 bp, Artificial Sequence
  Synthetic
gtgccacaagaacuacatccauct

SEQ ID NO: 93821 - DNA, 28 bp, Artificial Sequence
  Synthetic
actgatgtcaaacutctcgatttctuca

SEQ ID NO: 93822 - DNA, 26 bp, Artificial Sequence
  Synthetic
ctgtagcugagatttcacauccaact

SEQ ID NO: 93823 - DNA, 24 bp, Artificial Sequence
  Synthetic
aaaggccucgcagtggtaatauac

SEQ ID NO: 93824 - DNA, 27 bp, Artificial Sequence
  Synthetic
cattttgtcuagttcaggacugaggat

SEQ ID NO: 93825 - DNA, 29 bp, Artificial Sequence
  Synthetic
ccttactcttguagatattggtcctguca

SEQ ID NO: 93826 - DNA, 18 bp, Artificial Sequence
  Synthetic
ctctguaggccgacugct

SEQ ID NO: 93827 - DNA, 20 bp, Artificial Sequence
  Synthetic
tccaugggagacaggaugct

SEQ ID NO: 93828 - DNA, 18 bp, Artificial Sequence
  Synthetic
cgagctcucgacgtcucc

SEQ ID NO: 93829 - DNA, 18 bp, Artificial Sequence
  Synthetic
gcctgcggucgtagcaut

SEQ ID NO: 93830 - DNA, 22 bp, Artificial Sequence
  Synthetic
cagtacgucagtgccaucaaga

SEQ ID NO: 93831 - DNA, 18 bp, Artificial Sequence
  Synthetic
cctucccgaaggguccca

SEQ ID NO: 93832 - DNA, 23 bp, Artificial Sequence
  Synthetic
agacttcacugtcagcacucaag

SEQ ID NO: 93833 - DNA, 25 bp, Artificial Sequence
  Synthetic
ctgcccuagagagaggtaaacttug

SEQ ID NO: 93834 - DNA, 22 bp, Artificial Sequence
  Synthetic
gcaugaactcagauggagggaa

SEQ ID NO: 93835 - DNA, 24 bp, Artificial Sequence
  Synthetic
tctctgatccugtccgtcttguag

SEQ ID NO: 93836 - DNA, 26 bp, Artificial Sequence
  Synthetic
ctgtacagcauactaactggttugga

SEQ ID NO: 93837 - DNA, 22 bp, Artificial Sequence
  Synthetic
agaagatggugaatggcgucac

SEQ ID NO: 93838 - DNA, 17 bp, Artificial Sequence
  Synthetic
cattugccgccagugga

SEQ ID NO: 93839 - DNA, 19 bp, Artificial Sequence
  Synthetic
gtcucagggctcugcaact

SEQ ID NO: 93840 - DNA, 24 bp, Artificial Sequence
  Synthetic
cttggaagauctgacccgaaucaa

SEQ ID NO: 93841 - DNA, 23 bp, Artificial Sequence
  Synthetic
acacttucaggccagtttctuct

SEQ ID NO: 93842 - DNA, 20 bp, Artificial Sequence
  Synthetic
gcucccccagctctucagat

SEQ ID NO: 93843 - DNA, 21 bp, Artificial Sequence
  Synthetic
tctccctaugccatctugcac

SEQ ID NO: 93844 - DNA, 20 bp, Artificial Sequence
  Synthetic
cccaccugctggttguagag

SEQ ID NO: 93845 - DNA, 21 bp, Artificial Sequence
  Synthetic
gggaaucagcctcacagucat

SEQ ID NO: 93846 - DNA, 23 bp, Artificial Sequence
  Synthetic
ccctcttccucctcctcttgtua

SEQ ID NO: 93847 - DNA, 22 bp, Artificial Sequence
  Synthetic
gagcaggcauggtctcttcuac

SEQ ID NO: 93848 - DNA, 29 bp, Artificial Sequence
  Synthetic
acaggataccttcauattcttcagctcut

SEQ ID NO: 93849 - DNA, 25 bp, Artificial Sequence
  Synthetic
ggtgttcaguttatgtgggatugct

SEQ ID NO: 93850 - DNA, 18 bp, Artificial Sequence
  Synthetic
gagctgaugccggagguc

SEQ ID NO: 93851 - DNA, 20 bp, Artificial Sequence
  Synthetic
aggaagcccuggatccugaa

SEQ ID NO: 93852 - DNA, 22 bp, Artificial Sequence
  Synthetic
tucacagacucacagcagcaat

SEQ ID NO: 93853 - DNA, 33 bp, Artificial Sequence
  Synthetic
ttttaatgctgtttcutagaagttttggttaug

SEQ ID NO: 93854 - DNA, 21 bp, Artificial Sequence
  Synthetic
ggccguggucagaaaagagaa

SEQ ID NO: 93855 - DNA, 22 bp, Artificial Sequence
  Synthetic
aggtaccagagguagtgggtug

SEQ ID NO: 93856 - DNA, 17 bp, Artificial Sequence
  Synthetic
ggucccggcugacaagt

SEQ ID NO: 93857 - DNA, 25 bp, Artificial Sequence
  Synthetic
gaatccgccuaaagtagtgactcug

SEQ ID NO: 93858 - DNA, 23 bp, Artificial Sequence
  Synthetic
ttcactgcugcattccctuacat

SEQ ID NO: 93859 - DNA, 25 bp, Artificial Sequence
  Synthetic
ccctgagguagtttctttucgagaa

SEQ ID NO: 93860 - DNA, 21 bp, Artificial Sequence
  Synthetic
gggaaggagcuggatctucac

SEQ ID NO: 93861 - DNA, 22 bp, Artificial Sequence
  Synthetic
gggucaaaggagacttttugga

SEQ ID NO: 93862 - DNA, 23 bp, Artificial Sequence
  Synthetic
gaguaagtagcacugcacagcat

SEQ ID NO: 93863 - DNA, 21 bp, Artificial Sequence
  Synthetic
agcactcgcuatgccaauagg

SEQ ID NO: 93864 - DNA, 29 bp, Artificial Sequence
  Synthetic
acaattatgtccaaugagacagttcuacc

SEQ ID NO: 93865 - DNA, 24 bp, Artificial Sequence
  Synthetic
ggaugaaacaccagctagucagat

SEQ ID NO: 93866 - DNA, 21 bp, Artificial Sequence
  Synthetic
cttggcugcccttuagacaga

SEQ ID NO: 93867 - DNA, 28 bp, Artificial Sequence
  Synthetic
ggtaagctacaucgtgcattaaaactut

SEQ ID NO: 93868 - DNA, 21 bp, Artificial Sequence
  Synthetic
ttgugccaggaccagaaaugt

SEQ ID NO: 93869 - DNA, 21 bp, Artificial Sequence
  Synthetic
tcuttctuggcaccaacaggt

SEQ ID NO: 93870 - DNA, 22 bp, Artificial Sequence
  Synthetic
tgtgccaautggtgtcttucca

SEQ ID NO: 93871 - DNA, 26 bp, Artificial Sequence
  Synthetic
agattctattggugaaacaccgacuc

SEQ ID NO: 93872 - DNA, 26 bp, Artificial Sequence
  Synthetic
catcccaccgugattttcttttacug

SEQ ID NO: 93873 - DNA, 27 bp, Artificial Sequence
  Synthetic
tctttttaaagauactcctgggcaugg

SEQ ID NO: 93874 - DNA, 21 bp, Artificial Sequence
  Synthetic
gagacgccuccatugaaggaa

SEQ ID NO: 93875 - DNA, 20 bp, Artificial Sequence
  Synthetic
aagcttugcccctggauacc

SEQ ID NO: 93876 - DNA, 27 bp, Artificial Sequence
  Synthetic
tgtttaccuggaaatgaccaucaaagt

SEQ ID NO: 93877 - DNA, 25 bp, Artificial Sequence
  Synthetic
aaatgcatgacaugctccaattgut

SEQ ID NO: 93878 - DNA, 22 bp, Artificial Sequence
  Synthetic
ggaggcaagcutggttatguca

SEQ ID NO: 93879 - DNA, 21 bp, Artificial Sequence
  Synthetic
atgttcugggctcugaacgag

SEQ ID NO: 93880 - DNA, 31 bp, Artificial Sequence
  Synthetic
ttautcaaatgcaaaacugaaaaagaacaac

SEQ ID NO: 93881 - DNA, 28 bp, Artificial Sequence
  Synthetic
tcagtgcaagcuctatcagtactactua

SEQ ID NO: 93882 - DNA, 27 bp, Artificial Sequence
  Synthetic
tcattctcacagcuaacacatatucgt

SEQ ID NO: 93883 - DNA, 28 bp, Artificial Sequence
  Synthetic
aagcaatgagaacutgtagttcatucct

SEQ ID NO: 93884 - DNA, 27 bp, Artificial Sequence
  Synthetic
acatcacactugcaaaagaagtatgua

SEQ ID NO: 93885 - DNA, 28 bp, Artificial Sequence
  Synthetic
cactacuaggccaacaaaauagaaaaca

SEQ ID NO: 93886 - DNA, 21 bp, Artificial Sequence
  Synthetic
aggaagtggcuggactctcua

SEQ ID NO: 93887 - DNA, 28 bp, Artificial Sequence
  Synthetic
gctccattgttutactgtgcattttuac

SEQ ID NO: 93888 - DNA, 27 bp, Artificial Sequence
  Synthetic
gttacagcugttccagaauaacagagt

SEQ ID NO: 93889 - DNA, 23 bp, Artificial Sequence
  Synthetic
catccttatcucccttgctugga

SEQ ID NO: 93890 - DNA, 21 bp, Artificial Sequence
  Synthetic
agagccaccuccauccaaaac

SEQ ID NO: 93891 - DNA, 19 bp, Artificial Sequence
  Synthetic
gccccatuctggcacugac

SEQ ID NO: 93892 - DNA, 18 bp, Artificial Sequence
  Synthetic
gtuccccaggcucagaca

SEQ ID NO: 93893 - DNA, 20 bp, Artificial Sequence
  Synthetic
cugaaaagcccccugaggag

SEQ ID NO: 93894 - DNA, 21 bp, Artificial Sequence
  Synthetic
ggaaatguccgtcuccacaga

SEQ ID NO: 93895 - DNA, 24 bp, Artificial Sequence
  Synthetic
ccaucgttactgucagaagaaccc

SEQ ID NO: 93896 - DNA, 18 bp, Artificial Sequence
  Synthetic
tcaggugcagggcatugg

SEQ ID NO: 93897 - DNA, 20 bp, Artificial Sequence
  Synthetic
ccccaaccugaggaaucaca

SEQ ID NO: 93898 - DNA, 22 bp, Artificial Sequence
  Synthetic
gacaggtgugattcctcaggut

SEQ ID NO: 93899 - DNA, 19 bp, Artificial Sequence
  Synthetic
gcugagggaccacatcugt

SEQ ID NO: 93900 - DNA, 22 bp, Artificial Sequence
  Synthetic
tctcctcaauggagcacaggua

SEQ ID NO: 93901 - DNA, 21 bp, Artificial Sequence
  Synthetic
caattggucagctgctuccac

SEQ ID NO: 93902 - DNA, 20 bp, Artificial Sequence
  Synthetic
caggugcaattccucaggct

SEQ ID NO: 93903 - DNA, 21 bp, Artificial Sequence
  Synthetic
ccugaggagccacacctauct

SEQ ID NO: 93904 - DNA, 25 bp, Artificial Sequence
  Synthetic
ggagaatgtucccttgacataccug

SEQ ID NO: 93905 - DNA, 23 bp, Artificial Sequence
  Synthetic
acgaugaggagagtgaugaggaa

SEQ ID NO: 93906 - DNA, 21 bp, Artificial Sequence
  Synthetic
ttccacaacccagaugctgut

SEQ ID NO: 93907 - DNA, 22 bp, Artificial Sequence
  Synthetic
ctgaactucccagtcttccuca

SEQ ID NO: 93908 - DNA, 21 bp, Artificial Sequence
  Synthetic
acatacctgcugctgcttcut

SEQ ID NO: 93909 - DNA, 22 bp, Artificial Sequence
  Synthetic
cugagacagaugacgaagacga

SEQ ID NO: 93910 - DNA, 22 bp, Artificial Sequence
  Synthetic
gggtaatcccaauccctctucc

SEQ ID NO: 93911 - DNA, 22 bp, Artificial Sequence
  Synthetic
acccttuagcagcctctcucat

SEQ ID NO: 93912 - DNA, 28 bp, Artificial Sequence
  Synthetic
tggcgtagtguaaagggaaataauaagg

SEQ ID NO: 93913 - DNA, 23 bp, Artificial Sequence
  Synthetic
agtgagcagguatccagatcugt

SEQ ID NO: 93914 - DNA, 24 bp, Artificial Sequence
  Synthetic
gacagaggagacucttcaaauggt

SEQ ID NO: 93915 - DNA, 20 bp, Artificial Sequence
  Synthetic
caccugaggaatugcccact

SEQ ID NO: 93916 - DNA, 21 bp, Artificial Sequence
  Synthetic
gtggagacaugggtgactcut

SEQ ID NO: 93917 - DNA, 24 bp, Artificial Sequence
  Synthetic
ctgtccccaccauttgaagaauct

SEQ ID NO: 93918 - DNA, 17 bp, Artificial Sequence
  Synthetic
ggcagcaguggcatcuc

SEQ ID NO: 93919 - DNA, 18 bp, Artificial Sequence
  Synthetic
tgugcatugccccagacc

SEQ ID NO: 93920 - DNA, 21 bp, Artificial Sequence
  Synthetic
gggaagugggcaattccucag

SEQ ID NO: 93921 - DNA, 19 bp, Artificial Sequence
  Synthetic
ccutgtcuccaccggaaga

SEQ ID NO: 93922 - DNA, 22 bp, Artificial Sequence
  Synthetic
gaatggaaugcttgcatcugct

SEQ ID NO: 93923 - DNA, 22 bp, Artificial Sequence
  Synthetic
ttgcagtctucaggagggtcua

SEQ ID NO: 93924 - DNA, 20 bp, Artificial Sequence
  Synthetic
gggauagaggcgtcucaagt

SEQ ID NO: 93925 - DNA, 18 bp, Artificial Sequence
  Synthetic
ggaaucgcccctctcucc

SEQ ID NO: 93926 - DNA, 26 bp, Artificial Sequence
  Synthetic
gttctccattgcuttcagcatctaug

SEQ ID NO: 93927 - DNA, 21 bp, Artificial Sequence
  Synthetic
aagagccccaugtcctcacua

SEQ ID NO: 93928 - DNA, 23 bp, Artificial Sequence
  Synthetic
ttcctcatcacuctcctcaucgt

SEQ ID NO: 93929 - DNA, 25 bp, Artificial Sequence
  Synthetic
ggcaagggatuccttagagaaacut

SEQ ID NO: 93930 - DNA, 26 bp, Artificial Sequence
  Synthetic
ccagtggagaaaaaggugatgatuca

SEQ ID NO: 93931 - DNA, 18 bp, Artificial Sequence
  Synthetic
aggaatugcccgcauccc

SEQ ID NO: 93932 - DNA, 21 bp, Artificial Sequence
  Synthetic
gaggctccuccttgaccaaug

SEQ ID NO: 93933 - DNA, 28 bp, Artificial Sequence
  Synthetic
gcagactttgaugtgtgtgtttatgtut

SEQ ID NO: 93934 - DNA, 20 bp, Artificial Sequence
  Synthetic
ggtgcaaugccucaggaagt

SEQ ID NO: 93935 - DNA, 20 bp, Artificial Sequence
  Synthetic
ccccuaaacgaggagaugcc

SEQ ID NO: 93936 - DNA, 20 bp, Artificial Sequence
  Synthetic
gcaccucatcacgcugaaca

SEQ ID NO: 93937 - DNA, 28 bp, Artificial Sequence
  Synthetic
atttcgatgcaccaacauttatcactuc

SEQ ID NO: 93938 - DNA, 26 bp, Artificial Sequence
  Synthetic
tccaggttcttutcattggagatcug

SEQ ID NO: 93939 - DNA, 26 bp, Artificial Sequence
  Synthetic
cctagtgtccuctcagcagtatttut

SEQ ID NO: 93940 - DNA, 21 bp, Artificial Sequence
  Synthetic
cccaguggcauaagacacaag

SEQ ID NO: 93941 - DNA, 25 bp, Artificial Sequence
  Synthetic
cacttatcttcugtgctttggugga

SEQ ID NO: 93942 - DNA, 24 bp, Artificial Sequence
  Synthetic
agaaagccuccttcctcatucaac

SEQ ID NO: 93943 - DNA, 24 bp, Artificial Sequence
  Synthetic
ctctgaggugactacgtgaaugac

SEQ ID NO: 93944 - DNA, 25 bp, Artificial Sequence
  Synthetic
ttcctgatgcaaaagucccaaagua

SEQ ID NO: 93945 - DNA, 29 bp, Artificial Sequence
  Synthetic
atctctagactttuaggatcccactugaa

SEQ ID NO: 93946 - DNA, 23 bp, Artificial Sequence
  Synthetic
tgaatgtatgguttcccccucct

SEQ ID NO: 93947 - DNA, 28 bp, Artificial Sequence
  Synthetic
catgttgaacacuggcaaaagaaatcua

SEQ ID NO: 93948 - DNA, 22 bp, Artificial Sequence
  Synthetic
autgtgctttaauggcgcaagt

SEQ ID NO: 93949 - DNA, 21 bp, Artificial Sequence
  Synthetic
tgguccacggaggtctaugag

SEQ ID NO: 93950 - DNA, 18 bp, Artificial Sequence
  Synthetic
ccucaggcacagcgcaua

SEQ ID NO: 93951 - DNA, 18 bp, Artificial Sequence
  Synthetic
tgaggagccgcaacucug

SEQ ID NO: 93952 - DNA, 23 bp, Artificial Sequence
  Synthetic
ctgtccaugcaggcaacauaaac

SEQ ID NO: 93953 - DNA, 27 bp, Artificial Sequence
  Synthetic
gcctgtgcuatagaaccatgtuacaat

SEQ ID NO: 93954 - DNA, 19 bp, Artificial Sequence
  Synthetic
agccugcggagataggugt

SEQ ID NO: 93955 - DNA, 18 bp, Artificial Sequence
  Synthetic
accggaggacucgcucat

SEQ ID NO: 93956 - DNA, 19 bp, Artificial Sequence
  Synthetic
cgcacagcuggtgcaatuc

SEQ ID NO: 93957 - DNA, 22 bp, Artificial Sequence
  Synthetic
gagcacuggaaagggagagtuc

SEQ ID NO: 93958 - DNA, 18 bp, Artificial Sequence
  Synthetic
gggaagcaggugagucct

SEQ ID NO: 93959 - DNA, 17 bp, Artificial Sequence
  Synthetic
ccctgccugtggtguca

SEQ ID NO: 93960 - DNA, 18 bp, Artificial Sequence
  Synthetic
gggauaggcgcgauacct

SEQ ID NO: 93961 - DNA, 20 bp, Artificial Sequence
  Synthetic
cacctgaggaguctccccut

SEQ ID NO: 93962 - DNA, 20 bp, Artificial Sequence
  Synthetic
acauaggcgagtccucaggt

SEQ ID NO: 93963 - DNA, 20 bp, Artificial Sequence
  Synthetic
cggaggcauctcgtctgtuc

SEQ ID NO: 93964 - DNA, 24 bp, Artificial Sequence
  Synthetic
aaaatgccatguttggtcgttugt

SEQ ID NO: 93965 - DNA, 28 bp, Artificial Sequence
  Synthetic
aaatgatattacuatgcagagctugcca

SEQ ID NO: 93966 - DNA, 28 bp, Artificial Sequence
  Synthetic
agtaaaatttcctuagtccacgttggut

SEQ ID NO: 93967 - DNA, 27 bp, Artificial Sequence
  Synthetic
gtggagcgucattttactatgaaugag

SEQ ID NO: 93968 - DNA, 24 bp, Artificial Sequence
  Synthetic
caagtggucacactgaaucaggaa

SEQ ID NO: 93969 - DNA, 22 bp, Artificial Sequence
  Synthetic
cctguggcatgtgugagaaaaa

SEQ ID NO: 93970 - DNA, 22 bp, Artificial Sequence
  Synthetic
tggatccaauagttgcccucct

SEQ ID NO: 93971 - DNA, 28 bp, Artificial Sequence
  Synthetic
tggagaagtgaugccatttattgaugaa

SEQ ID NO: 93972 - DNA, 26 bp, Artificial Sequence
  Synthetic
agaacacgtcutgttaaatcccauga

SEQ ID NO: 93973 - DNA, 21 bp, Artificial Sequence
  Synthetic
gggtacaugattggugcacaa

SEQ ID NO: 93974 - DNA, 28 bp, Artificial Sequence
  Synthetic
agacgcatctucatttacagtttcauca

SEQ ID NO: 93975 - DNA, 27 bp, Artificial Sequence
  Synthetic
gggtattgutccagttgucagaaacat

SEQ ID NO: 93976 - DNA, 23 bp, Artificial Sequence
  Synthetic
tgagcataugggtcagtguagga

SEQ ID NO: 93977 - DNA, 21 bp, Artificial Sequence
  Synthetic
cauctcagguagagccccaga

SEQ ID NO: 93978 - DNA, 28 bp, Artificial Sequence
  Synthetic
ggtcatctaauaagtctggcucaaaagt

SEQ ID NO: 93979 - DNA, 28 bp, Artificial Sequence
  Synthetic
tcttttuacaaagggaaccauggaagat

SEQ ID NO: 93980 - DNA, 28 bp, Artificial Sequence
  Synthetic
tgcttagttactugccgatcataaauct

SEQ ID NO: 93981 - DNA, 33 bp, Artificial Sequence
  Synthetic
accataaagtttuaccatttcatatuaaccagt

SEQ ID NO: 93982 - DNA, 28 bp, Artificial Sequence
  Synthetic
tcaagtgttctugtactgtttgatcugt

SEQ ID NO: 93983 - DNA, 26 bp, Artificial Sequence
  Synthetic
ttgtgtgtggutttccttatuagggt

SEQ ID NO: 93984 - DNA, 29 bp, Artificial Sequence
  Synthetic
ttgaggctgaagaucacaaataatagugt

SEQ ID NO: 93985 - DNA, 27 bp, Artificial Sequence
  Synthetic
ccaggatatggcutgtgatacttucat

SEQ ID NO: 93986 - DNA, 22 bp, Artificial Sequence
  Synthetic
cctgaaccugaacgaaaugcct

SEQ ID NO: 93987 - DNA, 23 bp, Artificial Sequence
  Synthetic
ccaugatggaguccaggacaaaa

SEQ ID NO: 93988 - DNA, 21 bp, Artificial Sequence
  Synthetic
tuggaggagaaggugccaaag

SEQ ID NO: 93989 - DNA, 20 bp, Artificial Sequence
  Synthetic
ctggguggcctggagtuaaa

SEQ ID NO: 93990 - DNA, 21 bp, Artificial Sequence
  Synthetic
gggcttugaagacatcaggug

SEQ ID NO: 93991 - DNA, 25 bp, Artificial Sequence
  Synthetic
cctagaggugaagaaggaagagcut

SEQ ID NO: 93992 - DNA, 28 bp, Artificial Sequence
  Synthetic
caatattgcaacautctacatgguccaa

SEQ ID NO: 93993 - DNA, 25 bp, Artificial Sequence
  Synthetic
gatttggttgugaagattcgcugaa

SEQ ID NO: 93994 - DNA, 23 bp, Artificial Sequence
  Synthetic
gggaaaagcuggagcattucaga

SEQ ID NO: 93995 - DNA, 28 bp, Artificial Sequence
  Synthetic
cttgtgagtggutattcttcatttugct

SEQ ID NO: 93996 - DNA, 22 bp, Artificial Sequence
  Synthetic
tgagucaacaaagcccaggtut

SEQ ID NO: 93997 - DNA, 22 bp, Artificial Sequence
  Synthetic
gataactuggctgtgccugaga

SEQ ID NO: 93998 - DNA, 19 bp, Artificial Sequence
  Synthetic
tuccgggacuccccaaaag

SEQ ID NO: 93999 - DNA, 18 bp, Artificial Sequence
  Synthetic
acacuaccccaccuggca

SEQ ID NO: 94000 - DNA, 28 bp, Artificial Sequence
  Synthetic
tttcaagaatuaaggctatccugcagaa

SEQ ID NO: 94001 - DNA, 28 bp, Artificial Sequence
  Synthetic
gggacatauaacagctgaaataccucaa

SEQ ID NO: 94002 - DNA, 18 bp, Artificial Sequence
  Synthetic
tgtggagggcuggtguct

SEQ ID NO: 94003 - DNA, 17 bp, Artificial Sequence
  Synthetic
gcaccgcccaccuaucc

SEQ ID NO: 94004 - DNA, 21 bp, Artificial Sequence
  Synthetic
ccccguaggactaggauaggg

SEQ ID NO: 94005 - DNA, 21 bp, Artificial Sequence
  Synthetic
cctggugagctcttccucaag

SEQ ID NO: 94006 - DNA, 22 bp, Artificial Sequence
  Synthetic
cccacauccagagtagcacaua

SEQ ID NO: 94007 - DNA, 21 bp, Artificial Sequence
  Synthetic
catccccugagagcatctugg

SEQ ID NO: 94008 - DNA, 28 bp, Artificial Sequence
  Synthetic
caatgtgcatucaaaaacagcaucaaat

SEQ ID NO: 94009 - DNA, 21 bp, Artificial Sequence
  Synthetic
cccctctgutggatgcagtuc

SEQ ID NO: 94010 - DNA, 22 bp, Artificial Sequence
  Synthetic
aacatcagcuctggaucagcaa

SEQ ID NO: 94011 - DNA, 22 bp, Artificial Sequence
  Synthetic
gatctgguggcagagcagttua

SEQ ID NO: 94012 - DNA, 25 bp, Artificial Sequence
  Synthetic
gggccatacauagttcaacaaguga

SEQ ID NO: 94013 - DNA, 24 bp, Artificial Sequence
  Synthetic
tttttcccutccgttguagagacc

SEQ ID NO: 94014 - DNA, 23 bp, Artificial Sequence
  Synthetic
actgccttatguttttccccgut

SEQ ID NO: 94015 - DNA, 23 bp, Artificial Sequence
  Synthetic
ctatcccaugggcagtcactuac

SEQ ID NO: 94016 - DNA, 19 bp, Artificial Sequence
  Synthetic
gccaugtuagcggccaaga

SEQ ID NO: 94017 - DNA, 18 bp, Artificial Sequence
  Synthetic
gcggaggcacutacggut

SEQ ID NO: 94018 - DNA, 21 bp, Artificial Sequence
  Synthetic
gaagcccucuagaacaaccca

SEQ ID NO: 94019 - DNA, 22 bp, Artificial Sequence
  Synthetic
ctcctgctgcugcttcaagaua

SEQ ID NO: 94020 - DNA, 28 bp, Artificial Sequence
  Synthetic
gctgggacattuctctgataatcaauga

SEQ ID NO: 94021 - DNA, 28 bp, Artificial Sequence
  Synthetic
tgctacatcucatagacaggaauaacct

SEQ ID NO: 94022 - DNA, 22 bp, Artificial Sequence
  Synthetic
gggtggaggguacaaatuggag

SEQ ID NO: 94023 - DNA, 28 bp, Artificial Sequence
  Synthetic
tcaaggaagagaaaaagutguagaagca

SEQ ID NO: 94024 - DNA, 21 bp, Artificial Sequence
  Synthetic
cugagcccagaugagggaaac

SEQ ID NO: 94025 - DNA, 20 bp, Artificial Sequence
  Synthetic
tgcagggcuguagcaacaaa

SEQ ID NO: 94026 - DNA, 22 bp, Artificial Sequence
  Synthetic
ctagccguctgtctgtguacaa

SEQ ID NO: 94027 - DNA, 29 bp, Artificial Sequence
  Synthetic
ccggtgaatauttcctgtaaaacuaagac

SEQ ID NO: 94028 - DNA, 20 bp, Artificial Sequence
  Synthetic
gctcaccgcauccatcagug

SEQ ID NO: 94029 - DNA, 24 bp, Artificial Sequence
  Synthetic
cagttccaucattacagcctucct

SEQ ID NO: 94030 - DNA, 22 bp, Artificial Sequence
  Synthetic
ctttagggaaggcuccccuact

SEQ ID NO: 94031 - DNA, 19 bp, Artificial Sequence
  Synthetic
catgccaaggucccaagug

SEQ ID NO: 94032 - DNA, 22 bp, Artificial Sequence
  Synthetic
tcactgctgucacactgttugt

SEQ ID NO: 94033 - DNA, 28 bp, Artificial Sequence
  Synthetic
ggcaaatggaaggautccctatacttua

SEQ ID NO: 94034 - DNA, 24 bp, Artificial Sequence
  Synthetic
aaccugagaacagaugaagccaaa

SEQ ID NO: 94035 - DNA, 22 bp, Artificial Sequence
  Synthetic
ccactgucacccagtucaacag

SEQ ID NO: 94036 - DNA, 18 bp, Artificial Sequence
  Synthetic
acaaaugcacccguccca

SEQ ID NO: 94037 - DNA, 21 bp, Artificial Sequence
  Synthetic
gcccccugaagttgccttuaa

SEQ ID NO: 94038 - DNA, 24 bp, Artificial Sequence
  Synthetic
cacagaggaggautgccaaaagua

SEQ ID NO: 94039 - DNA, 23 bp, Artificial Sequence
  Synthetic
catgggaacaguattggacccut

SEQ ID NO: 94040 - DNA, 20 bp, Artificial Sequence
  Synthetic
cagcgaagugtgggcuagag

SEQ ID NO: 94041 - DNA, 21 bp, Artificial Sequence
  Synthetic
ctttttgcccaucacccgtua

SEQ ID NO: 94042 - DNA, 21 bp, Artificial Sequence
  Synthetic
tctcugcaaccacaggugaag

SEQ ID NO: 94043 - DNA, 20 bp, Artificial Sequence
  Synthetic
agccagcugtgggacuagaa

SEQ ID NO: 94044 - DNA, 24 bp, Artificial Sequence
  Synthetic
ccactgtcuggtccaatatgtuct

SEQ ID NO: 94045 - DNA, 20 bp, Artificial Sequence
  Synthetic
tgcggcacaaautgactgug

SEQ ID NO: 94046 - DNA, 20 bp, Artificial Sequence
  Synthetic
tgaugacacagtuggccaca

SEQ ID NO: 94047 - DNA, 22 bp, Artificial Sequence
  Synthetic
ggcaggaccaggugacattuag

SEQ ID NO: 94048 - DNA, 23 bp, Artificial Sequence
  Synthetic
tcttctccagautctccgucact

SEQ ID NO: 94049 - DNA, 28 bp, Artificial Sequence
  Synthetic
ggcattttaaaggcugaagaaggtttua

SEQ ID NO: 94050 - DNA, 22 bp, Artificial Sequence
  Synthetic
ggacccuttacaggugggaaga

SEQ ID NO: 94051 - DNA, 20 bp, Artificial Sequence
  Synthetic
ggtttcccugagggcctuac

SEQ ID NO: 94052 - DNA, 21 bp, Artificial Sequence
  Synthetic
gtgagggugggcgagaauaag

SEQ ID NO: 94053 - DNA, 19 bp, Artificial Sequence
  Synthetic
cgacccttuctcccgagug

SEQ ID NO: 94054 - DNA, 20 bp, Artificial Sequence
  Synthetic
tggactgggacugaggacug

SEQ ID NO: 94055 - DNA, 23 bp, Artificial Sequence
  Synthetic
ctccaagucacccagacatctut

SEQ ID NO: 94056 - DNA, 22 bp, Artificial Sequence
  Synthetic
cauccaccuggagaacagagac

SEQ ID NO: 94057 - DNA, 23 bp, Artificial Sequence
  Synthetic
gccctatctgucatgctcctuac

SEQ ID NO: 94058 - DNA, 22 bp, Artificial Sequence
  Synthetic
tcuacugaaagagcgggaaaga

SEQ ID NO: 94059 - DNA, 25 bp, Artificial Sequence
  Synthetic
cgtgctcacautctctatgagaugt

SEQ ID NO: 94060 - DNA, 28 bp, Artificial Sequence
  Synthetic
catatttgtaccugaacacatccagcua

SEQ ID NO: 94061 - DNA, 26 bp, Artificial Sequence
  Synthetic
acttggatccautaaggagtucagga

SEQ ID NO: 94062 - DNA, 26 bp, Artificial Sequence
  Synthetic
tcctgaacuccttaatggauccaagt

SEQ ID NO: 94063 - DNA, 26 bp, Artificial Sequence
  Synthetic
tgcatgtgttttugacatgagcatut

SEQ ID NO: 94064 - DNA, 31 bp, Artificial Sequence
  Synthetic
aaaaggcacttutaagagttattaguaggca

SEQ ID NO: 94065 - DNA, 26 bp, Artificial Sequence
  Synthetic
tcagtttgtttcuctgcacctttcut

SEQ ID NO: 94066 - DNA, 29 bp, Artificial Sequence
  Synthetic
acctccataagaguttccctgagattuaa

SEQ ID NO: 94067 - DNA, 28 bp, Artificial Sequence
  Synthetic
cgtactcaaauggaaaagatgaugaaca

SEQ ID NO: 94068 - DNA, 19 bp, Artificial Sequence
  Synthetic
tuctcctaggugggcaggt

SEQ ID NO: 94069 - DNA, 17 bp, Artificial Sequence
  Synthetic
ggagcuacggcgcttug

SEQ ID NO: 94070 - DNA, 28 bp, Artificial Sequence
  Synthetic
gtgcagagaaacaaacugagatttugaa

SEQ ID NO: 94071 - DNA, 24 bp, Artificial Sequence
  Synthetic
aatgcgaactgaucgtccctttua

SEQ ID NO: 94072 - DNA, 24 bp, Artificial Sequence
  Synthetic
ccatttcacaauacacaacuggca

SEQ ID NO: 94073 - DNA, 22 bp, Artificial Sequence
  Synthetic
ggccaauggtttugcaacaact

SEQ ID NO: 94074 - DNA, 26 bp, Artificial Sequence
  Synthetic
atgttcagtggaauctcatgtgatut

SEQ ID NO: 94075 - DNA, 27 bp, Artificial Sequence
  Synthetic
ctctcttcttatuagagggcccttuac

SEQ ID NO: 94076 - DNA, 23 bp, Artificial Sequence
  Synthetic
acaccaataguaaagggcccuct

SEQ ID NO: 94077 - DNA, 23 bp, Artificial Sequence
  Synthetic
ccacaagcucctcctugagaaac

SEQ ID NO: 94078 - DNA, 20 bp, Artificial Sequence
  Synthetic
gggccaaucaaauggcaact

SEQ ID NO: 94079 - DNA, 22 bp, Artificial Sequence
  Synthetic
gtggtactgaugcttgtgtguc

SEQ ID NO: 94080 - DNA, 20 bp, Artificial Sequence
  Synthetic
aggctucgaagagcaaggut

SEQ ID NO: 94081 - DNA, 18 bp, Artificial Sequence
  Synthetic
cggaggucttcgccugac

SEQ ID NO: 94082 - DNA, 27 bp, Artificial Sequence
  Synthetic
gcactggattaguaggtcctcttcuac

SEQ ID NO: 94083 - DNA, 23 bp, Artificial Sequence
  Synthetic
gctctgtttucctgctcctauca

SEQ ID NO: 94084 - DNA, 28 bp, Artificial Sequence
  Synthetic
caactttgttuccctctctgtaauacac

SEQ ID NO: 94085 - DNA, 22 bp, Artificial Sequence
  Synthetic
tcgcttuggacaaacuaagcct

SEQ ID NO: 94086 - DNA, 26 bp, Artificial Sequence
  Synthetic
aggcttagttugtccaaagcgauaaa

SEQ ID NO: 94087 - DNA, 30 bp, Artificial Sequence
  Synthetic
ctaaagcaggatcuctaggaattaatcugg

SEQ ID NO: 94088 - DNA, 22 bp, Artificial Sequence
  Synthetic
atggatuccaagaagcgucgaa

SEQ ID NO: 94089 - DNA, 33 bp, Artificial Sequence
  Synthetic
gcatttattcuatattttcatttucagaggacg

SEQ ID NO: 94090 - DNA, 20 bp, Artificial Sequence
  Synthetic
gctgtccagguagtgccaua

SEQ ID NO: 94091 - DNA, 18 bp, Artificial Sequence
  Synthetic
cactcagcugtgcuggct

SEQ ID NO: 94092 - DNA, 19 bp, Artificial Sequence
  Synthetic
gactcugggaagggcugag

SEQ ID NO: 94093 - DNA, 20 bp, Artificial Sequence
  Synthetic
tctccgacccucccatgtua

SEQ ID NO: 94094 - DNA, 27 bp, Artificial Sequence
  Synthetic
cataaaagtggucacatctaccccuaa

SEQ ID NO: 94095 - DNA, 25 bp, Artificial Sequence
  Synthetic
tcattgtgttutgatttgcagugct

SEQ ID NO: 94096 - DNA, 17 bp, Artificial Sequence
  Synthetic
gcccggcucaacctgut

SEQ ID NO: 94097 - DNA, 18 bp, Artificial Sequence
  Synthetic
gcgggcagcaugagguag

SEQ ID NO: 94098 - DNA, 19 bp, Artificial Sequence
  Synthetic
gcctgcacuctttcugcca

SEQ ID NO: 94099 - DNA, 17 bp, Artificial Sequence
  Synthetic
cggccggutctcaccut

SEQ ID NO: 94100 - DNA, 27 bp, Artificial Sequence
  Synthetic
acaagcaacugagaatttctuggagaa

SEQ ID NO: 94101 - DNA, 21 bp, Artificial Sequence
  Synthetic
aggcctgccuctctttaccua

SEQ ID NO: 94102 - DNA, 33 bp, Artificial Sequence
  Synthetic
ttaaaagtagctuttaacttgcaaaaucagaat

SEQ ID NO: 94103 - DNA, 28 bp, Artificial Sequence
  Synthetic
tggctggccaugatctatattagtauct

SEQ ID NO: 94104 - DNA, 21 bp, Artificial Sequence
  Synthetic
gccagacagcaggguttguaa

SEQ ID NO: 94105 - DNA, 24 bp, Artificial Sequence
  Synthetic
cccgttcugaacctaaaatgagug

SEQ ID NO: 94106 - DNA, 22 bp, Artificial Sequence
  Synthetic
cggctttuccagcaagttctuc

SEQ ID NO: 94107 - DNA, 26 bp, Artificial Sequence
  Synthetic
tcattgcatatucgctcagtagcaua

SEQ ID NO: 94108 - DNA, 28 bp, Artificial Sequence
  Synthetic
gactgttcaaguactattatgcuggaca

SEQ ID NO: 94109 - DNA, 22 bp, Artificial Sequence
  Synthetic
aagaagcccacuttaccugcaa

SEQ ID NO: 94110 - DNA, 28 bp, Artificial Sequence
  Synthetic
gggaagaaguaagaatttgaugcaaaag

SEQ ID NO: 94111 - DNA, 25 bp, Artificial Sequence
  Synthetic
caaaccatactugcctcagatcugt

SEQ ID NO: 94112 - DNA, 21 bp, Artificial Sequence
  Synthetic
agctgccucacacccaaauat

SEQ ID NO: 94113 - DNA, 29 bp, Artificial Sequence
  Synthetic
agatgaagaugaagaaaccaaagaaccut

SEQ ID NO: 94114 - DNA, 24 bp, Artificial Sequence
  Synthetic
acctgcacuaaaggttctttggut

SEQ ID NO: 94115 - DNA, 28 bp, Artificial Sequence
  Synthetic
ccattgcttgaaugatttctttgagcut

SEQ ID NO: 94116 - DNA, 21 bp, Artificial Sequence
  Synthetic
cccautttcuccacgggaact

SEQ ID NO: 94117 - DNA, 24 bp, Artificial Sequence
  Synthetic
cgatcagagccuaaaatccucaca

SEQ ID NO: 94118 - DNA, 26 bp, Artificial Sequence
  Synthetic
ggctatttatcutggttgcaauccga

SEQ ID NO: 94119 - DNA, 25 bp, Artificial Sequence
  Synthetic
ccagtuccagattggctugaaaaat

SEQ ID NO: 94120 - DNA, 23 bp, Artificial Sequence
  Synthetic
gggaacuatucacaaagaagcct

SEQ ID NO: 94121 - DNA, 27 bp, Artificial Sequence
  Synthetic
aactggaggaugagaatacctaucaca

SEQ ID NO: 94122 - DNA, 25 bp, Artificial Sequence
  Synthetic
cttaacacaaaccucttgacauggg

SEQ ID NO: 94123 - DNA, 25 bp, Artificial Sequence
  Synthetic
ttgtgtctgcuttgcttctttucag

SEQ ID NO: 94124 - DNA, 23 bp, Artificial Sequence
  Synthetic
gacaatgtcuctctgaaggcugt

SEQ ID NO: 94125 - DNA, 27 bp, Artificial Sequence
  Synthetic
ggatgaggucatctccaaataugcaat

SEQ ID NO: 94126 - DNA, 28 bp, Artificial Sequence
  Synthetic
tgttattuaaacgccacaaaactguacc

SEQ ID NO: 94127 - DNA, 28 bp, Artificial Sequence
  Synthetic
gtatttcaacugtgcagtcauaaaccaa

SEQ ID NO: 94128 - DNA, 26 bp, Artificial Sequence
  Synthetic
gcacagagaaaagcaaugagaacaut

SEQ ID NO: 94129 - DNA, 28 bp, Artificial Sequence
  Synthetic
agtcttttcttgauggttgacaaaucca

SEQ ID NO: 94130 - DNA, 27 bp, Artificial Sequence
  Synthetic
ctgtttttgtatatutactgggcgcut

SEQ ID NO: 94131 - DNA, 26 bp, Artificial Sequence
  Synthetic
gatcacagtgaaautggatggtgtug

SEQ ID NO: 94132 - DNA, 26 bp, Artificial Sequence
  Synthetic
tccaatggauttgtcaaccaucaaga

SEQ ID NO: 94133 - DNA, 23 bp, Artificial Sequence
  Synthetic
ttttcacacugctgttcctucct

SEQ ID NO: 94134 - DNA, 27 bp, Artificial Sequence
  Synthetic
acatacagcaaucgcaaaaatgtctut

SEQ ID NO: 94135 - DNA, 26 bp, Artificial Sequence
  Synthetic
tccctcagaaagucttgacacagaua

SEQ ID NO: 94136 - DNA, 28 bp, Artificial Sequence
  Synthetic
acatactgcutaccagcaauaagaagac

SEQ ID NO: 94137 - DNA, 28 bp, Artificial Sequence
  Synthetic
gagggaacagugttacagaaatttugac

SEQ ID NO: 94138 - DNA, 30 bp, Artificial Sequence
  Synthetic
ccacaataaacgcaacauacaataatauca

SEQ ID NO: 94139 - DNA, 24 bp, Artificial Sequence
  Synthetic
gcaattgcacaaucctcttaucct

SEQ ID NO: 94140 - DNA, 27 bp, Artificial Sequence
  Synthetic
atagaaaauaaggcttgtaccuggcat

SEQ ID NO: 94141 - DNA, 24 bp, Artificial Sequence
  Synthetic
gcctctcaugaatggccttatugg

SEQ ID NO: 94142 - DNA, 22 bp, Artificial Sequence
  Synthetic
cacaagcucaccgtttgtagug

SEQ ID NO: 94143 - DNA, 25 bp, Artificial Sequence
  Synthetic
caggctaaggugagtatgaactgug

SEQ ID NO: 94144 - DNA, 20 bp, Artificial Sequence
  Synthetic
gatgcauccccagugaccaa

SEQ ID NO: 94145 - DNA, 28 bp, Artificial Sequence
  Synthetic
ttttacagacaaaugccactgagaaaug

SEQ ID NO: 94146 - DNA, 21 bp, Artificial Sequence
  Synthetic
ggttttuggccaggactccut

SEQ ID NO: 94147 - DNA, 18 bp, Artificial Sequence
  Synthetic
caugcuagagcggcccat

SEQ ID NO: 94148 - DNA, 20 bp, Artificial Sequence
  Synthetic
ggcuccagggcuagaaaagt

SEQ ID NO: 94149 - DNA, 22 bp, Artificial Sequence
  Synthetic
cagcagaugggcctttuaaacc

SEQ ID NO: 94150 - DNA, 25 bp, Artificial Sequence
  Synthetic
atgacagattucattctgcctucca

SEQ ID NO: 94151 - DNA, 25 bp, Artificial Sequence
  Synthetic
ggtcattgaguacatcgggactauc

SEQ ID NO: 94152 - DNA, 18 bp, Artificial Sequence
  Synthetic
gaagcgccaucttugcga

SEQ ID NO: 94153 - DNA, 24 bp, Artificial Sequence
  Synthetic
tccatgtgtctutcctggtgacua

SEQ ID NO: 94154 - DNA, 23 bp, Artificial Sequence
  Synthetic
cctccucacttttgtctugcaac

SEQ ID NO: 94155 - DNA, 26 bp, Artificial Sequence
  Synthetic
gctgagtgctcugactttatgtctuc

SEQ ID NO: 94156 - DNA, 22 bp, Artificial Sequence
  Synthetic
ctgcugaagctgctguaaagag

SEQ ID NO: 94157 - DNA, 20 bp, Artificial Sequence
  Synthetic
cttaugggacacaggcuggt

SEQ ID NO: 94158 - DNA, 24 bp, Artificial Sequence
  Synthetic
gtgacaucagactctgcugaagat

SEQ ID NO: 94159 - DNA, 21 bp, Artificial Sequence
  Synthetic
caggtgctuatgacccagucc

SEQ ID NO: 94160 - DNA, 25 bp, Artificial Sequence
  Synthetic
gaggttguggccctgtattatttug

SEQ ID NO: 94161 - DNA, 23 bp, Artificial Sequence
  Synthetic
ctaggcaguggatcatcttcuga

SEQ ID NO: 94162 - DNA, 24 bp, Artificial Sequence
  Synthetic
cctgttggcuacttcgttucgaat

SEQ ID NO: 94163 - DNA, 24 bp, Artificial Sequence
  Synthetic
ccgagggugaaacctttgtaugaa

SEQ ID NO: 94164 - DNA, 20 bp, Artificial Sequence
  Synthetic
tgaccagccugtgtcccaua

SEQ ID NO: 94165 - DNA, 18 bp, Artificial Sequence
  Synthetic
gcagcacccuggagctut

SEQ ID NO: 94166 - DNA, 22 bp, Artificial Sequence
  Synthetic
atgtgggagaugaggacuggat

SEQ ID NO: 94167 - DNA, 29 bp, Artificial Sequence
  Synthetic
gctttacttcaacuccttgttacttguga

SEQ ID NO: 94168 - DNA, 26 bp, Artificial Sequence
  Synthetic
caaatgcuacatgcagtguacaaaca

SEQ ID NO: 94169 - DNA, 20 bp, Artificial Sequence
  Synthetic
gggaaaacugcaguggaaga

SEQ ID NO: 94170 - DNA, 22 bp, Artificial Sequence
  Synthetic
gcugatccccuaaggaaacaga

SEQ ID NO: 94171 - DNA, 20 bp, Artificial Sequence
  Synthetic
cugaggctuccaggacaaca

SEQ ID NO: 94172 - DNA, 21 bp, Artificial Sequence
  Synthetic
ccatccaugctgtcctcauct

SEQ ID NO: 94173 - DNA, 30 bp, Artificial Sequence
  Synthetic
tgtataccttcaaautgtgccttatgtuga

SEQ ID NO: 94174 - DNA, 21 bp, Artificial Sequence
  Synthetic
ctgggtcauaagcacctguct

SEQ ID NO: 94175 - DNA, 18 bp, Artificial Sequence
  Synthetic
agggccutatgccuccca

SEQ ID NO: 94176 - DNA, 18 bp, Artificial Sequence
  Synthetic
cuggaccaggaggcctug

SEQ ID NO: 94177 - DNA, 21 bp, Artificial Sequence
  Synthetic
ccttcuaggacagguggcaat

SEQ ID NO: 94178 - DNA, 21 bp, Artificial Sequence
  Synthetic
ctgtguggagcaggctaacut

SEQ ID NO: 94179 - DNA, 22 bp, Artificial Sequence
  Synthetic
gaggtaaagcccucactctcug

SEQ ID NO: 94180 - DNA, 24 bp, Artificial Sequence
  Synthetic
tctagaagcugtgttcaggaucca

SEQ ID NO: 94181 - DNA, 23 bp, Artificial Sequence
  Synthetic
aggagatcaacaucagcttcguc

SEQ ID NO: 94182 - DNA, 23 bp, Artificial Sequence
  Synthetic
gagcttgguttgtctgtacucca

SEQ ID NO: 94183 - DNA, 26 bp, Artificial Sequence
  Synthetic
ctgautcaaggctttuacaggaaagg

SEQ ID NO: 94184 - DNA, 22 bp, Artificial Sequence
  Synthetic
caccttctttucctggccauca

SEQ ID NO: 94185 - DNA, 20 bp, Artificial Sequence
  Synthetic
ccaagtccugtgaccagcuc

SEQ ID NO: 94186 - DNA, 21 bp, Artificial Sequence
  Synthetic
ggacaagcaggagutgugagt

SEQ ID NO: 94187 - DNA, 20 bp, Artificial Sequence
  Synthetic
cguagacccagccgtttcut

SEQ ID NO: 94188 - DNA, 17 bp, Artificial Sequence
  Synthetic
tccccgcugctgaggua

SEQ ID NO: 94189 - DNA, 19 bp, Artificial Sequence
  Synthetic
gggttgggaugtgtcctug

SEQ ID NO: 94190 - DNA, 23 bp, Artificial Sequence
  Synthetic
cttctgcagcuccttcttcucat

SEQ ID NO: 94191 - DNA, 21 bp, Artificial Sequence
  Synthetic
ggatccuccctgcuggaaaag

SEQ ID NO: 94192 - DNA, 28 bp, Artificial Sequence
  Synthetic
cattacuatttcatgtcugccacagagt

SEQ ID NO: 94193 - DNA, 27 bp, Artificial Sequence
  Synthetic
ctggctatagcaugagaatgagtaguc

SEQ ID NO: 94194 - DNA, 18 bp, Artificial Sequence
  Synthetic
gggccagcugcatacgut

SEQ ID NO: 94195 - DNA, 22 bp, Artificial Sequence
  Synthetic
cagcaacagcaacautctggug

SEQ ID NO: 94196 - DNA, 24 bp, Artificial Sequence
  Synthetic
cctcgacuatcatccattucacca

SEQ ID NO: 94197 - DNA, 28 bp, Artificial Sequence
  Synthetic
agaagaaaacggucaaaaccaaaatuga

SEQ ID NO: 94198 - DNA, 19 bp, Artificial Sequence
  Synthetic
cggcccuccctgatgtgua

SEQ ID NO: 94199 - DNA, 20 bp, Artificial Sequence
  Synthetic
gccagcaaagccuctucaac

SEQ ID NO: 94200 - DNA, 19 bp, Artificial Sequence
  Synthetic
ccccacuctcgagcucaaa

SEQ ID NO: 94201 - DNA, 21 bp, Artificial Sequence
  Synthetic
tuttctagcagugggcacaca

SEQ ID NO: 94202 - DNA, 24 bp, Artificial Sequence
  Synthetic
cccacccttguttcaagtctctua

SEQ ID NO: 94203 - DNA, 22 bp, Artificial Sequence
  Synthetic
tcacacauggccttggaugaag

SEQ ID NO: 94204 - DNA, 24 bp, Artificial Sequence
  Synthetic
ccatttcaccaucccttgaaugct

SEQ ID NO: 94205 - DNA, 23 bp, Artificial Sequence
  Synthetic
ggtgtgtguttgactgaaucagg

SEQ ID NO: 94206 - DNA, 21 bp, Artificial Sequence
  Synthetic
ggcaggcacucctggttttua

SEQ ID NO: 94207 - DNA, 25 bp, Artificial Sequence
  Synthetic
gccttatctaaaucagtgcctguca

SEQ ID NO: 94208 - DNA, 19 bp, Artificial Sequence
  Synthetic
cccaaaggaggccutcuca

SEQ ID NO: 94209 - DNA, 19 bp, Artificial Sequence
  Synthetic
acctgcugccaattcccut

SEQ ID NO: 94210 - DNA, 29 bp, Artificial Sequence
  Synthetic
tgactatgcaugaacactttucaaaacag

SEQ ID NO: 94211 - DNA, 24 bp, Artificial Sequence
  Synthetic
ccagcattggcuacttctgaauca

SEQ ID NO: 94212 - DNA, 22 bp, Artificial Sequence
  Synthetic
ctccacagccugatucagaagt

SEQ ID NO: 94213 - DNA, 23 bp, Artificial Sequence
  Synthetic
gggctguacaaagtcatcatcug

SEQ ID NO: 94214 - DNA, 23 bp, Artificial Sequence
  Synthetic
atcatgctcugtcctggcttuag

SEQ ID NO: 94215 - DNA, 20 bp, Artificial Sequence
  Synthetic
tctgtgcuccctgaggugaa

SEQ ID NO: 94216 - DNA, 25 bp, Artificial Sequence
  Synthetic
tcccatgtcaagutctggatctgua

SEQ ID NO: 94217 - DNA, 27 bp, Artificial Sequence
  Synthetic
atggcaaggtagutgaattggatacut

SEQ ID NO: 94218 - DNA, 24 bp, Artificial Sequence
  Synthetic
tgtcgtcatcaucatcatccacug

SEQ ID NO: 94219 - DNA, 26 bp, Artificial Sequence
  Synthetic
ccagagttuagaccccacttagttug

SEQ ID NO: 94220 - DNA, 24 bp, Artificial Sequence
  Synthetic
gacttggaagaugcagaacuggat

SEQ ID NO: 94221 - DNA, 24 bp, Artificial Sequence
  Synthetic
accatuaaaaccaccatcccucac

SEQ ID NO: 94222 - DNA, 18 bp, Artificial Sequence
  Synthetic
tccacccucctccaccut

SEQ ID NO: 94223 - DNA, 20 bp, Artificial Sequence
  Synthetic
cctgaggcuggtagaaucgg

SEQ ID NO: 94224 - DNA, 28 bp, Artificial Sequence
  Synthetic
caaaccagaautcaggaatgaaucagaa

SEQ ID NO: 94225 - DNA, 20 bp, Artificial Sequence
  Synthetic
acaagcuagtggtgcugcat

SEQ ID NO: 94226 - DNA, 25 bp, Artificial Sequence
  Synthetic
gcctctgucacatactcaacaucat

SEQ ID NO: 94227 - DNA, 27 bp, Artificial Sequence
  Synthetic
gctgctctgugatgactgtgatatuag

SEQ ID NO: 94228 - DNA, 28 bp, Artificial Sequence
  Synthetic
ccaggttgggaucattagtttccaaaut

SEQ ID NO: 94229 - DNA, 25 bp, Artificial Sequence
  Synthetic
cttgattctgaugacccttctguga

SEQ ID NO: 94230 - DNA, 17 bp, Artificial Sequence
  Synthetic
gccgccacuccacctug

SEQ ID NO: 94231 - DNA, 24 bp, Artificial Sequence
  Synthetic
ctctttccttcuttgcccttcuga

SEQ ID NO: 94232 - DNA, 22 bp, Artificial Sequence
  Synthetic
gtccaggcaguatgtgtgguag

SEQ ID NO: 94233 - DNA, 22 bp, Artificial Sequence
  Synthetic
caccctgagaagutcccatcut

SEQ ID NO: 94234 - DNA, 23 bp, Artificial Sequence
  Synthetic
ctcccgtucagccttctcatuag

SEQ ID NO: 94235 - DNA, 20 bp, Artificial Sequence
  Synthetic
ccaaugacccccactuggat

SEQ ID NO: 94236 - DNA, 26 bp, Artificial Sequence
  Synthetic
ctcaaggtctutaacatccagtucct

SEQ ID NO: 94237 - DNA, 24 bp, Artificial Sequence
  Synthetic
agaagctccuttgtcaacatcugt

SEQ ID NO: 94238 - DNA, 30 bp, Artificial Sequence
  Synthetic
agcaaaauattacttgtaaauaggcaggga

SEQ ID NO: 94239 - DNA, 28 bp, Artificial Sequence
  Synthetic
gtgagcagtuaccagatactttagtuga

SEQ ID NO: 94240 - DNA, 26 bp, Artificial Sequence
  Synthetic
gcagggaaaguttcttcaagcttaut

SEQ ID NO: 94241 - DNA, 28 bp, Artificial Sequence
  Synthetic
tttataaatgugactgttgttucaggct

SEQ ID NO: 94242 - DNA, 28 bp, Artificial Sequence
  Synthetic
ccaacatttaaagucgaaactgctuact

SEQ ID NO: 94243 - DNA, 25 bp, Artificial Sequence
  Synthetic
gaataacgccuggatttatctugcc

SEQ ID NO: 94244 - DNA, 21 bp, Artificial Sequence
  Synthetic
acaaugttcagtgugccaggt

SEQ ID NO: 94245 - DNA, 25 bp, Artificial Sequence
  Synthetic
ctttccataacuctctgcccaucag

SEQ ID NO: 94246 - DNA, 20 bp, Artificial Sequence
  Synthetic
ctcguctccatugagcaggt

SEQ ID NO: 94247 - DNA, 19 bp, Artificial Sequence
  Synthetic
aggaucccgagctggauga

SEQ ID NO: 94248 - DNA, 25 bp, Artificial Sequence
  Synthetic
attatcagacgutgttucagacggt

SEQ ID NO: 94249 - DNA, 21 bp, Artificial Sequence
  Synthetic
cctgugcacccagattuggaa

SEQ ID NO: 94250 - DNA, 28 bp, Artificial Sequence
  Synthetic
cttcttgtuagaaggttggtttcuccat

SEQ ID NO: 94251 - DNA, 28 bp, Artificial Sequence
  Synthetic
agctacttttcuccttctctgactuaca

SEQ ID NO: 94252 - DNA, 20 bp, Artificial Sequence
  Synthetic
ccuttttcucccccagacct

SEQ ID NO: 94253 - DNA, 22 bp, Artificial Sequence
  Synthetic
ggctctgauccactcctttcug

SEQ ID NO: 94254 - DNA, 25 bp, Artificial Sequence
  Synthetic
cccgatggccuaatgtctgaatuat

SEQ ID NO: 94255 - DNA, 26 bp, Artificial Sequence
  Synthetic
gaaaagaaccaaucgagaaactgcug

SEQ ID NO: 94256 - DNA, 21 bp, Artificial Sequence
  Synthetic
agggcagaaucaggguacact

SEQ ID NO: 94257 - DNA, 25 bp, Artificial Sequence
  Synthetic
gagaggacacugtaatgttccaugt

SEQ ID NO: 94258 - DNA, 20 bp, Artificial Sequence
  Synthetic
ggcctugtgggcaucaaaat

SEQ ID NO: 94259 - DNA, 21 bp, Artificial Sequence
  Synthetic
tcutcauccaacaccccacac

SEQ ID NO: 94260 - DNA, 24 bp, Artificial Sequence
  Synthetic
gagtggatgccugaatgacattug

SEQ ID NO: 94261 - DNA, 25 bp, Artificial Sequence
  Synthetic
ctgctcacucagacctaaatgaugg

SEQ ID NO: 94262 - DNA, 27 bp, Artificial Sequence
  Synthetic
gatttcatgaaugtctagaugcccagt

SEQ ID NO: 94263 - DNA, 27 bp, Artificial Sequence
  Synthetic
ccaaaatgguggcccttaaaggtauaa

SEQ ID NO: 94264 - DNA, 26 bp, Artificial Sequence
  Synthetic
ccagattgtttugtgccatcacttua

SEQ ID NO: 94265 - DNA, 33 bp, Artificial Sequence
  Synthetic
atatttgaattactucttagtgtacgtugaact

SEQ ID NO: 94266 - DNA, 21 bp, Artificial Sequence
  Synthetic
cctctgcucgcttctctctug

SEQ ID NO: 94267 - DNA, 24 bp, Artificial Sequence
  Synthetic
agcacagcgaauctggaaaacuat

SEQ ID NO: 94268 - DNA, 19 bp, Artificial Sequence
  Synthetic
ccagtuggcaggguaggac

SEQ ID NO: 94269 - DNA, 23 bp, Artificial Sequence
  Synthetic
agagaccccguttttaccctgua

SEQ ID NO: 94270 - DNA, 24 bp, Artificial Sequence
  Synthetic
aactgcattautcagaccaugcct

SEQ ID NO: 94271 - DNA, 22 bp, Artificial Sequence
  Synthetic
gccacagucaacacatttggut

SEQ ID NO: 94272 - DNA, 22 bp, Artificial Sequence
  Synthetic
cttgttgagauggtggcactug

SEQ ID NO: 94273 - DNA, 24 bp, Artificial Sequence
  Synthetic
cagcgttguagaggcatcttcuaa

SEQ ID NO: 94274 - DNA, 27 bp, Artificial Sequence
  Synthetic
tcacaaggaugcaaagaagtctttuct

SEQ ID NO: 94275 - DNA, 28 bp, Artificial Sequence
  Synthetic
ggtggaauccaaatgtgaaacugaaaaa

SEQ ID NO: 94276 - DNA, 19 bp, Artificial Sequence
  Synthetic
ctgtctcccutgcccucat

SEQ ID NO: 94277 - DNA, 18 bp, Artificial Sequence
  Synthetic
gggcgacggacuctccua

SEQ ID NO: 94278 - DNA, 22 bp, Artificial Sequence
  Synthetic
cctaugaggaggcagagttgug

SEQ ID NO: 94279 - DNA, 20 bp, Artificial Sequence
  Synthetic
gatguggagccuggcaaaga

SEQ ID NO: 94280 - DNA, 28 bp, Artificial Sequence
  Synthetic
tgagcaaggagugtcaacattatcttua

SEQ ID NO: 94281 - DNA, 28 bp, Artificial Sequence
  Synthetic
ggttctcuctgataaacatucaccacag

SEQ ID NO: 94282 - DNA, 20 bp, Artificial Sequence
  Synthetic
gctgaagacuccgctggtua

SEQ ID NO: 94283 - DNA, 20 bp, Artificial Sequence
  Synthetic
gcutcttuagcccggaaccc

SEQ ID NO: 94284 - DNA, 17 bp, Artificial Sequence
  Synthetic
gagtccgucgcccucac

SEQ ID NO: 94285 - DNA, 17 bp, Artificial Sequence
  Synthetic
gcgcccugtgactcuct

SEQ ID NO: 94286 - DNA, 26 bp, Artificial Sequence
  Synthetic
agtacttccguttttacctcatuggt

SEQ ID NO: 94287 - DNA, 27 bp, Artificial Sequence
  Synthetic
gaggaactagaccutccaattgaugat

SEQ ID NO: 94288 - DNA, 28 bp, Artificial Sequence
  Synthetic
gaaccagagtttugttttcttgttccut

SEQ ID NO: 94289 - DNA, 28 bp, Artificial Sequence
  Synthetic
ggtcaggagaguttgatatcattgcaua

SEQ ID NO: 94290 - DNA, 22 bp, Artificial Sequence
  Synthetic
cacccaauggcctttgcaauat

SEQ ID NO: 94291 - DNA, 24 bp, Artificial Sequence
  Synthetic
gggagcugaatatgtatcugcaag

SEQ ID NO: 94292 - DNA, 25 bp, Artificial Sequence
  Synthetic
ctcaaagcaaaucctcatccacuct

SEQ ID NO: 94293 - DNA, 33 bp, Artificial Sequence
  Synthetic
tgagttaatcatguttttagaactgaattugca

SEQ ID NO: 94294 - DNA, 25 bp, Artificial Sequence
  Synthetic
cgatatggttuacgcttgcgtttut

SEQ ID NO: 94295 - DNA, 27 bp, Artificial Sequence
  Synthetic
acaaggtuaaaagggcctatagttcug

SEQ ID NO: 94296 - DNA, 23 bp, Artificial Sequence
  Synthetic
ctgcataggcaauctcagagguc

SEQ ID NO: 94297 - DNA, 28 bp, Artificial Sequence
  Synthetic
tgactcaaaatgacautagcacctguaa

SEQ ID NO: 94298 - DNA, 25 bp, Artificial Sequence
  Synthetic
cctaaatcctugcctttcactucct

SEQ ID NO: 94299 - DNA, 30 bp, Artificial Sequence
  Synthetic
aaagaatgttcaaaugtcatacgtgttuaa

SEQ ID NO: 94300 - DNA, 28 bp, Artificial Sequence
  Synthetic
tttaaagctgugttctgtatucaaggga

SEQ ID NO: 94301 - DNA, 28 bp, Artificial Sequence
  Synthetic
tccagataacagugaaagcaccaattua

SEQ ID NO: 94302 - DNA, 28 bp, Artificial Sequence
  Synthetic
ccatggactttaautcgccaaatgatua

SEQ ID NO: 94303 - DNA, 25 bp, Artificial Sequence
  Synthetic
gacgtgctugctttcatttgauagg

SEQ ID NO: 94304 - DNA, 27 bp, Artificial Sequence
  Synthetic
ggactttgctautaacgtatgcacuct

SEQ ID NO: 94305 - DNA, 29 bp, Artificial Sequence
  Synthetic
attcagcttaaaacutactgtcgucaaac

SEQ ID NO: 94306 - DNA, 24 bp, Artificial Sequence
  Synthetic
gctactgaaugctcaccacaauct

SEQ ID NO: 94307 - DNA, 28 bp, Artificial Sequence
  Synthetic
ccacacaaucaccctctttattagtuga

SEQ ID NO: 94308 - DNA, 23 bp, Artificial Sequence
  Synthetic
ctgctctaaaugactcacccuca

SEQ ID NO: 94309 - DNA, 26 bp, Artificial Sequence
  Synthetic
agauggaggaagugaaaccaagaaac

SEQ ID NO: 94310 - DNA, 25 bp, Artificial Sequence
  Synthetic
agttaggauagagcatgtggtguga

SEQ ID NO: 94311 - DNA, 21 bp, Artificial Sequence
  Synthetic
ttgggccaguttactctgugg

SEQ ID NO: 94312 - DNA, 24 bp, Artificial Sequence
  Synthetic
ggautaaagaugccagggacagac

SEQ ID NO: 94313 - DNA, 28 bp, Artificial Sequence
  Synthetic
gcaagttgaagtutattgcgttgacaut

SEQ ID NO: 94314 - DNA, 22 bp, Artificial Sequence
  Synthetic
ctgaacaacauggcagaugcaa

SEQ ID NO: 94315 - DNA, 22 bp, Artificial Sequence
  Synthetic
acagttttcugacatgguggct

SEQ ID NO: 94316 - DNA, 19 bp, Artificial Sequence
  Synthetic
tgagtccguttgctucgct

SEQ ID NO: 94317 - DNA, 28 bp, Artificial Sequence
  Synthetic
gcactgcatgaacuaaaaaccaaataug

SEQ ID NO: 94318 - DNA, 28 bp, Artificial Sequence
  Synthetic
agagatttaccaugcatgaatucgaaca

SEQ ID NO: 94319 - DNA, 27 bp, Artificial Sequence
  Synthetic
aggautatgugaacagaaaagaggcaa

SEQ ID NO: 94320 - DNA, 28 bp, Artificial Sequence
  Synthetic
ctttgcctcttutctgttcacataaucc

SEQ ID NO: 94321 - DNA, 28 bp, Artificial Sequence
  Synthetic
ggacgaaaaacgauttcttgttactgut

SEQ ID NO: 94322 - DNA, 20 bp, Artificial Sequence
  Synthetic
ccctcctcautcaccctcug

SEQ ID NO: 94323 - DNA, 20 bp, Artificial Sequence
  Synthetic
cggacttuccctgccucaag

SEQ ID NO: 94324 - DNA, 24 bp, Artificial Sequence
  Synthetic
tgaccctttaucctcagtgaucct

SEQ ID NO: 94325 - DNA, 28 bp, Artificial Sequence
  Synthetic
cccagatcaggucttatatctguagcaa

SEQ ID NO: 94326 - DNA, 21 bp, Artificial Sequence
  Synthetic
gcacuggcttuagcagcaaaa

SEQ ID NO: 94327 - DNA, 28 bp, Artificial Sequence
  Synthetic
ccaagaagtcaucaatggaagtaatguc

SEQ ID NO: 94328 - DNA, 19 bp, Artificial Sequence
  Synthetic
gcatgtugagctgcacgua

SEQ ID NO: 94329 - DNA, 19 bp, Artificial Sequence
  Synthetic
caggcctcugactctgcug

SEQ ID NO: 94330 - DNA, 26 bp, Artificial Sequence
  Synthetic
tccattgttctugcttttgctttgut

SEQ ID NO: 94331 - DNA, 26 bp, Artificial Sequence
  Synthetic
gagatgttcatuttccccaaacucac

SEQ ID NO: 94332 - DNA, 23 bp, Artificial Sequence
  Synthetic
gtgttcucacagatgctgucgat

SEQ ID NO: 94333 - DNA, 28 bp, Artificial Sequence
  Synthetic
cagtgtttgcccautaatacaactuaga

SEQ ID NO: 94334 - DNA, 27 bp, Artificial Sequence
  Synthetic
acctagcctgugtgtgactatttcuaa

SEQ ID NO: 94335 - DNA, 27 bp, Artificial Sequence
  Synthetic
ccatgagacttguttctgtcagaaaug

SEQ ID NO: 94336 - DNA, 27 bp, Artificial Sequence
  Synthetic
cgttgatgauaatgaagttcgugacct

SEQ ID NO: 94337 - DNA, 28 bp, Artificial Sequence
  Synthetic
tccattctccugatgtaccttcuacaat

SEQ ID NO: 94338 - DNA, 25 bp, Artificial Sequence
  Synthetic
accttcccaagaacutcactatucc

SEQ ID NO: 94339 - DNA, 22 bp, Artificial Sequence
  Synthetic
attttagcctcuttgcccccut

SEQ ID NO: 94340 - DNA, 22 bp, Artificial Sequence
  Synthetic
gcagctguaggatgcagaguaa

SEQ ID NO: 94341 - DNA, 29 bp, Artificial Sequence
  Synthetic
gttcagaaucaagaaggaatgacaucaaa

SEQ ID NO: 94342 - DNA, 25 bp, Artificial Sequence
  Synthetic
caaaatataaagugcctggcucagt

SEQ ID NO: 94343 - DNA, 29 bp, Artificial Sequence
  Synthetic
ccctttacacuacgccaatttactaaugt

SEQ ID NO: 94344 - DNA, 24 bp, Artificial Sequence
  Synthetic
aacccaacaacuctgttacacugt

SEQ ID NO: 94345 - DNA, 28 bp, Artificial Sequence
  Synthetic
gatttcagccaaaaacuggataucaact

SEQ ID NO: 94346 - DNA, 19 bp, Artificial Sequence
  Synthetic
cautgacugggcagccact

SEQ ID NO: 94347 - DNA, 19 bp, Artificial Sequence
  Synthetic
gugcaagacagcgaugcaa

SEQ ID NO: 94348 - DNA, 22 bp, Artificial Sequence
  Synthetic
aaggccttucctttctctucca

SEQ ID NO: 94349 - DNA, 25 bp, Artificial Sequence
  Synthetic
tggtcgtucacaatgtatguacact

SEQ ID NO: 94350 - DNA, 28 bp, Artificial Sequence
  Synthetic
tccatggtauaagcaattcaccacatua

SEQ ID NO: 94351 - DNA, 24 bp, Artificial Sequence
  Synthetic
accaaaacttgauaggcagctuca

SEQ ID NO: 94352 - DNA, 23 bp, Artificial Sequence
  Synthetic
gacagaggcugagttugaagaga

SEQ ID NO: 94353 - DNA, 28 bp, Artificial Sequence
  Synthetic
tcttcttgtcaauaaaccagaggctuac

SEQ ID NO: 94354 - DNA, 24 bp, Artificial Sequence
  Synthetic
gtatcatguacgcatagcucgaga

SEQ ID NO: 94355 - DNA, 23 bp, Artificial Sequence
  Synthetic
ccctctgaugagctctgauacac

SEQ ID NO: 94356 - DNA, 20 bp, Artificial Sequence
  Synthetic
ccttcccauggagctcugac

SEQ ID NO: 94357 - DNA, 21 bp, Artificial Sequence
  Synthetic
ttccagtugccggatcatcuc

SEQ ID NO: 94358 - DNA, 29 bp, Artificial Sequence
  Synthetic
acaatgaatgaauggaacagagagguaac

SEQ ID NO: 94359 - DNA, 27 bp, Artificial Sequence
  Synthetic
ggaagaaaaucagcggagctauaaaca

SEQ ID NO: 94360 - DNA, 28 bp, Artificial Sequence
  Synthetic
aaccttaatacgucgccttttcttttuc

SEQ ID NO: 94361 - DNA, 28 bp, Artificial Sequence
  Synthetic
ggaatgcauacagaggtagaacagttut

SEQ ID NO: 94362 - DNA, 24 bp, Artificial Sequence
  Synthetic
gaagcaggtutgacaagtgguaag

SEQ ID NO: 94363 - DNA, 20 bp, Artificial Sequence
  Synthetic
ccttccucagactgctguga

SEQ ID NO: 94364 - DNA, 28 bp, Artificial Sequence
  Synthetic
gtttgacutaaggcaguagaagagaagt

SEQ ID NO: 94365 - DNA, 28 bp, Artificial Sequence
  Synthetic
gcttaatgtauacaagtgcctcagugaa

SEQ ID NO: 94366 - DNA, 31 bp, Artificial Sequence
  Synthetic
ggtattcattgtgutaatgggttcaataucc

SEQ ID NO: 94367 - DNA, 22 bp, Artificial Sequence
  Synthetic
actattccuggagguggagcaa

SEQ ID NO: 94368 - DNA, 26 bp, Artificial Sequence
  Synthetic
ttctttagctuccagagcagttguag

SEQ ID NO: 94369 - DNA, 24 bp, Artificial Sequence
  Synthetic
ctttgcuttactccucccaaggat

SEQ ID NO: 94370 - DNA, 29 bp, Artificial Sequence
  Synthetic
tctaattcataccuatcccttgcauacct

SEQ ID NO: 94371 - DNA, 25 bp, Artificial Sequence
  Synthetic
gacagagaagcutcacaatcaagug

SEQ ID NO: 94372 - DNA, 20 bp, Artificial Sequence
  Synthetic
gcgacauccagtttgugcag

SEQ ID NO: 94373 - DNA, 25 bp, Artificial Sequence
  Synthetic
cttctagccaaccucttttcgauga

SEQ ID NO: 94374 - DNA, 27 bp, Artificial Sequence
  Synthetic
atttttccatgaccacuctgtaccaut

SEQ ID NO: 94375 - DNA, 28 bp, Artificial Sequence
  Synthetic
tgctcattattugcatttgaaaccaugt

SEQ ID NO: 94376 - DNA, 21 bp, Artificial Sequence
  Synthetic
ttgccauccacaccaaagcua

SEQ ID NO: 94377 - DNA, 24 bp, Artificial Sequence
  Synthetic
cactccaaaaautggcatggguaa

SEQ ID NO: 94378 - DNA, 30 bp, Artificial Sequence
  Synthetic
tcaagcacatauaaactgtgagataaucaa

SEQ ID NO: 94379 - DNA, 20 bp, Artificial Sequence
  Synthetic
cacutcuggcagcacaggat

SEQ ID NO: 94380 - DNA, 28 bp, Artificial Sequence
  Synthetic
cttacctgtcgguaatttcttctaucca

SEQ ID NO: 94381 - DNA, 25 bp, Artificial Sequence
  Synthetic
ggtaaaacagugttgugggacagat

SEQ ID NO: 94382 - DNA, 24 bp, Artificial Sequence
  Synthetic
ctgtgcugccagaagtgttuaaaa

SEQ ID NO: 94383 - DNA, 29 bp, Artificial Sequence
  Synthetic
tcacgtaatcagcaaugagtattctctuc

SEQ ID NO: 94384 - DNA, 27 bp, Artificial Sequence
  Synthetic
aataccacatauggtgctctttctugt

SEQ ID NO: 94385 - DNA, 27 bp, Artificial Sequence
  Synthetic
attagcatggcuctgagaaagtgtuat

SEQ ID NO: 94386 - DNA, 28 bp, Artificial Sequence
  Synthetic
tcuttcacaaccatuaaaacaggagaca

SEQ ID NO: 94387 - DNA, 28 bp, Artificial Sequence
  Synthetic
gtactctttttccugttgctgttcttut

SEQ ID NO: 94388 - DNA, 23 bp, Artificial Sequence
  Synthetic
aatagctgguttacccaugccaa

SEQ ID NO: 94389 - DNA, 20 bp, Artificial Sequence
  Synthetic
cagactugccttcgcaugac

SEQ ID NO: 94390 - DNA, 28 bp, Artificial Sequence
  Synthetic
ccattagcttggauagctgcagaaauat

SEQ ID NO: 94391 - DNA, 23 bp, Artificial Sequence
  Synthetic
tcaagcagcutggtagcatttug

SEQ ID NO: 94392 - DNA, 22 bp, Artificial Sequence
  Synthetic
gtgttgaauggctcugcaagac

SEQ ID NO: 94393 - DNA, 28 bp, Artificial Sequence
  Synthetic
tcaaaacaagucaauacaggaaggaaga

SEQ ID NO: 94394 - DNA, 25 bp, Artificial Sequence
  Synthetic
tgccaattttuggagtgacugagat

SEQ ID NO: 94395 - DNA, 27 bp, Artificial Sequence
  Synthetic
agtcaucattttcatcaucagcagaca

SEQ ID NO: 94396 - DNA, 25 bp, Artificial Sequence
  Synthetic
ctttgcaggcuctcacatttgttut

SEQ ID NO: 94397 - DNA, 27 bp, Artificial Sequence
  Synthetic
cccagccguggataattcttataugat

SEQ ID NO: 94398 - DNA, 25 bp, Artificial Sequence
  Synthetic
ctgtgtctgguctattgctagugag

SEQ ID NO: 94399 - DNA, 21 bp, Artificial Sequence
  Synthetic
cccugggaatagctucaggaa

SEQ ID NO: 94400 - DNA, 33 bp, Artificial Sequence
  Synthetic
agcaatttaacatatuactgatcatagttccut

SEQ ID NO: 94401 - DNA, 28 bp, Artificial Sequence
  Synthetic
ctagtggacagauaacccaagtcaaauc

SEQ ID NO: 94402 - DNA, 28 bp, Artificial Sequence
  Synthetic
tgcttagatttgacutgggttatctguc

SEQ ID NO: 94403 - DNA, 26 bp, Artificial Sequence
  Synthetic
agatacugaaacaagaauggcccaaa

SEQ ID NO: 94404 - DNA, 27 bp, Artificial Sequence
  Synthetic
cctacttgcuccaacaatatcacugat

SEQ ID NO: 94405 - DNA, 29 bp, Artificial Sequence
  Synthetic
gtgatttatcctuactcctgcctttaucc

SEQ ID NO: 94406 - DNA, 27 bp, Artificial Sequence
  Synthetic
tcttctctttgtcucccattgtttcug

SEQ ID NO: 94407 - DNA, 24 bp, Artificial Sequence
  Synthetic
tctcgacaugtcagtttgucacat

SEQ ID NO: 94408 - DNA, 25 bp, Artificial Sequence
  Synthetic
tgcctccttgguatgaaacatctut

SEQ ID NO: 94409 - DNA, 23 bp, Artificial Sequence
  Synthetic
gtgtccccacaugaggaaaguat

SEQ ID NO: 94410 - DNA, 22 bp, Artificial Sequence
  Synthetic
agctgaagcugtactgugagac

SEQ ID NO: 94411 - DNA, 23 bp, Artificial Sequence
  Synthetic
gcagcagtccuttagtcctcuaa

SEQ ID NO: 94412 - DNA, 18 bp, Artificial Sequence
  Synthetic
gtgcaguggagggcucat

SEQ ID NO: 94413 - DNA, 17 bp, Artificial Sequence
  Synthetic
tggugccagcctuccag

SEQ ID NO: 94414 - DNA, 20 bp, Artificial Sequence
  Synthetic
gcgtttgcaucgctgtctug

SEQ ID NO: 94415 - DNA, 21 bp, Artificial Sequence
  Synthetic
tuggtgagcucccgaaagaag

SEQ ID NO: 94416 - DNA, 25 bp, Artificial Sequence
  Synthetic
gctaacaaaaaccucccaactccua

SEQ ID NO: 94417 - DNA, 22 bp, Artificial Sequence
  Synthetic
cctgaagtatugggcagcatuc

SEQ ID NO: 94418 - DNA, 31 bp, Artificial Sequence
  Synthetic
gtctaagtttattcugcttccaatagaugct

SEQ ID NO: 94419 - DNA, 24 bp, Artificial Sequence
  Synthetic
caggtgcaaagcutttccaagaut

SEQ ID NO: 94420 - DNA, 24 bp, Artificial Sequence
  Synthetic
tguagtctagcugcaaacaccaag

SEQ ID NO: 94421 - DNA, 23 bp, Artificial Sequence
  Synthetic
tcttttgaucaggtgugggcaat

SEQ ID NO: 94422 - DNA, 20 bp, Artificial Sequence
  Synthetic
aatggccutcagtgcuccaa

SEQ ID NO: 94423 - DNA, 28 bp, Artificial Sequence
  Synthetic
gcatcaaatucttacttctuccccaaat

SEQ ID NO: 94424 - DNA, 21 bp, Artificial Sequence
  Synthetic
gaagtgatgggutcctgggut

SEQ ID NO: 94425 - DNA, 28 bp, Artificial Sequence
  Synthetic
cagcttgcaacagguaatgttttgaaua

SEQ ID NO: 94426 - DNA, 23 bp, Artificial Sequence
  Synthetic
ctgtutcagctgttucagcaagg

SEQ ID NO: 94427 - DNA, 24 bp, Artificial Sequence
  Synthetic
ccttcaatgggcutatttggctua

SEQ ID NO: 94428 - DNA, 26 bp, Artificial Sequence
  Synthetic
ccaactgttccucaggacataaugaa

SEQ ID NO: 94429 - DNA, 22 bp, Artificial Sequence
  Synthetic
ccagaucactgugcagcaagaa

SEQ ID NO: 94430 - DNA, 22 bp, Artificial Sequence
  Synthetic
acaggaagauggtgacguagga

SEQ ID NO: 94431 - DNA, 21 bp, Artificial Sequence
  Synthetic
ctgactgtcugtccctccuct

SEQ ID NO: 94432 - DNA, 26 bp, Artificial Sequence
  Synthetic
gaacgagactuttctcagatgtugga

SEQ ID NO: 94433 - DNA, 26 bp, Artificial Sequence
  Synthetic
gtttctacugcgacatuagccaaaaa

SEQ ID NO: 94434 - DNA, 26 bp, Artificial Sequence
  Synthetic
cctctgccautcacttcatctaucaa

SEQ ID NO: 94435 - DNA, 25 bp, Artificial Sequence
  Synthetic
ttgccaacacaacacutttuaagca

SEQ ID NO: 94436 - DNA, 24 bp, Artificial Sequence
  Synthetic
cccatagcacugaaagaggagaut

SEQ ID NO: 94437 - DNA, 22 bp, Artificial Sequence
  Synthetic
agagcuggtatuggaggcaaag

SEQ ID NO: 94438 - DNA, 28 bp, Artificial Sequence
  Synthetic
ttgagagctttuacactacagcaaucat

SEQ ID NO: 94439 - DNA, 22 bp, Artificial Sequence
  Synthetic
gtgaacguggacaaagctgtug

SEQ ID NO: 94440 - DNA, 23 bp, Artificial Sequence
  Synthetic
acttacttcugtgctcccugaga

SEQ ID NO: 94441 - DNA, 27 bp, Artificial Sequence
  Synthetic
tgctcatttgcuccttttcattttucc

SEQ ID NO: 94442 - DNA, 22 bp, Artificial Sequence
  Synthetic
cgccctcuggtcttctgactua

SEQ ID NO: 94443 - DNA, 22 bp, Artificial Sequence
  Synthetic
cttttcccugatggtccauccc

SEQ ID NO: 94444 - DNA, 27 bp, Artificial Sequence
  Synthetic
tgagtcatacuggttcatacauaagca

SEQ ID NO: 94445 - DNA, 25 bp, Artificial Sequence
  Synthetic
ggaatcctccacuctcttcactgua

SEQ ID NO: 94446 - DNA, 22 bp, Artificial Sequence
  Synthetic
tccatccctucctcagtcauct

SEQ ID NO: 94447 - DNA, 25 bp, Artificial Sequence
  Synthetic
tttgactcttugtctctcactuccc

SEQ ID NO: 94448 - DNA, 28 bp, Artificial Sequence
  Synthetic
tgtacttuacagaacggtcttuccaaat

SEQ ID NO: 94449 - DNA, 25 bp, Artificial Sequence
  Synthetic
catctgaaugggaagtggtauagcc

SEQ ID NO: 94450 - DNA, 23 bp, Artificial Sequence
  Synthetic
agctctttgugcttctgaucaca

SEQ ID NO: 94451 - DNA, 21 bp, Artificial Sequence
  Synthetic
tgatgtcatugccactgucgt

SEQ ID NO: 94452 - DNA, 21 bp, Artificial Sequence
  Synthetic
ctactaccccuccaccucaga

SEQ ID NO: 94453 - DNA, 23 bp, Artificial Sequence
  Synthetic
ggacacagcagaugtcttugagt

SEQ ID NO: 94454 - DNA, 25 bp, Artificial Sequence
  Synthetic
tttaaggtgugaagtagctgugcat

SEQ ID NO: 94455 - DNA, 27 bp, Artificial Sequence
  Synthetic
tttacaactccauctacattggtuccc

SEQ ID NO: 94456 - DNA, 23 bp, Artificial Sequence
  Synthetic
gctggaugctgaagtguccaaat

SEQ ID NO: 94457 - DNA, 20 bp, Artificial Sequence
  Synthetic
gggaagaaaguagccccugt

SEQ ID NO: 94458 - DNA, 28 bp, Artificial Sequence
  Synthetic
catattcatguggtaggaguaaaacgga

SEQ ID NO: 94459 - DNA, 22 bp, Artificial Sequence
  Synthetic
gcaggugaaggagcaggagaua

SEQ ID NO: 94460 - DNA, 27 bp, Artificial Sequence
  Synthetic
acatacatgtguccagaagcaatcuaa

SEQ ID NO: 94461 - DNA, 29 bp, Artificial Sequence
  Synthetic
gtggttctggaaguaactctgatatgaug

SEQ ID NO: 94462 - DNA, 20 bp, Artificial Sequence
  Synthetic
ggcucagctccuacgaaaga

SEQ ID NO: 94463 - DNA, 22 bp, Artificial Sequence
  Synthetic
gtctgtgugttcgaguggacaa

SEQ ID NO: 94464 - DNA, 25 bp, Artificial Sequence
  Synthetic
tccttacctctuccttgctgtttuc

SEQ ID NO: 94465 - DNA, 29 bp, Artificial Sequence
  Synthetic
gggtttgtggagutataggtattgatgut

SEQ ID NO: 94466 - DNA, 25 bp, Artificial Sequence
  Synthetic
gttcgtgttgautctgttcctgaug

SEQ ID NO: 94467 - DNA, 29 bp, Artificial Sequence
  Synthetic
agaaaatgctacuggagacacaaaagtua

SEQ ID NO: 94468 - DNA, 24 bp, Artificial Sequence
  Synthetic
ctgtgcccauttcgaactuacaaa

SEQ ID NO: 94469 - DNA, 21 bp, Artificial Sequence
  Synthetic
ctggagcaaugagctgagtug

SEQ ID NO: 94470 - DNA, 25 bp, Artificial Sequence
  Synthetic
aaagcaauaagctccatuagagcaa

SEQ ID NO: 94471 - DNA, 20 bp, Artificial Sequence
  Synthetic
ctuccaaggaaccagugcga

SEQ ID NO: 94472 - DNA, 24 bp, Artificial Sequence
  Synthetic
gtacttcaacttugcccccttcua

SEQ ID NO: 94473 - DNA, 23 bp, Artificial Sequence
  Synthetic
caaaggaggcaacgutgaagtut

SEQ ID NO: 94474 - DNA, 20 bp, Artificial Sequence
  Synthetic
cggaccuaacaugggagggt

SEQ ID NO: 94475 - DNA, 22 bp, Artificial Sequence
  Synthetic
agctgatgcugagaagcucaag

SEQ ID NO: 94476 - DNA, 26 bp, Artificial Sequence
  Synthetic
tctttattttccuaccttcgcacugg

SEQ ID NO: 94477 - DNA, 26 bp, Artificial Sequence
  Synthetic
ctgtccatttgugaatcctgagagut

SEQ ID NO: 94478 - DNA, 22 bp, Artificial Sequence
  Synthetic
ccgaccaggaacautctacgut

SEQ ID NO: 94479 - DNA, 26 bp, Artificial Sequence
  Synthetic
aatcctggaaauccagtuaacaacca

SEQ ID NO: 94480 - DNA, 21 bp, Artificial Sequence
  Synthetic
cagctgctautccacaccuga

SEQ ID NO: 94481 - DNA, 28 bp, Artificial Sequence
  Synthetic
ccatgagggtagugttgacaaagatuaa

SEQ ID NO: 94482 - DNA, 24 bp, Artificial Sequence
  Synthetic
tgctctggauttgtttttcaguct

SEQ ID NO: 94483 - DNA, 24 bp, Artificial Sequence
  Synthetic
ggaggtcgguaccacaaagtaaug

SEQ ID NO: 94484 - DNA, 24 bp, Artificial Sequence
  Synthetic
agagatgtgtcugacctgtgauct

SEQ ID NO: 94485 - DNA, 19 bp, Artificial Sequence
  Synthetic
ccacggagcgcutcctuac

SEQ ID NO: 94486 - DNA, 22 bp, Artificial Sequence
  Synthetic
tcttgctcugctgctctguaac

SEQ ID NO: 94487 - DNA, 20 bp, Artificial Sequence
  Synthetic
acccagcagcuccuacagat

SEQ ID NO: 94488 - DNA, 22 bp, Artificial Sequence
  Synthetic
tccaaggcacauttggtctcuc

SEQ ID NO: 94489 - DNA, 21 bp, Artificial Sequence
  Synthetic
atgtccacggcuttaccacut

SEQ ID NO: 94490 - DNA, 17 bp, Artificial Sequence
  Synthetic
cccacuggtgcccucac

SEQ ID NO: 94491 - DNA, 22 bp, Artificial Sequence
  Synthetic
tccacaactcugcctcctcaua

SEQ ID NO: 94492 - DNA, 22 bp, Artificial Sequence
  Synthetic
gcaactgtgagucagggaaaug

SEQ ID NO: 94493 - DNA, 24 bp, Artificial Sequence
  Synthetic
gggagtagcaguagtacatgauga

SEQ ID NO: 94494 - DNA, 23 bp, Artificial Sequence
  Synthetic
agucgccctuacacaaacaaagt

SEQ ID NO: 94495 - DNA, 29 bp, Artificial Sequence
  Synthetic
acagagaaaacaaaguacaagucaacagt

SEQ ID NO: 94496 - DNA, 24 bp, Artificial Sequence
  Synthetic
cctaacctgugttgtgccuaagac

SEQ ID NO: 94497 - DNA, 23 bp, Artificial Sequence
  Synthetic
gtgtgaccugttcttctguacca

SEQ ID NO: 94498 - DNA, 22 bp, Artificial Sequence
  Synthetic
gggtuaggccaaagttcucagt

SEQ ID NO: 94499 - DNA, 20 bp, Artificial Sequence
  Synthetic
tgacatgcugcgactctucc

SEQ ID NO: 94500 - DNA, 21 bp, Artificial Sequence
  Synthetic
tctgctccuctagcacctuca

SEQ ID NO: 94501 - DNA, 22 bp, Artificial Sequence
  Synthetic
gggagtgguttgggtcataugg

SEQ ID NO: 94502 - DNA, 32 bp, Artificial Sequence
  Synthetic
agtttatttctgcuagtatcacttaccaauag

SEQ ID NO: 94503 - DNA, 28 bp, Artificial Sequence
  Synthetic
catgcaaacugaagatcgaactaugaaa

SEQ ID NO: 94504 - DNA, 25 bp, Artificial Sequence
  Synthetic
atttccagauggctggtcatuaaca

SEQ ID NO: 94505 - DNA, 22 bp, Artificial Sequence
  Synthetic
acttcctccuccagctggtuat

SEQ ID NO: 94506 - DNA, 26 bp, Artificial Sequence
  Synthetic
cagugttttcatggauaggaaggaac

SEQ ID NO: 94507 - DNA, 21 bp, Artificial Sequence
  Synthetic
ggctgacacugaggctcttut

SEQ ID NO: 94508 - DNA, 22 bp, Artificial Sequence
  Synthetic
cgagcuggagttcgaauaggaa

SEQ ID NO: 94509 - DNA, 27 bp, Artificial Sequence
  Synthetic
gatgttgtcuccaagcaaauaaaaacc

SEQ ID NO: 94510 - DNA, 21 bp, Artificial Sequence
  Synthetic
tcctcgcccutcagatacuca

SEQ ID NO: 94511 - DNA, 21 bp, Artificial Sequence
  Synthetic
tggaggucagugagcagaagt

SEQ ID NO: 94512 - DNA, 21 bp, Artificial Sequence
  Synthetic
caagcauctcctgcuggacaa

SEQ ID NO: 94513 - DNA, 19 bp, Artificial Sequence
  Synthetic
ggtgtttguggctccucgt

SEQ ID NO: 94514 - DNA, 24 bp, Artificial Sequence
  Synthetic
tctaccuccttcaaacucagggaa

SEQ ID NO: 94515 - DNA, 28 bp, Artificial Sequence
  Synthetic
cattaactagcggutttctcaaaucact

SEQ ID NO: 94516 - DNA, 21 bp, Artificial Sequence
  Synthetic
ccgugatagtgaugcccacag

SEQ ID NO: 94517 - DNA, 23 bp, Artificial Sequence
  Synthetic
tggagtgccugttttgtguacag

SEQ ID NO: 94518 - DNA, 28 bp, Artificial Sequence
  Synthetic
gatgagaggtgagutttcactgaaguat

SEQ ID NO: 94519 - DNA, 28 bp, Artificial Sequence
  Synthetic
gtaggaatccugatccacatatucacaa

SEQ ID NO: 94520 - DNA, 28 bp, Artificial Sequence
  Synthetic
agaacucagaacaaatagacaugcaaga

SEQ ID NO: 94521 - DNA, 28 bp, Artificial Sequence
  Synthetic
tcaccatttccuacatgattggaagtut

SEQ ID NO: 94522 - DNA, 28 bp, Artificial Sequence
  Synthetic
tttgcaaagcagaagauaatggtgttut

SEQ ID NO: 94523 - DNA, 27 bp, Artificial Sequence
  Synthetic
gtatagcaccucgagtgttgagatuac

SEQ ID NO: 94524 - DNA, 24 bp, Artificial Sequence
  Synthetic
tggtgtctcuctctgatgtuggaa

SEQ ID NO: 94525 - DNA, 25 bp, Artificial Sequence
  Synthetic
agtggtgttgucattgtaaaguggt

SEQ ID NO: 94526 - DNA, 28 bp, Artificial Sequence
  Synthetic
ggagauggttctcattuaagcaaaaaca

SEQ ID NO: 94527 - DNA, 27 bp, Artificial Sequence
  Synthetic
ctttctagttgaucacctttggcagua

SEQ ID NO: 94528 - DNA, 24 bp, Artificial Sequence
  Synthetic
tctccugaagattccttugaagca

SEQ ID NO: 94529 - DNA, 24 bp, Artificial Sequence
  Synthetic
gctattuaagagcagggaggugag

SEQ ID NO: 94530 - DNA, 25 bp, Artificial Sequence
  Synthetic
tcatctcacttuacctgatgtgcug

SEQ ID NO: 94531 - DNA, 28 bp, Artificial Sequence
  Synthetic
tccagtcttaccuatgctcttttcuact

SEQ ID NO: 94532 - DNA, 20 bp, Artificial Sequence
  Synthetic
agtcauggagaacccgucct

SEQ ID NO: 94533 - DNA, 28 bp, Artificial Sequence
  Synthetic
tgagcactgatuagtctcactttgaaut

SEQ ID NO: 94534 - DNA, 21 bp, Artificial Sequence
  Synthetic
tgggagaugttgctugcacaa

SEQ ID NO: 94535 - DNA, 32 bp, Artificial Sequence
  Synthetic
ataaattgagggtttugtacagtaccatatua

SEQ ID NO: 94536 - DNA, 31 bp, Artificial Sequence
  Synthetic
tccaatagaaataucaagaccaaagggtuac

SEQ ID NO: 94537 - DNA, 27 bp, Artificial Sequence
  Synthetic
tgatcagaaaagautcctcaggctcua

SEQ ID NO: 94538 - DNA, 22 bp, Artificial Sequence
  Synthetic
caaggctgcucttgtccuagaa

SEQ ID NO: 94539 - DNA, 20 bp, Artificial Sequence
  Synthetic
tgccttugagcagctgaguc

SEQ ID NO: 94540 - DNA, 21 bp, Artificial Sequence
  Synthetic
ccccatguactctcccacugt

SEQ ID NO: 94541 - DNA, 19 bp, Artificial Sequence
  Synthetic
ggtagatgugacgcccuca

SEQ ID NO: 94542 - DNA, 22 bp, Artificial Sequence
  Synthetic
tgcaagguaactgcucggaaat

SEQ ID NO: 94543 - DNA, 29 bp, Artificial Sequence
  Synthetic
gtgtactgtggaaaugtagggagaaatua

SEQ ID NO: 94544 - DNA, 25 bp, Artificial Sequence
  Synthetic
attctcagggaaagugtaggtacut

SEQ ID NO: 94545 - DNA, 28 bp, Artificial Sequence
  Synthetic
tttagggtgtugaaatacctaccatugt

SEQ ID NO: 94546 - DNA, 27 bp, Artificial Sequence
  Synthetic
agggacttuagatatcacucagcaaga

SEQ ID NO: 94547 - DNA, 21 bp, Artificial Sequence
  Synthetic
ccgcattugaagcctcctgua

SEQ ID NO: 94548 - DNA, 21 bp, Artificial Sequence
  Synthetic
ccuacctgtgucccagcaaag

SEQ ID NO: 94549 - DNA, 20 bp, Artificial Sequence
  Synthetic
tgatucggcagcagauccag

SEQ ID NO: 94550 - DNA, 23 bp, Artificial Sequence
  Synthetic
ctgttcccaucccctaatggaut

SEQ ID NO: 94551 - DNA, 19 bp, Artificial Sequence
  Synthetic
tgccaggcgauagtgggua

SEQ ID NO: 94552 - DNA, 22 bp, Artificial Sequence
  Synthetic
ccgcacaccacutccaagaaua

SEQ ID NO: 94553 - DNA, 28 bp, Artificial Sequence
  Synthetic
caccttgtgtcaucagtcagttttaaut

SEQ ID NO: 94554 - DNA, 21 bp, Artificial Sequence
  Synthetic
tgcagctgtutccttctccug

SEQ ID NO: 94555 - DNA, 21 bp, Artificial Sequence
  Synthetic
ccccctataucgctcctguct

SEQ ID NO: 94556 - DNA, 21 bp, Artificial Sequence
  Synthetic
agtuggaccacgaccttgtut

SEQ ID NO: 94557 - DNA, 29 bp, Artificial Sequence
  Synthetic
cctttgctcucatttccttcatauacaac

SEQ ID NO: 94558 - DNA, 24 bp, Artificial Sequence
  Synthetic
caccctccagauatatccccguat

SEQ ID NO: 94559 - DNA, 27 bp, Artificial Sequence
  Synthetic
caugcccatguaagaaacaaaaaggaa

SEQ ID NO: 94560 - DNA, 27 bp, Artificial Sequence
  Synthetic
ctacaggccaautatccaagaagcaua

SEQ ID NO: 94561 - DNA, 25 bp, Artificial Sequence
  Synthetic
ggatccaaccautcagacttuccat

SEQ ID NO: 94562 - DNA, 27 bp, Artificial Sequence
  Synthetic
tgaggaagaagagaaagugatacugga

SEQ ID NO: 94563 - DNA, 20 bp, Artificial Sequence
  Synthetic
cagccacgccutcctctaug

SEQ ID NO: 94564 - DNA, 22 bp, Artificial Sequence
  Synthetic
ggtggttcauctgtgagcagua

SEQ ID NO: 94565 - DNA, 21 bp, Artificial Sequence
  Synthetic
gacaactacacutgggcgtug

SEQ ID NO: 94566 - DNA, 20 bp, Artificial Sequence
  Synthetic
cctcaccggcugttcacauc

SEQ ID NO: 94567 - DNA, 27 bp, Artificial Sequence
  Synthetic
ccaccttcatcuaccttgtctcttcua

SEQ ID NO: 94568 - DNA, 31 bp, Artificial Sequence
  Synthetic
gctgctctcugaataaaataaatggtuacct

SEQ ID NO: 94569 - DNA, 21 bp, Artificial Sequence
  Synthetic
tctccuccacgacttgcaaug

SEQ ID NO: 94570 - DNA, 19 bp, Artificial Sequence
  Synthetic
acacgcccuccccttctua

SEQ ID NO: 94571 - DNA, 19 bp, Artificial Sequence
  Synthetic
cttcccccutggcttccut

SEQ ID NO: 94572 - DNA, 25 bp, Artificial Sequence
  Synthetic
agattcttcugatgagtgugcaagg

SEQ ID NO: 94573 - DNA, 28 bp, Artificial Sequence
  Synthetic
tggctatattttcaguttgctagagcut

SEQ ID NO: 94574 - DNA, 24 bp, Artificial Sequence
  Synthetic
ggautcagaccucaaaaccacagt

SEQ ID NO: 94575 - DNA, 24 bp, Artificial Sequence
  Synthetic
cgttgctttcuggaagtcaacaut

SEQ ID NO: 94576 - DNA, 24 bp, Artificial Sequence
  Synthetic
gactucaccaggacaattccucaa

SEQ ID NO: 94577 - DNA, 21 bp, Artificial Sequence
  Synthetic
ggagttccccuccgtttugac

SEQ ID NO: 94578 - DNA, 27 bp, Artificial Sequence
  Synthetic
aagccccacauaaagaaacctctuaat

SEQ ID NO: 94579 - DNA, 20 bp, Artificial Sequence
  Synthetic
cctgagaagggcgucaccua

SEQ ID NO: 94580 - DNA, 20 bp, Artificial Sequence
  Synthetic
gtcaggttccucgctgtcuc

SEQ ID NO: 94581 - DNA, 25 bp, Artificial Sequence
  Synthetic
ggtcgacatugatgacttacugact

SEQ ID NO: 94582 - DNA, 21 bp, Artificial Sequence
  Synthetic
cgtggaggaaucagcaacugg

SEQ ID NO: 94583 - DNA, 22 bp, Artificial Sequence
  Synthetic
tcccgtaccccuccacatatut

SEQ ID NO: 94584 - DNA, 27 bp, Artificial Sequence
  Synthetic
ccttttcguaaccaggcattatgauct

SEQ ID NO: 94585 - DNA, 21 bp, Artificial Sequence
  Synthetic
gggagaggaagguctgugagt

SEQ ID NO: 94586 - DNA, 26 bp, Artificial Sequence
  Synthetic
cauattatccattucaagggcccact

SEQ ID NO: 94587 - DNA, 20 bp, Artificial Sequence
  Synthetic
caatcgtcgcugctgctauc

SEQ ID NO: 94588 - DNA, 26 bp, Artificial Sequence
  Synthetic
agcttgttgauagcctttgttctuct

SEQ ID NO: 94589 - DNA, 25 bp, Artificial Sequence
  Synthetic
ctttccatcataucctgctgcacua

SEQ ID NO: 94590 - DNA, 22 bp, Artificial Sequence
  Synthetic
tgtctccugggaggaacaucaa

SEQ ID NO: 94591 - DNA, 28 bp, Artificial Sequence
  Synthetic
gcccttcattataugttgttggtatcug

SEQ ID NO: 94592 - DNA, 22 bp, Artificial Sequence
  Synthetic
aatgaggacuggtgtgcagtut

SEQ ID NO: 94593 - DNA, 27 bp, Artificial Sequence
  Synthetic
aagaatgugggaagggaagtactauct

SEQ ID NO: 94594 - DNA, 21 bp, Artificial Sequence
  Synthetic
ggaacagaggacacgucacut

SEQ ID NO: 94595 - DNA, 27 bp, Artificial Sequence
  Synthetic
gaaagacagatucctccaaaaacucac

SEQ ID NO: 94596 - DNA, 29 bp, Artificial Sequence
  Synthetic
gccaaatgautccagtatucaagacaaat

SEQ ID NO: 94597 - DNA, 26 bp, Artificial Sequence
  Synthetic
ccttaaggugtaacaagugaaaagca

SEQ ID NO: 94598 - DNA, 23 bp, Artificial Sequence
  Synthetic
catccagguaaactgggcatuct

SEQ ID NO: 94599 - DNA, 21 bp, Artificial Sequence
  Synthetic
cctaattccaggugccacucc

SEQ ID NO: 94600 - DNA, 23 bp, Artificial Sequence
  Synthetic
gcccgttgutctcaccaauagaa

SEQ ID NO: 94601 - DNA, 18 bp, Artificial Sequence
  Synthetic
gtuccacgccaucggaca

SEQ ID NO: 94602 - DNA, 27 bp, Artificial Sequence
  Synthetic
gttacctctcucaatttttctcgcuca

SEQ ID NO: 94603 - DNA, 28 bp, Artificial Sequence
  Synthetic
aaaggcagaaagaaaautcggaagatuc

SEQ ID NO: 94604 - DNA, 20 bp, Artificial Sequence
  Synthetic
cctuccagccccacgatuac

SEQ ID NO: 94605 - DNA, 28 bp, Artificial Sequence
  Synthetic
ccaacagtttucaacagaggctagtaua

SEQ ID NO: 94606 - DNA, 23 bp, Artificial Sequence
  Synthetic
gctccctcucagcaatacgttut

SEQ ID NO: 94607 - DNA, 22 bp, Artificial Sequence
  Synthetic
caaguctccuggaaaaggcaga

SEQ ID NO: 94608 - DNA, 20 bp, Artificial Sequence
  Synthetic
caccaugggaaaggtgggut

SEQ ID NO: 94609 - DNA, 28 bp, Artificial Sequence
  Synthetic
gattcguaaacaacagaaagaacaugct

SEQ ID NO: 94610 - DNA, 24 bp, Artificial Sequence
  Synthetic
ctatgaaagucagccatctgguga

SEQ ID NO: 94611 - DNA, 22 bp, Artificial Sequence
  Synthetic
agctgagcucttttgctgtcut

SEQ ID NO: 94612 - DNA, 25 bp, Artificial Sequence
  Synthetic
gaagttcgugacctcatttcugaca

SEQ ID NO: 94613 - DNA, 26 bp, Artificial Sequence
  Synthetic
gaggtggaugaaataaagacucccaa

SEQ ID NO: 94614 - DNA, 28 bp, Artificial Sequence
  Synthetic
tgctgtttgauccgataatcttcaauca

SEQ ID NO: 94615 - DNA, 20 bp, Artificial Sequence
  Synthetic
gccaaacugccctctgtgua

SEQ ID NO: 94616 - DNA, 27 bp, Artificial Sequence
  Synthetic
tgtagaagguacatcaggagaauggat

SEQ ID NO: 94617 - DNA, 25 bp, Artificial Sequence
  Synthetic
gtacgattagcugccaagagctuaa

SEQ ID NO: 94618 - DNA, 19 bp, Artificial Sequence
  Synthetic
cctcgucccgctcaatgua

SEQ ID NO: 94619 - DNA, 19 bp, Artificial Sequence
  Synthetic
catgcgtugccccaatguc

SEQ ID NO: 94620 - DNA, 26 bp, Artificial Sequence
  Synthetic
tgagauaaagcagaaatgugcaagga

SEQ ID NO: 94621 - DNA, 28 bp, Artificial Sequence
  Synthetic
aggatgaugaagaaaactctaugcacaa

SEQ ID NO: 94622 - DNA, 26 bp, Artificial Sequence
  Synthetic
gggcttcacauacaataatccttgut

SEQ ID NO: 94623 - DNA, 22 bp, Artificial Sequence
  Synthetic
acctggcaaguctgtcactuac

SEQ ID NO: 94624 - DNA, 22 bp, Artificial Sequence
  Synthetic
caugagtttgcugggaaacaga

SEQ ID NO: 94625 - DNA, 27 bp, Artificial Sequence
  Synthetic
ttgatacttgugtaccctgtttugaca

SEQ ID NO: 94626 - DNA, 21 bp, Artificial Sequence
  Synthetic
cggauggcacaagcaaaaugg

SEQ ID NO: 94627 - DNA, 20 bp, Artificial Sequence
  Synthetic
gguccacggaggtgtaugag

SEQ ID NO: 94628 - DNA, 23 bp, Artificial Sequence
  Synthetic
tctttccttugaggagggcaaug

SEQ ID NO: 94629 - DNA, 28 bp, Artificial Sequence
  Synthetic
aactagtttaagguacagtcacatgcut

SEQ ID NO: 94630 - DNA, 28 bp, Artificial Sequence
  Synthetic
tgatctgtggcagagutctatttttcug

SEQ ID NO: 94631 - DNA, 22 bp, Artificial Sequence
  Synthetic
agaactgguccattgggttugg

SEQ ID NO: 94632 - DNA, 22 bp, Artificial Sequence
  Synthetic
cctgcugaccagggtatcuact

SEQ ID NO: 94633 - DNA, 21 bp, Artificial Sequence
  Synthetic
aggcgggaagcaucgauaaac

SEQ ID NO: 94634 - DNA, 28 bp, Artificial Sequence
  Synthetic
ccacgtttgauaaactttcagaaucaca

SEQ ID NO: 94635 - DNA, 22 bp, Artificial Sequence
  Synthetic
tgtugagccaagaaagccauct

SEQ ID NO: 94636 - DNA, 18 bp, Artificial Sequence
  Synthetic
cucagccaagggtucggt

SEQ ID NO: 94637 - DNA, 23 bp, Artificial Sequence
  Synthetic
cactcagcacagcuataccuaca

SEQ ID NO: 94638 - DNA, 22 bp, Artificial Sequence
  Synthetic
gcaauaaagccaaacccccuac

SEQ ID NO: 94639 - DNA, 28 bp, Artificial Sequence
  Synthetic
tcttggctcttuataacctgttgctuaa

SEQ ID NO: 94640 - DNA, 21 bp, Artificial Sequence
  Synthetic
ccagcccauggatgagaauga

SEQ ID NO: 94641 - DNA, 28 bp, Artificial Sequence
  Synthetic
gaaagaagctgtuaagacgtctgaaaug

SEQ ID NO: 94642 - DNA, 22 bp, Artificial Sequence
  Synthetic
agtctgacacuttgggaccuct

SEQ ID NO: 94643 - DNA, 26 bp, Artificial Sequence
  Synthetic
aggctcattucatggcaguaaagaaa

SEQ ID NO: 94644 - DNA, 26 bp, Artificial Sequence
  Synthetic
cttagaagtgugagcgcctactttua

SEQ ID NO: 94645 - DNA, 27 bp, Artificial Sequence
  Synthetic
cagaaaagcautccactgtguaaacat

SEQ ID NO: 94646 - DNA, 22 bp, Artificial Sequence
  Synthetic
cgcacauccagatuggagacat

SEQ ID NO: 94647 - DNA, 24 bp, Artificial Sequence
  Synthetic
ggagggagcuagttagaugaggag

SEQ ID NO: 94648 - DNA, 21 bp, Artificial Sequence
  Synthetic
gttggcaggguggtcatagut

SEQ ID NO: 94649 - DNA, 24 bp, Artificial Sequence
  Synthetic
tgggatgatucacaatggccttut

SEQ ID NO: 94650 - DNA, 25 bp, Artificial Sequence
  Synthetic
cacagaagtcacucgttacacatug

SEQ ID NO: 94651 - DNA, 25 bp, Artificial Sequence
  Synthetic
agaggguagagaaggacattgtcut

SEQ ID NO: 94652 - DNA, 26 bp, Artificial Sequence
  Synthetic
tccttccacucccttagtttcaucat

SEQ ID NO: 94653 - DNA, 27 bp, Artificial Sequence
  Synthetic
caacaaccctacuttttattccccaut

SEQ ID NO: 94654 - DNA, 29 bp, Artificial Sequence
  Synthetic
cgcttgtgcagutgatgaataaagaauaa

SEQ ID NO: 94655 - DNA, 24 bp, Artificial Sequence
  Synthetic
ttgacutgttgagatucccacaca

SEQ ID NO: 94656 - DNA, 23 bp, Artificial Sequence
  Synthetic
ggtgttaagccugctctctctuc

SEQ ID NO: 94657 - DNA, 25 bp, Artificial Sequence
  Synthetic
cuaatgctuaccccagagacaacaa

SEQ ID NO: 94658 - DNA, 26 bp, Artificial Sequence
  Synthetic
aggtattgcacaugtgaaaatgtugg

SEQ ID NO: 94659 - DNA, 22 bp, Artificial Sequence
  Synthetic
tctgggtgaaauggcaactgut

SEQ ID NO: 94660 - DNA, 22 bp, Artificial Sequence
  Synthetic
acaagcucaactccuagagcac

SEQ ID NO: 94661 - DNA, 24 bp, Artificial Sequence
  Synthetic
agataagggttucaaggcatgcut

SEQ ID NO: 94662 - DNA, 28 bp, Artificial Sequence
  Synthetic
gcttaccagggaautcttcctttaagut

SEQ ID NO: 94663 - DNA, 28 bp, Artificial Sequence
  Synthetic
gaaggagaaaaugacacaatgtcgaaug

SEQ ID NO: 94664 - DNA, 24 bp, Artificial Sequence
  Synthetic
caactcuggaagaagcatagcuca

SEQ ID NO: 94665 - DNA, 26 bp, Artificial Sequence
  Synthetic
cttcagtgaaaacucacctctcauct

SEQ ID NO: 94666 - DNA, 21 bp, Artificial Sequence
  Synthetic
ctcccactuaagcgtgctuct

SEQ ID NO: 94667 - DNA, 25 bp, Artificial Sequence
  Synthetic
ttcccagggauaaaaattcagccut

SEQ ID NO: 94668 - DNA, 22 bp, Artificial Sequence
  Synthetic
gaacatcugcagcaaggucaag

SEQ ID NO: 94669 - DNA, 22 bp, Artificial Sequence
  Synthetic
gcaggtguttatgcggauagga

SEQ ID NO: 94670 - DNA, 27 bp, Artificial Sequence
  Synthetic
tgttaggatcacutgccattggatuaa

SEQ ID NO: 94671 - DNA, 33 bp, Artificial Sequence
  Synthetic
ggcttttgctataaauatgttacttttaacugt

SEQ ID NO: 94672 - DNA, 24 bp, Artificial Sequence
  Synthetic
cgacagcggutttcttttatuacc

SEQ ID NO: 94673 - DNA, 22 bp, Artificial Sequence
  Synthetic
ctgcaaguagggcatccttuga

SEQ ID NO: 94674 - DNA, 22 bp, Artificial Sequence
  Synthetic
gugaaaaagtccugggagggat

SEQ ID NO: 94675 - DNA, 21 bp, Artificial Sequence
  Synthetic
atcggugaggagctgaucaac

SEQ ID NO: 94676 - DNA, 31 bp, Artificial Sequence
  Synthetic
atgaccaaauaaatcacatcttuaggaagga

SEQ ID NO: 94677 - DNA, 23 bp, Artificial Sequence
  Synthetic
cttcgaauggcagaggaaatugg

SEQ ID NO: 94678 - DNA, 26 bp, Artificial Sequence
  Synthetic
gcacttacacuttatccccaattucc

SEQ ID NO: 94679 - DNA, 27 bp, Artificial Sequence
  Synthetic
gctccagacuggtacaaagattttgut

SEQ ID NO: 94680 - DNA, 24 bp, Artificial Sequence
  Synthetic
gcagggagauggagtagatgacuc

SEQ ID NO: 94681 - DNA, 22 bp, Artificial Sequence
  Synthetic
agtctgugccctatcugggaaa

SEQ ID NO: 94682 - DNA, 31 bp, Artificial Sequence
  Synthetic
aaaattctgtuagaaccatgaaacataucca

SEQ ID NO: 94683 - DNA, 28 bp, Artificial Sequence
  Synthetic
ggatgcagaataugccaactactauact

SEQ ID NO: 94684 - DNA, 24 bp, Artificial Sequence
  Synthetic
tcctcaucaggagactggaatuct

SEQ ID NO: 94685 - DNA, 21 bp, Artificial Sequence
  Synthetic
agggtttggcugctttctuga

SEQ ID NO: 94686 - DNA, 22 bp, Artificial Sequence
  Synthetic
aaacctcagcaucagcatcugt

SEQ ID NO: 94687 - DNA, 28 bp, Artificial Sequence
  Synthetic
tctcttgctcuctttccatttctttuct

SEQ ID NO: 94688 - DNA, 26 bp, Artificial Sequence
  Synthetic
gcttccagaatuaagaggcagtcaut

SEQ ID NO: 94689 - DNA, 25 bp, Artificial Sequence
  Synthetic
agatgatcaagcuggtaaactgugg

SEQ ID NO: 94690 - DNA, 27 bp, Artificial Sequence
  Synthetic
ctcttccucaaaaaggataagcacugt

SEQ ID NO: 94691 - DNA, 28 bp, Artificial Sequence
  Synthetic
cgtttcattttcutgtgttttgccuagt

SEQ ID NO: 94692 - DNA, 22 bp, Artificial Sequence
  Synthetic
gcccaaccagacugagttcauc

SEQ ID NO: 94693 - DNA, 28 bp, Artificial Sequence
  Synthetic
ttttctgcttgttutcactttcacagut

SEQ ID NO: 94694 - DNA, 18 bp, Artificial Sequence
  Synthetic
ccaggcuctggctgugaa

SEQ ID NO: 94695 - DNA, 19 bp, Artificial Sequence
  Synthetic
caccagucctctccctucc

SEQ ID NO: 94696 - DNA, 21 bp, Artificial Sequence
  Synthetic
acctcugacagtgggcuaact

SEQ ID NO: 94697 - DNA, 22 bp, Artificial Sequence
  Synthetic
tcacugccagagactgaugact

SEQ ID NO: 94698 - DNA, 21 bp, Artificial Sequence
  Synthetic
gggtcagugcagttagctuct

SEQ ID NO: 94699 - DNA, 22 bp, Artificial Sequence
  Synthetic
ctccactcucacccatcaucac

SEQ ID NO: 94700 - DNA, 21 bp, Artificial Sequence
  Synthetic
ggguactctaacucccccaaa

SEQ ID NO: 94701 - DNA, 27 bp, Artificial Sequence
  Synthetic
gggatgttaguactctgttattcugga

SEQ ID NO: 94702 - DNA, 19 bp, Artificial Sequence
  Synthetic
gcaggaaaggucccccaut

SEQ ID NO: 94703 - DNA, 20 bp, Artificial Sequence
  Synthetic
cctccccgutgagtcccaua

SEQ ID NO: 94704 - DNA, 20 bp, Artificial Sequence
  Synthetic
tgtcccagcaucgcacaaua

SEQ ID NO: 94705 - DNA, 20 bp, Artificial Sequence
  Synthetic
gctccctguccatggagtug

SEQ ID NO: 94706 - DNA, 29 bp, Artificial Sequence
  Synthetic
ctaccgtaagcutcattagatttaagugt

SEQ ID NO: 94707 - DNA, 25 bp, Artificial Sequence
  Synthetic
aaagaatcugaaacgtggtccauga

SEQ ID NO: 94708 - DNA, 27 bp, Artificial Sequence
  Synthetic
aatttaatcattagcuccgcaaagcug

SEQ ID NO: 94709 - DNA, 27 bp, Artificial Sequence
  Synthetic
cttgggcatacuccttaacttcttuct

SEQ ID NO: 94710 - DNA, 21 bp, Artificial Sequence
  Synthetic
atctgagacccccacuaccut

SEQ ID NO: 94711 - DNA, 20 bp, Artificial Sequence
  Synthetic
gcttcucccatcctgaugga

SEQ ID NO: 94712 - DNA, 25 bp, Artificial Sequence
  Synthetic
gcacgttttaauggagtaaccgcua

SEQ ID NO: 94713 - DNA, 22 bp, Artificial Sequence
  Synthetic
agcgaaggaagaugcaaacugt

SEQ ID NO: 94714 - DNA, 21 bp, Artificial Sequence
  Synthetic
aaccagggaaugcugaaggag

SEQ ID NO: 94715 - DNA, 21 bp, Artificial Sequence
  Synthetic
ccatccuggagacacccauca

SEQ ID NO: 94716 - DNA, 23 bp, Artificial Sequence
  Synthetic
ctggacuaacatccguagagacc

SEQ ID NO: 94717 - DNA, 24 bp, Artificial Sequence
  Synthetic
actctcatcaaauccgacatcgut

SEQ ID NO: 94718 - DNA, 27 bp, Artificial Sequence
  Synthetic
tgattgaagcugcaaagaatggaaaug

SEQ ID NO: 94719 - DNA, 27 bp, Artificial Sequence
  Synthetic
caagttgccuacaagtcaatgaaacug

SEQ ID NO: 94720 - DNA, 20 bp, Artificial Sequence
  Synthetic
cctguaccccacccttgtuc

SEQ ID NO: 94721 - DNA, 24 bp, Artificial Sequence
  Synthetic
caccctcaccugacttttcttcuc

SEQ ID NO: 94722 - DNA, 25 bp, Artificial Sequence
  Synthetic
cctggctcagautagagatctcgut

SEQ ID NO: 94723 - DNA, 22 bp, Artificial Sequence
  Synthetic
tgtgaccccuatggaggtcuac

SEQ ID NO: 94724 - DNA, 19 bp, Artificial Sequence
  Synthetic
gctgtcugcttgcatucgg

SEQ ID NO: 94725 - DNA, 21 bp, Artificial Sequence
  Synthetic
cccctctggaugggattgaug

SEQ ID NO: 94726 - DNA, 27 bp, Artificial Sequence
  Synthetic
gcccatataaagagugctccaattuct

SEQ ID NO: 94727 - DNA, 22 bp, Artificial Sequence
  Synthetic
ccttataggcugcgacaucagg

SEQ ID NO: 94728 - DNA, 27 bp, Artificial Sequence
  Synthetic
ggatttctaugggaactcagacatuca

SEQ ID NO: 94729 - DNA, 24 bp, Artificial Sequence
  Synthetic
cttggucagaagaagccaggauat

SEQ ID NO: 94730 - DNA, 22 bp, Artificial Sequence
  Synthetic
tgggttgcuttcatgtgagugt

SEQ ID NO: 94731 - DNA, 21 bp, Artificial Sequence
  Synthetic
cguatgatgtggugggaccat

SEQ ID NO: 94732 - DNA, 25 bp, Artificial Sequence
  Synthetic
aaagatcaccugttctgttgacugt

SEQ ID NO: 94733 - DNA, 22 bp, Artificial Sequence
  Synthetic
ggttttcautgcaggaugacga

SEQ ID NO: 94734 - DNA, 26 bp, Artificial Sequence
  Synthetic
agaagaacgtuccgatcctctauact

SEQ ID NO: 94735 - DNA, 20 bp, Artificial Sequence
  Synthetic
cctgggcugcattggaaaug

SEQ ID NO: 94736 - DNA, 27 bp, Artificial Sequence
  Synthetic
caaataagaactugcaatgaagggugt

SEQ ID NO: 94737 - DNA, 28 bp, Artificial Sequence
  Synthetic
atgtgtgaataauagccactcctttcuc

SEQ ID NO: 94738 - DNA, 32 bp, Artificial Sequence
  Synthetic
atgtactttaguaatttagatttatgucgcct

SEQ ID NO: 94739 - DNA, 28 bp, Artificial Sequence
  Synthetic
gcaactccttauggtatcgaatctttug

SEQ ID NO: 94740 - DNA, 33 bp, Artificial Sequence
  Synthetic
aactacaagtacauttcctaaaatgtattucca

SEQ ID NO: 94741 - DNA, 28 bp, Artificial Sequence
  Synthetic
gagaagttgugagagaattcaugaagga

SEQ ID NO: 94742 - DNA, 21 bp, Artificial Sequence
  Synthetic
gccctucacctatgcaauccc

SEQ ID NO: 94743 - DNA, 26 bp, Artificial Sequence
  Synthetic
ttctctttaccucttcccacctguaa

SEQ ID NO: 94744 - DNA, 27 bp, Artificial Sequence
  Synthetic
caaagucactaaugaacaacacaccaa

SEQ ID NO: 94745 - DNA, 20 bp, Artificial Sequence
  Synthetic
caagaaagcugggcgugaat

SEQ ID NO: 94746 - DNA, 28 bp, Artificial Sequence
  Synthetic
cccttccauaaaggcttuaacacagaat

SEQ ID NO: 94747 - DNA, 26 bp, Artificial Sequence
  Synthetic
ggcatagtuaaaacctgtgtttggut

SEQ ID NO: 94748 - DNA, 24 bp, Artificial Sequence
  Synthetic
caacagggaccugatauacaagca

SEQ ID NO: 94749 - DNA, 26 bp, Artificial Sequence
  Synthetic
gaaattuccacccaagcataactuac

SEQ ID NO: 94750 - DNA, 21 bp, Artificial Sequence
  Synthetic
cttgacctucactccctuggt

SEQ ID NO: 94751 - DNA, 20 bp, Artificial Sequence
  Synthetic
catccctgaucacccctcug

SEQ ID NO: 94752 - DNA, 24 bp, Artificial Sequence
  Synthetic
gttgttctgcaucttcctcuggaa

SEQ ID NO: 94753 - DNA, 23 bp, Artificial Sequence
  Synthetic
cgtaagcaguatgaagaguggct

SEQ ID NO: 94754 - DNA, 27 bp, Artificial Sequence
  Synthetic
tcagtttgaugaaatgaacagctucct

SEQ ID NO: 94755 - DNA, 23 bp, Artificial Sequence
  Synthetic
gttctctggugtctcccaactuc

SEQ ID NO: 94756 - DNA, 22 bp, Artificial Sequence
  Synthetic
gatttggcaugaggactgguct

SEQ ID NO: 94757 - DNA, 23 bp, Artificial Sequence
  Synthetic
catatgcucatcctccuggaaca

SEQ ID NO: 94758 - DNA, 21 bp, Artificial Sequence
  Synthetic
cattugaagcagctgtugggt

SEQ ID NO: 94759 - DNA, 27 bp, Artificial Sequence
  Synthetic
attatgtggtcauggtgaaactactuc

SEQ ID NO: 94760 - DNA, 21 bp, Artificial Sequence
  Synthetic
gcaggccuttcataaggguca

SEQ ID NO: 94761 - DNA, 22 bp, Artificial Sequence
  Synthetic
gactcataugcacgaccctugt

SEQ ID NO: 94762 - DNA, 22 bp, Artificial Sequence
  Synthetic
ttacucctgaagtuggcacagg

SEQ ID NO: 94763 - DNA, 26 bp, Artificial Sequence
  Synthetic
ctcagtcugactctttuggaacaagt

SEQ ID NO: 94764 - DNA, 31 bp, Artificial Sequence
  Synthetic
cattgttagttgtautactacttgacagucc

SEQ ID NO: 94765 - DNA, 28 bp, Artificial Sequence
  Synthetic
gtgccctttgguatgtattctttacuca

SEQ ID NO: 94766 - DNA, 27 bp, Artificial Sequence
  Synthetic
cctgtttaggutattggagtgaugagt

SEQ ID NO: 94767 - DNA, 28 bp, Artificial Sequence
  Synthetic
ccaaaaatatttccugttggcgttctua

SEQ ID NO: 94768 - DNA, 21 bp, Artificial Sequence
  Synthetic
gggcttgaacuggtgtaccua

SEQ ID NO: 94769 - DNA, 28 bp, Artificial Sequence
  Synthetic
aggatggcagtauaacacatcagattuc

SEQ ID NO: 94770 - DNA, 22 bp, Artificial Sequence
  Synthetic
ccactctgguccataagtgcut

SEQ ID NO: 94771 - DNA, 20 bp, Artificial Sequence
  Synthetic
gtccucaagaagcggaccut

SEQ ID NO: 94772 - DNA, 27 bp, Artificial Sequence
  Synthetic
aataatgcaaagaccucccttcucaaa

SEQ ID NO: 94773 - DNA, 28 bp, Artificial Sequence
  Synthetic
gctctcgtattgautcggagcttttuaa

SEQ ID NO: 94774 - DNA, 27 bp, Artificial Sequence
  Synthetic
tgaaatctacaccaaugacacagtucc

SEQ ID NO: 94775 - DNA, 21 bp, Artificial Sequence
  Synthetic
gtgagccacccagcuctttua

SEQ ID NO: 94776 - DNA, 21 bp, Artificial Sequence
  Synthetic
ggucgtgagtuagaggaccca

SEQ ID NO: 94777 - DNA, 25 bp, Artificial Sequence
  Synthetic
agtaccccuacgtctacatctucag

SEQ ID NO: 94778 - DNA, 24 bp, Artificial Sequence
  Synthetic
ccagatuaaaccagatggcugcaa

SEQ ID NO: 94779 - DNA, 24 bp, Artificial Sequence
  Synthetic
agatttgctggauacgtgacauca

SEQ ID NO: 94780 - DNA, 29 bp, Artificial Sequence
  Synthetic
ctgttcatgttcugattctctttgcttua

SEQ ID NO: 94781 - DNA, 22 bp, Artificial Sequence
  Synthetic
gccagagauaacagagctgcut

SEQ ID NO: 94782 - DNA, 24 bp, Artificial Sequence
  Synthetic
aagggacagaaautccaggtctug

SEQ ID NO: 94783 - DNA, 19 bp, Artificial Sequence
  Synthetic
ccccggccuactactgtug

SEQ ID NO: 94784 - DNA, 25 bp, Artificial Sequence
  Synthetic
catctucaagttcagtugcagcaat

SEQ ID NO: 94785 - DNA, 26 bp, Artificial Sequence
  Synthetic
cacagautcgagaaatucaaggcaag

SEQ ID NO: 94786 - DNA, 24 bp, Artificial Sequence
  Synthetic
tttcagtttcugacccatgucaca

SEQ ID NO: 94787 - DNA, 21 bp, Artificial Sequence
  Synthetic
gcagtggccauttcatcugga

SEQ ID NO: 94788 - DNA, 24 bp, Artificial Sequence
  Synthetic
cagctccuaagccagaagaaagut

SEQ ID NO: 94789 - DNA, 22 bp, Artificial Sequence
  Synthetic
gtaaggcccuttttgcagtugg

SEQ ID NO: 94790 - DNA, 21 bp, Artificial Sequence
  Synthetic
agcaacatcaugggcagttug

SEQ ID NO: 94791 - DNA, 25 bp, Artificial Sequence
  Synthetic
cctgatacatgtucccagacaccua

SEQ ID NO: 94792 - DNA, 22 bp, Artificial Sequence
  Synthetic
ctatcaagaggugcaggtguca

SEQ ID NO: 94793 - DNA, 23 bp, Artificial Sequence
  Synthetic
agaacaaacugcaaaaggcccua

SEQ ID NO: 94794 - DNA, 21 bp, Artificial Sequence
  Synthetic
agcttcaucaagagctgccut

SEQ ID NO: 94795 - DNA, 26 bp, Artificial Sequence
  Synthetic
aaagaaatgcatugtgttgggagtuc

SEQ ID NO: 94796 - DNA, 20 bp, Artificial Sequence
  Synthetic
gggctgcugactataugggt

SEQ ID NO: 94797 - DNA, 27 bp, Artificial Sequence
  Synthetic
ctccacgaccugttgtagattcttaut

SEQ ID NO: 94798 - DNA, 22 bp, Artificial Sequence
  Synthetic
catcatacaccuctcgcucaca

SEQ ID NO: 94799 - DNA, 19 bp, Artificial Sequence
  Synthetic
aggtccugctgaugaccca

SEQ ID NO: 94800 - DNA, 29 bp, Artificial Sequence
  Synthetic
acttcagaaataucagctaatgggtcauc

SEQ ID NO: 94801 - DNA, 23 bp, Artificial Sequence
  Synthetic
tgcctcacucagtatctgctgua

SEQ ID NO: 94802 - DNA, 22 bp, Artificial Sequence
  Synthetic
cctccatcucccttggctttug

SEQ ID NO: 94803 - DNA, 23 bp, Artificial Sequence
  Synthetic
gcagggcaugaagaaaactgtut

SEQ ID NO: 94804 - DNA, 25 bp, Artificial Sequence
  Synthetic
acttttgtttccuctcgccagtauc

SEQ ID NO: 94805 - DNA, 25 bp, Artificial Sequence
  Synthetic
ccatcatctcugggaggttactuac

SEQ ID NO: 94806 - DNA, 25 bp, Artificial Sequence
  Synthetic
gcttgtggcuttacaaacacaucat

SEQ ID NO: 94807 - DNA, 22 bp, Artificial Sequence
  Synthetic
ggatacagaguccctugacacc

SEQ ID NO: 94808 - DNA, 24 bp, Artificial Sequence
  Synthetic
cggcuaaatgtgtcugaaagacca

SEQ ID NO: 94809 - DNA, 26 bp, Artificial Sequence
  Synthetic
agggttttacuaggtcctcaaugaca

SEQ ID NO: 94810 - DNA, 21 bp, Artificial Sequence
  Synthetic
ctgctctccugtgaccaaucc

SEQ ID NO: 94811 - DNA, 26 bp, Artificial Sequence
  Synthetic
agaaaagcacacaauggttaucgagt

SEQ ID NO: 94812 - DNA, 23 bp, Artificial Sequence
  Synthetic
cctagctgutcctgaagatuggg

SEQ ID NO: 94813 - DNA, 22 bp, Artificial Sequence
  Synthetic
cccacauccagcagtgaaugaa

SEQ ID NO: 94814 - DNA, 20 bp, Artificial Sequence
  Synthetic
ctacccagcagcuggtacuc

SEQ ID NO: 94815 - DNA, 26 bp, Artificial Sequence
  Synthetic
gcttatttccuccagtctctgttcuc

SEQ ID NO: 94816 - DNA, 21 bp, Artificial Sequence
  Synthetic
gatcactggutccagctgcua

SEQ ID NO: 94817 - DNA, 26 bp, Artificial Sequence
  Synthetic
ttccacgacaaauaatgacccctaug

SEQ ID NO: 94818 - DNA, 23 bp, Artificial Sequence
  Synthetic
acatatttccautgccaggcuga

SEQ ID NO: 94819 - DNA, 26 bp, Artificial Sequence
  Synthetic
agcuaaaatugaagccacacagaaac

SEQ ID NO: 94820 - DNA, 21 bp, Artificial Sequence
  Synthetic
tccgaatgauggtgccaaugt

SEQ ID NO: 94821 - DNA, 21 bp, Artificial Sequence
  Synthetic
cccuacagcaagcagtttgug

SEQ ID NO: 94822 - DNA, 22 bp, Artificial Sequence
  Synthetic
cccutgaaggaugggcaaaaga

SEQ ID NO: 94823 - DNA, 21 bp, Artificial Sequence
  Synthetic
ggcaucaaggcgattgtcugt

SEQ ID NO: 94824 - DNA, 20 bp, Artificial Sequence
  Synthetic
ggtctagcugcgtgaagcug

SEQ ID NO: 94825 - DNA, 17 bp, Artificial Sequence
  Synthetic
atggugcagcgcatgug

SEQ ID NO: 94826 - DNA, 18 bp, Artificial Sequence
  Synthetic
tgaagcugugcagcacca

SEQ ID NO: 94827 - DNA, 17 bp, Artificial Sequence
  Synthetic
cgcugcgagcctuccat

SEQ ID NO: 94828 - DNA, 25 bp, Artificial Sequence
  Synthetic
tcatttgaaggcauggtcatucaga

SEQ ID NO: 94829 - DNA, 27 bp, Artificial Sequence
  Synthetic
tcaggaaucaggagttagugaagaagt

SEQ ID NO: 94830 - DNA, 24 bp, Artificial Sequence
  Synthetic
cgctgttcatcutcggattcacua

SEQ ID NO: 94831 - DNA, 28 bp, Artificial Sequence
  Synthetic
tctgttttaatgucgagtcagtgguaaa

SEQ ID NO: 94832 - DNA, 29 bp, Artificial Sequence
  Synthetic
tgcattcuagaaaaatttgctugacaact

SEQ ID NO: 94833 - DNA, 28 bp, Artificial Sequence
  Synthetic
ggagcagcagauattgatcataaactug

SEQ ID NO: 94834 - DNA, 24 bp, Artificial Sequence
  Synthetic
gctgctcatutttcacctgtucaa

SEQ ID NO: 94835 - DNA, 28 bp, Artificial Sequence
  Synthetic
ccatgatgguagttttcttcctuaacct

SEQ ID NO: 94836 - DNA, 28 bp, Artificial Sequence
  Synthetic
ctctgtagtctgutcttggaaagcauaa

SEQ ID NO: 94837 - DNA, 25 bp, Artificial Sequence
  Synthetic
ccaggattguggatgatcugaaaga

SEQ ID NO: 94838 - DNA, 23 bp, Artificial Sequence
  Synthetic
cctaggtgtguctggaggtttug

SEQ ID NO: 94839 - DNA, 23 bp, Artificial Sequence
  Synthetic
agaagaaautctgcugcaccagt

SEQ ID NO: 94840 - DNA, 25 bp, Artificial Sequence
  Synthetic
catttttctguactgttcggctuca

SEQ ID NO: 94841 - DNA, 27 bp, Artificial Sequence
  Synthetic
ccttggaaaagcaguctaaaaggttut

SEQ ID NO: 94842 - DNA, 21 bp, Artificial Sequence
  Synthetic
gcccagacacucttcucacat

SEQ ID NO: 94843 - DNA, 29 bp, Artificial Sequence
  Synthetic
cttcctctaaccugatgattgtcactuac

SEQ ID NO: 94844 - DNA, 23 bp, Artificial Sequence
  Synthetic
ccggtacugagatgactuggagt

SEQ ID NO: 94845 - DNA, 21 bp, Artificial Sequence
  Synthetic
tgagggagagcugtcttguca

SEQ ID NO: 94846 - DNA, 28 bp, Artificial Sequence
  Synthetic
cctatctcatcgucttatattggctuca

SEQ ID NO: 94847 - DNA, 21 bp, Artificial Sequence
  Synthetic
tctctgggutggagtggaugt

SEQ ID NO: 94848 - DNA, 27 bp, Artificial Sequence
  Synthetic
accgatgauaaaggtgtacagtttucc

SEQ ID NO: 94849 - DNA, 21 bp, Artificial Sequence
  Synthetic
cctcaccgcaagugtttucac

SEQ ID NO: 94850 - DNA, 19 bp, Artificial Sequence
  Synthetic
cctcccgccagcuttcauc

SEQ ID NO: 94851 - DNA, 21 bp, Artificial Sequence
  Synthetic
gaggccaaagutgttgaugcc

SEQ ID NO: 94852 - DNA, 19 bp, Artificial Sequence
  Synthetic
cgctgugagcagcaugaat

SEQ ID NO: 94853 - DNA, 18 bp, Artificial Sequence
  Synthetic
cctccgggcuccatcuga

SEQ ID NO: 94854 - DNA, 21 bp, Artificial Sequence
  Synthetic
catgcucaaccccacttcuct

SEQ ID NO: 94855 - DNA, 21 bp, Artificial Sequence
  Synthetic
gctacaggccutgtcctucat

SEQ ID NO: 94856 - DNA, 20 bp, Artificial Sequence
  Synthetic
caaagcuaccucagcagcga

SEQ ID NO: 94857 - DNA, 23 bp, Artificial Sequence
  Synthetic
tcgtacttgaucttgccgttcug

SEQ ID NO: 94858 - DNA, 21 bp, Artificial Sequence
  Synthetic
ctcaaauggcacagctgctua

SEQ ID NO: 94859 - DNA, 23 bp, Artificial Sequence
  Synthetic
gcttcctucaaagactcctcugg

SEQ ID NO: 94860 - DNA, 22 bp, Artificial Sequence
  Synthetic
ccacagugccttctccttuacc

SEQ ID NO: 94861 - DNA, 20 bp, Artificial Sequence
  Synthetic
agattcauggcttcgucgct

SEQ ID NO: 94862 - DNA, 20 bp, Artificial Sequence
  Synthetic
cuactucccagcagcaggac

SEQ ID NO: 94863 - DNA, 24 bp, Artificial Sequence
  Synthetic
gggttttcaucagctgacucaaga

SEQ ID NO: 94864 - DNA, 21 bp, Artificial Sequence
  Synthetic
cttcccuacccgcugaagaag

SEQ ID NO: 94865 - DNA, 28 bp, Artificial Sequence
  Synthetic
aaagcaagcuaaauacaaacacaagcat

SEQ ID NO: 94866 - DNA, 20 bp, Artificial Sequence
  Synthetic
gggttgaagacugggctugt

SEQ ID NO: 94867 - DNA, 22 bp, Artificial Sequence
  Synthetic
cagacagugatgaaccucagga

SEQ ID NO: 94868 - DNA, 27 bp, Artificial Sequence
  Synthetic
ctgacatgcagaauatattggcagtuc

SEQ ID NO: 94869 - DNA, 25 bp, Artificial Sequence
  Synthetic
tgagattcaugaccggtctgttuac

SEQ ID NO: 94870 - DNA, 23 bp, Artificial Sequence
  Synthetic
aaugaagaaagagtuccccagca

SEQ ID NO: 94871 - DNA, 24 bp, Artificial Sequence
  Synthetic
gtacauggacaggcagacagauac

SEQ ID NO: 94872 - DNA, 25 bp, Artificial Sequence
  Synthetic
aaagctgauggtgatgatguacaga

SEQ ID NO: 94873 - DNA, 28 bp, Artificial Sequence
  Synthetic
tcaaccagtuatgaaatcaguaccaacc

SEQ ID NO: 94874 - DNA, 21 bp, Artificial Sequence
  Synthetic
cctctcagutcccacgcuaat

SEQ ID NO: 94875 - DNA, 25 bp, Artificial Sequence
  Synthetic
agtcttctctgacucactctctcug

SEQ ID NO: 94876 - DNA, 23 bp, Artificial Sequence
  Synthetic
ggcagucaaggagaaacagttut

SEQ ID NO: 94877 - DNA, 21 bp, Artificial Sequence
  Synthetic
gagcagagcutagcugaaggg

SEQ ID NO: 94878 - DNA, 30 bp, Artificial Sequence
  Synthetic
tcaattaggttatuttgaagtggtgtucct

SEQ ID NO: 94879 - DNA, 28 bp, Artificial Sequence
  Synthetic
tgttgtttgtgaugaaggccatattcua

SEQ ID NO: 94880 - DNA, 28 bp, Artificial Sequence
  Synthetic
gctttagaaacagcagaugcttcattut

SEQ ID NO: 94881 - DNA, 28 bp, Artificial Sequence
  Synthetic
cctgtaagaucagcactttaaagggaut

SEQ ID NO: 94882 - DNA, 23 bp, Artificial Sequence
  Synthetic
accctttgucacacgtaucacac

SEQ ID NO: 94883 - DNA, 21 bp, Artificial Sequence
  Synthetic
gtgcagtucccaggactgaut

SEQ ID NO: 94884 - DNA, 25 bp, Artificial Sequence
  Synthetic
ggatatgcugaactaagtugccaca

SEQ ID NO: 94885 - DNA, 21 bp, Artificial Sequence
  Synthetic
ccagagcagggutgagctuac

SEQ ID NO: 94886 - DNA, 23 bp, Artificial Sequence
  Synthetic
cgctgttgcutcttcttctcauc

SEQ ID NO: 94887 - DNA, 22 bp, Artificial Sequence
  Synthetic
acaaagtgucaccctgcaagut

SEQ ID NO: 94888 - DNA, 21 bp, Artificial Sequence
  Synthetic
gtgcttctuaccacccctguc

SEQ ID NO: 94889 - DNA, 23 bp, Artificial Sequence
  Synthetic
tggtatttgguagaggcgacgua

SEQ ID NO: 94890 - DNA, 26 bp, Artificial Sequence
  Synthetic
gtacaactgaugattccactuggaaa

SEQ ID NO: 94891 - DNA, 23 bp, Artificial Sequence
  Synthetic
cagttgcugcatgguagaaaacc

SEQ ID NO: 94892 - DNA, 21 bp, Artificial Sequence
  Synthetic
gtggttucagacacccucaca

SEQ ID NO: 94893 - DNA, 27 bp, Artificial Sequence
  Synthetic
gtgtaccugcaagtgggtaauaaaaga

SEQ ID NO: 94894 - DNA, 24 bp, Artificial Sequence
  Synthetic
caagaacttgaugaatgctguggt

SEQ ID NO: 94895 - DNA, 25 bp, Artificial Sequence
  Synthetic
tctcttcaccaauggctttttcuct

SEQ ID NO: 94896 - DNA, 21 bp, Artificial Sequence
  Synthetic
ctgtgaccutggagacugaca

SEQ ID NO: 94897 - DNA, 23 bp, Artificial Sequence
  Synthetic
tcauaaaggcattuggcaagggt

SEQ ID NO: 94898 - DNA, 25 bp, Artificial Sequence
  Synthetic
aaagaaattaccuctgcctgauccc

SEQ ID NO: 94899 - DNA, 27 bp, Artificial Sequence
  Synthetic
gcagaaaaagcuaaagctggagaacua

SEQ ID NO: 94900 - DNA, 26 bp, Artificial Sequence
  Synthetic
agtgctagccautagtaacauggaag

SEQ ID NO: 94901 - DNA, 26 bp, Artificial Sequence
  Synthetic
cagtatgtgaaaugtggctgacttug

SEQ ID NO: 94902 - DNA, 20 bp, Artificial Sequence
  Synthetic
ctttucagcgacagcggtut

SEQ ID NO: 94903 - DNA, 27 bp, Artificial Sequence
  Synthetic
cutatccttttugaggaagaggaagca

SEQ ID NO: 94904 - DNA, 21 bp, Artificial Sequence
  Synthetic
tgctgctccautgacgactut

SEQ ID NO: 94905 - DNA, 28 bp, Artificial Sequence
  Synthetic
gtgattgcgcuaatggtagaaaaauaca

SEQ ID NO: 94906 - DNA, 32 bp, Artificial Sequence
  Synthetic
ctaagtagtaacccuaaatttgattagctuca

SEQ ID NO: 94907 - DNA, 27 bp, Artificial Sequence
  Synthetic
tgtcttcacauactggatttugccaat

SEQ ID NO: 94908 - DNA, 23 bp, Artificial Sequence
  Synthetic
ttgcataccugaagatuggcaaa

SEQ ID NO: 94909 - DNA, 28 bp, Artificial Sequence
  Synthetic
ctgacattacaucctcatcttcttcuga

SEQ ID NO: 94910 - DNA, 28 bp, Artificial Sequence
  Synthetic
agtatcagatgaugaacaatcttgtcuc

SEQ ID NO: 94911 - DNA, 26 bp, Artificial Sequence
  Synthetic
agggaaaggagauagttgtgactcut

SEQ ID NO: 94912 - DNA, 28 bp, Artificial Sequence
  Synthetic
attggcaggcaaaugaauaaaagaacat

SEQ ID NO: 94913 - DNA, 26 bp, Artificial Sequence
  Synthetic
caattctcattguttcccagcatucc

SEQ ID NO: 94914 - DNA, 27 bp, Artificial Sequence
  Synthetic
gaagtaaaacuctgctcttucccagaa

SEQ ID NO: 94915 - DNA, 28 bp, Artificial Sequence
  Synthetic
tgaugatgcugaaagaaaacaagagaga

SEQ ID NO: 94916 - DNA, 28 bp, Artificial Sequence
  Synthetic
ttcttctctcuaccatatgctccatuct

SEQ ID NO: 94917 - DNA, 28 bp, Artificial Sequence
  Synthetic
tggaacaacugauggagaaaagaaaagt

SEQ ID NO: 94918 - DNA, 23 bp, Artificial Sequence
  Synthetic
cctgctgtgucatggaagaugaa

SEQ ID NO: 94919 - DNA, 23 bp, Artificial Sequence
  Synthetic
ggcagactuagatgctgtccaua

SEQ ID NO: 94920 - DNA, 28 bp, Artificial Sequence
  Synthetic
cctgttgacttcucagcataatcagaua

SEQ ID NO: 94921 - DNA, 27 bp, Artificial Sequence
  Synthetic
cttcatctgauggcactgaaaagtuac

SEQ ID NO: 94922 - DNA, 27 bp, Artificial Sequence
  Synthetic
ggaaaatgacaaauttcttctcgcuca

SEQ ID NO: 94923 - DNA, 26 bp, Artificial Sequence
  Synthetic
agagcgaugaaacttctgaagaugat

SEQ ID NO: 94924 - DNA, 28 bp, Artificial Sequence
  Synthetic
cgcctgagtcuttaaatcatacaaaguc

SEQ ID NO: 94925 - DNA, 27 bp, Artificial Sequence
  Synthetic
agattctgaugaaatgctagcaaucct

SEQ ID NO: 94926 - DNA, 27 bp, Artificial Sequence
  Synthetic
ctcttaattccaugatggtcgtgtcut

SEQ ID NO: 94927 - DNA, 26 bp, Artificial Sequence
  Synthetic
cucttctgaagaugagaaacacagca

SEQ ID NO: 94928 - DNA, 22 bp, Artificial Sequence
  Synthetic
gactcatccugctcacctctut

SEQ ID NO: 94929 - DNA, 27 bp, Artificial Sequence
  Synthetic
aggataagcgtaautcttctgacagug

SEQ ID NO: 94930 - DNA, 27 bp, Artificial Sequence
  Synthetic
gtttaaactgugtaggtggaauagcaa

SEQ ID NO: 94931 - DNA, 27 bp, Artificial Sequence
  Synthetic
tcuagcacaacaaagacacugaaacat

SEQ ID NO: 94932 - DNA, 27 bp, Artificial Sequence
  Synthetic
ctatagcacugtcagaagaatuacgct

SEQ ID NO: 94933 - DNA, 24 bp, Artificial Sequence
  Synthetic
agatccccacgugtaaagacuaca

SEQ ID NO: 94934 - DNA, 25 bp, Artificial Sequence
  Synthetic
cagttccctttutgctctgctttut

SEQ ID NO: 94935 - DNA, 27 bp, Artificial Sequence
  Synthetic
gcaagcatcucaaaaccaaaacatgua

SEQ ID NO: 94936 - DNA, 29 bp, Artificial Sequence
  Synthetic
gcttccctcaccuatagaattctgaucat

SEQ ID NO: 94937 - DNA, 24 bp, Artificial Sequence
  Synthetic
aaagaaggcagucattgucaagga

SEQ ID NO: 94938 - DNA, 19 bp, Artificial Sequence
  Synthetic
ttctgtcggucgccucaag

SEQ ID NO: 94939 - DNA, 21 bp, Artificial Sequence
  Synthetic
ttgtggtcugaaccccaagut

SEQ ID NO: 94940 - DNA, 19 bp, Artificial Sequence
  Synthetic
gcccucagcgagtucaaag

SEQ ID NO: 94941 - DNA, 21 bp, Artificial Sequence
  Synthetic
actggttcaguctgcccatut

SEQ ID NO: 94942 - DNA, 28 bp, Artificial Sequence
  Synthetic
gcttgttctuagggagtttctcttttuc

SEQ ID NO: 94943 - DNA, 27 bp, Artificial Sequence
  Synthetic
aaggaaatacaaaguggctcatcauca

SEQ ID NO: 94944 - DNA, 22 bp, Artificial Sequence
  Synthetic
agctcttagcugatttgcccut

SEQ ID NO: 94945 - DNA, 28 bp, Artificial Sequence
  Synthetic
gatgagtcacagutcttcttcagauact

SEQ ID NO: 94946 - DNA, 28 bp, Artificial Sequence
  Synthetic
gcaatatcagauaagccatcctgtacut

SEQ ID NO: 94947 - DNA, 22 bp, Artificial Sequence
  Synthetic
gcttccacugatggtgtcgaua

SEQ ID NO: 94948 - DNA, 27 bp, Artificial Sequence
  Synthetic
gatgatgaugagccactttgtattucc

SEQ ID NO: 94949 - DNA, 28 bp, Artificial Sequence
  Synthetic
ggaagagacaagautgttcatcatcuga

SEQ ID NO: 94950 - DNA, 23 bp, Artificial Sequence
  Synthetic
cctgtccaaguccacatttcuct

SEQ ID NO: 94951 - DNA, 26 bp, Artificial Sequence
  Synthetic
tcactcctgtutccctttctaatucc

SEQ ID NO: 94952 - DNA, 28 bp, Artificial Sequence
  Synthetic
atgatgagccacuttgtatttcctuagt

SEQ ID NO: 94953 - DNA, 26 bp, Artificial Sequence
  Synthetic
cutggaaagagtucaaggaagagaca

SEQ ID NO: 94954 - DNA, 28 bp, Artificial Sequence
  Synthetic
ttccaatgcaagaugagccttcttaaua

SEQ ID NO: 94955 - DNA, 24 bp, Artificial Sequence
  Synthetic
agccaacaugaactccagttaugt

SEQ ID NO: 94956 - DNA, 28 bp, Artificial Sequence
  Synthetic
caaatttgagaacugtagggtcattgug

SEQ ID NO: 94957 - DNA, 23 bp, Artificial Sequence
  Synthetic
tgtgcaccgcutactaggatcua

SEQ ID NO: 94958 - DNA, 19 bp, Artificial Sequence
  Synthetic
ctcgaccucgccgattcut

SEQ ID NO: 94959 - DNA, 20 bp, Artificial Sequence
  Synthetic
gggcgtacucaccttctucc

SEQ ID NO: 94960 - DNA, 27 bp, Artificial Sequence
  Synthetic
gatttctgaattauctgttgcctgcut

SEQ ID NO: 94961 - DNA, 28 bp, Artificial Sequence
  Synthetic
gaaattagatgatucctgttctggcuct

SEQ ID NO: 94962 - DNA, 26 bp, Artificial Sequence
  Synthetic
agtgcggaauaagagtaggtuacaga

SEQ ID NO: 94963 - DNA, 29 bp, Artificial Sequence
  Synthetic
cagttgutgcagcaaaauaagaagaagat

SEQ ID NO: 94964 - DNA, 28 bp, Artificial Sequence
  Synthetic
gagccagaacaggaaucatctaattuct

SEQ ID NO: 94965 - DNA, 28 bp, Artificial Sequence
  Synthetic
gagaattuagaacagttgtugcagcaaa

SEQ ID NO: 94966 - DNA, 28 bp, Artificial Sequence
  Synthetic
tcttcttcttatttugctgcaacaacug

SEQ ID NO: 94967 - DNA, 24 bp, Artificial Sequence
  Synthetic
ggtcgaaaggagutgtccacaaua

SEQ ID NO: 94968 - DNA, 22 bp, Artificial Sequence
  Synthetic
gactauacgccagcatgtuacc

SEQ ID NO: 94969 - DNA, 24 bp, Artificial Sequence
  Synthetic
gctgaagcagccuaatgtaccaut

SEQ ID NO: 94970 - DNA, 19 bp, Artificial Sequence
  Synthetic
cggcaggguctggguaaga

SEQ ID NO: 94971 - DNA, 20 bp, Artificial Sequence
  Synthetic
cgcttgtccucctccgagua

SEQ ID NO: 94972 - DNA, 28 bp, Artificial Sequence
  Synthetic
atggtgttuaaaagaagtaaccctucca

SEQ ID NO: 94973 - DNA, 23 bp, Artificial Sequence
  Synthetic
ggaaagaucgcctucaaccagag

SEQ ID NO: 94974 - DNA, 22 bp, Artificial Sequence
  Synthetic
agagcacgutcaucaagcagat

SEQ ID NO: 94975 - DNA, 21 bp, Artificial Sequence
  Synthetic
gctcacctugttctgctcgua

SEQ ID NO: 94976 - DNA, 29 bp, Artificial Sequence
  Synthetic
tggcttatcttugatacgtcgttcuaaaa

SEQ ID NO: 94977 - DNA, 28 bp, Artificial Sequence
  Synthetic
tgtgagtguaagccaataugaagaacaa

SEQ ID NO: 94978 - DNA, 18 bp, Artificial Sequence
  Synthetic
cgccaugcaggccaugat

SEQ ID NO: 94979 - DNA, 19 bp, Artificial Sequence
  Synthetic
caccaugcucaccaccaag

SEQ ID NO: 94980 - DNA, 26 bp, Artificial Sequence
  Synthetic
tgctttagtugcatcattgucagagt

SEQ ID NO: 94981 - DNA, 27 bp, Artificial Sequence
  Synthetic
tcaggccaautaattttatggtuccct

SEQ ID NO: 94982 - DNA, 21 bp, Artificial Sequence
  Synthetic
tcaccautgcttgtuggagga

SEQ ID NO: 94983 - DNA, 22 bp, Artificial Sequence
  Synthetic
cagatgtcccauccatgggtut

SEQ ID NO: 94984 - DNA, 24 bp, Artificial Sequence
  Synthetic
ccucacattctuccaccagagaag

SEQ ID NO: 94985 - DNA, 23 bp, Artificial Sequence
  Synthetic
cugggataaaagtugcagcaagg

SEQ ID NO: 94986 - DNA, 21 bp, Artificial Sequence
  Synthetic
gcaaccatucctgaaggcuga

SEQ ID NO: 94987 - DNA, 20 bp, Artificial Sequence
  Synthetic
ggcccccgauagagtttucc

SEQ ID NO: 94988 - DNA, 28 bp, Artificial Sequence
  Synthetic
tggccaaattugaaaattgatactgcut

SEQ ID NO: 94989 - DNA, 25 bp, Artificial Sequence
  Synthetic
cccccatctuaaagaacagacauga

SEQ ID NO: 94990 - DNA, 19 bp, Artificial Sequence
  Synthetic
gagtugaacccagccguga

SEQ ID NO: 94991 - DNA, 22 bp, Artificial Sequence
  Synthetic
tgtttcaggcccaucagtgtut

SEQ ID NO: 94992 - DNA, 28 bp, Artificial Sequence
  Synthetic
gcaauacgaccaacaagatcaauacaat

SEQ ID NO: 94993 - DNA, 28 bp, Artificial Sequence
  Synthetic
aggaaagugaacaaaagttgcaatucaa

SEQ ID NO: 94994 - DNA, 21 bp, Artificial Sequence
  Synthetic
ccattccagcccugagtctua

SEQ ID NO: 94995 - DNA, 21 bp, Artificial Sequence
  Synthetic
acttggttcucccctcuccag

SEQ ID NO: 94996 - DNA, 25 bp, Artificial Sequence
  Synthetic
gatttatuggaccacatgcugacac

SEQ ID NO: 94997 - DNA, 20 bp, Artificial Sequence
  Synthetic
tcgucuaaggcccagggaaa

SEQ ID NO: 94998 - DNA, 24 bp, Artificial Sequence
  Synthetic
tcttcacagcauttgataguggct

SEQ ID NO: 94999 - DNA, 27 bp, Artificial Sequence
  Synthetic
gcaggttcaauttgttttacttgugat

SEQ ID NO: 95000 - DNA, 19 bp, Artificial Sequence
  Synthetic
ggagcuccuacagaggcat

SEQ ID NO: 95001 - DNA, 21 bp, Artificial Sequence
  Synthetic
gtgccggaucctcaagaacut

SEQ ID NO: 95002 - DNA, 26 bp, Artificial Sequence
  Synthetic
tgatagagttgugagactgggtagut

SEQ ID NO: 95003 - DNA, 29 bp, Artificial Sequence
  Synthetic
tgaautagctaguagggagaagacagaag

SEQ ID NO: 95004 - DNA, 22 bp, Artificial Sequence
  Synthetic
gaggauggcatacagugacgag

SEQ ID NO: 95005 - DNA, 23 bp, Artificial Sequence
  Synthetic
cctgggtguctgtctcatuagga

SEQ ID NO: 95006 - DNA, 21 bp, Artificial Sequence
  Synthetic
ccccguccaaacaggactuat

SEQ ID NO: 95007 - DNA, 21 bp, Artificial Sequence
  Synthetic
gtaacugctggacuccccaag

SEQ ID NO: 95008 - DNA, 24 bp, Artificial Sequence
  Synthetic
gctttgtcacucagtcaggauact

SEQ ID NO: 95009 - DNA, 21 bp, Artificial Sequence
  Synthetic
gcctgacauccctgactcugt

SEQ ID NO: 95010 - DNA, 23 bp, Artificial Sequence
  Synthetic
ggttgattcugtggctacugacc

SEQ ID NO: 95011 - DNA, 27 bp, Artificial Sequence
  Synthetic
tctgggtgaauaatacagcattugcat

SEQ ID NO: 95012 - DNA, 23 bp, Artificial Sequence
  Synthetic
gcccaacucagtcttctgctuat

SEQ ID NO: 95013 - DNA, 27 bp, Artificial Sequence
  Synthetic
gaaaggaatcuttcaggacacugaagt

SEQ ID NO: 95014 - DNA, 29 bp, Artificial Sequence
  Synthetic
cgacacagaaatauttgtagctcacctut

SEQ ID NO: 95015 - DNA, 22 bp, Artificial Sequence
  Synthetic
ttgtttucagccagtcccucat

SEQ ID NO: 95016 - DNA, 21 bp, Artificial Sequence
  Synthetic
ggaccttcucaggctctcuga

SEQ ID NO: 95017 - DNA, 22 bp, Artificial Sequence
  Synthetic
gtaccacagaautgctgctucc

SEQ ID NO: 95018 - DNA, 25 bp, Artificial Sequence
  Synthetic
gtcctggattuttgcttctcatugg

SEQ ID NO: 95019 - DNA, 27 bp, Artificial Sequence
  Synthetic
cccccaaattugatcatgaatcctuct

SEQ ID NO: 95020 - DNA, 28 bp, Artificial Sequence
  Synthetic
ttcttagautgttcacgtucagacaact

SEQ ID NO: 95021 - DNA, 28 bp, Artificial Sequence
  Synthetic
caccgcaaguaatactgtttuaaagcaa

SEQ ID NO: 95022 - DNA, 22 bp, Artificial Sequence
  Synthetic
agaagttgutctaacgcugcct

SEQ ID NO: 95023 - DNA, 23 bp, Artificial Sequence
  Synthetic
gaactgtttggugtgcaaggtut

SEQ ID NO: 95024 - DNA, 27 bp, Artificial Sequence
  Synthetic
tcctctcatatcaauctgctggtagut

SEQ ID NO: 95025 - DNA, 22 bp, Artificial Sequence
  Synthetic
gctccagcagcaguacaaucag

SEQ ID NO: 95026 - DNA, 26 bp, Artificial Sequence
  Synthetic
tgataagtcattugttgctgttgcug

SEQ ID NO: 95027 - DNA, 25 bp, Artificial Sequence
  Synthetic
ttttgagacaggucatgcacttgua

SEQ ID NO: 95028 - DNA, 17 bp, Artificial Sequence
  Synthetic
gcggcgcutcucggaaa

SEQ ID NO: 95029 - DNA, 20 bp, Artificial Sequence
  Synthetic
gggaggauguggaggagacc

SEQ ID NO: 95030 - DNA, 17 bp, Artificial Sequence
  Synthetic
cgcugaggcuccaggac

SEQ ID NO: 95031 - DNA, 20 bp, Artificial Sequence
  Synthetic
tguccgcacgtucaagaaca

SEQ ID NO: 95032 - DNA, 20 bp, Artificial Sequence
  Synthetic
gctgcuctcaacaugcgagt

SEQ ID NO: 95033 - DNA, 20 bp, Artificial Sequence
  Synthetic
tccgcttgugtctccagtug

SEQ ID NO: 95034 - DNA, 22 bp, Artificial Sequence
  Synthetic
tctaccccucatgaagtugcct

SEQ ID NO: 95035 - DNA, 26 bp, Artificial Sequence
  Synthetic
ggattatguacaagccacttccuaca

SEQ ID NO: 95036 - DNA, 27 bp, Artificial Sequence
  Synthetic
ggagatggacuttgagtactuggagat

SEQ ID NO: 95037 - DNA, 20 bp, Artificial Sequence
  Synthetic
cccagctuggtaagcagcuc

SEQ ID NO: 95038 - DNA, 23 bp, Artificial Sequence
  Synthetic
ctttctcatcugtaccccacguc

SEQ ID NO: 95039 - DNA, 27 bp, Artificial Sequence
  Synthetic
gactccaatccuaacgaaaatgaucca

SEQ ID NO: 95040 - DNA, 24 bp, Artificial Sequence
  Synthetic
atttatuaaggcaccagccugagt

SEQ ID NO: 95041 - DNA, 27 bp, Artificial Sequence
  Synthetic
ggaaatgtugcttttgtcaugaagaag

SEQ ID NO: 95042 - DNA, 25 bp, Artificial Sequence
  Synthetic
cttauccagacaaatuccagggact

SEQ ID NO: 95043 - DNA, 21 bp, Artificial Sequence
  Synthetic
tgcctgucacaactugggaaa

SEQ ID NO: 95044 - DNA, 28 bp, Artificial Sequence
  Synthetic
gaaaagaatatatguggctatccgguga

SEQ ID NO: 95045 - DNA, 24 bp, Artificial Sequence
  Synthetic
cttgtacaugcaacctuggaaaca

SEQ ID NO: 95046 - DNA, 26 bp, Artificial Sequence
  Synthetic
ggaatccagutcagaaatcugagcaa

SEQ ID NO: 95047 - DNA, 27 bp, Artificial Sequence
  Synthetic
actgtgtcagtutgtaatggtaagugt

SEQ ID NO: 95048 - DNA, 23 bp, Artificial Sequence
  Synthetic
tggtccatcugtcaatccaucac

SEQ ID NO: 95049 - DNA, 28 bp, Artificial Sequence
  Synthetic
gaagtggagcautcatattgtaauccct

SEQ ID NO: 95050 - DNA, 21 bp, Artificial Sequence
  Synthetic
tgacaccucacttccttugcc

SEQ ID NO: 95051 - DNA, 22 bp, Artificial Sequence
  Synthetic
gcggccaagugttacacaaaut

SEQ ID NO: 95052 - DNA, 24 bp, Artificial Sequence
  Synthetic
acaaggtggtutaaatgtccccut

SEQ ID NO: 95053 - DNA, 22 bp, Artificial Sequence
  Synthetic
cagatgagcugaaggugacagt

SEQ ID NO: 95054 - DNA, 18 bp, Artificial Sequence
  Synthetic
gtccugcgaaggcactug

SEQ ID NO: 95055 - DNA, 21 bp, Artificial Sequence
  Synthetic
ttttcatuggcagccccacua

SEQ ID NO: 95056 - DNA, 22 bp, Artificial Sequence
  Synthetic
cttagcuccagggtgtcaacut

SEQ ID NO: 95057 - DNA, 22 bp, Artificial Sequence
  Synthetic
cucctgucgaaaagcgagaaga

SEQ ID NO: 95058 - DNA, 19 bp, Artificial Sequence
  Synthetic
cguccgcagagguagacaa

SEQ ID NO: 95059 - DNA, 19 bp, Artificial Sequence
  Synthetic
agcccguaagacugaccga

SEQ ID NO: 95060 - DNA, 20 bp, Artificial Sequence
  Synthetic
gggaaugcggagatguaggg

SEQ ID NO: 95061 - DNA, 20 bp, Artificial Sequence
  Synthetic
ctagtggguggcctctctug

SEQ ID NO: 95062 - DNA, 21 bp, Artificial Sequence
  Synthetic
tcgccaaagagcuacccatuc

SEQ ID NO: 95063 - DNA, 19 bp, Artificial Sequence
  Synthetic
gggagagcuatgggctguc

SEQ ID NO: 95064 - DNA, 28 bp, Artificial Sequence
  Synthetic
tttggcttttctucctccttcattttuc

SEQ ID NO: 95065 - DNA, 22 bp, Artificial Sequence
  Synthetic
aggagtttucggagctcttcuc

SEQ ID NO: 95066 - DNA, 20 bp, Artificial Sequence
  Synthetic
cttagccgaggcutcagcut

SEQ ID NO: 95067 - DNA, 24 bp, Artificial Sequence
  Synthetic
tcaguacagcaacaacatcuccac

SEQ ID NO: 95068 - DNA, 21 bp, Artificial Sequence
  Synthetic
acctctgugggacatccctua

SEQ ID NO: 95069 - DNA, 25 bp, Artificial Sequence
  Synthetic
cttgtatguagcgaacgcactttut

SEQ ID NO: 95070 - DNA, 17 bp, Artificial Sequence
  Synthetic
cgacggagggcguagug

SEQ ID NO: 95071 - DNA, 19 bp, Artificial Sequence
  Synthetic
cctugggcaagccucaaag

SEQ ID NO: 95072 - DNA, 25 bp, Artificial Sequence
  Synthetic
cgaacugatttcctucaaagacgag

SEQ ID NO: 95073 - DNA, 23 bp, Artificial Sequence
  Synthetic
cggaggagcugttttgattcgut

SEQ ID NO: 95074 - DNA, 27 bp, Artificial Sequence
  Synthetic
acttcccttguctgtggttagauaagt

SEQ ID NO: 95075 - DNA, 26 bp, Artificial Sequence
  Synthetic
aaccatgccaaaagutgtaccuagaa

SEQ ID NO: 95076 - DNA, 29 bp, Artificial Sequence
  Synthetic
gtcaaatcgtcuctagtcaatgaaucaga

SEQ ID NO: 95077 - DNA, 24 bp, Artificial Sequence
  Synthetic
cgattuctccccttucagcaacat

SEQ ID NO: 95078 - DNA, 23 bp, Artificial Sequence
  Synthetic
cctgtggcuactgtgtagttugt

SEQ ID NO: 95079 - DNA, 22 bp, Artificial Sequence
  Synthetic
ccatgcgttucactttcccuca

SEQ ID NO: 95080 - DNA, 26 bp, Artificial Sequence
  Synthetic
gataactctcucccctgtttcuagga

SEQ ID NO: 95081 - DNA, 22 bp, Artificial Sequence
  Synthetic
gtctgctcaguctgtgactugg

SEQ ID NO: 95082 - DNA, 18 bp, Artificial Sequence
  Synthetic
cccuccccgaacctgcua

SEQ ID NO: 95083 - DNA, 17 bp, Artificial Sequence
  Synthetic
ccttgugggtggccuca

SEQ ID NO: 95084 - DNA, 17 bp, Artificial Sequence
  Synthetic
gctgucgctcgucacca

SEQ ID NO: 95085 - DNA, 27 bp, Artificial Sequence
  Synthetic
aatgtagccacauggcacaaaatuaag

SEQ ID NO: 95086 - DNA, 27 bp, Artificial Sequence
  Synthetic
caattctagguacaacttttggcaugg

SEQ ID NO: 95087 - DNA, 23 bp, Artificial Sequence
  Synthetic
tgacucaggtctgtuagggaact

SEQ ID NO: 95088 - DNA, 18 bp, Artificial Sequence
  Synthetic
aggcaccguggcuagaga

SEQ ID NO: 95089 - DNA, 19 bp, Artificial Sequence
  Synthetic
cctgtccuctacccuggca

SEQ ID NO: 95090 - DNA, 19 bp, Artificial Sequence
  Synthetic
ggttggccccugaggttug

SEQ ID NO: 95091 - DNA, 24 bp, Artificial Sequence
  Synthetic
ccttatcuacaggaccagtcctug

SEQ ID NO: 95092 - DNA, 23 bp, Artificial Sequence
  Synthetic
ctctacctgcuccactctacuca

SEQ ID NO: 95093 - DNA, 20 bp, Artificial Sequence
  Synthetic
agaagcuacuccgggcaaag

SEQ ID NO: 95094 - DNA, 19 bp, Artificial Sequence
  Synthetic
gatgguggaggtgugggat

SEQ ID NO: 95095 - DNA, 18 bp, Artificial Sequence
  Synthetic
gggcugccaaccucaact

SEQ ID NO: 95096 - DNA, 28 bp, Artificial Sequence
  Synthetic
ggacatugaaaaagaacaaagucacagt

SEQ ID NO: 95097 - DNA, 21 bp, Artificial Sequence
  Synthetic
ctgcacautcttggcugcaaa

SEQ ID NO: 95098 - DNA, 23 bp, Artificial Sequence
  Synthetic
tttcccagtuggagtcattcgut

SEQ ID NO: 95099 - DNA, 22 bp, Artificial Sequence
  Synthetic
ggcaggcaaaaggutcaagaug

SEQ ID NO: 95100 - DNA, 20 bp, Artificial Sequence
  Synthetic
cugtctgtgguccagggaag

SEQ ID NO: 95101 - DNA, 20 bp, Artificial Sequence
  Synthetic
cagcuacaggcactccucat

SEQ ID NO: 95102 - DNA, 33 bp, Artificial Sequence
  Synthetic
caaatgctaatacuaaaaatgagatacctucct

SEQ ID NO: 95103 - DNA, 26 bp, Artificial Sequence
  Synthetic
gacaagagucgacacaatttuggaat

SEQ ID NO: 95104 - DNA, 28 bp, Artificial Sequence
  Synthetic
cagatttuaaaaccaccacttgctuact

SEQ ID NO: 95105 - DNA, 25 bp, Artificial Sequence
  Synthetic
gcaaagaatggcucaagaagtacug

SEQ ID NO: 95106 - DNA, 18 bp, Artificial Sequence
  Synthetic
ggcgtacugcctgacuct

SEQ ID NO: 95107 - DNA, 18 bp, Artificial Sequence
  Synthetic
tgggucagctucgagcac

SEQ ID NO: 95108 - DNA, 18 bp, Artificial Sequence
  Synthetic
gcccagcuctccccaaua

SEQ ID NO: 95109 - DNA, 19 bp, Artificial Sequence
  Synthetic
gugggagugggaaggaagg

SEQ ID NO: 95110 - DNA, 20 bp, Artificial Sequence
  Synthetic
cccagugctgagtugcacat

SEQ ID NO: 95111 - DNA, 20 bp, Artificial Sequence
  Synthetic
gagcccagucagugaagagg

SEQ ID NO: 95112 - DNA, 26 bp, Artificial Sequence
  Synthetic
gcatcaggaugctcctttaaatgugt

SEQ ID NO: 95113 - DNA, 26 bp, Artificial Sequence
  Synthetic
gaatttgtgccutgctcagtagttut

SEQ ID NO: 95114 - DNA, 27 bp, Artificial Sequence
  Synthetic
acccttttcttcutcattgctcttuca

SEQ ID NO: 95115 - DNA, 28 bp, Artificial Sequence
  Synthetic
gaacaugattctctttuggaccacaaag

SEQ ID NO: 95116 - DNA, 22 bp, Artificial Sequence
  Synthetic
gcaacaccucttttcccaucct

SEQ ID NO: 95117 - DNA, 28 bp, Artificial Sequence
  Synthetic
gatcagggatggaucgaactttaatcuc

SEQ ID NO: 95118 - DNA, 20 bp, Artificial Sequence
  Synthetic
cccctatuggctccccatug

SEQ ID NO: 95119 - DNA, 21 bp, Artificial Sequence
  Synthetic
ctggaccaggugaauggacag

SEQ ID NO: 95120 - DNA, 26 bp, Artificial Sequence
  Synthetic
gctgcttttcuttcttcttcagucaa

SEQ ID NO: 95121 - DNA, 29 bp, Artificial Sequence
  Synthetic
ttgtctcttattucaacccctcuaaacag

SEQ ID NO: 95122 - DNA, 28 bp, Artificial Sequence
  Synthetic
ggagaatgugatatttctgcauagggaa

SEQ ID NO: 95123 - DNA, 21 bp, Artificial Sequence
  Synthetic
gagccctgucagcaatgagua

SEQ ID NO: 95124 - DNA, 21 bp, Artificial Sequence
  Synthetic
gaggttccugcttgatgcuga

SEQ ID NO: 95125 - DNA, 20 bp, Artificial Sequence
  Synthetic
gggaucccccagacaaccua

SEQ ID NO: 95126 - DNA, 22 bp, Artificial Sequence
  Synthetic
caactcaccuccagctgtugat

SEQ ID NO: 95127 - DNA, 21 bp, Artificial Sequence
  Synthetic
gggacugaccatgcgttucaa

SEQ ID NO: 95128 - DNA, 24 bp, Artificial Sequence
  Synthetic
aagcatatcgcaugccactcuaat

SEQ ID NO: 95129 - DNA, 26 bp, Artificial Sequence
  Synthetic
gcctctacttcuacaggatctttugg

SEQ ID NO: 95130 - DNA, 20 bp, Artificial Sequence
  Synthetic
ctgctctggcutctgggtut

SEQ ID NO: 95131 - DNA, 18 bp, Artificial Sequence
  Synthetic
tcccucccacccauccag

SEQ ID NO: 95132 - DNA, 25 bp, Artificial Sequence
  Synthetic
gggtaaattggucccagttggtaug

SEQ ID NO: 95133 - DNA, 27 bp, Artificial Sequence
  Synthetic
cctggatctgagaaugtggattcttut

SEQ ID NO: 95134 - DNA, 25 bp, Artificial Sequence
  Synthetic
gggaatgaaguttccatgtcucaga

SEQ ID NO: 95135 - DNA, 25 bp, Artificial Sequence
  Synthetic
actgggccaagcauatattgaacug

SEQ ID NO: 95136 - DNA, 18 bp, Artificial Sequence
  Synthetic
ctucaggagccagucggt

SEQ ID NO: 95137 - DNA, 20 bp, Artificial Sequence
  Synthetic
ctggtccugcccagttcaut

SEQ ID NO: 95138 - DNA, 26 bp, Artificial Sequence
  Synthetic
ttcttggcaautttgaagttcugcaa

SEQ ID NO: 95139 - DNA, 23 bp, Artificial Sequence
  Synthetic
aattctgtuccacgacaggatuc

SEQ ID NO: 95140 - DNA, 20 bp, Artificial Sequence
  Synthetic
actcugccgctcccuaagat

SEQ ID NO: 95141 - DNA, 21 bp, Artificial Sequence
  Synthetic
gcaggatuggagggttcugag

SEQ ID NO: 95142 - DNA, 20 bp, Artificial Sequence
  Synthetic
agccagccacaaaugccuaa

SEQ ID NO: 95143 - DNA, 22 bp, Artificial Sequence
  Synthetic
agccattaccugttgctgcaua

SEQ ID NO: 95144 - DNA, 20 bp, Artificial Sequence
  Synthetic
tccaaccggcagcaauguat

SEQ ID NO: 95145 - DNA, 28 bp, Artificial Sequence
  Synthetic
gaacaaaaactcuaccaccattcctuac

SEQ ID NO: 95146 - DNA, 24 bp, Artificial Sequence
  Synthetic
tcccagtccuttctgtacattgug

SEQ ID NO: 95147 - DNA, 21 bp, Artificial Sequence
  Synthetic
ccatgucagctcgcttuccat

SEQ ID NO: 95148 - DNA, 23 bp, Artificial Sequence
  Synthetic
caccctgaguaacttggctaugt

SEQ ID NO: 95149 - DNA, 22 bp, Artificial Sequence
  Synthetic
cagugctaucacagaagcccat

SEQ ID NO: 95150 - DNA, 20 bp, Artificial Sequence
  Synthetic
ccgucaggagccctatguct

SEQ ID NO: 95151 - DNA, 28 bp, Artificial Sequence
  Synthetic
tccacagcuaagaagatcagtatctgua

SEQ ID NO: 95152 - DNA, 21 bp, Artificial Sequence
  Synthetic
ccaagttcagguccaggagut

SEQ ID NO: 95153 - DNA, 21 bp, Artificial Sequence
  Synthetic
gtaggaggcucccaagcttuc

SEQ ID NO: 95154 - DNA, 23 bp, Artificial Sequence
  Synthetic
ctgctgttcutgcctttctugat

SEQ ID NO: 95155 - DNA, 22 bp, Artificial Sequence
  Synthetic
ggccucaaacaagtcagtcugg

SEQ ID NO: 95156 - DNA, 21 bp, Artificial Sequence
  Synthetic
ccutcttgtcaucagggccaa

SEQ ID NO: 95157 - DNA, 21 bp, Artificial Sequence
  Synthetic
gtgtgtggcugacagaaacug

SEQ ID NO: 95158 - DNA, 21 bp, Artificial Sequence
  Synthetic
tgactcaccuggctcttucac

SEQ ID NO: 95159 - DNA, 22 bp, Artificial Sequence
  Synthetic
tggtaaagccugtgggtgagua

SEQ ID NO: 95160 - DNA, 19 bp, Artificial Sequence
  Synthetic
acatggaagguggcauggt

SEQ ID NO: 95161 - DNA, 18 bp, Artificial Sequence
  Synthetic
ccagcucatgcccuccag

SEQ ID NO: 95162 - DNA, 20 bp, Artificial Sequence
  Synthetic
tggucaggtuacgcagcaag

SEQ ID NO: 95163 - DNA, 25 bp, Artificial Sequence
  Synthetic
tgtctcagcuaaggacataggtuga

SEQ ID NO: 95164 - DNA, 22 bp, Artificial Sequence
  Synthetic
gggtccagacaugctactggua

SEQ ID NO: 95165 - DNA, 28 bp, Artificial Sequence
  Synthetic
cagtagtctcuagggtaaaccatgttut

SEQ ID NO: 95166 - DNA, 29 bp, Artificial Sequence
  Synthetic
tgtgagttattuaaaggcctaggcatauc

SEQ ID NO: 95167 - DNA, 26 bp, Artificial Sequence
  Synthetic
gatttggattuccaggaggtagucat

SEQ ID NO: 95168 - DNA, 20 bp, Artificial Sequence
  Synthetic
gctcttgacucggcatggua

SEQ ID NO: 95169 - DNA, 28 bp, Artificial Sequence
  Synthetic
atttggcaacatuttgtatgtacagtut

SEQ ID NO: 95170 - DNA, 17 bp, Artificial Sequence
  Synthetic
ggauggagccaggcgut

SEQ ID NO: 95171 - DNA, 17 bp, Artificial Sequence
  Synthetic
ccugcccaggccatguc

SEQ ID NO: 95172 - DNA, 29 bp, Artificial Sequence
  Synthetic
tttgagttcattcutgctgagtttgttut

SEQ ID NO: 95173 - DNA, 23 bp, Artificial Sequence
  Synthetic
caaaaucagcaaccggguaacag

SEQ ID NO: 95174 - DNA, 20 bp, Artificial Sequence
  Synthetic
aagagcccucatguggcaaa

SEQ ID NO: 95175 - DNA, 22 bp, Artificial Sequence
  Synthetic
gctcatugaggacctgtuggag

SEQ ID NO: 95176 - DNA, 21 bp, Artificial Sequence
  Synthetic
aggatagggugctcgctgaua

SEQ ID NO: 95177 - DNA, 24 bp, Artificial Sequence
  Synthetic
tctatccttccucactgcccuaag

SEQ ID NO: 95178 - DNA, 18 bp, Artificial Sequence
  Synthetic
cgaggcaacauggtucgg

SEQ ID NO: 95179 - DNA, 24 bp, Artificial Sequence
  Synthetic
actaaggaaggccaguagcaauct

SEQ ID NO: 95180 - DNA, 22 bp, Artificial Sequence
  Synthetic
gtttaccugcacacccugagaa

SEQ ID NO: 95181 - DNA, 23 bp, Artificial Sequence
  Synthetic
tccccauccaatcatgtgucaag

SEQ ID NO: 95182 - DNA, 21 bp, Artificial Sequence
  Synthetic
catccgccucataccugacat

SEQ ID NO: 95183 - DNA, 20 bp, Artificial Sequence
  Synthetic
aggatgccutccgagatgug

SEQ ID NO: 95184 - DNA, 22 bp, Artificial Sequence
  Synthetic
agattgctagacuccacccugt

SEQ ID NO: 95185 - DNA, 28 bp, Artificial Sequence
  Synthetic
tgaacgcaccutatagtaaacagttugt

SEQ ID NO: 95186 - DNA, 23 bp, Artificial Sequence
  Synthetic
gagacugagaggcagtgtttuca

SEQ ID NO: 95187 - DNA, 27 bp, Artificial Sequence
  Synthetic
gccaagctcuatgtctacatcaaugag

SEQ ID NO: 95188 - DNA, 22 bp, Artificial Sequence
  Synthetic
cggugctaugaaaggaggcaaa

SEQ ID NO: 95189 - DNA, 28 bp, Artificial Sequence
  Synthetic
ctccagttctcucaagtttacttgcuaa

SEQ ID NO: 95190 - DNA, 25 bp, Artificial Sequence
  Synthetic
ggcaaaacttgcutgtgtgtgtaua

SEQ ID NO: 95191 - DNA, 21 bp, Artificial Sequence
  Synthetic
cagctguacttagtccugcga

SEQ ID NO: 95192 - DNA, 20 bp, Artificial Sequence
  Synthetic
cgctccugtaacctgaugcc

SEQ ID NO: 95193 - DNA, 20 bp, Artificial Sequence
  Synthetic
gcatugagcggctcaucaac

SEQ ID NO: 95194 - DNA, 20 bp, Artificial Sequence
  Synthetic
ggcctugagaacagugcaga

SEQ ID NO: 95195 - DNA, 21 bp, Artificial Sequence
  Synthetic
gtgcccacuctctgttttugg

SEQ ID NO: 95196 - DNA, 21 bp, Artificial Sequence
  Synthetic
gcaatggagutggctgagugt

SEQ ID NO: 95197 - DNA, 29 bp, Artificial Sequence
  Synthetic
caggaccctacuagtcttttaatcttgut

SEQ ID NO: 95198 - DNA, 22 bp, Artificial Sequence
  Synthetic
gtactgcgaugacttggaguga

SEQ ID NO: 95199 - DNA, 29 bp, Artificial Sequence
  Synthetic
actcagaggtatcutcagttttccttgua

SEQ ID NO: 95200 - DNA, 23 bp, Artificial Sequence
  Synthetic
cccuagagaggatgtugcagaac

SEQ ID NO: 95201 - DNA, 23 bp, Artificial Sequence
  Synthetic
ttccccugaaccttctagtucct

SEQ ID NO: 95202 - DNA, 24 bp, Artificial Sequence
  Synthetic
ccccatagucagggaaggtaucag

SEQ ID NO: 95203 - DNA, 22 bp, Artificial Sequence
  Synthetic
cctcttugggcgactatgugag

SEQ ID NO: 95204 - DNA, 25 bp, Artificial Sequence
  Synthetic
tgctgtctgcaucttacaaagtuca

SEQ ID NO: 95205 - DNA, 20 bp, Artificial Sequence
  Synthetic
gatggcugactggttcucct

SEQ ID NO: 95206 - DNA, 26 bp, Artificial Sequence
  Synthetic
gataccactgtutcaggttcctcuaa

SEQ ID NO: 95207 - DNA, 28 bp, Artificial Sequence
  Synthetic
agacctgaaaaugtcttctgaagugaag

SEQ ID NO: 95208 - DNA, 23 bp, Artificial Sequence
  Synthetic
ggtcagugaagagcagtcttuca

SEQ ID NO: 95209 - DNA, 22 bp, Artificial Sequence
  Synthetic
gcugcaggaaaaggagtuggat

SEQ ID NO: 95210 - DNA, 28 bp, Artificial Sequence
  Synthetic
gcccggcctucattttcttaaataacua

SEQ ID NO: 95211 - DNA, 21 bp, Artificial Sequence
  Synthetic
tcaaacutguccacacagcgt

SEQ ID NO: 95212 - DNA, 26 bp, Artificial Sequence
  Synthetic
gutgtcctcgttauggagaaagaaga

SEQ ID NO: 95213 - DNA, 27 bp, Artificial Sequence
  Synthetic
tgtggcaatattuacctgtgtcttugt

SEQ ID NO: 95214 - DNA, 29 bp, Artificial Sequence
  Synthetic
atgctattccuaaagacattaugccacat

SEQ ID NO: 95215 - DNA, 18 bp, Artificial Sequence
  Synthetic
cagccucccucccaacac

SEQ ID NO: 95216 - DNA, 26 bp, Artificial Sequence
  Synthetic
cttcctgattgtuatgaggtggtgut

SEQ ID NO: 95217 - DNA, 27 bp, Artificial Sequence
  Synthetic
gcttttccagutaccaaaactcuagga

SEQ ID NO: 95218 - DNA, 28 bp, Artificial Sequence
  Synthetic
cacattcagatugttagaaaagcauagg

SEQ ID NO: 95219 - DNA, 24 bp, Artificial Sequence
  Synthetic
cctcagattcugatgaaaccucca

SEQ ID NO: 95220 - DNA, 27 bp, Artificial Sequence
  Synthetic
attttatgctcucccaataagcuccaa

SEQ ID NO: 95221 - DNA, 25 bp, Artificial Sequence
  Synthetic
gcatgcuacaaaagagcucaacaat

SEQ ID NO: 95222 - DNA, 26 bp, Artificial Sequence
  Synthetic
agcttaaactcauggaggtttcauca

SEQ ID NO: 95223 - DNA, 26 bp, Artificial Sequence
  Synthetic
ctcagctcgugccaattaacttatuc

SEQ ID NO: 95224 - DNA, 22 bp, Artificial Sequence
  Synthetic
agggcagcugaaatggttuagg

SEQ ID NO: 95225 - DNA, 26 bp, Artificial Sequence
  Synthetic
ccagttgugtattgtgaaauggcaat

SEQ ID NO: 95226 - DNA, 24 bp, Artificial Sequence
  Synthetic
gtctgggucatccaattcugagag

SEQ ID NO: 95227 - DNA, 21 bp, Artificial Sequence
  Synthetic
tctcctuggaccccacaaaug

SEQ ID NO: 95228 - DNA, 27 bp, Artificial Sequence
  Synthetic
gctcttctggacuaagtgttgatucat

SEQ ID NO: 95229 - DNA, 33 bp, Artificial Sequence
  Synthetic
tgataaactatuggtaagtgatacuagcagaaa

SEQ ID NO: 95230 - DNA, 28 bp, Artificial Sequence
  Synthetic
actgtagtccautcatttaaaacuggct

SEQ ID NO: 95231 - DNA, 23 bp, Artificial Sequence
  Synthetic
gaagccugacaggtgagatacug

SEQ ID NO: 95232 - DNA, 21 bp, Artificial Sequence
  Synthetic
caccagaaucactccccucaa

SEQ ID NO: 95233 - DNA, 22 bp, Artificial Sequence
  Synthetic
gagcatgaagauccccaacucc

SEQ ID NO: 95234 - DNA, 24 bp, Artificial Sequence
  Synthetic
cgacaaauacccacatgctgttut

SEQ ID NO: 95235 - DNA, 29 bp, Artificial Sequence
  Synthetic
gctgaugaagagaaacataaacgucaaat

SEQ ID NO: 95236 - DNA, 21 bp, Artificial Sequence
  Synthetic
ccagtucacgcagtcgtcaut

SEQ ID NO: 95237 - DNA, 25 bp, Artificial Sequence
  Synthetic
caaaaatacaggugaaccctuggac

SEQ ID NO: 95238 - DNA, 21 bp, Artificial Sequence
  Synthetic
attugggcaaagccaaugcaa

SEQ ID NO: 95239 - DNA, 25 bp, Artificial Sequence
  Synthetic
gcccactttcugatgaggaatuaga

SEQ ID NO: 95240 - DNA, 27 bp, Artificial Sequence
  Synthetic
accttatatccutctgggaacauagca

SEQ ID NO: 95241 - DNA, 28 bp, Artificial Sequence
  Synthetic
gcttttcttgguaggtcacataaugagt

SEQ ID NO: 95242 - DNA, 19 bp, Artificial Sequence
  Synthetic
gccaagccugaagctgtuc

SEQ ID NO: 95243 - DNA, 33 bp, Artificial Sequence
  Synthetic
agcaaataataggatugatcttaactgtcttut

SEQ ID NO: 95244 - DNA, 23 bp, Artificial Sequence
  Synthetic
ccaatccagcugcattcattcuc

SEQ ID NO: 95245 - DNA, 27 bp, Artificial Sequence
  Synthetic
gcagaaaucaaagaacaatcugcagaa

SEQ ID NO: 95246 - DNA, 22 bp, Artificial Sequence
  Synthetic
tctcugggaacagcacctcaua

SEQ ID NO: 95247 - DNA, 26 bp, Artificial Sequence
  Synthetic
acttggctgauatgtttcttccaucc

SEQ ID NO: 95248 - DNA, 17 bp, Artificial Sequence
  Synthetic
ggcccacgaguccctug

SEQ ID NO: 95249 - DNA, 18 bp, Artificial Sequence
  Synthetic
cgguggcacacgugaagt

SEQ ID NO: 95250 - DNA, 24 bp, Artificial Sequence
  Synthetic
gacagcgacaagaucatctacuca

SEQ ID NO: 95251 - DNA, 18 bp, Artificial Sequence
  Synthetic
cgtgtcuccatcccguct

SEQ ID NO: 95252 - DNA, 23 bp, Artificial Sequence
  Synthetic
gcagcaaagauggauggaaagga

SEQ ID NO: 95253 - DNA, 26 bp, Artificial Sequence
  Synthetic
gggcagattttuccaattttacacut

SEQ ID NO: 95254 - DNA, 23 bp, Artificial Sequence
  Synthetic
ggatgaattucagggacccucaa

SEQ ID NO: 95255 - DNA, 19 bp, Artificial Sequence
  Synthetic
cgauacccccacugacgag

SEQ ID NO: 95256 - DNA, 29 bp, Artificial Sequence
  Synthetic
ttcctacttgggautttcagtcattucat

SEQ ID NO: 95257 - DNA, 27 bp, Artificial Sequence
  Synthetic
caccttguacaggaaaagacatttgug

SEQ ID NO: 95258 - DNA, 27 bp, Artificial Sequence
  Synthetic
caggtttggaguctaaaaagtuaccca

SEQ ID NO: 95259 - DNA, 26 bp, Artificial Sequence
  Synthetic
tttaacaagatgcutctcggagtuct

SEQ ID NO: 95260 - DNA, 21 bp, Artificial Sequence
  Synthetic
cttggcaugcaacguacagag

SEQ ID NO: 95261 - DNA, 24 bp, Artificial Sequence
  Synthetic
ccagtgtgcuctctaggatttgut

SEQ ID NO: 95262 - DNA, 26 bp, Artificial Sequence
  Synthetic
tggtgatacaauggcacaacatuaca

SEQ ID NO: 95263 - DNA, 28 bp, Artificial Sequence
  Synthetic
ctcagcucaaagaagagtatatcugcat

SEQ ID NO: 95264 - DNA, 28 bp, Artificial Sequence
  Synthetic
cttcagauacagggaaagtaaagtugga

SEQ ID NO: 95265 - DNA, 27 bp, Artificial Sequence
  Synthetic
tgatgtttctguctcctttggaguaac

SEQ ID NO: 95266 - DNA, 26 bp, Artificial Sequence
  Synthetic
caagtttgaatucagatgtgccucag

SEQ ID NO: 95267 - DNA, 25 bp, Artificial Sequence
  Synthetic
catttguagaccgaacgtcagauga

SEQ ID NO: 95268 - DNA, 22 bp, Artificial Sequence
  Synthetic
gctggucagacagttcagcuaa

SEQ ID NO: 95269 - DNA, 22 bp, Artificial Sequence
  Synthetic
tgactgacaguaggaggtgguc

SEQ ID NO: 95270 - DNA, 26 bp, Artificial Sequence
  Synthetic
caaccaatctucaaatctgacugcaa

SEQ ID NO: 95271 - DNA, 26 bp, Artificial Sequence
  Synthetic
acttcacaaggaautggagcttuact

SEQ ID NO: 95272 - DNA, 24 bp, Artificial Sequence
  Synthetic
tcagctcccaggugtttacaauac

SEQ ID NO: 95273 - DNA, 28 bp, Artificial Sequence
  Synthetic
tcagcaatgcctuctctttacctagaua

SEQ ID NO: 95274 - DNA, 27 bp, Artificial Sequence
  Synthetic
gaacataccagcaugtacttcuacagt

SEQ ID NO: 95275 - DNA, 28 bp, Artificial Sequence
  Synthetic
tgagacaatattggaugcagaagttgut

SEQ ID NO: 95276 - DNA, 22 bp, Artificial Sequence
  Synthetic
gtctuccagagcaagggcauat

SEQ ID NO: 95277 - DNA, 26 bp, Artificial Sequence
  Synthetic
gattttgattucacgaatggctguga

SEQ ID NO: 95278 - DNA, 23 bp, Artificial Sequence
  Synthetic
aagtatcccatuctcctgcccua

SEQ ID NO: 95279 - DNA, 28 bp, Artificial Sequence
  Synthetic
gggtcactgatugtaacaattctaacuc

SEQ ID NO: 95280 - DNA, 22 bp, Artificial Sequence
  Synthetic
tcctcuacccctcaaucacagg

SEQ ID NO: 95281 - DNA, 22 bp, Artificial Sequence
  Synthetic
tgcattcgacugttgaggtuga

SEQ ID NO: 95282 - DNA, 24 bp, Artificial Sequence
  Synthetic
aatgctccagugactgtcatucaa

SEQ ID NO: 95283 - DNA, 22 bp, Artificial Sequence
  Synthetic
caggttguggccctgtactaug

SEQ ID NO: 95284 - DNA, 23 bp, Artificial Sequence
  Synthetic
caaugagaaagagggctucccaa

SEQ ID NO: 95285 - DNA, 28 bp, Artificial Sequence
  Synthetic
ccagtctacccugtaaaaatgtgatuct

SEQ ID NO: 95286 - DNA, 27 bp, Artificial Sequence
  Synthetic
cagtcgcaggaautccaaataaaguag

SEQ ID NO: 95287 - DNA, 22 bp, Artificial Sequence
  Synthetic
gttggtggaugctgttgcttut

SEQ ID NO: 95288 - DNA, 20 bp, Artificial Sequence
  Synthetic
gctcaautacggcuccagca

SEQ ID NO: 95289 - DNA, 23 bp, Artificial Sequence
  Synthetic
ggacaggccugcttccaaattua

SEQ ID NO: 95290 - DNA, 28 bp, Artificial Sequence
  Synthetic
gctaaagtagcaauagaaagtgctgtuc

SEQ ID NO: 95291 - DNA, 25 bp, Artificial Sequence
  Synthetic
agatgagacauggaaaacagugcat

SEQ ID NO: 95292 - DNA, 22 bp, Artificial Sequence
  Synthetic
tcauagcacccccacagtaugt

SEQ ID NO: 95293 - DNA, 20 bp, Artificial Sequence
  Synthetic
ccctacccutgaggcttgug

SEQ ID NO: 95294 - DNA, 23 bp, Artificial Sequence
  Synthetic
ccccaacaaguacagaugcaagt

SEQ ID NO: 95295 - DNA, 22 bp, Artificial Sequence
  Synthetic
gcttaccaccuggtgtugaagg

SEQ ID NO: 95296 - DNA, 26 bp, Artificial Sequence
  Synthetic
ggaaagggaaauagugaagagaggaa

SEQ ID NO: 95297 - DNA, 26 bp, Artificial Sequence
  Synthetic
ctgggagcaucacaatcatatucaac

SEQ ID NO: 95298 - DNA, 25 bp, Artificial Sequence
  Synthetic
ctgccgagacutatcuaaaccagaa

SEQ ID NO: 95299 - DNA, 28 bp, Artificial Sequence
  Synthetic
ggtaccacaguacaatattgcacuacaa

SEQ ID NO: 95300 - DNA, 26 bp, Artificial Sequence
  Synthetic
ctccacagagutctgttgtucagaat

SEQ ID NO: 95301 - DNA, 24 bp, Artificial Sequence
  Synthetic
gtcctgguaccactgtgtgtaaug

SEQ ID NO: 95302 - DNA, 20 bp, Artificial Sequence
  Synthetic
ttctgctuccgaaacguggt

SEQ ID NO: 95303 - DNA, 22 bp, Artificial Sequence
  Synthetic
aatagctgcugagctggagtut

SEQ ID NO: 95304 - DNA, 24 bp, Artificial Sequence
  Synthetic
ttactattgcuggtgtcccaaguc

SEQ ID NO: 95305 - DNA, 20 bp, Artificial Sequence
  Synthetic
tgttgagcuggctggctuac

SEQ ID NO: 95306 - DNA, 25 bp, Artificial Sequence
  Synthetic
ccatctgtaatuccacagcagtcuc

SEQ ID NO: 95307 - DNA, 25 bp, Artificial Sequence
  Synthetic
ggtgattaacugttgaccctgugaa

SEQ ID NO: 95308 - DNA, 20 bp, Artificial Sequence
  Synthetic
aguaaccaagccgcaggtut

SEQ ID NO: 95309 - DNA, 23 bp, Artificial Sequence
  Synthetic
tgagatcaguggacctggcaaua

SEQ ID NO: 95310 - DNA, 23 bp, Artificial Sequence
  Synthetic
caacccaacaaagcguagtgaut

SEQ ID NO: 95311 - DNA, 28 bp, Artificial Sequence
  Synthetic
gaagatggagutatgttaggttguccag

SEQ ID NO: 95312 - DNA, 26 bp, Artificial Sequence
  Synthetic
cagttgctgguactaatctgctguaa

SEQ ID NO: 95313 - DNA, 28 bp, Artificial Sequence
  Synthetic
ggcagtatttgtucagaagatgactgua

SEQ ID NO: 95314 - DNA, 29 bp, Artificial Sequence
  Synthetic
ctgggttctgcutctcaactagtttatua

SEQ ID NO: 95315 - DNA, 20 bp, Artificial Sequence
  Synthetic
ctgcugccaaaggagacuca

SEQ ID NO: 95316 - DNA, 21 bp, Artificial Sequence
  Synthetic
gctgccauattgggaguggat

SEQ ID NO: 95317 - DNA, 22 bp, Artificial Sequence
  Synthetic
tcagauataacugccccaccga

SEQ ID NO: 95318 - DNA, 27 bp, Artificial Sequence
  Synthetic
caacaagtgttucagaagttcatuccc

SEQ ID NO: 95319 - DNA, 25 bp, Artificial Sequence
  Synthetic
gcctaaatuggaggaacagaauggt

SEQ ID NO: 95320 - DNA, 23 bp, Artificial Sequence
  Synthetic
ggtagtttcugagatgccuggag

SEQ ID NO: 95321 - DNA, 28 bp, Artificial Sequence
  Synthetic
ccaatcgctcautcagttgtattcugat

SEQ ID NO: 95322 - DNA, 25 bp, Artificial Sequence
  Synthetic
ctacagcgttuccttctacctuact

SEQ ID NO: 95323 - DNA, 28 bp, Artificial Sequence
  Synthetic
caaatcaacagacguatgcaaatucaga

SEQ ID NO: 95324 - DNA, 24 bp, Artificial Sequence
  Synthetic
tggtggattcugcatcatcatcuc

SEQ ID NO: 95325 - DNA, 25 bp, Artificial Sequence
  Synthetic
agtagctaauagcagtctcccaugt

SEQ ID NO: 95326 - DNA, 23 bp, Artificial Sequence
  Synthetic
ccttcgctcautagtctgcauga

SEQ ID NO: 95327 - DNA, 25 bp, Artificial Sequence
  Synthetic
ccttctacagtuccgacttacctug

SEQ ID NO: 95328 - DNA, 28 bp, Artificial Sequence
  Synthetic
gtgtccatgggutatagtagaatctugg

SEQ ID NO: 95329 - DNA, 24 bp, Artificial Sequence
  Synthetic
tuttcttctgugaagcagggacat

SEQ ID NO: 95330 - DNA, 27 bp, Artificial Sequence
  Synthetic
acccttatctguaaaagtctgagucct

SEQ ID NO: 95331 - DNA, 24 bp, Artificial Sequence
  Synthetic
cauattactcaccugcgaccacat

SEQ ID NO: 95332 - DNA, 24 bp, Artificial Sequence
  Synthetic
gtttccauggagagcttgtcuact

SEQ ID NO: 95333 - DNA, 21 bp, Artificial Sequence
  Synthetic
caagagtcgguggaaccaguc

SEQ ID NO: 95334 - DNA, 22 bp, Artificial Sequence
  Synthetic
cattgccuccacatggcttuag

SEQ ID NO: 95335 - DNA, 27 bp, Artificial Sequence
  Synthetic
gctaatttacugcaagtcgagagguat

SEQ ID NO: 95336 - DNA, 27 bp, Artificial Sequence
  Synthetic
tgtttcucgagcagaaatgtattcuga

SEQ ID NO: 95337 - DNA, 28 bp, Artificial Sequence
  Synthetic
aagagatgttguaagtgacgtaaaugga

SEQ ID NO: 95338 - DNA, 24 bp, Artificial Sequence
  Synthetic
agtgactgcaucttggctttuact

SEQ ID NO: 95339 - DNA, 22 bp, Artificial Sequence
  Synthetic
gtattcucagagcaggcagcua

SEQ ID NO: 95340 - DNA, 25 bp, Artificial Sequence
  Synthetic
gggtccuagaggttgcataaaauca

SEQ ID NO: 95341 - DNA, 26 bp, Artificial Sequence
  Synthetic
aggtagauagacaaagagcttugcag

SEQ ID NO: 95342 - DNA, 22 bp, Artificial Sequence
  Synthetic
agctggucccagaaagattucc

SEQ ID NO: 95343 - DNA, 26 bp, Artificial Sequence
  Synthetic
aattaattcacccuccacccaaacut

SEQ ID NO: 95344 - DNA, 25 bp, Artificial Sequence
  Synthetic
catctttattagcugcctgctcuga

SEQ ID NO: 95345 - DNA, 28 bp, Artificial Sequence
  Synthetic
gtgatgattugcccttactcauacaaaa

SEQ ID NO: 95346 - DNA, 22 bp, Artificial Sequence
  Synthetic
gctgctccauttccatcctcug

SEQ ID NO: 95347 - DNA, 21 bp, Artificial Sequence
  Synthetic
accaccaccucgggtagaaut

SEQ ID NO: 95348 - DNA, 24 bp, Artificial Sequence
  Synthetic
gtaccggcugtgtttattcugaga

SEQ ID NO: 95349 - DNA, 21 bp, Artificial Sequence
  Synthetic
ggagagtgugctggatucaca

SEQ ID NO: 95350 - DNA, 26 bp, Artificial Sequence
  Synthetic
gacttgaggcautgttattucagcat

SEQ ID NO: 95351 - DNA, 25 bp, Artificial Sequence
  Synthetic
cagaaaagugcaccaaaccagatuc

SEQ ID NO: 95352 - DNA, 22 bp, Artificial Sequence
  Synthetic
ggaugggaggaauaggaggcat

SEQ ID NO: 95353 - DNA, 24 bp, Artificial Sequence
  Synthetic
gtcattgtccccutctttcacuca

SEQ ID NO: 95354 - DNA, 24 bp, Artificial Sequence
  Synthetic
gaccatgactuaatgggactgcua

SEQ ID NO: 95355 - DNA, 25 bp, Artificial Sequence
  Synthetic
ccgatgcaggaaautctttttguga

SEQ ID NO: 95356 - DNA, 24 bp, Artificial Sequence
  Synthetic
gtcccatgucccatgaatcuaagg

SEQ ID NO: 95357 - DNA, 20 bp, Artificial Sequence
  Synthetic
actttcugacggccatuggg

SEQ ID NO: 95358 - DNA, 27 bp, Artificial Sequence
  Synthetic
acagctaauggaaggattggaatacug

SEQ ID NO: 95359 - DNA, 27 bp, Artificial Sequence
  Synthetic
acuaaaaaggucagaggagaagaggaa

SEQ ID NO: 95360 - DNA, 22 bp, Artificial Sequence
  Synthetic
agaaaagcaacuggatgcgcua

SEQ ID NO: 95361 - DNA, 21 bp, Artificial Sequence
  Synthetic
tgcaaagucccgacaauacca

SEQ ID NO: 95362 - DNA, 20 bp, Artificial Sequence
  Synthetic
gggttgcuttttggagugct

SEQ ID NO: 95363 - DNA, 21 bp, Artificial Sequence
  Synthetic
gtgacgcuctctgctgtuaga

SEQ ID NO: 95364 - DNA, 21 bp, Artificial Sequence
  Synthetic
agggcaaccuccacattcauc

SEQ ID NO: 95365 - DNA, 23 bp, Artificial Sequence
  Synthetic
gtttctgtcaugaggagggugac

SEQ ID NO: 95366 - DNA, 28 bp, Artificial Sequence
  Synthetic
actttcacuaaagggattgttgtcauca

SEQ ID NO: 95367 - DNA, 23 bp, Artificial Sequence
  Synthetic
ctcctagaatucagcccccaaut

SEQ ID NO: 95368 - DNA, 22 bp, Artificial Sequence
  Synthetic
tggaggagcutctggaacttug

SEQ ID NO: 95369 - DNA, 21 bp, Artificial Sequence
  Synthetic
ggtcaccaaccccaugtctut

SEQ ID NO: 95370 - DNA, 21 bp, Artificial Sequence
  Synthetic
ggtcaguccccctuacaagga

SEQ ID NO: 95371 - DNA, 19 bp, Artificial Sequence
  Synthetic
cgaucgcccgctguaagag

SEQ ID NO: 95372 - DNA, 20 bp, Artificial Sequence
  Synthetic
cagguccaggtucagcagac

SEQ ID NO: 95373 - DNA, 22 bp, Artificial Sequence
  Synthetic
ggcagagttuatggagcagcut

SEQ ID NO: 95374 - DNA, 28 bp, Artificial Sequence
  Synthetic
gctggtguacaagtttttattgguaact

SEQ ID NO: 95375 - DNA, 21 bp, Artificial Sequence
  Synthetic
tctggccauactagccctgut

SEQ ID NO: 95376 - DNA, 21 bp, Artificial Sequence
  Synthetic
gccaaccaggaacutcttgug

SEQ ID NO: 95377 - DNA, 25 bp, Artificial Sequence
  Synthetic
cagaaccgacautactggcatttut

SEQ ID NO: 95378 - DNA, 19 bp, Artificial Sequence
  Synthetic
gtctcgcgguaccttguca

SEQ ID NO: 95379 - DNA, 21 bp, Artificial Sequence
  Synthetic
gtgaagatucccgtcctccuc

SEQ ID NO: 95380 - DNA, 20 bp, Artificial Sequence
  Synthetic
ccgcugagcuagcaaggaat

SEQ ID NO: 95381 - DNA, 23 bp, Artificial Sequence
  Synthetic
ctttcttacccugtgtcttugcc

SEQ ID NO: 95382 - DNA, 24 bp, Artificial Sequence
  Synthetic
cccattcttacutccctgggauca

SEQ ID NO: 95383 - DNA, 28 bp, Artificial Sequence
  Synthetic
gagactaggaacuctagacttcccttut

SEQ ID NO: 95384 - DNA, 26 bp, Artificial Sequence
  Synthetic
ccgggacutactaaaagcuaaacaga

SEQ ID NO: 95385 - DNA, 20 bp, Artificial Sequence
  Synthetic
ttgctgcugcttttggcuac

SEQ ID NO: 95386 - DNA, 22 bp, Artificial Sequence
  Synthetic
cgtccagcuacgaaagaagugg

SEQ ID NO: 95387 - DNA, 28 bp, Artificial Sequence
  Synthetic
cctaaaugaggaaggactgtuagacaaa

SEQ ID NO: 95388 - DNA, 21 bp, Artificial Sequence
  Synthetic
cggcataaguccaaacacucc

SEQ ID NO: 95389 - DNA, 21 bp, Artificial Sequence
  Synthetic
tcgttctcccutcggtcuagt

SEQ ID NO: 95390 - DNA, 23 bp, Artificial Sequence
  Synthetic
gtgtctctcuggtgccatctuaa

SEQ ID NO: 95391 - DNA, 28 bp, Artificial Sequence
  Synthetic
attcttctagttgcugaggaaacgtauc

SEQ ID NO: 95392 - DNA, 23 bp, Artificial Sequence
  Synthetic
gcactccuttccatttctugagg

SEQ ID NO: 95393 - DNA, 23 bp, Artificial Sequence
  Synthetic
ctactgagcccutggttgaacut

SEQ ID NO: 95394 - DNA, 20 bp, Artificial Sequence
  Synthetic
ctccgaugacatggcctuca

SEQ ID NO: 95395 - DNA, 22 bp, Artificial Sequence
  Synthetic
tgctggagacutcttggcttut

SEQ ID NO: 95396 - DNA, 24 bp, Artificial Sequence
  Synthetic
aggagacugatgactaugggaagg

SEQ ID NO: 95397 - DNA, 26 bp, Artificial Sequence
  Synthetic
ccactgttttguaacttttgggtgut

SEQ ID NO: 95398 - DNA, 25 bp, Artificial Sequence
  Synthetic
agatgaaguggaaggttttcugcaa

SEQ ID NO: 95399 - DNA, 22 bp, Artificial Sequence
  Synthetic
aggcatgugagggatgaatcuc

SEQ ID NO: 95400 - DNA, 26 bp, Artificial Sequence
  Synthetic
cggaguaaaagtcaucgaaaaaggga

SEQ ID NO: 95401 - DNA, 25 bp, Artificial Sequence
  Synthetic
agatcgtgagggacuaaggtcauaa

SEQ ID NO: 95402 - DNA, 21 bp, Artificial Sequence
  Synthetic
gggagcutcttauggccaaga

SEQ ID NO: 95403 - DNA, 19 bp, Artificial Sequence
  Synthetic
cuggactgguaggccgaag

SEQ ID NO: 95404 - DNA, 24 bp, Artificial Sequence
  Synthetic
tcatcacuccagaaagcttuggaa

SEQ ID NO: 95405 - DNA, 20 bp, Artificial Sequence
  Synthetic
ccaaggcuaagcaggagguc

SEQ ID NO: 95406 - DNA, 21 bp, Artificial Sequence
  Synthetic
aatgggccucatgtguaccag

SEQ ID NO: 95407 - DNA, 28 bp, Artificial Sequence
  Synthetic
acatggtgacataugcttcttcttgaut

SEQ ID NO: 95408 - DNA, 23 bp, Artificial Sequence
  Synthetic
gggagagaaaagugagugaaagg

SEQ ID NO: 95409 - DNA, 27 bp, Artificial Sequence
  Synthetic
ctgactacttcuttcttcctctuccag

SEQ ID NO: 95410 - DNA, 23 bp, Artificial Sequence
  Synthetic
gaaatgtgttgguggctgttgut

SEQ ID NO: 95411 - DNA, 20 bp, Artificial Sequence
  Synthetic
actgcacaaggccugctaug

SEQ ID NO: 95412 - DNA, 24 bp, Artificial Sequence
  Synthetic
ctcttgctctuagctcctccuact

SEQ ID NO: 95413 - DNA, 24 bp, Artificial Sequence
  Synthetic
gtgcgtuactcacctgugaaaaat

SEQ ID NO: 95414 - DNA, 27 bp, Artificial Sequence
  Synthetic
cccaaagauaaaaagacaauggcaaca

SEQ ID NO: 95415 - DNA, 21 bp, Artificial Sequence
  Synthetic
ggcauaaggtucgggaagagg

SEQ ID NO: 95416 - DNA, 24 bp, Artificial Sequence
  Synthetic
tgacaactcugcaacatcttccuc

SEQ ID NO: 95417 - DNA, 25 bp, Artificial Sequence
  Synthetic
gagtctuccttcttgtucgaaacca

SEQ ID NO: 95418 - DNA, 20 bp, Artificial Sequence
  Synthetic
agagtugcccacgguaacaa

SEQ ID NO: 95419 - DNA, 25 bp, Artificial Sequence
  Synthetic
gctttggaugtaccgataatugcag

SEQ ID NO: 95420 - DNA, 28 bp, Artificial Sequence
  Synthetic
gacctaaagtcuccaatcatttctguga

SEQ ID NO: 95421 - DNA, 22 bp, Artificial Sequence
  Synthetic
gucagggagaaaauggccagat

SEQ ID NO: 95422 - DNA, 21 bp, Artificial Sequence
  Synthetic
ccaagacatgugcagctcauc

SEQ ID NO: 95423 - DNA, 21 bp, Artificial Sequence
  Synthetic
acgtcccagutcacctacugt

SEQ ID NO: 95424 - DNA, 21 bp, Artificial Sequence
  Synthetic
tuctgctttcuccagcccaaa

SEQ ID NO: 95425 - DNA, 26 bp, Artificial Sequence
  Synthetic
gacaacagtctuctcatcctcatuca

SEQ ID NO: 95426 - DNA, 22 bp, Artificial Sequence
  Synthetic
gtggaagagguggtgagctuaa

SEQ ID NO: 95427 - DNA, 20 bp, Artificial Sequence
  Synthetic
cagugcacagagguggaaag

SEQ ID NO: 95428 - DNA, 21 bp, Artificial Sequence
  Synthetic
cctcccgaaggutcatgcaut

SEQ ID NO: 95429 - DNA, 30 bp, Artificial Sequence
  Synthetic
cagaauggaagcatttttcuaaaagcaaag

SEQ ID NO: 95430 - DNA, 22 bp, Artificial Sequence
  Synthetic
gaagggaagcccccuagtauct

SEQ ID NO: 95431 - DNA, 21 bp, Artificial Sequence
  Synthetic
cagccaagcagcacuattuga

SEQ ID NO: 95432 - DNA, 21 bp, Artificial Sequence
  Synthetic
caggcaaguatcgagagugct

SEQ ID NO: 95433 - DNA, 23 bp, Artificial Sequence
  Synthetic
ccaagccaugctctcttcatuca

SEQ ID NO: 95434 - DNA, 25 bp, Artificial Sequence
  Synthetic
ggtatggtgtauacttgccctcuga

SEQ ID NO: 95435 - DNA, 24 bp, Artificial Sequence
  Synthetic
agagctttgtgucagctttgacut

SEQ ID NO: 95436 - DNA, 20 bp, Artificial Sequence
  Synthetic
gcagguccgcagtcagaauc

SEQ ID NO: 95437 - DNA, 22 bp, Artificial Sequence
  Synthetic
ggaccaagtugatgacaccuca

SEQ ID NO: 95438 - DNA, 24 bp, Artificial Sequence
  Synthetic
ttcaagtgacucctgcttcatuca

SEQ ID NO: 95439 - DNA, 21 bp, Artificial Sequence
  Synthetic
ttttcggucgtggatggugat

SEQ ID NO: 95440 - DNA, 21 bp, Artificial Sequence
  Synthetic
tcugcuccagcgaacaacaat

SEQ ID NO: 95441 - DNA, 28 bp, Artificial Sequence
  Synthetic
caggtacatgtgugctacatagtgtuaa

SEQ ID NO: 95442 - DNA, 23 bp, Artificial Sequence
  Synthetic
ggaatctgcuccttgggucagaa

SEQ ID NO: 95443 - DNA, 21 bp, Artificial Sequence
  Synthetic
gtcaccuggaggacaactugt

SEQ ID NO: 95444 - DNA, 21 bp, Artificial Sequence
  Synthetic
cgaattcgtugctcctctugt

SEQ ID NO: 95445 - DNA, 23 bp, Artificial Sequence
  Synthetic
ccttcttcucaggaggaaaucgg

SEQ ID NO: 95446 - DNA, 22 bp, Artificial Sequence
  Synthetic
cctgctcatcuggaaactccuc

SEQ ID NO: 95447 - DNA, 23 bp, Artificial Sequence
  Synthetic
gctgcttccacutaagagtcuca

SEQ ID NO: 95448 - DNA, 22 bp, Artificial Sequence
  Synthetic
cgaaauggaagccgtcaucagt

SEQ ID NO: 95449 - DNA, 20 bp, Artificial Sequence
  Synthetic
agctctgcaucgtctccuct

SEQ ID NO: 95450 - DNA, 22 bp, Artificial Sequence
  Synthetic
gaagaggaugtcauccggcaaa

SEQ ID NO: 95451 - DNA, 21 bp, Artificial Sequence
  Synthetic
tggctttcuccctcttcccua

SEQ ID NO: 95452 - DNA, 23 bp, Artificial Sequence
  Synthetic
gttggcucaaaagcugggaaaaa

SEQ ID NO: 95453 - DNA, 28 bp, Artificial Sequence
  Synthetic
atctcacattuccaagtacattcucagg

SEQ ID NO: 95454 - DNA, 21 bp, Artificial Sequence
  Synthetic
tgggatacucacaggtcucca

SEQ ID NO: 95455 - DNA, 20 bp, Artificial Sequence
  Synthetic
gctcaaguggtcctgucgaa

SEQ ID NO: 95456 - DNA, 21 bp, Artificial Sequence
  Synthetic
ccctgttcuccctgatuggaa

SEQ ID NO: 95457 - DNA, 20 bp, Artificial Sequence
  Synthetic
cugagaccgucaccaagacc

SEQ ID NO: 95458 - DNA, 23 bp, Artificial Sequence
  Synthetic
ggccgagaugcagatgattctua

SEQ ID NO: 95459 - DNA, 22 bp, Artificial Sequence
  Synthetic
ccgaugtucaggacaacagcat

SEQ ID NO: 95460 - DNA, 27 bp, Artificial Sequence
  Synthetic
ctgattgcauacaagtcaatggcatut

SEQ ID NO: 95461 - DNA, 26 bp, Artificial Sequence
  Synthetic
ggcactgacuacaagatctacctgua

SEQ ID NO: 95462 - DNA, 22 bp, Artificial Sequence
  Synthetic
ccgagcatugtcattcaaggug

SEQ ID NO: 95463 - DNA, 25 bp, Artificial Sequence
  Synthetic
agaaaaatugcaggctagctugaga

SEQ ID NO: 95464 - DNA, 21 bp, Artificial Sequence
  Synthetic
gaaggcagccacutgacacua

SEQ ID NO: 95465 - DNA, 24 bp, Artificial Sequence
  Synthetic
cttgtccaaucttgtcuccaagga

SEQ ID NO: 95466 - DNA, 26 bp, Artificial Sequence
  Synthetic
gtcccaactguatccaaatctgctua

SEQ ID NO: 95467 - DNA, 26 bp, Artificial Sequence
  Synthetic
tggagtaagacagguccatcaaguag

SEQ ID NO: 95468 - DNA, 24 bp, Artificial Sequence
  Synthetic
ggaggattacccugtggacatcua

SEQ ID NO: 95469 - DNA, 22 bp, Artificial Sequence
  Synthetic
gacacaggcutgtccacaaaug

SEQ ID NO: 95470 - DNA, 20 bp, Artificial Sequence
  Synthetic
agtaaccugcggattggcut

SEQ ID NO: 95471 - DNA, 26 bp, Artificial Sequence
  Synthetic
gagctagaaauaggaaccaggactug

SEQ ID NO: 95472 - DNA, 24 bp, Artificial Sequence
  Synthetic
gtattcuggagccactagaccuct

SEQ ID NO: 95473 - DNA, 27 bp, Artificial Sequence
  Synthetic
cctggacccacacuttgaatatatuga

SEQ ID NO: 95474 - DNA, 21 bp, Artificial Sequence
  Synthetic
acaacccacaagggcutcauc

SEQ ID NO: 95475 - DNA, 26 bp, Artificial Sequence
  Synthetic
aaccacaattacacugattgcactuc

SEQ ID NO: 95476 - DNA, 21 bp, Artificial Sequence
  Synthetic
gtgucacgaaggcgtttucag

SEQ ID NO: 95477 - DNA, 20 bp, Artificial Sequence
  Synthetic
cggaagcgacuaaacgucca

SEQ ID NO: 95478 - DNA, 22 bp, Artificial Sequence
  Synthetic
catgttgtcucttctgcccuca

SEQ ID NO: 95479 - DNA, 28 bp, Artificial Sequence
  Synthetic
cggtaatctttuccttctttgttgtgua

SEQ ID NO: 95480 - DNA, 22 bp, Artificial Sequence
  Synthetic
ttgtgaugccaaagactcugct

SEQ ID NO: 95481 - DNA, 28 bp, Artificial Sequence
  Synthetic
gccccactaguttctcttctgtaatuat

SEQ ID NO: 95482 - DNA, 21 bp, Artificial Sequence
  Synthetic
cttuccaacctggugccaaac

SEQ ID NO: 95483 - DNA, 25 bp, Artificial Sequence
  Synthetic
gtcaagtgacuatgacagctctucc

SEQ ID NO: 95484 - DNA, 23 bp, Artificial Sequence
  Synthetic
tcctcactcuttttgccttugct

SEQ ID NO: 95485 - DNA, 25 bp, Artificial Sequence
  Synthetic
gtacctctccuttctccttccttuc

SEQ ID NO: 95486 - DNA, 21 bp, Artificial Sequence
  Synthetic
gcagtgaauggctgaggctut

SEQ ID NO: 95487 - DNA, 28 bp, Artificial Sequence
  Synthetic
aaatcagtttcugaatctcttgctcugt

SEQ ID NO: 95488 - DNA, 21 bp, Artificial Sequence
  Synthetic
gggcttgtugtcacttaccut

SEQ ID NO: 95489 - DNA, 22 bp, Artificial Sequence
  Synthetic
agccggtugttatgacaaugga

SEQ ID NO: 95490 - DNA, 25 bp, Artificial Sequence
  Synthetic
agaagccacagutctccagatcaua

SEQ ID NO: 95491 - DNA, 24 bp, Artificial Sequence
  Synthetic
gagaaactutcagctcaugaggga

SEQ ID NO: 95492 - DNA, 25 bp, Artificial Sequence
  Synthetic
cataccctcugttctttggtcuagg

SEQ ID NO: 95493 - DNA, 27 bp, Artificial Sequence
  Synthetic
actttaaaaggagcugtaaggcctaug

SEQ ID NO: 95494 - DNA, 27 bp, Artificial Sequence
  Synthetic
gaaaatggaagaaaaccugactagcug

SEQ ID NO: 95495 - DNA, 28 bp, Artificial Sequence
  Synthetic
ccacagtgtguacccaataactuaaaga

SEQ ID NO: 95496 - DNA, 23 bp, Artificial Sequence
  Synthetic
actgctagcautgggaaucaagg

SEQ ID NO: 95497 - DNA, 27 bp, Artificial Sequence
  Synthetic
caattggcugagcaagattttctauct

SEQ ID NO: 95498 - DNA, 22 bp, Artificial Sequence
  Synthetic
ctcccctgugccattctcauaa

SEQ ID NO: 95499 - DNA, 24 bp, Artificial Sequence
  Synthetic
tctacaccauccaagtccugagag

SEQ ID NO: 95500 - DNA, 28 bp, Artificial Sequence
  Synthetic
acaccaatttcaagguttttggttgtut

SEQ ID NO: 95501 - DNA, 26 bp, Artificial Sequence
  Synthetic
ccaagaaagugatgtagtagcugcat

SEQ ID NO: 95502 - DNA, 28 bp, Artificial Sequence
  Synthetic
gaaacgtguaaaaggatgcaaatcuagt

SEQ ID NO: 95503 - DNA, 26 bp, Artificial Sequence
  Synthetic
aaggaaccaaagucattctcactuag

SEQ ID NO: 95504 - DNA, 21 bp, Artificial Sequence
  Synthetic
gcgcatcuctttcctguccat

SEQ ID NO: 95505 - DNA, 27 bp, Artificial Sequence
  Synthetic
ggtgtttacttugcattccttcctcua

SEQ ID NO: 95506 - DNA, 21 bp, Artificial Sequence
  Synthetic
ggagaccaccagcutccttug

SEQ ID NO: 95507 - DNA, 24 bp, Artificial Sequence
  Synthetic
gactatucccagcacaagacacut

SEQ ID NO: 95508 - DNA, 24 bp, Artificial Sequence
  Synthetic
aggtgtggccautgtaaaaacuca

SEQ ID NO: 95509 - DNA, 25 bp, Artificial Sequence
  Synthetic
tgacaactgaucgaaggaacguaac

SEQ ID NO: 95510 - DNA, 27 bp, Artificial Sequence
  Synthetic
ctatatcccaauggatgatgactucca

SEQ ID NO: 95511 - DNA, 22 bp, Artificial Sequence
  Synthetic
ggtagtgguggcattagcagua

SEQ ID NO: 95512 - DNA, 21 bp, Artificial Sequence
  Synthetic
gtgccccucctggaagaauat

SEQ ID NO: 95513 - DNA, 20 bp, Artificial Sequence
  Synthetic
aguacggccaccaagaagug

SEQ ID NO: 95514 - DNA, 17 bp, Artificial Sequence
  Synthetic
caccucaccugccgaca

SEQ ID NO: 95515 - DNA, 21 bp, Artificial Sequence
  Synthetic
aggttctuccccagtgugagt

SEQ ID NO: 95516 - DNA, 19 bp, Artificial Sequence
  Synthetic
agaugccgcacuccaagaa

SEQ ID NO: 95517 - DNA, 18 bp, Artificial Sequence
  Synthetic
gugaaggucacggccaca

SEQ ID NO: 95518 - DNA, 21 bp, Artificial Sequence
  Synthetic
gacaaacgacugctccuggat

SEQ ID NO: 95519 - DNA, 17 bp, Artificial Sequence
  Synthetic
tccuccccacgcugaac

SEQ ID NO: 95520 - DNA, 25 bp, Artificial Sequence
  Synthetic
tccagcagacucaaauacaagaacc

SEQ ID NO: 95521 - DNA, 28 bp, Artificial Sequence
  Synthetic
gtgatgatguggcactagtagtttctut

SEQ ID NO: 95522 - DNA, 21 bp, Artificial Sequence
  Synthetic
gguggtgaagucaaagcgagt

SEQ ID NO: 95523 - DNA, 21 bp, Artificial Sequence
  Synthetic
ccgtuggaaggaagcuaccat

SEQ ID NO: 95524 - DNA, 27 bp, Artificial Sequence
  Synthetic
ttgactgtugacttcacttuaagcaga

SEQ ID NO: 95525 - DNA, 22 bp, Artificial Sequence
  Synthetic
gtaaccaguggagtggctugag

SEQ ID NO: 95526 - DNA, 17 bp, Artificial Sequence
  Synthetic
gcaggucacgctgccut

SEQ ID NO: 95527 - DNA, 17 bp, Artificial Sequence
  Synthetic
agccaccugcggtctuc

SEQ ID NO: 95528 - DNA, 22 bp, Artificial Sequence
  Synthetic
gtaggagttuaagtggccuggt

SEQ ID NO: 95529 - DNA, 26 bp, Artificial Sequence
  Synthetic
tgcctaagtccugcttaagtcattut

SEQ ID NO: 95530 - DNA, 25 bp, Artificial Sequence
  Synthetic
atctccatcucctacccacauacat

SEQ ID NO: 95531 - DNA, 26 bp, Artificial Sequence
  Synthetic
actcaaagcgacagauaacacgtuag

SEQ ID NO: 95532 - DNA, 19 bp, Artificial Sequence
  Synthetic
cgugacgucagagcaggaa

SEQ ID NO: 95533 - DNA, 17 bp, Artificial Sequence
  Synthetic
tcaccugucggcaggga

SEQ ID NO: 95534 - DNA, 26 bp, Artificial Sequence
  Synthetic
gacagaaaaauctcauccaagaagcc

SEQ ID NO: 95535 - DNA, 28 bp, Artificial Sequence
  Synthetic
gcgttagggcauatatatcagaaagtut

SEQ ID NO: 95536 - DNA, 27 bp, Artificial Sequence
  Synthetic
tgtgactgcaccuaacaagattcauat

SEQ ID NO: 95537 - DNA, 22 bp, Artificial Sequence
  Synthetic
gtattcgtguaatgccgctgug

SEQ ID NO: 95538 - DNA, 22 bp, Artificial Sequence
  Synthetic
ctacttgccagauttggctugg

SEQ ID NO: 95539 - DNA, 23 bp, Artificial Sequence
  Synthetic
caggtggcautgaaggauagaga

SEQ ID NO: 95540 - DNA, 21 bp, Artificial Sequence
  Synthetic
cgtgaccuccctgaagagtug

SEQ ID NO: 95541 - DNA, 22 bp, Artificial Sequence
  Synthetic
ccacagaugcuccaggacaaag

SEQ ID NO: 95542 - DNA, 28 bp, Artificial Sequence
  Synthetic
gtggttattcttugacaattgcttgugt

SEQ ID NO: 95543 - DNA, 19 bp, Artificial Sequence
  Synthetic
cagccggutgcaatctucc

SEQ ID NO: 95544 - DNA, 22 bp, Artificial Sequence
  Synthetic
tcactaucccccagccatctua

SEQ ID NO: 95545 - DNA, 20 bp, Artificial Sequence
  Synthetic
agcugaacgaacugcaaggt

SEQ ID NO: 95546 - DNA, 20 bp, Artificial Sequence
  Synthetic
cacagcauccagacccugaa

SEQ ID NO: 95547 - DNA, 23 bp, Artificial Sequence
  Synthetic
tgttgctcauaacggttgctuct

SEQ ID NO: 95548 - DNA, 20 bp, Artificial Sequence
  Synthetic
cctgtguggcaggactucag

SEQ ID NO: 95549 - DNA, 27 bp, Artificial Sequence
  Synthetic
tcttgtccaggcuaagaactttcaaut

SEQ ID NO: 95550 - DNA, 25 bp, Artificial Sequence
  Synthetic
ggcacttaattutcagcttacgugt

SEQ ID NO: 95551 - DNA, 21 bp, Artificial Sequence
  Synthetic
acaatgtggguccctctguct

SEQ ID NO: 95552 - DNA, 23 bp, Artificial Sequence
  Synthetic
cagattccucagtgggtactugg

SEQ ID NO: 95553 - DNA, 27 bp, Artificial Sequence
  Synthetic
ccactaaccuccagtttgtcaaugaaa

SEQ ID NO: 95554 - DNA, 25 bp, Artificial Sequence
  Synthetic
catcucaccaggacagtagaaucag

SEQ ID NO: 95555 - DNA, 28 bp, Artificial Sequence
  Synthetic
caacctugaggagagaaaactuagacat

SEQ ID NO: 95556 - DNA, 21 bp, Artificial Sequence
  Synthetic
agaggtugagggacggagaut

SEQ ID NO: 95557 - DNA, 27 bp, Artificial Sequence
  Synthetic
cttcaggttttgaguttcctagaccut

SEQ ID NO: 95558 - DNA, 27 bp, Artificial Sequence
  Synthetic
ccaatgtcggaguttggaaaacaaaut

SEQ ID NO: 95559 - DNA, 25 bp, Artificial Sequence
  Synthetic
agttcagccccuataacuaggaaca

SEQ ID NO: 95560 - DNA, 21 bp, Artificial Sequence
  Synthetic
cacctgguggtgcaatuaacc

SEQ ID NO: 95561 - DNA, 21 bp, Artificial Sequence
  Synthetic
gagctatuccctgcaccugat

SEQ ID NO: 95562 - DNA, 22 bp, Artificial Sequence
  Synthetic
gctctgcagugtcttctucacc

SEQ ID NO: 95563 - DNA, 25 bp, Artificial Sequence
  Synthetic
gcattcactgaugtggatgtcgaut

SEQ ID NO: 95564 - DNA, 20 bp, Artificial Sequence
  Synthetic
cctgacggccutgtctucac

SEQ ID NO: 95565 - DNA, 20 bp, Artificial Sequence
  Synthetic
acacucacaagcccctgtut

SEQ ID NO: 95566 - DNA, 22 bp, Artificial Sequence
  Synthetic
caagtgaggguggagaattugg

SEQ ID NO: 95567 - DNA, 21 bp, Artificial Sequence
  Synthetic
ccaucagcaggaacaccttug

SEQ ID NO: 95568 - DNA, 24 bp, Artificial Sequence
  Synthetic
ggcttucccaagcaattttgaugg

SEQ ID NO: 95569 - DNA, 28 bp, Artificial Sequence
  Synthetic
atgcttattucacaacttgctttucaca

SEQ ID NO: 95570 - DNA, 18 bp, Artificial Sequence
  Synthetic
acagcccggugacttcug

SEQ ID NO: 95571 - DNA, 21 bp, Artificial Sequence
  Synthetic
gacctgcaguttgtggaagug

SEQ ID NO: 95572 - DNA, 21 bp, Artificial Sequence
  Synthetic
gatggtgaccutcacgtcugt

SEQ ID NO: 95573 - DNA, 26 bp, Artificial Sequence
  Synthetic
gcctaacatauccaagaaactggcut

SEQ ID NO: 95574 - DNA, 19 bp, Artificial Sequence
  Synthetic
cacctacatucggcgggua

SEQ ID NO: 95575 - DNA, 23 bp, Artificial Sequence
  Synthetic
ctgggtaugacactggaaauggt

SEQ ID NO: 95576 - DNA, 21 bp, Artificial Sequence
  Synthetic
gggtctgcuctcatcggttut

SEQ ID NO: 95577 - DNA, 21 bp, Artificial Sequence
  Synthetic
tcctcctuggcagtacuccat

SEQ ID NO: 95578 - DNA, 19 bp, Artificial Sequence
  Synthetic
gaactuggcgcccaaugac

SEQ ID NO: 95579 - DNA, 25 bp, Artificial Sequence
  Synthetic
gcttcctgaugatgacagaagugaa

SEQ ID NO: 95580 - DNA, 22 bp, Artificial Sequence
  Synthetic
cagaagugccaggaagcugaat

SEQ ID NO: 95581 - DNA, 21 bp, Artificial Sequence
  Synthetic
ggctctaaccuctctcggcua

SEQ ID NO: 95582 - DNA, 20 bp, Artificial Sequence
  Synthetic
ctggcctuggcataccacua

SEQ ID NO: 95583 - DNA, 20 bp, Artificial Sequence
  Synthetic
tggtcagutagcgucagcac

SEQ ID NO: 95584 - DNA, 22 bp, Artificial Sequence
  Synthetic
gcacagggtutcctgtcacaua

SEQ ID NO: 95585 - DNA, 27 bp, Artificial Sequence
  Synthetic
cgacacagtcaucctcattcttauagg

SEQ ID NO: 95586 - DNA, 24 bp, Artificial Sequence
  Synthetic
tgaatcttuggccaattgcugact

SEQ ID NO: 95587 - DNA, 21 bp, Artificial Sequence
  Synthetic
gagagtgccccuactacacug

SEQ ID NO: 95588 - DNA, 22 bp, Artificial Sequence
  Synthetic
cttgcccaugtttggcuacaaa

SEQ ID NO: 95589 - DNA, 22 bp, Artificial Sequence
  Synthetic
gcactccaagucctccaaacuc

SEQ ID NO: 95590 - DNA, 23 bp, Artificial Sequence
  Synthetic
tggcaaggaugcagtgaattgua

SEQ ID NO: 95591 - DNA, 22 bp, Artificial Sequence
  Synthetic
cctaacatggutctccctcucc

SEQ ID NO: 95592 - DNA, 22 bp, Artificial Sequence
  Synthetic
caggagguagagagtcgccaua

SEQ ID NO: 95593 - DNA, 21 bp, Artificial Sequence
  Synthetic
ctagtacucgggcctcacuca

SEQ ID NO: 95594 - DNA, 25 bp, Artificial Sequence
  Synthetic
ttcaaaatucacccgtttgttgugt

SEQ ID NO: 95595 - DNA, 28 bp, Artificial Sequence
  Synthetic
caggagaagguatccctattttugaaga

SEQ ID NO: 95596 - DNA, 21 bp, Artificial Sequence
  Synthetic
gccccagaauccatcgagtuc

SEQ ID NO: 95597 - DNA, 20 bp, Artificial Sequence
  Synthetic
gtctcuccccgcaaagaguc

SEQ ID NO: 95598 - DNA, 27 bp, Artificial Sequence
  Synthetic
tagtatccuactgaggaguccacaaaa

SEQ ID NO: 95599 - DNA, 28 bp, Artificial Sequence
  Synthetic
aactcactgaccuaagctttgttgauat

SEQ ID NO: 95600 - DNA, 24 bp, Artificial Sequence
  Synthetic
ctttagtgaagaacuggtggcuga

SEQ ID NO: 95601 - DNA, 27 bp, Artificial Sequence
  Synthetic
ttgccauagaaagaaaggacauggaat

SEQ ID NO: 95602 - DNA, 23 bp, Artificial Sequence
  Synthetic
catgcggcauttatctttugcag

SEQ ID NO: 95603 - DNA, 27 bp, Artificial Sequence
  Synthetic
ccgatggaugattctgttttcaugaag

SEQ ID NO: 95604 - DNA, 22 bp, Artificial Sequence
  Synthetic
ctcagcctcugcgcttagauac

SEQ ID NO: 95605 - DNA, 21 bp, Artificial Sequence
  Synthetic
gcagagtgugctcctttccuc

SEQ ID NO: 95606 - DNA, 28 bp, Artificial Sequence
  Synthetic
gtattttcttuaaaagcgctcacuggat

SEQ ID NO: 95607 - DNA, 25 bp, Artificial Sequence
  Synthetic
ctctgagcatuctgcaaagctagua

SEQ ID NO: 95608 - DNA, 28 bp, Artificial Sequence
  Synthetic
gttccugaggaagaactaaauccaaaga

SEQ ID NO: 95609 - DNA, 28 bp, Artificial Sequence
  Synthetic
cacattagcuagaaaagcaaaaccuact

SEQ ID NO: 95610 - DNA, 18 bp, Artificial Sequence
  Synthetic
ccccacccaauggaugct

SEQ ID NO: 95611 - DNA, 20 bp, Artificial Sequence
  Synthetic
aacugagcaggacctccuct

SEQ ID NO: 95612 - DNA, 23 bp, Artificial Sequence
  Synthetic
tgtcactcucaggatagcagcut

SEQ ID NO: 95613 - DNA, 21 bp, Artificial Sequence
  Synthetic
ctgatcagagcucctgcacut

SEQ ID NO: 95614 - DNA, 21 bp, Artificial Sequence
  Synthetic
ccacctcuggacttgccttuc

SEQ ID NO: 95615 - DNA, 19 bp, Artificial Sequence
  Synthetic
gccgagggaaugggctuac

SEQ ID NO: 95616 - DNA, 20 bp, Artificial Sequence
  Synthetic
gccgggacucaggttaucaa

SEQ ID NO: 95617 - DNA, 26 bp, Artificial Sequence
  Synthetic
cctctgtgcaauaacttccctttuct

SEQ ID NO: 95618 - DNA, 23 bp, Artificial Sequence
  Synthetic
acagcccaagcaagauaagtuct

SEQ ID NO: 95619 - DNA, 28 bp, Artificial Sequence
  Synthetic
cagtcactgcaaagaucaaattgatgut

SEQ ID NO: 95620 - DNA, 26 bp, Artificial Sequence
  Synthetic
tgatgacugagaagctaucccagaaa

SEQ ID NO: 95621 - DNA, 22 bp, Artificial Sequence
  Synthetic
guatccaatgcuagcacaggct

SEQ ID NO: 95622 - DNA, 25 bp, Artificial Sequence
  Synthetic
gctcaaaggucagagtcatgaucaa

SEQ ID NO: 95623 - DNA, 25 bp, Artificial Sequence
  Synthetic
cccctgauggtttctctttucacag

SEQ ID NO: 95624 - DNA, 22 bp, Artificial Sequence
  Synthetic
gccccaugagaagugaagagaa

SEQ ID NO: 95625 - DNA, 22 bp, Artificial Sequence
  Synthetic
gcctcuacaggacaagaagcuc

SEQ ID NO: 95626 - DNA, 21 bp, Artificial Sequence
  Synthetic
gggaaagcugtggaacttcut

SEQ ID NO: 95627 - DNA, 29 bp, Artificial Sequence
  Synthetic
gagtctcataggugattttactgttguca

SEQ ID NO: 95628 - DNA, 20 bp, Artificial Sequence
  Synthetic
ccgcacctutggaactccut

SEQ ID NO: 95629 - DNA, 23 bp, Artificial Sequence
  Synthetic
gacactagccutacctggaacuc

SEQ ID NO: 95630 - DNA, 27 bp, Artificial Sequence
  Synthetic
catctttctatgaauctgctccgugat

SEQ ID NO: 95631 - DNA, 21 bp, Artificial Sequence
  Synthetic
tcgcagagautgtgggttcuc

SEQ ID NO: 95632 - DNA, 27 bp, Artificial Sequence
  Synthetic
tcttgaaatgutcctgtccauaaagca

SEQ ID NO: 95633 - DNA, 25 bp, Artificial Sequence
  Synthetic
acacautctgtttgtugaagggaga

SEQ ID NO: 95634 - DNA, 28 bp, Artificial Sequence
  Synthetic
agtggtattatucagcacgacttgatut

SEQ ID NO: 95635 - DNA, 23 bp, Artificial Sequence
  Synthetic
ccagcaaagutaaagcaucaggt

SEQ ID NO: 95636 - DNA, 22 bp, Artificial Sequence
  Synthetic
gcaggacutcttgccttucaca

SEQ ID NO: 95637 - DNA, 21 bp, Artificial Sequence
  Synthetic
gacagcuccactggaauccat

SEQ ID NO: 95638 - DNA, 28 bp, Artificial Sequence
  Synthetic
cattggacatggaucttgtttttctcut

SEQ ID NO: 95639 - DNA, 28 bp, Artificial Sequence
  Synthetic
gccttgtcccacauattataacggatua

SEQ ID NO: 95640 - DNA, 24 bp, Artificial Sequence
  Synthetic
accaactggguaggaaagtctuct

SEQ ID NO: 95641 - DNA, 23 bp, Artificial Sequence
  Synthetic
ggaattccaucacccucaccaac

SEQ ID NO: 95642 - DNA, 28 bp, Artificial Sequence
  Synthetic
gtagcctcuttgacaaactuaagaagga

SEQ ID NO: 95643 - DNA, 26 bp, Artificial Sequence
  Synthetic
gcttguagcaacagacacaattuagg

SEQ ID NO: 95644 - DNA, 22 bp, Artificial Sequence
  Synthetic
acatactctgugcctggaguga

SEQ ID NO: 95645 - DNA, 24 bp, Artificial Sequence
  Synthetic
tcttttactgugcactggatugct

SEQ ID NO: 95646 - DNA, 22 bp, Artificial Sequence
  Synthetic
gatcctguagccagtgatggug

SEQ ID NO: 95647 - DNA, 23 bp, Artificial Sequence
  Synthetic
cacttcctaaacuggtggtguct

SEQ ID NO: 95648 - DNA, 22 bp, Artificial Sequence
  Synthetic
acautcaggguagggaaggact

SEQ ID NO: 95649 - DNA, 26 bp, Artificial Sequence
  Synthetic
aggctgataaugatctgaggaugact

SEQ ID NO: 95650 - DNA, 24 bp, Artificial Sequence
  Synthetic
ctggauagtcatacugccaacacc

SEQ ID NO: 95651 - DNA, 28 bp, Artificial Sequence
  Synthetic
gtttctcatgctuttgagcagagtttua

SEQ ID NO: 95652 - DNA, 21 bp, Artificial Sequence
  Synthetic
tgcatcaaaccuccacgauga

SEQ ID NO: 95653 - DNA, 23 bp, Artificial Sequence
  Synthetic
gctactucactgccauccagaac

SEQ ID NO: 95654 - DNA, 22 bp, Artificial Sequence
  Synthetic
ggcaaacagucaggaagtgcua

SEQ ID NO: 95655 - DNA, 27 bp, Artificial Sequence
  Synthetic
cctggccgaaaauacattgtaaatguc

SEQ ID NO: 95656 - DNA, 23 bp, Artificial Sequence
  Synthetic
acaaaacaacccucctucaggaa

SEQ ID NO: 95657 - DNA, 29 bp, Artificial Sequence
  Synthetic
agaaaatcaagaaaguacacctgttguca

SEQ ID NO: 95658 - DNA, 22 bp, Artificial Sequence
  Synthetic
gggctcacucacttttccucaa

SEQ ID NO: 95659 - DNA, 24 bp, Artificial Sequence
  Synthetic
cagaaagauctgctgtucaaggac

SEQ ID NO: 95660 - DNA, 23 bp, Artificial Sequence
  Synthetic
ctctgctccccaucctcagauat

SEQ ID NO: 95661 - DNA, 25 bp, Artificial Sequence
  Synthetic
agctgtagagucatttgagggacua

SEQ ID NO: 95662 - DNA, 22 bp, Artificial Sequence
  Synthetic
gtgccaguggtttcttgtugaa

SEQ ID NO: 95663 - DNA, 21 bp, Artificial Sequence
  Synthetic
cagcacagaacucaacctucc

SEQ ID NO: 95664 - DNA, 21 bp, Artificial Sequence
  Synthetic
ccucgaaaacccaauggcaga

SEQ ID NO: 95665 - DNA, 28 bp, Artificial Sequence
  Synthetic
cctccctattuaccattgacaccauaat

SEQ ID NO: 95666 - DNA, 21 bp, Artificial Sequence
  Synthetic
gtgacggaguttgcagttuca

SEQ ID NO: 95667 - DNA, 28 bp, Artificial Sequence
  Synthetic
tgtctcaaagaaaacagugcatctuact

SEQ ID NO: 95668 - DNA, 23 bp, Artificial Sequence
  Synthetic
gaactatgcuaccctccctcuct

SEQ ID NO: 95669 - DNA, 21 bp, Artificial Sequence
  Synthetic
catctcccaguccttccucca

SEQ ID NO: 95670 - DNA, 28 bp, Artificial Sequence
  Synthetic
gtgtcugcgagaaaactttguaaaaaca

SEQ ID NO: 95671 - DNA, 26 bp, Artificial Sequence
  Synthetic
ccataacaaaaccauccaaggcttuc

SEQ ID NO: 95672 - DNA, 25 bp, Artificial Sequence
  Synthetic
gacaugaaagcacagatgaatugct

SEQ ID NO: 95673 - DNA, 28 bp, Artificial Sequence
  Synthetic
agagctcttaauatgtgtgcatttuacc

SEQ ID NO: 95674 - DNA, 18 bp, Artificial Sequence
  Synthetic
ccaggaccccucagtgug

SEQ ID NO: 95675 - DNA, 18 bp, Artificial Sequence
  Synthetic
cagcccagaggugacugt

SEQ ID NO: 95676 - DNA, 20 bp, Artificial Sequence
  Synthetic
gacautgatcugcacgccat

SEQ ID NO: 95677 - DNA, 21 bp, Artificial Sequence
  Synthetic
ccccaagaguaaccgctcuct

SEQ ID NO: 95678 - DNA, 28 bp, Artificial Sequence
  Synthetic
gtagtaagaaggaaaaugacagcaugga

SEQ ID NO: 95679 - DNA, 23 bp, Artificial Sequence
  Synthetic
aattccttgcuggtatcauggca

SEQ ID NO: 95680 - DNA, 24 bp, Artificial Sequence
  Synthetic
ttgatgatguagccggtaatccug

SEQ ID NO: 95681 - DNA, 22 bp, Artificial Sequence
  Synthetic
tcgggagaaaagugtgggagua

SEQ ID NO: 95682 - DNA, 24 bp, Artificial Sequence
  Synthetic
ccctttctguaccttttgccauct

SEQ ID NO: 95683 - DNA, 22 bp, Artificial Sequence
  Synthetic
tcagtgggauaagcagcaugac

SEQ ID NO: 95684 - DNA, 21 bp, Artificial Sequence
  Synthetic
gcaccucatcatgugacccat

SEQ ID NO: 95685 - DNA, 28 bp, Artificial Sequence
  Synthetic
ctggtgatcatutatcaagtgcattuct

SEQ ID NO: 95686 - DNA, 20 bp, Artificial Sequence
  Synthetic
gtgcccuctaggaugaagcc

SEQ ID NO: 95687 - DNA, 20 bp, Artificial Sequence
  Synthetic
gtgccgaagcuccagtaguc

SEQ ID NO: 95688 - DNA, 21 bp, Artificial Sequence
  Synthetic
gcagaaguacacagugaccgt

SEQ ID NO: 95689 - DNA, 24 bp, Artificial Sequence
  Synthetic
aaacaggguacgugaagagaaagg

SEQ ID NO: 95690 - DNA, 22 bp, Artificial Sequence
  Synthetic
ccactcgutgaatgguccagaa

SEQ ID NO: 95691 - DNA, 20 bp, Artificial Sequence
  Synthetic
cccggcaagcugatauacgg

SEQ ID NO: 95692 - DNA, 21 bp, Artificial Sequence
  Synthetic
gatggtgucacactcgcagua

SEQ ID NO: 95693 - DNA, 20 bp, Artificial Sequence
  Synthetic
caggagcuggaaggaagcug

SEQ ID NO: 95694 - DNA, 24 bp, Artificial Sequence
  Synthetic
tgagcagatgauggagttgttguc

SEQ ID NO: 95695 - DNA, 20 bp, Artificial Sequence
  Synthetic
tgtccctugtcccacaucac

SEQ ID NO: 95696 - DNA, 23 bp, Artificial Sequence
  Synthetic
cctugggagaacatugcaaaaca

SEQ ID NO: 95697 - DNA, 27 bp, Artificial Sequence
  Synthetic
gccttaaaccuggagttgattauacca

SEQ ID NO: 95698 - DNA, 27 bp, Artificial Sequence
  Synthetic
attatcatggcagugaaggaucaaact

SEQ ID NO: 95699 - DNA, 19 bp, Artificial Sequence
  Synthetic
cggccgugagatgagtguc

SEQ ID NO: 95700 - DNA, 22 bp, Artificial Sequence
  Synthetic
ccagtgacagcauacacaguga

SEQ ID NO: 95701 - DNA, 26 bp, Artificial Sequence
  Synthetic
cctcacactcugaactaaccctttut

SEQ ID NO: 95702 - DNA, 26 bp, Artificial Sequence
  Synthetic
catgctgagacutaattgaacgggua

SEQ ID NO: 95703 - DNA, 22 bp, Artificial Sequence
  Synthetic
agcttcgcugtgtgttttgtuc

SEQ ID NO: 95704 - DNA, 20 bp, Artificial Sequence
  Synthetic
ctgggcccaacugtgtcuaa

SEQ ID NO: 95705 - DNA, 20 bp, Artificial Sequence
  Synthetic
ggcaggcacagucacaauca

SEQ ID NO: 95706 - DNA, 27 bp, Artificial Sequence
  Synthetic
tcattaggcctugtgaaaaaggguaaa

SEQ ID NO: 95707 - DNA, 27 bp, Artificial Sequence
  Synthetic
cttaccttccaugttgcagactttaug

SEQ ID NO: 95708 - DNA, 27 bp, Artificial Sequence
  Synthetic
cctaacuagccgaggaagaactaugaa

SEQ ID NO: 95709 - DNA, 25 bp, Artificial Sequence
  Synthetic
ggaactguaaaccttcccucacaat

SEQ ID NO: 95710 - DNA, 20 bp, Artificial Sequence
  Synthetic
ctgatcguccaggtcaccut

SEQ ID NO: 95711 - DNA, 20 bp, Artificial Sequence
  Synthetic
ggaagggcgauagtccucct

SEQ ID NO: 95712 - DNA, 26 bp, Artificial Sequence
  Synthetic
acatggcatctuctaatccttctgug

SEQ ID NO: 95713 - DNA, 21 bp, Artificial Sequence
  Synthetic
ctggctgcauctcgagactut

SEQ ID NO: 95714 - DNA, 21 bp, Artificial Sequence
  Synthetic
gatcccagugtgagtgcucag

SEQ ID NO: 95715 - DNA, 21 bp, Artificial Sequence
  Synthetic
tcgtcacacucgcagtactug

SEQ ID NO: 95716 - DNA, 28 bp, Artificial Sequence
  Synthetic
gtaggataagutctgaacgucgaaaaga

SEQ ID NO: 95717 - DNA, 25 bp, Artificial Sequence
  Synthetic
aatagctgauggtaagcctcaucac

SEQ ID NO: 95718 - DNA, 21 bp, Artificial Sequence
  Synthetic
cacagcagugacttuggcaag

SEQ ID NO: 95719 - DNA, 24 bp, Artificial Sequence
  Synthetic
ccttcacctaugtttccagtggut

SEQ ID NO: 95720 - DNA, 23 bp, Artificial Sequence
  Synthetic
gttcgcatcutgataaggccuct

SEQ ID NO: 95721 - DNA, 27 bp, Artificial Sequence
  Synthetic
aaaacatugcgaccaccttcuaaaaat

SEQ ID NO: 95722 - DNA, 21 bp, Artificial Sequence
  Synthetic
cctgagcuagggtggtgacut

SEQ ID NO: 95723 - DNA, 21 bp, Artificial Sequence
  Synthetic
caccaucccgaacuggaagag

SEQ ID NO: 95724 - DNA, 24 bp, Artificial Sequence
  Synthetic
tuctcaacaucaaccccaacaaga

SEQ ID NO: 95725 - DNA, 24 bp, Artificial Sequence
  Synthetic
acaaaaagaugtgguggagacaca

SEQ ID NO: 95726 - DNA, 19 bp, Artificial Sequence
  Synthetic
ggtccccacugtgctgtut

SEQ ID NO: 95727 - DNA, 19 bp, Artificial Sequence
  Synthetic
ctccagcuttccctugggt

SEQ ID NO: 95728 - DNA, 19 bp, Artificial Sequence
  Synthetic
ggtgcagaggugctcacug

SEQ ID NO: 95729 - DNA, 19 bp, Artificial Sequence
  Synthetic
cctcacccugtggcaagua

SEQ ID NO: 95730 - DNA, 18 bp, Artificial Sequence
  Synthetic
ctccgccugcacucacat

SEQ ID NO: 95731 - DNA, 19 bp, Artificial Sequence
  Synthetic
gugcgagaggaccacugag

SEQ ID NO: 95732 - DNA, 20 bp, Artificial Sequence
  Synthetic
gccacgaccacuacacucaa

SEQ ID NO: 95733 - DNA, 18 bp, Artificial Sequence
  Synthetic
aggagctuagccgtgcug

SEQ ID NO: 95734 - DNA, 25 bp, Artificial Sequence
  Synthetic
gataatgcauacctgtctctuggca

SEQ ID NO: 95735 - DNA, 19 bp, Artificial Sequence
  Synthetic
tcctcccuatggccacugt

SEQ ID NO: 95736 - DNA, 22 bp, Artificial Sequence
  Synthetic
agaguagaccacaccactguct

SEQ ID NO: 95737 - DNA, 28 bp, Artificial Sequence
  Synthetic
gcagaaagtagugaattgtcttctcuca

SEQ ID NO: 95738 - DNA, 25 bp, Artificial Sequence
  Synthetic
gggucagaagaggaauaaacagaca

SEQ ID NO: 95739 - DNA, 23 bp, Artificial Sequence
  Synthetic
gcatctcacguaccccuacaaag

SEQ ID NO: 95740 - DNA, 23 bp, Artificial Sequence
  Synthetic
cacaaaactucagccccaactut

SEQ ID NO: 95741 - DNA, 20 bp, Artificial Sequence
  Synthetic
caggcucagcaaatggtuca

SEQ ID NO: 95742 - DNA, 20 bp, Artificial Sequence
  Synthetic
cutgctttgacugacagcca

SEQ ID NO: 95743 - DNA, 18 bp, Artificial Sequence
  Synthetic
tcucccccaccgtcucaa

SEQ ID NO: 95744 - DNA, 22 bp, Artificial Sequence
  Synthetic
tgatctgtccuggagacctcug

SEQ ID NO: 95745 - DNA, 23 bp, Artificial Sequence
  Synthetic
acagaaaggcauccuggaaaagg

SEQ ID NO: 95746 - DNA, 25 bp, Artificial Sequence
  Synthetic
aggtgggacuggcttaatauaagga

SEQ ID NO: 95747 - DNA, 28 bp, Artificial Sequence
  Synthetic
ggctagacttttcucctaaagccttaut

SEQ ID NO: 95748 - DNA, 23 bp, Artificial Sequence
  Synthetic
cccactggccuttgttttgtauc

SEQ ID NO: 95749 - DNA, 21 bp, Artificial Sequence
  Synthetic
aactacagcucccccatugac

SEQ ID NO: 95750 - DNA, 19 bp, Artificial Sequence
  Synthetic
gcatgcgccuaccacauca

SEQ ID NO: 95751 - DNA, 18 bp, Artificial Sequence
  Synthetic
cccccagccaguacucac

SEQ ID NO: 95752 - DNA, 21 bp, Artificial Sequence
  Synthetic
gggatgcuagctagggtcuac

SEQ ID NO: 95753 - DNA, 27 bp, Artificial Sequence
  Synthetic
gtctgaaaccaaaaaccutctgtucaa

SEQ ID NO: 95754 - DNA, 24 bp, Artificial Sequence
  Synthetic
gagggtguaaacttctgccaugat

SEQ ID NO: 95755 - DNA, 25 bp, Artificial Sequence
  Synthetic
atttaatgtcugagtgguggaagca

SEQ ID NO: 95756 - DNA, 21 bp, Artificial Sequence
  Synthetic
gccagacacucagtgttguca

SEQ ID NO: 95757 - DNA, 22 bp, Artificial Sequence
  Synthetic
gctactcacugtctgcccttut

SEQ ID NO: 95758 - DNA, 23 bp, Artificial Sequence
  Synthetic
cccaaacagaucccaacacagut

SEQ ID NO: 95759 - DNA, 21 bp, Artificial Sequence
  Synthetic
gaagccuatggcaagugcaag

SEQ ID NO: 95760 - DNA, 26 bp, Artificial Sequence
  Synthetic
ccuatcagttaactugggaggagaaa

SEQ ID NO: 95761 - DNA, 27 bp, Artificial Sequence
  Synthetic
tcataaatugagcggcctaaaagtuct

SEQ ID NO: 95762 - DNA, 24 bp, Artificial Sequence
  Synthetic
cgaatugatgggataugagccaga

SEQ ID NO: 95763 - DNA, 28 bp, Artificial Sequence
  Synthetic
tgtacagaggtugcaacagttaaguaat

SEQ ID NO: 95764 - DNA, 22 bp, Artificial Sequence
  Synthetic
gcaccttgucgtcaccaaatuc

SEQ ID NO: 95765 - DNA, 22 bp, Artificial Sequence
  Synthetic
ccaggcctcugtctctgttgua

SEQ ID NO: 95766 - DNA, 26 bp, Artificial Sequence
  Synthetic
cctatctttcuccttgttaccugcaa

SEQ ID NO: 95767 - DNA, 28 bp, Artificial Sequence
  Synthetic
gcccattgacauaatgtgatggttcuat

SEQ ID NO: 95768 - DNA, 28 bp, Artificial Sequence
  Synthetic
gtattaccctuctctctaggaauccaga

SEQ ID NO: 95769 - DNA, 21 bp, Artificial Sequence
  Synthetic
ctaccaaggcuggatgauggt

SEQ ID NO: 95770 - DNA, 23 bp, Artificial Sequence
  Synthetic
cttcucccaggcaagtacaauct

SEQ ID NO: 95771 - DNA, 28 bp, Artificial Sequence
  Synthetic
ggagcttgcacaautcaaaataacctut

SEQ ID NO: 95772 - DNA, 20 bp, Artificial Sequence
  Synthetic
gagttgtuggtcctcugggt

SEQ ID NO: 95773 - DNA, 21 bp, Artificial Sequence
  Synthetic
ggagugcacgaagtucaaggt

SEQ ID NO: 95774 - DNA, 22 bp, Artificial Sequence
  Synthetic
acacactaugctcctcuccaca

SEQ ID NO: 95775 - DNA, 21 bp, Artificial Sequence
  Synthetic
gctaactuggctccacacuca

SEQ ID NO: 95776 - DNA, 19 bp, Artificial Sequence
  Synthetic
gccccgacucgatgcatuc

SEQ ID NO: 95777 - DNA, 22 bp, Artificial Sequence
  Synthetic
tcctctgaccutcctgctcuac

SEQ ID NO: 95778 - DNA, 22 bp, Artificial Sequence
  Synthetic
ggcttgctccutctttgcctua

SEQ ID NO: 95779 - DNA, 27 bp, Artificial Sequence
  Synthetic
tgcaactctaagaugtgctgaactuac

SEQ ID NO: 95780 - DNA, 19 bp, Artificial Sequence
  Synthetic
cagcaggaggucgcauagt

SEQ ID NO: 95781 - DNA, 21 bp, Artificial Sequence
  Synthetic
ggaaggctcugatccaccuga

SEQ ID NO: 95782 - DNA, 22 bp, Artificial Sequence
  Synthetic
ccttcucaaagcgcctgtacuc

SEQ ID NO: 95783 - DNA, 20 bp, Artificial Sequence
  Synthetic
ggtgtgcugcttcttcccua

SEQ ID NO: 95784 - DNA, 22 bp, Artificial Sequence
  Synthetic
ctcccaugacccagagggaaua

SEQ ID NO: 95785 - DNA, 23 bp, Artificial Sequence
  Synthetic
gctggagatcugctctgtcttug

SEQ ID NO: 95786 - DNA, 22 bp, Artificial Sequence
  Synthetic
tctccgtctuccctggaatuga

SEQ ID NO: 95787 - DNA, 21 bp, Artificial Sequence
  Synthetic
aagtgcccuggtgtttccuac

SEQ ID NO: 95788 - DNA, 24 bp, Artificial Sequence
  Synthetic
tttttacagtucctgccactucct

SEQ ID NO: 95789 - DNA, 28 bp, Artificial Sequence
  Synthetic
tgatgtctggcutgtctttattcttuca

SEQ ID NO: 95790 - DNA, 26 bp, Artificial Sequence
  Synthetic
gccatattugacctcaagtcuagaca

SEQ ID NO: 95791 - DNA, 28 bp, Artificial Sequence
  Synthetic
ccauaaatgagauaaggagaagcccaag

SEQ ID NO: 95792 - DNA, 23 bp, Artificial Sequence
  Synthetic
tccaaugaacaacggtcatguct

SEQ ID NO: 95793 - DNA, 21 bp, Artificial Sequence
  Synthetic
accacccaaugttcagcucac

SEQ ID NO: 95794 - DNA, 19 bp, Artificial Sequence
  Synthetic
catgggucccagctgagug

SEQ ID NO: 95795 - DNA, 21 bp, Artificial Sequence
  Synthetic
cgtgccatguctggtcttcut

SEQ ID NO: 95796 - DNA, 19 bp, Artificial Sequence
  Synthetic
cacccgcacucgataucca

SEQ ID NO: 95797 - DNA, 26 bp, Artificial Sequence
  Synthetic
cctctaaccaaugacaatcucgacag

SEQ ID NO: 95798 - DNA, 20 bp, Artificial Sequence
  Synthetic
acutggccacugacgagaag

SEQ ID NO: 95799 - DNA, 23 bp, Artificial Sequence
  Synthetic
ataaaggacagutccccaaccug

SEQ ID NO: 95800 - DNA, 22 bp, Artificial Sequence
  Synthetic
gcacatttgutttcccctgucc

SEQ ID NO: 95801 - DNA, 22 bp, Artificial Sequence
  Synthetic
tcacactctguggtccactuct

SEQ ID NO: 95802 - DNA, 23 bp, Artificial Sequence
  Synthetic
tctctaccagugacatggcugaa

SEQ ID NO: 95803 - DNA, 22 bp, Artificial Sequence
  Synthetic
tggcaucagtgguaaacaccag

SEQ ID NO: 95804 - DNA, 22 bp, Artificial Sequence
  Synthetic
ctgaaccugtctugagcgacat

SEQ ID NO: 95805 - DNA, 22 bp, Artificial Sequence
  Synthetic
ggccactuctgaatctgugacc

SEQ ID NO: 95806 - DNA, 26 bp, Artificial Sequence
  Synthetic
aaatatttctugacctgctuccccat

SEQ ID NO: 95807 - DNA, 23 bp, Artificial Sequence
  Synthetic
agacaccuggagcaagaaggaua

SEQ ID NO: 95808 - DNA, 23 bp, Artificial Sequence
  Synthetic
ggaggaatgaugcatcccactug

SEQ ID NO: 95809 - DNA, 21 bp, Artificial Sequence
  Synthetic
accauaggtggugccagagat

SEQ ID NO: 95810 - DNA, 20 bp, Artificial Sequence
  Synthetic
ctggagcagguttccucgat

SEQ ID NO: 95811 - DNA, 25 bp, Artificial Sequence
  Synthetic
ctcgacctgaugtatgtatgtgcut

SEQ ID NO: 95812 - DNA, 24 bp, Artificial Sequence
  Synthetic
cacaaagctacuggctgtgattuc

SEQ ID NO: 95813 - DNA, 22 bp, Artificial Sequence
  Synthetic
atgacugaaggctgacttuccc

SEQ ID NO: 95814 - DNA, 24 bp, Artificial Sequence
  Synthetic
gacctaggcaaauagatgggcaut

SEQ ID NO: 95815 - DNA, 21 bp, Artificial Sequence
  Synthetic
tcctgttggautctggcctuc

SEQ ID NO: 95816 - DNA, 25 bp, Artificial Sequence
  Synthetic
gaatcctcguagaaggacattgugt

SEQ ID NO: 95817 - DNA, 20 bp, Artificial Sequence
  Synthetic
caggcaaggcccacutctua

SEQ ID NO: 95818 - DNA, 22 bp, Artificial Sequence
  Synthetic
aggatgagaguctgcagagcut

SEQ ID NO: 95819 - DNA, 20 bp, Artificial Sequence
  Synthetic
ggauggtgtguacgaagcca

SEQ ID NO: 95820 - DNA, 25 bp, Artificial Sequence
  Synthetic
ttttatcaaagcutactggccaugt

SEQ ID NO: 95821 - DNA, 25 bp, Artificial Sequence
  Synthetic
actgaggttggutactgttggtauc

SEQ ID NO: 95822 - DNA, 28 bp, Artificial Sequence
  Synthetic
ctttcaggttauccacaacagaatcuga

SEQ ID NO: 95823 - DNA, 20 bp, Artificial Sequence
  Synthetic
cgagggaccuggaagttgut

SEQ ID NO: 95824 - DNA, 23 bp, Artificial Sequence
  Synthetic
gcacaggccacautcacgtauat

SEQ ID NO: 95825 - DNA, 22 bp, Artificial Sequence
  Synthetic
tcatauccaggctgtgucgact

SEQ ID NO: 95826 - DNA, 28 bp, Artificial Sequence
  Synthetic
tcctttagauagcaagactttccucagt

SEQ ID NO: 95827 - DNA, 26 bp, Artificial Sequence
  Synthetic
cgctgaatcttugctatggtgaauat

SEQ ID NO: 95828 - DNA, 26 bp, Artificial Sequence
  Synthetic
gttttcactggaautcaggtctauga

SEQ ID NO: 95829 - DNA, 24 bp, Artificial Sequence
  Synthetic
gagtgtgtgugtcttggtaaugga

SEQ ID NO: 95830 - DNA, 24 bp, Artificial Sequence
  Synthetic
cctgugcaaactcatcuagggaaa

SEQ ID NO: 95831 - DNA, 26 bp, Artificial Sequence
  Synthetic
gacatcacutacaatgugaacgacac

SEQ ID NO: 95832 - DNA, 22 bp, Artificial Sequence
  Synthetic
atgggctgguaagagacatgug

SEQ ID NO: 95833 - DNA, 23 bp, Artificial Sequence
  Synthetic
ctgaattccgggacugggattua

SEQ ID NO: 95834 - DNA, 23 bp, Artificial Sequence
  Synthetic
cctcttcaugacgcttguggaat

SEQ ID NO: 95835 - DNA, 28 bp, Artificial Sequence
  Synthetic
agtggaaguagttgtatgcttugagaag

SEQ ID NO: 95836 - DNA, 22 bp, Artificial Sequence
  Synthetic
gcttgcagguccattctcctut

SEQ ID NO: 95837 - DNA, 29 bp, Artificial Sequence
  Synthetic
ccctctcctaacautttcgttgtatctuc

SEQ ID NO: 95838 - DNA, 17 bp, Artificial Sequence
  Synthetic
gcggcgaccugcaucat

SEQ ID NO: 95839 - DNA, 18 bp, Artificial Sequence
  Synthetic
ttcaggcacgugcugaag

SEQ ID NO: 95840 - DNA, 31 bp, Artificial Sequence
  Synthetic
ttctcttagugaaaagttaacatttgugact

SEQ ID NO: 95841 - DNA, 21 bp, Artificial Sequence
  Synthetic
ggttuggcccgagaaauacga

SEQ ID NO: 95842 - DNA, 23 bp, Artificial Sequence
  Synthetic
tttgaucgtatttcucgggccaa

SEQ ID NO: 95843 - DNA, 28 bp, Artificial Sequence
  Synthetic
tttggatttcttcucctctactgtcuct

SEQ ID NO: 95844 - DNA, 23 bp, Artificial Sequence
  Synthetic
tgaaactggutggagttgtuggt

SEQ ID NO: 95845 - DNA, 19 bp, Artificial Sequence
  Synthetic
ccutcguggacaagaccgt

SEQ ID NO: 95846 - DNA, 18 bp, Artificial Sequence
  Synthetic
gugcgtgtucacgaacgg

SEQ ID NO: 95847 - DNA, 22 bp, Artificial Sequence
  Synthetic
cccugcuaggagagaggaaaca

SEQ ID NO: 95848 - DNA, 26 bp, Artificial Sequence
  Synthetic
tgaaccccacugatttaccattctut

SEQ ID NO: 95849 - DNA, 25 bp, Artificial Sequence
  Synthetic
gctctuaaggacacttugacaagca

SEQ ID NO: 95850 - DNA, 20 bp, Artificial Sequence
  Synthetic
ggcaggcaaguacctucact

SEQ ID NO: 95851 - DNA, 24 bp, Artificial Sequence
  Synthetic
caaggtctgguatctgctcctuac

SEQ ID NO: 95852 - DNA, 22 bp, Artificial Sequence
  Synthetic
gttcccccagucttaauccaca

SEQ ID NO: 95853 - DNA, 21 bp, Artificial Sequence
  Synthetic
ctgtgacccutgatggtggut

SEQ ID NO: 95854 - DNA, 20 bp, Artificial Sequence
  Synthetic
gacaactcccugagctgguc

SEQ ID NO: 95855 - DNA, 24 bp, Artificial Sequence
  Synthetic
gctgtagtgaaacuccttgggtut

SEQ ID NO: 95856 - DNA, 20 bp, Artificial Sequence
  Synthetic
caggccugcctcgtatauga

SEQ ID NO: 95857 - DNA, 23 bp, Artificial Sequence
  Synthetic
ctttttgaggucctgaaguccca

SEQ ID NO: 95858 - DNA, 24 bp, Artificial Sequence
  Synthetic
cccatgagauggttgtcugagaga

SEQ ID NO: 95859 - DNA, 22 bp, Artificial Sequence
  Synthetic
cauaaggcauaggccaagacca

SEQ ID NO: 95860 - DNA, 29 bp, Artificial Sequence
  Synthetic
caagactgtggaauctataactgacauca

SEQ ID NO: 95861 - DNA, 18 bp, Artificial Sequence
  Synthetic
ccaagggucagcgtccua

SEQ ID NO: 95862 - DNA, 24 bp, Artificial Sequence
  Synthetic
gtaggtgaagcugagggttatgug

SEQ ID NO: 95863 - DNA, 21 bp, Artificial Sequence
  Synthetic
gttcatcauggtgguggcaat

SEQ ID NO: 95864 - DNA, 22 bp, Artificial Sequence
  Synthetic
ggcagguagcatgtgaugaaca

SEQ ID NO: 95865 - DNA, 21 bp, Artificial Sequence
  Synthetic
ccagcuggagttctttaugcc

SEQ ID NO: 95866 - DNA, 21 bp, Artificial Sequence
  Synthetic
ccccaaaagcccagugtcuac

SEQ ID NO: 95867 - DNA, 21 bp, Artificial Sequence
  Synthetic
gcttccacaugaagaccugga

SEQ ID NO: 95868 - DNA, 25 bp, Artificial Sequence
  Synthetic
cggccaaautgaaaagguaaacagt

SEQ ID NO: 95869 - DNA, 19 bp, Artificial Sequence
  Synthetic
atguacaacgggtcgugct

SEQ ID NO: 95870 - DNA, 19 bp, Artificial Sequence
  Synthetic
agatggtgucccccucgat

SEQ ID NO: 95871 - DNA, 20 bp, Artificial Sequence
  Synthetic
ggtgagugctaacgcucaga

SEQ ID NO: 95872 - DNA, 27 bp, Artificial Sequence
  Synthetic
cttgaaggagcaaaauaagatgaugcc

SEQ ID NO: 95873 - DNA, 24 bp, Artificial Sequence
  Synthetic
ggtcatccugggaacagtgtauct

SEQ ID NO: 95874 - DNA, 22 bp, Artificial Sequence
  Synthetic
gcagagauggttcuccagcaaa

SEQ ID NO: 95875 - DNA, 20 bp, Artificial Sequence
  Synthetic
tcgtgttccutacggtggug

SEQ ID NO: 95876 - DNA, 20 bp, Artificial Sequence
  Synthetic
cgacccctuagcacgagtua

SEQ ID NO: 95877 - DNA, 19 bp, Artificial Sequence
  Synthetic
atttcgaaccucggucgca

SEQ ID NO: 95878 - DNA, 24 bp, Artificial Sequence
  Synthetic
ggtggaccacuttgaaataccugt

SEQ ID NO: 95879 - DNA, 27 bp, Artificial Sequence
  Synthetic
ccttttcggacagacuattaccucaga

SEQ ID NO: 95880 - DNA, 24 bp, Artificial Sequence
  Synthetic
ctatttgccacacugatgcaacuc

SEQ ID NO: 95881 - DNA, 27 bp, Artificial Sequence
  Synthetic
gtattattttucaagcccctccttucc

SEQ ID NO: 95882 - DNA, 28 bp, Artificial Sequence
  Synthetic
ctgcagatttugagcttgttgtagaaut

SEQ ID NO: 95883 - DNA, 25 bp, Artificial Sequence
  Synthetic
ctagactcuatttcctcuggacggt

SEQ ID NO: 95884 - DNA, 29 bp, Artificial Sequence
  Synthetic
tgatgaccaaacugtacctctctttaaug

SEQ ID NO: 95885 - DNA, 23 bp, Artificial Sequence
  Synthetic
agaagctcaaccaugccaatgua

SEQ ID NO: 95886 - DNA, 28 bp, Artificial Sequence
  Synthetic
ctgtacctctcuttaatgagctgguaaa

SEQ ID NO: 95887 - DNA, 28 bp, Artificial Sequence
  Synthetic
tgttttgttttgugtttattcctugcct

SEQ ID NO: 95888 - DNA, 28 bp, Artificial Sequence
  Synthetic
atggataacagaaaaugacagtgauggt

SEQ ID NO: 95889 - DNA, 25 bp, Artificial Sequence
  Synthetic
cacttatgagcgucctaaagacucc

SEQ ID NO: 95890 - DNA, 22 bp, Artificial Sequence
  Synthetic
tgcagguacagtcccagaucat

SEQ ID NO: 95891 - DNA, 23 bp, Artificial Sequence
  Synthetic
ggctcacauggactttcctttuc

SEQ ID NO: 95892 - DNA, 28 bp, Artificial Sequence
  Synthetic
ttgcttatttcugtttcagttttguggt

SEQ ID NO: 95893 - DNA, 24 bp, Artificial Sequence
  Synthetic
ccgaaacccaaaaugagtctccua

SEQ ID NO: 95894 - DNA, 22 bp, Artificial Sequence
  Synthetic
acaacacuggaggtgagaucct

SEQ ID NO: 95895 - DNA, 21 bp, Artificial Sequence
  Synthetic
ggatggaccgcuacctcauct

SEQ ID NO: 95896 - DNA, 20 bp, Artificial Sequence
  Synthetic
acctcggcuctcauccacat

SEQ ID NO: 95897 - DNA, 19 bp, Artificial Sequence
  Synthetic
cugcagctgucgaacaacc

SEQ ID NO: 95898 - DNA, 18 bp, Artificial Sequence
  Synthetic
gcaggucctgccctucac

SEQ ID NO: 95899 - DNA, 17 bp, Artificial Sequence
  Synthetic
tggcaccgaugcucaca

SEQ ID NO: 95900 - DNA, 24 bp, Artificial Sequence
  Synthetic
ccacagacacagaaacugaugacc

SEQ ID NO: 95901 - DNA, 21 bp, Artificial Sequence
  Synthetic
gtttcagcggugggtaaugga

SEQ ID NO: 95902 - DNA, 21 bp, Artificial Sequence
  Synthetic
gccagccagutgtctccuaag

SEQ ID NO: 95903 - DNA, 21 bp, Artificial Sequence
  Synthetic
ctggctaagucgagaggcaut

SEQ ID NO: 95904 - DNA, 26 bp, Artificial Sequence
  Synthetic
ccucacccaacgaaaaatuacagaat

SEQ ID NO: 95905 - DNA, 25 bp, Artificial Sequence
  Synthetic
ccagtgactcuggatttggttcuaa

SEQ ID NO: 95906 - DNA, 28 bp, Artificial Sequence
  Synthetic
tgcactcaaucaagaagttgcatuaaaa

SEQ ID NO: 95907 - DNA, 24 bp, Artificial Sequence
  Synthetic
acctaccucaggtgaactttguct

SEQ ID NO: 95908 - DNA, 20 bp, Artificial Sequence
  Synthetic
gtcaguggaagcccggauag

SEQ ID NO: 95909 - DNA, 21 bp, Artificial Sequence
  Synthetic
tgcccttgauggtcacactug

SEQ ID NO: 95910 - DNA, 28 bp, Artificial Sequence
  Synthetic
agattcagtcugtttacaaatgugagca

SEQ ID NO: 95911 - DNA, 28 bp, Artificial Sequence
  Synthetic
gtcttatttccaggucaacaaaggatuc

SEQ ID NO: 95912 - DNA, 17 bp, Artificial Sequence
  Synthetic
ctcugggcgactgugct

SEQ ID NO: 95913 - DNA, 19 bp, Artificial Sequence
  Synthetic
ggctccaaguccgcaacut

SEQ ID NO: 95914 - DNA, 23 bp, Artificial Sequence
  Synthetic
catccaagucagcccaatcauct

SEQ ID NO: 95915 - DNA, 27 bp, Artificial Sequence
  Synthetic
ttctgttaaugccaagtattgcttucc

SEQ ID NO: 95916 - DNA, 27 bp, Artificial Sequence
  Synthetic
gggattaacucaggtaaaaugcacaca

SEQ ID NO: 95917 - DNA, 25 bp, Artificial Sequence
  Synthetic
ctcatttccucatggtcacauggat

SEQ ID NO: 95918 - DNA, 23 bp, Artificial Sequence
  Synthetic
gtaugagggaacacacttgugct

SEQ ID NO: 95919 - DNA, 24 bp, Artificial Sequence
  Synthetic
tgacttcatgccuctactctcuca

SEQ ID NO: 95920 - DNA, 27 bp, Artificial Sequence
  Synthetic
ctggacacagugtgtttgattttacuc

SEQ ID NO: 95921 - DNA, 28 bp, Artificial Sequence
  Synthetic
gccttgggtaaguacaatagcaaagtut

SEQ ID NO: 95922 - DNA, 24 bp, Artificial Sequence
  Synthetic
ctggcaaauaaaactagggcauga

SEQ ID NO: 95923 - DNA, 21 bp, Artificial Sequence
  Synthetic
cuactccugcaccacagaagg

SEQ ID NO: 95924 - DNA, 20 bp, Artificial Sequence
  Synthetic
gggaaggguctggaauaggt

SEQ ID NO: 95925 - DNA, 23 bp, Artificial Sequence
  Synthetic
gtgtcctggguacatgtcttugt

SEQ ID NO: 95926 - DNA, 27 bp, Artificial Sequence
  Synthetic
gaaagaaagaagaacuctaagcugggt

SEQ ID NO: 95927 - DNA, 27 bp, Artificial Sequence
  Synthetic
caattgagtgctucatgcctttagaug

SEQ ID NO: 95928 - DNA, 21 bp, Artificial Sequence
  Synthetic
caccaaagaugtccgtccugt

SEQ ID NO: 95929 - DNA, 27 bp, Artificial Sequence
  Synthetic
gcatctctgttuactgacactctttug

SEQ ID NO: 95930 - DNA, 24 bp, Artificial Sequence
  Synthetic
gggaatcttcuctgtcagcctgua

SEQ ID NO: 95931 - DNA, 27 bp, Artificial Sequence
  Synthetic
cctatctataagcagcugtcatgaguc

SEQ ID NO: 95932 - DNA, 21 bp, Artificial Sequence
  Synthetic
tcaccuaacaugagcccacac

SEQ ID NO: 95933 - DNA, 20 bp, Artificial Sequence
  Synthetic
gcaaacggaagccugugact

SEQ ID NO: 95934 - DNA, 21 bp, Artificial Sequence
  Synthetic
caagauggcagcttcuagcct

SEQ ID NO: 95935 - DNA, 21 bp, Artificial Sequence
  Synthetic
cgtggatgaugccaccttcut

SEQ ID NO: 95936 - DNA, 19 bp, Artificial Sequence
  Synthetic
acccggacacaugcctuct

SEQ ID NO: 95937 - DNA, 18 bp, Artificial Sequence
  Synthetic
gaagcagcuguccccaca

SEQ ID NO: 95938 - DNA, 21 bp, Artificial Sequence
  Synthetic
cgcagguaaagcgtcacttut

SEQ ID NO: 95939 - DNA, 20 bp, Artificial Sequence
  Synthetic
ggatccugactccatucgct

SEQ ID NO: 95940 - DNA, 17 bp, Artificial Sequence
  Synthetic
augtcgucagccgcaca

SEQ ID NO: 95941 - DNA, 19 bp, Artificial Sequence
  Synthetic
agtcctccauggccaguca

SEQ ID NO: 95942 - DNA, 21 bp, Artificial Sequence
  Synthetic
cttcctgggcugtgtgtttuc

SEQ ID NO: 95943 - DNA, 21 bp, Artificial Sequence
  Synthetic
acagctgccacautcacacut

SEQ ID NO: 95944 - DNA, 21 bp, Artificial Sequence
  Synthetic
gtactgacaccugcatgucca

SEQ ID NO: 95945 - DNA, 22 bp, Artificial Sequence
  Synthetic
ctctctccagacuccacacuca

SEQ ID NO: 95946 - DNA, 26 bp, Artificial Sequence
  Synthetic
ctttttccattuctctctccctucca

SEQ ID NO: 95947 - DNA, 24 bp, Artificial Sequence
  Synthetic
aaaaugcttccaauggcaaaggaa

SEQ ID NO: 95948 - DNA, 21 bp, Artificial Sequence
  Synthetic
gggccacgcacutttctcaua

SEQ ID NO: 95949 - DNA, 25 bp, Artificial Sequence
  Synthetic
tcagtggttgaauccttactcctug

SEQ ID NO: 95950 - DNA, 22 bp, Artificial Sequence
  Synthetic
gggatguggaagaaactgtgut

SEQ ID NO: 95951 - DNA, 25 bp, Artificial Sequence
  Synthetic
gcattctcccuttcactcactttuc

SEQ ID NO: 95952 - DNA, 22 bp, Artificial Sequence
  Synthetic
acaggtcacauctggctcctua

SEQ ID NO: 95953 - DNA, 21 bp, Artificial Sequence
  Synthetic
gagaauaagtgcgugcccaac

SEQ ID NO: 95954 - DNA, 20 bp, Artificial Sequence
  Synthetic
ctgagugcgaggagttgugt

SEQ ID NO: 95955 - DNA, 23 bp, Artificial Sequence
  Synthetic
gcttgatgaccucaggaatguca

SEQ ID NO: 95956 - DNA, 19 bp, Artificial Sequence
  Synthetic
aggtcgccaccuagctuct

SEQ ID NO: 95957 - DNA, 22 bp, Artificial Sequence
  Synthetic
tgtggctccutttgttctgucc

SEQ ID NO: 95958 - DNA, 21 bp, Artificial Sequence
  Synthetic
gccgtaguatctctcgtugct

SEQ ID NO: 95959 - DNA, 23 bp, Artificial Sequence
  Synthetic
gactcagguttgaagagcugact

SEQ ID NO: 95960 - DNA, 20 bp, Artificial Sequence
  Synthetic
gcctggcacauccagtctua

SEQ ID NO: 95961 - DNA, 25 bp, Artificial Sequence
  Synthetic
gcgtgcatcugtcttgtgtctauat

SEQ ID NO: 95962 - DNA, 23 bp, Artificial Sequence
  Synthetic
augcatggaactugaggagacaa

SEQ ID NO: 95963 - DNA, 22 bp, Artificial Sequence
  Synthetic
cagtttcccautatgccgtugg

SEQ ID NO: 95964 - DNA, 21 bp, Artificial Sequence
  Synthetic
aacatgaccuttgaccugcca

SEQ ID NO: 95965 - DNA, 27 bp, Artificial Sequence
  Synthetic
ctcgtgaaatugagagtgagtgtaugt

SEQ ID NO: 95966 - DNA, 23 bp, Artificial Sequence
  Synthetic
cagacattcgutcccactcauct

SEQ ID NO: 95967 - DNA, 29 bp, Artificial Sequence
  Synthetic
agtcattcgatuttcttcttatgguccaa

SEQ ID NO: 95968 - DNA, 23 bp, Artificial Sequence
  Synthetic
ctcgugattgctttuggaagagg

SEQ ID NO: 95969 - DNA, 26 bp, Artificial Sequence
  Synthetic
tcataatcggcccautttggttctua

SEQ ID NO: 95970 - DNA, 23 bp, Artificial Sequence
  Synthetic
agtcagcugagggaaagtaucct

SEQ ID NO: 95971 - DNA, 21 bp, Artificial Sequence
  Synthetic
cattctuccacacccagccua

SEQ ID NO: 95972 - DNA, 22 bp, Artificial Sequence
  Synthetic
ggtaucaacccaggagtgctuc

SEQ ID NO: 95973 - DNA, 23 bp, Artificial Sequence
  Synthetic
gcttacatuggccccataucagt

SEQ ID NO: 95974 - DNA, 28 bp, Artificial Sequence
  Synthetic
gcaaagtatauggaagcttctucaggaa

SEQ ID NO: 95975 - DNA, 24 bp, Artificial Sequence
  Synthetic
gcutctgtgtctucagcaaaaagt

SEQ ID NO: 95976 - DNA, 27 bp, Artificial Sequence
  Synthetic
ctttttacagccuaatagtcccaguga

SEQ ID NO: 95977 - DNA, 27 bp, Artificial Sequence
  Synthetic
cctgagtagaaaaugggttctttgcut

SEQ ID NO: 95978 - DNA, 28 bp, Artificial Sequence
  Synthetic
ggtagaaaaacuttttgcugaagacaca

SEQ ID NO: 95979 - DNA, 24 bp, Artificial Sequence
  Synthetic
gagtttttacaauggccacaccut

SEQ ID NO: 95980 - DNA, 23 bp, Artificial Sequence
  Synthetic
aagcccgttuacattgtggguat

SEQ ID NO: 95981 - DNA, 22 bp, Artificial Sequence
  Synthetic
gactgagacgaucactggctuc

SEQ ID NO: 95982 - DNA, 26 bp, Artificial Sequence
  Synthetic
agagcattaataaucactgccctgut

SEQ ID NO: 95983 - DNA, 24 bp, Artificial Sequence
  Synthetic
gagaagtatgugcatggtgucaga

SEQ ID NO: 95984 - DNA, 21 bp, Artificial Sequence
  Synthetic
gccatagcaguagcactggua

SEQ ID NO: 95985 - DNA, 26 bp, Artificial Sequence
  Synthetic
aggctgtttaucttttccttccaugt

SEQ ID NO: 95986 - DNA, 20 bp, Artificial Sequence
  Synthetic
gctggaacggcaucaactug

SEQ ID NO: 95987 - DNA, 24 bp, Artificial Sequence
  Synthetic
caggcactaauctctagctaugct

SEQ ID NO: 95988 - DNA, 28 bp, Artificial Sequence
  Synthetic
tcaagacataaacuaaccaacaagtuca

SEQ ID NO: 95989 - DNA, 23 bp, Artificial Sequence
  Synthetic
ctctggtucagactgcaguaacc

SEQ ID NO: 95990 - DNA, 23 bp, Artificial Sequence
  Synthetic
aaaccaagcaguggttacguact

SEQ ID NO: 95991 - DNA, 24 bp, Artificial Sequence
  Synthetic
gtggatgtugcatttgctttucac

SEQ ID NO: 95992 - DNA, 28 bp, Artificial Sequence
  Synthetic
tttccaaaacaaugatgaacatucagca

SEQ ID NO: 95993 - DNA, 21 bp, Artificial Sequence
  Synthetic
acctctttuggcaagcaucct

SEQ ID NO: 95994 - DNA, 22 bp, Artificial Sequence
  Synthetic
gacaagucaccacaggacagua

SEQ ID NO: 95995 - DNA, 28 bp, Artificial Sequence
  Synthetic
ttacttaccucacaacgtaatucacaca

SEQ ID NO: 95996 - DNA, 24 bp, Artificial Sequence
  Synthetic
tctcaaccacagugcattgtaugt

SEQ ID NO: 95997 - DNA, 33 bp, Artificial Sequence
  Synthetic
ttggtagcgatguaaaagaattaaaatttagut

SEQ ID NO: 95998 - DNA, 23 bp, Artificial Sequence
  Synthetic
gggcaatcaauggatgaaagugg

SEQ ID NO: 95999 - DNA, 28 bp, Artificial Sequence
  Synthetic
cagttaacttgauccaaagctctgagua

SEQ ID NO: 96000 - DNA, 24 bp, Artificial Sequence
  Synthetic
gaaacctacugcagggugaagaat

SEQ ID NO: 96001 - DNA, 26 bp, Artificial Sequence
  Synthetic
gcagtattguagccaggcttcuaaaa

SEQ ID NO: 96002 - DNA, 28 bp, Artificial Sequence
  Synthetic
cttactgtaacugctgatggttaugaga

SEQ ID NO: 96003 - DNA, 23 bp, Artificial Sequence
  Synthetic
tcacgutgtacttguccacagag

SEQ ID NO: 96004 - DNA, 17 bp, Artificial Sequence
  Synthetic
ccucacccgugcccaag

SEQ ID NO: 96005 - DNA, 17 bp, Artificial Sequence
  Synthetic
cccagcccuaccgtgut

SEQ ID NO: 96006 - DNA, 23 bp, Artificial Sequence
  Synthetic
accucacctaugagaggaaggac

SEQ ID NO: 96007 - DNA, 22 bp, Artificial Sequence
  Synthetic
ttaacagcaugacgugcagaga

SEQ ID NO: 96008 - DNA, 21 bp, Artificial Sequence
  Synthetic
ctgacaccauccgtctgtcut

SEQ ID NO: 96009 - DNA, 21 bp, Artificial Sequence
  Synthetic
agatagtcuggtagccugcgt

SEQ ID NO: 96010 - DNA, 22 bp, Artificial Sequence
  Synthetic
tctccauccctttgagcuccat

SEQ ID NO: 96011 - DNA, 22 bp, Artificial Sequence
  Synthetic
acatttccaaauccccctgucc

SEQ ID NO: 96012 - DNA, 21 bp, Artificial Sequence
  Synthetic
cctcatcgucctcatcgccua

SEQ ID NO: 96013 - DNA, 20 bp, Artificial Sequence
  Synthetic
cccctucgacaggacccuaa

SEQ ID NO: 96014 - DNA, 22 bp, Artificial Sequence
  Synthetic
ccttcctgcauccagggaatut

SEQ ID NO: 96015 - DNA, 23 bp, Artificial Sequence
  Synthetic
ctctcgaauccaggcaaggaaut

SEQ ID NO: 96016 - DNA, 21 bp, Artificial Sequence
  Synthetic
gggaaaugaaagagcgcctug

SEQ ID NO: 96017 - DNA, 22 bp, Artificial Sequence
  Synthetic
cccagcaggaucagagaaagug

SEQ ID NO: 96018 - DNA, 28 bp, Artificial Sequence
  Synthetic
agaactagaccauggattaggtggaaua

SEQ ID NO: 96019 - DNA, 29 bp, Artificial Sequence
  Synthetic
agagtttttgacaaautgagttctgcaut

SEQ ID NO: 96020 - DNA, 21 bp, Artificial Sequence
  Synthetic
gtgacctuctcgtcacuggaa

SEQ ID NO: 96021 - DNA, 24 bp, Artificial Sequence
  Synthetic
gatcggaagutgctttgtttugct

SEQ ID NO: 96022 - DNA, 22 bp, Artificial Sequence
  Synthetic
gcucagggctgtaucacagaga

SEQ ID NO: 96023 - DNA, 23 bp, Artificial Sequence
  Synthetic
ctgggagcuctattccacctuac

SEQ ID NO: 96024 - DNA, 21 bp, Artificial Sequence
  Synthetic
ggaggaccgugggtgaagaua

SEQ ID NO: 96025 - DNA, 22 bp, Artificial Sequence
  Synthetic
ttactcugcccagacaacacuc

SEQ ID NO: 96026 - DNA, 20 bp, Artificial Sequence
  Synthetic
gtctcagucacctcggtgut

SEQ ID NO: 96027 - DNA, 26 bp, Artificial Sequence
  Synthetic
gcttggttaaacugaggttctccaua

SEQ ID NO: 96028 - DNA, 25 bp, Artificial Sequence
  Synthetic
ccagcccauctttcttctattcuga

SEQ ID NO: 96029 - DNA, 22 bp, Artificial Sequence
  Synthetic
ttgtcaccagguctcctaugga

SEQ ID NO: 96030 - DNA, 23 bp, Artificial Sequence
  Synthetic
ctttgaacttguccactggctuc

SEQ ID NO: 96031 - DNA, 23 bp, Artificial Sequence
  Synthetic
gggaactauagctcgaggtuact

SEQ ID NO: 96032 - DNA, 22 bp, Artificial Sequence
  Synthetic
ggttgucacagccaatcatcuc

SEQ ID NO: 96033 - DNA, 24 bp, Artificial Sequence
  Synthetic
gacactttcucttcctctuggcat

SEQ ID NO: 96034 - DNA, 26 bp, Artificial Sequence
  Synthetic
gggttttgttautgtacaggaaaugg

SEQ ID NO: 96035 - DNA, 24 bp, Artificial Sequence
  Synthetic
acatggaagccauggaattctuca

SEQ ID NO: 96036 - DNA, 29 bp, Artificial Sequence
  Synthetic
acttgataacaacauttcactgctctuca

SEQ ID NO: 96037 - DNA, 26 bp, Artificial Sequence
  Synthetic
aactttgttttccuctgcctcauaca

SEQ ID NO: 96038 - DNA, 21 bp, Artificial Sequence
  Synthetic
acaacagcugcctcuccaaaa

SEQ ID NO: 96039 - DNA, 22 bp, Artificial Sequence
  Synthetic
ctcattgcaaagugcacacuca

SEQ ID NO: 96040 - DNA, 22 bp, Artificial Sequence
  Synthetic
gggttcatctucaagggtggut

SEQ ID NO: 96041 - DNA, 22 bp, Artificial Sequence
  Synthetic
gcttctctgcugagtcccatuc

SEQ ID NO: 96042 - DNA, 27 bp, Artificial Sequence
  Synthetic
agatgaggutctagtattucccgaaca

SEQ ID NO: 96043 - DNA, 28 bp, Artificial Sequence
  Synthetic
gcttcactguggacttacaaatguaaaa

SEQ ID NO: 96044 - DNA, 23 bp, Artificial Sequence
  Synthetic
ctgtgtgaccauctcgtgtgaut

SEQ ID NO: 96045 - DNA, 19 bp, Artificial Sequence
  Synthetic
tgccuagccgaagctgaug

SEQ ID NO: 96046 - DNA, 18 bp, Artificial Sequence
  Synthetic
cccucaccucgcaagcat

SEQ ID NO: 96047 - DNA, 20 bp, Artificial Sequence
  Synthetic
tcccuccccaacccttctua

SEQ ID NO: 96048 - DNA, 21 bp, Artificial Sequence
  Synthetic
ccagtgcucagtaacgtgcuc

SEQ ID NO: 96049 - DNA, 23 bp, Artificial Sequence
  Synthetic
agtgcccaugatatgcaggaauc

SEQ ID NO: 96050 - DNA, 27 bp, Artificial Sequence
  Synthetic
caggtatgucaaggaagatacagtugt

SEQ ID NO: 96051 - DNA, 28 bp, Artificial Sequence
  Synthetic
gaccgtcatggugaaaatattctcttug

SEQ ID NO: 96052 - DNA, 32 bp, Artificial Sequence
  Synthetic
tcacaaataagatucacgtagattttgugaaa

SEQ ID NO: 96053 - DNA, 26 bp, Artificial Sequence
  Synthetic
ggcctatatugcagggtttgatgaua

SEQ ID NO: 96054 - DNA, 33 bp, Artificial Sequence
  Synthetic
agtcatataaaacugaagtttaccatatcauca

SEQ ID NO: 96055 - DNA, 28 bp, Artificial Sequence
  Synthetic
gaaatcctcatucctctacaatcaguca

SEQ ID NO: 96056 - DNA, 25 bp, Artificial Sequence
  Synthetic
tgtacgcautcaccagucaaagaat

SEQ ID NO: 96057 - DNA, 27 bp, Artificial Sequence
  Synthetic
aggcattgtguttcttttagguacagt

SEQ ID NO: 96058 - DNA, 22 bp, Artificial Sequence
  Synthetic
ggaacggcaguaagctgatcua

SEQ ID NO: 96059 - DNA, 32 bp, Artificial Sequence
  Synthetic
ccaagaatataatacgutgttatggttgaaug

SEQ ID NO: 96060 - DNA, 26 bp, Artificial Sequence
  Synthetic
ggtacccagaautgatggaagtguag

SEQ ID NO: 96061 - DNA, 28 bp, Artificial Sequence
  Synthetic
tccacattaagcaugagcactcatttua

SEQ ID NO: 96062 - DNA, 28 bp, Artificial Sequence
  Synthetic
gcttcttcuaccagctttttaagcatut

SEQ ID NO: 96063 - DNA, 25 bp, Artificial Sequence
  Synthetic
acagactgcugaacctttgtaauca

SEQ ID NO: 96064 - DNA, 21 bp, Artificial Sequence
  Synthetic
aacaaaaacugctgtggcgut

SEQ ID NO: 96065 - DNA, 26 bp, Artificial Sequence
  Synthetic
ctgcatctggguaattctttcaccua

SEQ ID NO: 96066 - DNA, 27 bp, Artificial Sequence
  Synthetic
agtagtgugagaaaccttttgtugagg

SEQ ID NO: 96067 - DNA, 22 bp, Artificial Sequence
  Synthetic
cagcattcuccaggtgacagut

SEQ ID NO: 96068 - DNA, 28 bp, Artificial Sequence
  Synthetic
agctacccagtutagagaatcttctuga

SEQ ID NO: 96069 - DNA, 32 bp, Artificial Sequence
  Synthetic
aacattttaacauaggctctatctatctucag

SEQ ID NO: 96070 - DNA, 22 bp, Artificial Sequence
  Synthetic
gccaggttaucagctggatgug

SEQ ID NO: 96071 - DNA, 25 bp, Artificial Sequence
  Synthetic
tcccatttctuagtgtgcacagaug

SEQ ID NO: 96072 - DNA, 26 bp, Artificial Sequence
  Synthetic
cttacctctgcauctacctcaatucc

SEQ ID NO: 96073 - DNA, 25 bp, Artificial Sequence
  Synthetic
gctaaaagcagcuttgtgccattua

SEQ ID NO: 96074 - DNA, 24 bp, Artificial Sequence
  Synthetic
ccagcuggcacaaattuaaggaaa

SEQ ID NO: 96075 - DNA, 28 bp, Artificial Sequence
  Synthetic
atttaaatatgcugctggaaaaactcug

SEQ ID NO: 96076 - DNA, 22 bp, Artificial Sequence
  Synthetic
cacaccgucttcaaacaugaca

SEQ ID NO: 96077 - DNA, 29 bp, Artificial Sequence
  Synthetic
ccttgtagaaauggatactgaccaatuga

SEQ ID NO: 96078 - DNA, 26 bp, Artificial Sequence
  Synthetic
catattggacauggaaatcucgggaa

SEQ ID NO: 96079 - DNA, 24 bp, Artificial Sequence
  Synthetic
catgactacuggtctcccaatuca

SEQ ID NO: 96080 - DNA, 28 bp, Artificial Sequence
  Synthetic
cagctttgataauggctcttcauagagt

SEQ ID NO: 96081 - DNA, 26 bp, Artificial Sequence
  Synthetic
cagaacttttucagcttggaggacua

SEQ ID NO: 96082 - DNA, 20 bp, Artificial Sequence
  Synthetic
aagtgcuagctggttgugct

SEQ ID NO: 96083 - DNA, 27 bp, Artificial Sequence
  Synthetic
tcttactttggcagauaggttgtgtuc

SEQ ID NO: 96084 - DNA, 28 bp, Artificial Sequence
  Synthetic
cttccccctuctaaatgttcataugact

SEQ ID NO: 96085 - DNA, 27 bp, Artificial Sequence
  Synthetic
gctatttgcauacagataccagctugt

SEQ ID NO: 96086 - DNA, 26 bp, Artificial Sequence
  Synthetic
actcccacccaacuataggaaauaca

SEQ ID NO: 96087 - DNA, 23 bp, Artificial Sequence
  Synthetic
ctacacatgugcacgtaacucac

SEQ ID NO: 96088 - DNA, 21 bp, Artificial Sequence
  Synthetic
cccatgaaccugggtatuggt

SEQ ID NO: 96089 - DNA, 21 bp, Artificial Sequence
  Synthetic
atttcccuggcgcagataguc

SEQ ID NO: 96090 - DNA, 27 bp, Artificial Sequence
  Synthetic
ggtagatgacugacattgaccaugaaa

SEQ ID NO: 96091 - DNA, 20 bp, Artificial Sequence
  Synthetic
acttctucgcccgttcctuc

SEQ ID NO: 96092 - DNA, 23 bp, Artificial Sequence
  Synthetic
gcguggagaacagcgagattuat

SEQ ID NO: 96093 - DNA, 24 bp, Artificial Sequence
  Synthetic
gggtttggaaugaattctgggtug

SEQ ID NO: 96094 - DNA, 22 bp, Artificial Sequence
  Synthetic
agtgauaacagggcagcaaugt

SEQ ID NO: 96095 - DNA, 29 bp, Artificial Sequence
  Synthetic
gaggaataugacccttaaccaaugacaat

SEQ ID NO: 96096 - DNA, 26 bp, Artificial Sequence
  Synthetic
ggttcctaagcuaactcttcccauct

SEQ ID NO: 96097 - DNA, 21 bp, Artificial Sequence
  Synthetic
atcccgaagccaaugtaccuc

SEQ ID NO: 96098 - DNA, 20 bp, Artificial Sequence
  Synthetic
gtgtcagcuccaggtucagg

SEQ ID NO: 96099 - DNA, 25 bp, Artificial Sequence
  Synthetic
accactatccagucatcctgtucat

SEQ ID NO: 96100 - DNA, 20 bp, Artificial Sequence
  Synthetic
cttcgggauggacagaucct

SEQ ID NO: 96101 - DNA, 21 bp, Artificial Sequence
  Synthetic
gctttcugccctctgtgugac

SEQ ID NO: 96102 - DNA, 26 bp, Artificial Sequence
  Synthetic
aauccaagttcatuacaggaaaccca

SEQ ID NO: 96103 - DNA, 28 bp, Artificial Sequence
  Synthetic
gaatacagtggccuaaagaatcctgtua

SEQ ID NO: 96104 - DNA, 28 bp, Artificial Sequence
  Synthetic
acaacagcaatuccttctaacatcucaa

SEQ ID NO: 96105 - DNA, 30 bp, Artificial Sequence
  Synthetic
gaattaaacaugtggacaugaaccaaaaga

SEQ ID NO: 96106 - DNA, 22 bp, Artificial Sequence
  Synthetic
agtcaugcaggagggaagagua

SEQ ID NO: 96107 - DNA, 25 bp, Artificial Sequence
  Synthetic
gcaacaaacucagaatgacctugat

SEQ ID NO: 96108 - DNA, 21 bp, Artificial Sequence
  Synthetic
atggtgggaagggugaacauc

SEQ ID NO: 96109 - DNA, 28 bp, Artificial Sequence
  Synthetic
gcugataaactuggaaggaaaagaggac

SEQ ID NO: 96110 - DNA, 21 bp, Artificial Sequence
  Synthetic
gctgagauggtgcttgcucaa

SEQ ID NO: 96111 - DNA, 22 bp, Artificial Sequence
  Synthetic
ccagttcaccuctttccacugt

SEQ ID NO: 96112 - DNA, 22 bp, Artificial Sequence
  Synthetic
ccccagagaagugttugaacca

SEQ ID NO: 96113 - DNA, 25 bp, Artificial Sequence
  Synthetic
gccagattcuctacagccttuagat

SEQ ID NO: 96114 - DNA, 27 bp, Artificial Sequence
  Synthetic
tcccacaccuagaaagtcttatucaga

SEQ ID NO: 96115 - DNA, 23 bp, Artificial Sequence
  Synthetic
ccatcgactucggcctatagtut

SEQ ID NO: 96116 - DNA, 21 bp, Artificial Sequence
  Synthetic
gcaccacagggcautctugat

SEQ ID NO: 96117 - DNA, 28 bp, Artificial Sequence
  Synthetic
ccctggctaaagutaatgacattttcut

SEQ ID NO: 96118 - DNA, 27 bp, Artificial Sequence
  Synthetic
cctaaagutgctatctugggaaacagt

SEQ ID NO: 96119 - DNA, 27 bp, Artificial Sequence
  Synthetic
ggttctgtctttutcccaattagcaut

SEQ ID NO: 96120 - DNA, 27 bp, Artificial Sequence
  Synthetic
gtagatcagaaacucaggagtgtctut

SEQ ID NO: 96121 - DNA, 28 bp, Artificial Sequence
  Synthetic
accttgttucactatttcaauggaacca

SEQ ID NO: 96122 - DNA, 27 bp, Artificial Sequence
  Synthetic
gcattgttttgcuacctggaagaauat

SEQ ID NO: 96123 - DNA, 24 bp, Artificial Sequence
  Synthetic
atgcactgauctttccccttucaa

SEQ ID NO: 96124 - DNA, 28 bp, Artificial Sequence
  Synthetic
gtgaaatctcuagcaaccattttgtuga

SEQ ID NO: 96125 - DNA, 28 bp, Artificial Sequence
  Synthetic
accgctttatuaccaactgttctcauaa

SEQ ID NO: 96126 - DNA, 22 bp, Artificial Sequence
  Synthetic
caagaaccaugtcgccattgug

SEQ ID NO: 96127 - DNA, 27 bp, Artificial Sequence
  Synthetic
acgagaaccauttttcttcugaacaga

SEQ ID NO: 96128 - DNA, 28 bp, Artificial Sequence
  Synthetic
agttggtaauaaagcggtctcaagttua

SEQ ID NO: 96129 - DNA, 24 bp, Artificial Sequence
  Synthetic
ggaacggtucttgagacauacaga

SEQ ID NO: 96130 - DNA, 28 bp, Artificial Sequence
  Synthetic
aactcaataaagauggcttactgauccc

SEQ ID NO: 96131 - DNA, 22 bp, Artificial Sequence
  Synthetic
gcacacagccacuttcctagut

SEQ ID NO: 96132 - DNA, 25 bp, Artificial Sequence
  Synthetic
gggtcaatagagutaatgcagguga

SEQ ID NO: 96133 - DNA, 28 bp, Artificial Sequence
  Synthetic
ggaaacgtauggtgtagatactugcaat

SEQ ID NO: 96134 - DNA, 25 bp, Artificial Sequence
  Synthetic
gcttagataauagcttggcugcaca

SEQ ID NO: 96135 - DNA, 25 bp, Artificial Sequence
  Synthetic
gcatgaacuaccatcagccaatuga

SEQ ID NO: 96136 - DNA, 28 bp, Artificial Sequence
  Synthetic
ggaggatttuatagaacagauggcaagt

SEQ ID NO: 96137 - DNA, 23 bp, Artificial Sequence
  Synthetic
ctccgtgaugttgcttgattuca

SEQ ID NO: 96138 - DNA, 24 bp, Artificial Sequence
  Synthetic
gggaggattucatgatatgcugga

SEQ ID NO: 96139 - DNA, 27 bp, Artificial Sequence
  Synthetic
ccacaguctggtttctuaacaaaagga

SEQ ID NO: 96140 - DNA, 24 bp, Artificial Sequence
  Synthetic
gtgtgtgcuaggcattcagauaga

SEQ ID NO: 96141 - DNA, 26 bp, Artificial Sequence
  Synthetic
ttggtctggaguaaagaagccaatut

SEQ ID NO: 96142 - DNA, 26 bp, Artificial Sequence
  Synthetic
gggtgtgatguatagctacgtaaugt

SEQ ID NO: 96143 - DNA, 28 bp, Artificial Sequence
  Synthetic
tgcaatgaaucaaacacagcaaaaagua

SEQ ID NO: 96144 - DNA, 20 bp, Artificial Sequence
  Synthetic
cacccacutccugggaacag

SEQ ID NO: 96145 - DNA, 20 bp, Artificial Sequence
  Synthetic
cucttgccaaugcacgaagg

SEQ ID NO: 96146 - DNA, 26 bp, Artificial Sequence
  Synthetic
gggatgagagcuatcttgttctttut

SEQ ID NO: 96147 - DNA, 26 bp, Artificial Sequence
  Synthetic
caggcatugaagcaaagcatactuac

SEQ ID NO: 96148 - DNA, 28 bp, Artificial Sequence
  Synthetic
tttgattttactgcuctgcttttgtugt

SEQ ID NO: 96149 - DNA, 24 bp, Artificial Sequence
  Synthetic
gtgtgcatgaccutgttcttgtuc

SEQ ID NO: 96150 - DNA, 23 bp, Artificial Sequence
  Synthetic
gaacattagtgcuacgcggaaug

SEQ ID NO: 96151 - DNA, 20 bp, Artificial Sequence
  Synthetic
ccaagccacuccacuccaat

SEQ ID NO: 96152 - DNA, 27 bp, Artificial Sequence
  Synthetic
accattctgcaaagutactacccaaut

SEQ ID NO: 96153 - DNA, 27 bp, Artificial Sequence
  Synthetic
agtcaactgaaggagutgctgtaatut

SEQ ID NO: 96154 - DNA, 22 bp, Artificial Sequence
  Synthetic
tutacatgtggucgaggccaaa

SEQ ID NO: 96155 - DNA, 26 bp, Artificial Sequence
  Synthetic
cataaccaaaugcagaataggcucac

SEQ ID NO: 96156 - DNA, 28 bp, Artificial Sequence
  Synthetic
tgacagataaacgcuccatattgttuca

SEQ ID NO: 96157 - DNA, 25 bp, Artificial Sequence
  Synthetic
agcaaggaaauaccatuccaaccat

SEQ ID NO: 96158 - DNA, 28 bp, Artificial Sequence
  Synthetic
aacctcaauaggacagagaactctttug

SEQ ID NO: 96159 - DNA, 20 bp, Artificial Sequence
  Synthetic
tcaagctcggutgctctgug

SEQ ID NO: 96160 - DNA, 23 bp, Artificial Sequence
  Synthetic
gcccccaatucccctaaacatuc

SEQ ID NO: 96161 - DNA, 25 bp, Artificial Sequence
  Synthetic
gcaacagacagugaaacaguagaac

SEQ ID NO: 96162 - DNA, 23 bp, Artificial Sequence
  Synthetic
ccttucaaaagcactgucaccaa

SEQ ID NO: 96163 - DNA, 26 bp, Artificial Sequence
  Synthetic
aagcttcctagcucaggaaaacauac

SEQ ID NO: 96164 - DNA, 22 bp, Artificial Sequence
  Synthetic
cccgagagugaaggctuaacag

SEQ ID NO: 96165 - DNA, 23 bp, Artificial Sequence
  Synthetic
cacacugtcagatuggacacaga

SEQ ID NO: 96166 - DNA, 22 bp, Artificial Sequence
  Synthetic
catagggcuaaggcaagaggug

SEQ ID NO: 96167 - DNA, 21 bp, Artificial Sequence
  Synthetic
ttgggcauggctttggactua

SEQ ID NO: 96168 - DNA, 26 bp, Artificial Sequence
  Synthetic
gaattucaggcattctgugcaaagat

SEQ ID NO: 96169 - DNA, 28 bp, Artificial Sequence
  Synthetic
ggtaccataugtgatccttuacaaagct

SEQ ID NO: 96170 - DNA, 27 bp, Artificial Sequence
  Synthetic
gcagctttguaaaggatcacatauggt

SEQ ID NO: 96171 - DNA, 30 bp, Artificial Sequence
  Synthetic
gccaattctgcautcttttctaagtaauaa

SEQ ID NO: 96172 - DNA, 20 bp, Artificial Sequence
  Synthetic
ggaaucagcggaggaggaug

SEQ ID NO: 96173 - DNA, 17 bp, Artificial Sequence
  Synthetic
cgtuggcgtggtugact

SEQ ID NO: 96174 - DNA, 23 bp, Artificial Sequence
  Synthetic
ccugaaagggaaacucacaacct

SEQ ID NO: 96175 - DNA, 25 bp, Artificial Sequence
  Synthetic
cacagutcatuccaagagaccacat

SEQ ID NO: 96176 - DNA, 28 bp, Artificial Sequence
  Synthetic
ggttcactatcagacuttcttaaggcua

SEQ ID NO: 96177 - DNA, 19 bp, Artificial Sequence
  Synthetic
ggcaggtutgtggccauct

SEQ ID NO: 96178 - DNA, 27 bp, Artificial Sequence
  Synthetic
acatgaggatauacctggccuaaaaga

SEQ ID NO: 96179 - DNA, 28 bp, Artificial Sequence
  Synthetic
ctgtcttguaaagcatgattgcauaaca

SEQ ID NO: 96180 - DNA, 29 bp, Artificial Sequence
  Synthetic
tggcagtttucgaacaaaataaaggaaut

SEQ ID NO: 96181 - DNA, 27 bp, Artificial Sequence
  Synthetic
cttcagaacttccuggatcacgataug

SEQ ID NO: 96182 - DNA, 20 bp, Artificial Sequence
  Synthetic
ccaaacgcaagcucacacug

SEQ ID NO: 96183 - DNA, 27 bp, Artificial Sequence
  Synthetic
aatcatactggaaugcatccatgtgua

SEQ ID NO: 96184 - DNA, 28 bp, Artificial Sequence
  Synthetic
aggctataattuactcaccctcttucct

SEQ ID NO: 96185 - DNA, 26 bp, Artificial Sequence
  Synthetic
tctcatttgguctgttcttgtuccaa

SEQ ID NO: 96186 - DNA, 28 bp, Artificial Sequence
  Synthetic
ttcagataaugaagggcacgttctaaut

SEQ ID NO: 96187 - DNA, 20 bp, Artificial Sequence
  Synthetic
cugatcttgcugccaaagca

SEQ ID NO: 96188 - DNA, 27 bp, Artificial Sequence
  Synthetic
ttccuaaagttcgaaugagagcagaag

SEQ ID NO: 96189 - DNA, 26 bp, Artificial Sequence
  Synthetic
tcacccagacaaaugtacttttuggt

SEQ ID NO: 96190 - DNA, 19 bp, Artificial Sequence
  Synthetic
caggagugacagggcuacc

SEQ ID NO: 96191 - DNA, 24 bp, Artificial Sequence
  Synthetic
tgaatgatuaaacgcccctuacca

SEQ ID NO: 96192 - DNA, 26 bp, Artificial Sequence
  Synthetic
gtgttgatggaauaatttgccccuac

SEQ ID NO: 96193 - DNA, 23 bp, Artificial Sequence
  Synthetic
ggtggcttaggugtaactggaut

SEQ ID NO: 96194 - DNA, 21 bp, Artificial Sequence
  Synthetic
ccctttuccacagccactuca

SEQ ID NO: 96195 - DNA, 22 bp, Artificial Sequence
  Synthetic
ccatcttgugatgcctguacac

SEQ ID NO: 96196 - DNA, 24 bp, Artificial Sequence
  Synthetic
gggattgtcauttgtgcatttugg

SEQ ID NO: 96197 - DNA, 28 bp, Artificial Sequence
  Synthetic
tgggttucaccacagtaatatttcucaa

SEQ ID NO: 96198 - DNA, 26 bp, Artificial Sequence
  Synthetic
tgttggaaugcataagaacataugct

SEQ ID NO: 96199 - DNA, 26 bp, Artificial Sequence
  Synthetic
ggaactgaaacucatgacatctgugt

SEQ ID NO: 96200 - DNA, 26 bp, Artificial Sequence
  Synthetic
gtttacttaccauacactggcctuga

SEQ ID NO: 96201 - DNA, 28 bp, Artificial Sequence
  Synthetic
gcacaaaggaucgttgtaaactctatug

SEQ ID NO: 96202 - DNA, 26 bp, Artificial Sequence
  Synthetic
agaaataattggutccagcaaccuga

SEQ ID NO: 96203 - DNA, 28 bp, Artificial Sequence
  Synthetic
tggcagtaagtaaautatgctggttcut

SEQ ID NO: 96204 - DNA, 31 bp, Artificial Sequence
  Synthetic
aagattatgataguaccggtttatugcacaa

SEQ ID NO: 96205 - DNA, 26 bp, Artificial Sequence
  Synthetic
tgaacagaugcaaggaaatccucaat

SEQ ID NO: 96206 - DNA, 29 bp, Artificial Sequence
  Synthetic
tgcacaattcuagaagcttatctgtuagg

SEQ ID NO: 96207 - DNA, 23 bp, Artificial Sequence
  Synthetic
tcatcttaucccatgcgtgugaa

SEQ ID NO: 96208 - DNA, 22 bp, Artificial Sequence
  Synthetic
cctagtggugagtcaggcauct

SEQ ID NO: 96209 - DNA, 18 bp, Artificial Sequence
  Synthetic
gtagguccacgggctcug

SEQ ID NO: 96210 - DNA, 20 bp, Artificial Sequence
  Synthetic
caacacccccutcaaccuga

SEQ ID NO: 96211 - DNA, 21 bp, Artificial Sequence
  Synthetic
cuattcggagcugacccacat

SEQ ID NO: 96212 - DNA, 24 bp, Artificial Sequence
  Synthetic
tggtgtgtgucatgttctgctuat

SEQ ID NO: 96213 - DNA, 25 bp, Artificial Sequence
  Synthetic
acatattcgtuaagcaactgggcut

SEQ ID NO: 96214 - DNA, 23 bp, Artificial Sequence
  Synthetic
gggaagattuggttgtgtcugga

SEQ ID NO: 96215 - DNA, 28 bp, Artificial Sequence
  Synthetic
ggcttctgttutgagactatttcugagt

SEQ ID NO: 96216 - DNA, 23 bp, Artificial Sequence
  Synthetic
acgatccttugtgccaactguaa

SEQ ID NO: 96217 - DNA, 24 bp, Artificial Sequence
  Synthetic
aatgtgagguggcttccaagauac

SEQ ID NO: 96218 - DNA, 27 bp, Artificial Sequence
  Synthetic
aaccagcauaatttacttacugccact

SEQ ID NO: 96219 - DNA, 24 bp, Artificial Sequence
  Synthetic
gautcatguccaaaaggcacacaa

SEQ ID NO: 96220 - DNA, 22 bp, Artificial Sequence
  Synthetic
agcactgctuctctcgaaaguc

SEQ ID NO: 96221 - DNA, 28 bp, Artificial Sequence
  Synthetic
gcacaaataatgtugtactgatgtgcut

SEQ ID NO: 96222 - DNA, 20 bp, Artificial Sequence
  Synthetic
ccttgccgcaugaaaggcua

SEQ ID NO: 96223 - DNA, 20 bp, Artificial Sequence
  Synthetic
cagctgugcgaggtucaaag

SEQ ID NO: 96224 - DNA, 24 bp, Artificial Sequence
  Synthetic
ccaggaacauatgcagaattugcc

SEQ ID NO: 96225 - DNA, 27 bp, Artificial Sequence
  Synthetic
ggctcacctcuaaagaactcattgaua

SEQ ID NO: 96226 - DNA, 28 bp, Artificial Sequence
  Synthetic
ctatcaagaagugaaactggaucaacga

SEQ ID NO: 96227 - DNA, 22 bp, Artificial Sequence
  Synthetic
cccacaccagugtcacaucaat

SEQ ID NO: 96228 - DNA, 17 bp, Artificial Sequence
  Synthetic
ccccacutagccgcuga

SEQ ID NO: 96229 - DNA, 17 bp, Artificial Sequence
  Synthetic
ggguccccaggguggaa

SEQ ID NO: 96230 - DNA, 28 bp, Artificial Sequence
  Synthetic
tggctaaatacaaacugaatgaagguca

SEQ ID NO: 96231 - DNA, 28 bp, Artificial Sequence
  Synthetic
gaaaaccucagcagtaatagtgauggaa

SEQ ID NO: 96232 - DNA, 20 bp, Artificial Sequence
  Synthetic
acgacgccutttgggtgaua

SEQ ID NO: 96233 - DNA, 21 bp, Artificial Sequence
  Synthetic
agtacttgtugggcccactut

SEQ ID NO: 96234 - DNA, 27 bp, Artificial Sequence
  Synthetic
ccatactttccautttcaaagcugcat

SEQ ID NO: 96235 - DNA, 28 bp, Artificial Sequence
  Synthetic
cctaacatctaauacattcttgcugcct

SEQ ID NO: 96236 - DNA, 27 bp, Artificial Sequence
  Synthetic
cagagatuaacaatccccugaagaaca

SEQ ID NO: 96237 - DNA, 24 bp, Artificial Sequence
  Synthetic
gucaaaacccaacagaaugaagcc

SEQ ID NO: 96238 - DNA, 28 bp, Artificial Sequence
  Synthetic
caagttagtgcuactggaaaaugcaaaa

SEQ ID NO: 96239 - DNA, 24 bp, Artificial Sequence
  Synthetic
ggtgaagatgaugaccacacugag

SEQ ID NO: 96240 - DNA, 26 bp, Artificial Sequence
  Synthetic
actgcattttugcactttttctucct

SEQ ID NO: 96241 - DNA, 28 bp, Artificial Sequence
  Synthetic
tcattttgagaagagcaugaaacgguat

SEQ ID NO: 96242 - DNA, 22 bp, Artificial Sequence
  Synthetic
atccttgaaucgaaggccagut

SEQ ID NO: 96243 - DNA, 28 bp, Artificial Sequence
  Synthetic
gctttactcugaagcactacttaacuct

SEQ ID NO: 96244 - DNA, 28 bp, Artificial Sequence
  Synthetic
gcaactctgaaauaaaagcaatctggut

SEQ ID NO: 96245 - DNA, 26 bp, Artificial Sequence
  Synthetic
atcatgatgtguaagccaaaagauga

SEQ ID NO: 96246 - DNA, 28 bp, Artificial Sequence
  Synthetic
tccattagtcuacaatcctttcucaggt

SEQ ID NO: 96247 - DNA, 28 bp, Artificial Sequence
  Synthetic
tttaggtggaaautcttgcttctctuca

SEQ ID NO: 96248 - DNA, 28 bp, Artificial Sequence
  Synthetic
gtctacaatccttuctcaggtcatctut

SEQ ID NO: 96249 - DNA, 29 bp, Artificial Sequence
  Synthetic
catcatcttttagguggaaattcttgcut

SEQ ID NO: 96250 - DNA, 22 bp, Artificial Sequence
  Synthetic
ccacaggaagcugaacacugat

SEQ ID NO: 96251 - DNA, 22 bp, Artificial Sequence
  Synthetic
ttttaccccutgtggagagugg

SEQ ID NO: 96252 - DNA, 24 bp, Artificial Sequence
  Synthetic
gaatactuacgggtgaccaauccc

SEQ ID NO: 96253 - DNA, 21 bp, Artificial Sequence
  Synthetic
agaggtacucaagcccgcuat

SEQ ID NO: 96254 - DNA, 23 bp, Artificial Sequence
  Synthetic
tcaagagcaucacgacagctuac

SEQ ID NO: 96255 - DNA, 28 bp, Artificial Sequence
  Synthetic
gtgaguaacagctatguaaaagggacat

SEQ ID NO: 96256 - DNA, 26 bp, Artificial Sequence
  Synthetic
gccctgaaguatatttttgttgcugt

SEQ ID NO: 96257 - DNA, 28 bp, Artificial Sequence
  Synthetic
caatctacagtugagcaaacctacguat

SEQ ID NO: 96258 - DNA, 28 bp, Artificial Sequence
  Synthetic
acagcaagcaaauaaaaatggagaaugg

SEQ ID NO: 96259 - DNA, 28 bp, Artificial Sequence
  Synthetic
agcatatacacaugcccaaataucaaga

SEQ ID NO: 96260 - DNA, 27 bp, Artificial Sequence
  Synthetic
ccctgttgtaagaaucaaggtatccut

SEQ ID NO: 96261 - DNA, 28 bp, Artificial Sequence
  Synthetic
catttgagtttacgucaacctagctcua

SEQ ID NO: 96262 - DNA, 20 bp, Artificial Sequence
  Synthetic
cagggtcaauctctcccgut

SEQ ID NO: 96263 - DNA, 25 bp, Artificial Sequence
  Synthetic
aaatgaaccaaguttgggagtcuca

SEQ ID NO: 96264 - DNA, 24 bp, Artificial Sequence
  Synthetic
aaaccaagccaaautccatugcat

SEQ ID NO: 96265 - DNA, 26 bp, Artificial Sequence
  Synthetic
tgaatctctgaguccatgtgaactuc

SEQ ID NO: 96266 - DNA, 24 bp, Artificial Sequence
  Synthetic
ctactugccaggaagcacatguat

SEQ ID NO: 96267 - DNA, 27 bp, Artificial Sequence
  Synthetic
gutacatgtgguaaaggaacaaagcag

SEQ ID NO: 96268 - DNA, 23 bp, Artificial Sequence
  Synthetic
acattcagcugacaccataccug

SEQ ID NO: 96269 - DNA, 26 bp, Artificial Sequence
  Synthetic
attgcatcagtutaaggcatttgugt

SEQ ID NO: 96270 - DNA, 26 bp, Artificial Sequence
  Synthetic
cactttgtttugtggagtgugaaact

SEQ ID NO: 96271 - DNA, 28 bp, Artificial Sequence
  Synthetic
gtttgtccagugacttatgttuaaacca

SEQ ID NO: 96272 - DNA, 25 bp, Artificial Sequence
  Synthetic
acctgagaccautctgaataaugcc

SEQ ID NO: 96273 - DNA, 25 bp, Artificial Sequence
  Synthetic
tccattcaugaaggacagactgtuc

SEQ ID NO: 96274 - DNA, 28 bp, Artificial Sequence
  Synthetic
cataacatttctttugagcacctggtut

SEQ ID NO: 96275 - DNA, 24 bp, Artificial Sequence
  Synthetic
tcttttcacagugctcagtgacut

SEQ ID NO: 96276 - DNA, 28 bp, Artificial Sequence
  Synthetic
acttgtctctucattatcccaatuccac

SEQ ID NO: 96277 - DNA, 28 bp, Artificial Sequence
  Synthetic
tccagaaauacctggtcuaagaaaagga

SEQ ID NO: 96278 - DNA, 23 bp, Artificial Sequence
  Synthetic
caccacaguagtggtcaucaact

SEQ ID NO: 96279 - DNA, 23 bp, Artificial Sequence
  Synthetic
caagguggcatgttatuggcaaa

SEQ ID NO: 96280 - DNA, 24 bp, Artificial Sequence
  Synthetic
accacatugggatgaacatucact

SEQ ID NO: 96281 - DNA, 29 bp, Artificial Sequence
  Synthetic
tggtggtttgtcuatcaacttttaggaut

SEQ ID NO: 96282 - DNA, 28 bp, Artificial Sequence
  Synthetic
tgacatgtuaacagacaagagtgctauc

SEQ ID NO: 96283 - DNA, 28 bp, Artificial Sequence
  Synthetic
gtaatatgucaatttcccaauggccaaa

SEQ ID NO: 96284 - DNA, 22 bp, Artificial Sequence
  Synthetic
agggttcuccaagtacatguct

SEQ ID NO: 96285 - DNA, 29 bp, Artificial Sequence
  Synthetic
cacattagaaaggauggtgactatuacct

SEQ ID NO: 96286 - DNA, 24 bp, Artificial Sequence
  Synthetic
ttctccaaguacatgtcugcacaa

SEQ ID NO: 96287 - DNA, 27 bp, Artificial Sequence
  Synthetic
aaaaccacatuagaaaggatggugact

SEQ ID NO: 96288 - DNA, 28 bp, Artificial Sequence
  Synthetic
agtcaccatccuttctaatgtggtttut

SEQ ID NO: 96289 - DNA, 28 bp, Artificial Sequence
  Synthetic
caaagtgtcagauattcagagtguagca

SEQ ID NO: 96290 - DNA, 26 bp, Artificial Sequence
  Synthetic
gtggcttgttuacaatttcacagtug

SEQ ID NO: 96291 - DNA, 32 bp, Artificial Sequence
  Synthetic
aaaccacagttttgaautttcctattcttgut

SEQ ID NO: 96292 - DNA, 24 bp, Artificial Sequence
  Synthetic
cagatgaaugccatcagttugcac

SEQ ID NO: 96293 - DNA, 28 bp, Artificial Sequence
  Synthetic
gatgagatgauagacaggcagaagtuaa

SEQ ID NO: 96294 - DNA, 26 bp, Artificial Sequence
  Synthetic
acttttctctcuctggctagguacat

SEQ ID NO: 96295 - DNA, 27 bp, Artificial Sequence
  Synthetic
accttattatgugtctgagtctgucca

SEQ ID NO: 96296 - DNA, 26 bp, Artificial Sequence
  Synthetic
caatatccucatactggtuggacaga

SEQ ID NO: 96297 - DNA, 31 bp, Artificial Sequence
  Synthetic
tgtcagaagttcuccattttagaatgaaugt

SEQ ID NO: 96298 - DNA, 32 bp, Artificial Sequence
  Synthetic
atacccatautatataacttaguacccacact

SEQ ID NO: 96299 - DNA, 26 bp, Artificial Sequence
  Synthetic
tgggattautgaatgggugaacaaca

SEQ ID NO: 96300 - DNA, 26 bp, Artificial Sequence
  Synthetic
gtttggucagaataggtcucaaacca

SEQ ID NO: 96301 - DNA, 27 bp, Artificial Sequence
  Synthetic
gaaaagaugcagagtctcguagaagag

SEQ ID NO: 96302 - DNA, 23 bp, Artificial Sequence
  Synthetic
gtctcaaaccagcagugttgtuc

SEQ ID NO: 96303 - DNA, 26 bp, Artificial Sequence
  Synthetic
acagtgcutaagaaaagaugcagagt

SEQ ID NO: 96304 - DNA, 25 bp, Artificial Sequence
  Synthetic
agttctcttcuacgagactcugcat

SEQ ID NO: 96305 - DNA, 28 bp, Artificial Sequence
  Synthetic
gccttcaatgacautctttggttaugaa

SEQ ID NO: 96306 - DNA, 26 bp, Artificial Sequence
  Synthetic
acactactgacautcaagtcccttug

SEQ ID NO: 96307 - DNA, 22 bp, Artificial Sequence
  Synthetic
ttgggtgggucatcctactgua

SEQ ID NO: 96308 - DNA, 23 bp, Artificial Sequence
  Synthetic
gcuagcagccagaaaaugaccaa

SEQ ID NO: 96309 - DNA, 22 bp, Artificial Sequence
  Synthetic
ccataucagggcccgagagaua

SEQ ID NO: 96310 - DNA, 27 bp, Artificial Sequence
  Synthetic
tccttaccatcagutcaggtgatauga

SEQ ID NO: 96311 - DNA, 24 bp, Artificial Sequence
  Synthetic
agcctgtugagacaagattuccaa

SEQ ID NO: 96312 - DNA, 27 bp, Artificial Sequence
  Synthetic
acgcagcaauaattcattatgcaaucc

SEQ ID NO: 96313 - DNA, 27 bp, Artificial Sequence
  Synthetic
gagctcctgaugtactaatagcatgut

SEQ ID NO: 96314 - DNA, 28 bp, Artificial Sequence
  Synthetic
gttgtttgtaucacacgttagtggtcua

SEQ ID NO: 96315 - DNA, 28 bp, Artificial Sequence
  Synthetic
gutgattttgatgttuaccaggacaaca

SEQ ID NO: 96316 - DNA, 27 bp, Artificial Sequence
  Synthetic
gaaggaggacuactctatgcttttgug

SEQ ID NO: 96317 - DNA, 30 bp, Artificial Sequence
  Synthetic
ttgccactctaatugaaagaaagtagtcut

SEQ ID NO: 96318 - DNA, 25 bp, Artificial Sequence
  Synthetic
attttccaaucctgtcaggugacat

SEQ ID NO: 96319 - DNA, 28 bp, Artificial Sequence
  Synthetic
ctgaaactagugagagcagaacaaatug

SEQ ID NO: 96320 - DNA, 22 bp, Artificial Sequence
  Synthetic
aagcttgcagcugaaagaggua

SEQ ID NO: 96321 - DNA, 28 bp, Artificial Sequence
  Synthetic
cgtgacatttctugactcttcatttgut

SEQ ID NO: 96322 - DNA, 28 bp, Artificial Sequence
  Synthetic
gaactgauaaagggaagagctaatuggt

SEQ ID NO: 96323 - DNA, 23 bp, Artificial Sequence
  Synthetic
tcaggcacugaaagcugagaaat

SEQ ID NO: 96324 - DNA, 25 bp, Artificial Sequence
  Synthetic
tttctgtttgauttgctgtguggac

SEQ ID NO: 96325 - DNA, 28 bp, Artificial Sequence
  Synthetic
gatcagcauaccataaauacccaagaca

SEQ ID NO: 96326 - DNA, 24 bp, Artificial Sequence
  Synthetic
tgagtugacacagatcagaugcaa

SEQ ID NO: 96327 - DNA, 28 bp, Artificial Sequence
  Synthetic
tgccttagaatggutagctttagatguc

SEQ ID NO: 96328 - DNA, 27 bp, Artificial Sequence
  Synthetic
atagcucagaagtattucaaacaggct

SEQ ID NO: 96329 - DNA, 28 bp, Artificial Sequence
  Synthetic
attaatttgucaggaactgggaugaaga

SEQ ID NO: 96330 - DNA, 22 bp, Artificial Sequence
  Synthetic
gcacutaggctucaggcaaaaa

SEQ ID NO: 96331 - DNA, 22 bp, Artificial Sequence
  Synthetic
ctgttcagaaacuggaccugga

SEQ ID NO: 96332 - DNA, 21 bp, Artificial Sequence
  Synthetic
gccactttgcugtgctggaua

SEQ ID NO: 96333 - DNA, 27 bp, Artificial Sequence
  Synthetic
cccttgcaatugagaagacttattugt

SEQ ID NO: 96334 - DNA, 22 bp, Artificial Sequence
  Synthetic
caccaccutatcaatggtugcc

SEQ ID NO: 96335 - DNA, 28 bp, Artificial Sequence
  Synthetic
aaggactgucaacataaauccaagaaga

SEQ ID NO: 96336 - DNA, 27 bp, Artificial Sequence
  Synthetic
agtcaacagagutaactgaaacugcat

SEQ ID NO: 96337 - DNA, 27 bp, Artificial Sequence
  Synthetic
gagggtaagaacaugttaatccauggt

SEQ ID NO: 96338 - DNA, 26 bp, Artificial Sequence
  Synthetic
cataaatcggcccacuagtagcauag

SEQ ID NO: 96339 - DNA, 24 bp, Artificial Sequence
  Synthetic
tgatgtucaccaggcactaatugt

SEQ ID NO: 96340 - DNA, 28 bp, Artificial Sequence
  Synthetic
gacatccaagttaucactacagaaggut

SEQ ID NO: 96341 - DNA, 28 bp, Artificial Sequence
  Synthetic
cgtactcacaauttcttttggcttuact

SEQ ID NO: 96342 - DNA, 33 bp, Artificial Sequence
  Synthetic
atatttgataatgtuaagcacttaaccaguagt

SEQ ID NO: 96343 - DNA, 28 bp, Artificial Sequence
  Synthetic
gaatacagtggaucaaataacgcagtug

SEQ ID NO: 96344 - DNA, 28 bp, Artificial Sequence
  Synthetic
actgatgacugagaatttaccugcaaaa

SEQ ID NO: 96345 - DNA, 26 bp, Artificial Sequence
  Synthetic
aatcaatgugcaaggaacaagaacug

SEQ ID NO: 96346 - DNA, 28 bp, Artificial Sequence
  Synthetic
caactgcgttatutgatccactgtatuc

SEQ ID NO: 96347 - DNA, 27 bp, Artificial Sequence
  Synthetic
attatctgacgcugaagggaatttuct

SEQ ID NO: 96348 - DNA, 22 bp, Artificial Sequence
  Synthetic
gccagaaugcacagtcagtcut

SEQ ID NO: 96349 - DNA, 28 bp, Artificial Sequence
  Synthetic
gtgtgggtaattuatacaaccctgaugt

SEQ ID NO: 96350 - DNA, 26 bp, Artificial Sequence
  Synthetic
actcctctctuccaaagggatatuga

SEQ ID NO: 96351 - DNA, 33 bp, Artificial Sequence
  Synthetic
aaactactggtuaagtgcttaacattaucaaat

SEQ ID NO: 96352 - DNA, 21 bp, Artificial Sequence
  Synthetic
gcataccaucatctgcccuca

SEQ ID NO: 96353 - DNA, 26 bp, Artificial Sequence
  Synthetic
cctccttgcaautacattgtgguaac

SEQ ID NO: 96354 - DNA, 23 bp, Artificial Sequence
  Synthetic
accttaccugtgatgagtcugct

SEQ ID NO: 96355 - DNA, 28 bp, Artificial Sequence
  Synthetic
gagagaaaagatucacatcaacgaaugg

SEQ ID NO: 96356 - DNA, 25 bp, Artificial Sequence
  Synthetic
tgtctgattuggttatctgugcact

SEQ ID NO: 96357 - DNA, 28 bp, Artificial Sequence
  Synthetic
ggctgaatgugagtatcgacatguaaat

SEQ ID NO: 96358 - DNA, 20 bp, Artificial Sequence
  Synthetic
cuaggctugcacagagggat

SEQ ID NO: 96359 - DNA, 24 bp, Artificial Sequence
  Synthetic
tcccggtgtaugaatctcttggua

SEQ ID NO: 96360 - DNA, 22 bp, Artificial Sequence
  Synthetic
ccagtggcauggagtatcugag

SEQ ID NO: 96361 - DNA, 22 bp, Artificial Sequence
  Synthetic
tctagcccugcttccatccuaa

SEQ ID NO: 96362 - DNA, 26 bp, Artificial Sequence
  Synthetic
ccggtcaatgaautgacacagaatut

SEQ ID NO: 96363 - DNA, 28 bp, Artificial Sequence
  Synthetic
aacattgacacugaacacatttgaugag

SEQ ID NO: 96364 - DNA, 21 bp, Artificial Sequence
  Synthetic
cagacuggacaccctcttucc

SEQ ID NO: 96365 - DNA, 22 bp, Artificial Sequence
  Synthetic
gguctgatgucccagaaacacc

SEQ ID NO: 96366 - DNA, 21 bp, Artificial Sequence
  Synthetic
cacgggacaguaccagtgtut

SEQ ID NO: 96367 - DNA, 20 bp, Artificial Sequence
  Synthetic
ctaugagcgccacatgucct

SEQ ID NO: 96368 - DNA, 21 bp, Artificial Sequence
  Synthetic
ctgctccaugactctguccac

SEQ ID NO: 96369 - DNA, 26 bp, Artificial Sequence
  Synthetic
gaagttcagaaggaugtgtgtaugct

SEQ ID NO: 96370 - DNA, 28 bp, Artificial Sequence
  Synthetic
tgaacagauacaaccacagattcauacc

SEQ ID NO: 96371 - DNA, 28 bp, Artificial Sequence
  Synthetic
gcattaccttauacaggaagctacugat

SEQ ID NO: 96372 - DNA, 28 bp, Artificial Sequence
  Synthetic
caaccaagatacauctggcataguaagt

SEQ ID NO: 96373 - DNA, 24 bp, Artificial Sequence
  Synthetic
ttcttttuaggccaagacccaugt

SEQ ID NO: 96374 - DNA, 23 bp, Artificial Sequence
  Synthetic
gtagtcgcugctcaatgucaaga

SEQ ID NO: 96375 - DNA, 29 bp, Artificial Sequence
  Synthetic
gggtattggucagtaaaatggtatuaaca

SEQ ID NO: 96376 - DNA, 29 bp, Artificial Sequence
  Synthetic
aaaatactgaatugcaaacctcaagugaa

SEQ ID NO: 96377 - DNA, 28 bp, Artificial Sequence
  Synthetic
ctcaccagagagaaauggctttaaauac

SEQ ID NO: 96378 - DNA, 25 bp, Artificial Sequence
  Synthetic
gaaaacgutggcaattucagacaac

SEQ ID NO: 96379 - DNA, 27 bp, Artificial Sequence
  Synthetic
gctctagttttuggtagaatccctuca

SEQ ID NO: 96380 - DNA, 27 bp, Artificial Sequence
  Synthetic
ctgttacaccutctttacagacuccat

SEQ ID NO: 96381 - DNA, 27 bp, Artificial Sequence
  Synthetic
ggacaactctucatgcaagacaauaac

SEQ ID NO: 96382 - DNA, 27 bp, Artificial Sequence
  Synthetic
ccataaugagaactgtugaagacacct

SEQ ID NO: 96383 - DNA, 20 bp, Artificial Sequence
  Synthetic
tgtctugaaggcagctggut

SEQ ID NO: 96384 - DNA, 27 bp, Artificial Sequence
  Synthetic
aaatattacctgutagcatgcacucca

SEQ ID NO: 96385 - DNA, 28 bp, Artificial Sequence
  Synthetic
ggtccccaagcuattattgaagtgauaa

SEQ ID NO: 96386 - DNA, 20 bp, Artificial Sequence
  Synthetic
gagacgcccuggaacttgua

SEQ ID NO: 96387 - DNA, 28 bp, Artificial Sequence
  Synthetic
gccaaagtattuctagcctatccucaac

SEQ ID NO: 96388 - DNA, 27 bp, Artificial Sequence
  Synthetic
tgtgagaaatgtcuacacacaagctut

SEQ ID NO: 96389 - DNA, 21 bp, Artificial Sequence
  Synthetic
cttgttccugagggaccctut

SEQ ID NO: 96390 - DNA, 23 bp, Artificial Sequence
  Synthetic
gcgaccucgatctgttcaugaaa

SEQ ID NO: 96391 - DNA, 28 bp, Artificial Sequence
  Synthetic
gcaaaagattaugaaaacatgcaguggt

SEQ ID NO: 96392 - DNA, 23 bp, Artificial Sequence
  Synthetic
agctgtcatcauccacattgcut

SEQ ID NO: 96393 - DNA, 28 bp, Artificial Sequence
  Synthetic
ctgcttttucacaattgatctcucgaat

SEQ ID NO: 96394 - DNA, 28 bp, Artificial Sequence
  Synthetic
caacaaaaactucatcgtgagaaugaca

SEQ ID NO: 96395 - DNA, 17 bp, Artificial Sequence
  Synthetic
gccgcuccgatcgtgua

SEQ ID NO: 96396 - DNA, 25 bp, Artificial Sequence
  Synthetic
tcattcctcauttgtacacgaucgg

SEQ ID NO: 96397 - DNA, 27 bp, Artificial Sequence
  Synthetic
cttgggcaugggaataacatacttuaa

SEQ ID NO: 96398 - DNA, 29 bp, Artificial Sequence
  Synthetic
aaaaagctaaacagaaautgaaccaccut

SEQ ID NO: 96399 - DNA, 27 bp, Artificial Sequence
  Synthetic
ctgctttaagtttucacatgagtccut

SEQ ID NO: 96400 - DNA, 27 bp, Artificial Sequence
  Synthetic
gctccaaggacucatgtgaaaactuaa

SEQ ID NO: 96401 - DNA, 33 bp, Artificial Sequence
  Synthetic
aggatctattactaauatcgtaagcatctttug

SEQ ID NO: 96402 - DNA, 28 bp, Artificial Sequence
  Synthetic
ccctggctacaacauataccaacataut

SEQ ID NO: 96403 - DNA, 24 bp, Artificial Sequence
  Synthetic
actgtgaaugtgacaauggacact

SEQ ID NO: 96404 - DNA, 25 bp, Artificial Sequence
  Synthetic
ctgaaaacagtguatccagcagcua

SEQ ID NO: 96405 - DNA, 28 bp, Artificial Sequence
  Synthetic
ggcctcgtaacugcatctaatacuaaaa

SEQ ID NO: 96406 - DNA, 27 bp, Artificial Sequence
  Synthetic
aacaaaacaauaaacttgtacugccaa

SEQ ID NO: 96407 - DNA, 28 bp, Artificial Sequence
  Synthetic
ggcaatgtctacauccttttcaaaguct

SEQ ID NO: 96408 - DNA, 26 bp, Artificial Sequence
  Synthetic
ctaggaaautagactguccagccaaa

SEQ ID NO: 96409 - DNA, 27 bp, Artificial Sequence
  Synthetic
cagttcatauatcagtcaaugccacga

SEQ ID NO: 96410 - DNA, 26 bp, Artificial Sequence
  Synthetic
gccatagagtuaacattcgtggcaut

SEQ ID NO: 96411 - DNA, 28 bp, Artificial Sequence
  Synthetic
tgaaaacggtaugtggtagtttgaauct

SEQ ID NO: 96412 - DNA, 28 bp, Artificial Sequence
  Synthetic
cgtattuaaaagctaactugaagcagca

SEQ ID NO: 96413 - DNA, 23 bp, Artificial Sequence
  Synthetic
aaactacuccacactuggcacat

SEQ ID NO: 96414 - DNA, 21 bp, Artificial Sequence
  Synthetic
tcatagcgguttgacgcucaa

SEQ ID NO: 96415 - DNA, 28 bp, Artificial Sequence
  Synthetic
gcattttcucacatgcactguaaaagat

SEQ ID NO: 96416 - DNA, 22 bp, Artificial Sequence
  Synthetic
cagggaccugattccctucaat

SEQ ID NO: 96417 - DNA, 25 bp, Artificial Sequence
  Synthetic
tcaaaatccaccaautgcagctuac

SEQ ID NO: 96418 - DNA, 19 bp, Artificial Sequence
  Synthetic
gcugggagcccaacaacut

SEQ ID NO: 96419 - DNA, 18 bp, Artificial Sequence
  Synthetic
aggagcccccaucacuca

SEQ ID NO: 96420 - DNA, 28 bp, Artificial Sequence
  Synthetic
tcttgcatgtcauaatgtcagtttggua

SEQ ID NO: 96421 - DNA, 22 bp, Artificial Sequence
  Synthetic
cgaccctugaccacaaguaacc

SEQ ID NO: 96422 - DNA, 23 bp, Artificial Sequence
  Synthetic
cctgttccuttccccaauccaaa

SEQ ID NO: 96423 - DNA, 24 bp, Artificial Sequence
  Synthetic
agactctcaauggcaatccactug

SEQ ID NO: 96424 - DNA, 20 bp, Artificial Sequence
  Synthetic
gtcccaguggagcacatgut

SEQ ID NO: 96425 - DNA, 22 bp, Artificial Sequence
  Synthetic
atccacagutgtagttgcugct

SEQ ID NO: 96426 - DNA, 27 bp, Artificial Sequence
  Synthetic
tgtacaggaatuacagtagacgacuct

SEQ ID NO: 96427 - DNA, 22 bp, Artificial Sequence
  Synthetic
agttttacauccctggguggac

SEQ ID NO: 96428 - DNA, 20 bp, Artificial Sequence
  Synthetic
cgtaucgccaagaugccagt

SEQ ID NO: 96429 - DNA, 21 bp, Artificial Sequence
  Synthetic
ccaggcauagtgtgtgauggt

SEQ ID NO: 96430 - DNA, 21 bp, Artificial Sequence
  Synthetic
gaacgagtcuttgggaacgug

SEQ ID NO: 96431 - DNA, 25 bp, Artificial Sequence
  Synthetic
agccgtgtttuccctttgttactua

SEQ ID NO: 96432 - DNA, 22 bp, Artificial Sequence
  Synthetic
aaggcttcauccatgacctgut

SEQ ID NO: 96433 - DNA, 19 bp, Artificial Sequence
  Synthetic
tcttucgccgguggacaag

SEQ ID NO: 96434 - DNA, 24 bp, Artificial Sequence
  Synthetic
acatacacgugtttaaggcauaca

SEQ ID NO: 96435 - DNA, 24 bp, Artificial Sequence
  Synthetic
acacagaatgccaugaagctaguc

SEQ ID NO: 96436 - DNA, 27 bp, Artificial Sequence
  Synthetic
tgattctttttaccugtctgtcacugg

SEQ ID NO: 96437 - DNA, 24 bp, Artificial Sequence
  Synthetic
tcutctttcagugcacaaccacat

SEQ ID NO: 96438 - DNA, 23 bp, Artificial Sequence
  Synthetic
gtgtcctcaucttggctctctuc

SEQ ID NO: 96439 - DNA, 28 bp, Artificial Sequence
  Synthetic
attctgattctuagtcatcactccucct

SEQ ID NO: 96440 - DNA, 27 bp, Artificial Sequence
  Synthetic
caacataaacauaaaagacuggccaca

SEQ ID NO: 96441 - DNA, 28 bp, Artificial Sequence
  Synthetic
cgagctgtaaugcactttgaatcattua

SEQ ID NO: 96442 - DNA, 28 bp, Artificial Sequence
  Synthetic
acctgtaaaaauccaagatgttccugaa

SEQ ID NO: 96443 - DNA, 26 bp, Artificial Sequence
  Synthetic
gactatcagagugtaacccgtttuct

SEQ ID NO: 96444 - DNA, 33 bp, Artificial Sequence
  Synthetic
agtgaaatcagattautgaacagtataagaugc

SEQ ID NO: 96445 - DNA, 17 bp, Artificial Sequence
  Synthetic
gtgguccagggcctugt

SEQ ID NO: 96446 - DNA, 26 bp, Artificial Sequence
  Synthetic
ttacttctccccaauttccgtagtuc

SEQ ID NO: 96447 - DNA, 22 bp, Artificial Sequence
  Synthetic
tgtggtcugccaggaugaaaat

SEQ ID NO: 96448 - DNA, 27 bp, Artificial Sequence
  Synthetic
agctaggttgacguaaactcaaatgut

SEQ ID NO: 96449 - DNA, 28 bp, Artificial Sequence
  Synthetic
tggaagauccagacaaagatgtuagagt

SEQ ID NO: 96450 - DNA, 28 bp, Artificial Sequence
  Synthetic
gcttgatattuccactaaaagccacuct

SEQ ID NO: 96451 - DNA, 28 bp, Artificial Sequence
  Synthetic
ggtattgtatactcutgtccttcagcut

SEQ ID NO: 96452 - DNA, 23 bp, Artificial Sequence
  Synthetic
tcgcagtaacuagcactttgucc

SEQ ID NO: 96453 - DNA, 25 bp, Artificial Sequence
  Synthetic
ggaatccgcaguttgtgcatattut

SEQ ID NO: 96454 - DNA, 31 bp, Artificial Sequence
  Synthetic
tgugaaggaaatatgtauaaaacaagcagga

SEQ ID NO: 96455 - DNA, 26 bp, Artificial Sequence
  Synthetic
cctcaaagucaaggtctgaataucgt

SEQ ID NO: 96456 - DNA, 30 bp, Artificial Sequence
  Synthetic
gagaagaaaatcacgauattcagacctuga

SEQ ID NO: 96457 - DNA, 24 bp, Artificial Sequence
  Synthetic
acccttacauggctgcatagagua

SEQ ID NO: 96458 - DNA, 26 bp, Artificial Sequence
  Synthetic
atgactctcttuccctctcttcucaa

SEQ ID NO: 96459 - DNA, 21 bp, Artificial Sequence
  Synthetic
gacacttcucccactctgcug

SEQ ID NO: 96460 - DNA, 23 bp, Artificial Sequence
  Synthetic
cggactgaccuccagtttuagaa

SEQ ID NO: 96461 - DNA, 26 bp, Artificial Sequence
  Synthetic
catgggaaccutacagttcttgtuca

SEQ ID NO: 96462 - DNA, 21 bp, Artificial Sequence
  Synthetic
gattccgccuccacatgtuct

SEQ ID NO: 96463 - DNA, 28 bp, Artificial Sequence
  Synthetic
gagacacacatcauttctttttgtgcut

SEQ ID NO: 96464 - DNA, 22 bp, Artificial Sequence
  Synthetic
gcaaaggaugctttggaacuga

SEQ ID NO: 96465 - DNA, 23 bp, Artificial Sequence
  Synthetic
aaatgtcaggcutcccaagtcut

SEQ ID NO: 96466 - DNA, 27 bp, Artificial Sequence
  Synthetic
actgcaagauttaccttgaucaacact

SEQ ID NO: 96467 - DNA, 22 bp, Artificial Sequence
  Synthetic
cccttccgucctttcatuggaa

SEQ ID NO: 96468 - DNA, 25 bp, Artificial Sequence
  Synthetic
gcctctgtuctaacagacaucaact

SEQ ID NO: 96469 - DNA, 22 bp, Artificial Sequence
  Synthetic
ccttttgaugacaccggaguga

SEQ ID NO: 96470 - DNA, 30 bp, Artificial Sequence
  Synthetic
ttcuttctttttgactcuaggacaaacagt

SEQ ID NO: 96471 - DNA, 21 bp, Artificial Sequence
  Synthetic
tcaacactggugcctcgttut

SEQ ID NO: 96472 - DNA, 28 bp, Artificial Sequence
  Synthetic
tgaagcaugagaacatattacagtucat

SEQ ID NO: 96473 - DNA, 25 bp, Artificial Sequence
  Synthetic
ctctgagggauttatagccagcaut

SEQ ID NO: 96474 - DNA, 33 bp, Artificial Sequence
  Synthetic
taattacattggagaaaguaagtttcacatgut

SEQ ID NO: 96475 - DNA, 28 bp, Artificial Sequence
  Synthetic
caaagtgaccauctatcttctuccacat

SEQ ID NO: 96476 - DNA, 25 bp, Artificial Sequence
  Synthetic
cttctctcugttctttgugacacac

SEQ ID NO: 96477 - DNA, 24 bp, Artificial Sequence
  Synthetic
gtactaaagcuggctttgcaccua

SEQ ID NO: 96478 - DNA, 25 bp, Artificial Sequence
  Synthetic
caacccaguaagacauacaccagaa

SEQ ID NO: 96479 - DNA, 27 bp, Artificial Sequence
  Synthetic
tgtgaaagtgugttactgtcuacacat

SEQ ID NO: 96480 - DNA, 21 bp, Artificial Sequence
  Synthetic
tcaucagccaccaacucgaaa

SEQ ID NO: 96481 - DNA, 24 bp, Artificial Sequence
  Synthetic
caggtcaacucacaggaggatuac

SEQ ID NO: 96482 - DNA, 25 bp, Artificial Sequence
  Synthetic
ttccagagttccuattcagggcuat

SEQ ID NO: 96483 - DNA, 21 bp, Artificial Sequence
  Synthetic
catgaaagccutggcttgcug

SEQ ID NO: 96484 - DNA, 20 bp, Artificial Sequence
  Synthetic
cataagcugacgacggccut

SEQ ID NO: 96485 - DNA, 19 bp, Artificial Sequence
  Synthetic
ccgccgaugcatccttuct

SEQ ID NO: 96486 - DNA, 19 bp, Artificial Sequence
  Synthetic
ccaagtgcaccucggtgua

SEQ ID NO: 96487 - DNA, 21 bp, Artificial Sequence
  Synthetic
agaagugttcccucagagcca

SEQ ID NO: 96488 - DNA, 21 bp, Artificial Sequence
  Synthetic
ataacaagcaguggcauccct

SEQ ID NO: 96489 - DNA, 28 bp, Artificial Sequence
  Synthetic
caaagaaattgtaugctgctatgcauga

SEQ ID NO: 96490 - DNA, 23 bp, Artificial Sequence
  Synthetic
ctccatcaggutcatgcauagca

SEQ ID NO: 96491 - DNA, 31 bp, Artificial Sequence
  Synthetic
aattgctgtttcaauataaacaggtggttut

SEQ ID NO: 96492 - DNA, 19 bp, Artificial Sequence
  Synthetic
cgtttcugccggcugaagt

SEQ ID NO: 96493 - DNA, 28 bp, Artificial Sequence
  Synthetic
tggaagaagttuagagttggacaaugag

SEQ ID NO: 96494 - DNA, 28 bp, Artificial Sequence
  Synthetic
accacaagauaagaaatcttccattcug

SEQ ID NO: 96495 - DNA, 26 bp, Artificial Sequence
  Synthetic
atctgtcactuacgttttggagucat

SEQ ID NO: 96496 - DNA, 29 bp, Artificial Sequence
  Synthetic
gggtactttgaauccctattgtgtatugt

SEQ ID NO: 96497 - DNA, 23 bp, Artificial Sequence
  Synthetic
ctgttaacuagcaggcagcugaa

SEQ ID NO: 96498 - DNA, 25 bp, Artificial Sequence
  Synthetic
ccctggtaauagaccacatttggut

SEQ ID NO: 96499 - DNA, 23 bp, Artificial Sequence
  Synthetic
ccctcuaatacctcuggagccat

SEQ ID NO: 96500 - DNA, 19 bp, Artificial Sequence
  Synthetic
aggttgguacccggaggua

SEQ ID NO: 96501 - DNA, 21 bp, Artificial Sequence
  Synthetic
gcgagaagccagutcccauag

SEQ ID NO: 96502 - DNA, 28 bp, Artificial Sequence
  Synthetic
cacatgatgtugaacactagaaaugcaa

SEQ ID NO: 96503 - DNA, 20 bp, Artificial Sequence
  Synthetic
cacccgaccutgttcucaga

SEQ ID NO: 96504 - DNA, 29 bp, Artificial Sequence
  Synthetic
aggatagatatguatgccatgggatuagt

SEQ ID NO: 96505 - DNA, 25 bp, Artificial Sequence
  Synthetic
ccttggagtguatcatccctttuca

SEQ ID NO: 96506 - DNA, 22 bp, Artificial Sequence
  Synthetic
acacagtccugactccaacauc

SEQ ID NO: 96507 - DNA, 28 bp, Artificial Sequence
  Synthetic
gctaattgttcaaaucaactggacucct

SEQ ID NO: 96508 - DNA, 26 bp, Artificial Sequence
  Synthetic
aagtatcactcugagggctagaagut

SEQ ID NO: 96509 - DNA, 28 bp, Artificial Sequence
  Synthetic
gatttattgugcagacatgtactuggag

SEQ ID NO: 96510 - DNA, 27 bp, Artificial Sequence
  Synthetic
atcatataccucattccagctatuggc

SEQ ID NO: 96511 - DNA, 25 bp, Artificial Sequence
  Synthetic
aagtgttttgcautgaccaatucca

SEQ ID NO: 96512 - DNA, 25 bp, Artificial Sequence
  Synthetic
tgtgagttggagguttctgtactug

SEQ ID NO: 96513 - DNA, 26 bp, Artificial Sequence
  Synthetic
tcttttctagtgcucagcttcttgug

SEQ ID NO: 96514 - DNA, 27 bp, Artificial Sequence
  Synthetic
ttttgagtgauaggttagctttgcuga

SEQ ID NO: 96515 - DNA, 25 bp, Artificial Sequence
  Synthetic
accactgccuactattaggguaact

SEQ ID NO: 96516 - DNA, 21 bp, Artificial Sequence
  Synthetic
ggaatcctcuggcacacctuc

SEQ ID NO: 96517 - DNA, 28 bp, Artificial Sequence
  Synthetic
actaagcattgcauttcaggtctaucaa

SEQ ID NO: 96518 - DNA, 26 bp, Artificial Sequence
  Synthetic
aagtgacagttuccacattaccauca

SEQ ID NO: 96519 - DNA, 27 bp, Artificial Sequence
  Synthetic
acctcttauacacatccagccuaaaga

SEQ ID NO: 96520 - DNA, 23 bp, Artificial Sequence
  Synthetic
ggtagtggaagauagctgcagut

SEQ ID NO: 96521 - DNA, 21 bp, Artificial Sequence
  Synthetic
cacatagagcutgggacugct

SEQ ID NO: 96522 - DNA, 29 bp, Artificial Sequence
  Synthetic
ttgctagggauttaatttttggacuacca

SEQ ID NO: 96523 - DNA, 24 bp, Artificial Sequence
  Synthetic
agctccttugcagttgatgaguat

SEQ ID NO: 96524 - DNA, 22 bp, Artificial Sequence
  Synthetic
tgatgacattuccctggccaut

SEQ ID NO: 96525 - DNA, 21 bp, Artificial Sequence
  Synthetic
gcuagaaaggctggucaccac

SEQ ID NO: 96526 - DNA, 28 bp, Artificial Sequence
  Synthetic
gccaaagtaagagutcttgccttcuaaa

SEQ ID NO: 96527 - DNA, 27 bp, Artificial Sequence
  Synthetic
tggtcaugagccgatttttaagucaat

SEQ ID NO: 96528 - DNA, 28 bp, Artificial Sequence
  Synthetic
ggagctgattguaaatatcccatgtgut

SEQ ID NO: 96529 - DNA, 28 bp, Artificial Sequence
  Synthetic
actttttgaagacutggtttaccuccat

SEQ ID NO: 96530 - DNA, 24 bp, Artificial Sequence
  Synthetic
agcatgacccaucacatttctuct

SEQ ID NO: 96531 - DNA, 28 bp, Artificial Sequence
  Synthetic
acacaagaaaatcugtgaagtcatcugt

SEQ ID NO: 96532 - DNA, 25 bp, Artificial Sequence
  Synthetic
gtaccccaaaaauagcaggactcut

SEQ ID NO: 96533 - DNA, 24 bp, Artificial Sequence
  Synthetic
tcataacgagacutctgcggatug

SEQ ID NO: 96534 - DNA, 22 bp, Artificial Sequence
  Synthetic
ggagagcatugtaggctgtcug

SEQ ID NO: 96535 - DNA, 26 bp, Artificial Sequence
  Synthetic
ctctcaccaaugtgttgttactucct

SEQ ID NO: 96536 - DNA, 25 bp, Artificial Sequence
  Synthetic
tgtaacaaaugacaggagggagtug

SEQ ID NO: 96537 - DNA, 28 bp, Artificial Sequence
  Synthetic
agtcaatcgucaaggatttagcaaauga

SEQ ID NO: 96538 - DNA, 25 bp, Artificial Sequence
  Synthetic
gcaaautcgatccaugagcagaaac

SEQ ID NO: 96539 - DNA, 29 bp, Artificial Sequence
  Synthetic
tgaaagaaagagtuttaggacacacauca

SEQ ID NO: 96540 - DNA, 28 bp, Artificial Sequence
  Synthetic
gcatcagctguaaccataatttcaaugt

SEQ ID NO: 96541 - DNA, 26 bp, Artificial Sequence
  Synthetic
cagtttacccuttcataccuacagca

SEQ ID NO: 96542 - DNA, 26 bp, Artificial Sequence
  Synthetic
tatctttgccuaaggaagtacuggaa

SEQ ID NO: 96543 - DNA, 24 bp, Artificial Sequence
  Synthetic
agtttttguataggacugcgccaa

SEQ ID NO: 96544 - DNA, 23 bp, Artificial Sequence
  Synthetic
tcugtatttgttctuggcgcagt

SEQ ID NO: 96545 - DNA, 27 bp, Artificial Sequence
  Synthetic
cccttcatatuaccacagcttgttuga

SEQ ID NO: 96546 - DNA, 25 bp, Artificial Sequence
  Synthetic
gtgtacatatucccccttttcugct

SEQ ID NO: 96547 - DNA, 21 bp, Artificial Sequence
  Synthetic
gccaacccaaagucagcaaug

SEQ ID NO: 96548 - DNA, 25 bp, Artificial Sequence
  Synthetic
ctgttgaaaaacaaccugacagcut

SEQ ID NO: 96549 - DNA, 25 bp, Artificial Sequence
  Synthetic
actaattcagtccugacatgccaut

SEQ ID NO: 96550 - DNA, 21 bp, Artificial Sequence
  Synthetic
ctcctccucacgacctttcuc

SEQ ID NO: 96551 - DNA, 22 bp, Artificial Sequence
  Synthetic
ggcttguagaccccttgaauct

SEQ ID NO: 96552 - DNA, 27 bp, Artificial Sequence
  Synthetic
gcagatgatgaguaataattgcatguc

SEQ ID NO: 96553 - DNA, 26 bp, Artificial Sequence
  Synthetic
tgccacttccaucatttgttacucaa

SEQ ID NO: 96554 - DNA, 27 bp, Artificial Sequence
  Synthetic
ccttagtucacagtctgtatugcaact

SEQ ID NO: 96555 - DNA, 23 bp, Artificial Sequence
  Synthetic
tcatttgacttuggccaagguct

SEQ ID NO: 96556 - DNA, 27 bp, Artificial Sequence
  Synthetic
tgtatgcaagtuatgtttcttcgcuga

SEQ ID NO: 96557 - DNA, 28 bp, Artificial Sequence
  Synthetic
ctggctccttuaagctattagcagaaut

SEQ ID NO: 96558 - DNA, 26 bp, Artificial Sequence
  Synthetic
gctaaatatgaaugcgtgacatugct

SEQ ID NO: 96559 - DNA, 28 bp, Artificial Sequence
  Synthetic
ccaaccaagacuctttgatgatttgtua

SEQ ID NO: 96560 - DNA, 29 bp, Artificial Sequence
  Synthetic
tctttgaatgtutgtagctagaugcagaa

SEQ ID NO: 96561 - DNA, 24 bp, Artificial Sequence
  Synthetic
catgcagttacugagctctagugt

SEQ ID NO: 96562 - DNA, 25 bp, Artificial Sequence
  Synthetic
tgcaaacaugcagttctcatacuca

SEQ ID NO: 96563 - DNA, 28 bp, Artificial Sequence
  Synthetic
gcatttttacctugccaagtactaugac

SEQ ID NO: 96564 - DNA, 23 bp, Artificial Sequence
  Synthetic
tctgtgaccaugggcatcaatut

SEQ ID NO: 96565 - DNA, 28 bp, Artificial Sequence
  Synthetic
gggatttcctuaggtaggtatcctaugt

SEQ ID NO: 96566 - DNA, 25 bp, Artificial Sequence
  Synthetic
gtagagatgaggacuacagcccaua

SEQ ID NO: 96567 - DNA, 26 bp, Artificial Sequence
  Synthetic
tctacatgatccucttgtggaaugga

SEQ ID NO: 96568 - DNA, 24 bp, Artificial Sequence
  Synthetic
ggaatgcccuttcactggttuact

SEQ ID NO: 96569 - DNA, 30 bp, Artificial Sequence
  Synthetic
gtattaccattagcutctcatccttcacut

SEQ ID NO: 96570 - DNA, 24 bp, Artificial Sequence
  Synthetic
ccacatacuggctgttgttuacga

SEQ ID NO: 96571 - DNA, 28 bp, Artificial Sequence
  Synthetic
gccatctgcuttttgtgaaattuaacat

SEQ ID NO: 96572 - DNA, 27 bp, Artificial Sequence
  Synthetic
catcccaaaaugtattgagcaguagga

SEQ ID NO: 96573 - DNA, 25 bp, Artificial Sequence
  Synthetic
gttgttttgggutcaggccttatug

SEQ ID NO: 96574 - DNA, 28 bp, Artificial Sequence
  Synthetic
gtcattaattccaaaaucatcgtgguca

SEQ ID NO: 96575 - DNA, 28 bp, Artificial Sequence
  Synthetic
tggtgttatcagutgaaagaatgacugt

SEQ ID NO: 96576 - DNA, 29 bp, Artificial Sequence
  Synthetic
cgagtatttccaacuaatttcccaggaut

SEQ ID NO: 96577 - DNA, 27 bp, Artificial Sequence
  Synthetic
cacatgattctgutctcccattttcug

SEQ ID NO: 96578 - DNA, 26 bp, Artificial Sequence
  Synthetic
agctggctguaatattgaaaggagut

SEQ ID NO: 96579 - DNA, 29 bp, Artificial Sequence
  Synthetic
caaacauaaccaggagatagguggaaaat

SEQ ID NO: 96580 - DNA, 25 bp, Artificial Sequence
  Synthetic
acttggtuggagagctgctuaaaat

SEQ ID NO: 96581 - DNA, 21 bp, Artificial Sequence
  Synthetic
ccctctguctgctcatucagg

SEQ ID NO: 96582 - DNA, 27 bp, Artificial Sequence
  Synthetic
ggctgttcguaacctgctgatttauat

SEQ ID NO: 96583 - DNA, 28 bp, Artificial Sequence
  Synthetic
ccaagtgcaguttgtaaagttttuagga

SEQ ID NO: 96584 - DNA, 29 bp, Artificial Sequence
  Synthetic
agggagtcatttauggatcgtattctgua

SEQ ID NO: 96585 - DNA, 26 bp, Artificial Sequence
  Synthetic
aaactgauaagccaggagugaaaagt

SEQ ID NO: 96586 - DNA, 24 bp, Artificial Sequence
  Synthetic
ccaaaaaggaccutagctgctcua

SEQ ID NO: 96587 - DNA, 28 bp, Artificial Sequence
  Synthetic
cattcttggaatugcagagttgcatuat

SEQ ID NO: 96588 - DNA, 28 bp, Artificial Sequence
  Synthetic
cgctgattttgtuaaataacgtggtgut

SEQ ID NO: 96589 - DNA, 22 bp, Artificial Sequence
  Synthetic
cttcccctcuctttggcactua

SEQ ID NO: 96590 - DNA, 28 bp, Artificial Sequence
  Synthetic
actcctggcttaucagtttgatcattut

SEQ ID NO: 96591 - DNA, 28 bp, Artificial Sequence
  Synthetic
gggaaattagtuggaaatactcgacgua

SEQ ID NO: 96592 - DNA, 27 bp, Artificial Sequence
  Synthetic
ccaagaatgcuttcgtttttcuacagt

SEQ ID NO: 96593 - DNA, 27 bp, Artificial Sequence
  Synthetic
gctgaccttgtucaataccaaaaacuc

SEQ ID NO: 96594 - DNA, 27 bp, Artificial Sequence
  Synthetic
tgtattggaactugggaacaattcugt

SEQ ID NO: 96595 - DNA, 27 bp, Artificial Sequence
  Synthetic
caactaactatuagggatgctgugcaa

SEQ ID NO: 96596 - DNA, 27 bp, Artificial Sequence
  Synthetic
tgaagattctgaugtttgctctgtuct

SEQ ID NO: 96597 - DNA, 27 bp, Artificial Sequence
  Synthetic
cagaagatcgccugcatagaaatttut

SEQ ID NO: 96598 - DNA, 24 bp, Artificial Sequence
  Synthetic
cgcacccaucctaaaactgctuat

SEQ ID NO: 96599 - DNA, 28 bp, Artificial Sequence
  Synthetic
cagatgaatuaaacacgtacagagugga

SEQ ID NO: 96600 - DNA, 24 bp, Artificial Sequence
  Synthetic
caccaaatcccacugtgacaatut

SEQ ID NO: 96601 - DNA, 28 bp, Artificial Sequence
  Synthetic
ccaatgaaaaatcuctgaatgtcaccut

SEQ ID NO: 96602 - DNA, 29 bp, Artificial Sequence
  Synthetic
auctttaatgtttaguagaaagcgagaca

SEQ ID NO: 96603 - DNA, 20 bp, Artificial Sequence
  Synthetic
ctgcucggcaaggaccaaua

SEQ ID NO: 96604 - DNA, 17 bp, Artificial Sequence
  Synthetic
tggucctugccgagcag

SEQ ID NO: 96605 - DNA, 27 bp, Artificial Sequence
  Synthetic
ctggatgatgacuttggaaatgacaut

SEQ ID NO: 96606 - DNA, 28 bp, Artificial Sequence
  Synthetic
caagacactgutggatttaacucagaga

SEQ ID NO: 96607 - DNA, 24 bp, Artificial Sequence
  Synthetic
ccttcacgaacutgtctccctuac

SEQ ID NO: 96608 - DNA, 25 bp, Artificial Sequence
  Synthetic
gctaagctatucaacattgccugga

SEQ ID NO: 96609 - DNA, 27 bp, Artificial Sequence
  Synthetic
cccctctcaaautatcatccgtacaua

SEQ ID NO: 96610 - DNA, 32 bp, Artificial Sequence
  Synthetic
acttatgtttctugcaatattctggtuaaaaa

SEQ ID NO: 96611 - DNA, 24 bp, Artificial Sequence
  Synthetic
ggagattgcuacagtgcttucaga

SEQ ID NO: 96612 - DNA, 27 bp, Artificial Sequence
  Synthetic
acaaatatgaaauacctgtgggcauct

SEQ ID NO: 96613 - DNA, 27 bp, Artificial Sequence
  Synthetic
tgcattattguctccatgcuaaagagt

SEQ ID NO: 96614 - DNA, 23 bp, Artificial Sequence
  Synthetic
tgaatugcggagaactgtguact

SEQ ID NO: 96615 - DNA, 28 bp, Artificial Sequence
  Synthetic
tcattgaaggcuggttattuacagaact

SEQ ID NO: 96616 - DNA, 27 bp, Artificial Sequence
  Synthetic
gaaagtgacuatattgtgaugcccaga

SEQ ID NO: 96617 - DNA, 28 bp, Artificial Sequence
  Synthetic
tgaattcaggguttactttgtagugcaa

SEQ ID NO: 96618 - DNA, 26 bp, Artificial Sequence
  Synthetic
actcttaaaaaguactgctgtugcct

SEQ ID NO: 96619 - DNA, 23 bp, Artificial Sequence
  Synthetic
catctgtctcuggagcagcauac

SEQ ID NO: 96620 - DNA, 24 bp, Artificial Sequence
  Synthetic
gctgcaaccagagcuctaattuct

SEQ ID NO: 96621 - DNA, 26 bp, Artificial Sequence
  Synthetic
tgutgtttttaatttuagggccgcaa

SEQ ID NO: 96622 - DNA, 25 bp, Artificial Sequence
  Synthetic
agtgcaaatgguaccaaatctccut

SEQ ID NO: 96623 - DNA, 27 bp, Artificial Sequence
  Synthetic
ccgtttgtttcugggatattggagaua

SEQ ID NO: 96624 - DNA, 23 bp, Artificial Sequence
  Synthetic
cacacacattcutgtgagcacut

SEQ ID NO: 96625 - DNA, 26 bp, Artificial Sequence
  Synthetic
gctctcactuccatggatttatuccc

SEQ ID NO: 96626 - DNA, 28 bp, Artificial Sequence
  Synthetic
gtcaacttuaaacagccatcaucagaat

SEQ ID NO: 96627 - DNA, 33 bp, Artificial Sequence
  Synthetic
ttaatgacttatttugtgcttctgtaguaaaca

SEQ ID NO: 96628 - DNA, 25 bp, Artificial Sequence
  Synthetic
tgtaccuaaaagaaacacaaugcct

SEQ ID NO: 96629 - DNA, 28 bp, Artificial Sequence
  Synthetic
tcctcctattttucatgagtggtttcug

SEQ ID NO: 96630 - DNA, 26 bp, Artificial Sequence
  Synthetic
catgatgtaggaucagggaatgtuct

SEQ ID NO: 96631 - DNA, 23 bp, Artificial Sequence
  Synthetic
gccagtgtaugctaccaaaguca

SEQ ID NO: 96632 - DNA, 20 bp, Artificial Sequence
  Synthetic
gaugccugggcaggagaaat

SEQ ID NO: 96633 - DNA, 24 bp, Artificial Sequence
  Synthetic
gatatcacucttcctugcaggagt

SEQ ID NO: 96634 - DNA, 33 bp, Artificial Sequence
  Synthetic
aaagtcttagatuacaaagctttacuaacacaa

SEQ ID NO: 96635 - DNA, 26 bp, Artificial Sequence
  Synthetic
agtgacgagagagaautgcaaugaat

SEQ ID NO: 96636 - DNA, 27 bp, Artificial Sequence
  Synthetic
gtttaatgtaccucgctccattcacua

SEQ ID NO: 96637 - DNA, 27 bp, Artificial Sequence
  Synthetic
gtatgaataacttuggccatcgtctug

SEQ ID NO: 96638 - DNA, 25 bp, Artificial Sequence
  Synthetic
cccaacugggacaggaaaattcaut

SEQ ID NO: 96639 - DNA, 22 bp, Artificial Sequence
  Synthetic
cagtgtuccaggagttguggag

SEQ ID NO: 96640 - DNA, 20 bp, Artificial Sequence
  Synthetic
accttucccctccuccacaa

SEQ ID NO: 96641 - DNA, 29 bp, Artificial Sequence
  Synthetic
aagttgcccctutctttctaattacguat

SEQ ID NO: 96642 - DNA, 27 bp, Artificial Sequence
  Synthetic
tcttcatacaagacucaccctucaaga

SEQ ID NO: 96643 - DNA, 22 bp, Artificial Sequence
  Synthetic
cttgccugccttttgttacuca

SEQ ID NO: 96644 - DNA, 20 bp, Artificial Sequence
  Synthetic
cccctcattutgctgcccua

SEQ ID NO: 96645 - DNA, 21 bp, Artificial Sequence
  Synthetic
ccacccucatccatgtugaca

SEQ ID NO: 96646 - DNA, 22 bp, Artificial Sequence
  Synthetic
aggagccugacgaaatcctcua

SEQ ID NO: 96647 - DNA, 20 bp, Artificial Sequence
  Synthetic
acatagcguccagcaggaug

SEQ ID NO: 96648 - DNA, 24 bp, Artificial Sequence
  Synthetic
cgtagtcaacccaaaugggtgtua

SEQ ID NO: 96649 - DNA, 28 bp, Artificial Sequence
  Synthetic
gttctgaaataacccuaaccttaccugt

SEQ ID NO: 96650 - DNA, 21 bp, Artificial Sequence
  Synthetic
gattcctguagctgccucact

SEQ ID NO: 96651 - DNA, 22 bp, Artificial Sequence
  Synthetic
ttggatccugagagggaguacc

SEQ ID NO: 96652 - DNA, 28 bp, Artificial Sequence
  Synthetic
catagcatguaaacagttgggaauaggt

SEQ ID NO: 96653 - DNA, 22 bp, Artificial Sequence
  Synthetic
agagatggaugctggccaatut

SEQ ID NO: 96654 - DNA, 29 bp, Artificial Sequence
  Synthetic
gagttctattucacagtttaccugacaca

SEQ ID NO: 96655 - DNA, 28 bp, Artificial Sequence
  Synthetic
gaaggcagaugggaatgaataugaagat

SEQ ID NO: 96656 - DNA, 28 bp, Artificial Sequence
  Synthetic
tgtatataagatguggcttgttgugacc

SEQ ID NO: 96657 - DNA, 25 bp, Artificial Sequence
  Synthetic
ttttcttctuggcgactgtuaggaa

SEQ ID NO: 96658 - DNA, 27 bp, Artificial Sequence
  Synthetic
gatgaatacaugttgccattugaggag

SEQ ID NO: 96659 - DNA, 28 bp, Artificial Sequence
  Synthetic
aagctaactggauaacttacagcatgut

SEQ ID NO: 96660 - DNA, 27 bp, Artificial Sequence
  Synthetic
ggcctgttutaagagattatuggcaga

SEQ ID NO: 96661 - DNA, 27 bp, Artificial Sequence
  Synthetic
atcacctuccagaaaatactugcagaa

SEQ ID NO: 96662 - DNA, 29 bp, Artificial Sequence
  Synthetic
catgtaactucctgtaattttucaaggct

SEQ ID NO: 96663 - DNA, 25 bp, Artificial Sequence
  Synthetic
gcaagccatuccttttcctacugaa

SEQ ID NO: 96664 - DNA, 28 bp, Artificial Sequence
  Synthetic
ctcaccaagtttuactggactaggtaut

SEQ ID NO: 96665 - DNA, 21 bp, Artificial Sequence
  Synthetic
ctcugaacacggacatgugga

SEQ ID NO: 96666 - DNA, 25 bp, Artificial Sequence
  Synthetic
ggcuttcaagttccuacagaagagg

SEQ ID NO: 96667 - DNA, 28 bp, Artificial Sequence
  Synthetic
ccccagagauaaagtcaaagatgatuct

SEQ ID NO: 96668 - DNA, 28 bp, Artificial Sequence
  Synthetic
cagacaagtugaccaagtauagaagcaa

SEQ ID NO: 96669 - DNA, 27 bp, Artificial Sequence
  Synthetic
ggctttgtttuaccagtacttttgucc

SEQ ID NO: 96670 - DNA, 27 bp, Artificial Sequence
  Synthetic
actatatccacucttacctgaauggca

SEQ ID NO: 96671 - DNA, 27 bp, Artificial Sequence
  Synthetic
gtagaagatucaagctttgcctaugga

SEQ ID NO: 96672 - DNA, 28 bp, Artificial Sequence
  Synthetic
ggtaagctcttgutagctccatcaauaa

SEQ ID NO: 96673 - DNA, 28 bp, Artificial Sequence
  Synthetic
catggaaaaagcaguacaccuaagaaaa

SEQ ID NO: 96674 - DNA, 28 bp, Artificial Sequence
  Synthetic
atcaggaaauccaggaaaatgtcttuct

SEQ ID NO: 96675 - DNA, 26 bp, Artificial Sequence
  Synthetic
gccgacacccuttacagtcaaatuaa

SEQ ID NO: 96676 - DNA, 23 bp, Artificial Sequence
  Synthetic
cccagtatgutttggtgcuggat

SEQ ID NO: 96677 - DNA, 22 bp, Artificial Sequence
  Synthetic
actgtgauggttcgtgtuggag

SEQ ID NO: 96678 - DNA, 24 bp, Artificial Sequence
  Synthetic
cggttgatttuacaccaggaggut

SEQ ID NO: 96679 - DNA, 23 bp, Artificial Sequence
  Synthetic
gcaccuaccugaagaacaggaga

SEQ ID NO: 96680 - DNA, 27 bp, Artificial Sequence
  Synthetic
gggccaataautatattcgaggtuact

SEQ ID NO: 96681 - DNA, 26 bp, Artificial Sequence
  Synthetic
gtcttttucgaagagcatgtgaagut

SEQ ID NO: 96682 - DNA, 26 bp, Artificial Sequence
  Synthetic
aatgggccauaccaaattattcucct

SEQ ID NO: 96683 - DNA, 28 bp, Artificial Sequence
  Synthetic
ccagagagaauagaaagcagctcaaaua

SEQ ID NO: 96684 - DNA, 20 bp, Artificial Sequence
  Synthetic
tcacgcaucagcctcatugt

SEQ ID NO: 96685 - DNA, 28 bp, Artificial Sequence
  Synthetic
agaaacctttgaagutccagaaattgug

SEQ ID NO: 96686 - DNA, 22 bp, Artificial Sequence
  Synthetic
tcatcaagugccatccauccac

SEQ ID NO: 96687 - DNA, 27 bp, Artificial Sequence
  Synthetic
gcaaattgcacaucatcctgtagttua

SEQ ID NO: 96688 - DNA, 26 bp, Artificial Sequence
  Synthetic
accatattatgagucaggcgaaaugg

SEQ ID NO: 96689 - DNA, 28 bp, Artificial Sequence
  Synthetic
tgctaaaagaatcuggacatgaagtuct

SEQ ID NO: 96690 - DNA, 25 bp, Artificial Sequence
  Synthetic
ggccaugaaaaucaaaaccacaact

SEQ ID NO: 96691 - DNA, 26 bp, Artificial Sequence
  Synthetic
tcttagcaatuggtttggattccugt

SEQ ID NO: 96692 - DNA, 22 bp, Artificial Sequence
  Synthetic
gauccatcacuccgaaaagcca

SEQ ID NO: 96693 - DNA, 28 bp, Artificial Sequence
  Synthetic
ccuctatatctatgauggaccagacagt

SEQ ID NO: 96694 - DNA, 21 bp, Artificial Sequence
  Synthetic
tggcgttugccgtctttctua

SEQ ID NO: 96695 - DNA, 20 bp, Artificial Sequence
  Synthetic
ggactcuccgacucaacacc

SEQ ID NO: 96696 - DNA, 26 bp, Artificial Sequence
  Synthetic
gggctattactguctggtccatcaua

SEQ ID NO: 96697 - DNA, 33 bp, Artificial Sequence
  Synthetic
tggttaacagccuaataataattatcctactuc

SEQ ID NO: 96698 - DNA, 23 bp, Artificial Sequence
  Synthetic
gaguttgtggtucaggacaggaa

SEQ ID NO: 96699 - DNA, 32 bp, Artificial Sequence
  Synthetic
gtttgatgagacacugatattcaatttuagca

SEQ ID NO: 96700 - DNA, 23 bp, Artificial Sequence
  Synthetic
cagcacgcuttttgacatctuct

SEQ ID NO: 96701 - DNA, 22 bp, Artificial Sequence
  Synthetic
agaugaacaaaacugggccaca

SEQ ID NO: 96702 - DNA, 27 bp, Artificial Sequence
  Synthetic
ggatactaaccugttgtcaatcugcac

SEQ ID NO: 96703 - DNA, 23 bp, Artificial Sequence
  Synthetic
gttgcagaaagcuaaagccauca

SEQ ID NO: 96704 - DNA, 24 bp, Artificial Sequence
  Synthetic
ctgctttttcuttgtgccagucaa

SEQ ID NO: 96705 - DNA, 25 bp, Artificial Sequence
  Synthetic
tgaaaagagacagguattccaugcc

SEQ ID NO: 96706 - DNA, 22 bp, Artificial Sequence
  Synthetic
cccagggcucaattccaguaac

SEQ ID NO: 96707 - DNA, 26 bp, Artificial Sequence
  Synthetic
gaccctgagauactgaaaagctgtut

SEQ ID NO: 96708 - DNA, 28 bp, Artificial Sequence
  Synthetic
gatctgaattcaccutttcctctacgut

SEQ ID NO: 96709 - DNA, 21 bp, Artificial Sequence
  Synthetic
tgtgacagggugaacttgcug

SEQ ID NO: 96710 - DNA, 24 bp, Artificial Sequence
  Synthetic
ctcctgatccugaaagttctugct

SEQ ID NO: 96711 - DNA, 21 bp, Artificial Sequence
  Synthetic
ccatgctguaggcatcctcuc

SEQ ID NO: 96712 - DNA, 27 bp, Artificial Sequence
  Synthetic
ggcttgtaautttcaacttcucagcaa

SEQ ID NO: 96713 - DNA, 26 bp, Artificial Sequence
  Synthetic
gcagagcagcuacttctagaaaauca

SEQ ID NO: 96714 - DNA, 22 bp, Artificial Sequence
  Synthetic
ctcaatagtuaaccgggcugga

SEQ ID NO: 96715 - DNA, 28 bp, Artificial Sequence
  Synthetic
tgcatactagggutgcattttaggttua

SEQ ID NO: 96716 - DNA, 19 bp, Artificial Sequence
  Synthetic
cggagcucctgaccuacac

SEQ ID NO: 96717 - DNA, 26 bp, Artificial Sequence
  Synthetic
ggcattttcucatgtcaatguacaca

SEQ ID NO: 96718 - DNA, 22 bp, Artificial Sequence
  Synthetic
cauccaucacaggaccacagag

SEQ ID NO: 96719 - DNA, 22 bp, Artificial Sequence
  Synthetic
ttttggcaucagtgctctcuca

SEQ ID NO: 96720 - DNA, 31 bp, Artificial Sequence
  Synthetic
caataacaatagucctgacttaccauacagt

SEQ ID NO: 96721 - DNA, 28 bp, Artificial Sequence
  Synthetic
ccatttattctccugggtatcctgauga

SEQ ID NO: 96722 - DNA, 28 bp, Artificial Sequence
  Synthetic
ggtactctuacaagccaaaaacaatcut

SEQ ID NO: 96723 - DNA, 23 bp, Artificial Sequence
  Synthetic
tgcctttttcuccacagtcagut

SEQ ID NO: 96724 - DNA, 30 bp, Artificial Sequence
  Synthetic
agagttccataauctctacgtattgucact

SEQ ID NO: 96725 - DNA, 26 bp, Artificial Sequence
  Synthetic
aggttgcaacaauctacaaagaucca

SEQ ID NO: 96726 - DNA, 29 bp, Artificial Sequence
  Synthetic
gtgacttcatttgcugttaactgtatcuc

SEQ ID NO: 96727 - DNA, 24 bp, Artificial Sequence
  Synthetic
gaaatggccucttccagaaaacuc

SEQ ID NO: 96728 - DNA, 26 bp, Artificial Sequence
  Synthetic
aaaaguagggcaaacagaaugaggaa

SEQ ID NO: 96729 - DNA, 25 bp, Artificial Sequence
  Synthetic
tgccccaguttctatttaguagcag

SEQ ID NO: 96730 - DNA, 24 bp, Artificial Sequence
  Synthetic
tgaaggaagcccugattgatctug

SEQ ID NO: 96731 - DNA, 21 bp, Artificial Sequence
  Synthetic
ccgagaagcuctgctagtcug

SEQ ID NO: 96732 - DNA, 28 bp, Artificial Sequence
  Synthetic
ggaacgactgutgtctgttgtaaauaga

SEQ ID NO: 96733 - DNA, 29 bp, Artificial Sequence
  Synthetic
tcagactgaacugaattatgatgttcugg

SEQ ID NO: 96734 - DNA, 25 bp, Artificial Sequence
  Synthetic
agaagattuggcccatcatgaacut

SEQ ID NO: 96735 - DNA, 32 bp, Artificial Sequence
  Synthetic
gcagtccaaagcautatttccatatatagugt

SEQ ID NO: 96736 - DNA, 24 bp, Artificial Sequence
  Synthetic
cgtgtuacagcagcattttuggaa

SEQ ID NO: 96737 - DNA, 25 bp, Artificial Sequence
  Synthetic
acgtcctcguataaggctttttguc

SEQ ID NO: 96738 - DNA, 25 bp, Artificial Sequence
  Synthetic
catgttttgaagugtcgcctttcua

SEQ ID NO: 96739 - DNA, 21 bp, Artificial Sequence
  Synthetic
aatcctugcggaaaggagcut

SEQ ID NO: 96740 - DNA, 28 bp, Artificial Sequence
  Synthetic
aggacagagaaagaauaagtagcacuct

SEQ ID NO: 96741 - DNA, 23 bp, Artificial Sequence
  Synthetic
gagtgcaguttcagaaugaagca

SEQ ID NO: 96742 - DNA, 29 bp, Artificial Sequence
  Synthetic
gttctcacautcaagtatauacccagcaa

SEQ ID NO: 96743 - DNA, 21 bp, Artificial Sequence
  Synthetic
cccaaguaggcttctgtucca

SEQ ID NO: 96744 - DNA, 29 bp, Artificial Sequence
  Synthetic
aaacaagggaaccaauatacatgaucact

SEQ ID NO: 96745 - DNA, 23 bp, Artificial Sequence
  Synthetic
atttcaggcugaccactcaaugt

SEQ ID NO: 96746 - DNA, 23 bp, Artificial Sequence
  Synthetic
agtgatgtuaaagccacgtccug

SEQ ID NO: 96747 - DNA, 26 bp, Artificial Sequence
  Synthetic
tcccagtttgauttccttgctgtuaa

SEQ ID NO: 96748 - DNA, 24 bp, Artificial Sequence
  Synthetic
tgctucaacaacatcaaugcaagg

SEQ ID NO: 96749 - DNA, 24 bp, Artificial Sequence
  Synthetic
ctgattgcacutggaccattguag

SEQ ID NO: 96750 - DNA, 23 bp, Artificial Sequence
  Synthetic
gggattcuggagagtcaccauct

SEQ ID NO: 96751 - DNA, 24 bp, Artificial Sequence
  Synthetic
tcctgatuacccagaagggtaugg

SEQ ID NO: 96752 - DNA, 21 bp, Artificial Sequence
  Synthetic
gaaattgtguccccaggcuct

SEQ ID NO: 96753 - DNA, 24 bp, Artificial Sequence
  Synthetic
aagatgcttguggaggaacaauga

SEQ ID NO: 96754 - DNA, 23 bp, Artificial Sequence
  Synthetic
tggatatgaugccactggaucct

SEQ ID NO: 96755 - DNA, 26 bp, Artificial Sequence
  Synthetic
gcacttggtaucacatttgaactgut

SEQ ID NO: 96756 - DNA, 20 bp, Artificial Sequence
  Synthetic
gtcutccataggugcaccca

SEQ ID NO: 96757 - DNA, 24 bp, Artificial Sequence
  Synthetic
tgcaatgaugcagtggtuacagaa

SEQ ID NO: 96758 - DNA, 28 bp, Artificial Sequence
  Synthetic
atcagagattatcguccagatgcaatut

SEQ ID NO: 96759 - DNA, 31 bp, Artificial Sequence
  Synthetic
tgtatttcataatctucctgtttcaccagut

SEQ ID NO: 96760 - DNA, 27 bp, Artificial Sequence
  Synthetic
agaactgttggtutgatatgtcagcut

SEQ ID NO: 96761 - DNA, 26 bp, Artificial Sequence
  Synthetic
caaaatgacagautgagccaccauac

SEQ ID NO: 96762 - DNA, 26 bp, Artificial Sequence
  Synthetic
gccattttgtugcagttttgttcaut

SEQ ID NO: 96763 - DNA, 23 bp, Artificial Sequence
  Synthetic
tcttggccucttacucaaggaca

SEQ ID NO: 96764 - DNA, 26 bp, Artificial Sequence
  Synthetic
ccagaacacgguattctaaaaugcct

SEQ ID NO: 96765 - DNA, 24 bp, Artificial Sequence
  Synthetic
ccccagcccutgaatatgaaacuc

SEQ ID NO: 96766 - DNA, 30 bp, Artificial Sequence
  Synthetic
tgtagtgaaaaauaaagcatgtctggauga

SEQ ID NO: 96767 - DNA, 28 bp, Artificial Sequence
  Synthetic
gcactgttcuatcaccaaactauccaaa

SEQ ID NO: 96768 - DNA, 28 bp, Artificial Sequence
  Synthetic
gagtcgaatctuacttaccaaactccut

SEQ ID NO: 96769 - DNA, 18 bp, Artificial Sequence
  Synthetic
tttccuagcgccctgugg

SEQ ID NO: 96770 - DNA, 26 bp, Artificial Sequence
  Synthetic
gtactgatcugtttttgctcaugcaa

SEQ ID NO: 96771 - DNA, 23 bp, Artificial Sequence
  Synthetic
ggactgttgaugtaacccaugga

SEQ ID NO: 96772 - DNA, 24 bp, Artificial Sequence
  Synthetic
gaggcaaatuaccttttccauggg

SEQ ID NO: 96773 - DNA, 26 bp, Artificial Sequence
  Synthetic
tgctgatcacauggatctgtttctut

SEQ ID NO: 96774 - DNA, 21 bp, Artificial Sequence
  Synthetic
gttcttccugctgctgcctua

SEQ ID NO: 96775 - DNA, 28 bp, Artificial Sequence
  Synthetic
ggttaaccaatuctgggaaacataugaa

SEQ ID NO: 96776 - DNA, 27 bp, Artificial Sequence
  Synthetic
agagtttagtgtucagttccgctatut

SEQ ID NO: 96777 - DNA, 28 bp, Artificial Sequence
  Synthetic
tccaaatgtccugaaaatgtgtcaguat

SEQ ID NO: 96778 - DNA, 25 bp, Artificial Sequence
  Synthetic
gactccuggaaaacaatggagauca

SEQ ID NO: 96779 - DNA, 25 bp, Artificial Sequence
  Synthetic
gacaaggcagguagctaagtguaaa

SEQ ID NO: 96780 - DNA, 24 bp, Artificial Sequence
  Synthetic
ctcaactugaaatcgcttugcaca

SEQ ID NO: 96781 - DNA, 28 bp, Artificial Sequence
  Synthetic
cgatatcaugcacaattcauacaaccat

SEQ ID NO: 96782 - DNA, 20 bp, Artificial Sequence
  Synthetic
tgtcagccauggccaaagut

SEQ ID NO: 96783 - DNA, 27 bp, Artificial Sequence
  Synthetic
cctgaccagtuaaacatttcatcctut

SEQ ID NO: 96784 - DNA, 30 bp, Artificial Sequence
  Synthetic
acgctcctcauggttaaaatagaatataug

SEQ ID NO: 96785 - DNA, 23 bp, Artificial Sequence
  Synthetic
agccuggaggagagaatcaucaa

SEQ ID NO: 96786 - DNA, 28 bp, Artificial Sequence
  Synthetic
agtcttggtattuacctgtctgttgaug

SEQ ID NO: 96787 - DNA, 28 bp, Artificial Sequence
  Synthetic
caagcagagctuttgctaaagaaaguaa

SEQ ID NO: 96788 - DNA, 27 bp, Artificial Sequence
  Synthetic
cattaatgggtcutgaacagtgtgtut

SEQ ID NO: 96789 - DNA, 27 bp, Artificial Sequence
  Synthetic
agcaatttaaguctgaggcctaucaac

SEQ ID NO: 96790 - DNA, 29 bp, Artificial Sequence
  Synthetic
tgcttgatgatucagtctttccatttcua

SEQ ID NO: 96791 - DNA, 23 bp, Artificial Sequence
  Synthetic
gtcaccucccctcagtaaguagt

SEQ ID NO: 96792 - DNA, 28 bp, Artificial Sequence
  Synthetic
ctaattaggcautgaaggaagctuaaca

SEQ ID NO: 96793 - DNA, 21 bp, Artificial Sequence
  Synthetic
gggaatgguacctggaguggt

SEQ ID NO: 96794 - DNA, 21 bp, Artificial Sequence
  Synthetic
acgtaagcacugcggtactuc

SEQ ID NO: 96795 - DNA, 24 bp, Artificial Sequence
  Synthetic
ggaaggcuggaaggaacaaattuc

SEQ ID NO: 96796 - DNA, 22 bp, Artificial Sequence
  Synthetic
ccagtctugtcctctcugagca

SEQ ID NO: 96797 - DNA, 23 bp, Artificial Sequence
  Synthetic
tgcaatgaguatgcatggugaca

SEQ ID NO: 96798 - DNA, 27 bp, Artificial Sequence
  Synthetic
gatgtagctaatacuaaagccccaguc

SEQ ID NO: 96799 - DNA, 25 bp, Artificial Sequence
  Synthetic
gctcaggatauttcaacagctgugt

SEQ ID NO: 96800 - DNA, 27 bp, Artificial Sequence
  Synthetic
ccacaaataugattcatggucaccaca

SEQ ID NO: 96801 - DNA, 22 bp, Artificial Sequence
  Synthetic
ggagcatgaccuggatgatguc

SEQ ID NO: 96802 - DNA, 21 bp, Artificial Sequence
  Synthetic
gagagtctuccaccgtgcaut

SEQ ID NO: 96803 - DNA, 27 bp, Artificial Sequence
  Synthetic
ttgcaagguaaacagcaagatguaaac

SEQ ID NO: 96804 - DNA, 24 bp, Artificial Sequence
  Synthetic
ctgaataaggccutgaccuaacca

SEQ ID NO: 96805 - DNA, 27 bp, Artificial Sequence
  Synthetic
acaacctgatgccuaaagaaatgctua

SEQ ID NO: 96806 - DNA, 25 bp, Artificial Sequence
  Synthetic
cagctcagtucacctatgtctctug

SEQ ID NO: 96807 - DNA, 24 bp, Artificial Sequence
  Synthetic
cctgcugagaaaggcatgaaguag

SEQ ID NO: 96808 - DNA, 29 bp, Artificial Sequence
  Synthetic
gtgactgactuagcatcttacatctttug

SEQ ID NO: 96809 - DNA, 26 bp, Artificial Sequence
  Synthetic
tcaggcctcucattgaataaggagua

SEQ ID NO: 96810 - DNA, 28 bp, Artificial Sequence
  Synthetic
tcactttctggaugaaggtggaaattut

SEQ ID NO: 96811 - DNA, 24 bp, Artificial Sequence
  Synthetic
agaaggcacaugtaagtuccaact

SEQ ID NO: 96812 - DNA, 23 bp, Artificial Sequence
  Synthetic
ggcatgtttcucaggagtgtgua

SEQ ID NO: 96813 - DNA, 25 bp, Artificial Sequence
  Synthetic
cattgtggcaccaauattgacucac

SEQ ID NO: 96814 - DNA, 28 bp, Artificial Sequence
  Synthetic
acactctcttttuactagacaggtggua

SEQ ID NO: 96815 - DNA, 28 bp, Artificial Sequence
  Synthetic
aatggagtagugaacatttagccaacut

SEQ ID NO: 96816 - DNA, 24 bp, Artificial Sequence
  Synthetic
gcaaatagttcugccagcagtaug

SEQ ID NO: 96817 - DNA, 28 bp, Artificial Sequence
  Synthetic
ctgcacagaaaaggaauaaacacttugt

SEQ ID NO: 96818 - DNA, 21 bp, Artificial Sequence
  Synthetic
ggtctcugcggccctaattuc

SEQ ID NO: 96819 - DNA, 25 bp, Artificial Sequence
  Synthetic
ggtgtgguaagaaactgggtctuaa

SEQ ID NO: 96820 - DNA, 19 bp, Artificial Sequence
  Synthetic
gcagcagaaggutgccuac

SEQ ID NO: 96821 - DNA, 18 bp, Artificial Sequence
  Synthetic
gcacccacuccugacact

SEQ ID NO: 96822 - DNA, 21 bp, Artificial Sequence
  Synthetic
ccucagagctgatugccaaga

SEQ ID NO: 96823 - DNA, 25 bp, Artificial Sequence
  Synthetic
gatttgagcaugcccatuaggaaac

SEQ ID NO: 96824 - DNA, 25 bp, Artificial Sequence
  Synthetic
ccatcaatgcagautcttcgagtuc

SEQ ID NO: 96825 - DNA, 29 bp, Artificial Sequence
  Synthetic
actgaagccaaagucaatcaaaaugaaaa

SEQ ID NO: 96826 - DNA, 25 bp, Artificial Sequence
  Synthetic
ttcacatccaaugacaaggcctuat

SEQ ID NO: 96827 - DNA, 24 bp, Artificial Sequence
  Synthetic
gggagagaaaguggagatgctuac

SEQ ID NO: 96828 - DNA, 27 bp, Artificial Sequence
  Synthetic
tccatgctatttuggtcttgaatgcua

SEQ ID NO: 96829 - DNA, 23 bp, Artificial Sequence
  Synthetic
acgcuggcaaaatgtttuggaaa

SEQ ID NO: 96830 - DNA, 26 bp, Artificial Sequence
  Synthetic
caacaauaaacacaaccctgcauaca

SEQ ID NO: 96831 - DNA, 26 bp, Artificial Sequence
  Synthetic
cgggctagttgugttagtggatttut

SEQ ID NO: 96832 - DNA, 23 bp, Artificial Sequence
  Synthetic
ctgctgctucctttgttctgtut

SEQ ID NO: 96833 - DNA, 25 bp, Artificial Sequence
  Synthetic
gatgtatuagcccatcaguccacag

SEQ ID NO: 96834 - DNA, 24 bp, Artificial Sequence
  Synthetic
ttcctgcttuattaacggctucca

SEQ ID NO: 96835 - DNA, 28 bp, Artificial Sequence
  Synthetic
ttugaggatgtttcauaaccagaaagga

SEQ ID NO: 96836 - DNA, 24 bp, Artificial Sequence
  Synthetic
tctgatatuggacccttcccucat

SEQ ID NO: 96837 - DNA, 20 bp, Artificial Sequence
  Synthetic
ccaccucccaactctgucac

SEQ ID NO: 96838 - DNA, 28 bp, Artificial Sequence
  Synthetic
acaagaattctgcugctgcaataagaua

SEQ ID NO: 96839 - DNA, 20 bp, Artificial Sequence
  Synthetic
ccacaggcacaaucacgaug

SEQ ID NO: 96840 - DNA, 28 bp, Artificial Sequence
  Synthetic
tgtcatcttttcuttaagcctccaauct

SEQ ID NO: 96841 - DNA, 26 bp, Artificial Sequence
  Synthetic
gccattcaacaugaaaatgtcgaugt

SEQ ID NO: 96842 - DNA, 27 bp, Artificial Sequence
  Synthetic
ttcaagcttguaagagcatgaauacga

SEQ ID NO: 96843 - DNA, 28 bp, Artificial Sequence
  Synthetic
ggcctttggaaauggttgttaaaauagt

SEQ ID NO: 96844 - DNA, 29 bp, Artificial Sequence
  Synthetic
caaaataggcaauctcctttcuaagcaaa

SEQ ID NO: 96845 - DNA, 22 bp, Artificial Sequence
  Synthetic
tcacaaggucctgttggtaugg

SEQ ID NO: 96846 - DNA, 24 bp, Artificial Sequence
  Synthetic
ctcctgagtaguaagggaggcaua

SEQ ID NO: 96847 - DNA, 28 bp, Artificial Sequence
  Synthetic
gaggagcuaaaaaccaaagtagaacugt

SEQ ID NO: 96848 - DNA, 25 bp, Artificial Sequence
  Synthetic
agctgctgatuaattgtctccgtut

SEQ ID NO: 96849 - DNA, 20 bp, Artificial Sequence
  Synthetic
gutacuggaccgagcccaag

SEQ ID NO: 96850 - DNA, 24 bp, Artificial Sequence
  Synthetic
ggagcttttcugagaggttcucaa

SEQ ID NO: 96851 - DNA, 24 bp, Artificial Sequence
  Synthetic
cacugcaagccaaaaugaaagact

SEQ ID NO: 96852 - DNA, 22 bp, Artificial Sequence
  Synthetic
ccttcaaccugctcttctcugg

SEQ ID NO: 96853 - DNA, 27 bp, Artificial Sequence
  Synthetic
caatgccaauaaaacctgcaagaugat

SEQ ID NO: 96854 - DNA, 22 bp, Artificial Sequence
  Synthetic
gcutcugaaaaccgagcagaca

SEQ ID NO: 96855 - DNA, 24 bp, Artificial Sequence
  Synthetic
tgttggaacaggauattgcagguc

SEQ ID NO: 96856 - DNA, 25 bp, Artificial Sequence
  Synthetic
gcuctactcagaaauaaggccaagt

SEQ ID NO: 96857 - DNA, 25 bp, Artificial Sequence
  Synthetic
gaaagaaaaaugggaatcgguggaa

SEQ ID NO: 96858 - DNA, 28 bp, Artificial Sequence
  Synthetic
ttcattcatggcauttatactgctcuga

SEQ ID NO: 96859 - DNA, 22 bp, Artificial Sequence
  Synthetic
cacaggttgugcaagcttaugt

SEQ ID NO: 96860 - DNA, 28 bp, Artificial Sequence
  Synthetic
cacatactttccuttcattgagttuggt

SEQ ID NO: 96861 - DNA, 28 bp, Artificial Sequence
  Synthetic
ctgcctttgaagcuaaagaagaaacaua

SEQ ID NO: 96862 - DNA, 24 bp, Artificial Sequence
  Synthetic
ggagaggttucttctgtggcuaac

SEQ ID NO: 96863 - DNA, 24 bp, Artificial Sequence
  Synthetic
gatgatgaacuggatagcauggct

SEQ ID NO: 96864 - DNA, 24 bp, Artificial Sequence
  Synthetic
cccccaaaacuagctcaacattut

SEQ ID NO: 96865 - DNA, 26 bp, Artificial Sequence
  Synthetic
gaaggtcattagucctactgggaaug

SEQ ID NO: 96866 - DNA, 23 bp, Artificial Sequence
  Synthetic
ggcctttcugcatcagactctua

SEQ ID NO: 96867 - DNA, 26 bp, Artificial Sequence
  Synthetic
gcttgggacugatgaccuagaaaaat

SEQ ID NO: 96868 - DNA, 21 bp, Artificial Sequence
  Synthetic
acacagaugggaccauagcct

SEQ ID NO: 96869 - DNA, 28 bp, Artificial Sequence
  Synthetic
gtgacctcatugagttattctgctctut

SEQ ID NO: 96870 - DNA, 21 bp, Artificial Sequence
  Synthetic
tttctgcatcuctccccacug

SEQ ID NO: 96871 - DNA, 26 bp, Artificial Sequence
  Synthetic
actaagucagcaggttgaugaaaagt

SEQ ID NO: 96872 - DNA, 27 bp, Artificial Sequence
  Synthetic
gggtagatttatugtccatgtgcaauc

SEQ ID NO: 96873 - DNA, 26 bp, Artificial Sequence
  Synthetic
ggatttctgtuattttgcagcucagt

SEQ ID NO: 96874 - DNA, 22 bp, Artificial Sequence
  Synthetic
gaaguctgacauagcaccacca

SEQ ID NO: 96875 - DNA, 23 bp, Artificial Sequence
  Synthetic
actcagagccutgaaaacgugaa

SEQ ID NO: 96876 - DNA, 21 bp, Artificial Sequence
  Synthetic
gtgcauccagctcactgugat

SEQ ID NO: 96877 - DNA, 22 bp, Artificial Sequence
  Synthetic
attaggtgtgugagcaggugac

SEQ ID NO: 96878 - DNA, 24 bp, Artificial Sequence
  Synthetic
gcctggacaugacagatacttuga

SEQ ID NO: 96879 - DNA, 24 bp, Artificial Sequence
  Synthetic
gagttctctguggctgccaataua

SEQ ID NO: 96880 - DNA, 24 bp, Artificial Sequence
  Synthetic
gcataugaaccaaagacgcatuct

SEQ ID NO: 96881 - DNA, 22 bp, Artificial Sequence
  Synthetic
cctcttgugaaaacccaggugt

SEQ ID NO: 96882 - DNA, 28 bp, Artificial Sequence
  Synthetic
aaatccgaatguattgttctgagaucca

SEQ ID NO: 96883 - DNA, 24 bp, Artificial Sequence
  Synthetic
gaucctttguaccaaaccccagat

SEQ ID NO: 96884 - DNA, 21 bp, Artificial Sequence
  Synthetic
gggtgucccagcaaagtucat

SEQ ID NO: 96885 - DNA, 18 bp, Artificial Sequence
  Synthetic
ggugaccaccucgaccac

SEQ ID NO: 96886 - DNA, 23 bp, Artificial Sequence
  Synthetic
ggaugtaggatcaugagcaggag

SEQ ID NO: 96887 - DNA, 20 bp, Artificial Sequence
  Synthetic
ccccgttcugtcccgaguat

SEQ ID NO: 96888 - DNA, 22 bp, Artificial Sequence
  Synthetic
tgccttugaacctcacaaucgt

SEQ ID NO: 96889 - DNA, 21 bp, Artificial Sequence
  Synthetic
ggacaaacgagaccgugctua

SEQ ID NO: 96890 - DNA, 26 bp, Artificial Sequence
  Synthetic
ggtggtgccaauatgtagacaucaat

SEQ ID NO: 96891 - DNA, 28 bp, Artificial Sequence
  Synthetic
cagcatgggatuctctaaataaagctug

SEQ ID NO: 96892 - DNA, 24 bp, Artificial Sequence
  Synthetic
caagtttgtcaauccggtcttucc

SEQ ID NO: 96893 - DNA, 27 bp, Artificial Sequence
  Synthetic
actggcttactuatcagaatggcttut

SEQ ID NO: 96894 - DNA, 27 bp, Artificial Sequence
  Synthetic
aagggaaccuagttgatactaugaaga

SEQ ID NO: 96895 - DNA, 21 bp, Artificial Sequence
  Synthetic
actgggcacuttctagcgtug

SEQ ID NO: 96896 - DNA, 24 bp, Artificial Sequence
  Synthetic
ctttttctttugcagctgtcguga

SEQ ID NO: 96897 - DNA, 21 bp, Artificial Sequence
  Synthetic
actucttcctgcuccgaaacc

SEQ ID NO: 96898 - DNA, 20 bp, Artificial Sequence
  Synthetic
caacacuctcaguggaccga

SEQ ID NO: 96899 - DNA, 28 bp, Artificial Sequence
  Synthetic
ctaagggataaggucagaatgcaacaua

SEQ ID NO: 96900 - DNA, 26 bp, Artificial Sequence
  Synthetic
gccattctgauaagtaagccagtugt

SEQ ID NO: 96901 - DNA, 29 bp, Artificial Sequence
  Synthetic
acaggaggagcuggatatagttatuaacc

SEQ ID NO: 96902 - DNA, 21 bp, Artificial Sequence
  Synthetic
acatgccgcaaugagtucaga

SEQ ID NO: 96903 - DNA, 28 bp, Artificial Sequence
  Synthetic
gtggttttgctuaaaattctaaggcugt

SEQ ID NO: 96904 - DNA, 21 bp, Artificial Sequence
  Synthetic
tctttcagcggcutccttcuc

SEQ ID NO: 96905 - DNA, 24 bp, Artificial Sequence
  Synthetic
gtagaggaagaacutccgaagguc

SEQ ID NO: 96906 - DNA, 28 bp, Artificial Sequence
  Synthetic
gagttggaacuaccacattgctttatug

SEQ ID NO: 96907 - DNA, 22 bp, Artificial Sequence
  Synthetic
atggtgtcuttgctttccuggt

SEQ ID NO: 96908 - DNA, 22 bp, Artificial Sequence
  Synthetic
attcattttcugcagccuccct

SEQ ID NO: 96909 - DNA, 27 bp, Artificial Sequence
  Synthetic
acagtgctugagaatagcaaactuaca

SEQ ID NO: 96910 - DNA, 28 bp, Artificial Sequence
  Synthetic
gcgattatugtgctttattuggaagact

SEQ ID NO: 96911 - DNA, 20 bp, Artificial Sequence
  Synthetic
gggcuccccaatgactucac

SEQ ID NO: 96912 - DNA, 29 bp, Artificial Sequence
  Synthetic
accattctttccaacucacttatcttucc

SEQ ID NO: 96913 - DNA, 23 bp, Artificial Sequence
  Synthetic
acagaacaggcutgacacttuca

SEQ ID NO: 96914 - DNA, 24 bp, Artificial Sequence
  Synthetic
aaacttgttgcugttgtcttuccc

SEQ ID NO: 96915 - DNA, 28 bp, Artificial Sequence
  Synthetic
gtttctttatctugcataagtccaugct

SEQ ID NO: 96916 - DNA, 22 bp, Artificial Sequence
  Synthetic
ggagacacagugctacucaagt

SEQ ID NO: 96917 - DNA, 21 bp, Artificial Sequence
  Synthetic
aaattccaatgucccccggut

SEQ ID NO: 96918 - DNA, 21 bp, Artificial Sequence
  Synthetic
cctctggagcautgcagauca

SEQ ID NO: 96919 - DNA, 24 bp, Artificial Sequence
  Synthetic
aggcaacaaagagcautgcaauac

SEQ ID NO: 96920 - DNA, 22 bp, Artificial Sequence
  Synthetic
tgtcaugttcttgcuggagacc

SEQ ID NO: 96921 - DNA, 27 bp, Artificial Sequence
  Synthetic
agguagcagagaaacagtugaaagaaa

SEQ ID NO: 96922 - DNA, 21 bp, Artificial Sequence
  Synthetic
ggacugagtttccugggcaat

SEQ ID NO: 96923 - DNA, 20 bp, Artificial Sequence
  Synthetic
tcaccaccugctgctgaaug

SEQ ID NO: 96924 - DNA, 27 bp, Artificial Sequence
  Synthetic
ttcttgctuccaattcaattttcugct

SEQ ID NO: 96925 - DNA, 28 bp, Artificial Sequence
  Synthetic
agaaagagagacaaugaggaagaacuct

SEQ ID NO: 96926 - DNA, 21 bp, Artificial Sequence
  Synthetic
ccagguggtucagcagaaact

SEQ ID NO: 96927 - DNA, 21 bp, Artificial Sequence
  Synthetic
ggtgtcuttagccugacagca

SEQ ID NO: 96928 - DNA, 27 bp, Artificial Sequence
  Synthetic
gtctttttccatcugctttatcagcut

SEQ ID NO: 96929 - DNA, 24 bp, Artificial Sequence
  Synthetic
caatcagtuggaggaaaacaccut

SEQ ID NO: 96930 - DNA, 21 bp, Artificial Sequence
  Synthetic
gcccaagutacagaugagggt

SEQ ID NO: 96931 - DNA, 21 bp, Artificial Sequence
  Synthetic
tgctgaauctcttgcgugaca

SEQ ID NO: 96932 - DNA, 24 bp, Artificial Sequence
  Synthetic
tgatcttccagugttcgtctggua

SEQ ID NO: 96933 - DNA, 24 bp, Artificial Sequence
  Synthetic
agggaactugaaaccattgugaga

SEQ ID NO: 96934 - DNA, 25 bp, Artificial Sequence
  Synthetic
gagcttgttguagctgaactttcug

SEQ ID NO: 96935 - DNA, 24 bp, Artificial Sequence
  Synthetic
cctggcgaaaagucaaaattuggt

SEQ ID NO: 96936 - DNA, 27 bp, Artificial Sequence
  Synthetic
acattggtcucagtaagtcaaatugct

SEQ ID NO: 96937 - DNA, 28 bp, Artificial Sequence
  Synthetic
tgtggaaaaagaacutatggtcagtgut

SEQ ID NO: 96938 - DNA, 28 bp, Artificial Sequence
  Synthetic
tgaaacgcaauacaaaagcatgacuaac

SEQ ID NO: 96939 - DNA, 20 bp, Artificial Sequence
  Synthetic
actgugggaggtuccaggat

SEQ ID NO: 96940 - DNA, 24 bp, Artificial Sequence
  Synthetic
gctgcctttgugtgtttagcauat

SEQ ID NO: 96941 - DNA, 27 bp, Artificial Sequence
  Synthetic
acaacaaaaacuggaagaatccuccaa

SEQ ID NO: 96942 - DNA, 28 bp, Artificial Sequence
  Synthetic
ggaactgggtuagattattggaggatuc

SEQ ID NO: 96943 - DNA, 31 bp, Artificial Sequence
  Synthetic
atcataccatacagucctcatagacataguc

SEQ ID NO: 96944 - DNA, 22 bp, Artificial Sequence
  Synthetic
tcatggccuctcctcttgttuc

SEQ ID NO: 96945 - DNA, 22 bp, Artificial Sequence
  Synthetic
gactucaccaccccaagtaucc

SEQ ID NO: 96946 - DNA, 28 bp, Artificial Sequence
  Synthetic
gttggtcacacutttgcttaaatucact

SEQ ID NO: 96947 - DNA, 23 bp, Artificial Sequence
  Synthetic
gcactgaaaautcaggcagaugg

SEQ ID NO: 96948 - DNA, 20 bp, Artificial Sequence
  Synthetic
ctcctcagugtccaccaucc

SEQ ID NO: 96949 - DNA, 28 bp, Artificial Sequence
  Synthetic
gtgctcagautgcattattttgugaaac

SEQ ID NO: 96950 - DNA, 24 bp, Artificial Sequence
  Synthetic
gagcaaaggaaagcaauagugcaa

SEQ ID NO: 96951 - DNA, 22 bp, Artificial Sequence
  Synthetic
cctggcttcutcttagcaggug

SEQ ID NO: 96952 - DNA, 24 bp, Artificial Sequence
  Synthetic
gtgctgcguagctgatcttuaaaa

SEQ ID NO: 96953 - DNA, 29 bp, Artificial Sequence
  Synthetic
agcttacuaggcagaataaugaaaccaaa

SEQ ID NO: 96954 - DNA, 22 bp, Artificial Sequence
  Synthetic
cccuagggaggaagcaactuac

SEQ ID NO: 96955 - DNA, 22 bp, Artificial Sequence
  Synthetic
ccaaagcaaggutcccattguc

SEQ ID NO: 96956 - DNA, 27 bp, Artificial Sequence
  Synthetic
tcggatctacacacuctatgttctgut

SEQ ID NO: 96957 - DNA, 29 bp, Artificial Sequence
  Synthetic
ctcttttcttaatauagcccacagctgua

SEQ ID NO: 96958 - DNA, 27 bp, Artificial Sequence
  Synthetic
attctgcctgaautctctgcatcatua

SEQ ID NO: 96959 - DNA, 24 bp, Artificial Sequence
  Synthetic
ccaaaggcucaatgaagaatugga

SEQ ID NO: 96960 - DNA, 26 bp, Artificial Sequence
  Synthetic
agcatctcugcacactcattacttut

SEQ ID NO: 96961 - DNA, 28 bp, Artificial Sequence
  Synthetic
acaaatcugccagagaaaatcagaucat

SEQ ID NO: 96962 - DNA, 28 bp, Artificial Sequence
  Synthetic
gatgtctgggauaataacagaagtucgt

SEQ ID NO: 96963 - DNA, 28 bp, Artificial Sequence
  Synthetic
gcctgatggagcuacttatgtattucaa

SEQ ID NO: 96964 - DNA, 29 bp, Artificial Sequence
  Synthetic
gctcatggctttuctcaaattgttcttut

SEQ ID NO: 96965 - DNA, 27 bp, Artificial Sequence
  Synthetic
acaaagagaaguagacagaaucacaag

SEQ ID NO: 96966 - DNA, 28 bp, Artificial Sequence
  Synthetic
ccaaattgtccauaatctttgcctugaa

SEQ ID NO: 96967 - DNA, 25 bp, Artificial Sequence
  Synthetic
ctgggaaaauatagctauggccagt

SEQ ID NO: 96968 - DNA, 28 bp, Artificial Sequence
  Synthetic
tcattatgacugagtagattgcgugaag

SEQ ID NO: 96969 - DNA, 25 bp, Artificial Sequence
  Synthetic
tcttcugaaagggattcaugccaag

SEQ ID NO: 96970 - DNA, 25 bp, Artificial Sequence
  Synthetic
gctgtctcacugtctatactucagg

SEQ ID NO: 96971 - DNA, 28 bp, Artificial Sequence
  Synthetic
cactgaacttagaugacactggaaugaa

SEQ ID NO: 96972 - DNA, 20 bp, Artificial Sequence
  Synthetic
ccttctcagccuggcttcug

SEQ ID NO: 96973 - DNA, 17 bp, Artificial Sequence
  Synthetic
tgggcaaccugcugcat

SEQ ID NO: 96974 - DNA, 20 bp, Artificial Sequence
  Synthetic
tggaaguccacaugcagcag

SEQ ID NO: 96975 - DNA, 23 bp, Artificial Sequence
  Synthetic
atttggtagugaggcaggtaugg

SEQ ID NO: 96976 - DNA, 17 bp, Artificial Sequence
  Synthetic
tggtggguagcgugcag

SEQ ID NO: 96977 - DNA, 22 bp, Artificial Sequence
  Synthetic
ccatttggtagugaggcaggua

SEQ ID NO: 96978 - DNA, 24 bp, Artificial Sequence
  Synthetic
acatagattuccagagccaugcaa

SEQ ID NO: 96979 - DNA, 28 bp, Artificial Sequence
  Synthetic
agtgaatctcugaaacagcuacaagaat

SEQ ID NO: 96980 - DNA, 27 bp, Artificial Sequence
  Synthetic
ctacctttacatcucctgaggtttgug

SEQ ID NO: 96981 - DNA, 25 bp, Artificial Sequence
  Synthetic
cttgaggacgacutgcattagtcut

SEQ ID NO: 96982 - DNA, 32 bp, Artificial Sequence
  Synthetic
tcgatataaagugttagttctaugaggacaga

SEQ ID NO: 96983 - DNA, 24 bp, Artificial Sequence
  Synthetic
ggactatcctcugccttcctguat

SEQ ID NO: 96984 - DNA, 23 bp, Artificial Sequence
  Synthetic
ccuaccaauacaggaaggcagag

SEQ ID NO: 96985 - DNA, 21 bp, Artificial Sequence
  Synthetic
ccacuttgctgguagcaccat

SEQ ID NO: 96986 - DNA, 28 bp, Artificial Sequence
  Synthetic
gcctaatacagccugtgataaaaguaca

SEQ ID NO: 96987 - DNA, 23 bp, Artificial Sequence
  Synthetic
gatgggaaaaaguggtucaacgg

SEQ ID NO: 96988 - DNA, 22 bp, Artificial Sequence
  Synthetic
agacagggauccccatgcttua

SEQ ID NO: 96989 - DNA, 24 bp, Artificial Sequence
  Synthetic
gaagatagccaggaaucccaaguc

SEQ ID NO: 96990 - DNA, 24 bp, Artificial Sequence
  Synthetic
gtgtagccuggattgcatccauaa

SEQ ID NO: 96991 - DNA, 24 bp, Artificial Sequence
  Synthetic
tttgtcccaggutttgaactcuca

SEQ ID NO: 96992 - DNA, 22 bp, Artificial Sequence
  Synthetic
ggaaugccaggatctucacagt

SEQ ID NO: 96993 - DNA, 29 bp, Artificial Sequence
  Synthetic
atggtaagggcaauatgactaagaauaag

SEQ ID NO: 96994 - DNA, 28 bp, Artificial Sequence
  Synthetic
ccagttgtgtuatatctgagccugaaaa

SEQ ID NO: 96995 - DNA, 28 bp, Artificial Sequence
  Synthetic
aatgaattacaugggtctttggtctuct

SEQ ID NO: 96996 - DNA, 27 bp, Artificial Sequence
  Synthetic
atccaaagatcutcctctctcuaccaa

SEQ ID NO: 96997 - DNA, 28 bp, Artificial Sequence
  Synthetic
aatgaagtaaautctcatcgugagcaga

SEQ ID NO: 96998 - DNA, 26 bp, Artificial Sequence
  Synthetic
ggttccagtttugtccagctctatua

SEQ ID NO: 96999 - DNA, 27 bp, Artificial Sequence
  Synthetic
caggtttaugacaccagaagcatttut

SEQ ID NO: 97000 - DNA, 26 bp, Artificial Sequence
  Synthetic
tgccatgcattuaactcattgtgaug

SEQ ID NO: 97001 - DNA, 20 bp, Artificial Sequence
  Synthetic
agagatcugggaccgaggug

SEQ ID NO: 97002 - DNA, 29 bp, Artificial Sequence
  Synthetic
cccagttgattatuatcctttgcttgaug

SEQ ID NO: 97003 - DNA, 20 bp, Artificial Sequence
  Synthetic
cgcaccucagacgtctttug

SEQ ID NO: 97004 - DNA, 28 bp, Artificial Sequence
  Synthetic
agccctatgcutattctcaagtttucaa

SEQ ID NO: 97005 - DNA, 28 bp, Artificial Sequence
  Synthetic
tgtcaaagaaautcaaggaaauggagga

SEQ ID NO: 97006 - DNA, 24 bp, Artificial Sequence
  Synthetic
ggaccaaagccutatcacttggua

SEQ ID NO: 97007 - DNA, 26 bp, Artificial Sequence
  Synthetic
gaatgccauttgaagatcuagcaaca

SEQ ID NO: 97008 - DNA, 27 bp, Artificial Sequence
  Synthetic
agaaatuggaagcctttcaguaagact

SEQ ID NO: 97009 - DNA, 22 bp, Artificial Sequence
  Synthetic
atgtggactucttgctggacuc

SEQ ID NO: 97010 - DNA, 23 bp, Artificial Sequence
  Synthetic
gcagacaacuctgtcccuaagaa

SEQ ID NO: 97011 - DNA, 28 bp, Artificial Sequence
  Synthetic
tccaggagagguttaaaacaatgtgtua

SEQ ID NO: 97012 - DNA, 22 bp, Artificial Sequence
  Synthetic
gataagtgttugctcgctgugg

SEQ ID NO: 97013 - DNA, 28 bp, Artificial Sequence
  Synthetic
atctcctaccccutttctcttttgatug

SEQ ID NO: 97014 - DNA, 24 bp, Artificial Sequence
  Synthetic
cagaacgtcugtaattcccaucct

SEQ ID NO: 97015 - DNA, 20 bp, Artificial Sequence
  Synthetic
caagcgtggugagcctttut

SEQ ID NO: 97016 - DNA, 23 bp, Artificial Sequence
  Synthetic
gcttgcugtctgagaaugaggat

SEQ ID NO: 97017 - DNA, 21 bp, Artificial Sequence
  Synthetic
gcctgagaagcuggaaatgug

SEQ ID NO: 97018 - DNA, 22 bp, Artificial Sequence
  Synthetic
cccuggaaaaaccaucacacct

SEQ ID NO: 97019 - DNA, 21 bp, Artificial Sequence
  Synthetic
gccctggauctgtggaactug

SEQ ID NO: 97020 - DNA, 19 bp, Artificial Sequence
  Synthetic
agacgacgacgaccucuca

SEQ ID NO: 97021 - DNA, 19 bp, Artificial Sequence
  Synthetic
agacgcacacgutcauggt

SEQ ID NO: 97022 - DNA, 29 bp, Artificial Sequence
  Synthetic
ggaactgatucaaacaattcgauaaccaa

SEQ ID NO: 97023 - DNA, 25 bp, Artificial Sequence
  Synthetic
gcctccatcgaaugtcttcctaaug

SEQ ID NO: 97024 - DNA, 27 bp, Artificial Sequence
  Synthetic
ggtctttcatttcuccaactccaagua

SEQ ID NO: 97025 - DNA, 23 bp, Artificial Sequence
  Synthetic
ggaacatggaagauggcgaatug

SEQ ID NO: 97026 - DNA, 30 bp, Artificial Sequence
  Synthetic
atgataaacattccuatggtttccaugaca

SEQ ID NO: 97027 - DNA, 28 bp, Artificial Sequence
  Synthetic
tggtattctatgacugcaatcctggaua

SEQ ID NO: 97028 - DNA, 28 bp, Artificial Sequence
  Synthetic
gttttgtattcauaatgggagccatuca

SEQ ID NO: 97029 - DNA, 27 bp, Artificial Sequence
  Synthetic
ggtcaguggagatgtaaagaauggaat

SEQ ID NO: 97030 - DNA, 26 bp, Artificial Sequence
  Synthetic
acattctgguaaaggtttgtcccaut

SEQ ID NO: 97031 - DNA, 27 bp, Artificial Sequence
  Synthetic
aacatggaaatttuacttacggcacug

SEQ ID NO: 97032 - DNA, 25 bp, Artificial Sequence
  Synthetic
ccaggatugcagtcatagaauacca

SEQ ID NO: 97033 - DNA, 29 bp, Artificial Sequence
  Synthetic
tttgtcatttgttuagtggtcaactgtuc

SEQ ID NO: 97034 - DNA, 24 bp, Artificial Sequence
  Synthetic
ggaattccaggaucagaacagtug

SEQ ID NO: 97035 - DNA, 32 bp, Artificial Sequence
  Synthetic
attggaatctggtugtttgaataaatttacut

SEQ ID NO: 97036 - DNA, 28 bp, Artificial Sequence
  Synthetic
ttcaaatacacuggctgataacaacuct

SEQ ID NO: 97037 - DNA, 22 bp, Artificial Sequence
  Synthetic
gatccgcuacagctgtguaact

SEQ ID NO: 97038 - DNA, 21 bp, Artificial Sequence
  Synthetic
gggtggccaucaaggatguat

SEQ ID NO: 97039 - DNA, 24 bp, Artificial Sequence
  Synthetic
aattgcagaguagctcttguggaa

SEQ ID NO: 97040 - DNA, 21 bp, Artificial Sequence
  Synthetic
cuttggguggaacaccaggat

SEQ ID NO: 97041 - DNA, 27 bp, Artificial Sequence
  Synthetic
cctttcagugactcttcuccaaagaaa

SEQ ID NO: 97042 - DNA, 24 bp, Artificial Sequence
  Synthetic
tgacauagcaatagugcaccacat

SEQ ID NO: 97043 - DNA, 29 bp, Artificial Sequence
  Synthetic
gaagauaaggctttgatugaacagaaact

SEQ ID NO: 97044 - DNA, 24 bp, Artificial Sequence
  Synthetic
acccttggutaccatcauacacct

SEQ ID NO: 97045 - DNA, 28 bp, Artificial Sequence
  Synthetic
gatatcctgacagutacccaaatctuca

SEQ ID NO: 97046 - DNA, 28 bp, Artificial Sequence
  Synthetic
agctgttcacacuttatcttagctucat

SEQ ID NO: 97047 - DNA, 20 bp, Artificial Sequence
  Synthetic
caaggaagugcacaggcaut

SEQ ID NO: 97048 - DNA, 25 bp, Artificial Sequence
  Synthetic
tctgtgttuttcactactucagcca

SEQ ID NO: 97049 - DNA, 27 bp, Artificial Sequence
  Synthetic
actctctctgtacucactctgtcttut

SEQ ID NO: 97050 - DNA, 23 bp, Artificial Sequence
  Synthetic
ctgaaatgcuccatgcacacaut

SEQ ID NO: 97051 - DNA, 27 bp, Artificial Sequence
  Synthetic
tgaggctcuaaaagactggcattatut

SEQ ID NO: 97052 - DNA, 21 bp, Artificial Sequence
  Synthetic
ggatgaugaggcgctctugat

SEQ ID NO: 97053 - DNA, 28 bp, Artificial Sequence
  Synthetic
gaggtaatggaagutcaagaacatcuct

SEQ ID NO: 97054 - DNA, 25 bp, Artificial Sequence
  Synthetic
tgacagtccuggtaggataatgugt

SEQ ID NO: 97055 - DNA, 25 bp, Artificial Sequence
  Synthetic
ggatggaaaaguaatgtggagugga

SEQ ID NO: 97056 - DNA, 27 bp, Artificial Sequence
  Synthetic
acacttaccuccacattttggaaucag

SEQ ID NO: 97057 - DNA, 20 bp, Artificial Sequence
  Synthetic
caatcaaugcacggcggtut

SEQ ID NO: 97058 - DNA, 33 bp, Artificial Sequence
  Synthetic
tgagcacaatcttuccttaaagattatatuaca

SEQ ID NO: 97059 - DNA, 21 bp, Artificial Sequence
  Synthetic
ttgctgcutggagtgaucaca

SEQ ID NO: 97060 - DNA, 25 bp, Artificial Sequence
  Synthetic
tgtaattgtttcugttccctgggut

SEQ ID NO: 97061 - DNA, 23 bp, Artificial Sequence
  Synthetic
gaatgcccugatcctggaauacc

SEQ ID NO: 97062 - DNA, 23 bp, Artificial Sequence
  Synthetic
acuccaagcagcaaaaactucag

SEQ ID NO: 97063 - DNA, 28 bp, Artificial Sequence
  Synthetic
ccagcagaagugaagcctagttattaug

SEQ ID NO: 97064 - DNA, 25 bp, Artificial Sequence
  Synthetic
ccuaattgaaagttguccccaaacc

SEQ ID NO: 97065 - DNA, 26 bp, Artificial Sequence
  Synthetic
agaaggatctcuctctggctaatgut

SEQ ID NO: 97066 - DNA, 31 bp, Artificial Sequence
  Synthetic
tgaacaatatacaaguatgtctgagtucacc

SEQ ID NO: 97067 - DNA, 28 bp, Artificial Sequence
  Synthetic
tccactcaacuatgaaaacaaccaugaa

SEQ ID NO: 97068 - DNA, 28 bp, Artificial Sequence
  Synthetic
gggtgctgattutatcacagatgatuct

SEQ ID NO: 97069 - DNA, 22 bp, Artificial Sequence
  Synthetic
ggcatucaacaccagtgacuga

SEQ ID NO: 97070 - DNA, 27 bp, Artificial Sequence
  Synthetic
tctggctgaaauattgattcccttucc

SEQ ID NO: 97071 - DNA, 28 bp, Artificial Sequence
  Synthetic
gcatctgcaacgaauaatgaaggaatut

SEQ ID NO: 97072 - DNA, 28 bp, Artificial Sequence
  Synthetic
tcatggttgttutcatagttgaguggat

SEQ ID NO: 97073 - DNA, 29 bp, Artificial Sequence
  Synthetic
tgcataacactuccatacatgatatugct

SEQ ID NO: 97074 - DNA, 21 bp, Artificial Sequence
  Synthetic
gtcccacggaaauctgtcuct

SEQ ID NO: 97075 - DNA, 18 bp, Artificial Sequence
  Synthetic
ccggtggucgtgcucaat

SEQ ID NO: 97076 - DNA, 19 bp, Artificial Sequence
  Synthetic
auctgggtgaugggcacag

SEQ ID NO: 97077 - DNA, 19 bp, Artificial Sequence
  Synthetic
tgacccuccctctgcagut

SEQ ID NO: 97078 - DNA, 20 bp, Artificial Sequence
  Synthetic
gggttggutaggcactucag

SEQ ID NO: 97079 - DNA, 26 bp, Artificial Sequence
  Synthetic
cctggctauccttttccataugacaa

SEQ ID NO: 97080 - DNA, 28 bp, Artificial Sequence
  Synthetic
tgtcacttucactttgtatttcugaggt

SEQ ID NO: 97081 - DNA, 20 bp, Artificial Sequence
  Synthetic
ccaccccugcaaaggcaaua

SEQ ID NO: 97082 - DNA, 28 bp, Artificial Sequence
  Synthetic
actgttgtttacuttctgaatctcuggt

SEQ ID NO: 97083 - DNA, 28 bp, Artificial Sequence
  Synthetic
ccctcacaaaucagggtctacaattaut

SEQ ID NO: 97084 - DNA, 20 bp, Artificial Sequence
  Synthetic
tccacaugcaacgcaggtua

SEQ ID NO: 97085 - DNA, 28 bp, Artificial Sequence
  Synthetic
tgaaaagattggcautaaattgtggcut

SEQ ID NO: 97086 - DNA, 27 bp, Artificial Sequence
  Synthetic
catacctctacaagutggcattacucc

SEQ ID NO: 97087 - DNA, 27 bp, Artificial Sequence
  Synthetic
tggagatgautatgtggtuggacaaaa

SEQ ID NO: 97088 - DNA, 20 bp, Artificial Sequence
  Synthetic
cccgaaggugttggcugaaa

SEQ ID NO: 97089 - DNA, 23 bp, Artificial Sequence
  Synthetic
aagagccactuaccggttactug

SEQ ID NO: 97090 - DNA, 22 bp, Artificial Sequence
  Synthetic
tcttcggagcutccttgtucag

SEQ ID NO: 97091 - DNA, 21 bp, Artificial Sequence
  Synthetic
caagcgccaaauctcttgcua

SEQ ID NO: 97092 - DNA, 22 bp, Artificial Sequence
  Synthetic
tggcuggcacatguaagaaaca

SEQ ID NO: 97093 - DNA, 28 bp, Artificial Sequence
  Synthetic
ccatctgctcutctaatccaatacugac

SEQ ID NO: 97094 - DNA, 23 bp, Artificial Sequence
  Synthetic
gcatucaaagcacagcaatugac

SEQ ID NO: 97095 - DNA, 22 bp, Artificial Sequence
  Synthetic
ggtgatugaagctgaaccugga

SEQ ID NO: 97096 - DNA, 24 bp, Artificial Sequence
  Synthetic
tgatagagtguccaggttcagcut

SEQ ID NO: 97097 - DNA, 26 bp, Artificial Sequence
  Synthetic
atttaattttucagccccatgtggug

SEQ ID NO: 97098 - DNA, 21 bp, Artificial Sequence
  Synthetic
ggccatccuggtgagagaauc

SEQ ID NO: 97099 - DNA, 32 bp, Artificial Sequence
  Synthetic
aactatttaataaggauatgcagagacttgut

SEQ ID NO: 97100 - DNA, 27 bp, Artificial Sequence
  Synthetic
gaaaaagatucctgcaagtuagccaaa

SEQ ID NO: 97101 - DNA, 22 bp, Artificial Sequence
  Synthetic
atcttacagcuctgccagtgug

SEQ ID NO: 97102 - DNA, 19 bp, Artificial Sequence
  Synthetic
tggtgttcugccgtgcuac

SEQ ID NO: 97103 - DNA, 22 bp, Artificial Sequence
  Synthetic
tcaagggaggaguccaacucat

SEQ ID NO: 97104 - DNA, 23 bp, Artificial Sequence
  Synthetic
gttctccttuatgtgctgcucca

SEQ ID NO: 97105 - DNA, 25 bp, Artificial Sequence
  Synthetic
gccttatttcuccccagtcagtuat

SEQ ID NO: 97106 - DNA, 25 bp, Artificial Sequence
  Synthetic
tctgcagaattutaaactcgccuct

SEQ ID NO: 97107 - DNA, 21 bp, Artificial Sequence
  Synthetic
aggaaaucaccugccagcaaa

SEQ ID NO: 97108 - DNA, 26 bp, Artificial Sequence
  Synthetic
cactatctctutgaggacttguccaa

SEQ ID NO: 97109 - DNA, 25 bp, Artificial Sequence
  Synthetic
ttgacattucagaaatccaguccgt

SEQ ID NO: 97110 - DNA, 22 bp, Artificial Sequence
  Synthetic
gacagttuccacatcugagcac

SEQ ID NO: 97111 - DNA, 24 bp, Artificial Sequence
  Synthetic
tgagctgtcuctaccttcttucct

SEQ ID NO: 97112 - DNA, 22 bp, Artificial Sequence
  Synthetic
gccccagacuaactgcatcauc

SEQ ID NO: 97113 - DNA, 28 bp, Artificial Sequence
  Synthetic
atcacagatacucacctaacctcucaat

SEQ ID NO: 97114 - DNA, 24 bp, Artificial Sequence
  Synthetic
gacagcaagcagcgauattatucc

SEQ ID NO: 97115 - DNA, 25 bp, Artificial Sequence
  Synthetic
gaaaccatcauaccagggaacagut

SEQ ID NO: 97116 - DNA, 25 bp, Artificial Sequence
  Synthetic
ctgaatttctcuggactctcccaut

SEQ ID NO: 97117 - DNA, 19 bp, Artificial Sequence
  Synthetic
tgacucccggugaggagac

SEQ ID NO: 97118 - DNA, 17 bp, Artificial Sequence
  Synthetic
gaagccuccggtggugt

SEQ ID NO: 97119 - DNA, 20 bp, Artificial Sequence
  Synthetic
cctgugaaaccaggcucaag

SEQ ID NO: 97120 - DNA, 22 bp, Artificial Sequence
  Synthetic
gtgcactgutttgtgtgucgat

SEQ ID NO: 97121 - DNA, 27 bp, Artificial Sequence
  Synthetic
cttttgaaaaucccatgtaugacacca

SEQ ID NO: 97122 - DNA, 22 bp, Artificial Sequence
  Synthetic
ccaatuggacggtgaguaaacc

SEQ ID NO: 97123 - DNA, 27 bp, Artificial Sequence
  Synthetic
agccgttguatgaaactctuaaacaga

SEQ ID NO: 97124 - DNA, 27 bp, Artificial Sequence
  Synthetic
tctctttttgugcacatactccttuga

SEQ ID NO: 97125 - DNA, 24 bp, Artificial Sequence
  Synthetic
ttccactttguctatgcgtccuac

SEQ ID NO: 97126 - DNA, 20 bp, Artificial Sequence
  Synthetic
ccctuccactgacttugcgt

SEQ ID NO: 97127 - DNA, 25 bp, Artificial Sequence
  Synthetic
ctgtagtcugctgtttcuggaagaa

SEQ ID NO: 97128 - DNA, 26 bp, Artificial Sequence
  Synthetic
ccagatctagcaaucatttcctcucc

SEQ ID NO: 97129 - DNA, 23 bp, Artificial Sequence
  Synthetic
tctgcagaggutgagaagaucaa

SEQ ID NO: 97130 - DNA, 27 bp, Artificial Sequence
  Synthetic
gcttttccatguctactgacacatuct

SEQ ID NO: 97131 - DNA, 23 bp, Artificial Sequence
  Synthetic
ttgttttgccccuagttccauga

SEQ ID NO: 97132 - DNA, 26 bp, Artificial Sequence
  Synthetic
caggctcucaaggatctgatctauct

SEQ ID NO: 97133 - DNA, 33 bp, Artificial Sequence
  Synthetic
taaagaggctaagauttattcttaattcugaca

SEQ ID NO: 97134 - DNA, 27 bp, Artificial Sequence
  Synthetic
ttcataggcautcatctaaguaacgca

SEQ ID NO: 97135 - DNA, 24 bp, Artificial Sequence
  Synthetic
gttagtcgttugaggcagaacuga

SEQ ID NO: 97136 - DNA, 28 bp, Artificial Sequence
  Synthetic
aactcctgtacuttgtttacattcugct

SEQ ID NO: 97137 - DNA, 28 bp, Artificial Sequence
  Synthetic
acccaccacaacauttaacagtagatut

SEQ ID NO: 97138 - DNA, 22 bp, Artificial Sequence
  Synthetic
agtacccgauaggcuaaggcaa

SEQ ID NO: 97139 - DNA, 25 bp, Artificial Sequence
  Synthetic
aggtgcatgttuctgtttactgcua

SEQ ID NO: 97140 - DNA, 29 bp, Artificial Sequence
  Synthetic
gccaaauatagauaagggaaacagaaggt

SEQ ID NO: 97141 - DNA, 25 bp, Artificial Sequence
  Synthetic
cagattcctgacuggagtgtcttut

SEQ ID NO: 97142 - DNA, 29 bp, Artificial Sequence
  Synthetic
tttgctttuaagggaattcatagguaaga

SEQ ID NO: 97143 - DNA, 22 bp, Artificial Sequence
  Synthetic
ccaggaugaaagtgggaucaca

SEQ ID NO: 97144 - DNA, 28 bp, Artificial Sequence
  Synthetic
caatgtgatcugctccattatttuccag

SEQ ID NO: 97145 - DNA, 25 bp, Artificial Sequence
  Synthetic
tguaagtggtttcucaggaagcaaa

SEQ ID NO: 97146 - DNA, 27 bp, Artificial Sequence
  Synthetic
tgaggagtaacutctccctatgttugt

SEQ ID NO: 97147 - DNA, 24 bp, Artificial Sequence
  Synthetic
gcaaatccatugacaacaggagut

SEQ ID NO: 97148 - DNA, 23 bp, Artificial Sequence
  Synthetic
gatugacccaaaggacctugaca

SEQ ID NO: 97149 - DNA, 28 bp, Artificial Sequence
  Synthetic
atcacagauagtgaaattuggaccagag

SEQ ID NO: 97150 - DNA, 28 bp, Artificial Sequence
  Synthetic
ctgutttatttcatagtugcaggcagaa

SEQ ID NO: 97151 - DNA, 21 bp, Artificial Sequence
  Synthetic
cuaatggcagtuggaccggaa

SEQ ID NO: 97152 - DNA, 24 bp, Artificial Sequence
  Synthetic
tgcttgagatuacctttgcacuct

SEQ ID NO: 97153 - DNA, 27 bp, Artificial Sequence
  Synthetic
gctcuagacaggaaagcaattucagaa

SEQ ID NO: 97154 - DNA, 28 bp, Artificial Sequence
  Synthetic
aggatgtaaccaguatcacaagcauaac

SEQ ID NO: 97155 - DNA, 28 bp, Artificial Sequence
  Synthetic
gaattggttaacutgaactgtacugcat

SEQ ID NO: 97156 - DNA, 23 bp, Artificial Sequence
  Synthetic
gtaaaaucaccaatugcccccaa

SEQ ID NO: 97157 - DNA, 27 bp, Artificial Sequence
  Synthetic
ccttcctcatuacaatcccatatucca

SEQ ID NO: 97158 - DNA, 22 bp, Artificial Sequence
  Synthetic
ctgctcgucccttauccaagac

SEQ ID NO: 97159 - DNA, 29 bp, Artificial Sequence
  Synthetic
tcatttctttcatutcagaccttcaugga

SEQ ID NO: 97160 - DNA, 25 bp, Artificial Sequence
  Synthetic
gctgttttcuggtcatttccuccat

SEQ ID NO: 97161 - DNA, 30 bp, Artificial Sequence
  Synthetic
acatggttctttuatccttctgctttuagt

SEQ ID NO: 97162 - DNA, 26 bp, Artificial Sequence
  Synthetic
tgtcagucaaaaccacttgcuaaact

SEQ ID NO: 97163 - DNA, 28 bp, Artificial Sequence
  Synthetic
ccttatgacaacaauctgaattgtgugt

SEQ ID NO: 97164 - DNA, 23 bp, Artificial Sequence
  Synthetic
tgcattgcuagtacgacactugt

SEQ ID NO: 97165 - DNA, 23 bp, Artificial Sequence
  Synthetic
agatgauggaagacctggaugga

SEQ ID NO: 97166 - DNA, 21 bp, Artificial Sequence
  Synthetic
cctctggcacugtgatctucc

SEQ ID NO: 97167 - DNA, 24 bp, Artificial Sequence
  Synthetic
actccctctcutggactgcttuat

SEQ ID NO: 97168 - DNA, 23 bp, Artificial Sequence
  Synthetic
atgacaactuggcaaggctcuat

SEQ ID NO: 97169 - DNA, 29 bp, Artificial Sequence
  Synthetic
ggcaccagactuggaatggattataaaut

SEQ ID NO: 97170 - DNA, 28 bp, Artificial Sequence
  Synthetic
tgaagaacauaaccagcatcacaguaat

SEQ ID NO: 97171 - DNA, 24 bp, Artificial Sequence
  Synthetic
gtttuacagcaaaacugcgagagt

SEQ ID NO: 97172 - DNA, 25 bp, Artificial Sequence
  Synthetic
tutatccaucaaagaggcacacaca

SEQ ID NO: 97173 - DNA, 27 bp, Artificial Sequence
  Synthetic
atugaaaggagaagcaaacaugagaga

SEQ ID NO: 97174 - DNA, 22 bp, Artificial Sequence
  Synthetic
ccttttgtgguccttgtgcuct

SEQ ID NO: 97175 - DNA, 28 bp, Artificial Sequence
  Synthetic
acttacattggutaaggatttgcugaca

SEQ ID NO: 97176 - DNA, 28 bp, Artificial Sequence
  Synthetic
tcccagtgautggaaatatccuacagat

SEQ ID NO: 97177 - DNA, 28 bp, Artificial Sequence
  Synthetic
atctcttgtaacautgtacctcuaggga

SEQ ID NO: 97178 - DNA, 24 bp, Artificial Sequence
  Synthetic
gttcaccucactactctugcacat

SEQ ID NO: 97179 - DNA, 23 bp, Artificial Sequence
  Synthetic
cgaaaggtguacatggcttcugg

SEQ ID NO: 97180 - DNA, 25 bp, Artificial Sequence
  Synthetic
gaggaaaagtcutcatcctgaguct

SEQ ID NO: 97181 - DNA, 19 bp, Artificial Sequence
  Synthetic
gggtauggctgcttuccga

SEQ ID NO: 97182 - DNA, 24 bp, Artificial Sequence
  Synthetic
actuggagaagagacugaccacat

SEQ ID NO: 97183 - DNA, 20 bp, Artificial Sequence
  Synthetic
cagcatagguggttgtuggg

SEQ ID NO: 97184 - DNA, 22 bp, Artificial Sequence
  Synthetic
gctcactgugggaaaccugaag

SEQ ID NO: 97185 - DNA, 22 bp, Artificial Sequence
  Synthetic
ggcccgtuccttttcatacuca

SEQ ID NO: 97186 - DNA, 20 bp, Artificial Sequence
  Synthetic
tgatgauggccgggatctuc

SEQ ID NO: 97187 - DNA, 21 bp, Artificial Sequence
  Synthetic
aacgatugagcgcctcttcut

SEQ ID NO: 97188 - DNA, 22 bp, Artificial Sequence
  Synthetic
gcagtgagugaaggaccaacua

SEQ ID NO: 97189 - DNA, 23 bp, Artificial Sequence
  Synthetic
actcattgguggagguagcaaag

SEQ ID NO: 97190 - DNA, 28 bp, Artificial Sequence
  Synthetic
caggtguttaagtatttcucaggaagga

SEQ ID NO: 97191 - DNA, 21 bp, Artificial Sequence
  Synthetic
gtgtccucccagatgaugagg

SEQ ID NO: 97192 - DNA, 29 bp, Artificial Sequence
  Synthetic
tgcatgtcaaaugagttattaccaucaca

SEQ ID NO: 97193 - DNA, 28 bp, Artificial Sequence
  Synthetic
tccattggctcuactgtttcatttagut

SEQ ID NO: 97194 - DNA, 27 bp, Artificial Sequence
  Synthetic
tcacacttacgtutgggttacttctut

SEQ ID NO: 97195 - DNA, 26 bp, Artificial Sequence
  Synthetic
gggtcgtcttuctgtgtcgaatttua

SEQ ID NO: 97196 - DNA, 22 bp, Artificial Sequence
  Synthetic
tcaaugagaguccggagagcat

SEQ ID NO: 97197 - DNA, 24 bp, Artificial Sequence
  Synthetic
ggtgtgtgtgugtgtgaactctua

SEQ ID NO: 97198 - DNA, 26 bp, Artificial Sequence
  Synthetic
catgactcaaccugtatcctgaauca

SEQ ID NO: 97199 - DNA, 28 bp, Artificial Sequence
  Synthetic
ccaccaagctuactctttattttctucc

SEQ ID NO: 97200 - DNA, 21 bp, Artificial Sequence
  Synthetic
cactccgcagcuttgctaauc

SEQ ID NO: 97201 - DNA, 28 bp, Artificial Sequence
  Synthetic
tcatgcacttaaauagaggcaccaauaa

SEQ ID NO: 97202 - DNA, 28 bp, Artificial Sequence
  Synthetic
gaacacaaaatggauttattaccggcua

SEQ ID NO: 97203 - DNA, 25 bp, Artificial Sequence
  Synthetic
caagactacaccaugtgaacacuga

SEQ ID NO: 97204 - DNA, 27 bp, Artificial Sequence
  Synthetic
actggtctguttctaggagtuacaagt

SEQ ID NO: 97205 - DNA, 26 bp, Artificial Sequence
  Synthetic
agaagaacutctgcaguacaaaagca

SEQ ID NO: 97206 - DNA, 21 bp, Artificial Sequence
  Synthetic
cgtggaaucgcatggtgtuag

SEQ ID NO: 97207 - DNA, 24 bp, Artificial Sequence
  Synthetic
ccagcatcauccatgggagaauaa

SEQ ID NO: 97208 - DNA, 22 bp, Artificial Sequence
  Synthetic
ccauccaggagctgttugaagt

SEQ ID NO: 97209 - DNA, 28 bp, Artificial Sequence
  Synthetic
aactcttcagccagautcaatgtatuct

SEQ ID NO: 97210 - DNA, 29 bp, Artificial Sequence
  Synthetic
aatggtttacatutcctgtacacucagaa

SEQ ID NO: 97211 - DNA, 21 bp, Artificial Sequence
  Synthetic
ccagccugttcauggagacat

SEQ ID NO: 97212 - DNA, 28 bp, Artificial Sequence
  Synthetic
tcgatcagattcaucaccaaatcaaugt

SEQ ID NO: 97213 - DNA, 24 bp, Artificial Sequence
  Synthetic
tggaggaagcccugttattttcug

SEQ ID NO: 97214 - DNA, 17 bp, Artificial Sequence
  Synthetic
ggcugggcugccagaag

SEQ ID NO: 97215 - DNA, 18 bp, Artificial Sequence
  Synthetic
tctgtugccactgcgugt

SEQ ID NO: 97216 - DNA, 24 bp, Artificial Sequence
  Synthetic
cctgtagggcauctgtgaattguc

SEQ ID NO: 97217 - DNA, 22 bp, Artificial Sequence
  Synthetic
gctctuccccttgaguaccact

SEQ ID NO: 97218 - DNA, 21 bp, Artificial Sequence
  Synthetic
ccccattucgagtcccatuca

SEQ ID NO: 97219 - DNA, 33 bp, Artificial Sequence
  Synthetic
acacagggatataugaaattgattttggtagut

SEQ ID NO: 97220 - DNA, 26 bp, Artificial Sequence
  Synthetic
aagcaaaaccaacaguctgaatucac

SEQ ID NO: 97221 - DNA, 24 bp, Artificial Sequence
  Synthetic
tctgtgatcauacctgtgaccuct

SEQ ID NO: 97222 - DNA, 24 bp, Artificial Sequence
  Synthetic
aaccctgagauatgctctcctuct

SEQ ID NO: 97223 - DNA, 20 bp, Artificial Sequence
  Synthetic
gcugcgggcacagaaattua

SEQ ID NO: 97224 - DNA, 27 bp, Artificial Sequence
  Synthetic
acaagcacautttatagagtuggagca

SEQ ID NO: 97225 - DNA, 21 bp, Artificial Sequence
  Synthetic
ggtgacaucaggctugagcaa

SEQ ID NO: 97226 - DNA, 21 bp, Artificial Sequence
  Synthetic
gaagcugagcagaagtcuggt

SEQ ID NO: 97227 - DNA, 23 bp, Artificial Sequence
  Synthetic
cgggaacgugctgacctaatuat

SEQ ID NO: 97228 - DNA, 26 bp, Artificial Sequence
  Synthetic
cacctctgtttugctgaaagctttua

SEQ ID NO: 97229 - DNA, 28 bp, Artificial Sequence
  Synthetic
tgaggaaauaucaaccaagaaggaacaa

SEQ ID NO: 97230 - DNA, 28 bp, Artificial Sequence
  Synthetic
gctgtatagttugaagtgcttccgauaa

SEQ ID NO: 97231 - DNA, 28 bp, Artificial Sequence
  Synthetic
acttgggtctugactaaagcttgatuaa

SEQ ID NO: 97232 - DNA, 27 bp, Artificial Sequence
  Synthetic
tcatctttgtucaggtaaaagcuccaa

SEQ ID NO: 97233 - DNA, 22 bp, Artificial Sequence
  Synthetic
cuaccgattagugagcgacacc

SEQ ID NO: 97234 - DNA, 21 bp, Artificial Sequence
  Synthetic
cccacuaccaguccacagaca

SEQ ID NO: 97235 - DNA, 29 bp, Artificial Sequence
  Synthetic
ccatggagatttugagacacaaggataut

SEQ ID NO: 97236 - DNA, 23 bp, Artificial Sequence
  Synthetic
atctccuccaccttctgagugat

SEQ ID NO: 97237 - DNA, 21 bp, Artificial Sequence
  Synthetic
gaagtgagcagugctttgcug

SEQ ID NO: 97238 - DNA, 26 bp, Artificial Sequence
  Synthetic
tgcccagatutaacaaggtcaucaat

SEQ ID NO: 97239 - DNA, 28 bp, Artificial Sequence
  Synthetic
gacccctctagugtaacgtgatatttut

SEQ ID NO: 97240 - DNA, 20 bp, Artificial Sequence
  Synthetic
gccctccauggtaccagtuc

SEQ ID NO: 97241 - DNA, 28 bp, Artificial Sequence
  Synthetic
gaaaagtctgtugaagctcttaagtgut

SEQ ID NO: 97242 - DNA, 20 bp, Artificial Sequence
  Synthetic
cctugggaacgaactgugct

SEQ ID NO: 97243 - DNA, 23 bp, Artificial Sequence
  Synthetic
agctgcttcuactccttcucaca

SEQ ID NO: 97244 - DNA, 25 bp, Artificial Sequence
  Synthetic
cccagagcagugttttaaacucagt

SEQ ID NO: 97245 - DNA, 25 bp, Artificial Sequence
  Synthetic
ggcatacaggutggaaggatgatut

SEQ ID NO: 97246 - DNA, 23 bp, Artificial Sequence
  Synthetic
agtaactgaugcatggcagtuct

SEQ ID NO: 97247 - DNA, 20 bp, Artificial Sequence
  Synthetic
gcttctccgggutcctgtug

SEQ ID NO: 97248 - DNA, 25 bp, Artificial Sequence
  Synthetic
tttttaccugcatctcaucaaccca

SEQ ID NO: 97249 - DNA, 26 bp, Artificial Sequence
  Synthetic
gaguagagccaaattcatugcaaact

SEQ ID NO: 97250 - DNA, 28 bp, Artificial Sequence
  Synthetic
ttaccaaccuggaaatagaatugaacga

SEQ ID NO: 97251 - DNA, 22 bp, Artificial Sequence
  Synthetic
gtgatggcaagucagcaatugg

SEQ ID NO: 97252 - DNA, 20 bp, Artificial Sequence
  Synthetic
gcagtuccgccatggtttut

SEQ ID NO: 97253 - DNA, 24 bp, Artificial Sequence
  Synthetic
tcactaggaaugaccacatcucca

SEQ ID NO: 97254 - DNA, 28 bp, Artificial Sequence
  Synthetic
caggttaccatuaacttcatcctctuct

SEQ ID NO: 97255 - DNA, 26 bp, Artificial Sequence
  Synthetic
ccttttggacuggttgtcaaatgtug

SEQ ID NO: 97256 - DNA, 23 bp, Artificial Sequence
  Synthetic
gggtttucggatctgcaucaact

SEQ ID NO: 97257 - DNA, 21 bp, Artificial Sequence
  Synthetic
gcctgacuccatctgtcacuc

SEQ ID NO: 97258 - DNA, 22 bp, Artificial Sequence
  Synthetic
cctgccctutctgagtcttugt

SEQ ID NO: 97259 - DNA, 25 bp, Artificial Sequence
  Synthetic
gaattcctccugtgaactttcccut

SEQ ID NO: 97260 - DNA, 25 bp, Artificial Sequence
  Synthetic
tcctgaugggaaaccaggtgtauaa

SEQ ID NO: 97261 - DNA, 25 bp, Artificial Sequence
  Synthetic
gtttaaacucaggattugcacagac

SEQ ID NO: 97262 - DNA, 25 bp, Artificial Sequence
  Synthetic
ggaagtgccautgaatagaggtuct

SEQ ID NO: 97263 - DNA, 28 bp, Artificial Sequence
  Synthetic
agtgccagauggcttttcaatattttuc

SEQ ID NO: 97264 - DNA, 25 bp, Artificial Sequence
  Synthetic
gatggaaaacagacuagcagagcut

SEQ ID NO: 97265 - DNA, 20 bp, Artificial Sequence
  Synthetic
gagaaacgccggauctccut

SEQ ID NO: 97266 - DNA, 21 bp, Artificial Sequence
  Synthetic
cugggtgttuggaagcagaac

SEQ ID NO: 97267 - DNA, 25 bp, Artificial Sequence
  Synthetic
gcctatcaccacugattgttuccat

SEQ ID NO: 97268 - DNA, 27 bp, Artificial Sequence
  Synthetic
gaatcgutttcagcaauggaaagagat

SEQ ID NO: 97269 - DNA, 22 bp, Artificial Sequence
  Synthetic
gtatgtucacccacccttggut

SEQ ID NO: 97270 - DNA, 24 bp, Artificial Sequence
  Synthetic
cctgaggucagactagggtguaag

SEQ ID NO: 97271 - DNA, 19 bp, Artificial Sequence
  Synthetic
cagggtugcaaaacugcgt

SEQ ID NO: 97272 - DNA, 28 bp, Artificial Sequence
  Synthetic
tttggatccaucatgaagaaauggagat

SEQ ID NO: 97273 - DNA, 21 bp, Artificial Sequence
  Synthetic
gcttcccagutgggtttcuga

SEQ ID NO: 97274 - DNA, 27 bp, Artificial Sequence
  Synthetic
aagaacatcccaautgatgactggaut

SEQ ID NO: 97275 - DNA, 25 bp, Artificial Sequence
  Synthetic
tgaagaggauaggatcagagagugg

SEQ ID NO: 97276 - DNA, 22 bp, Artificial Sequence
  Synthetic
caaagtugccaagaccucacac

SEQ ID NO: 97277 - DNA, 28 bp, Artificial Sequence
  Synthetic
gggaagacattuccataaaaggagugaa

SEQ ID NO: 97278 - DNA, 24 bp, Artificial Sequence
  Synthetic
aagcacgaaautcaaaaggagugg

SEQ ID NO: 97279 - DNA, 24 bp, Artificial Sequence
  Synthetic
tgcagccaugttgctaauagagat

SEQ ID NO: 97280 - DNA, 22 bp, Artificial Sequence
  Synthetic
gccttguggaggagtugagaaa

SEQ ID NO: 97281 - DNA, 28 bp, Artificial Sequence
  Synthetic
acaaccaggacuccaaataaaagatcug

SEQ ID NO: 97282 - DNA, 26 bp, Artificial Sequence
  Synthetic
aacattgtgcuaggtaaactgtguca

SEQ ID NO: 97283 - DNA, 23 bp, Artificial Sequence
  Synthetic
aaagaugcagagaaggcuggaaa

SEQ ID NO: 97284 - DNA, 23 bp, Artificial Sequence
  Synthetic
ccutttgctuagagaagggaggt

SEQ ID NO: 97285 - DNA, 23 bp, Artificial Sequence
  Synthetic
tttcttaccgcucacaactguca

SEQ ID NO: 97286 - DNA, 21 bp, Artificial Sequence
  Synthetic
cctcagatucccacccaguga

SEQ ID NO: 97287 - DNA, 22 bp, Artificial Sequence
  Synthetic
gcatagatcuggctcguacgga

SEQ ID NO: 97288 - DNA, 23 bp, Artificial Sequence
  Synthetic
gcagaguaaaaacaaccgtccuc

SEQ ID NO: 97289 - DNA, 28 bp, Artificial Sequence
  Synthetic
gaacataaaaugagcacucaggaaacat

SEQ ID NO: 97290 - DNA, 23 bp, Artificial Sequence
  Synthetic
ggtctcatttucccatggccaua

SEQ ID NO: 97291 - DNA, 25 bp, Artificial Sequence
  Synthetic
cgactccaucactaccatuaagcac

SEQ ID NO: 97292 - DNA, 25 bp, Artificial Sequence
  Synthetic
tgtgtttcuagactacagggucact

SEQ ID NO: 97293 - DNA, 28 bp, Artificial Sequence
  Synthetic
tgttttgttgaguaggagaatcactucc

SEQ ID NO: 97294 - DNA, 24 bp, Artificial Sequence
  Synthetic
cctgaactcaguggaagtgatuct

SEQ ID NO: 97295 - DNA, 32 bp, Artificial Sequence
  Synthetic
gaacatagattgacautttcaaatgacagugt

SEQ ID NO: 97296 - DNA, 21 bp, Artificial Sequence
  Synthetic
cgcccggaugattgttaucca

SEQ ID NO: 97297 - DNA, 26 bp, Artificial Sequence
  Synthetic
gccaatgccaacagutaattgaaguc

SEQ ID NO: 97298 - DNA, 20 bp, Artificial Sequence
  Synthetic
gcatcaccccutgcacagut

SEQ ID NO: 97299 - DNA, 26 bp, Artificial Sequence
  Synthetic
cccucagacaaaaagaaagtugacat

SEQ ID NO: 97300 - DNA, 30 bp, Artificial Sequence
  Synthetic
gataacaatgatucaccttagtgtctucca

SEQ ID NO: 97301 - DNA, 24 bp, Artificial Sequence
  Synthetic
gtcaagaacagutggatgcttucc

SEQ ID NO: 97302 - DNA, 33 bp, Artificial Sequence
  Synthetic
acagaatgaaacttuaaaatctgatgaagctua

SEQ ID NO: 97303 - DNA, 24 bp, Artificial Sequence
  Synthetic
acatgtaugccaggacctguaaga

SEQ ID NO: 97304 - DNA, 24 bp, Artificial Sequence
  Synthetic
catcttcttacaggucctggcaua

SEQ ID NO: 97305 - DNA, 31 bp, Artificial Sequence
  Synthetic
aaaataaagccatguacttaagcttgtttut

SEQ ID NO: 97306 - DNA, 26 bp, Artificial Sequence
  Synthetic
ttucctaaatcctcugcaccaaaaga

SEQ ID NO: 97307 - DNA, 27 bp, Artificial Sequence
  Synthetic
aagctguaacttcttgucaagaacagt

SEQ ID NO: 97308 - DNA, 28 bp, Artificial Sequence
  Synthetic
gatttaacaagaacutggaaagcaucca

SEQ ID NO: 97309 - DNA, 28 bp, Artificial Sequence
  Synthetic
tggtttcttaacautgtgtgacaugaga

SEQ ID NO: 97310 - DNA, 28 bp, Artificial Sequence
  Synthetic
tgtgtggaaaucaaaatcagcttttuct

SEQ ID NO: 97311 - DNA, 28 bp, Artificial Sequence
  Synthetic
caatagaagaggcuctccaagtagguat

SEQ ID NO: 97312 - DNA, 26 bp, Artificial Sequence
  Synthetic
agttttgtggcaaugaggacatcuat

SEQ ID NO: 97313 - DNA, 27 bp, Artificial Sequence
  Synthetic
tggtggaagcugtgaatgcaaatatua

SEQ ID NO: 97314 - DNA, 26 bp, Artificial Sequence
  Synthetic
agttactgctcauctctagctcctut

SEQ ID NO: 97315 - DNA, 25 bp, Artificial Sequence
  Synthetic
agttcatggaccuaaggactcgaua

SEQ ID NO: 97316 - DNA, 20 bp, Artificial Sequence
  Synthetic
tgagagugaccagggcagua

SEQ ID NO: 97317 - DNA, 28 bp, Artificial Sequence
  Synthetic
gctgtctgaaggccuagttaatgtaaut

SEQ ID NO: 97318 - DNA, 27 bp, Artificial Sequence
  Synthetic
caaacatcggatucccatttccttaut

SEQ ID NO: 97319 - DNA, 20 bp, Artificial Sequence
  Synthetic
gccgaagcuttgcauagagg

SEQ ID NO: 97320 - DNA, 20 bp, Artificial Sequence
  Synthetic
tgggcaaaccccucaucaac

SEQ ID NO: 97321 - DNA, 25 bp, Artificial Sequence
  Synthetic
tctgtacuaaaagcctcccguagaa

SEQ ID NO: 97322 - DNA, 27 bp, Artificial Sequence
  Synthetic
cagggucttcatguaaaaagcaaaaca

SEQ ID NO: 97323 - DNA, 28 bp, Artificial Sequence
  Synthetic
ccaagtgtugaaagccatttagaaaauc

SEQ ID NO: 97324 - DNA, 26 bp, Artificial Sequence
  Synthetic
gaacatatttcccugtgctctctugt

SEQ ID NO: 97325 - DNA, 25 bp, Artificial Sequence
  Synthetic
ccatctttctuccacttgatcacug

SEQ ID NO: 97326 - DNA, 28 bp, Artificial Sequence
  Synthetic
cctcactgautttagcttcttugagact

SEQ ID NO: 97327 - DNA, 20 bp, Artificial Sequence
  Synthetic
gtacaacuggaccgcacuga

SEQ ID NO: 97328 - DNA, 25 bp, Artificial Sequence
  Synthetic
gctttcaacacutggcaaatcugag

SEQ ID NO: 97329 - DNA, 28 bp, Artificial Sequence
  Synthetic
tgttcaggatcutttgaattgggtugat

SEQ ID NO: 97330 - DNA, 26 bp, Artificial Sequence
  Synthetic
gtccagttguaccttcagacaguaaa

SEQ ID NO: 97331 - DNA, 30 bp, Artificial Sequence
  Synthetic
atgaaatttgtucaggatcttttgaatugg

SEQ ID NO: 97332 - DNA, 33 bp, Artificial Sequence
  Synthetic
ttcatcttgccuaacaaaaactagaattatucc

SEQ ID NO: 97333 - DNA, 27 bp, Artificial Sequence
  Synthetic
tcttcagugaggatatgucaacaggat

SEQ ID NO: 97334 - DNA, 21 bp, Artificial Sequence
  Synthetic
gagcugaccagaccaattgug

SEQ ID NO: 97335 - DNA, 21 bp, Artificial Sequence
  Synthetic
tcagcgggucattgtggaaut

SEQ ID NO: 97336 - DNA, 19 bp, Artificial Sequence
  Synthetic
gaguccgaccgaggagtuc

SEQ ID NO: 97337 - DNA, 27 bp, Artificial Sequence
  Synthetic
tggtgtctggaaugaagtatgtttugt

SEQ ID NO: 97338 - DNA, 25 bp, Artificial Sequence
  Synthetic
cttgaccatucacaatcagttcugg

SEQ ID NO: 97339 - DNA, 27 bp, Artificial Sequence
  Synthetic
ctttaaaggtutgctcatgtuccacat

SEQ ID NO: 97340 - DNA, 18 bp, Artificial Sequence
  Synthetic
actccucggtctcucgct

SEQ ID NO: 97341 - DNA, 18 bp, Artificial Sequence
  Synthetic
ccccaacgguctctugga

SEQ ID NO: 97342 - DNA, 25 bp, Artificial Sequence
  Synthetic
aactttcaaaugggtctctgcugat

SEQ ID NO: 97343 - DNA, 23 bp, Artificial Sequence
  Synthetic
ggaagaauccacctacctgcuac

SEQ ID NO: 97344 - DNA, 28 bp, Artificial Sequence
  Synthetic
agtaagtgttcttucttttatgccccut

SEQ ID NO: 97345 - DNA, 22 bp, Artificial Sequence
  Synthetic
gggccauggtagatucacaaca

SEQ ID NO: 97346 - DNA, 22 bp, Artificial Sequence
  Synthetic
tcggcgttucactggagattut

SEQ ID NO: 97347 - DNA, 29 bp, Artificial Sequence
  Synthetic
tgaaactctaguactttgcttcaatucat

SEQ ID NO: 97348 - DNA, 25 bp, Artificial Sequence
  Synthetic
cctggattatuggcaacatctugga

SEQ ID NO: 97349 - DNA, 28 bp, Artificial Sequence
  Synthetic
actggtuaaagaagagtactugaaagca

SEQ ID NO: 97350 - DNA, 24 bp, Artificial Sequence
  Synthetic
gatgcttgcuaataggttggcuct

SEQ ID NO: 97351 - DNA, 20 bp, Artificial Sequence
  Synthetic
cggacaaaucggcuggaaac

SEQ ID NO: 97352 - DNA, 28 bp, Artificial Sequence
  Synthetic
ccacactcatatucagtaaatgtctcut

SEQ ID NO: 97353 - DNA, 26 bp, Artificial Sequence
  Synthetic
gcctttaaacuctactgctctucagg

SEQ ID NO: 97354 - DNA, 26 bp, Artificial Sequence
  Synthetic
ctgaagagcaguagagttuaaaggca

SEQ ID NO: 97355 - DNA, 28 bp, Artificial Sequence
  Synthetic
tgtccaagtcugttaatgaacgaaauga

SEQ ID NO: 97356 - DNA, 23 bp, Artificial Sequence
  Synthetic
tgaaatcctgugaacttggcgut

SEQ ID NO: 97357 - DNA, 22 bp, Artificial Sequence
  Synthetic
ggtctcaagcucaggtgctuac

SEQ ID NO: 97358 - DNA, 26 bp, Artificial Sequence
  Synthetic
gatgccttctagutgcctactaagut

SEQ ID NO: 97359 - DNA, 25 bp, Artificial Sequence
  Synthetic
gctaugaaccaacagtuggaaacag

SEQ ID NO: 97360 - DNA, 21 bp, Artificial Sequence
  Synthetic
acaggtggcugtgtgaatguc

SEQ ID NO: 97361 - DNA, 20 bp, Artificial Sequence
  Synthetic
ggcatgcucgtcccaguaac

SEQ ID NO: 97362 - DNA, 24 bp, Artificial Sequence
  Synthetic
cgggtcaaggutatctggagttut

SEQ ID NO: 97363 - DNA, 28 bp, Artificial Sequence
  Synthetic
ccttcatgtgtutttgaaaagggauagg

SEQ ID NO: 97364 - DNA, 22 bp, Artificial Sequence
  Synthetic
cagagatgtgguccctgtctug

SEQ ID NO: 97365 - DNA, 27 bp, Artificial Sequence
  Synthetic
agctgaatttuattggtagcaucacct

SEQ ID NO: 97366 - DNA, 20 bp, Artificial Sequence
  Synthetic
gccucttcaugcagcaagac

SEQ ID NO: 97367 - DNA, 22 bp, Artificial Sequence
  Synthetic
gctgctgaaguggagattucct

SEQ ID NO: 97368 - DNA, 26 bp, Artificial Sequence
  Synthetic
cctgctgtatcucctgcttcatttut

SEQ ID NO: 97369 - DNA, 24 bp, Artificial Sequence
  Synthetic
tgaccaagccautgtuaaaagcac

SEQ ID NO: 97370 - DNA, 21 bp, Artificial Sequence
  Synthetic
agauaccgcggaaactcaugg

SEQ ID NO: 97371 - DNA, 23 bp, Artificial Sequence
  Synthetic
agcctttctttucaccacgcaua

SEQ ID NO: 97372 - DNA, 24 bp, Artificial Sequence
  Synthetic
cttctcagcaggcuttgatacugt

SEQ ID NO: 97373 - DNA, 24 bp, Artificial Sequence
  Synthetic
aagacccttcuttacgtgggatug

SEQ ID NO: 97374 - DNA, 20 bp, Artificial Sequence
  Synthetic
agctgccagutgctcttuca

SEQ ID NO: 97375 - DNA, 26 bp, Artificial Sequence
  Synthetic
gcgtttgttuacccttgttacctuag

SEQ ID NO: 97376 - DNA, 22 bp, Artificial Sequence
  Synthetic
gggagacagcaugggaaagaut

SEQ ID NO: 97377 - DNA, 28 bp, Artificial Sequence
  Synthetic
cctgttgaacuaattgtgtctttctucc

SEQ ID NO: 97378 - DNA, 28 bp, Artificial Sequence
  Synthetic
gacgagctgucattcttttatttgtuca

SEQ ID NO: 97379 - DNA, 27 bp, Artificial Sequence
  Synthetic
ccaatatgccautgagattcttccugt

SEQ ID NO: 97380 - DNA, 25 bp, Artificial Sequence
  Synthetic
ttaaaacugcaagggagtctucgat

SEQ ID NO: 97381 - DNA, 21 bp, Artificial Sequence
  Synthetic
gtgggcgaaugtgtcttucag

SEQ ID NO: 97382 - DNA, 20 bp, Artificial Sequence
  Synthetic
ggactggcuggccaaactut

SEQ ID NO: 97383 - DNA, 27 bp, Artificial Sequence
  Synthetic
tggcctatagguaagtcctagcaaaua

SEQ ID NO: 97384 - DNA, 28 bp, Artificial Sequence
  Synthetic
ccaacacatautgtccaatttuccaagt

SEQ ID NO: 97385 - DNA, 23 bp, Artificial Sequence
  Synthetic
agtcctgtcuggcgagaagtaua

SEQ ID NO: 97386 - DNA, 27 bp, Artificial Sequence
  Synthetic
tgttacaatttugctgaagctttugga

SEQ ID NO: 97387 - DNA, 23 bp, Artificial Sequence
  Synthetic
gtaccattgacugtcatggcuga

SEQ ID NO: 97388 - DNA, 28 bp, Artificial Sequence
  Synthetic
caggaauagtgaacaguagacccaaaag

SEQ ID NO: 97389 - DNA, 25 bp, Artificial Sequence
  Synthetic
tgctggtauaggttgttcgauagga

SEQ ID NO: 97390 - DNA, 24 bp, Artificial Sequence
  Synthetic
ggaagtcaguacagtttccaggug

SEQ ID NO: 97391 - DNA, 28 bp, Artificial Sequence
  Synthetic
acctttugaagctgagauaacaagaaga

SEQ ID NO: 97392 - DNA, 24 bp, Artificial Sequence
  Synthetic
aaaagccuggtgtcugaaaagaga

SEQ ID NO: 97393 - DNA, 25 bp, Artificial Sequence
  Synthetic
caggcugaacagaccctaaatguag

SEQ ID NO: 97394 - DNA, 23 bp, Artificial Sequence
  Synthetic
ctcacctcacacuagactggcua

SEQ ID NO: 97395 - DNA, 28 bp, Artificial Sequence
  Synthetic
catgaaagugtgttcagaaucacagaac

SEQ ID NO: 97396 - DNA, 28 bp, Artificial Sequence
  Synthetic
cccaacatatttauagctctcaccucct

SEQ ID NO: 97397 - DNA, 28 bp, Artificial Sequence
  Synthetic
tcgaaacatuagacttcggtuagagaac

SEQ ID NO: 97398 - DNA, 22 bp, Artificial Sequence
  Synthetic
aagaugagactuggccgagaag

SEQ ID NO: 97399 - DNA, 28 bp, Artificial Sequence
  Synthetic
aggccctuaaacatcacatacuaaacaa

SEQ ID NO: 97400 - DNA, 24 bp, Artificial Sequence
  Synthetic
ctgtctaaucagccgatctucaca

SEQ ID NO: 97401 - DNA, 28 bp, Artificial Sequence
  Synthetic
gaagcutctaagagauagaaaacaaggt

SEQ ID NO: 97402 - DNA, 22 bp, Artificial Sequence
  Synthetic
ctggtggugacaaaacatgcut

SEQ ID NO: 97403 - DNA, 19 bp, Artificial Sequence
  Synthetic
gcagcugctggaaguacgg

SEQ ID NO: 97404 - DNA, 23 bp, Artificial Sequence
  Synthetic
cacagaaugaggatctugaggca

SEQ ID NO: 97405 - DNA, 17 bp, Artificial Sequence
  Synthetic
cccccaacugccgcaua

SEQ ID NO: 97406 - DNA, 27 bp, Artificial Sequence
  Synthetic
aaaagggactutaatcctcagaugacc

SEQ ID NO: 97407 - DNA, 25 bp, Artificial Sequence
  Synthetic
gcaagcttcgacutccaggatatut

SEQ ID NO: 97408 - DNA, 18 bp, Artificial Sequence
  Synthetic
gctttgggcugggtgtuc

SEQ ID NO: 97409 - DNA, 27 bp, Artificial Sequence
  Synthetic
agaataaaauggacagtgcaucacact

SEQ ID NO: 97410 - DNA, 28 bp, Artificial Sequence
  Synthetic
tgttagattacatuaagggcagtggtut

SEQ ID NO: 97411 - DNA, 23 bp, Artificial Sequence
  Synthetic
ggttaacaggautccatcugcca

SEQ ID NO: 97412 - DNA, 21 bp, Artificial Sequence
  Synthetic
gagtggaagccuttcccugat

SEQ ID NO: 97413 - DNA, 26 bp, Artificial Sequence
  Synthetic
gtcagtggaauatcatgguacaggag

SEQ ID NO: 97414 - DNA, 31 bp, Artificial Sequence
  Synthetic
aatgtatagcattguttccagttaaacatut

SEQ ID NO: 97415 - DNA, 21 bp, Artificial Sequence
  Synthetic
gaacgacugcagatggaugga

SEQ ID NO: 97416 - DNA, 26 bp, Artificial Sequence
  Synthetic
accattgaauaccttgacaaacugga

SEQ ID NO: 97417 - DNA, 26 bp, Artificial Sequence
  Synthetic
gttgcttataugaaacctcccctcut

SEQ ID NO: 97418 - DNA, 25 bp, Artificial Sequence
  Synthetic
gtagattcuaggtaaagcccugcaa

SEQ ID NO: 97419 - DNA, 20 bp, Artificial Sequence
  Synthetic
gggctuaggcacactgugac

SEQ ID NO: 97420 - DNA, 27 bp, Artificial Sequence
  Synthetic
gtaaaagaacaccaagaaucgauggac

SEQ ID NO: 97421 - DNA, 26 bp, Artificial Sequence
  Synthetic
gtcaaugaatcacaaauacgcaagca

SEQ ID NO: 97422 - DNA, 22 bp, Artificial Sequence
  Synthetic
ccagaagcutagctuccaccaa

SEQ ID NO: 97423 - DNA, 23 bp, Artificial Sequence
  Synthetic
gcatcuggtggacucaagaaagg

SEQ ID NO: 97424 - DNA, 27 bp, Artificial Sequence
  Synthetic
ctggttcuaagcccttctuaaggaaat

SEQ ID NO: 97425 - DNA, 27 bp, Artificial Sequence
  Synthetic
cctgutacagatagcuaagaacaagca

SEQ ID NO: 97426 - DNA, 22 bp, Artificial Sequence
  Synthetic
ccattcutcagcacugggaact

SEQ ID NO: 97427 - DNA, 29 bp, Artificial Sequence
  Synthetic
tgtttggatugagaatggataaagugaca

SEQ ID NO: 97428 - DNA, 31 bp, Artificial Sequence
  Synthetic
gtacagcaattcaucgaaatcatcauaaaca

SEQ ID NO: 97429 - DNA, 20 bp, Artificial Sequence
  Synthetic
ggctauggaagcagcaguct

SEQ ID NO: 97430 - DNA, 23 bp, Artificial Sequence
  Synthetic
aatacccgaagutcagactgcug

SEQ ID NO: 97431 - DNA, 27 bp, Artificial Sequence
  Synthetic
agcaggccttaugtaatgctaagatut

SEQ ID NO: 97432 - DNA, 20 bp, Artificial Sequence
  Synthetic
agctgccacacutgggaauc

SEQ ID NO: 97433 - DNA, 17 bp, Artificial Sequence
  Synthetic
gcaagcuggcagcgtuc

SEQ ID NO: 97434 - DNA, 22 bp, Artificial Sequence
  Synthetic
cagagucagcagcagtaugacc

SEQ ID NO: 97435 - DNA, 20 bp, Artificial Sequence
  Synthetic
tgtctgggccuctaccacut

SEQ ID NO: 97436 - DNA, 18 bp, Artificial Sequence
  Synthetic
tcctcugcgctgcagtut

SEQ ID NO: 97437 - DNA, 18 bp, Artificial Sequence
  Synthetic
caggtgugggaacgugga

SEQ ID NO: 97438 - DNA, 25 bp, Artificial Sequence
  Synthetic
atcagtucaacttcatctuccccaa

SEQ ID NO: 97439 - DNA, 23 bp, Artificial Sequence
  Synthetic
ttgagcuccagggaggauaaaga

SEQ ID NO: 97440 - DNA, 18 bp, Artificial Sequence
  Synthetic
agcagccaacuccccauc

SEQ ID NO: 97441 - DNA, 21 bp, Artificial Sequence
  Synthetic
acacagguagccagcaaaucc

SEQ ID NO: 97442 - DNA, 28 bp, Artificial Sequence
  Synthetic
gagagaaguctaatttactcugcaccat

SEQ ID NO: 97443 - DNA, 25 bp, Artificial Sequence
  Synthetic
gcttaggccutagaagatgacauca

SEQ ID NO: 97444 - DNA, 28 bp, Artificial Sequence
  Synthetic
gcctggtgtaaaugtttattgtgatuga

SEQ ID NO: 97445 - DNA, 30 bp, Artificial Sequence
  Synthetic
gcaaactaaatccauttaacatgtcaugct

SEQ ID NO: 97446 - DNA, 25 bp, Artificial Sequence
  Synthetic
gacacataugaaaaggcaugcacat

SEQ ID NO: 97447 - DNA, 26 bp, Artificial Sequence
  Synthetic
tggcatgaguctcacataaacaugaa

SEQ ID NO: 97448 - DNA, 28 bp, Artificial Sequence
  Synthetic
gatgagataaugccaggatactacacuc

SEQ ID NO: 97449 - DNA, 26 bp, Artificial Sequence
  Synthetic
gcagtgtgttutcagagggaguaaaa

SEQ ID NO: 97450 - DNA, 22 bp, Artificial Sequence
  Synthetic
acaggtucacactggaccuaca

SEQ ID NO: 97451 - DNA, 28 bp, Artificial Sequence
  Synthetic
ggaaatcgcaaaugatccagacaaaaua

SEQ ID NO: 97452 - DNA, 26 bp, Artificial Sequence
  Synthetic
accttatgttgugcaagttgtgttut

SEQ ID NO: 97453 - DNA, 27 bp, Artificial Sequence
  Synthetic
ctagttccaugaagcttggaguaaact

SEQ ID NO: 97454 - DNA, 26 bp, Artificial Sequence
  Synthetic
tttctgactcttcuagccactccaua

SEQ ID NO: 97455 - DNA, 29 bp, Artificial Sequence
  Synthetic
ctgtcttaaaacugtgctagatcucaagt

SEQ ID NO: 97456 - DNA, 29 bp, Artificial Sequence
  Synthetic
autatttaatatacaugcagcaccccagt

SEQ ID NO: 97457 - DNA, 28 bp, Artificial Sequence
  Synthetic
cggactgacacutagtagtactucaaat

SEQ ID NO: 97458 - DNA, 19 bp, Artificial Sequence
  Synthetic
ctgtgggcgcucaggtaut

SEQ ID NO: 97459 - DNA, 21 bp, Artificial Sequence
  Synthetic
agggacgagguagaagaggug

SEQ ID NO: 97460 - DNA, 24 bp, Artificial Sequence
  Synthetic
agccttcatcugtcccttcaguat

SEQ ID NO: 97461 - DNA, 28 bp, Artificial Sequence
  Synthetic
agataaaacgacucatctactaggugct

SEQ ID NO: 97462 - DNA, 27 bp, Artificial Sequence
  Synthetic
agtaaaagcaccuagtagatgagucgt

SEQ ID NO: 97463 - DNA, 27 bp, Artificial Sequence
  Synthetic
gccctttggaaaugtactgatctgaut

SEQ ID NO: 97464 - DNA, 23 bp, Artificial Sequence
  Synthetic
cctctgctguttgggagtagaut

SEQ ID NO: 97465 - DNA, 22 bp, Artificial Sequence
  Synthetic
gtgtttggttugaggcctgtug

SEQ ID NO: 97466 - DNA, 24 bp, Artificial Sequence
  Synthetic
ccttacagauggtagcaucgacaa

SEQ ID NO: 97467 - DNA, 21 bp, Artificial Sequence
  Synthetic
gccttatuggtggcugaggaa

SEQ ID NO: 97468 - DNA, 29 bp, Artificial Sequence
  Synthetic
cagaagacacaacauctctaagtuacaca

SEQ ID NO: 97469 - DNA, 25 bp, Artificial Sequence
  Synthetic
ggtccaaaguagacatttccucaca

SEQ ID NO: 97470 - DNA, 23 bp, Artificial Sequence
  Synthetic
tctcctttccuggacaagcuaca

SEQ ID NO: 97471 - DNA, 17 bp, Artificial Sequence
  Synthetic
gccaggaagcucgccua

SEQ ID NO: 97472 - DNA, 21 bp, Artificial Sequence
  Synthetic
tgcgtaacatuaggcgagcut

SEQ ID NO: 97473 - DNA, 27 bp, Artificial Sequence
  Synthetic
ccttgacttgcccutgttttatttcut

SEQ ID NO: 97474 - DNA, 28 bp, Artificial Sequence
  Synthetic
acaggaagcaaggacaugaatatctuac

SEQ ID NO: 97475 - DNA, 26 bp, Artificial Sequence
  Synthetic
caggttgcugtagagaaacugaagaa

SEQ ID NO: 97476 - DNA, 25 bp, Artificial Sequence
  Synthetic
ctcgatccuctccagtaaauagacc

SEQ ID NO: 97477 - DNA, 27 bp, Artificial Sequence
  Synthetic
gagttatttgtuctgtcagcgtaucct

SEQ ID NO: 97478 - DNA, 27 bp, Artificial Sequence
  Synthetic
aagtaaagaucccctggcatcuaaaag

SEQ ID NO: 97479 - DNA, 27 bp, Artificial Sequence
  Synthetic
cctgctgagtauaattgaaaagcgtut

SEQ ID NO: 97480 - DNA, 28 bp, Artificial Sequence
  Synthetic
acttgttctuaacctttttgaauggcac

SEQ ID NO: 97481 - DNA, 28 bp, Artificial Sequence
  Synthetic
aggaacaacaauaccccatctttugaat

SEQ ID NO: 97482 - DNA, 23 bp, Artificial Sequence
  Synthetic
gcagcagaaacacugatgtcuga

SEQ ID NO: 97483 - DNA, 28 bp, Artificial Sequence
  Synthetic
acttattatgtggucattgtcttgccut

SEQ ID NO: 97484 - DNA, 21 bp, Artificial Sequence
  Synthetic
cctcgucccaagacagttcuc

SEQ ID NO: 97485 - DNA, 28 bp, Artificial Sequence
  Synthetic
cgccatcacautcttgacaatuaaaact

SEQ ID NO: 97486 - DNA, 22 bp, Artificial Sequence
  Synthetic
gtgcaugatatcguggcagaac

SEQ ID NO: 97487 - DNA, 28 bp, Artificial Sequence
  Synthetic
agagatggcgauggatatattgacuact

SEQ ID NO: 97488 - DNA, 24 bp, Artificial Sequence
  Synthetic
ggcugtaactaaaugggcacaagt

SEQ ID NO: 97489 - DNA, 25 bp, Artificial Sequence
  Synthetic
cagcagauacacaaaguaccaggag

SEQ ID NO: 97490 - DNA, 26 bp, Artificial Sequence
  Synthetic
ctatctgttcagcaugtcttggtcut

SEQ ID NO: 97491 - DNA, 21 bp, Artificial Sequence
  Synthetic
ccagtgtuacagctgucacca

SEQ ID NO: 97492 - DNA, 24 bp, Artificial Sequence
  Synthetic
ggtgaagggcugctacaaatucat

SEQ ID NO: 97493 - DNA, 28 bp, Artificial Sequence
  Synthetic
tgcaatugagaatgtctugagaaagaac

SEQ ID NO: 97494 - DNA, 23 bp, Artificial Sequence
  Synthetic
ctgttccucggaaagtctaugga

SEQ ID NO: 97495 - DNA, 22 bp, Artificial Sequence
  Synthetic
tctagtgcuactgtgucccaca

SEQ ID NO: 97496 - DNA, 33 bp, Artificial Sequence
  Synthetic
ttcaatataactactguttgcctctaagattut

SEQ ID NO: 97497 - DNA, 25 bp, Artificial Sequence
  Synthetic
ggaacagccacaaauacugaggaat

SEQ ID NO: 97498 - DNA, 23 bp, Artificial Sequence
  Synthetic
cctcagtatutgtggctgtucct

SEQ ID NO: 97499 - DNA, 28 bp, Artificial Sequence
  Synthetic
gggtttgatttaaugccatctactgtua

SEQ ID NO: 97500 - DNA, 28 bp, Artificial Sequence
  Synthetic
aagatgatagugagatctgtccugaagt

SEQ ID NO: 97501 - DNA, 23 bp, Artificial Sequence
  Synthetic
tccagtgctuatttccctcagug

SEQ ID NO: 97502 - DNA, 25 bp, Artificial Sequence
  Synthetic
gatgaataauccccacugagggaaa

SEQ ID NO: 97503 - DNA, 28 bp, Artificial Sequence
  Synthetic
gattggtggugaagcaatttaaccauat

SEQ ID NO: 97504 - DNA, 28 bp, Artificial Sequence
  Synthetic
acaaaaccacacaauaaaaacugaacct

SEQ ID NO: 97505 - DNA, 25 bp, Artificial Sequence
  Synthetic
gaaaagaggcuggtgaattgugaac

SEQ ID NO: 97506 - DNA, 26 bp, Artificial Sequence
  Synthetic
aagtttagatgcutgggttcctaugg

SEQ ID NO: 97507 - DNA, 25 bp, Artificial Sequence
  Synthetic
tccctaaatgaccutttggcacaut

SEQ ID NO: 97508 - DNA, 26 bp, Artificial Sequence
  Synthetic
aagtcatgaagguatatttcgcugct

SEQ ID NO: 97509 - DNA, 28 bp, Artificial Sequence
  Synthetic
cccatgacctuaacagttactagttuca

SEQ ID NO: 97510 - DNA, 21 bp, Artificial Sequence
  Synthetic
gcgttaacuctcccaguggaa

SEQ ID NO: 97511 - DNA, 25 bp, Artificial Sequence
  Synthetic
cacagttccugatgatgtattugcc

SEQ ID NO: 97512 - DNA, 22 bp, Artificial Sequence
  Synthetic
cccttctuaccgtggttcucct

SEQ ID NO: 97513 - DNA, 20 bp, Artificial Sequence
  Synthetic
cacugagaacucggcaggaa

SEQ ID NO: 97514 - DNA, 22 bp, Artificial Sequence
  Synthetic
acctgaugaagctguacgaagg

SEQ ID NO: 97515 - DNA, 24 bp, Artificial Sequence
  Synthetic
tctttgtaagtacuccggcttcug

SEQ ID NO: 97516 - DNA, 24 bp, Artificial Sequence
  Synthetic
gaggaaugagggcaaatgacaaug

SEQ ID NO: 97517 - DNA, 28 bp, Artificial Sequence
  Synthetic
acagacacaaautgaaaccaaaaaucct

SEQ ID NO: 97518 - DNA, 25 bp, Artificial Sequence
  Synthetic
aatgtagcaugtgttcugcaaaact

SEQ ID NO: 97519 - DNA, 23 bp, Artificial Sequence
  Synthetic
tcaaacggacgaaagugtuggat

SEQ ID NO: 97520 - DNA, 28 bp, Artificial Sequence
  Synthetic
cctutgtagttaacctugaaaccaacag

SEQ ID NO: 97521 - DNA, 28 bp, Artificial Sequence
  Synthetic
ctctcccttcttugtccatctcttttua

SEQ ID NO: 97522 - DNA, 29 bp, Artificial Sequence
  Synthetic
tttgttactaactcutggctctcattcuc

SEQ ID NO: 97523 - DNA, 28 bp, Artificial Sequence
  Synthetic
ggaaaattcaccucatccatucagaaat

SEQ ID NO: 97524 - DNA, 25 bp, Artificial Sequence
  Synthetic
atttgcucaccagtaagttuaccct

SEQ ID NO: 97525 - DNA, 23 bp, Artificial Sequence
  Synthetic
gaaacugccatccuaaccgaagt

SEQ ID NO: 97526 - DNA, 28 bp, Artificial Sequence
  Synthetic
cctaaaatcaaugccaatctcctggaua

SEQ ID NO: 97527 - DNA, 22 bp, Artificial Sequence
  Synthetic
gaucttgctttuccagccaacc

SEQ ID NO: 97528 - DNA, 22 bp, Artificial Sequence
  Synthetic
catgtgaaaacagccuccctug

SEQ ID NO: 97529 - DNA, 28 bp, Artificial Sequence
  Synthetic
tctgtcccttgaugaagcatgaatttua

SEQ ID NO: 97530 - DNA, 28 bp, Artificial Sequence
  Synthetic
tcatgccaccaaaugggaatatactuag

SEQ ID NO: 97531 - DNA, 28 bp, Artificial Sequence
  Synthetic
tggtaacattctcaugcaatattgggua

SEQ ID NO: 97532 - DNA, 22 bp, Artificial Sequence
  Synthetic
ctttgtuggcccttgcauaaga

SEQ ID NO: 97533 - DNA, 23 bp, Artificial Sequence
  Synthetic
tttctgtgttuccttccctgucc

SEQ ID NO: 97534 - DNA, 25 bp, Artificial Sequence
  Synthetic
aagcccagaacautaggaacttugt

SEQ ID NO: 97535 - DNA, 22 bp, Artificial Sequence
  Synthetic
tgatcacaagcaggutgctgut

SEQ ID NO: 97536 - DNA, 24 bp, Artificial Sequence
  Synthetic
agtttaccacuctctcttuccaga

SEQ ID NO: 97537 - DNA, 23 bp, Artificial Sequence
  Synthetic
ggttcctttgcuggaaacctgua

SEQ ID NO: 97538 - DNA, 27 bp, Artificial Sequence
  Synthetic
tccatttctctccutttccatcagtuc

SEQ ID NO: 97539 - DNA, 22 bp, Artificial Sequence
  Synthetic
gggatgaggucgatgtatcuct

SEQ ID NO: 97540 - DNA, 19 bp, Artificial Sequence
  Synthetic
gcaagtuccagggccagua

SEQ ID NO: 97541 - DNA, 21 bp, Artificial Sequence
  Synthetic
agtgtgguccattcctucacc

SEQ ID NO: 97542 - DNA, 20 bp, Artificial Sequence
  Synthetic
gaggctguctgtcggucaag

SEQ ID NO: 97543 - DNA, 24 bp, Artificial Sequence
  Synthetic
catcutccagatcauccgggaaag

SEQ ID NO: 97544 - DNA, 21 bp, Artificial Sequence
  Synthetic
cttctcaguggccctcactuc

SEQ ID NO: 97545 - DNA, 23 bp, Artificial Sequence
  Synthetic
gcagcttugaactgatccaugat

SEQ ID NO: 97546 - DNA, 20 bp, Artificial Sequence
  Synthetic
gccacaugcccuacacagat

SEQ ID NO: 97547 - DNA, 27 bp, Artificial Sequence
  Synthetic
gaggaauaaaagaacatggagtugcag

SEQ ID NO: 97548 - DNA, 21 bp, Artificial Sequence
  Synthetic
ggcagtgucactccucagaag

SEQ ID NO: 97549 - DNA, 23 bp, Artificial Sequence
  Synthetic
tcttgggaaccagcugttaccua

SEQ ID NO: 97550 - DNA, 23 bp, Artificial Sequence
  Synthetic
tggttctcaucgactcgctttuc

SEQ ID NO: 97551 - DNA, 21 bp, Artificial Sequence
  Synthetic
acttgaaagcutagcgccuca

SEQ ID NO: 97552 - DNA, 23 bp, Artificial Sequence
  Synthetic
cacccagcuctcatttacauggt

SEQ ID NO: 97553 - DNA, 22 bp, Artificial Sequence
  Synthetic
cagcccgagaacucauagaagg

SEQ ID NO: 97554 - DNA, 20 bp, Artificial Sequence
  Synthetic
aggaggagucatcccgacug

SEQ ID NO: 97555 - DNA, 28 bp, Artificial Sequence
  Synthetic
agtatgtgttgcugttttggttttguaa

SEQ ID NO: 97556 - DNA, 22 bp, Artificial Sequence
  Synthetic
caccaucccccatgtatcauct

SEQ ID NO: 97557 - DNA, 20 bp, Artificial Sequence
  Synthetic
gcaaagtcugtggccaucca

SEQ ID NO: 97558 - DNA, 22 bp, Artificial Sequence
  Synthetic
ggactatctgcuggaggagaug

SEQ ID NO: 97559 - DNA, 21 bp, Artificial Sequence
  Synthetic
ccaccacutacaccacugcaa

SEQ ID NO: 97560 - DNA, 28 bp, Artificial Sequence
  Synthetic
tgcttccgaauatttccattcucagaaa

SEQ ID NO: 97561 - DNA, 22 bp, Artificial Sequence
  Synthetic
gtgctgtgugcagaaagtctuc

SEQ ID NO: 97562 - DNA, 24 bp, Artificial Sequence
  Synthetic
gcatcccaugcatgatacccauag

SEQ ID NO: 97563 - DNA, 25 bp, Artificial Sequence
  Synthetic
ccagaatccccaccucatggataua

SEQ ID NO: 97564 - DNA, 21 bp, Artificial Sequence
  Synthetic
gcccaccugtctgactgauaa

SEQ ID NO: 97565 - DNA, 23 bp, Artificial Sequence
  Synthetic
agcactagucgctgtataggugt

SEQ ID NO: 97566 - DNA, 27 bp, Artificial Sequence
  Synthetic
tgttttgaggaaaaugtttgcctugag

SEQ ID NO: 97567 - DNA, 24 bp, Artificial Sequence
  Synthetic
ctccttcuccggcattgtuaaaag

SEQ ID NO: 97568 - DNA, 28 bp, Artificial Sequence
  Synthetic
ctccagagtcaagutcccattatguaat

SEQ ID NO: 97569 - DNA, 31 bp, Artificial Sequence
  Synthetic
actttgtcagaggaagautaacaattucact

SEQ ID NO: 97570 - DNA, 26 bp, Artificial Sequence
  Synthetic
ttcttgtaauggccttcagtgaucaa

SEQ ID NO: 97571 - DNA, 17 bp, Artificial Sequence
  Synthetic
ctagccgugccgacgua

SEQ ID NO: 97572 - DNA, 20 bp, Artificial Sequence
  Synthetic
agccactcucaccttcucca

SEQ ID NO: 97573 - DNA, 22 bp, Artificial Sequence
  Synthetic
aaggtccuacgctuccaaaagg

SEQ ID NO: 97574 - DNA, 19 bp, Artificial Sequence
  Synthetic
cctggaccaaugggcauct

SEQ ID NO: 97575 - DNA, 18 bp, Artificial Sequence
  Synthetic
agagaacguggcgauggg

SEQ ID NO: 97576 - DNA, 21 bp, Artificial Sequence
  Synthetic
gctcagtuagcagctcaucca

SEQ ID NO: 97577 - DNA, 19 bp, Artificial Sequence
  Synthetic
gccugagacttguccaggt

SEQ ID NO: 97578 - DNA, 17 bp, Artificial Sequence
  Synthetic
gcctcugctgcuccaca

SEQ ID NO: 97579 - DNA, 21 bp, Artificial Sequence
  Synthetic
cgcgagaagaaagugccauga

SEQ ID NO: 97580 - DNA, 28 bp, Artificial Sequence
  Synthetic
tgttttgagaaguacagcagugaaagaa

SEQ ID NO: 97581 - DNA, 24 bp, Artificial Sequence
  Synthetic
gauaaagaagtcaucccccaggag

SEQ ID NO: 97582 - DNA, 24 bp, Artificial Sequence
  Synthetic
aatgagtgcuttcacctctucgat

SEQ ID NO: 97583 - DNA, 20 bp, Artificial Sequence
  Synthetic
ccugggcaaagcaacaucag

SEQ ID NO: 97584 - DNA, 22 bp, Artificial Sequence
  Synthetic
gccagagcacutgctaatcuct

SEQ ID NO: 97585 - DNA, 24 bp, Artificial Sequence
  Synthetic
cagaagcattaugggtctagcuca

SEQ ID NO: 97586 - DNA, 26 bp, Artificial Sequence
  Synthetic
acctaaaaugcaaccctagtaugcaa

SEQ ID NO: 97587 - DNA, 28 bp, Artificial Sequence
  Synthetic
gtgcgactaaugaacttatttggtugaa

SEQ ID NO: 97588 - DNA, 25 bp, Artificial Sequence
  Synthetic
ctctcactccagucataagcaacut

SEQ ID NO: 97589 - DNA, 26 bp, Artificial Sequence
  Synthetic
agaatacauccaggaaucaagaacgg

SEQ ID NO: 97590 - DNA, 22 bp, Artificial Sequence
  Synthetic
ctgctgtctuggtttcccatuc

SEQ ID NO: 97591 - DNA, 24 bp, Artificial Sequence
  Synthetic
agccctggagaugacaaagauagt

SEQ ID NO: 97592 - DNA, 28 bp, Artificial Sequence
  Synthetic
gcacgactuacaaaattatggagtguat

SEQ ID NO: 97593 - DNA, 28 bp, Artificial Sequence
  Synthetic
agtcagtatgcaaaacucttggtaagut

SEQ ID NO: 97594 - DNA, 31 bp, Artificial Sequence
  Synthetic
actaccaagtaagagutgtagatagctctut

SEQ ID NO: 97595 - DNA, 28 bp, Artificial Sequence
  Synthetic
gctttgctacagaacauaattgggatuc

SEQ ID NO: 97596 - DNA, 24 bp, Artificial Sequence
  Synthetic
tctcccccaucataaaaguccaga

SEQ ID NO: 97597 - DNA, 28 bp, Artificial Sequence
  Synthetic
gggattggtggacuatagttatgtguat

SEQ ID NO: 97598 - DNA, 30 bp, Artificial Sequence
  Synthetic
ccttggtatacaauatgaaacccttgttug

SEQ ID NO: 97599 - DNA, 22 bp, Artificial Sequence
  Synthetic
actgttatuggccggcttagug

SEQ ID NO: 97600 - DNA, 28 bp, Artificial Sequence
  Synthetic
ggtgctgaauaaggaagatggtattuga

SEQ ID NO: 97601 - DNA, 28 bp, Artificial Sequence
  Synthetic
cttcaggtgtacauctccagtttguaaa

SEQ ID NO: 97602 - DNA, 27 bp, Artificial Sequence
  Synthetic
gaggatccactucgtacttccaaauaa

SEQ ID NO: 97603 - DNA, 27 bp, Artificial Sequence
  Synthetic
agtacattgatgugattgtgtgtgugt

SEQ ID NO: 97604 - DNA, 20 bp, Artificial Sequence
  Synthetic
ctaagaggccucgcctugaa

SEQ ID NO: 97605 - DNA, 20 bp, Artificial Sequence
  Synthetic
ggtttcuggaaccgcagugt

SEQ ID NO: 97606 - DNA, 28 bp, Artificial Sequence
  Synthetic
gaattagtgggaaauatcaagagugcca

SEQ ID NO: 97607 - DNA, 24 bp, Artificial Sequence
  Synthetic
agatcaagcagcautcacaagcua

SEQ ID NO: 97608 - DNA, 26 bp, Artificial Sequence
  Synthetic
accattgattccugaacaaggtctuc

SEQ ID NO: 97609 - DNA, 29 bp, Artificial Sequence
  Synthetic
actttaacttccagguttcatctttccut

SEQ ID NO: 97610 - DNA, 28 bp, Artificial Sequence
  Synthetic
tcttgtcagctauaactgcttcttctuc

SEQ ID NO: 97611 - DNA, 28 bp, Artificial Sequence
  Synthetic
aacatttaaccauaggtggctattgtut

SEQ ID NO: 97612 - DNA, 23 bp, Artificial Sequence
  Synthetic
gagatgccucttttcaaggguga

SEQ ID NO: 97613 - DNA, 21 bp, Artificial Sequence
  Synthetic
gggctctgcugtaagggaaug

SEQ ID NO: 97614 - DNA, 23 bp, Artificial Sequence
  Synthetic
cacuccaaagaccugaggaaagg

SEQ ID NO: 97615 - DNA, 28 bp, Artificial Sequence
  Synthetic
acacctccaaauggaaataagatuggaa

SEQ ID NO: 97616 - DNA, 25 bp, Artificial Sequence
  Synthetic
gctgttgagccauatgaagttugag

SEQ ID NO: 97617 - DNA, 25 bp, Artificial Sequence
  Synthetic
cagttttgtuacaagtgcagctuga

SEQ ID NO: 97618 - DNA, 28 bp, Artificial Sequence
  Synthetic
gctgtgttgtucagtaattctaccauac

SEQ ID NO: 97619 - DNA, 24 bp, Artificial Sequence
  Synthetic
gtagagactcuctggccatggaua

SEQ ID NO: 97620 - DNA, 23 bp, Artificial Sequence
  Synthetic
tccaggttgutttggcatttguc

SEQ ID NO: 97621 - DNA, 29 bp, Artificial Sequence
  Synthetic
gcagccttacagutacagcttaauacaat

SEQ ID NO: 97622 - DNA, 18 bp, Artificial Sequence
  Synthetic
cuccggagauggcacaga

SEQ ID NO: 97623 - DNA, 28 bp, Artificial Sequence
  Synthetic
gggcataatgttucttcttgaaagcuaa

SEQ ID NO: 97624 - DNA, 26 bp, Artificial Sequence
  Synthetic
agtgtcttttcagugctgttaagugt

SEQ ID NO: 97625 - DNA, 17 bp, Artificial Sequence
  Synthetic
caggcccuggacctcug

SEQ ID NO: 97626 - DNA, 29 bp, Artificial Sequence
  Synthetic
tcttctctccagcuatttttcactgttut

SEQ ID NO: 97627 - DNA, 23 bp, Artificial Sequence
  Synthetic
gggctcaatugcgtttcattuca

SEQ ID NO: 97628 - DNA, 21 bp, Artificial Sequence
  Synthetic
tgaaacgcaautgagcccuga

SEQ ID NO: 97629 - DNA, 27 bp, Artificial Sequence
  Synthetic
tggaagaccaucatgactacttacuga

SEQ ID NO: 97630 - DNA, 20 bp, Artificial Sequence
  Synthetic
cccagaacguccagcaucag

SEQ ID NO: 97631 - DNA, 28 bp, Artificial Sequence
  Synthetic
ctcctattcaucagctgctgtattugat

SEQ ID NO: 97632 - DNA, 27 bp, Artificial Sequence
  Synthetic
cctgaagcutggtttcuaagaaagaac

SEQ ID NO: 97633 - DNA, 24 bp, Artificial Sequence
  Synthetic
gctaaaagactugcacaggaccut

SEQ ID NO: 97634 - DNA, 18 bp, Artificial Sequence
  Synthetic
caccccaguctcccagut

SEQ ID NO: 97635 - DNA, 21 bp, Artificial Sequence
  Synthetic
cagtgtgauctgctggttucc

SEQ ID NO: 97636 - DNA, 29 bp, Artificial Sequence
  Synthetic
acctgcttatuaaatgtatcccaatuggt

SEQ ID NO: 97637 - DNA, 26 bp, Artificial Sequence
  Synthetic
ctttgaccgcucagtctcatatguat

SEQ ID NO: 97638 - DNA, 24 bp, Artificial Sequence
  Synthetic
gggtaaaacugccattctctguga

SEQ ID NO: 97639 - DNA, 29 bp, Artificial Sequence
  Synthetic
actctctgtgtttuactgatctacctgua

SEQ ID NO: 97640 - DNA, 27 bp, Artificial Sequence
  Synthetic
acactttcaagggaacaugatggatut

SEQ ID NO: 97641 - DNA, 28 bp, Artificial Sequence
  Synthetic
cttacctcgtcautgataacctcagaut

SEQ ID NO: 97642 - DNA, 20 bp, Artificial Sequence
  Synthetic
cgtgaacaucacccugcaga

SEQ ID NO: 97643 - DNA, 21 bp, Artificial Sequence
  Synthetic
gggacgugacctgaatgtaug

SEQ ID NO: 97644 - DNA, 27 bp, Artificial Sequence
  Synthetic
agattttcacctuctgcaatggtttut

SEQ ID NO: 97645 - DNA, 25 bp, Artificial Sequence
  Synthetic
ggcuggauacaaagaaagaagagca

SEQ ID NO: 97646 - DNA, 23 bp, Artificial Sequence
  Synthetic
gatgaggtccuctgtttgcctut

SEQ ID NO: 97647 - DNA, 20 bp, Artificial Sequence
  Synthetic
acagaagugaccgcucgaac

SEQ ID NO: 97648 - DNA, 28 bp, Artificial Sequence
  Synthetic
gtttggcagatautggatgagatttgut

SEQ ID NO: 97649 - DNA, 24 bp, Artificial Sequence
  Synthetic
tcuagagaatcatguccagcacct

SEQ ID NO: 97650 - DNA, 18 bp, Artificial Sequence
  Synthetic
tugcacaggccgacugaa

SEQ ID NO: 97651 - DNA, 23 bp, Artificial Sequence
  Synthetic
agtcaatgcuaaaagccctugct

SEQ ID NO: 97652 - DNA, 19 bp, Artificial Sequence
  Synthetic
cauggcaacgacucagggt

SEQ ID NO: 97653 - DNA, 20 bp, Artificial Sequence
  Synthetic
gcagacguguggcagagaaa

SEQ ID NO: 97654 - DNA, 21 bp, Artificial Sequence
  Synthetic
tgagtcugaggcctcuaccac

SEQ ID NO: 97655 - DNA, 21 bp, Artificial Sequence
  Synthetic
tgugcaaaggagcagcuagat

SEQ ID NO: 97656 - DNA, 21 bp, Artificial Sequence
  Synthetic
ggaucccagcgaatcauggat

SEQ ID NO: 97657 - DNA, 21 bp, Artificial Sequence
  Synthetic
ggtggacauggtcacugaaca

SEQ ID NO: 97658 - DNA, 25 bp, Artificial Sequence
  Synthetic
guaacacaagttuaccagacccaca

SEQ ID NO: 97659 - DNA, 28 bp, Artificial Sequence
  Synthetic
gagaattgauaaagaccaggaugggaaa

SEQ ID NO: 97660 - DNA, 27 bp, Artificial Sequence
  Synthetic
cccaggaaatatuttctctccagtcut

SEQ ID NO: 97661 - DNA, 28 bp, Artificial Sequence
  Synthetic
cacaugggtaataauagcagaagaacga

SEQ ID NO: 97662 - DNA, 25 bp, Artificial Sequence
  Synthetic
catcaataaatucctgccgcgtuat

SEQ ID NO: 97663 - DNA, 24 bp, Artificial Sequence
  Synthetic
tccttttagcugagggaattugct

SEQ ID NO: 97664 - DNA, 26 bp, Artificial Sequence
  Synthetic
gtttgtaggaugaggatgtccaucat

SEQ ID NO: 97665 - DNA, 25 bp, Artificial Sequence
  Synthetic
cactauagaaagccctggtttucca

SEQ ID NO: 97666 - DNA, 22 bp, Artificial Sequence
  Synthetic
ccatgtgcaguttgcaccatut

SEQ ID NO: 97667 - DNA, 28 bp, Artificial Sequence
  Synthetic
gtctgtttautgtcttttgtugcaggat

SEQ ID NO: 97668 - DNA, 27 bp, Artificial Sequence
  Synthetic
ggctttctatagugccattaagtccut

SEQ ID NO: 97669 - DNA, 30 bp, Artificial Sequence
  Synthetic
ttgttaactttggucttggaaatgcaauag

SEQ ID NO: 97670 - DNA, 28 bp, Artificial Sequence
  Synthetic
ttttgcgccagauatcaaaatcaaagut

SEQ ID NO: 97671 - DNA, 28 bp, Artificial Sequence
  Synthetic
tgaaatgggaaggauatgtgtacuacct

SEQ ID NO: 97672 - DNA, 19 bp, Artificial Sequence
  Synthetic
gtaucgccagggcccauat

SEQ ID NO: 97673 - DNA, 21 bp, Artificial Sequence
  Synthetic
catctaaaccgcugggaggut

SEQ ID NO: 97674 - DNA, 28 bp, Artificial Sequence
  Synthetic
ctccagacagaauttcttactgugaagt

SEQ ID NO: 97675 - DNA, 25 bp, Artificial Sequence
  Synthetic
cagaaggaaauggaccaacacttug

SEQ ID NO: 97676 - DNA, 20 bp, Artificial Sequence
  Synthetic
ctccttggcugtttccggua

SEQ ID NO: 97677 - DNA, 28 bp, Artificial Sequence
  Synthetic
cccaacttaaaacugcctattactucag

SEQ ID NO: 97678 - DNA, 31 bp, Artificial Sequence
  Synthetic
tcaaatgttggutagtggattgtauaaggaa

SEQ ID NO: 97679 - DNA, 28 bp, Artificial Sequence
  Synthetic
actgtttctctccutttcttgctcaaua

SEQ ID NO: 97680 - DNA, 26 bp, Artificial Sequence
  Synthetic
agtgtcttaatutgagctttggugga

SEQ ID NO: 97681 - DNA, 27 bp, Artificial Sequence
  Synthetic
catcatctgucacattggagauaagca

SEQ ID NO: 97682 - DNA, 28 bp, Artificial Sequence
  Synthetic
aagtautctttattggguggaagcaact

SEQ ID NO: 97683 - DNA, 29 bp, Artificial Sequence
  Synthetic
caatataaactcauctccagccacuaact

SEQ ID NO: 97684 - DNA, 27 bp, Artificial Sequence
  Synthetic
atgctgaccacaugatgatttgattug

SEQ ID NO: 97685 - DNA, 27 bp, Artificial Sequence
  Synthetic
cccacataaaaauggtacctgtgttut

SEQ ID NO: 97686 - DNA, 21 bp, Artificial Sequence
  Synthetic
gggutggugaagacaggaact

SEQ ID NO: 97687 - DNA, 28 bp, Artificial Sequence
  Synthetic
cgctcgttgacuaaataaatctgaucca

SEQ ID NO: 97688 - DNA, 26 bp, Artificial Sequence
  Synthetic
gaggaaaagaccagacuctugaaaga

SEQ ID NO: 97689 - DNA, 21 bp, Artificial Sequence
  Synthetic
cactgtacccutccatggcua

SEQ ID NO: 97690 - DNA, 24 bp, Artificial Sequence
  Synthetic
ggcagagacutgctaaggattugt

SEQ ID NO: 97691 - DNA, 20 bp, Artificial Sequence
  Synthetic
gcagagacucuccacaccga

SEQ ID NO: 97692 - DNA, 22 bp, Artificial Sequence
  Synthetic
gtgagctgaugttgacgcttug

SEQ ID NO: 97693 - DNA, 24 bp, Artificial Sequence
  Synthetic
agaagccgaugggagtaagatgua

SEQ ID NO: 97694 - DNA, 28 bp, Artificial Sequence
  Synthetic
attaggtagcugataaggtcucagaaca

SEQ ID NO: 97695 - DNA, 24 bp, Artificial Sequence
  Synthetic
agaagauaagagaccaagcccuga

SEQ ID NO: 97696 - DNA, 28 bp, Artificial Sequence
  Synthetic
ctgaatattcttcucagctacagcaugt

SEQ ID NO: 97697 - DNA, 26 bp, Artificial Sequence
  Synthetic
tgaatcaaaccacagguaaagcugaa

SEQ ID NO: 97698 - DNA, 22 bp, Artificial Sequence
  Synthetic
aggttttcaaccucacgctuct

SEQ ID NO: 97699 - DNA, 28 bp, Artificial Sequence
  Synthetic
ccaagaaaaugctaagctttgugaaaca

SEQ ID NO: 97700 - DNA, 26 bp, Artificial Sequence
  Synthetic
agaggtcuacagagtaaccaaacugt

SEQ ID NO: 97701 - DNA, 22 bp, Artificial Sequence
  Synthetic
gactggacgutctcugaaggag

SEQ ID NO: 97702 - DNA, 28 bp, Artificial Sequence
  Synthetic
tgatacctaacagguggtctagaatugt

SEQ ID NO: 97703 - DNA, 21 bp, Artificial Sequence
  Synthetic
gggcuccacucgagaaagaga

SEQ ID NO: 97704 - DNA, 23 bp, Artificial Sequence
  Synthetic
atcactagctucttgcatggcut

SEQ ID NO: 97705 - DNA, 23 bp, Artificial Sequence
  Synthetic
ccttaagutggagcuggaaagga

SEQ ID NO: 97706 - DNA, 21 bp, Artificial Sequence
  Synthetic
gtcaucagccagggaggttut

SEQ ID NO: 97707 - DNA, 27 bp, Artificial Sequence
  Synthetic
cctcttaccugtttattagucccaaga

SEQ ID NO: 97708 - DNA, 27 bp, Artificial Sequence
  Synthetic
ctgttgaagctguctttcaagttctut

SEQ ID NO: 97709 - DNA, 27 bp, Artificial Sequence
  Synthetic
atggaguccaaagtcatcacugaaaat

SEQ ID NO: 97710 - DNA, 28 bp, Artificial Sequence
  Synthetic
acaaagtcaagccuaatgcctgaaauat

SEQ ID NO: 97711 - DNA, 22 bp, Artificial Sequence
  Synthetic
ccauagaggagcagaugaccca

SEQ ID NO: 97712 - DNA, 23 bp, Artificial Sequence
  Synthetic
ctcagagtaacacugctggctut

SEQ ID NO: 97713 - DNA, 22 bp, Artificial Sequence
  Synthetic
atccccuctgttgagauggact

SEQ ID NO: 97714 - DNA, 22 bp, Artificial Sequence
  Synthetic
gaataccctutctccgccugat

SEQ ID NO: 97715 - DNA, 24 bp, Artificial Sequence
  Synthetic
tgaacaagacaugagagagcugac

SEQ ID NO: 97716 - DNA, 28 bp, Artificial Sequence
  Synthetic
attcttccugaaacagaaccatcttuct

SEQ ID NO: 97717 - DNA, 21 bp, Artificial Sequence
  Synthetic
gcggaacugaatgctuccaaa

SEQ ID NO: 97718 - DNA, 22 bp, Artificial Sequence
  Synthetic
tcttccaauggctgtggttcut

SEQ ID NO: 97719 - DNA, 22 bp, Artificial Sequence
  Synthetic
cacagccaaagacugtacctuc

SEQ ID NO: 97720 - DNA, 26 bp, Artificial Sequence
  Synthetic
caagctggagggcautaagttcauat

SEQ ID NO: 97721 - DNA, 23 bp, Artificial Sequence
  Synthetic
gctacatcaugcagggcaguaac

SEQ ID NO: 97722 - DNA, 24 bp, Artificial Sequence
  Synthetic
gcggtgtcaaautactgtccctut

SEQ ID NO: 97723 - DNA, 22 bp, Artificial Sequence
  Synthetic
gctccaggaagguattgugcag

SEQ ID NO: 97724 - DNA, 28 bp, Artificial Sequence
  Synthetic
ccttcactgtcauctcaaaatctggtut

SEQ ID NO: 97725 - DNA, 24 bp, Artificial Sequence
  Synthetic
aaacttgaggaugagctgauagcc

SEQ ID NO: 97726 - DNA, 22 bp, Artificial Sequence
  Synthetic
caacgtcugcttctgaucgact

SEQ ID NO: 97727 - DNA, 24 bp, Artificial Sequence
  Synthetic
ccctgtgtaaccutatgaccacut

SEQ ID NO: 97728 - DNA, 17 bp, Artificial Sequence
  Synthetic
cacccaccggaguggut

SEQ ID NO: 97729 - DNA, 17 bp, Artificial Sequence
  Synthetic
tgttccuggcgcgcuat

SEQ ID NO: 97730 - DNA, 18 bp, Artificial Sequence
  Synthetic
caagtugcgcaaggugga

SEQ ID NO: 97731 - DNA, 19 bp, Artificial Sequence
  Synthetic
gttggagugggtgguggat

SEQ ID NO: 97732 - DNA, 26 bp, Artificial Sequence
  Synthetic
tgaagagagccaggautactaccaua

SEQ ID NO: 97733 - DNA, 26 bp, Artificial Sequence
  Synthetic
tctttccaaaaaugctgctguaacac

SEQ ID NO: 97734 - DNA, 24 bp, Artificial Sequence
  Synthetic
cactgagtgaaaugacttgcaugg

SEQ ID NO: 97735 - DNA, 28 bp, Artificial Sequence
  Synthetic
tguccgaaatagaaaugaaacagagcaa

SEQ ID NO: 97736 - DNA, 26 bp, Artificial Sequence
  Synthetic
ctgcatattttugacactcgtccaut

SEQ ID NO: 97737 - DNA, 28 bp, Artificial Sequence
  Synthetic
gctgtactgugaagtgatgtagataugt

SEQ ID NO: 97738 - DNA, 26 bp, Artificial Sequence
  Synthetic
catatattuagggagtggugcaacga

SEQ ID NO: 97739 - DNA, 23 bp, Artificial Sequence
  Synthetic
gucaactccttguaaagcagcag

SEQ ID NO: 97740 - DNA, 22 bp, Artificial Sequence
  Synthetic
cagcttccugtgagtuccacat

SEQ ID NO: 97741 - DNA, 21 bp, Artificial Sequence
  Synthetic
ggatgggaguggcttcauaca

SEQ ID NO: 97742 - DNA, 20 bp, Artificial Sequence
  Synthetic
cgactcggucatgtgtcuca

SEQ ID NO: 97743 - DNA, 20 bp, Artificial Sequence
  Synthetic
tggctgacaugcagggatuc

SEQ ID NO: 97744 - DNA, 20 bp, Artificial Sequence
  Synthetic
cacgggaaagucugagcact

SEQ ID NO: 97745 - DNA, 28 bp, Artificial Sequence
  Synthetic
ccttttcatttgauttgccattgtucca

SEQ ID NO: 97746 - DNA, 24 bp, Artificial Sequence
  Synthetic
acacaaucccacaccaatgatuca

SEQ ID NO: 97747 - DNA, 28 bp, Artificial Sequence
  Synthetic
cgtagcagtgautctgtgtttaguaaca

SEQ ID NO: 97748 - DNA, 21 bp, Artificial Sequence
  Synthetic
gactggtucgagtgctgguag

SEQ ID NO: 97749 - DNA, 26 bp, Artificial Sequence
  Synthetic
caccgttagaaguagagcttttucca

SEQ ID NO: 97750 - DNA, 33 bp, Artificial Sequence
  Synthetic
atcacagatcauacaaatttatatacucaccaa

SEQ ID NO: 97751 - DNA, 20 bp, Artificial Sequence
  Synthetic
gcagtcggutcatcggtuct

SEQ ID NO: 97752 - DNA, 27 bp, Artificial Sequence
  Synthetic
actgtttcacaccuaattgctauggat

SEQ ID NO: 97753 - DNA, 26 bp, Artificial Sequence
  Synthetic
acagctgttccuagaacaagttcuac

SEQ ID NO: 97754 - DNA, 21 bp, Artificial Sequence
  Synthetic
tcaggcacagaacugcatugt

SEQ ID NO: 97755 - DNA, 33 bp, Artificial Sequence
  Synthetic
attcaagttctgauaaaaagtgatgatttcuca

SEQ ID NO: 97756 - DNA, 24 bp, Artificial Sequence
  Synthetic
cgtcttgggtaugccttgcttcua

SEQ ID NO: 97757 - DNA, 29 bp, Artificial Sequence
  Synthetic
tggcacagtugagttaaagaaataucagt

SEQ ID NO: 97758 - DNA, 27 bp, Artificial Sequence
  Synthetic
gaaaaccaaattcuacctcttgctugg

SEQ ID NO: 97759 - DNA, 28 bp, Artificial Sequence
  Synthetic
agggatatgugatcttctuacccaaact

SEQ ID NO: 97760 - DNA, 22 bp, Artificial Sequence
  Synthetic
cctagaaaauctgctccugcct

SEQ ID NO: 97761 - DNA, 21 bp, Artificial Sequence
  Synthetic
caaggatgcucaggacgtuga

SEQ ID NO: 97762 - DNA, 22 bp, Artificial Sequence
  Synthetic
ggtgaccaautaggcggtttuc

SEQ ID NO: 97763 - DNA, 27 bp, Artificial Sequence
  Synthetic
gcgattttgugaccaccatacattuaa

SEQ ID NO: 97764 - DNA, 20 bp, Artificial Sequence
  Synthetic
ctugaagagcgggcacttug

SEQ ID NO: 97765 - DNA, 23 bp, Artificial Sequence
  Synthetic
tctccagugccttcaggatuaga

SEQ ID NO: 97766 - DNA, 20 bp, Artificial Sequence
  Synthetic
ctggagtauccgtccgcauc

SEQ ID NO: 97767 - DNA, 23 bp, Artificial Sequence
  Synthetic
gctggtugagaacccattuccaa

SEQ ID NO: 97768 - DNA, 29 bp, Artificial Sequence
  Synthetic
atcaaaagaggcaaagguattccauaagt

SEQ ID NO: 97769 - DNA, 25 bp, Artificial Sequence
  Synthetic
ccaccaccaautaucagcaacaaaa

SEQ ID NO: 97770 - DNA, 22 bp, Artificial Sequence
  Synthetic
acaaaaugcagtcugagccagt

SEQ ID NO: 97771 - DNA, 28 bp, Artificial Sequence
  Synthetic
caattttgugaaaacgtttactgcugaa

SEQ ID NO: 97772 - DNA, 30 bp, Artificial Sequence
  Synthetic
tgtaagtggaagacauagaatagactuggt

SEQ ID NO: 97773 - DNA, 28 bp, Artificial Sequence
  Synthetic
gaacgactuaaagatgattugggaacaa

SEQ ID NO: 97774 - DNA, 28 bp, Artificial Sequence
  Synthetic
gcttgactgaaaaacucctcacactuat

SEQ ID NO: 97775 - DNA, 22 bp, Artificial Sequence
  Synthetic
atcacaggugatggcctgauac

SEQ ID NO: 97776 - DNA, 25 bp, Artificial Sequence
  Synthetic
agtgatgaaautccctugacacaca

SEQ ID NO: 97777 - DNA, 28 bp, Artificial Sequence
  Synthetic
gaacgcgagtuacctatttttgtaauga

SEQ ID NO: 97778 - DNA, 21 bp, Artificial Sequence
  Synthetic
caagtggugttgcctcucagt

SEQ ID NO: 97779 - DNA, 28 bp, Artificial Sequence
  Synthetic
tgaaugtttaataagguagcaacagcct

SEQ ID NO: 97780 - DNA, 27 bp, Artificial Sequence
  Synthetic
ctgtagtgagtuctttggatgacaauc

SEQ ID NO: 97781 - DNA, 28 bp, Artificial Sequence
  Synthetic
acgattttgctugtgtgtatgttttuct

SEQ ID NO: 97782 - DNA, 28 bp, Artificial Sequence
  Synthetic
aggtttcccaacautttccaagaauact

SEQ ID NO: 97783 - DNA, 22 bp, Artificial Sequence
  Synthetic
gtcauaaaacacgacggtgucc

SEQ ID NO: 97784 - DNA, 27 bp, Artificial Sequence
  Synthetic
acagttactgugcataatcagccttua

SEQ ID NO: 97785 - DNA, 28 bp, Artificial Sequence
  Synthetic
ggcaaaagcuttatataccagucagagg

SEQ ID NO: 97786 - DNA, 25 bp, Artificial Sequence
  Synthetic
ccgtaccacagguataaaccttgua

SEQ ID NO: 97787 - DNA, 25 bp, Artificial Sequence
  Synthetic
gtctttgcatcucctgatcctaucc

SEQ ID NO: 97788 - DNA, 27 bp, Artificial Sequence
  Synthetic
tgaaaggaaaautgcagctgaaugaaa

SEQ ID NO: 97789 - DNA, 29 bp, Artificial Sequence
  Synthetic
ccaaactgtgtacuctgctgtatacuaaa

SEQ ID NO: 97790 - DNA, 27 bp, Artificial Sequence
  Synthetic
gtggagaguattacgaagaaucaacca

SEQ ID NO: 97791 - DNA, 26 bp, Artificial Sequence
  Synthetic
agtgtcatctgugaagacaaacugat

SEQ ID NO: 97792 - DNA, 23 bp, Artificial Sequence
  Synthetic
acugaagagcattuccagcaaga

SEQ ID NO: 97793 - DNA, 24 bp, Artificial Sequence
  Synthetic
tggtgagcuctttgactucaaagg

SEQ ID NO: 97794 - DNA, 24 bp, Artificial Sequence
  Synthetic
ctatcuggaagcaaagcattuggt

SEQ ID NO: 97795 - DNA, 28 bp, Artificial Sequence
  Synthetic
gcgatggatttuctaatcgtgatgttut

SEQ ID NO: 97796 - DNA, 22 bp, Artificial Sequence
  Synthetic
cccaaacuggcattcaaaccut

SEQ ID NO: 97797 - DNA, 23 bp, Artificial Sequence
  Synthetic
ggtatcataugcctgcaacccut

SEQ ID NO: 97798 - DNA, 29 bp, Artificial Sequence
  Synthetic
ccaagaaatctgaugacactagaaaugga

SEQ ID NO: 97799 - DNA, 24 bp, Artificial Sequence
  Synthetic
ctaagugagcagaaacctgtugga

SEQ ID NO: 97800 - DNA, 25 bp, Artificial Sequence
  Synthetic
ttgtactgacautgtgacatgcuct

SEQ ID NO: 97801 - DNA, 28 bp, Artificial Sequence
  Synthetic
ccccagacacucttgaattaaccattua

SEQ ID NO: 97802 - DNA, 25 bp, Artificial Sequence
  Synthetic
caatttcaatggcuttagggtcucc

SEQ ID NO: 97803 - DNA, 23 bp, Artificial Sequence
  Synthetic
gcataaacuggagggtgctcuat

SEQ ID NO: 97804 - DNA, 21 bp, Artificial Sequence
  Synthetic
gttggaacugacccaaggcua

SEQ ID NO: 97805 - DNA, 24 bp, Artificial Sequence
  Synthetic
ggcttcacuggatacgtttaugga

SEQ ID NO: 97806 - DNA, 26 bp, Artificial Sequence
  Synthetic
cagtttgatgccacuaagacttcauc

SEQ ID NO: 97807 - DNA, 24 bp, Artificial Sequence
  Synthetic
gcttccaattuatgcccagaucca

SEQ ID NO: 97808 - DNA, 25 bp, Artificial Sequence
  Synthetic
ctgggcataaautggaagctgttut

SEQ ID NO: 97809 - DNA, 30 bp, Artificial Sequence
  Synthetic
aatgcttaaaugacagtgattatagugaca

SEQ ID NO: 97810 - DNA, 24 bp, Artificial Sequence
  Synthetic
gcaugctatuggaagaggaagaca

SEQ ID NO: 97811 - DNA, 26 bp, Artificial Sequence
  Synthetic
ggagtcagtcguaattggaatcaucc

SEQ ID NO: 97812 - DNA, 23 bp, Artificial Sequence
  Synthetic
gcataccutcacacctuggaagt

SEQ ID NO: 97813 - DNA, 19 bp, Artificial Sequence
  Synthetic
ccacgcccguttcgaaaug

SEQ ID NO: 97814 - DNA, 27 bp, Artificial Sequence
  Synthetic
tcatatgatacugtgttttccccucat

SEQ ID NO: 97815 - DNA, 25 bp, Artificial Sequence
  Synthetic
gauagccagaaacacaacatuccag

SEQ ID NO: 97816 - DNA, 27 bp, Artificial Sequence
  Synthetic
caaagaccatccaaugtagtagccaut

SEQ ID NO: 97817 - DNA, 28 bp, Artificial Sequence
  Synthetic
aatgtgaaataccugagttggatgacut

SEQ ID NO: 97818 - DNA, 28 bp, Artificial Sequence
  Synthetic
gtttgacccacaguaaaatcatuaccaa

SEQ ID NO: 97819 - DNA, 25 bp, Artificial Sequence
  Synthetic
agttgcaaaautgctgtaguaccct

SEQ ID NO: 97820 - DNA, 28 bp, Artificial Sequence
  Synthetic
tgatttgtggcutataacatgacacuga

SEQ ID NO: 97821 - DNA, 24 bp, Artificial Sequence
  Synthetic
catgagaugtggaacucacaggaa

SEQ ID NO: 97822 - DNA, 20 bp, Artificial Sequence
  Synthetic
tggagtgtguggctgtgaug

SEQ ID NO: 97823 - DNA, 18 bp, Artificial Sequence
  Synthetic
cgccugagacacggtcug

SEQ ID NO: 97824 - DNA, 17 bp, Artificial Sequence
  Synthetic
cctggcccugtggugat

SEQ ID NO: 97825 - DNA, 25 bp, Artificial Sequence
  Synthetic
acucgccttagauggaagagaaaga

SEQ ID NO: 97826 - DNA, 29 bp, Artificial Sequence
  Synthetic
cagtagcaaaugaaataggaactcucaga

SEQ ID NO: 97827 - DNA, 22 bp, Artificial Sequence
  Synthetic
tcacctcagaucggtcagtuca

SEQ ID NO: 97828 - DNA, 24 bp, Artificial Sequence
  Synthetic
agaacctcuaacagcttugcacaa

SEQ ID NO: 97829 - DNA, 18 bp, Artificial Sequence
  Synthetic
gcagttucgcaggauggg

SEQ ID NO: 97830 - DNA, 17 bp, Artificial Sequence
  Synthetic
cuccagcacagccgcua

SEQ ID NO: 97831 - DNA, 17 bp, Artificial Sequence
  Synthetic
ggagcaccagccucuga

SEQ ID NO: 97832 - DNA, 18 bp, Artificial Sequence
  Synthetic
gcccatccugcgaaacug

SEQ ID NO: 97833 - DNA, 21 bp, Artificial Sequence
  Synthetic
ggaaaggugaggccactuact

SEQ ID NO: 97834 - DNA, 18 bp, Artificial Sequence
  Synthetic
cctcagaggcuggtgcuc

SEQ ID NO: 97835 - DNA, 20 bp, Artificial Sequence
  Synthetic
ggacagcaaggcucctccua

SEQ ID NO: 97836 - DNA, 26 bp, Artificial Sequence
  Synthetic
ctgtagactgatuccaaagcggtaut

SEQ ID NO: 97837 - DNA, 28 bp, Artificial Sequence
  Synthetic
cggttcaaaacuacttccacaatcaauc

SEQ ID NO: 97838 - DNA, 22 bp, Artificial Sequence
  Synthetic
gctcatuagaaggctggagugt

SEQ ID NO: 97839 - DNA, 29 bp, Artificial Sequence
  Synthetic
gccttccagttuataagatagtccaucaa

SEQ ID NO: 97840 - DNA, 27 bp, Artificial Sequence
  Synthetic
acagttttggugttttatgtcuccaga

SEQ ID NO: 97841 - DNA, 24 bp, Artificial Sequence
  Synthetic
ccgtcagaaagugtaaccactgut

SEQ ID NO: 97842 - DNA, 23 bp, Artificial Sequence
  Synthetic
ccgggcguctctactgatgauat

SEQ ID NO: 97843 - DNA, 26 bp, Artificial Sequence
  Synthetic
ttagtcaggaagccutgaaaauggaa

SEQ ID NO: 97844 - DNA, 28 bp, Artificial Sequence
  Synthetic
ttcatgttctttugcagtttctctttut

SEQ ID NO: 97845 - DNA, 26 bp, Artificial Sequence
  Synthetic
ccccgttacugcttgaagattaugat

SEQ ID NO: 97846 - DNA, 28 bp, Artificial Sequence
  Synthetic
tttttccagcaugacatagaguacaaca

SEQ ID NO: 97847 - DNA, 23 bp, Artificial Sequence
  Synthetic
gtctgctcugctcttccttctuc

SEQ ID NO: 97848 - DNA, 25 bp, Artificial Sequence
  Synthetic
gtttctugcctcttgtuccaaaact

SEQ ID NO: 97849 - DNA, 23 bp, Artificial Sequence
  Synthetic
cggtggcaaggutgatacttcug

SEQ ID NO: 97850 - DNA, 26 bp, Artificial Sequence
  Synthetic
caggtgtcugctttggtatttaaugg

SEQ ID NO: 97851 - DNA, 22 bp, Artificial Sequence
  Synthetic
tctgcagtutctgcttcugcat

SEQ ID NO: 97852 - DNA, 22 bp, Artificial Sequence
  Synthetic
agaagcagcuccgugaagaaag

SEQ ID NO: 97853 - DNA, 23 bp, Artificial Sequence
  Synthetic
cagctccgacagacugattctua

SEQ ID NO: 97854 - DNA, 20 bp, Artificial Sequence
  Synthetic
ctgcacttcuctgtgggtug

SEQ ID NO: 97855 - DNA, 26 bp, Artificial Sequence
  Synthetic
accaaatugaagaggcagaagagtut

SEQ ID NO: 97856 - DNA, 28 bp, Artificial Sequence
  Synthetic
tgcttgtatttuaggaacacctcaucaa

SEQ ID NO: 97857 - DNA, 18 bp, Artificial Sequence
  Synthetic
cgtgaccgucgtgagcug

SEQ ID NO: 97858 - DNA, 20 bp, Artificial Sequence
  Synthetic
caacagcccaagugcaagug

SEQ ID NO: 97859 - DNA, 25 bp, Artificial Sequence
  Synthetic
augctgctttuggaaaacaaacaga

SEQ ID NO: 97860 - DNA, 23 bp, Artificial Sequence
  Synthetic
cagutttguagacagaggccact

SEQ ID NO: 97861 - DNA, 25 bp, Artificial Sequence
  Synthetic
agcccgcagauaaagtgaagattut

SEQ ID NO: 97862 - DNA, 27 bp, Artificial Sequence
  Synthetic
acctttgtgagaaauaacgtcttcuga

SEQ ID NO: 97863 - DNA, 28 bp, Artificial Sequence
  Synthetic
gcaggaagaautagaaaagtttgaugct

SEQ ID NO: 97864 - DNA, 25 bp, Artificial Sequence
  Synthetic
gctatccaagagacugagctgttuc

SEQ ID NO: 97865 - DNA, 26 bp, Artificial Sequence
  Synthetic
gttttgtcucaagcttcuccagagat

SEQ ID NO: 97866 - DNA, 24 bp, Artificial Sequence
  Synthetic
ccgtagatuttcggtcauccaaca

SEQ ID NO: 97867 - DNA, 28 bp, Artificial Sequence
  Synthetic
tcagatcctttcauatgtgcatacauac

SEQ ID NO: 97868 - DNA, 23 bp, Artificial Sequence
  Synthetic
ccagtgcucaaactcggtauagt

SEQ ID NO: 97869 - DNA, 24 bp, Artificial Sequence
  Synthetic
agggtcaguatctctctccugaag

SEQ ID NO: 97870 - DNA, 28 bp, Artificial Sequence
  Synthetic
acatcacctucctattttgcatugaaga

SEQ ID NO: 97871 - DNA, 28 bp, Artificial Sequence
  Synthetic
ctgaaggaattcauagcaccctcaauat

SEQ ID NO: 97872 - DNA, 23 bp, Artificial Sequence
  Synthetic
ccgtgtcaaacuggatggtuact

SEQ ID NO: 97873 - DNA, 26 bp, Artificial Sequence
  Synthetic
catcacatgatauactccgagtcugg

SEQ ID NO: 97874 - DNA, 28 bp, Artificial Sequence
  Synthetic
ggtgctatgaautccttcaggaauaaga

SEQ ID NO: 97875 - DNA, 20 bp, Artificial Sequence
  Synthetic
ttctcccacagcutgcagut

SEQ ID NO: 97876 - DNA, 28 bp, Artificial Sequence
  Synthetic
gtacaaatgcuaaagcaaaatggccuaa

SEQ ID NO: 97877 - DNA, 22 bp, Artificial Sequence
  Synthetic
tgtgactggacuatcaccguca

SEQ ID NO: 97878 - DNA, 29 bp, Artificial Sequence
  Synthetic
cagattauaaagaacgaagggtguaacca

SEQ ID NO: 97879 - DNA, 24 bp, Artificial Sequence
  Synthetic
gggttatcgacuggaaggaacauc

SEQ ID NO: 97880 - DNA, 25 bp, Artificial Sequence
  Synthetic
gccaaggagauaacatagtcugcat

SEQ ID NO: 97881 - DNA, 26 bp, Artificial Sequence
  Synthetic
tgtggaggcaauttaacaggatctuc

SEQ ID NO: 97882 - DNA, 26 bp, Artificial Sequence
  Synthetic
ggaagttuggtgaaagaauaaagcct

SEQ ID NO: 97883 - DNA, 26 bp, Artificial Sequence
  Synthetic
gtctgtacaaagccucataagctcut

SEQ ID NO: 97884 - DNA, 23 bp, Artificial Sequence
  Synthetic
caccaccaagacagaugatcuct

SEQ ID NO: 97885 - DNA, 23 bp, Artificial Sequence
  Synthetic
accttgtgaagaucctggcatuc

SEQ ID NO: 97886 - DNA, 25 bp, Artificial Sequence
  Synthetic
gaacccgatucgactaccatatuga

SEQ ID NO: 97887 - DNA, 29 bp, Artificial Sequence
  Synthetic
aaccactatcatuttctttgtccttucct

SEQ ID NO: 97888 - DNA, 23 bp, Artificial Sequence
  Synthetic
aggcaggaaccautaaaacauca

SEQ ID NO: 97889 - DNA, 24 bp, Artificial Sequence
  Synthetic
gttcacgaucacatttccacucac

SEQ ID NO: 97890 - DNA, 20 bp, Artificial Sequence
  Synthetic
ccatttctccuggcgctgut

SEQ ID NO: 97891 - DNA, 19 bp, Artificial Sequence
  Synthetic
ccaggugaagcgcaacuca

SEQ ID NO: 97892 - DNA, 25 bp, Artificial Sequence
  Synthetic
gattacctttauggagagtggguga

SEQ ID NO: 97893 - DNA, 23 bp, Artificial Sequence
  Synthetic
ggcatccucctccagatacucaa

SEQ ID NO: 97894 - DNA, 21 bp, Artificial Sequence
  Synthetic
gccagccuctctccatcuaca

SEQ ID NO: 97895 - DNA, 21 bp, Artificial Sequence
  Synthetic
ccgccuagacttcatccugat

SEQ ID NO: 97896 - DNA, 31 bp, Artificial Sequence
  Synthetic
atgcatataaattctuacccatgatagcaut

SEQ ID NO: 97897 - DNA, 28 bp, Artificial Sequence
  Synthetic
tgctatagguaggaagtgttgtacagut

SEQ ID NO: 97898 - DNA, 22 bp, Artificial Sequence
  Synthetic
tttcctcaggcccucaagagua

SEQ ID NO: 97899 - DNA, 21 bp, Artificial Sequence
  Synthetic
cccaaaccugctccaugaagt

SEQ ID NO: 97900 - DNA, 23 bp, Artificial Sequence
  Synthetic
cccttggagaaggugtcctttut

SEQ ID NO: 97901 - DNA, 28 bp, Artificial Sequence
  Synthetic
tcttccaacttuaccatacggaattuca

SEQ ID NO: 97902 - DNA, 28 bp, Artificial Sequence
  Synthetic
gaggttccaaaacguaaatccactttua

SEQ ID NO: 97903 - DNA, 21 bp, Artificial Sequence
  Synthetic
caggaatuaggagcucgcgaa

SEQ ID NO: 97904 - DNA, 24 bp, Artificial Sequence
  Synthetic
catcccaatuagaggagctagcug

SEQ ID NO: 97905 - DNA, 28 bp, Artificial Sequence
  Synthetic
caagttcctuatacaatccacuaaccaa

SEQ ID NO: 97906 - DNA, 25 bp, Artificial Sequence
  Synthetic
ctggtttacuctcttgcugaagact

SEQ ID NO: 97907 - DNA, 25 bp, Artificial Sequence
  Synthetic
gaatattcttcutctgctcctugcc

SEQ ID NO: 97908 - DNA, 25 bp, Artificial Sequence
  Synthetic
gcaacaccaggacutctgaaaatuc

SEQ ID NO: 97909 - DNA, 21 bp, Artificial Sequence
  Synthetic
agtccucactgaugagccact

SEQ ID NO: 97910 - DNA, 27 bp, Artificial Sequence
  Synthetic
gaaaggcaguacaaacagtuaaaacct

SEQ ID NO: 97911 - DNA, 20 bp, Artificial Sequence
  Synthetic
cagugcacagccaauggaac

SEQ ID NO: 97912 - DNA, 21 bp, Artificial Sequence
  Synthetic
gcugagcctggucaagacaac

SEQ ID NO: 97913 - DNA, 22 bp, Artificial Sequence
  Synthetic
gucttccctctugccaaagact

SEQ ID NO: 97914 - DNA, 28 bp, Artificial Sequence
  Synthetic
tgtacagutaggtaaagtuccagaccat

SEQ ID NO: 97915 - DNA, 28 bp, Artificial Sequence
  Synthetic
cgaattgauggcacaacattttctagut

SEQ ID NO: 97916 - DNA, 24 bp, Artificial Sequence
  Synthetic
tccagaaaggaugtatcccuccat

SEQ ID NO: 97917 - DNA, 27 bp, Artificial Sequence
  Synthetic
aacactttgttttauagctgtgcagug

SEQ ID NO: 97918 - DNA, 24 bp, Artificial Sequence
  Synthetic
attggaaaugttcctcuccccaaa

SEQ ID NO: 97919 - DNA, 24 bp, Artificial Sequence
  Synthetic
gtttttacaugagccauccagcaa

SEQ ID NO: 97920 - DNA, 24 bp, Artificial Sequence
  Synthetic
gggcaguaatccgaucaaccaaat

SEQ ID NO: 97921 - DNA, 27 bp, Artificial Sequence
  Synthetic
catcacactuacagaacttgctgatuc

SEQ ID NO: 97922 - DNA, 28 bp, Artificial Sequence
  Synthetic
gcttgttattgggautagggaaaacuct

SEQ ID NO: 97923 - DNA, 27 bp, Artificial Sequence
  Synthetic
gtaaacatatctuggaagcccagatug

SEQ ID NO: 97924 - DNA, 25 bp, Artificial Sequence
  Synthetic
gggaatatugcgccaaaatccuact

SEQ ID NO: 97925 - DNA, 21 bp, Artificial Sequence
  Synthetic
agcaatgcacaaugtgtcugg

SEQ ID NO: 97926 - DNA, 24 bp, Artificial Sequence
  Synthetic
ttctgtagaggugagtcagtugga

SEQ ID NO: 97927 - DNA, 19 bp, Artificial Sequence
  Synthetic
gcctgcugcttcagctuca

SEQ ID NO: 97928 - DNA, 18 bp, Artificial Sequence
  Synthetic
gcaggacagaccguggug

SEQ ID NO: 97929 - DNA, 22 bp, Artificial Sequence
  Synthetic
cttggcauagacccagaaguga

SEQ ID NO: 97930 - DNA, 28 bp, Artificial Sequence
  Synthetic
ccttatttgtatucactgctgtgaugac

SEQ ID NO: 97931 - DNA, 26 bp, Artificial Sequence
  Synthetic
tcttttagtgaaaacgugtggctcua

SEQ ID NO: 97932 - DNA, 28 bp, Artificial Sequence
  Synthetic
ctaatccaaaaugcagaaatcagagcut

SEQ ID NO: 97933 - DNA, 20 bp, Artificial Sequence
  Synthetic
cugcacuccacacacgaaga

SEQ ID NO: 97934 - DNA, 22 bp, Artificial Sequence
  Synthetic
cctcucacagggtcaaugacac

SEQ ID NO: 97935 - DNA, 24 bp, Artificial Sequence
  Synthetic
gaautaggcttctugaggcagaga

SEQ ID NO: 97936 - DNA, 20 bp, Artificial Sequence
  Synthetic
ggacuaaccggcucagcaaa

SEQ ID NO: 97937 - DNA, 28 bp, Artificial Sequence
  Synthetic
gcattcttctcauatgctgactgauact

SEQ ID NO: 97938 - DNA, 21 bp, Artificial Sequence
  Synthetic
actttguccagccagguacac

SEQ ID NO: 97939 - DNA, 26 bp, Artificial Sequence
  Synthetic
gaagccatuaaagcaagguacaaaga

SEQ ID NO: 97940 - DNA, 26 bp, Artificial Sequence
  Synthetic
ccacatcagugctcagtttagtaaug

SEQ ID NO: 97941 - DNA, 28 bp, Artificial Sequence
  Synthetic
ccataatatcugaagaaaccctcuccct

SEQ ID NO: 97942 - DNA, 25 bp, Artificial Sequence
  Synthetic
gaataagaataucccacagcugcct

SEQ ID NO: 97943 - DNA, 22 bp, Artificial Sequence
  Synthetic
acaaaatgguggctttggcaut

SEQ ID NO: 97944 - DNA, 28 bp, Artificial Sequence
  Synthetic
tgttccctgctcuatagcctcattaaua

SEQ ID NO: 97945 - DNA, 27 bp, Artificial Sequence
  Synthetic
gcttuccagagaaacctgatugagaaa

SEQ ID NO: 97946 - DNA, 22 bp, Artificial Sequence
  Synthetic
tgttgcagccugagcttcuaaa

SEQ ID NO: 97947 - DNA, 22 bp, Artificial Sequence
  Synthetic
tttcugacgaaagccaccucaa

SEQ ID NO: 97948 - DNA, 28 bp, Artificial Sequence
  Synthetic
gctgcccugaaagttcaagatatauact

SEQ ID NO: 97949 - DNA, 23 bp, Artificial Sequence
  Synthetic
agtcccaaugctttctgttucca

SEQ ID NO: 97950 - DNA, 26 bp, Artificial Sequence
  Synthetic
acttgtctgtcutaaaacttgccugt

SEQ ID NO: 97951 - DNA, 24 bp, Artificial Sequence
  Synthetic
cacautttcccacucaagcagaag

SEQ ID NO: 97952 - DNA, 26 bp, Artificial Sequence
  Synthetic
acauaggaaaggaagaugaggagcat

SEQ ID NO: 97953 - DNA, 29 bp, Artificial Sequence
  Synthetic
gcaggttgaaacuactcagagaaagatuc

SEQ ID NO: 97954 - DNA, 22 bp, Artificial Sequence
  Synthetic
aagccctguacttcgatgucac

SEQ ID NO: 97955 - DNA, 19 bp, Artificial Sequence
  Synthetic
gccguguccaacaggagat

SEQ ID NO: 97956 - DNA, 21 bp, Artificial Sequence
  Synthetic
atgaatcacggcaguggtgua

SEQ ID NO: 97957 - DNA, 21 bp, Artificial Sequence
  Synthetic
ggaggcaagaaggagugucag

SEQ ID NO: 97958 - DNA, 29 bp, Artificial Sequence
  Synthetic
ggttttactatttucaggctgatttucct

SEQ ID NO: 97959 - DNA, 21 bp, Artificial Sequence
  Synthetic
cgctggacaccgugactatuc

SEQ ID NO: 97960 - DNA, 27 bp, Artificial Sequence
  Synthetic
cctaacattuacccaaggaatcuggat

SEQ ID NO: 97961 - DNA, 28 bp, Artificial Sequence
  Synthetic
gaagatcctggaautgatccttcaguag

SEQ ID NO: 97962 - DNA, 26 bp, Artificial Sequence
  Synthetic
gtccucaaggtgatttugaaagacag

SEQ ID NO: 97963 - DNA, 22 bp, Artificial Sequence
  Synthetic
catcaaugaccaggcactucca

SEQ ID NO: 97964 - DNA, 24 bp, Artificial Sequence
  Synthetic
ctgctgcttcutgctgttgtttua

SEQ ID NO: 97965 - DNA, 23 bp, Artificial Sequence
  Synthetic
gggaagccaaacuactggatgug

SEQ ID NO: 97966 - DNA, 23 bp, Artificial Sequence
  Synthetic
cacgtccuacactcagttctucc

SEQ ID NO: 97967 - DNA, 22 bp, Artificial Sequence
  Synthetic
acactcaaugacaagcgcguaa

SEQ ID NO: 97968 - DNA, 24 bp, Artificial Sequence
  Synthetic
ccagaacttutctgctagcuccat

SEQ ID NO: 97969 - DNA, 28 bp, Artificial Sequence
  Synthetic
gccttgtggauattgttttgcttcauag

SEQ ID NO: 97970 - DNA, 21 bp, Artificial Sequence
  Synthetic
gcctgcttuggtcagtacugt

SEQ ID NO: 97971 - DNA, 25 bp, Artificial Sequence
  Synthetic
agtccaaagaacutctgcatctuct

SEQ ID NO: 97972 - DNA, 24 bp, Artificial Sequence
  Synthetic
tgtttgtgcugaaggacacacuaa

SEQ ID NO: 97973 - DNA, 23 bp, Artificial Sequence
  Synthetic
tgatctggttcutgtcccactug

SEQ ID NO: 97974 - DNA, 23 bp, Artificial Sequence
  Synthetic
aactacaacutcttcccucgcaa

SEQ ID NO: 97975 - DNA, 23 bp, Artificial Sequence
  Synthetic
agcctucacaaaagacaccucat

SEQ ID NO: 97976 - DNA, 23 bp, Artificial Sequence
  Synthetic
gagaaggcagauttgtggucact

SEQ ID NO: 97977 - DNA, 27 bp, Artificial Sequence
  Synthetic
gtgtgacatctaauctcccccataaut

SEQ ID NO: 97978 - DNA, 28 bp, Artificial Sequence
  Synthetic
acagtttggttagugatgagttgtaucc

SEQ ID NO: 97979 - DNA, 20 bp, Artificial Sequence
  Synthetic
ccagtucaggcccctguaac

SEQ ID NO: 97980 - DNA, 20 bp, Artificial Sequence
  Synthetic
aggaaggccugaccctgtua

SEQ ID NO: 97981 - DNA, 21 bp, Artificial Sequence
  Synthetic
ggctttcutttgctccuccag

SEQ ID NO: 97982 - DNA, 26 bp, Artificial Sequence
  Synthetic
tgtcatgguagaagtttgcucaacaa

SEQ ID NO: 97983 - DNA, 20 bp, Artificial Sequence
  Synthetic
accttgaggugtcggttcug

SEQ ID NO: 97984 - DNA, 28 bp, Artificial Sequence
  Synthetic
caggaagtauagacggcttttatgtuga

SEQ ID NO: 97985 - DNA, 24 bp, Artificial Sequence
  Synthetic
ctgatatgauctggtgtugaccca

SEQ ID NO: 97986 - DNA, 28 bp, Artificial Sequence
  Synthetic
ctggcaaggaagaagautgaaauacaag

SEQ ID NO: 97987 - DNA, 21 bp, Artificial Sequence
  Synthetic
cccgugguagaaaccacaaca

SEQ ID NO: 97988 - DNA, 21 bp, Artificial Sequence
  Synthetic
attttcccugtgttgcuccct

SEQ ID NO: 97989 - DNA, 27 bp, Artificial Sequence
  Synthetic
ccacatataaugcaacagctagctuac

SEQ ID NO: 97990 - DNA, 22 bp, Artificial Sequence
  Synthetic
gactgagaagacgcugtaccug

SEQ ID NO: 97991 - DNA, 23 bp, Artificial Sequence
  Synthetic
cgacacgagguagtcaaacacut

SEQ ID NO: 97992 - DNA, 22 bp, Artificial Sequence
  Synthetic
aaaccgaaacagcucctctugt

SEQ ID NO: 97993 - DNA, 26 bp, Artificial Sequence
  Synthetic
agatcagaagagagaguccatuaccc

SEQ ID NO: 97994 - DNA, 23 bp, Artificial Sequence
  Synthetic
gcaggagaagugtttgacuacct

SEQ ID NO: 97995 - DNA, 19 bp, Artificial Sequence
  Synthetic
ccaugcccagctcucagac

SEQ ID NO: 97996 - DNA, 19 bp, Artificial Sequence
  Synthetic
cgtggtgaugccagctcua

SEQ ID NO: 97997 - DNA, 17 bp, Artificial Sequence
  Synthetic
agcccucgacucccact

SEQ ID NO: 97998 - DNA, 17 bp, Artificial Sequence
  Synthetic
ccuccagccccatgguc

SEQ ID NO: 97999 - DNA, 18 bp, Artificial Sequence
  Synthetic
gcagggccugaggaaugt

SEQ ID NO: 98000 - DNA, 21 bp, Artificial Sequence
  Synthetic
agcgctucgggtgaattcaua

SEQ ID NO: 98001 - DNA, 23 bp, Artificial Sequence
  Synthetic
ctccttaacaagcutccccucag

SEQ ID NO: 98002 - DNA, 27 bp, Artificial Sequence
  Synthetic
gatcgctgactuaaggtatcactguaa

SEQ ID NO: 98003 - DNA, 28 bp, Artificial Sequence
  Synthetic
gggtctttatuccagatgagatctucac

SEQ ID NO: 98004 - DNA, 23 bp, Artificial Sequence
  Synthetic
ccataaggaacutctgcagcuct

SEQ ID NO: 98005 - DNA, 28 bp, Artificial Sequence
  Synthetic
catgaaggtcuactaactgtaggugagt

SEQ ID NO: 98006 - DNA, 22 bp, Artificial Sequence
  Synthetic
aagcagacagugtaagggcaut

SEQ ID NO: 98007 - DNA, 20 bp, Artificial Sequence
  Synthetic
gaacagaugccguccaagga

SEQ ID NO: 98008 - DNA, 22 bp, Artificial Sequence
  Synthetic
catgaagtgcucaatggcaucc

SEQ ID NO: 98009 - DNA, 24 bp, Artificial Sequence
  Synthetic
acatgtgtatcugacaccctccut

SEQ ID NO: 98010 - DNA, 26 bp, Artificial Sequence
  Synthetic
tcagttttgtcuctaatgggcttuca

SEQ ID NO: 98011 - DNA, 26 bp, Artificial Sequence
  Synthetic
aatgcccaaaguatagttgcacagua

SEQ ID NO: 98012 - DNA, 19 bp, Artificial Sequence
  Synthetic
ccagcccacccutgtctut

SEQ ID NO: 98013 - DNA, 19 bp, Artificial Sequence
  Synthetic
gatuccaaggcagcctgug

SEQ ID NO: 98014 - DNA, 27 bp, Artificial Sequence
  Synthetic
ggacacactcucagaaataaagacgut

SEQ ID NO: 98015 - DNA, 28 bp, Artificial Sequence
  Synthetic
gggaaaaacatgcucaaaaggacaatua

SEQ ID NO: 98016 - DNA, 25 bp, Artificial Sequence
  Synthetic
cattaaggucagcgtcatgtcatug

SEQ ID NO: 98017 - DNA, 20 bp, Artificial Sequence
  Synthetic
cgctggugcagctctcauat

SEQ ID NO: 98018 - DNA, 21 bp, Artificial Sequence
  Synthetic
cctggacucacatgggtucac

SEQ ID NO: 98019 - DNA, 27 bp, Artificial Sequence
  Synthetic
ccccacttatcuttgtatatccctgut

SEQ ID NO: 98020 - DNA, 22 bp, Artificial Sequence
  Synthetic
tctggagcugcagagagtcuaa

SEQ ID NO: 98021 - DNA, 25 bp, Artificial Sequence
  Synthetic
gatgccatcaaauacaatgtccugt

SEQ ID NO: 98022 - DNA, 22 bp, Artificial Sequence
  Synthetic
ctgtcacucctgagatcugcaa

SEQ ID NO: 98023 - DNA, 27 bp, Artificial Sequence
  Synthetic
cgaagagugagggaaaagaataauggt

SEQ ID NO: 98024 - DNA, 29 bp, Artificial Sequence
  Synthetic
gttctgatugaccacacataatguagagt

SEQ ID NO: 98025 - DNA, 28 bp, Artificial Sequence
  Synthetic
gggacagcacutcttaccatgttuaaat

SEQ ID NO: 98026 - DNA, 22 bp, Artificial Sequence
  Synthetic
ccutcactttccugggcaacaa

SEQ ID NO: 98027 - DNA, 21 bp, Artificial Sequence
  Synthetic
tgtccaggguctctguccaat

SEQ ID NO: 98028 - DNA, 28 bp, Artificial Sequence
  Synthetic
gactctctgautctaatagggucaaagg

SEQ ID NO: 98029 - DNA, 20 bp, Artificial Sequence
  Synthetic
ctcaggcagccaugcuaact

SEQ ID NO: 98030 - DNA, 22 bp, Artificial Sequence
  Synthetic
gagtgcagugtttgugcaaact

SEQ ID NO: 98031 - DNA, 27 bp, Artificial Sequence
  Synthetic
agagtgctgttguttaagtcactacug

SEQ ID NO: 98032 - DNA, 21 bp, Artificial Sequence
  Synthetic
gggcttccauctcagatucct

SEQ ID NO: 98033 - DNA, 23 bp, Artificial Sequence
  Synthetic
ggatgaaagggcaaaucaaccut

SEQ ID NO: 98034 - DNA, 23 bp, Artificial Sequence
  Synthetic
agtggaaactugtgtcagagguc

SEQ ID NO: 98035 - DNA, 20 bp, Artificial Sequence
  Synthetic
agaacccgugtgttgctuca

SEQ ID NO: 98036 - DNA, 28 bp, Artificial Sequence
  Synthetic
aatgtgaagcuctgcattattacuccat

SEQ ID NO: 98037 - DNA, 26 bp, Artificial Sequence
  Synthetic
cccattgcaaaaguaggtgtattcug

SEQ ID NO: 98038 - DNA, 23 bp, Artificial Sequence
  Synthetic
gggttctcuaggtctcggtgaut

SEQ ID NO: 98039 - DNA, 25 bp, Artificial Sequence
  Synthetic
agtaaacagagaacacugccctuac

SEQ ID NO: 98040 - DNA, 25 bp, Artificial Sequence
  Synthetic
gtggttugggaaagatacctgauct

SEQ ID NO: 98041 - DNA, 25 bp, Artificial Sequence
  Synthetic
ccataggccugaacaaaatgactug

SEQ ID NO: 98042 - DNA, 28 bp, Artificial Sequence
  Synthetic
ctaatagctcuacccacaaattgtguca

SEQ ID NO: 98043 - DNA, 20 bp, Artificial Sequence
  Synthetic
gctataatcggcugccccut

SEQ ID NO: 98044 - DNA, 23 bp, Artificial Sequence
  Synthetic
gctacaggagcugtgcaguaaac

SEQ ID NO: 98045 - DNA, 22 bp, Artificial Sequence
  Synthetic
ggtgcttgugaaagcgacuact

SEQ ID NO: 98046 - DNA, 21 bp, Artificial Sequence
  Synthetic
gggaggguctggaagatgtua

SEQ ID NO: 98047 - DNA, 23 bp, Artificial Sequence
  Synthetic
ccagcccaagcagauatguaagg

SEQ ID NO: 98048 - DNA, 21 bp, Artificial Sequence
  Synthetic
agttggccutgtctttcuggt

SEQ ID NO: 98049 - DNA, 25 bp, Artificial Sequence
  Synthetic
tgtggaggagcugttttcttttuga

SEQ ID NO: 98050 - DNA, 21 bp, Artificial Sequence
  Synthetic
tgccccaacccaaauggaaua

SEQ ID NO: 98051 - DNA, 23 bp, Artificial Sequence
  Synthetic
gctgucaaacagaggtggaugag

SEQ ID NO: 98052 - DNA, 28 bp, Artificial Sequence
  Synthetic
taccatactgggcutctaaatttgauac

SEQ ID NO: 98053 - DNA, 28 bp, Artificial Sequence
  Synthetic
tcatatcaccaucaaggagaaggtttuc

SEQ ID NO: 98054 - DNA, 26 bp, Artificial Sequence
  Synthetic
tttcctcttaggcugaaaaccttcuc

SEQ ID NO: 98055 - DNA, 25 bp, Artificial Sequence
  Synthetic
acttcaggcccaucatacttcttuc

SEQ ID NO: 98056 - DNA, 20 bp, Artificial Sequence
  Synthetic
tgcucccgagctttuccaag

SEQ ID NO: 98057 - DNA, 28 bp, Artificial Sequence
  Synthetic
tgatacctttaaautctggccaucgaaa

SEQ ID NO: 98058 - DNA, 27 bp, Artificial Sequence
  Synthetic
ctctatacattagucagtggctcctug

SEQ ID NO: 98059 - DNA, 22 bp, Artificial Sequence
  Synthetic
cgtaaaactcgcuctcgcagut

SEQ ID NO: 98060 - DNA, 27 bp, Artificial Sequence
  Synthetic
ggccaaauaaaactaggtaugagagca

SEQ ID NO: 98061 - DNA, 27 bp, Artificial Sequence
  Synthetic
tgagaatgaagguggatgattgcuaag

SEQ ID NO: 98062 - DNA, 27 bp, Artificial Sequence
  Synthetic
actgtgttttcautccagtgtctuaca

SEQ ID NO: 98063 - DNA, 28 bp, Artificial Sequence
  Synthetic
cttcagttgttutcttgagatttcugct

SEQ ID NO: 98064 - DNA, 20 bp, Artificial Sequence
  Synthetic
cagcgucagcatugacaacc

SEQ ID NO: 98065 - DNA, 24 bp, Artificial Sequence
  Synthetic
acatcaaagaaaggcutccaguca

SEQ ID NO: 98066 - DNA, 21 bp, Artificial Sequence
  Synthetic
caacacacccuttgctuccac

SEQ ID NO: 98067 - DNA, 27 bp, Artificial Sequence
  Synthetic
gtctccagcaaagaugtatgtcttcut

SEQ ID NO: 98068 - DNA, 23 bp, Artificial Sequence
  Synthetic
ccgccuttaacuggagcaaaaac

SEQ ID NO: 98069 - DNA, 19 bp, Artificial Sequence
  Synthetic
agcccaccaaccucugaac

SEQ ID NO: 98070 - DNA, 21 bp, Artificial Sequence
  Synthetic
gcagaagcuggtggacuacat

SEQ ID NO: 98071 - DNA, 26 bp, Artificial Sequence
  Synthetic
agaaaggaaggacutactgcacuaac

SEQ ID NO: 98072 - DNA, 20 bp, Artificial Sequence
  Synthetic
tcagcacgccugactucaat

SEQ ID NO: 98073 - DNA, 24 bp, Artificial Sequence
  Synthetic
ctatcatgcccugtctctgtctug

SEQ ID NO: 98074 - DNA, 21 bp, Artificial Sequence
  Synthetic
catctgaggguggtcugcaaa

SEQ ID NO: 98075 - DNA, 25 bp, Artificial Sequence
  Synthetic
tctctttctttuggttcccctgaug

SEQ ID NO: 98076 - DNA, 28 bp, Artificial Sequence
  Synthetic
ccctacagctuaaactatgtaacacgua

SEQ ID NO: 98077 - DNA, 25 bp, Artificial Sequence
  Synthetic
ttatcttcaagcugcagtcttugga

SEQ ID NO: 98078 - DNA, 24 bp, Artificial Sequence
  Synthetic
ctttgccctcutgttccagaagua

SEQ ID NO: 98079 - DNA, 28 bp, Artificial Sequence
  Synthetic
cagttatttgcauctaacactttucgga

SEQ ID NO: 98080 - DNA, 25 bp, Artificial Sequence
  Synthetic
cagtgattcugaggtacaaagccua

SEQ ID NO: 98081 - DNA, 21 bp, Artificial Sequence
  Synthetic
gagccacacuctcaccaucag

SEQ ID NO: 98082 - DNA, 27 bp, Artificial Sequence
  Synthetic
tggacccuaatgacatgaugagagaaa

SEQ ID NO: 98083 - DNA, 23 bp, Artificial Sequence
  Synthetic
ccattaagugacagtcguggcaa

SEQ ID NO: 98084 - DNA, 21 bp, Artificial Sequence
  Synthetic
tgggagauggaagtcugcaag

SEQ ID NO: 98085 - DNA, 28 bp, Artificial Sequence
  Synthetic
tgtatcttcccugaacctgtaaattugg

SEQ ID NO: 98086 - DNA, 17 bp, Artificial Sequence
  Synthetic
ccggagagccccuguga

SEQ ID NO: 98087 - DNA, 18 bp, Artificial Sequence
  Synthetic
ggaggguccacgttguga

SEQ ID NO: 98088 - DNA, 21 bp, Artificial Sequence
  Synthetic
catucgaacagccccuaggag

SEQ ID NO: 98089 - DNA, 21 bp, Artificial Sequence
  Synthetic
ccatgccugtgaacgtgaugt

SEQ ID NO: 98090 - DNA, 23 bp, Artificial Sequence
  Synthetic
gccagguttttcucccaacagat

SEQ ID NO: 98091 - DNA, 21 bp, Artificial Sequence
  Synthetic
agctggtctucaagagcgaug

SEQ ID NO: 98092 - DNA, 19 bp, Artificial Sequence
  Synthetic
ggtccuggaagcactcgut

SEQ ID NO: 98093 - DNA, 21 bp, Artificial Sequence
  Synthetic
ccagctucgggacttctgtuc

SEQ ID NO: 98094 - DNA, 22 bp, Artificial Sequence
  Synthetic
tccatuaacacatgggtuggct

SEQ ID NO: 98095 - DNA, 21 bp, Artificial Sequence
  Synthetic
agagugagcactggguaacct

SEQ ID NO: 98096 - DNA, 22 bp, Artificial Sequence
  Synthetic
gacgtccccagugcagtaauag

SEQ ID NO: 98097 - DNA, 21 bp, Artificial Sequence
  Synthetic
gcatttgcccuctgacatgut

SEQ ID NO: 98098 - DNA, 24 bp, Artificial Sequence
  Synthetic
gacagacacuaagttgtgcugagt

SEQ ID NO: 98099 - DNA, 25 bp, Artificial Sequence
  Synthetic
gcattactuaccatgcttcauccca

SEQ ID NO: 98100 - DNA, 26 bp, Artificial Sequence
  Synthetic
tggaattccuccctaccatgtatuct

SEQ ID NO: 98101 - DNA, 18 bp, Artificial Sequence
  Synthetic
tgggagcutgcggttcug

SEQ ID NO: 98102 - DNA, 19 bp, Artificial Sequence
  Synthetic
gcgggaucggaatgtugga

SEQ ID NO: 98103 - DNA, 21 bp, Artificial Sequence
  Synthetic
ccguaggttttcugcaggcat

SEQ ID NO: 98104 - DNA, 24 bp, Artificial Sequence
  Synthetic
cactccgtaucttcctcgcatuat

SEQ ID NO: 98105 - DNA, 20 bp, Artificial Sequence
  Synthetic
cttgguccgtagactuggct

SEQ ID NO: 98106 - DNA, 21 bp, Artificial Sequence
  Synthetic
ggctccggcaaugagaauagg

SEQ ID NO: 98107 - DNA, 17 bp, Artificial Sequence
  Synthetic
gcacggacggugucagt

SEQ ID NO: 98108 - DNA, 25 bp, Artificial Sequence
  Synthetic
cacaagcatacccuccttagttcut

SEQ ID NO: 98109 - DNA, 21 bp, Artificial Sequence
  Synthetic
ctagcccuggaggctacuact

SEQ ID NO: 98110 - DNA, 25 bp, Artificial Sequence
  Synthetic
cagtgagtgaaaugtgctctaaugt

SEQ ID NO: 98111 - DNA, 28 bp, Artificial Sequence
  Synthetic
cacactctgattuttgtgtctgtttcug

SEQ ID NO: 98112 - DNA, 24 bp, Artificial Sequence
  Synthetic
tcttttgcucttttcccuaggcaa

SEQ ID NO: 98113 - DNA, 25 bp, Artificial Sequence
  Synthetic
catacaagttgugttcctccatucc

SEQ ID NO: 98114 - DNA, 23 bp, Artificial Sequence
  Synthetic
acacagtagucagtgctggttug

SEQ ID NO: 98115 - DNA, 20 bp, Artificial Sequence
  Synthetic
cccccaccugtttcctucag

SEQ ID NO: 98116 - DNA, 26 bp, Artificial Sequence
  Synthetic
accctaataucctaaccatugggact

SEQ ID NO: 98117 - DNA, 24 bp, Artificial Sequence
  Synthetic
gggacaaattugagccatgactug

SEQ ID NO: 98118 - DNA, 28 bp, Artificial Sequence
  Synthetic
tgtttcatttggauccttctttgacuca

SEQ ID NO: 98119 - DNA, 29 bp, Artificial Sequence
  Synthetic
gcautttactaagacugaaagcagaacaa

SEQ ID NO: 98120 - DNA, 19 bp, Artificial Sequence
  Synthetic
actccugcaaggcacacuc

SEQ ID NO: 98121 - DNA, 18 bp, Artificial Sequence
  Synthetic
gcacccagggcutccaut

SEQ ID NO: 98122 - DNA, 24 bp, Artificial Sequence
  Synthetic
tgtcaaggtgucagaacactgaug

SEQ ID NO: 98123 - DNA, 21 bp, Artificial Sequence
  Synthetic
attggcaugcctcttugcaag

SEQ ID NO: 98124 - DNA, 25 bp, Artificial Sequence
  Synthetic
cctctttcuagagaaggctaugcag

SEQ ID NO: 98125 - DNA, 25 bp, Artificial Sequence
  Synthetic
ccaggacaaccuatcaugcaaaagt

SEQ ID NO: 98126 - DNA, 29 bp, Artificial Sequence
  Synthetic
tcttgcctaggutttctttcatactuacc

SEQ ID NO: 98127 - DNA, 23 bp, Artificial Sequence
  Synthetic
gttccuggacccaccattaugat

SEQ ID NO: 98128 - DNA, 23 bp, Artificial Sequence
  Synthetic
cttaccagaugacccctcaaucc

SEQ ID NO: 98129 - DNA, 26 bp, Artificial Sequence
  Synthetic
acggttacucaggaatacatttuccc

SEQ ID NO: 98130 - DNA, 26 bp, Artificial Sequence
  Synthetic
cttcgttcagaguttaaagcaugcaa

SEQ ID NO: 98131 - DNA, 25 bp, Artificial Sequence
  Synthetic
ctgttagccugaggtcttttgguat

SEQ ID NO: 98132 - DNA, 20 bp, Artificial Sequence
  Synthetic
gtggcacagcuagacgcuaa

SEQ ID NO: 98133 - DNA, 22 bp, Artificial Sequence
  Synthetic
ctcccaagguccatagctcauc

SEQ ID NO: 98134 - DNA, 24 bp, Artificial Sequence
  Synthetic
tttccatggtcutctcaactgcut

SEQ ID NO: 98135 - DNA, 27 bp, Artificial Sequence
  Synthetic
gcagtgtgacuttaataggaugaccag

SEQ ID NO: 98136 - DNA, 24 bp, Artificial Sequence
  Synthetic
catccattccucctgctgtaucat

SEQ ID NO: 98137 - DNA, 22 bp, Artificial Sequence
  Synthetic
tttcctcuctggcccuacaaga

SEQ ID NO: 98138 - DNA, 22 bp, Artificial Sequence
  Synthetic
gggagacucccattttgaugac

SEQ ID NO: 98139 - DNA, 22 bp, Artificial Sequence
  Synthetic
tcacccagaugtgtgacttucc

SEQ ID NO: 98140 - DNA, 22 bp, Artificial Sequence
  Synthetic
caccagaaguccatgtccacut

SEQ ID NO: 98141 - DNA, 28 bp, Artificial Sequence
  Synthetic
gtgatggtgacuatcatgtatttucaca

SEQ ID NO: 98142 - DNA, 23 bp, Artificial Sequence
  Synthetic
acuagcagaaaattgugggccaa

SEQ ID NO: 98143 - DNA, 28 bp, Artificial Sequence
  Synthetic
tcttccaugggcaactaagtaaucaaat

SEQ ID NO: 98144 - DNA, 26 bp, Artificial Sequence
  Synthetic
ctgctttacctutctgattcagguga

SEQ ID NO: 98145 - DNA, 28 bp, Artificial Sequence
  Synthetic
gtacatcgcuacaattaucagcaaaaca

SEQ ID NO: 98146 - DNA, 22 bp, Artificial Sequence
  Synthetic
ctgtcccttugcttggactcua

SEQ ID NO: 98147 - DNA, 21 bp, Artificial Sequence
  Synthetic
agatgttgucgtgcuccacag

SEQ ID NO: 98148 - DNA, 21 bp, Artificial Sequence
  Synthetic
aatgcucaggagcagaagucc

SEQ ID NO: 98149 - DNA, 24 bp, Artificial Sequence
  Synthetic
gcagctacugacttccttcttuga

SEQ ID NO: 98150 - DNA, 20 bp, Artificial Sequence
  Synthetic
cctguggagagcacgtctuc

SEQ ID NO: 98151 - DNA, 19 bp, Artificial Sequence
  Synthetic
ggaaucgccccagggatua

SEQ ID NO: 98152 - DNA, 28 bp, Artificial Sequence
  Synthetic
aaaaatgttcagccacutagagatcuca

SEQ ID NO: 98153 - DNA, 24 bp, Artificial Sequence
  Synthetic
ctgatgttccuataatccggccut

SEQ ID NO: 98154 - DNA, 19 bp, Artificial Sequence
  Synthetic
ggacggcugcaaggtaguc

SEQ ID NO: 98155 - DNA, 25 bp, Artificial Sequence
  Synthetic
tctcaaatcgcutttacacccugat

SEQ ID NO: 98156 - DNA, 26 bp, Artificial Sequence
  Synthetic
gggcacaagaaacuctaaagctcaua

SEQ ID NO: 98157 - DNA, 28 bp, Artificial Sequence
  Synthetic
catcttagacacauggaacaatggaaut

SEQ ID NO: 98158 - DNA, 20 bp, Artificial Sequence
  Synthetic
ggutccguggacaacaacct

SEQ ID NO: 98159 - DNA, 21 bp, Artificial Sequence
  Synthetic
gcagagccugttgaagttgug

SEQ ID NO: 98160 - DNA, 22 bp, Artificial Sequence
  Synthetic
ggcttctucatcccaaagucgt

SEQ ID NO: 98161 - DNA, 21 bp, Artificial Sequence
  Synthetic
ctgctcccucagtcttgcaut

SEQ ID NO: 98162 - DNA, 19 bp, Artificial Sequence
  Synthetic
agccccugacttccctcut

SEQ ID NO: 98163 - DNA, 23 bp, Artificial Sequence
  Synthetic
guaaaggaagccaacauccgagt

SEQ ID NO: 98164 - DNA, 21 bp, Artificial Sequence
  Synthetic
aactccugaaggctcttggug

SEQ ID NO: 98165 - DNA, 27 bp, Artificial Sequence
  Synthetic
aattugaacagaggagguggaaaagat

SEQ ID NO: 98166 - DNA, 29 bp, Artificial Sequence
  Synthetic
gcttcctttactucctccatcttcttaut

SEQ ID NO: 98167 - DNA, 23 bp, Artificial Sequence
  Synthetic
gaagcaaaggagagcugtgaaug

SEQ ID NO: 98168 - DNA, 23 bp, Artificial Sequence
  Synthetic
cctcactctccuctgtcttccut

SEQ ID NO: 98169 - DNA, 22 bp, Artificial Sequence
  Synthetic
tttgcaagtgutccagttggug

SEQ ID NO: 98170 - DNA, 20 bp, Artificial Sequence
  Synthetic
cacggaaggugggatuggat

SEQ ID NO: 98171 - DNA, 20 bp, Artificial Sequence
  Synthetic
gacaggaggcgauggagtuc

SEQ ID NO: 98172 - DNA, 17 bp, Artificial Sequence
  Synthetic
ctcactgggugcccgut

SEQ ID NO: 98173 - DNA, 18 bp, Artificial Sequence
  Synthetic
ccacccugtgcccauact

SEQ ID NO: 98174 - DNA, 21 bp, Artificial Sequence
  Synthetic
tccattgccugttgcuagcat

SEQ ID NO: 98175 - DNA, 21 bp, Artificial Sequence
  Synthetic
ggcttctacuccgcttcctug

SEQ ID NO: 98176 - DNA, 17 bp, Artificial Sequence
  Synthetic
ccacugcagccaucgca

SEQ ID NO: 98177 - DNA, 23 bp, Artificial Sequence
  Synthetic
gggaccaauacagaggtctcuga

SEQ ID NO: 98178 - DNA, 21 bp, Artificial Sequence
  Synthetic
cccacgtccaugaaaggctut

SEQ ID NO: 98179 - DNA, 21 bp, Artificial Sequence
  Synthetic
cagaacgugtccagctucgat

SEQ ID NO: 98180 - DNA, 28 bp, Artificial Sequence
  Synthetic
ctgaattacttugaacttcggatgctut

SEQ ID NO: 98181 - DNA, 26 bp, Artificial Sequence
  Synthetic
gacaagtuggaaagacctccactuat

SEQ ID NO: 98182 - DNA, 21 bp, Artificial Sequence
  Synthetic
ctttggctucagcaacgagut

SEQ ID NO: 98183 - DNA, 19 bp, Artificial Sequence
  Synthetic
gcugacgagggtguacagg

SEQ ID NO: 98184 - DNA, 22 bp, Artificial Sequence
  Synthetic
ggaaacautaccuggagccaga

SEQ ID NO: 98185 - DNA, 26 bp, Artificial Sequence
  Synthetic
gcagggctaagagutcttctaccaua

SEQ ID NO: 98186 - DNA, 19 bp, Artificial Sequence
  Synthetic
tctggagccugggagucat

SEQ ID NO: 98187 - DNA, 18 bp, Artificial Sequence
  Synthetic
ccagucccaccacugagg

SEQ ID NO: 98188 - DNA, 25 bp, Artificial Sequence
  Synthetic
ctttcgauggccagaattuaaaggt

SEQ ID NO: 98189 - DNA, 27 bp, Artificial Sequence
  Synthetic
acagtcugtggacatauagaagggaat

SEQ ID NO: 98190 - DNA, 23 bp, Artificial Sequence
  Synthetic
gagtttuacgagggaaguaccgt

SEQ ID NO: 98191 - DNA, 26 bp, Artificial Sequence
  Synthetic
aatgctcttcggutcctggaatatut

SEQ ID NO: 98192 - DNA, 26 bp, Artificial Sequence
  Synthetic
gtgtgggtatugttgcattgtttcut

SEQ ID NO: 98193 - DNA, 28 bp, Artificial Sequence
  Synthetic
tgctgtguagcatataguaacagaaacc

SEQ ID NO: 98194 - DNA, 25 bp, Artificial Sequence
  Synthetic
gttacatgccutgaagtgaugagga

SEQ ID NO: 98195 - DNA, 27 bp, Artificial Sequence
  Synthetic
ggtaaaatccacugtaacggctcuaac

SEQ ID NO: 98196 - DNA, 26 bp, Artificial Sequence
  Synthetic
ttctgctgaacaaaugagtcactuct

SEQ ID NO: 98197 - DNA, 23 bp, Artificial Sequence
  Synthetic
cacacacaaugcgtatgactugg

SEQ ID NO: 98198 - DNA, 28 bp, Artificial Sequence
  Synthetic
gaagaagggattcutacatcgatgacut

SEQ ID NO: 98199 - DNA, 24 bp, Artificial Sequence
  Synthetic
tcctgggtcucttttgtgctaauc

SEQ ID NO: 98200 - DNA, 21 bp, Artificial Sequence
  Synthetic
gggtgttauggttggcacaut

SEQ ID NO: 98201 - DNA, 21 bp, Artificial Sequence
  Synthetic
agcactugcgtactccaucac

SEQ ID NO: 98202 - DNA, 21 bp, Artificial Sequence
  Synthetic
gtcccctucggagctttcuat

SEQ ID NO: 98203 - DNA, 18 bp, Artificial Sequence
  Synthetic
cggaauccgggaaccgua

SEQ ID NO: 98204 - DNA, 21 bp, Artificial Sequence
  Synthetic
ctggugatggaguacgcaagt

SEQ ID NO: 98205 - DNA, 21 bp, Artificial Sequence
  Synthetic
gagcttccutctccttcaugc

SEQ ID NO: 98206 - DNA, 25 bp, Artificial Sequence
  Synthetic
cttctatgtcaugaaccccttuccc

SEQ ID NO: 98207 - DNA, 27 bp, Artificial Sequence
  Synthetic
acctttttaggaautgctcggattuca

SEQ ID NO: 98208 - DNA, 23 bp, Artificial Sequence
  Synthetic
tcatttgacgauacccgatugct

SEQ ID NO: 98209 - DNA, 20 bp, Artificial Sequence
  Synthetic
tgcaagggagcgaugaaguc

SEQ ID NO: 98210 - DNA, 21 bp, Artificial Sequence
  Synthetic
tggttucacagtccacugagg

SEQ ID NO: 98211 - DNA, 22 bp, Artificial Sequence
  Synthetic
accttcagguccctgtguacaa

SEQ ID NO: 98212 - DNA, 26 bp, Artificial Sequence
  Synthetic
ttgctcatctauggctatcttgcaut

SEQ ID NO: 98213 - DNA, 28 bp, Artificial Sequence
  Synthetic
agcaaaaatctguttctaccactuacct

SEQ ID NO: 98214 - DNA, 22 bp, Artificial Sequence
  Synthetic
ggagccatacuactgcctcuca

SEQ ID NO: 98215 - DNA, 22 bp, Artificial Sequence
  Synthetic
ccatgatgcugctgtagtcguc

SEQ ID NO: 98216 - DNA, 26 bp, Artificial Sequence
  Synthetic
agacaggaccautatgagtctcucaa

SEQ ID NO: 98217 - DNA, 28 bp, Artificial Sequence
  Synthetic
gccttttacacucctcaaaaccatttua

SEQ ID NO: 98218 - DNA, 27 bp, Artificial Sequence
  Synthetic
ctgtgcactatugtcaccagaaaaaua

SEQ ID NO: 98219 - DNA, 23 bp, Artificial Sequence
  Synthetic
ggagaaaagggcuggaggaatut

SEQ ID NO: 98220 - DNA, 22 bp, Artificial Sequence
  Synthetic
caaggccuatgaggatgauggt

SEQ ID NO: 98221 - DNA, 24 bp, Artificial Sequence
  Synthetic
gttctaagggcugatcagtctuca

SEQ ID NO: 98222 - DNA, 22 bp, Artificial Sequence
  Synthetic
ggacagguacaagaagcugaca

SEQ ID NO: 98223 - DNA, 26 bp, Artificial Sequence
  Synthetic
tgaugtggaaagtaugaagaaagcca

SEQ ID NO: 98224 - DNA, 26 bp, Artificial Sequence
  Synthetic
ggattggttugacccatatgtguagt

SEQ ID NO: 98225 - DNA, 22 bp, Artificial Sequence
  Synthetic
cagcctguacatactccctucc

SEQ ID NO: 98226 - DNA, 29 bp, Artificial Sequence
  Synthetic
aaatgcattaguagagaacagcaatcuga

SEQ ID NO: 98227 - DNA, 24 bp, Artificial Sequence
  Synthetic
tccaggaggcuctatcttgaagut

SEQ ID NO: 98228 - DNA, 25 bp, Artificial Sequence
  Synthetic
ggauaaccacaaagagaggatugct

SEQ ID NO: 98229 - DNA, 22 bp, Artificial Sequence
  Synthetic
cataggatgaagugcgagcuca

SEQ ID NO: 98230 - DNA, 23 bp, Artificial Sequence
  Synthetic
cgcaauaacctcatacuccacca

SEQ ID NO: 98231 - DNA, 24 bp, Artificial Sequence
  Synthetic
tgggtctctuagcaatgtgcttut

SEQ ID NO: 98232 - DNA, 27 bp, Artificial Sequence
  Synthetic
gtgtttgtttutgcaagtagucaccat

SEQ ID NO: 98233 - DNA, 25 bp, Artificial Sequence
  Synthetic
gcguttcatcatagucaccaaaggt

SEQ ID NO: 98234 - DNA, 27 bp, Artificial Sequence
  Synthetic
aattatccttuctcaggtctucccaac

SEQ ID NO: 98235 - DNA, 28 bp, Artificial Sequence
  Synthetic
ggatttctucagggaaaattctcctuct

SEQ ID NO: 98236 - DNA, 22 bp, Artificial Sequence
  Synthetic
gtctacugccacaacagaggut

SEQ ID NO: 98237 - DNA, 28 bp, Artificial Sequence
  Synthetic
gagttaacaatgcugaggttaagguact

SEQ ID NO: 98238 - DNA, 18 bp, Artificial Sequence
  Synthetic
ctcgccccautccctgua

SEQ ID NO: 98239 - DNA, 18 bp, Artificial Sequence
  Synthetic
cgautcucccggccaacc

SEQ ID NO: 98240 - DNA, 18 bp, Artificial Sequence
  Synthetic
ggttggcuccagccucaa

SEQ ID NO: 98241 - DNA, 20 bp, Artificial Sequence
  Synthetic
gcatggtugggatgtccuga

SEQ ID NO: 98242 - DNA, 20 bp, Artificial Sequence
  Synthetic
cctccauccagcagaggtuc

SEQ ID NO: 98243 - DNA, 27 bp, Artificial Sequence
  Synthetic
gtgtcctttagautgacccattacuct

SEQ ID NO: 98244 - DNA, 25 bp, Artificial Sequence
  Synthetic
tcatggatguggcttaaacaacuca

SEQ ID NO: 98245 - DNA, 20 bp, Artificial Sequence
  Synthetic
gctgatccaugaccctguca

SEQ ID NO: 98246 - DNA, 22 bp, Artificial Sequence
  Synthetic
guagggccaaaagaaguagcca

SEQ ID NO: 98247 - DNA, 22 bp, Artificial Sequence
  Synthetic
cggtctggagucgcagtacuaa

SEQ ID NO: 98248 - DNA, 27 bp, Artificial Sequence
  Synthetic
gctcaaacttuaaaaggatgtagugca

SEQ ID NO: 98249 - DNA, 23 bp, Artificial Sequence
  Synthetic
ggctggatgugtggttcagtaua

SEQ ID NO: 98250 - DNA, 28 bp, Artificial Sequence
  Synthetic
tttttcttagcauacatctgtggaugga

SEQ ID NO: 98251 - DNA, 24 bp, Artificial Sequence
  Synthetic
caatgtgaggcugttcatctgtug

SEQ ID NO: 98252 - DNA, 21 bp, Artificial Sequence
  Synthetic
cttccccauctgctcacagua

SEQ ID NO: 98253 - DNA, 20 bp, Artificial Sequence
  Synthetic
cacccgtutcatgggauggt

SEQ ID NO: 98254 - DNA, 24 bp, Artificial Sequence
  Synthetic
gcattcctagugggttcaggacua

SEQ ID NO: 98255 - DNA, 20 bp, Artificial Sequence
  Synthetic
cccgttgugaggctgaucac

SEQ ID NO: 98256 - DNA, 22 bp, Artificial Sequence
  Synthetic
cttataaugggccacctgctuc

SEQ ID NO: 98257 - DNA, 26 bp, Artificial Sequence
  Synthetic
gaatcaaaacacgacaguacatuggt

SEQ ID NO: 98258 - DNA, 19 bp, Artificial Sequence
  Synthetic
gcugggagaggcactcaut

SEQ ID NO: 98259 - DNA, 20 bp, Artificial Sequence
  Synthetic
tggacucccagctcttcuct

SEQ ID NO: 98260 - DNA, 25 bp, Artificial Sequence
  Synthetic
cggtgtagaaacuccattacgucag

SEQ ID NO: 98261 - DNA, 26 bp, Artificial Sequence
  Synthetic
ccaggcagatautaaaaggcattgug

SEQ ID NO: 98262 - DNA, 21 bp, Artificial Sequence
  Synthetic
ctctgtggagguaaggcagut

SEQ ID NO: 98263 - DNA, 24 bp, Artificial Sequence
  Synthetic
ttttggtttaaccuggcttccuca

SEQ ID NO: 98264 - DNA, 21 bp, Artificial Sequence
  Synthetic
aggauacugaggaagccaggt

SEQ ID NO: 98265 - DNA, 27 bp, Artificial Sequence
  Synthetic
gcaactgtgaaaauttctccccataut

SEQ ID NO: 98266 - DNA, 22 bp, Artificial Sequence
  Synthetic
tgtgcucacacagcatacucaa

SEQ ID NO: 98267 - DNA, 28 bp, Artificial Sequence
  Synthetic
catgtcacttgugacttctgttttucag

SEQ ID NO: 98268 - DNA, 22 bp, Artificial Sequence
  Synthetic
ccagcacagggugtatatggut

SEQ ID NO: 98269 - DNA, 19 bp, Artificial Sequence
  Synthetic
tgtgtgacgugggtuggac

SEQ ID NO: 98270 - DNA, 33 bp, Artificial Sequence
  Synthetic
tattctgaattaatggauacaatgtttcctcut

SEQ ID NO: 98271 - DNA, 27 bp, Artificial Sequence
  Synthetic
ctgcaatcaggaauaccaggtcttuat

SEQ ID NO: 98272 - DNA, 21 bp, Artificial Sequence
  Synthetic
cctagctcugcctcacacuct

SEQ ID NO: 98273 - DNA, 23 bp, Artificial Sequence
  Synthetic
ccagaaucucagggccaaaagaa

SEQ ID NO: 98274 - DNA, 26 bp, Artificial Sequence
  Synthetic
cttctctctcauctctcttcctguct

SEQ ID NO: 98275 - DNA, 22 bp, Artificial Sequence
  Synthetic
acggaagttcutggtgtaggug

SEQ ID NO: 98276 - DNA, 20 bp, Artificial Sequence
  Synthetic
gccctgauggcacccattua

SEQ ID NO: 98277 - DNA, 21 bp, Artificial Sequence
  Synthetic
ctccaucccaggctacaugac

SEQ ID NO: 98278 - DNA, 23 bp, Artificial Sequence
  Synthetic
ccacatgagccccugacttatuc

SEQ ID NO: 98279 - DNA, 22 bp, Artificial Sequence
  Synthetic
gttctgugcaaacgtaggtgut

SEQ ID NO: 98280 - DNA, 20 bp, Artificial Sequence
  Synthetic
cuagcatgaugacccgcaga

SEQ ID NO: 98281 - DNA, 21 bp, Artificial Sequence
  Synthetic
aagggaggucctgttcaccua

SEQ ID NO: 98282 - DNA, 20 bp, Artificial Sequence
  Synthetic
ttttgugggaagccctcugt

SEQ ID NO: 98283 - DNA, 20 bp, Artificial Sequence
  Synthetic
gggtaacaaccucccacguc

SEQ ID NO: 98284 - DNA, 23 bp, Artificial Sequence
  Synthetic
cttacgttgagcuagcacccuaa

SEQ ID NO: 98285 - DNA, 22 bp, Artificial Sequence
  Synthetic
ccaaguccaacagaagtacgug

SEQ ID NO: 98286 - DNA, 28 bp, Artificial Sequence
  Synthetic
cttttctatcttcuccatacacccctug

SEQ ID NO: 98287 - DNA, 25 bp, Artificial Sequence
  Synthetic
agatgagcatugctgtctgttugat

SEQ ID NO: 98288 - DNA, 17 bp, Artificial Sequence
  Synthetic
ggtcttugggcccugct

SEQ ID NO: 98289 - DNA, 19 bp, Artificial Sequence
  Synthetic
ccctcacagccucctcuct

SEQ ID NO: 98290 - DNA, 22 bp, Artificial Sequence
  Synthetic
ggtgggutccctatguccagat

SEQ ID NO: 98291 - DNA, 20 bp, Artificial Sequence
  Synthetic
gtaagtgucgggaggtgcug

SEQ ID NO: 98292 - DNA, 27 bp, Artificial Sequence
  Synthetic
agtttattccugcatgaattccauggt

SEQ ID NO: 98293 - DNA, 26 bp, Artificial Sequence
  Synthetic
ggccttcccaaauatggatcatctuc

SEQ ID NO: 98294 - DNA, 27 bp, Artificial Sequence
  Synthetic
gttttaauacacagcttcagaauggca

SEQ ID NO: 98295 - DNA, 27 bp, Artificial Sequence
  Synthetic
gctaacttacuaatgttgccttugcat

SEQ ID NO: 98296 - DNA, 26 bp, Artificial Sequence
  Synthetic
ctctatagcauacatcacccctucct

SEQ ID NO: 98297 - DNA, 22 bp, Artificial Sequence
  Synthetic
gtagcagacaaacugcagugga

SEQ ID NO: 98298 - DNA, 20 bp, Artificial Sequence
  Synthetic
ccagcaucaagggtgtgguc

SEQ ID NO: 98299 - DNA, 19 bp, Artificial Sequence
  Synthetic
actcgagutggcaguccaa

SEQ ID NO: 98300 - DNA, 22 bp, Artificial Sequence
  Synthetic
gagcctggguttctcctcatuc

SEQ ID NO: 98301 - DNA, 21 bp, Artificial Sequence
  Synthetic
tcttctcgucctccagcucat

SEQ ID NO: 98302 - DNA, 18 bp, Artificial Sequence
  Synthetic
ggccgucgagugaaacca

SEQ ID NO: 98303 - DNA, 18 bp, Artificial Sequence
  Synthetic
cugccaaccagctuccct

SEQ ID NO: 98304 - DNA, 26 bp, Artificial Sequence
  Synthetic
aaaatgcctgttugtaagcagtcauc

SEQ ID NO: 98305 - DNA, 23 bp, Artificial Sequence
  Synthetic
ggccagggutttcattgcttcua

SEQ ID NO: 98306 - DNA, 26 bp, Artificial Sequence
  Synthetic
aagcaaagaggutggagtugaaaaac

SEQ ID NO: 98307 - DNA, 28 bp, Artificial Sequence
  Synthetic
ggtttggcacuagtaaagctgactttua

SEQ ID NO: 98308 - DNA, 20 bp, Artificial Sequence
  Synthetic
tggccagagaggcauctgua

SEQ ID NO: 98309 - DNA, 18 bp, Artificial Sequence
  Synthetic
cugagccacagcccucat

SEQ ID NO: 98310 - DNA, 22 bp, Artificial Sequence
  Synthetic
gggaggaaagucacacatcugg

SEQ ID NO: 98311 - DNA, 24 bp, Artificial Sequence
  Synthetic
tgttgtacuccttgccatugaaca

SEQ ID NO: 98312 - DNA, 22 bp, Artificial Sequence
  Synthetic
gagtactgcaagutcccctuct

SEQ ID NO: 98313 - DNA, 20 bp, Artificial Sequence
  Synthetic
gggactagaguggatgcuca

SEQ ID NO: 98314 - DNA, 21 bp, Artificial Sequence
  Synthetic
ggctguagcaacagcttugga

SEQ ID NO: 98315 - DNA, 21 bp, Artificial Sequence
  Synthetic
gttucgagagcccagtgugaa

SEQ ID NO: 98316 - DNA, 21 bp, Artificial Sequence
  Synthetic
cctaaacaacccugcctugct

SEQ ID NO: 98317 - DNA, 27 bp, Artificial Sequence
  Synthetic
gttgaaagaggugaggtcctaactuac

SEQ ID NO: 98318 - DNA, 20 bp, Artificial Sequence
  Synthetic
ccaggtcucacccccuaagt

SEQ ID NO: 98319 - DNA, 21 bp, Artificial Sequence
  Synthetic
cgaaatccccugtctccucag

SEQ ID NO: 98320 - DNA, 28 bp, Artificial Sequence
  Synthetic
tccautatttattgugcggaggaaaaga

SEQ ID NO: 98321 - DNA, 22 bp, Artificial Sequence
  Synthetic
caaaggaaccacgugugcaaaa

SEQ ID NO: 98322 - DNA, 21 bp, Artificial Sequence
  Synthetic
tcacatgcgugtcccactuaa

SEQ ID NO: 98323 - DNA, 21 bp, Artificial Sequence
  Synthetic
gccactgggucttgtccauag

SEQ ID NO: 98324 - DNA, 30 bp, Artificial Sequence
  Synthetic
atctagttaggaaugaaacagaaatuggat

SEQ ID NO: 98325 - DNA, 27 bp, Artificial Sequence
  Synthetic
ttgtagactgguaggatttagcugagt

SEQ ID NO: 98326 - DNA, 20 bp, Artificial Sequence
  Synthetic
cgcatggguggagactauct

SEQ ID NO: 98327 - DNA, 20 bp, Artificial Sequence
  Synthetic
cactctcuggccaatgccut

SEQ ID NO: 98328 - DNA, 20 bp, Artificial Sequence
  Synthetic
caggcagacacuggcaguag

SEQ ID NO: 98329 - DNA, 21 bp, Artificial Sequence
  Synthetic
accauggaacctgtacuccca

SEQ ID NO: 98330 - DNA, 24 bp, Artificial Sequence
  Synthetic
gattgcugggaagggtaaggaaut

SEQ ID NO: 98331 - DNA, 23 bp, Artificial Sequence
  Synthetic
ccatctagcaugccatcauccat

SEQ ID NO: 98332 - DNA, 21 bp, Artificial Sequence
  Synthetic
cacagtggaaucctccaggut

SEQ ID NO: 98333 - DNA, 25 bp, Artificial Sequence
  Synthetic
tggttccctguctaatcctcttugt

SEQ ID NO: 98334 - DNA, 20 bp, Artificial Sequence
  Synthetic
cccaggugttggatgucaac

SEQ ID NO: 98335 - DNA, 28 bp, Artificial Sequence
  Synthetic
gagacaagtaaauccccctgauaaacat

SEQ ID NO: 98336 - DNA, 20 bp, Artificial Sequence
  Synthetic
ggacaugggtcacucaggca

SEQ ID NO: 98337 - DNA, 21 bp, Artificial Sequence
  Synthetic
ctgcaagtguctcccagguaa

SEQ ID NO: 98338 - DNA, 23 bp, Artificial Sequence
  Synthetic
ctcacatgcagutctaccaccuc

SEQ ID NO: 98339 - DNA, 23 bp, Artificial Sequence
  Synthetic
gatcatgatguctgcctcuccat

SEQ ID NO: 98340 - DNA, 18 bp, Artificial Sequence
  Synthetic
ctgucccccacagtgugt

SEQ ID NO: 98341 - DNA, 19 bp, Artificial Sequence
  Synthetic
tcctcuccccacccactuc

SEQ ID NO: 98342 - DNA, 24 bp, Artificial Sequence
  Synthetic
gggtgtccucatggttctaatuca

SEQ ID NO: 98343 - DNA, 20 bp, Artificial Sequence
  Synthetic
ctgctcacugccacaguagg

SEQ ID NO: 98344 - DNA, 22 bp, Artificial Sequence
  Synthetic
ccaugaaagagtucgccgagaa

SEQ ID NO: 98345 - DNA, 20 bp, Artificial Sequence
  Synthetic
ctcgatgtcugcgagtcucc

SEQ ID NO: 98346 - DNA, 20 bp, Artificial Sequence
  Synthetic
caccgagaagcucaccaugt

SEQ ID NO: 98347 - DNA, 25 bp, Artificial Sequence
  Synthetic
ccctaagugccagtatgctgauaag

SEQ ID NO: 98348 - DNA, 22 bp, Artificial Sequence
  Synthetic
actgcggutttctcgaauccat

SEQ ID NO: 98349 - DNA, 21 bp, Artificial Sequence
  Synthetic
tgtcctatcuaagccgcccut

SEQ ID NO: 98350 - DNA, 24 bp, Artificial Sequence
  Synthetic
aagggcaaaagaaccutccacuaa

SEQ ID NO: 98351 - DNA, 21 bp, Artificial Sequence
  Synthetic
accgccagaucaccatctuac

SEQ ID NO: 98352 - DNA, 28 bp, Artificial Sequence
  Synthetic
tgttatttgttguttttcccctgugaac

SEQ ID NO: 98353 - DNA, 25 bp, Artificial Sequence
  Synthetic
tcacacctctugagatcagagauca

SEQ ID NO: 98354 - DNA, 20 bp, Artificial Sequence
  Synthetic
gcctucccggacacagtuaa

SEQ ID NO: 98355 - DNA, 20 bp, Artificial Sequence
  Synthetic
cgagucgaguacgccaagag

SEQ ID NO: 98356 - DNA, 22 bp, Artificial Sequence
  Synthetic
gatgctcucgctgcatttctug

SEQ ID NO: 98357 - DNA, 20 bp, Artificial Sequence
  Synthetic
cagcgtgtutctaggtcgug

SEQ ID NO: 98358 - DNA, 22 bp, Artificial Sequence
  Synthetic
acugggacucgaacacaagaac

SEQ ID NO: 98359 - DNA, 23 bp, Artificial Sequence
  Synthetic
gcctggaucacttcaattgctuc

SEQ ID NO: 98360 - DNA, 22 bp, Artificial Sequence
  Synthetic
cctgagacaaaugggcuacacc

SEQ ID NO: 98361 - DNA, 27 bp, Artificial Sequence
  Synthetic
agctggaaaatauctccactgtcttut

SEQ ID NO: 98362 - DNA, 23 bp, Artificial Sequence
  Synthetic
tctaaagcucctcccucacacat

SEQ ID NO: 98363 - DNA, 25 bp, Artificial Sequence
  Synthetic
catccagcaccauaatcctcttcug

SEQ ID NO: 98364 - DNA, 23 bp, Artificial Sequence
  Synthetic
gggatgagaucaatgccattcug

SEQ ID NO: 98365 - DNA, 25 bp, Artificial Sequence
  Synthetic
ggcctggcaugatctttaaatucct

SEQ ID NO: 98366 - DNA, 22 bp, Artificial Sequence
  Synthetic
aacgaagaacacutccgagguc

SEQ ID NO: 98367 - DNA, 25 bp, Artificial Sequence
  Synthetic
acatgggaaccugggaatacttuac

SEQ ID NO: 98368 - DNA, 26 bp, Artificial Sequence
  Synthetic
ctgatgtgcugggtgtgatttattut

SEQ ID NO: 98369 - DNA, 21 bp, Artificial Sequence
  Synthetic
accccagccutgtctgtttut

SEQ ID NO: 98370 - DNA, 26 bp, Artificial Sequence
  Synthetic
gtttctcaggcuccagttctatctuc

SEQ ID NO: 98371 - DNA, 22 bp, Artificial Sequence
  Synthetic
cctcccuccttctgtuccaaaa

SEQ ID NO: 98372 - DNA, 17 bp, Artificial Sequence
  Synthetic
gaggccuggatguggca

SEQ ID NO: 98373 - DNA, 19 bp, Artificial Sequence
  Synthetic
cccagcuctccctcuccat

SEQ ID NO: 98374 - DNA, 20 bp, Artificial Sequence
  Synthetic
gcacaagaagcugggtguca

SEQ ID NO: 98375 - DNA, 18 bp, Artificial Sequence
  Synthetic
cctggcutcctgggugag

SEQ ID NO: 98376 - DNA, 27 bp, Artificial Sequence
  Synthetic
gaacatcutcctaaactucaacccaga

SEQ ID NO: 98377 - DNA, 28 bp, Artificial Sequence
  Synthetic
tccataaagcagguaagttttcacugaa

SEQ ID NO: 98378 - DNA, 26 bp, Artificial Sequence
  Synthetic
tgtggttttgautctcagatggtugt

SEQ ID NO: 98379 - DNA, 21 bp, Artificial Sequence
  Synthetic
tctctgcaaccutccactguc

SEQ ID NO: 98380 - DNA, 21 bp, Artificial Sequence
  Synthetic
cgttggtuaccttggcucagt

SEQ ID NO: 98381 - DNA, 21 bp, Artificial Sequence
  Synthetic
caccccucagactctgaugga

SEQ ID NO: 98382 - DNA, 20 bp, Artificial Sequence
  Synthetic
cagggctuctgggcacauaa

SEQ ID NO: 98383 - DNA, 24 bp, Artificial Sequence
  Synthetic
ggccatucaggagaaggttttuga

SEQ ID NO: 98384 - DNA, 21 bp, Artificial Sequence
  Synthetic
gcatctcccuggcttacugac

SEQ ID NO: 98385 - DNA, 24 bp, Artificial Sequence
  Synthetic
ggauaaagaagcccugaagaagca

SEQ ID NO: 98386 - DNA, 27 bp, Artificial Sequence
  Synthetic
actgaatgtucaaatgcagagauggat

SEQ ID NO: 98387 - DNA, 24 bp, Artificial Sequence
  Synthetic
gctccaaaattuccatctgggugt

SEQ ID NO: 98388 - DNA, 27 bp, Artificial Sequence
  Synthetic
tccactuagagagaaacuccaagaaca

SEQ ID NO: 98389 - DNA, 28 bp, Artificial Sequence
  Synthetic
ctcagtggttgaguacaatactggaaut

SEQ ID NO: 98390 - DNA, 21 bp, Artificial Sequence
  Synthetic
cacccacccutcactctugac

SEQ ID NO: 98391 - DNA, 22 bp, Artificial Sequence
  Synthetic
catgatugaccgctgguaccat

SEQ ID NO: 98392 - DNA, 22 bp, Artificial Sequence
  Synthetic
ccugttctugacaaagcagcct

SEQ ID NO: 98393 - DNA, 20 bp, Artificial Sequence
  Synthetic
gctgcccguatcatgtucac

SEQ ID NO: 98394 - DNA, 26 bp, Artificial Sequence
  Synthetic
gcucaaagttctttauggagacacct

SEQ ID NO: 98395 - DNA, 23 bp, Artificial Sequence
  Synthetic
cagcttcauaaccgaagatugct

SEQ ID NO: 98396 - DNA, 20 bp, Artificial Sequence
  Synthetic
ccagcaaagutggtggucct

SEQ ID NO: 98397 - DNA, 27 bp, Artificial Sequence
  Synthetic
tgtctttcagucaaccagaguaacaaa

SEQ ID NO: 98398 - DNA, 23 bp, Artificial Sequence
  Synthetic
caaagagagacccutgacggaua

SEQ ID NO: 98399 - DNA, 21 bp, Artificial Sequence
  Synthetic
tgctgtgaacucctctgctuc

SEQ ID NO: 98400 - DNA, 21 bp, Artificial Sequence
  Synthetic
gtcccaaaugctgtaccugct

SEQ ID NO: 98401 - DNA, 27 bp, Artificial Sequence
  Synthetic
ggaattccgagaaauctcttaccucaa

SEQ ID NO: 98402 - DNA, 18 bp, Artificial Sequence
  Synthetic
ggaggcgcuggtttcugg

SEQ ID NO: 98403 - DNA, 20 bp, Artificial Sequence
  Synthetic
tcaagggagagcuggctuct

SEQ ID NO: 98404 - DNA, 23 bp, Artificial Sequence
  Synthetic
tgcagcaaacutgtctctuacct

SEQ ID NO: 98405 - DNA, 28 bp, Artificial Sequence
  Synthetic
gtgtttttgucatcacttttgucacaac

SEQ ID NO: 98406 - DNA, 27 bp, Artificial Sequence
  Synthetic
acactgaatcuaaaaaggacccugaag

SEQ ID NO: 98407 - DNA, 26 bp, Artificial Sequence
  Synthetic
cttcttttgttccugttgcatacgut

SEQ ID NO: 98408 - DNA, 21 bp, Artificial Sequence
  Synthetic
tgggaatggugaggtcacuct

SEQ ID NO: 98409 - DNA, 26 bp, Artificial Sequence
  Synthetic
agatatctttcugcacctaggacuga

SEQ ID NO: 98410 - DNA, 21 bp, Artificial Sequence
  Synthetic
ctgctggtucactgtgtcugt

SEQ ID NO: 98411 - DNA, 22 bp, Artificial Sequence
  Synthetic
ccuagaaagcggagacagucct

SEQ ID NO: 98412 - DNA, 28 bp, Artificial Sequence
  Synthetic
tgatggtagtugaataaaagtgcttuga

SEQ ID NO: 98413 - DNA, 20 bp, Artificial Sequence
  Synthetic
gcugcacccaaagcacaaut

SEQ ID NO: 98414 - DNA, 26 bp, Artificial Sequence
  Synthetic
agcattggatuaaattgtgcttuggg

SEQ ID NO: 98415 - DNA, 27 bp, Artificial Sequence
  Synthetic
tctcttacctcauctatgccatgtcut

SEQ ID NO: 98416 - DNA, 23 bp, Artificial Sequence
  Synthetic
tcctatctgcucagatgggcuat

SEQ ID NO: 98417 - DNA, 22 bp, Artificial Sequence
  Synthetic
aagttggtguacggtccaaucc

SEQ ID NO: 98418 - DNA, 25 bp, Artificial Sequence
  Synthetic
tccttttaagguctagagccctuca

SEQ ID NO: 98419 - DNA, 22 bp, Artificial Sequence
  Synthetic
cuagccaaagacaugggcagat

SEQ ID NO: 98420 - DNA, 27 bp, Artificial Sequence
  Synthetic
agcattgttugatggttattttuggca

SEQ ID NO: 98421 - DNA, 28 bp, Artificial Sequence
  Synthetic
tcttttgacuaatcagtgtgtucagcat

SEQ ID NO: 98422 - DNA, 22 bp, Artificial Sequence
  Synthetic
gguctacgatgaugcccacaat

SEQ ID NO: 98423 - DNA, 22 bp, Artificial Sequence
  Synthetic
cctctgcguacaggtgaatguc

SEQ ID NO: 98424 - DNA, 22 bp, Artificial Sequence
  Synthetic
gccagcacagaguauccaagac

SEQ ID NO: 98425 - DNA, 21 bp, Artificial Sequence
  Synthetic
gctggctgucagtacacctuc

SEQ ID NO: 98426 - DNA, 22 bp, Artificial Sequence
  Synthetic
gggcaagagutguccacagaat

SEQ ID NO: 98427 - DNA, 23 bp, Artificial Sequence
  Synthetic
gtcagagacucggtaaagcugag

SEQ ID NO: 98428 - DNA, 21 bp, Artificial Sequence
  Synthetic
gtggagacaucctuccgcaaa

SEQ ID NO: 98429 - DNA, 21 bp, Artificial Sequence
  Synthetic
cacggtgugggaaattgucag

SEQ ID NO: 98430 - DNA, 26 bp, Artificial Sequence
  Synthetic
agagttgtauaggaactgtcagugct

SEQ ID NO: 98431 - DNA, 27 bp, Artificial Sequence
  Synthetic
tggaataaaatguaaggtcacccacut

SEQ ID NO: 98432 - DNA, 20 bp, Artificial Sequence
  Synthetic
ccatgcugccccagtatgua

SEQ ID NO: 98433 - DNA, 22 bp, Artificial Sequence
  Synthetic
acttctccugcttcuggaaggt

SEQ ID NO: 98434 - DNA, 20 bp, Artificial Sequence
  Synthetic
cccatccaccucaacgucag

SEQ ID NO: 98435 - DNA, 24 bp, Artificial Sequence
  Synthetic
caaggtcaagguctagtgggtcua

SEQ ID NO: 98436 - DNA, 17 bp, Artificial Sequence
  Synthetic
guccgcaccccttucct

SEQ ID NO: 98437 - DNA, 19 bp, Artificial Sequence
  Synthetic
gggaggcuccggttacuca

SEQ ID NO: 98438 - DNA, 21 bp, Artificial Sequence
  Synthetic
gcattguccctgtugcacaaa

SEQ ID NO: 98439 - DNA, 21 bp, Artificial Sequence
  Synthetic
tcccggaacaaggaugaagug

SEQ ID NO: 98440 - DNA, 23 bp, Artificial Sequence
  Synthetic
ccgagtttcucaatcatggccut

SEQ ID NO: 98441 - DNA, 22 bp, Artificial Sequence
  Synthetic
gctggcctugctgaatgatuct

SEQ ID NO: 98442 - DNA, 20 bp, Artificial Sequence
  Synthetic
agacccccucctccaguaac

SEQ ID NO: 98443 - DNA, 23 bp, Artificial Sequence
  Synthetic
tcacctcgagaguacagcgttua

SEQ ID NO: 98444 - DNA, 23 bp, Artificial Sequence
  Synthetic
ggagattuttggtgcugaaccca

SEQ ID NO: 98445 - DNA, 25 bp, Artificial Sequence
  Synthetic
aggagaggaaaagugtgucaagaag

SEQ ID NO: 98446 - DNA, 28 bp, Artificial Sequence
  Synthetic
ttggacatgtttucacagtagttguaga

SEQ ID NO: 98447 - DNA, 27 bp, Artificial Sequence
  Synthetic
tctutctctagtccauagccaaacaga

SEQ ID NO: 98448 - DNA, 26 bp, Artificial Sequence
  Synthetic
tgtctatggcaugttagaacaagugt

SEQ ID NO: 98449 - DNA, 28 bp, Artificial Sequence
  Synthetic
aaggcattattaaguatccccagaccua

SEQ ID NO: 98450 - DNA, 28 bp, Artificial Sequence
  Synthetic
caaacttaattggcutaacgttcaccut

SEQ ID NO: 98451 - DNA, 28 bp, Artificial Sequence
  Synthetic
caaatagaaggagagcuaccacaaacut

SEQ ID NO: 98452 - DNA, 20 bp, Artificial Sequence
  Synthetic
ggcuactcuggcgcagaaat

SEQ ID NO: 98453 - DNA, 28 bp, Artificial Sequence
  Synthetic
gccagagatgutaacagagtaaagucaa

SEQ ID NO: 98454 - DNA, 21 bp, Artificial Sequence
  Synthetic
gctggcagucctgtttgctua

SEQ ID NO: 98455 - DNA, 28 bp, Artificial Sequence
  Synthetic
ccttctacctuccccttactttttagut

SEQ ID NO: 98456 - DNA, 20 bp, Artificial Sequence
  Synthetic
ccacccugacttgtctguct

SEQ ID NO: 98457 - DNA, 18 bp, Artificial Sequence
  Synthetic
gaccuggccaccauggaa

SEQ ID NO: 98458 - DNA, 17 bp, Artificial Sequence
  Synthetic
tuccaccauccgcagca

SEQ ID NO: 98459 - DNA, 21 bp, Artificial Sequence
  Synthetic
ggtcagctuggtgaagaggut

SEQ ID NO: 98460 - DNA, 18 bp, Artificial Sequence
  Synthetic
cccacacuggcccaugag

SEQ ID NO: 98461 - DNA, 21 bp, Artificial Sequence
  Synthetic
gagcagaguggaagacaggut

SEQ ID NO: 98462 - DNA, 23 bp, Artificial Sequence
  Synthetic
agcaatctgcccutttctgtcut

SEQ ID NO: 98463 - DNA, 20 bp, Artificial Sequence
  Synthetic
ctcacaggcuccacactcug

SEQ ID NO: 98464 - DNA, 20 bp, Artificial Sequence
  Synthetic
cgaauagccaggcugacaca

SEQ ID NO: 98465 - DNA, 21 bp, Artificial Sequence
  Synthetic
gaggactgcuaggagctucaa

SEQ ID NO: 98466 - DNA, 21 bp, Artificial Sequence
  Synthetic
actgcugaccagtgaatcucc

SEQ ID NO: 98467 - DNA, 22 bp, Artificial Sequence
  Synthetic
gcagcuaggugcaaaacagagt

SEQ ID NO: 98468 - DNA, 19 bp, Artificial Sequence
  Synthetic
cttctggaccgcutgggua

SEQ ID NO: 98469 - DNA, 26 bp, Artificial Sequence
  Synthetic
acaccaatgatgugtgattgtctcut

SEQ ID NO: 98470 - DNA, 26 bp, Artificial Sequence
  Synthetic
agcttgacaaccutttagtgauccat

SEQ ID NO: 98471 - DNA, 25 bp, Artificial Sequence
  Synthetic
atgttgtctugcacatactttgcug

SEQ ID NO: 98472 - DNA, 23 bp, Artificial Sequence
  Synthetic
ttctcaagagaugctcctgtugg

SEQ ID NO: 98473 - DNA, 20 bp, Artificial Sequence
  Synthetic
cuacccgactuaggcacgat

SEQ ID NO: 98474 - DNA, 19 bp, Artificial Sequence
  Synthetic
cctccuaagggagcugggt

SEQ ID NO: 98475 - DNA, 18 bp, Artificial Sequence
  Synthetic
aggguccctgccugaaga

SEQ ID NO: 98476 - DNA, 20 bp, Artificial Sequence
  Synthetic
cctgggcaugaatggacugt

SEQ ID NO: 98477 - DNA, 23 bp, Artificial Sequence
  Synthetic
agtgctauccggaagaaaagcug

SEQ ID NO: 98478 - DNA, 22 bp, Artificial Sequence
  Synthetic
gcccauggaagcatgtctcaut

SEQ ID NO: 98479 - DNA, 22 bp, Artificial Sequence
  Synthetic
gtcataggaugtgcccuggaag

SEQ ID NO: 98480 - DNA, 20 bp, Artificial Sequence
  Synthetic
aaggacagcccugcaagtut

SEQ ID NO: 98481 - DNA, 22 bp, Artificial Sequence
  Synthetic
cagggcagaagccauacttcut

SEQ ID NO: 98482 - DNA, 20 bp, Artificial Sequence
  Synthetic
cgtggugcggctcatgttua

SEQ ID NO: 98483 - DNA, 20 bp, Artificial Sequence
  Synthetic
gcccccugttggaagugaag

SEQ ID NO: 98484 - DNA, 24 bp, Artificial Sequence
  Synthetic
acaagugaagccagattcccuaga

SEQ ID NO: 98485 - DNA, 22 bp, Artificial Sequence
  Synthetic
cccttauacacgcctctgucat

SEQ ID NO: 98486 - DNA, 20 bp, Artificial Sequence
  Synthetic
gcaccacugaggacuacgac

SEQ ID NO: 98487 - DNA, 22 bp, Artificial Sequence
  Synthetic
agatgtctuagcacccctguct

SEQ ID NO: 98488 - DNA, 23 bp, Artificial Sequence
  Synthetic
gaatgtgucccgaatugggaaga

SEQ ID NO: 98489 - DNA, 21 bp, Artificial Sequence
  Synthetic
ggttuccgtttgaucccaagg

SEQ ID NO: 98490 - DNA, 20 bp, Artificial Sequence
  Synthetic
ctcgccucagttgccatcua

SEQ ID NO: 98491 - DNA, 17 bp, Artificial Sequence
  Synthetic
caggaacggcuguggct

SEQ ID NO: 98492 - DNA, 18 bp, Artificial Sequence
  Synthetic
ccctccugaggcccugat

SEQ ID NO: 98493 - DNA, 19 bp, Artificial Sequence
  Synthetic
gctggcagaccuccactuc

SEQ ID NO: 98494 - DNA, 17 bp, Artificial Sequence
  Synthetic
gagccccugtcccacut

SEQ ID NO: 98495 - DNA, 17 bp, Artificial Sequence
  Synthetic
ggaccguggtggcucag

SEQ ID NO: 98496 - DNA, 18 bp, Artificial Sequence
  Synthetic
cacccgcaucuccaacga

SEQ ID NO: 98497 - DNA, 21 bp, Artificial Sequence
  Synthetic
ggacaaucttugcccccaaat

SEQ ID NO: 98498 - DNA, 25 bp, Artificial Sequence
  Synthetic
aguatttgaaacacuggaagcacga

SEQ ID NO: 98499 - DNA, 24 bp, Artificial Sequence
  Synthetic
caaggccaggaaaaugatgctuac

SEQ ID NO: 98500 - DNA, 22 bp, Artificial Sequence
  Synthetic
ggttccttcugacacctgtcut

SEQ ID NO: 98501 - DNA, 19 bp, Artificial Sequence
  Synthetic
caggatggcuctcccugac

SEQ ID NO: 98502 - DNA, 18 bp, Artificial Sequence
  Synthetic
gggcacgcutacugacac

SEQ ID NO: 98503 - DNA, 19 bp, Artificial Sequence
  Synthetic
gacgtcgcucaccaacgua

SEQ ID NO: 98504 - DNA, 19 bp, Artificial Sequence
  Synthetic
gtcagcagaucccaguggt

SEQ ID NO: 98505 - DNA, 18 bp, Artificial Sequence
  Synthetic
ggcccuggctcttctgua

SEQ ID NO: 98506 - DNA, 23 bp, Artificial Sequence
  Synthetic
aauccagacagcagaatgucgaa

SEQ ID NO: 98507 - DNA, 26 bp, Artificial Sequence
  Synthetic
tctctcatatccugtgtctcctucag

SEQ ID NO: 98508 - DNA, 23 bp, Artificial Sequence
  Synthetic
tcagtgaaggutgatttgcccut

SEQ ID NO: 98509 - DNA, 22 bp, Artificial Sequence
  Synthetic
tctacccacccautccttucca

SEQ ID NO: 98510 - DNA, 21 bp, Artificial Sequence
  Synthetic
tcagucccagagccaggttua

SEQ ID NO: 98511 - DNA, 21 bp, Artificial Sequence
  Synthetic
ctccctttuccgacctuccag

SEQ ID NO: 98512 - DNA, 26 bp, Artificial Sequence
  Synthetic
tcccttcgaugtataacgatttcugg

SEQ ID NO: 98513 - DNA, 28 bp, Artificial Sequence
  Synthetic
ctccctttaaaugacagtgtggagauaa

SEQ ID NO: 98514 - DNA, 21 bp, Artificial Sequence
  Synthetic
ggagattgccucaagctgcua

SEQ ID NO: 98515 - DNA, 24 bp, Artificial Sequence
  Synthetic
attttcccaagagucatccagguc

SEQ ID NO: 98516 - DNA, 22 bp, Artificial Sequence
  Synthetic
caaagauggcaaactugcccat

SEQ ID NO: 98517 - DNA, 26 bp, Artificial Sequence
  Synthetic
ggcatcattuatttcatctcgugcaa

SEQ ID NO: 98518 - DNA, 23 bp, Artificial Sequence
  Synthetic
acattatggucaccatgggctut

SEQ ID NO: 98519 - DNA, 27 bp, Artificial Sequence
  Synthetic
aggtgaaaaactuacttcaggtggtut

SEQ ID NO: 98520 - DNA, 28 bp, Artificial Sequence
  Synthetic
gcacgagatgaaauaaatgatgcctuaa

SEQ ID NO: 98521 - DNA, 33 bp, Artificial Sequence
  Synthetic
tattagctcaagaaauaattcacagtaatcuga

SEQ ID NO: 98522 - DNA, 27 bp, Artificial Sequence
  Synthetic
tctgtggattttuctcaaagtcagcut

SEQ ID NO: 98523 - DNA, 28 bp, Artificial Sequence
  Synthetic
ggtcctttcacagacauatgtattccut

SEQ ID NO: 98524 - DNA, 19 bp, Artificial Sequence
  Synthetic
ggtgggaagccuggctuag

SEQ ID NO: 98525 - DNA, 20 bp, Artificial Sequence
  Synthetic
cutgauggagagcgggaaga

SEQ ID NO: 98526 - DNA, 22 bp, Artificial Sequence
  Synthetic
attctggagguagcauggcaag

SEQ ID NO: 98527 - DNA, 21 bp, Artificial Sequence
  Synthetic
tucagcaagggcacuaacaca

SEQ ID NO: 98528 - DNA, 20 bp, Artificial Sequence
  Synthetic
cgtccttccucctcctcuca

SEQ ID NO: 98529 - DNA, 19 bp, Artificial Sequence
  Synthetic
ctcggtgcuggcttctcut

SEQ ID NO: 98530 - DNA, 18 bp, Artificial Sequence
  Synthetic
gtcacacugtggguggca

SEQ ID NO: 98531 - DNA, 18 bp, Artificial Sequence
  Synthetic
gggugugagggcagaagt

SEQ ID NO: 98532 - DNA, 17 bp, Artificial Sequence
  Synthetic
caucgcaggccccauct

SEQ ID NO: 98533 - DNA, 21 bp, Artificial Sequence
  Synthetic
cctcccuccccatgcctauac

SEQ ID NO: 98534 - DNA, 20 bp, Artificial Sequence
  Synthetic
gtctcugagcagctgccaut

SEQ ID NO: 98535 - DNA, 18 bp, Artificial Sequence
  Synthetic
caucacugccaccacgga

SEQ ID NO: 98536 - DNA, 24 bp, Artificial Sequence
  Synthetic
gtggagaactutgagcctctcuat

SEQ ID NO: 98537 - DNA, 22 bp, Artificial Sequence
  Synthetic
attcctgaaccuctgacuccct

SEQ ID NO: 98538 - DNA, 18 bp, Artificial Sequence
  Synthetic
ccagggagcgcuacgaug

SEQ ID NO: 98539 - DNA, 22 bp, Artificial Sequence
  Synthetic
ctgccaacuctttgtccgttut

SEQ ID NO: 98540 - DNA, 20 bp, Artificial Sequence
  Synthetic
ccgtcgcccaucatcaagut

SEQ ID NO: 98541 - DNA, 21 bp, Artificial Sequence
  Synthetic
gagagacacccccauccttug

SEQ ID NO: 98542 - DNA, 23 bp, Artificial Sequence
  Synthetic
tcctgatacccuctacccccaua

SEQ ID NO: 98543 - DNA, 21 bp, Artificial Sequence
  Synthetic
ggtagcttucactgcgtgugt

SEQ ID NO: 98544 - DNA, 29 bp, Artificial Sequence
  Synthetic
cccataccttcaaauattagagcaaccua

SEQ ID NO: 98545 - DNA, 28 bp, Artificial Sequence
  Synthetic
gctgttacataauttgtcaggttgtuga

SEQ ID NO: 98546 - DNA, 21 bp, Artificial Sequence
  Synthetic
ccaggttcucctcacagctug

SEQ ID NO: 98547 - DNA, 20 bp, Artificial Sequence
  Synthetic
ctgggacugctccgaagaug

SEQ ID NO: 98548 - DNA, 19 bp, Artificial Sequence
  Synthetic
tgggccuaacgggttucac

SEQ ID NO: 98549 - DNA, 23 bp, Artificial Sequence
  Synthetic
cctgguggacatcgtuaaaggaa

SEQ ID NO: 98550 - DNA, 21 bp, Artificial Sequence
  Synthetic
cctgggtcucacactcaucca

SEQ ID NO: 98551 - DNA, 20 bp, Artificial Sequence
  Synthetic
gccacauccaugacacccat

SEQ ID NO: 98552 - DNA, 23 bp, Artificial Sequence
  Synthetic
ctgcagctugtagtaggagtugg

SEQ ID NO: 98553 - DNA, 21 bp, Artificial Sequence
  Synthetic
cccttctccgugagagtgcua

SEQ ID NO: 98554 - DNA, 21 bp, Artificial Sequence
  Synthetic
cutccctaugccaggcagaaa

SEQ ID NO: 98555 - DNA, 25 bp, Artificial Sequence
  Synthetic
caggtaauaggcaccctugaagaag

SEQ ID NO: 98556 - DNA, 24 bp, Artificial Sequence
  Synthetic
tttctctaucccaggtcacagcua

SEQ ID NO: 98557 - DNA, 22 bp, Artificial Sequence
  Synthetic
gtgtaucgaaggcaguggagag

SEQ ID NO: 98558 - DNA, 24 bp, Artificial Sequence
  Synthetic
aaagagcaaaggaagucagtgugt

SEQ ID NO: 98559 - DNA, 22 bp, Artificial Sequence
  Synthetic
ggaaagaguccgcccactttua

SEQ ID NO: 98560 - DNA, 23 bp, Artificial Sequence
  Synthetic
cagattucagggacgatcgtuga

SEQ ID NO: 98561 - DNA, 24 bp, Artificial Sequence
  Synthetic
ccaucagaaaaggtuccccaaaaa

SEQ ID NO: 98562 - DNA, 22 bp, Artificial Sequence
  Synthetic
cctgtggccuctgtgtgattut

SEQ ID NO: 98563 - DNA, 27 bp, Artificial Sequence
  Synthetic
gactaatgctatugacaatgcactucc

SEQ ID NO: 98564 - DNA, 21 bp, Artificial Sequence
  Synthetic
gctgcagggugactgaagaug

SEQ ID NO: 98565 - DNA, 20 bp, Artificial Sequence
  Synthetic
ggcctcguataccgcaucaa

SEQ ID NO: 98566 - DNA, 19 bp, Artificial Sequence
  Synthetic
ccugagcucccggaaaaga

SEQ ID NO: 98567 - DNA, 24 bp, Artificial Sequence
  Synthetic
gcataggaacugtggttugagagg

SEQ ID NO: 98568 - DNA, 21 bp, Artificial Sequence
  Synthetic
ctgggtuaaagtgcugccaag

SEQ ID NO: 98569 - DNA, 25 bp, Artificial Sequence
  Synthetic
caauggatuaggccaaaagaaacca

SEQ ID NO: 98570 - DNA, 21 bp, Artificial Sequence
  Synthetic
ccatgttgcuggagagucaga

SEQ ID NO: 98571 - DNA, 23 bp, Artificial Sequence
  Synthetic
tgggcaugcaggtggatatttut

SEQ ID NO: 98572 - DNA, 27 bp, Artificial Sequence
  Synthetic
gttattgttcagutggtcacaaaugga

SEQ ID NO: 98573 - DNA, 26 bp, Artificial Sequence
  Synthetic
ccacagcatcauatacccctactuac

SEQ ID NO: 98574 - DNA, 18 bp, Artificial Sequence
  Synthetic
gggugcagaagagccuca

SEQ ID NO: 98575 - DNA, 17 bp, Artificial Sequence
  Synthetic
ggcgguggtagguggaa

SEQ ID NO: 98576 - DNA, 22 bp, Artificial Sequence
  Synthetic
agtggtcttuctgtggctagug

SEQ ID NO: 98577 - DNA, 25 bp, Artificial Sequence
  Synthetic
cgaaactauccgaaaaatugggcat

SEQ ID NO: 98578 - DNA, 22 bp, Artificial Sequence
  Synthetic
gcagaggaaacgucagaagcuc

SEQ ID NO: 98579 - DNA, 23 bp, Artificial Sequence
  Synthetic
ttgtaccuggacctgtactucca

SEQ ID NO: 98580 - DNA, 26 bp, Artificial Sequence
  Synthetic
ggaaaugaatactgaguagccaggaa

SEQ ID NO: 98581 - DNA, 26 bp, Artificial Sequence
  Synthetic
acttgaaaaacuggatctgcugaagt

SEQ ID NO: 98582 - DNA, 20 bp, Artificial Sequence
  Synthetic
gcggaggcaugtttgguagt

SEQ ID NO: 98583 - DNA, 33 bp, Artificial Sequence
  Synthetic
aatatactcaataataucatagccactcaacuc

SEQ ID NO: 98584 - DNA, 24 bp, Artificial Sequence
  Synthetic
aaggaggaaagccaaguatctgug

SEQ ID NO: 98585 - DNA, 28 bp, Artificial Sequence
  Synthetic
catcctgacaauattactgtgcugagaa

SEQ ID NO: 98586 - DNA, 27 bp, Artificial Sequence
  Synthetic
gcaaggtacutaatgtttctuggcaaa

SEQ ID NO: 98587 - DNA, 28 bp, Artificial Sequence
  Synthetic
ccacagatatgtucttcctcaatgcaua

SEQ ID NO: 98588 - DNA, 25 bp, Artificial Sequence
  Synthetic
ttctcatctuttgcaggtugaggat

SEQ ID NO: 98589 - DNA, 27 bp, Artificial Sequence
  Synthetic
ccctaggttguatttccttgaggauca

SEQ ID NO: 98590 - DNA, 21 bp, Artificial Sequence
  Synthetic
tcugtctcctguaccccaaca

SEQ ID NO: 98591 - DNA, 20 bp, Artificial Sequence
  Synthetic
gcggttagagutctgccgut

SEQ ID NO: 98592 - DNA, 21 bp, Artificial Sequence
  Synthetic
gggttacccucgatccctcua

SEQ ID NO: 98593 - DNA, 21 bp, Artificial Sequence
  Synthetic
acacacaggucagacaugcag

SEQ ID NO: 98594 - DNA, 29 bp, Artificial Sequence
  Synthetic
agcataaggaaugtgtttaatgaguagca

SEQ ID NO: 98595 - DNA, 20 bp, Artificial Sequence
  Synthetic
tccuccgaagcuggacaaac

SEQ ID NO: 98596 - DNA, 27 bp, Artificial Sequence
  Synthetic
gccattgtctucaaaactccaaaguat

SEQ ID NO: 98597 - DNA, 28 bp, Artificial Sequence
  Synthetic
aacaactgacutacctttgattucagga

SEQ ID NO: 98598 - DNA, 18 bp, Artificial Sequence
  Synthetic
gggcttguggcacctuga

SEQ ID NO: 98599 - DNA, 18 bp, Artificial Sequence
  Synthetic
aggaagggucaggugggt

SEQ ID NO: 98600 - DNA, 26 bp, Artificial Sequence
  Synthetic
cagactgtcatuatcctgttctgugt

SEQ ID NO: 98601 - DNA, 25 bp, Artificial Sequence
  Synthetic
cttatctcctcutgtcctctgctug

SEQ ID NO: 98602 - DNA, 22 bp, Artificial Sequence
  Synthetic
tttcctcccuctgccctctuaa

SEQ ID NO: 98603 - DNA, 25 bp, Artificial Sequence
  Synthetic
gctgaagaaaagcuaggaggaacuc

SEQ ID NO: 98604 - DNA, 21 bp, Artificial Sequence
  Synthetic
ggctgcuctctcctgauaggt

SEQ ID NO: 98605 - DNA, 21 bp, Artificial Sequence
  Synthetic
cccuagaccagcagctgttug

SEQ ID NO: 98606 - DNA, 23 bp, Artificial Sequence
  Synthetic
agcccucagaaagcatttuaggt

SEQ ID NO: 98607 - DNA, 27 bp, Artificial Sequence
  Synthetic
aacctcagaatccuttcttcctgaauc

SEQ ID NO: 98608 - DNA, 21 bp, Artificial Sequence
  Synthetic
ctacccucagagucagggaca

SEQ ID NO: 98609 - DNA, 21 bp, Artificial Sequence
  Synthetic
tgugagaaaggcugcaacact

SEQ ID NO: 98610 - DNA, 20 bp, Artificial Sequence
  Synthetic
atcttcaggccugcagucac

SEQ ID NO: 98611 - DNA, 26 bp, Artificial Sequence
  Synthetic
tctagggugaagaaaagagtcaggut

SEQ ID NO: 98612 - DNA, 31 bp, Artificial Sequence
  Synthetic
tcttaaagcatautcaatctgtgcuaacagt

SEQ ID NO: 98613 - DNA, 27 bp, Artificial Sequence
  Synthetic
caaagagaactuttcaatcacccucat

SEQ ID NO: 98614 - DNA, 24 bp, Artificial Sequence
  Synthetic
caagtcgagcutctgagatucgat

SEQ ID NO: 98615 - DNA, 26 bp, Artificial Sequence
  Synthetic
ggguaaaccaggaatatucagagagg

SEQ ID NO: 98616 - DNA, 28 bp, Artificial Sequence
  Synthetic
ttcctttttcttucatcttcctcacugt

SEQ ID NO: 98617 - DNA, 28 bp, Artificial Sequence
  Synthetic
ccatttcctuggcaacaaaaatcattuc

SEQ ID NO: 98618 - DNA, 22 bp, Artificial Sequence
  Synthetic
actcatcacuccttcccuggat

SEQ ID NO: 98619 - DNA, 27 bp, Artificial Sequence
  Synthetic
tttgaagugaggacaaagctcatuagt

SEQ ID NO: 98620 - DNA, 20 bp, Artificial Sequence
  Synthetic
cgguacccccactcucacaa

SEQ ID NO: 98621 - DNA, 24 bp, Artificial Sequence
  Synthetic
gcccaaagcaaacauccatgatua

SEQ ID NO: 98622 - DNA, 27 bp, Artificial Sequence
  Synthetic
gatggaagttaaaguttctgggaguct

SEQ ID NO: 98623 - DNA, 22 bp, Artificial Sequence
  Synthetic
ttcgttgtacutctggctgguc

SEQ ID NO: 98624 - DNA, 25 bp, Artificial Sequence
  Synthetic
cacgggaagaaaucaaagagtccut

SEQ ID NO: 98625 - DNA, 22 bp, Artificial Sequence
  Synthetic
cgagaggaugacagaugaggct

SEQ ID NO: 98626 - DNA, 32 bp, Artificial Sequence
  Synthetic
aatgtcttcaagtugtctacaataaagtttut

SEQ ID NO: 98627 - DNA, 26 bp, Artificial Sequence
  Synthetic
tgagactcaaugatggcauaccaaag

SEQ ID NO: 98628 - DNA, 28 bp, Artificial Sequence
  Synthetic
agctacataaacuacacacacacatcug

SEQ ID NO: 98629 - DNA, 26 bp, Artificial Sequence
  Synthetic
cttaatttcutaacagctucggcagt

SEQ ID NO: 98630 - DNA, 19 bp, Artificial Sequence
  Synthetic
gcagggucccgcgaatuag

SEQ ID NO: 98631 - DNA, 23 bp, Artificial Sequence
  Synthetic
cccaggucctcaacttugaagag

SEQ ID NO: 98632 - DNA, 25 bp, Artificial Sequence
  Synthetic
ttttcttagautgctgcuggacact

SEQ ID NO: 98633 - DNA, 28 bp, Artificial Sequence
  Synthetic
gcatctgauagagaaggtaggacatuct

SEQ ID NO: 98634 - DNA, 27 bp, Artificial Sequence
  Synthetic
gcttaggtaugtttctcaaugagcact

SEQ ID NO: 98635 - DNA, 27 bp, Artificial Sequence
  Synthetic
catttcggccautttgctttaagguat

SEQ ID NO: 98636 - DNA, 23 bp, Artificial Sequence
  Synthetic
acctcgatcuccttgtagucgat

SEQ ID NO: 98637 - DNA, 18 bp, Artificial Sequence
  Synthetic
gggtcucacccggatugt

SEQ ID NO: 98638 - DNA, 26 bp, Artificial Sequence
  Synthetic
tgccttctgcutatctttttcctcut

SEQ ID NO: 98639 - DNA, 20 bp, Artificial Sequence
  Synthetic
tccctcuccacgacatccut

SEQ ID NO: 98640 - DNA, 23 bp, Artificial Sequence
  Synthetic
actgactcccutacagttcucca

SEQ ID NO: 98641 - DNA, 24 bp, Artificial Sequence
  Synthetic
ctagtggcgagcuggattcuaaat

SEQ ID NO: 98642 - DNA, 23 bp, Artificial Sequence
  Synthetic
tgcccttugggcttctctauact

SEQ ID NO: 98643 - DNA, 28 bp, Artificial Sequence
  Synthetic
gcacctgtctaaautaatcttgggttuc

SEQ ID NO: 98644 - DNA, 21 bp, Artificial Sequence
  Synthetic
gcagtcagugcagtgcaagua

SEQ ID NO: 98645 - DNA, 25 bp, Artificial Sequence
  Synthetic
tgaagacacaucatugacagacgac

SEQ ID NO: 98646 - DNA, 21 bp, Artificial Sequence
  Synthetic
cacttccugctgagauggcaa

SEQ ID NO: 98647 - DNA, 22 bp, Artificial Sequence
  Synthetic
ccagcgcaagcutaaagacauc

SEQ ID NO: 98648 - DNA, 23 bp, Artificial Sequence
  Synthetic
cgcaaagutgtaaaagcucagca

SEQ ID NO: 98649 - DNA, 24 bp, Artificial Sequence
  Synthetic
gctggtgtacuccactatttcugt

SEQ ID NO: 98650 - DNA, 21 bp, Artificial Sequence
  Synthetic
gcactauccagctgtcugcaa

SEQ ID NO: 98651 - DNA, 28 bp, Artificial Sequence
  Synthetic
ctaatatucccggccaaaaagaaaugaa

SEQ ID NO: 98652 - DNA, 27 bp, Artificial Sequence
  Synthetic
tggtgtggaaugtctagtattcucaca

SEQ ID NO: 98653 - DNA, 28 bp, Artificial Sequence
  Synthetic
gcttctccttauttagagtgaacuggat

SEQ ID NO: 98654 - DNA, 25 bp, Artificial Sequence
  Synthetic
ccaagtgatucagatggagcuagat

SEQ ID NO: 98655 - DNA, 28 bp, Artificial Sequence
  Synthetic
gacgatagtttctuctactaacccgaug

SEQ ID NO: 98656 - DNA, 22 bp, Artificial Sequence
  Synthetic
tccaccucagacggaaattgug

SEQ ID NO: 98657 - DNA, 29 bp, Artificial Sequence
  Synthetic
ctctggcttaatauctctgtgaatcacut

SEQ ID NO: 98658 - DNA, 21 bp, Artificial Sequence
  Synthetic
gtgctggutgtctcatuacgg

SEQ ID NO: 98659 - DNA, 22 bp, Artificial Sequence
  Synthetic
aaatcacacgcaccutcctuct

SEQ ID NO: 98660 - DNA, 24 bp, Artificial Sequence
  Synthetic
ctctggttucagtgtcatgtguct

SEQ ID NO: 98661 - DNA, 19 bp, Artificial Sequence
  Synthetic
gaagtggugcagccacuct

SEQ ID NO: 98662 - DNA, 20 bp, Artificial Sequence
  Synthetic
caagaccagcggcuaaucca

SEQ ID NO: 98663 - DNA, 27 bp, Artificial Sequence
  Synthetic
gatccacacaucagacattcatctcua

SEQ ID NO: 98664 - DNA, 22 bp, Artificial Sequence
  Synthetic
ccatcaaaugcagcaacctgug

SEQ ID NO: 98665 - DNA, 27 bp, Artificial Sequence
  Synthetic
cttacaactaugcaaactccctucact

SEQ ID NO: 98666 - DNA, 22 bp, Artificial Sequence
  Synthetic
cagccaggaacaugagctctua

SEQ ID NO: 98667 - DNA, 27 bp, Artificial Sequence
  Synthetic
tctcactacugcaaaacctttctctut

SEQ ID NO: 98668 - DNA, 20 bp, Artificial Sequence
  Synthetic
ccatggatugaggcctcugg

SEQ ID NO: 98669 - DNA, 27 bp, Artificial Sequence
  Synthetic
caaaacaagagcacagutgaaacauct

SEQ ID NO: 98670 - DNA, 23 bp, Artificial Sequence
  Synthetic
ggctctcagcauccatcatcauc

SEQ ID NO: 98671 - DNA, 20 bp, Artificial Sequence
  Synthetic
gactaaccgacuccccaucc

SEQ ID NO: 98672 - DNA, 22 bp, Artificial Sequence
  Synthetic
ctgaccuactgccaugacaaga

SEQ ID NO: 98673 - DNA, 23 bp, Artificial Sequence
  Synthetic
gtactcagaacucacccuaccac

SEQ ID NO: 98674 - DNA, 24 bp, Artificial Sequence
  Synthetic
ccaguacaaggactctttcugcat

SEQ ID NO: 98675 - DNA, 23 bp, Artificial Sequence
  Synthetic
tcctcacauccctgatctcaucc

SEQ ID NO: 98676 - DNA, 22 bp, Artificial Sequence
  Synthetic
ccatggugtgctcttuggagaa

SEQ ID NO: 98677 - DNA, 29 bp, Artificial Sequence
  Synthetic
cccactauacctatctatgcucaagaagt

SEQ ID NO: 98678 - DNA, 23 bp, Artificial Sequence
  Synthetic
ctctgcccutcacucaacaaaga

SEQ ID NO: 98679 - DNA, 24 bp, Artificial Sequence
  Synthetic
gtgctttgcugaattttggcaaut

SEQ ID NO: 98680 - DNA, 26 bp, Artificial Sequence
  Synthetic
tccctgatucaacgacatagaguaca

SEQ ID NO: 98681 - DNA, 27 bp, Artificial Sequence
  Synthetic
attcttggcaacutaaaattucacgct

SEQ ID NO: 98682 - DNA, 28 bp, Artificial Sequence
  Synthetic
aatagcacagacugaagcatcttuagag

SEQ ID NO: 98683 - DNA, 26 bp, Artificial Sequence
  Synthetic
atttggttagctutcatccccatcut

SEQ ID NO: 98684 - DNA, 25 bp, Artificial Sequence
  Synthetic
gatatttcccccaagugacacagua

SEQ ID NO: 98685 - DNA, 22 bp, Artificial Sequence
  Synthetic
gcatctgauggctccataccug

SEQ ID NO: 98686 - DNA, 21 bp, Artificial Sequence
  Synthetic
gctgacugggctguaccaaaa

SEQ ID NO: 98687 - DNA, 26 bp, Artificial Sequence
  Synthetic
atggtcactugtactgtttaugccat

SEQ ID NO: 98688 - DNA, 21 bp, Artificial Sequence
  Synthetic
cugaggtucagccagcaaaga

SEQ ID NO: 98689 - DNA, 21 bp, Artificial Sequence
  Synthetic
tgtccttucaatggccuccac

SEQ ID NO: 98690 - DNA, 21 bp, Artificial Sequence
  Synthetic
gautgugaaagacgccacgac

SEQ ID NO: 98691 - DNA, 23 bp, Artificial Sequence
  Synthetic
agccautagacugggaaaaagca

SEQ ID NO: 98692 - DNA, 22 bp, Artificial Sequence
  Synthetic
ccagugggcaaaaggaaaucca

SEQ ID NO: 98693 - DNA, 29 bp, Artificial Sequence
  Synthetic
ggctgatggtugttttgctatgtttuaat

SEQ ID NO: 98694 - DNA, 20 bp, Artificial Sequence
  Synthetic
gctcccccucttctggugaa

SEQ ID NO: 98695 - DNA, 20 bp, Artificial Sequence
  Synthetic
ctgtttccgugcagcaugag

SEQ ID NO: 98696 - DNA, 25 bp, Artificial Sequence
  Synthetic
atttcctctuggaagggatucaaca

SEQ ID NO: 98697 - DNA, 20 bp, Artificial Sequence
  Synthetic
ccugcacccagactacaucc

SEQ ID NO: 98698 - DNA, 24 bp, Artificial Sequence
  Synthetic
atgtacattutccccatuccccat

SEQ ID NO: 98699 - DNA, 26 bp, Artificial Sequence
  Synthetic
gtcaagcaaaccuggaacacaatuac

SEQ ID NO: 98700 - DNA, 23 bp, Artificial Sequence
  Synthetic
tctctgggacaccuctcgtttua

SEQ ID NO: 98701 - DNA, 25 bp, Artificial Sequence
  Synthetic
ccccacaucatcattgactauggag

SEQ ID NO: 98702 - DNA, 23 bp, Artificial Sequence
  Synthetic
cttaccacauccaccuggacaag

SEQ ID NO: 98703 - DNA, 25 bp, Artificial Sequence
  Synthetic
tcttgaagagacugagacctcucaa

SEQ ID NO: 98704 - DNA, 22 bp, Artificial Sequence
  Synthetic
aatacuggagcggauggcaaat

SEQ ID NO: 98705 - DNA, 26 bp, Artificial Sequence
  Synthetic
acagcatguttgggaaaauaacaacc

SEQ ID NO: 98706 - DNA, 28 bp, Artificial Sequence
  Synthetic
acaaagtcagguaattcttguaaaccca

SEQ ID NO: 98707 - DNA, 24 bp, Artificial Sequence
  Synthetic
accttgcagaaugactacttugct

SEQ ID NO: 98708 - DNA, 26 bp, Artificial Sequence
  Synthetic
ttccctuaaccaagacaattuggaaa

SEQ ID NO: 98709 - DNA, 27 bp, Artificial Sequence
  Synthetic
gatgacaatugcattgctagcauagaa

SEQ ID NO: 98710 - DNA, 23 bp, Artificial Sequence
  Synthetic
gacaaggucactggttctugagt

SEQ ID NO: 98711 - DNA, 20 bp, Artificial Sequence
  Synthetic
ggagccugaggaugaaggag

SEQ ID NO: 98712 - DNA, 22 bp, Artificial Sequence
  Synthetic
gggtgacgacutcttgttugat

SEQ ID NO: 98713 - DNA, 23 bp, Artificial Sequence
  Synthetic
cccagcttcaucacagagtccua

SEQ ID NO: 98714 - DNA, 22 bp, Artificial Sequence
  Synthetic
ctggaatcaccutgctgtccut

SEQ ID NO: 98715 - DNA, 19 bp, Artificial Sequence
  Synthetic
cagtctcuggcctccccua

SEQ ID NO: 98716 - DNA, 20 bp, Artificial Sequence
  Synthetic
tggatctagugtccgcugct

SEQ ID NO: 98717 - DNA, 21 bp, Artificial Sequence
  Synthetic
cagcgcccaagutcattaguc

SEQ ID NO: 98718 - DNA, 20 bp, Artificial Sequence
  Synthetic
tgatgggauggagcgtcuga

SEQ ID NO: 98719 - DNA, 25 bp, Artificial Sequence
  Synthetic
ctcctctcttuacttgcaaacccut

SEQ ID NO: 98720 - DNA, 22 bp, Artificial Sequence
  Synthetic
catgccaaguccuaggaagacc

SEQ ID NO: 98721 - DNA, 22 bp, Artificial Sequence
  Synthetic
gatcgtgaccuttgtccgcuat

SEQ ID NO: 98722 - DNA, 21 bp, Artificial Sequence
  Synthetic
gtgaucaccagctgagaugct

SEQ ID NO: 98723 - DNA, 26 bp, Artificial Sequence
  Synthetic
cagatacaaucatatgctcctuccga

SEQ ID NO: 98724 - DNA, 20 bp, Artificial Sequence
  Synthetic
gccccaucaagcacatcuca

SEQ ID NO: 98725 - DNA, 28 bp, Artificial Sequence
  Synthetic
ctccctggaugaggatagaaaaatgaut

SEQ ID NO: 98726 - DNA, 29 bp, Artificial Sequence
  Synthetic
aaatattaccuagtccacaugccaaaagt

SEQ ID NO: 98727 - DNA, 24 bp, Artificial Sequence
  Synthetic
agcgtggguaaatacgatggttut

SEQ ID NO: 98728 - DNA, 23 bp, Artificial Sequence
  Synthetic
acataaccuccacctctctcugt

SEQ ID NO: 98729 - DNA, 26 bp, Artificial Sequence
  Synthetic
ctgaaaggtguagacttccagaagut

SEQ ID NO: 98730 - DNA, 28 bp, Artificial Sequence
  Synthetic
tccagttctcaautgtcctttaaaguca

SEQ ID NO: 98731 - DNA, 26 bp, Artificial Sequence
  Synthetic
aggacatgtgcaugtttacacctuaa

SEQ ID NO: 98732 - DNA, 27 bp, Artificial Sequence
  Synthetic
ggcactagaaacuggaaaaacuaaacc

SEQ ID NO: 98733 - DNA, 28 bp, Artificial Sequence
  Synthetic
tgttttcagagaaaguttcattgugcaa

SEQ ID NO: 98734 - DNA, 22 bp, Artificial Sequence
  Synthetic
cagcgaggccaugaagtuagat

SEQ ID NO: 98735 - DNA, 28 bp, Artificial Sequence
  Synthetic
cctaggccaaaaucatttttcagatgut

SEQ ID NO: 98736 - DNA, 20 bp, Artificial Sequence
  Synthetic
gautcacugcgcaaagcaca

SEQ ID NO: 98737 - DNA, 28 bp, Artificial Sequence
  Synthetic
gtttaatcaaacugaatgccgtgaagut

SEQ ID NO: 98738 - DNA, 22 bp, Artificial Sequence
  Synthetic
ccctcacgauaggtgtgtcaut

SEQ ID NO: 98739 - DNA, 21 bp, Artificial Sequence
  Synthetic
tgccagctuatccccatcauc

SEQ ID NO: 98740 - DNA, 27 bp, Artificial Sequence
  Synthetic
aggtagaaactuctcatccagguaaca

SEQ ID NO: 98741 - DNA, 22 bp, Artificial Sequence
  Synthetic
acaggcagcutcaaaagauggt

SEQ ID NO: 98742 - DNA, 25 bp, Artificial Sequence
  Synthetic
aggcttcucatagaacaguccagaa

SEQ ID NO: 98743 - DNA, 21 bp, Artificial Sequence
  Synthetic
gcaatgtgcccugggaattug

SEQ ID NO: 98744 - DNA, 30 bp, Artificial Sequence
  Synthetic
atgaagtatatuccaacagaagatgttuca

SEQ ID NO: 98745 - DNA, 28 bp, Artificial Sequence
  Synthetic
gttcttccagugacagacctaauaacaa

SEQ ID NO: 98746 - DNA, 29 bp, Artificial Sequence
  Synthetic
ccaacagaagaugtttcagguaaaacaaa

SEQ ID NO: 98747 - DNA, 24 bp, Artificial Sequence
  Synthetic
cgttcttctugcaacctccucaat

SEQ ID NO: 98748 - DNA, 22 bp, Artificial Sequence
  Synthetic
ctccttcccuttggctctgtut

SEQ ID NO: 98749 - DNA, 28 bp, Artificial Sequence
  Synthetic
gggagcaggugttattgattgataugat

SEQ ID NO: 98750 - DNA, 27 bp, Artificial Sequence
  Synthetic
gttattagguctgtcacuggaagaaca

SEQ ID NO: 98751 - DNA, 25 bp, Artificial Sequence
  Synthetic
gattataccccugcaaauagggcat

SEQ ID NO: 98752 - DNA, 21 bp, Artificial Sequence
  Synthetic
agggctgcuccattcauacag

SEQ ID NO: 98753 - DNA, 27 bp, Artificial Sequence
  Synthetic
tggatcttcatcugatctctttccuca

SEQ ID NO: 98754 - DNA, 19 bp, Artificial Sequence
  Synthetic
ccctgagcguctgggaauc

SEQ ID NO: 98755 - DNA, 20 bp, Artificial Sequence
  Synthetic
gtgcatcagcuccttgguct

SEQ ID NO: 98756 - DNA, 24 bp, Artificial Sequence
  Synthetic
ggaatgugccccttctcuaagaaa

SEQ ID NO: 98757 - DNA, 28 bp, Artificial Sequence
  Synthetic
ctttagatggcutcaagtgtucaacaat

SEQ ID NO: 98758 - DNA, 23 bp, Artificial Sequence
  Synthetic
cccagcacauagtcgggaatuac

SEQ ID NO: 98759 - DNA, 24 bp, Artificial Sequence
  Synthetic
tgtggttaucaagggtcatcccua

SEQ ID NO: 98760 - DNA, 22 bp, Artificial Sequence
  Synthetic
ggguggtgagagugagagagaa

SEQ ID NO: 98761 - DNA, 23 bp, Artificial Sequence
  Synthetic
tttacagtgtucccaaggagugg

SEQ ID NO: 98762 - DNA, 22 bp, Artificial Sequence
  Synthetic
gtcaagcugagctcucagaaga

SEQ ID NO: 98763 - DNA, 19 bp, Artificial Sequence
  Synthetic
gtgggaggaacccutgugg

SEQ ID NO: 98764 - DNA, 23 bp, Artificial Sequence
  Synthetic
gggaagcctutggcacagattua

SEQ ID NO: 98765 - DNA, 22 bp, Artificial Sequence
  Synthetic
gcaagacacutcccaguaagcc

SEQ ID NO: 98766 - DNA, 28 bp, Artificial Sequence
  Synthetic
cagagttaaaatacucccagcatacuga

SEQ ID NO: 98767 - DNA, 28 bp, Artificial Sequence
  Synthetic
gttttccctcuaagaatctgacgaaugt

SEQ ID NO: 98768 - DNA, 22 bp, Artificial Sequence
  Synthetic
agggagaaugccactccaatut

SEQ ID NO: 98769 - DNA, 24 bp, Artificial Sequence
  Synthetic
tgtgaaggtuacaactaccaggug

SEQ ID NO: 98770 - DNA, 23 bp, Artificial Sequence
  Synthetic
gggttgcaugctgtgaagauaag

SEQ ID NO: 98771 - DNA, 28 bp, Artificial Sequence
  Synthetic
gcttgcattcacautgtgtcttttgtua

SEQ ID NO: 98772 - DNA, 23 bp, Artificial Sequence
  Synthetic
caaagtucacaggacagctcauc

SEQ ID NO: 98773 - DNA, 22 bp, Artificial Sequence
  Synthetic
catgcagugggctcauagagaa

SEQ ID NO: 98774 - DNA, 23 bp, Artificial Sequence
  Synthetic
gcuggtaagtguagaggcagact

SEQ ID NO: 98775 - DNA, 27 bp, Artificial Sequence
  Synthetic
gccttttcctutttataggctcuggat

SEQ ID NO: 98776 - DNA, 29 bp, Artificial Sequence
  Synthetic
tcacagagtatcutaagtgcagaacuaca

SEQ ID NO: 98777 - DNA, 23 bp, Artificial Sequence
  Synthetic
aagaggagccuttggagttgtut

SEQ ID NO: 98778 - DNA, 22 bp, Artificial Sequence
  Synthetic
gtgagccutgctttctcugaag

SEQ ID NO: 98779 - DNA, 24 bp, Artificial Sequence
  Synthetic
ctttctggauctcaatggctucca

SEQ ID NO: 98780 - DNA, 26 bp, Artificial Sequence
  Synthetic
catcttttgctcuccacttagcttug

SEQ ID NO: 98781 - DNA, 27 bp, Artificial Sequence
  Synthetic
attgggctgatcuatttgattccgaut

SEQ ID NO: 98782 - DNA, 19 bp, Artificial Sequence
  Synthetic
cagacgccgggugagtaug

SEQ ID NO: 98783 - DNA, 25 bp, Artificial Sequence
  Synthetic
attacaaacccguggctaggatuag

SEQ ID NO: 98784 - DNA, 23 bp, Artificial Sequence
  Synthetic
ccactctgccugggtatcttcua

SEQ ID NO: 98785 - DNA, 21 bp, Artificial Sequence
  Synthetic
tggccttugtccacgaaugag

SEQ ID NO: 98786 - DNA, 21 bp, Artificial Sequence
  Synthetic
ggcuccaggcaggaaacuaac

SEQ ID NO: 98787 - DNA, 25 bp, Artificial Sequence
  Synthetic
gcccatgaacutgattatggcuacc

SEQ ID NO: 98788 - DNA, 26 bp, Artificial Sequence
  Synthetic
caagtagctcttucccatcaatggua

SEQ ID NO: 98789 - DNA, 27 bp, Artificial Sequence
  Synthetic
gaattgcucgggattcatcttaugaac

SEQ ID NO: 98790 - DNA, 22 bp, Artificial Sequence
  Synthetic
gagtggctgugctacatgttug

SEQ ID NO: 98791 - DNA, 21 bp, Artificial Sequence
  Synthetic
acagattctuccccagcgtut

SEQ ID NO: 98792 - DNA, 28 bp, Artificial Sequence
  Synthetic
tcaattacaaatuggacctttcctucct

SEQ ID NO: 98793 - DNA, 27 bp, Artificial Sequence
  Synthetic
tcgtgtctcautaagtgttccucaaat

SEQ ID NO: 98794 - DNA, 19 bp, Artificial Sequence
  Synthetic
gaagtccgggutcgagguc

SEQ ID NO: 98795 - DNA, 21 bp, Artificial Sequence
  Synthetic
gctacaccaaccuctcguaca

SEQ ID NO: 98796 - DNA, 19 bp, Artificial Sequence
  Synthetic
cgccgatguacgagaggut

SEQ ID NO: 98797 - DNA, 17 bp, Artificial Sequence
  Synthetic
ccgagcgucgagcucag

SEQ ID NO: 98798 - DNA, 19 bp, Artificial Sequence
  Synthetic
caccccgcaauctuggaca

SEQ ID NO: 98799 - DNA, 21 bp, Artificial Sequence
  Synthetic
gaacgcugatgacagcuacga

SEQ ID NO: 98800 - DNA, 22 bp, Artificial Sequence
  Synthetic
gcguagtacccugcaaaagact

SEQ ID NO: 98801 - DNA, 25 bp, Artificial Sequence
  Synthetic
aagcacaggaugtttttcuccaaac

SEQ ID NO: 98802 - DNA, 22 bp, Artificial Sequence
  Synthetic
cctggttucctgctctacugga

SEQ ID NO: 98803 - DNA, 20 bp, Artificial Sequence
  Synthetic
gctgagcacagugtcugcat

SEQ ID NO: 98804 - DNA, 26 bp, Artificial Sequence
  Synthetic
tgctctcugaaaatggttuccagaat

SEQ ID NO: 98805 - DNA, 23 bp, Artificial Sequence
  Synthetic
gaacaaaggtugccacacaguag

SEQ ID NO: 98806 - DNA, 28 bp, Artificial Sequence
  Synthetic
ctttacagacaugtaagtggtgcuaact

SEQ ID NO: 98807 - DNA, 28 bp, Artificial Sequence
  Synthetic
cgtcttggacautactaaaattgtguga

SEQ ID NO: 98808 - DNA, 27 bp, Artificial Sequence
  Synthetic
cagcaguggagagatttgtttatucct

SEQ ID NO: 98809 - DNA, 28 bp, Artificial Sequence
  Synthetic
ttctgcactaaauaaactcacctgtcuc

SEQ ID NO: 98810 - DNA, 25 bp, Artificial Sequence
  Synthetic
tggttgctgcuttgagaatcatcut

SEQ ID NO: 98811 - DNA, 21 bp, Artificial Sequence
  Synthetic
agaaagccucgagctcaucag

SEQ ID NO: 98812 - DNA, 24 bp, Artificial Sequence
  Synthetic
gggtctcaggutgtgtttattugg

SEQ ID NO: 98813 - DNA, 21 bp, Artificial Sequence
  Synthetic
cccctcgcuttcaccttucag

SEQ ID NO: 98814 - DNA, 28 bp, Artificial Sequence
  Synthetic
aggtacuggaggaaagtttauggaaaac

SEQ ID NO: 98815 - DNA, 26 bp, Artificial Sequence
  Synthetic
agtgtactuccctttgctguaaacaa

SEQ ID NO: 98816 - DNA, 27 bp, Artificial Sequence
  Synthetic
tgacattgttuacagcaaagggaagua

SEQ ID NO: 98817 - DNA, 28 bp, Artificial Sequence
  Synthetic
aggaaaaugtgatatucagagagagcaa

SEQ ID NO: 98818 - DNA, 21 bp, Artificial Sequence
  Synthetic
gctaccucccacccatucact

SEQ ID NO: 98819 - DNA, 21 bp, Artificial Sequence
  Synthetic
tcccccuaccttaccctucac

SEQ ID NO: 98820 - DNA, 20 bp, Artificial Sequence
  Synthetic
tgtggtuaccccagcaugag

SEQ ID NO: 98821 - DNA, 21 bp, Artificial Sequence
  Synthetic
aacgaguggcgaatgaucaca

SEQ ID NO: 98822 - DNA, 26 bp, Artificial Sequence
  Synthetic
tcacagactgtucttgcatatgagut

SEQ ID NO: 98823 - DNA, 28 bp, Artificial Sequence
  Synthetic
acagattatugaaaaggcagctgagaut

SEQ ID NO: 98824 - DNA, 26 bp, Artificial Sequence
  Synthetic
ctgacacatuagcactatcactgcut

SEQ ID NO: 98825 - DNA, 25 bp, Artificial Sequence
  Synthetic
agcatagcaaugccagatcttaugt

SEQ ID NO: 98826 - DNA, 21 bp, Artificial Sequence
  Synthetic
ccgcttcggauggtgttcaut

SEQ ID NO: 98827 - DNA, 23 bp, Artificial Sequence
  Synthetic
tcctcaatcguctcctttaugcc

SEQ ID NO: 98828 - DNA, 25 bp, Artificial Sequence
  Synthetic
gtcaaaatacugcattggcugaaca

SEQ ID NO: 98829 - DNA, 22 bp, Artificial Sequence
  Synthetic
gaacttugggagcccctaucat

SEQ ID NO: 98830 - DNA, 23 bp, Artificial Sequence
  Synthetic
ttgttcttugcacctctctcucc

SEQ ID NO: 98831 - DNA, 26 bp, Artificial Sequence
  Synthetic
ggctctcaaauacagtcagaggguat

SEQ ID NO: 98832 - DNA, 21 bp, Artificial Sequence
  Synthetic
cctccctugctagagcucact

SEQ ID NO: 98833 - DNA, 25 bp, Artificial Sequence
  Synthetic
aagttcgacauggaattggaugact

SEQ ID NO: 98834 - DNA, 27 bp, Artificial Sequence
  Synthetic
cctacagauaagagagcactuggagat

SEQ ID NO: 98835 - DNA, 24 bp, Artificial Sequence
  Synthetic
tggaattatguttcgacacuggct

SEQ ID NO: 98836 - DNA, 22 bp, Artificial Sequence
  Synthetic
cgagaggcaugagaaggttcut

SEQ ID NO: 98837 - DNA, 25 bp, Artificial Sequence
  Synthetic
gtcaauggaggagaaagtgugaact

SEQ ID NO: 98838 - DNA, 19 bp, Artificial Sequence
  Synthetic
gcggttugtcccgucaaag

SEQ ID NO: 98839 - DNA, 24 bp, Artificial Sequence
  Synthetic
tggccattguccccatttttctua

SEQ ID NO: 98840 - DNA, 25 bp, Artificial Sequence
  Synthetic
agttcttugagcttttcctuaggca

SEQ ID NO: 98841 - DNA, 27 bp, Artificial Sequence
  Synthetic
tgagcagtggucattttatgaaucagt

SEQ ID NO: 98842 - DNA, 23 bp, Artificial Sequence
  Synthetic
aaccttgcctutgtgtagagcut

SEQ ID NO: 98843 - DNA, 24 bp, Artificial Sequence
  Synthetic
tgtaatcaugccaacatccugacc

SEQ ID NO: 98844 - DNA, 27 bp, Artificial Sequence
  Synthetic
cggcgaagattuaaagagattgcctua

SEQ ID NO: 98845 - DNA, 27 bp, Artificial Sequence
  Synthetic
acagacaaacaugttcatttcucacct

SEQ ID NO: 98846 - DNA, 20 bp, Artificial Sequence
  Synthetic
actugcttgaagugcgaggt

SEQ ID NO: 98847 - DNA, 28 bp, Artificial Sequence
  Synthetic
cgtaggttgtgcaucagtaagctattut

SEQ ID NO: 98848 - DNA, 21 bp, Artificial Sequence
  Synthetic
gaaggttctuggatcgggcut

SEQ ID NO: 98849 - DNA, 28 bp, Artificial Sequence
  Synthetic
agccttggaaucctttctctagaacuat

SEQ ID NO: 98850 - DNA, 23 bp, Artificial Sequence
  Synthetic
agttgggagaccaugcaguaaag

SEQ ID NO: 98851 - DNA, 23 bp, Artificial Sequence
  Synthetic
ggattaaagcucaggtccaggut

SEQ ID NO: 98852 - DNA, 28 bp, Artificial Sequence
  Synthetic
aaaattttaccaugaggcttgtgugaaa

SEQ ID NO: 98853 - DNA, 20 bp, Artificial Sequence
  Synthetic
gcaucugaacccacagcaag

SEQ ID NO: 98854 - DNA, 23 bp, Artificial Sequence
  Synthetic
ctctcaccauagttccccucaga

SEQ ID NO: 98855 - DNA, 26 bp, Artificial Sequence
  Synthetic
cagagctaagugataacaccagguat

SEQ ID NO: 98856 - DNA, 18 bp, Artificial Sequence
  Synthetic
gcagccucaccccacuaa

SEQ ID NO: 98857 - DNA, 20 bp, Artificial Sequence
  Synthetic
agttcagcauccgcuaccag

SEQ ID NO: 98858 - DNA, 22 bp, Artificial Sequence
  Synthetic
caaccuccccttcucaaccaag

SEQ ID NO: 98859 - DNA, 28 bp, Artificial Sequence
  Synthetic
cttgtgcagtaugtaaaagtggatucat

SEQ ID NO: 98860 - DNA, 26 bp, Artificial Sequence
  Synthetic
gagcatacagtauttgtttggctgut

SEQ ID NO: 98861 - DNA, 26 bp, Artificial Sequence
  Synthetic
acctctgaaacaautgctgacatuca

SEQ ID NO: 98862 - DNA, 21 bp, Artificial Sequence
  Synthetic
agcagccacautgctactgut

SEQ ID NO: 98863 - DNA, 25 bp, Artificial Sequence
  Synthetic
tttttccttccaggaugttgcctua

SEQ ID NO: 98864 - DNA, 24 bp, Artificial Sequence
  Synthetic
cggaaccacucgagagaaaaaguc

SEQ ID NO: 98865 - DNA, 26 bp, Artificial Sequence
  Synthetic
atcattctucaagattcgtcaugggt

SEQ ID NO: 98866 - DNA, 19 bp, Artificial Sequence
  Synthetic
ccagcccugctucaaccaa

SEQ ID NO: 98867 - DNA, 18 bp, Artificial Sequence
  Synthetic
cagcagcuccaggtccuc

SEQ ID NO: 98868 - DNA, 17 bp, Artificial Sequence
  Synthetic
ccaguaccgcgctcugt

SEQ ID NO: 98869 - DNA, 17 bp, Artificial Sequence
  Synthetic
gcauccagcccacgcuc

SEQ ID NO: 98870 - DNA, 24 bp, Artificial Sequence
  Synthetic
ccaaccaaguaccauacacccaaa

SEQ ID NO: 98871 - DNA, 21 bp, Artificial Sequence
  Synthetic
cugccgagagatttucccaca

SEQ ID NO: 98872 - DNA, 21 bp, Artificial Sequence
  Synthetic
cagtaaggcugccagcagaua

SEQ ID NO: 98873 - DNA, 22 bp, Artificial Sequence
  Synthetic
cctgtacccutgcctttgaucc

SEQ ID NO: 98874 - DNA, 25 bp, Artificial Sequence
  Synthetic
tgacagcaguaattttggcagugat

SEQ ID NO: 98875 - DNA, 28 bp, Artificial Sequence
  Synthetic
ctgtautgaaagaaatctuggacaggga

SEQ ID NO: 98876 - DNA, 25 bp, Artificial Sequence
  Synthetic
autttcacacagtugagacaaggga

SEQ ID NO: 98877 - DNA, 22 bp, Artificial Sequence
  Synthetic
tgaaagttcgcugtggtgttug

SEQ ID NO: 98878 - DNA, 26 bp, Artificial Sequence
  Synthetic
aaggaggccaacuaaaaggataaaut

SEQ ID NO: 98879 - DNA, 25 bp, Artificial Sequence
  Synthetic
cccaatggcutatcttacacuggat

SEQ ID NO: 98880 - DNA, 28 bp, Artificial Sequence
  Synthetic
gaaagtactccttuacctgtagttggug

SEQ ID NO: 98881 - DNA, 27 bp, Artificial Sequence
  Synthetic
attcatgctttcutgctgttcgttuat

SEQ ID NO: 98882 - DNA, 25 bp, Artificial Sequence
  Synthetic
tccacttaaaccauacatgcgtugt

SEQ ID NO: 98883 - DNA, 23 bp, Artificial Sequence
  Synthetic
gcccccgtauaactccattctug

SEQ ID NO: 98884 - DNA, 27 bp, Artificial Sequence
  Synthetic
gattatccttacutggaaagctgucgt

SEQ ID NO: 98885 - DNA, 28 bp, Artificial Sequence
  Synthetic
ttctggattttgugggtagagctaaaut

SEQ ID NO: 98886 - DNA, 25 bp, Artificial Sequence
  Synthetic
ggaagutatggactuggaggagaga

SEQ ID NO: 98887 - DNA, 27 bp, Artificial Sequence
  Synthetic
tttgtaaataugggaagaacugcaggt

SEQ ID NO: 98888 - DNA, 20 bp, Artificial Sequence
  Synthetic
ccgctccugaagaaaugcac

SEQ ID NO: 98889 - DNA, 21 bp, Artificial Sequence
  Synthetic
gccgactcucaccatcaucaa

SEQ ID NO: 98890 - DNA, 23 bp, Artificial Sequence
  Synthetic
gggaaaagcuccagatcgactut

SEQ ID NO: 98891 - DNA, 21 bp, Artificial Sequence
  Synthetic
gtcccctuccccctgttacua

SEQ ID NO: 98892 - DNA, 26 bp, Artificial Sequence
  Synthetic
cttttagaggacaugctcatcctuca

SEQ ID NO: 98893 - DNA, 27 bp, Artificial Sequence
  Synthetic
ctctgacattuatttccacattcugct

SEQ ID NO: 98894 - DNA, 21 bp, Artificial Sequence
  Synthetic
tgcautcaauaagggcaggga

SEQ ID NO: 98895 - DNA, 28 bp, Artificial Sequence
  Synthetic
cctctccagcugaaaccaaatatuacaa

SEQ ID NO: 98896 - DNA, 24 bp, Artificial Sequence
  Synthetic
agacautcattugaaagcgggaga

SEQ ID NO: 98897 - DNA, 27 bp, Artificial Sequence
  Synthetic
ccccagatgucaagctacaaaauacat

SEQ ID NO: 98898 - DNA, 20 bp, Artificial Sequence
  Synthetic
cacgaccaaugggaaccuga

SEQ ID NO: 98899 - DNA, 21 bp, Artificial Sequence
  Synthetic
ctaccuggaccaguccaacac

SEQ ID NO: 98900 - DNA, 28 bp, Artificial Sequence
  Synthetic
gtcctttttgauttttagtgguccagat

SEQ ID NO: 98901 - DNA, 21 bp, Artificial Sequence
  Synthetic
agttccacaugagggcgatut

SEQ ID NO: 98902 - DNA, 25 bp, Artificial Sequence
  Synthetic
gggaatatgugactgcttcctuaca

SEQ ID NO: 98903 - DNA, 28 bp, Artificial Sequence
  Synthetic
cgcagatcaucaccatgtttaaagauaa

SEQ ID NO: 98904 - DNA, 24 bp, Artificial Sequence
  Synthetic
ggttttagtugcaccatccugaaa

SEQ ID NO: 98905 - DNA, 30 bp, Artificial Sequence
  Synthetic
gataacttgtuaaatggaaatctucacgct

SEQ ID NO: 98906 - DNA, 26 bp, Artificial Sequence
  Synthetic
tgtctcattuggtacagaatgtugct

SEQ ID NO: 98907 - DNA, 21 bp, Artificial Sequence
  Synthetic
catcugccagaccttguaccc

SEQ ID NO: 98908 - DNA, 20 bp, Artificial Sequence
  Synthetic
caggaggugtctugcggaat

SEQ ID NO: 98909 - DNA, 28 bp, Artificial Sequence
  Synthetic
gtgtgccataugaaacttccaatuaagt

SEQ ID NO: 98910 - DNA, 21 bp, Artificial Sequence
  Synthetic
aggctatgcauctccccucat

SEQ ID NO: 98911 - DNA, 25 bp, Artificial Sequence
  Synthetic
tccgtgtgtacucttcataaagcug

SEQ ID NO: 98912 - DNA, 27 bp, Artificial Sequence
  Synthetic
cagccctaucaaatgaaacaatuggaa

SEQ ID NO: 98913 - DNA, 27 bp, Artificial Sequence
  Synthetic
cagtaggagaaagcaugtttttgaugt

SEQ ID NO: 98914 - DNA, 20 bp, Artificial Sequence
  Synthetic
cctgtaggccucgaagguga

SEQ ID NO: 98915 - DNA, 21 bp, Artificial Sequence
  Synthetic
ccgccuggttcuaacacacat

SEQ ID NO: 98916 - DNA, 27 bp, Artificial Sequence
  Synthetic
ctggaactcacauaactcttgtguact

SEQ ID NO: 98917 - DNA, 26 bp, Artificial Sequence
  Synthetic
acatggagacauccaagtgataccua

SEQ ID NO: 98918 - DNA, 20 bp, Artificial Sequence
  Synthetic
gccaucgccccattggaaut

SEQ ID NO: 98919 - DNA, 29 bp, Artificial Sequence
  Synthetic
gcttccagagcaccauaataaatagttuc

SEQ ID NO: 98920 - DNA, 22 bp, Artificial Sequence
  Synthetic
tcuggtaacattcuccccacca

SEQ ID NO: 98921 - DNA, 26 bp, Artificial Sequence
  Synthetic
tttccagacugctgacaaattguact

SEQ ID NO: 98922 - DNA, 19 bp, Artificial Sequence
  Synthetic
cagggaccaaucccaggug

SEQ ID NO: 98923 - DNA, 28 bp, Artificial Sequence
  Synthetic
cctggcttcuaggtttctaattctgaut

SEQ ID NO: 98924 - DNA, 20 bp, Artificial Sequence
  Synthetic
acaagagccgcgaguaugac

SEQ ID NO: 98925 - DNA, 26 bp, Artificial Sequence
  Synthetic
gcaactggatautcatcctcaagucc

SEQ ID NO: 98926 - DNA, 27 bp, Artificial Sequence
  Synthetic
gggtcttttccuagtttgctattauca

SEQ ID NO: 98927 - DNA, 29 bp, Artificial Sequence
  Synthetic
tctttgttcctuccctatctgttcatuac

SEQ ID NO: 98928 - DNA, 17 bp, Artificial Sequence
  Synthetic
gggccguggaggcttut

SEQ ID NO: 98929 - DNA, 18 bp, Artificial Sequence
  Synthetic
tgtgggcuagcgtgaugg

SEQ ID NO: 98930 - DNA, 23 bp, Artificial Sequence
  Synthetic
ccgtaccaucttgaagccttuga

SEQ ID NO: 98931 - DNA, 20 bp, Artificial Sequence
  Synthetic
gutcagcaacaucccggaga

SEQ ID NO: 98932 - DNA, 19 bp, Artificial Sequence
  Synthetic
ccaucacgcuagcccacag

SEQ ID NO: 98933 - DNA, 18 bp, Artificial Sequence
  Synthetic
cgggugagguaccaggaa

SEQ ID NO: 98934 - DNA, 28 bp, Artificial Sequence
  Synthetic
cagtagattugactagtttcaucccaga

SEQ ID NO: 98935 - DNA, 24 bp, Artificial Sequence
  Synthetic
caaaagcuacgaggctcttcucaa

SEQ ID NO: 98936 - DNA, 26 bp, Artificial Sequence
  Synthetic
tctacagcaaatutccaagagagcut

SEQ ID NO: 98937 - DNA, 22 bp, Artificial Sequence
  Synthetic
ccaggacacucattuggacaca

SEQ ID NO: 98938 - DNA, 27 bp, Artificial Sequence
  Synthetic
gcccagttacugaataagcagatctut

SEQ ID NO: 98939 - DNA, 28 bp, Artificial Sequence
  Synthetic
cacaggcaaaaacaautccatccataua

SEQ ID NO: 98940 - DNA, 22 bp, Artificial Sequence
  Synthetic
gccccagaaagagcutggauat

SEQ ID NO: 98941 - DNA, 28 bp, Artificial Sequence
  Synthetic
ggtctaaaaguagactgaagggtcauct

SEQ ID NO: 98942 - DNA, 24 bp, Artificial Sequence
  Synthetic
gagtctaattttucccctggguca

SEQ ID NO: 98943 - DNA, 28 bp, Artificial Sequence
  Synthetic
atgtgtgaaucagactgctgtataugag

SEQ ID NO: 98944 - DNA, 27 bp, Artificial Sequence
  Synthetic
cctttccttttuaggactggtcttuga

SEQ ID NO: 98945 - DNA, 25 bp, Artificial Sequence
  Synthetic
ttggaccccugaaauaagagaaacc

SEQ ID NO: 98946 - DNA, 21 bp, Artificial Sequence
  Synthetic
gtgtctucccaaagggtcuga

SEQ ID NO: 98947 - DNA, 26 bp, Artificial Sequence
  Synthetic
gcagatgucccactattaacuccaag

SEQ ID NO: 98948 - DNA, 21 bp, Artificial Sequence
  Synthetic
ggcctactuccctctctcuga

SEQ ID NO: 98949 - DNA, 17 bp, Artificial Sequence
  Synthetic
cuccccacaggcguaca

SEQ ID NO: 98950 - DNA, 26 bp, Artificial Sequence
  Synthetic
acagagtctucgtgtttcatctucaa

SEQ ID NO: 98951 - DNA, 27 bp, Artificial Sequence
  Synthetic
gttatggaagcaagutcacaatuaccc

SEQ ID NO: 98952 - DNA, 18 bp, Artificial Sequence
  Synthetic
cacccugagccccaucaa

SEQ ID NO: 98953 - DNA, 19 bp, Artificial Sequence
  Synthetic
cggugaggagaagcucaca

SEQ ID NO: 98954 - DNA, 28 bp, Artificial Sequence
  Synthetic
tctccaccautaatgtagtcuaggacaa

SEQ ID NO: 98955 - DNA, 26 bp, Artificial Sequence
  Synthetic
acatgccacuaaatctgaatcgucat

SEQ ID NO: 98956 - DNA, 27 bp, Artificial Sequence
  Synthetic
aatgcttgagacaucatttctttgcug

SEQ ID NO: 98957 - DNA, 23 bp, Artificial Sequence
  Synthetic
cttgccttctuacagcccattug

SEQ ID NO: 98958 - DNA, 28 bp, Artificial Sequence
  Synthetic
ttttggcttcttuactatcctggtctuc

SEQ ID NO: 98959 - DNA, 28 bp, Artificial Sequence
  Synthetic
catgtggtttuagaagtacccctcttut

SEQ ID NO: 98960 - DNA, 20 bp, Artificial Sequence
  Synthetic
ccccugtagcagucagagga

SEQ ID NO: 98961 - DNA, 27 bp, Artificial Sequence
  Synthetic
ggttacaagagcaugtagtatgtguct

SEQ ID NO: 98962 - DNA, 21 bp, Artificial Sequence
  Synthetic
tggaaccuaaccctucccact

SEQ ID NO: 98963 - DNA, 21 bp, Artificial Sequence
  Synthetic
gcatccccucaccttcctuct

SEQ ID NO: 98964 - DNA, 23 bp, Artificial Sequence
  Synthetic
ggcgtcaggaauttcagccaaua

SEQ ID NO: 98965 - DNA, 19 bp, Artificial Sequence
  Synthetic
gcttccaaucctgctcguc

SEQ ID NO: 98966 - DNA, 21 bp, Artificial Sequence
  Synthetic
ctcagaucactgaugggcagt

SEQ ID NO: 98967 - DNA, 21 bp, Artificial Sequence
  Synthetic
gcttgccugcctgacatcuat

SEQ ID NO: 98968 - DNA, 27 bp, Artificial Sequence
  Synthetic
caatgacaggutattggucaacacaag

SEQ ID NO: 98969 - DNA, 24 bp, Artificial Sequence
  Synthetic
ttaccttaacutccacatgugcca

SEQ ID NO: 98970 - DNA, 24 bp, Artificial Sequence
  Synthetic
tccagtgaaacugcatcatcucaa

SEQ ID NO: 98971 - DNA, 21 bp, Artificial Sequence
  Synthetic
cctgtgaucgaaagtctgcug

SEQ ID NO: 98972 - DNA, 20 bp, Artificial Sequence
  Synthetic
cutaccauccacggcaagga

SEQ ID NO: 98973 - DNA, 22 bp, Artificial Sequence
  Synthetic
catgctggaugtttgcctcuac

SEQ ID NO: 98974 - DNA, 23 bp, Artificial Sequence
  Synthetic
gtttgatctgugcaatgcctcut

SEQ ID NO: 98975 - DNA, 28 bp, Artificial Sequence
  Synthetic
aattagagttaaguagggaccaucccat

SEQ ID NO: 98976 - DNA, 24 bp, Artificial Sequence
  Synthetic
cacaccccuaagtgagtgatctut

SEQ ID NO: 98977 - DNA, 20 bp, Artificial Sequence
  Synthetic
ggcgaggacuacuccaaagg

SEQ ID NO: 98978 - DNA, 28 bp, Artificial Sequence
  Synthetic
aattagtgcuaactagtttcagugaaca

SEQ ID NO: 98979 - DNA, 26 bp, Artificial Sequence
  Synthetic
gcctgctctutagtggaaactaugaa

SEQ ID NO: 98980 - DNA, 28 bp, Artificial Sequence
  Synthetic
ctgtgaaagcgaacaauatctccattut

SEQ ID NO: 98981 - DNA, 27 bp, Artificial Sequence
  Synthetic
gtgttttccagautattgctcagtugt

SEQ ID NO: 98982 - DNA, 28 bp, Artificial Sequence
  Synthetic
agttagttttacauttgtctgguccaca

SEQ ID NO: 98983 - DNA, 28 bp, Artificial Sequence
  Synthetic
ggaagaataagguttggtgtttugaagt

SEQ ID NO: 98984 - DNA, 21 bp, Artificial Sequence
  Synthetic
gguccactgctucaggagaac

SEQ ID NO: 98985 - DNA, 22 bp, Artificial Sequence
  Synthetic
ggctcacugatgcugacaagaa

SEQ ID NO: 98986 - DNA, 22 bp, Artificial Sequence
  Synthetic
gggtuaacaaggagcctggtut

SEQ ID NO: 98987 - DNA, 22 bp, Artificial Sequence
  Synthetic
ccgaagagcucacttcuccaag

SEQ ID NO: 98988 - DNA, 18 bp, Artificial Sequence
  Synthetic
cacacccccucctccuca

SEQ ID NO: 98989 - DNA, 20 bp, Artificial Sequence
  Synthetic
gggcaugaaggacuccaagt

SEQ ID NO: 98990 - DNA, 23 bp, Artificial Sequence
  Synthetic
ggaacaccgaccucacagtttut

SEQ ID NO: 98991 - DNA, 27 bp, Artificial Sequence
  Synthetic
tgggcaagtcuttgattttgatacuga

SEQ ID NO: 98992 - DNA, 20 bp, Artificial Sequence
  Synthetic
gcagaaucggcaaacucagg

SEQ ID NO: 98993 - DNA, 20 bp, Artificial Sequence
  Synthetic
cuccaccagaccaggguact

SEQ ID NO: 98994 - DNA, 21 bp, Artificial Sequence
  Synthetic
ccttccacuccagaggacuga

SEQ ID NO: 98995 - DNA, 22 bp, Artificial Sequence
  Synthetic
gccatgguaaggatggatgcut

SEQ ID NO: 98996 - DNA, 23 bp, Artificial Sequence
  Synthetic
tcacctccgaguggcagtaauat

SEQ ID NO: 98997 - DNA, 21 bp, Artificial Sequence
  Synthetic
cagcacucccttgaggguaag

SEQ ID NO: 98998 - DNA, 19 bp, Artificial Sequence
  Synthetic
cctgcgccguggagaauac

SEQ ID NO: 98999 - DNA, 21 bp, Artificial Sequence
  Synthetic
ggguggcagtaattguccaga

SEQ ID NO: 99000 - DNA, 25 bp, Artificial Sequence
  Synthetic
gagtgaattttugcggtctcatgut

SEQ ID NO: 99001 - DNA, 28 bp, Artificial Sequence
  Synthetic
gtcctcatttatcutaacagcttccuct

SEQ ID NO: 99002 - DNA, 22 bp, Artificial Sequence
  Synthetic
agacgatgagguggaagaggua

SEQ ID NO: 99003 - DNA, 26 bp, Artificial Sequence
  Synthetic
cctgacctgcuccctttcttttauag

SEQ ID NO: 99004 - DNA, 21 bp, Artificial Sequence
  Synthetic
tgtggaaugtgtggctugagt

SEQ ID NO: 99005 - DNA, 22 bp, Artificial Sequence
  Synthetic
gagaagcugaactttgccctug

SEQ ID NO: 99006 - DNA, 26 bp, Artificial Sequence
  Synthetic
gagaactcaatguccatctccatuct

SEQ ID NO: 99007 - DNA, 23 bp, Artificial Sequence
  Synthetic
agggttaaguggatcagtggcua

SEQ ID NO: 99008 - DNA, 19 bp, Artificial Sequence
  Synthetic
cctccccaaaugcgaugct

SEQ ID NO: 99009 - DNA, 21 bp, Artificial Sequence
  Synthetic
agcuctaccgaaucaggacca

SEQ ID NO: 99010 - DNA, 20 bp, Artificial Sequence
  Synthetic
ggcagugagcgtggagtuaa

SEQ ID NO: 99011 - DNA, 19 bp, Artificial Sequence
  Synthetic
gcucccacaggaagaggug

SEQ ID NO: 99012 - DNA, 23 bp, Artificial Sequence
  Synthetic
tcacagaagcagugaggatgaug

SEQ ID NO: 99013 - DNA, 24 bp, Artificial Sequence
  Synthetic
cagaagugagggaaagtucagagg

SEQ ID NO: 99014 - DNA, 17 bp, Artificial Sequence
  Synthetic
ccgagggcaggucucca

SEQ ID NO: 99015 - DNA, 18 bp, Artificial Sequence
  Synthetic
ctctgccuggctgtucca

SEQ ID NO: 99016 - DNA, 23 bp, Artificial Sequence
  Synthetic
catggaacauctgatcacugggt

SEQ ID NO: 99017 - DNA, 22 bp, Artificial Sequence
  Synthetic
ctgggaggaggaguacgaugaa

SEQ ID NO: 99018 - DNA, 28 bp, Artificial Sequence
  Synthetic
gtatcctttctccucatctctagcauct

SEQ ID NO: 99019 - DNA, 24 bp, Artificial Sequence
  Synthetic
agcaacaaaacaauatgcctuggg

SEQ ID NO: 99020 - DNA, 22 bp, Artificial Sequence
  Synthetic
gagccctgagucctaataccug

SEQ ID NO: 99021 - DNA, 18 bp, Artificial Sequence
  Synthetic
cccctguccagctgtuga

SEQ ID NO: 99022 - DNA, 27 bp, Artificial Sequence
  Synthetic
ctgacctctucaccatttttctttcug

SEQ ID NO: 99023 - DNA, 20 bp, Artificial Sequence
  Synthetic
ttcggaaaagcucuggccat

SEQ ID NO: 99024 - DNA, 22 bp, Artificial Sequence
  Synthetic
ggtgctcaggaugcatttgtut

SEQ ID NO: 99025 - DNA, 23 bp, Artificial Sequence
  Synthetic
cagcaaccuaccttgaaatgucc

SEQ ID NO: 99026 - DNA, 22 bp, Artificial Sequence
  Synthetic
cggacttagacutgagcaggug

SEQ ID NO: 99027 - DNA, 24 bp, Artificial Sequence
  Synthetic
ccccaaccuccttacaagacttug

SEQ ID NO: 99028 - DNA, 28 bp, Artificial Sequence
  Synthetic
atgttggccaagaugaaatttagcttut

SEQ ID NO: 99029 - DNA, 29 bp, Artificial Sequence
  Synthetic
gttttctgggcucttggaatatcttauca

SEQ ID NO: 99030 - DNA, 21 bp, Artificial Sequence
  Synthetic
tggaatcauggccagagctut

SEQ ID NO: 99031 - DNA, 31 bp, Artificial Sequence
  Synthetic
cctttggaatguaatataggtgttctucaca

SEQ ID NO: 99032 - DNA, 20 bp, Artificial Sequence
  Synthetic
ggcattgucctcatccucgt

SEQ ID NO: 99033 - DNA, 21 bp, Artificial Sequence
  Synthetic
cccugaccagggtatcttucc

SEQ ID NO: 99034 - DNA, 21 bp, Artificial Sequence
  Synthetic
gcaggatgcugagtggtacug

SEQ ID NO: 99035 - DNA, 21 bp, Artificial Sequence
  Synthetic
ccctgugggaacauccaacat

SEQ ID NO: 99036 - DNA, 20 bp, Artificial Sequence
  Synthetic
caagcaatuggaggcgauca

SEQ ID NO: 99037 - DNA, 28 bp, Artificial Sequence
  Synthetic
gtccccatttcacugaactaaatagcut

SEQ ID NO: 99038 - DNA, 21 bp, Artificial Sequence
  Synthetic
agagtcccccagutctgaguc

SEQ ID NO: 99039 - DNA, 24 bp, Artificial Sequence
  Synthetic
ttggtcttcucccttcccagauat

SEQ ID NO: 99040 - DNA, 28 bp, Artificial Sequence
  Synthetic
catagtgcttauagcatcctcttgacut

SEQ ID NO: 99041 - DNA, 25 bp, Artificial Sequence
  Synthetic
cacaggtctuggatcaaagtucagt

SEQ ID NO: 99042 - DNA, 27 bp, Artificial Sequence
  Synthetic
tcacattugaacagtcattctugagga

SEQ ID NO: 99043 - DNA, 28 bp, Artificial Sequence
  Synthetic
caaggaagtguccagtatgaataaguga

SEQ ID NO: 99044 - DNA, 21 bp, Artificial Sequence
  Synthetic
ccacagaaacgugcagaugga

SEQ ID NO: 99045 - DNA, 22 bp, Artificial Sequence
  Synthetic
gggcacctucaaggactatgug

SEQ ID NO: 99046 - DNA, 25 bp, Artificial Sequence
  Synthetic
ctcctgcatcuctctacttgaagug

SEQ ID NO: 99047 - DNA, 23 bp, Artificial Sequence
  Synthetic
tccugcuaaaacccaggaacaat

SEQ ID NO: 99048 - DNA, 28 bp, Artificial Sequence
  Synthetic
gagttttggccucttcattttgctuaat

SEQ ID NO: 99049 - DNA, 29 bp, Artificial Sequence
  Synthetic
gggatccaaacaaugaatataaatuagcc

SEQ ID NO: 99050 - DNA, 21 bp, Artificial Sequence
  Synthetic
tgtcccauacccagtcctuga

SEQ ID NO: 99051 - DNA, 28 bp, Artificial Sequence
  Synthetic
agtttuacttcttgatcugggaaacaca

SEQ ID NO: 99052 - DNA, 26 bp, Artificial Sequence
  Synthetic
attcattgtttggaucccctggaaua

SEQ ID NO: 99053 - DNA, 25 bp, Artificial Sequence
  Synthetic
caaggagagauagaagttgggctut

SEQ ID NO: 99054 - DNA, 20 bp, Artificial Sequence
  Synthetic
gaggcacuagctctgccaut

SEQ ID NO: 99055 - DNA, 20 bp, Artificial Sequence
  Synthetic
agaccuctcucagcaccact

SEQ ID NO: 99056 - DNA, 21 bp, Artificial Sequence
  Synthetic
tgagaatguttaccgcuggca

SEQ ID NO: 99057 - DNA, 28 bp, Artificial Sequence
  Synthetic
cgtttctttattuctcctccttcaucca

SEQ ID NO: 99058 - DNA, 26 bp, Artificial Sequence
  Synthetic
cttgtattcaagguctggctggttua

SEQ ID NO: 99059 - DNA, 27 bp, Artificial Sequence
  Synthetic
tgctaatcggaautcttcaatggucaa

SEQ ID NO: 99060 - DNA, 21 bp, Artificial Sequence
  Synthetic
ccutattgaggucagcacggt

SEQ ID NO: 99061 - DNA, 22 bp, Artificial Sequence
  Synthetic
gcagccagucatcttucaacag

SEQ ID NO: 99062 - DNA, 28 bp, Artificial Sequence
  Synthetic
gctgatattcaugctttaaacgttguct

SEQ ID NO: 99063 - DNA, 24 bp, Artificial Sequence
  Synthetic
cacattccugctgtctcaguacaa

SEQ ID NO: 99064 - DNA, 17 bp, Artificial Sequence
  Synthetic
gtgggcguggcagauga

SEQ ID NO: 99065 - DNA, 18 bp, Artificial Sequence
  Synthetic
tgggcugactctgcucct

SEQ ID NO: 99066 - DNA, 25 bp, Artificial Sequence
  Synthetic
agtatgcutcaaggaugacaccaaa

SEQ ID NO: 99067 - DNA, 28 bp, Artificial Sequence
  Synthetic
acacaatgacctugccatcataagttua

SEQ ID NO: 99068 - DNA, 20 bp, Artificial Sequence
  Synthetic
ctcuagagggcctgugcaat

SEQ ID NO: 99069 - DNA, 27 bp, Artificial Sequence
  Synthetic
tttacccttucaatagtcacacucacc

SEQ ID NO: 99070 - DNA, 25 bp, Artificial Sequence
  Synthetic
tgtttcttcautttccctggugagt

SEQ ID NO: 99071 - DNA, 23 bp, Artificial Sequence
  Synthetic
ttcccaccuttgttggaagugaa

SEQ ID NO: 99072 - DNA, 25 bp, Artificial Sequence
  Synthetic
cctuaagcacccaaaagcataucct

SEQ ID NO: 99073 - DNA, 22 bp, Artificial Sequence
  Synthetic
gagcugcattgtuaacccaaca

SEQ ID NO: 99074 - DNA, 21 bp, Artificial Sequence
  Synthetic
tgucauaggagggaacacgct

SEQ ID NO: 99075 - DNA, 24 bp, Artificial Sequence
  Synthetic
gtcctcttccuacctcctccttua

SEQ ID NO: 99076 - DNA, 24 bp, Artificial Sequence
  Synthetic
gggtcauccacagaggacaguaat

SEQ ID NO: 99077 - DNA, 28 bp, Artificial Sequence
  Synthetic
gcaggttagaccutgacagtgaaaaaua

SEQ ID NO: 99078 - DNA, 29 bp, Artificial Sequence
  Synthetic
tgaaactcaaatcuctcaaaaggctuact

SEQ ID NO: 99079 - DNA, 23 bp, Artificial Sequence
  Synthetic
gctggttgucccaaaatcactut

SEQ ID NO: 99080 - DNA, 22 bp, Artificial Sequence
  Synthetic
tctgggaucaaagtgcttugga

SEQ ID NO: 99081 - DNA, 25 bp, Artificial Sequence
  Synthetic
ccattgauaacaccaacatccccua

SEQ ID NO: 99082 - DNA, 26 bp, Artificial Sequence
  Synthetic
caacgaaaaatcugtctgatgcaugt

SEQ ID NO: 99083 - DNA, 27 bp, Artificial Sequence
  Synthetic
ttcataccaaugccatggttatcgtua

SEQ ID NO: 99084 - DNA, 26 bp, Artificial Sequence
  Synthetic
cttgagtttcaaaggutgctgttcuc

SEQ ID NO: 99085 - DNA, 27 bp, Artificial Sequence
  Synthetic
gaatgctggaaauccagatgttcuagt

SEQ ID NO: 99086 - DNA, 25 bp, Artificial Sequence
  Synthetic
ccaggaactuggatcaaagggttua

SEQ ID NO: 99087 - DNA, 23 bp, Artificial Sequence
  Synthetic
gcaaacctucactttccaagugt

SEQ ID NO: 99088 - DNA, 24 bp, Artificial Sequence
  Synthetic
tgagctggagaauttggattgugt

SEQ ID NO: 99089 - DNA, 21 bp, Artificial Sequence
  Synthetic
cagaacaugcctcaagugcat

SEQ ID NO: 99090 - DNA, 27 bp, Artificial Sequence
  Synthetic
attgtctacttutgttcctaccugcaa

SEQ ID NO: 99091 - DNA, 25 bp, Artificial Sequence
  Synthetic
aatggaactcuctgtactttugcca

SEQ ID NO: 99092 - DNA, 20 bp, Artificial Sequence
  Synthetic
gggtagguccttcugccaac

SEQ ID NO: 99093 - DNA, 21 bp, Artificial Sequence
  Synthetic
gacuggcugcagaaacacaac

SEQ ID NO: 99094 - DNA, 21 bp, Artificial Sequence
  Synthetic
cctgcgaacacautgctguag

SEQ ID NO: 99095 - DNA, 28 bp, Artificial Sequence
  Synthetic
tccaatcauaagggacagtaactgguat

SEQ ID NO: 99096 - DNA, 28 bp, Artificial Sequence
  Synthetic
tcttcactttgcugttgagattcttuga

SEQ ID NO: 99097 - DNA, 29 bp, Artificial Sequence
  Synthetic
agatacactgggucaagtctacaaaagua

SEQ ID NO: 99098 - DNA, 29 bp, Artificial Sequence
  Synthetic
tcatttggtgtggutttctgttctacaua

SEQ ID NO: 99099 - DNA, 28 bp, Artificial Sequence
  Synthetic
cacccagaucaaacaaaacacttagaut

SEQ ID NO: 99100 - DNA, 21 bp, Artificial Sequence
  Synthetic
ccagguatctctcugcccact

SEQ ID NO: 99101 - DNA, 22 bp, Artificial Sequence
  Synthetic
cacaaccctcucctgctttcuc

SEQ ID NO: 99102 - DNA, 28 bp, Artificial Sequence
  Synthetic
gatcaaactccaauacagcaaaccatut

SEQ ID NO: 99103 - DNA, 27 bp, Artificial Sequence
  Synthetic
aagagagggaccaaagutggttaaaut

SEQ ID NO: 99104 - DNA, 27 bp, Artificial Sequence
  Synthetic
aaagctgtagtcutttctaagcaguca

SEQ ID NO: 99105 - DNA, 26 bp, Artificial Sequence
  Synthetic
tgcatgcaataauctggtttttcauc

SEQ ID NO: 99106 - DNA, 24 bp, Artificial Sequence
  Synthetic
ccctaccttcucatactcgtccuc

SEQ ID NO: 99107 - DNA, 20 bp, Artificial Sequence
  Synthetic
ggaacgugacccccattuct

SEQ ID NO: 99108 - DNA, 28 bp, Artificial Sequence
  Synthetic
ctggguggcatttatttgtuacaagaat

SEQ ID NO: 99109 - DNA, 26 bp, Artificial Sequence
  Synthetic
gattttaaaacacuggcagaguccag

SEQ ID NO: 99110 - DNA, 20 bp, Artificial Sequence
  Synthetic
gggccuatggcaugaagaga

SEQ ID NO: 99111 - DNA, 24 bp, Artificial Sequence
  Synthetic
catgagtgaggagguaccacaaug

SEQ ID NO: 99112 - DNA, 27 bp, Artificial Sequence
  Synthetic
gctctgaattttucttctgctgcttut

SEQ ID NO: 99113 - DNA, 23 bp, Artificial Sequence
  Synthetic
ctcactattugtgcgagauggga

SEQ ID NO: 99114 - DNA, 28 bp, Artificial Sequence
  Synthetic
ccgttttcctcuatccaccatcttatut

SEQ ID NO: 99115 - DNA, 26 bp, Artificial Sequence
  Synthetic
agcgttggcaagacauttctacatua

SEQ ID NO: 99116 - DNA, 20 bp, Artificial Sequence
  Synthetic
ggagucagggccgagagaua

SEQ ID NO: 99117 - DNA, 27 bp, Artificial Sequence
  Synthetic
acccautatttacctuaaagccgaagt

SEQ ID NO: 99118 - DNA, 21 bp, Artificial Sequence
  Synthetic
ggcugaccaccagcatguaat

SEQ ID NO: 99119 - DNA, 22 bp, Artificial Sequence
  Synthetic
acacttgtgccutctgcttcuc

SEQ ID NO: 99120 - DNA, 28 bp, Artificial Sequence
  Synthetic
cctgaattcugctattatctaugaccga

SEQ ID NO: 99121 - DNA, 24 bp, Artificial Sequence
  Synthetic
ggtccauctcaacuccaaacaact

SEQ ID NO: 99122 - DNA, 24 bp, Artificial Sequence
  Synthetic
gagcattgccaaaguccttcttut

SEQ ID NO: 99123 - DNA, 28 bp, Artificial Sequence
  Synthetic
ggttttccccauttattgaagcatuaca

SEQ ID NO: 99124 - DNA, 19 bp, Artificial Sequence
  Synthetic
gtgcctutaccccucacga

SEQ ID NO: 99125 - DNA, 24 bp, Artificial Sequence
  Synthetic
ccttgctgcauttctcttgaguct

SEQ ID NO: 99126 - DNA, 25 bp, Artificial Sequence
  Synthetic
gtgcctaaatugtttgtagggtugg

SEQ ID NO: 99127 - DNA, 25 bp, Artificial Sequence
  Synthetic
caggauaggaagcacacatgucaat

SEQ ID NO: 99128 - DNA, 28 bp, Artificial Sequence
  Synthetic
cttcaactgctucatttccttcatctut

SEQ ID NO: 99129 - DNA, 28 bp, Artificial Sequence
  Synthetic
gttcttcgauactggtaugggaaaaagt

SEQ ID NO: 99130 - DNA, 28 bp, Artificial Sequence
  Synthetic
acaagatagctcauttttaggcaacuca

SEQ ID NO: 99131 - DNA, 28 bp, Artificial Sequence
  Synthetic
cuctctctttattaaugcccaggaaact

SEQ ID NO: 99132 - DNA, 24 bp, Artificial Sequence
  Synthetic
tatgcaucagtgttgttuggcaat

SEQ ID NO: 99133 - DNA, 22 bp, Artificial Sequence
  Synthetic
gcccccauatcuaagcaaagga

SEQ ID NO: 99134 - DNA, 26 bp, Artificial Sequence
  Synthetic
aagaacagaauggctctcttucaaca

SEQ ID NO: 99135 - DNA, 25 bp, Artificial Sequence
  Synthetic
ccgcagcauttccttuaaccaaaat

SEQ ID NO: 99136 - DNA, 24 bp, Artificial Sequence
  Synthetic
ggacttuttcctcctuccacacat

SEQ ID NO: 99137 - DNA, 28 bp, Artificial Sequence
  Synthetic
gggcaatauaaacatatgcatcguacaa

SEQ ID NO: 99138 - DNA, 28 bp, Artificial Sequence
  Synthetic
ggccttcaaugagactatcaagatctut

SEQ ID NO: 99139 - DNA, 21 bp, Artificial Sequence
  Synthetic
tgtacugcaccagaucagggt

SEQ ID NO: 99140 - DNA, 25 bp, Artificial Sequence
  Synthetic
acaagcgagagaacugattgauacc

SEQ ID NO: 99141 - DNA, 27 bp, Artificial Sequence
  Synthetic
catctggccagucctaagaatttcuaa

SEQ ID NO: 99142 - DNA, 27 bp, Artificial Sequence
  Synthetic
actccaccagutttaataccuaccagt

SEQ ID NO: 99143 - DNA, 28 bp, Artificial Sequence
  Synthetic
ctctttctttaggutccagcaacaaaut

SEQ ID NO: 99144 - DNA, 28 bp, Artificial Sequence
  Synthetic
gacaattguaccacccttaagttgatuc

SEQ ID NO: 99145 - DNA, 30 bp, Artificial Sequence
  Synthetic
aggataaaatagtuacatggatttgcugct

SEQ ID NO: 99146 - DNA, 28 bp, Artificial Sequence
  Synthetic
agcattttccaaguagtctagctttcut

SEQ ID NO: 99147 - DNA, 22 bp, Artificial Sequence
  Synthetic
atgccctgcutatctgaaggug

SEQ ID NO: 99148 - DNA, 26 bp, Artificial Sequence
  Synthetic
ggtactgagaucaaattctuggagga

SEQ ID NO: 99149 - DNA, 23 bp, Artificial Sequence
  Synthetic
aatacccatcacucccgctttut

SEQ ID NO: 99150 - DNA, 28 bp, Artificial Sequence
  Synthetic
ccaagaaagaaauatgcaattggtugct

SEQ ID NO: 99151 - DNA, 28 bp, Artificial Sequence
  Synthetic
gccagaaaaucaacaactagaucaacat

SEQ ID NO: 99152 - DNA, 24 bp, Artificial Sequence
  Synthetic
gggcacatucttgggaatuacaaa

SEQ ID NO: 99153 - DNA, 22 bp, Artificial Sequence
  Synthetic
ggcgaugaaggaggtgactuac

SEQ ID NO: 99154 - DNA, 22 bp, Artificial Sequence
  Synthetic
cttgacaucctcttctguggct

SEQ ID NO: 99155 - DNA, 27 bp, Artificial Sequence
  Synthetic
catccatagaccugacatgtgtaucat

SEQ ID NO: 99156 - DNA, 28 bp, Artificial Sequence
  Synthetic
cttgagcatacuctttcatttgtucaga

SEQ ID NO: 99157 - DNA, 28 bp, Artificial Sequence
  Synthetic
cctccagatuagtaaagccagtugaaaa

SEQ ID NO: 99158 - DNA, 21 bp, Artificial Sequence
  Synthetic
ggcagcauttgagagcugact

SEQ ID NO: 99159 - DNA, 23 bp, Artificial Sequence
  Synthetic
acacgtccaacucatgtgtacug

SEQ ID NO: 99160 - DNA, 20 bp, Artificial Sequence
  Synthetic
accgcgugaagaagctcauc

SEQ ID NO: 99161 - DNA, 21 bp, Artificial Sequence
  Synthetic
ggucgcacaaggagucaaact

SEQ ID NO: 99162 - DNA, 26 bp, Artificial Sequence
  Synthetic
tcagaagagaaguagaagtuccacca

SEQ ID NO: 99163 - DNA, 28 bp, Artificial Sequence
  Synthetic
aaatgaatgugagggtacactgtuagag

SEQ ID NO: 99164 - DNA, 26 bp, Artificial Sequence
  Synthetic
gaagaagctcaucaactcacagauca

SEQ ID NO: 99165 - DNA, 22 bp, Artificial Sequence
  Synthetic
cgaaagtcgutcacttcugggt

SEQ ID NO: 99166 - DNA, 28 bp, Artificial Sequence
  Synthetic
caagacttcucgaagctgatctttuagt

SEQ ID NO: 99167 - DNA, 26 bp, Artificial Sequence
  Synthetic
aatgcactgucaaaatccagucaaaa

SEQ ID NO: 99168 - DNA, 21 bp, Artificial Sequence
  Synthetic
ccgcaggcagacuctguaaat

SEQ ID NO: 99169 - DNA, 19 bp, Artificial Sequence
  Synthetic
cccttcuacctccggcuga

SEQ ID NO: 99170 - DNA, 25 bp, Artificial Sequence
  Synthetic
gaagttgaacgaauggaatgugcaa

SEQ ID NO: 99171 - DNA, 28 bp, Artificial Sequence
  Synthetic
acttauagaccagaactgcuacaacaga

SEQ ID NO: 99172 - DNA, 25 bp, Artificial Sequence
  Synthetic
cttctgccacutctaagttgaccua

SEQ ID NO: 99173 - DNA, 21 bp, Artificial Sequence
  Synthetic
attccttguggcagaguggag

SEQ ID NO: 99174 - DNA, 29 bp, Artificial Sequence
  Synthetic
gctgtagacuaaaatccaacttguaacga

SEQ ID NO: 99175 - DNA, 25 bp, Artificial Sequence
  Synthetic
cgtctgcaaugagtacaactgcuaa

SEQ ID NO: 99176 - DNA, 27 bp, Artificial Sequence
  Synthetic
agtcttcctcttutgatgccttgaaut

SEQ ID NO: 99177 - DNA, 28 bp, Artificial Sequence
  Synthetic
tctattggtttaucgactgtccttcuga

SEQ ID NO: 99178 - DNA, 21 bp, Artificial Sequence
  Synthetic
cctccacgaguttgactccut

SEQ ID NO: 99179 - DNA, 20 bp, Artificial Sequence
  Synthetic
gggaaacugtacugcagcca

SEQ ID NO: 99180 - DNA, 18 bp, Artificial Sequence
  Synthetic
ctggaagggucggcugaa

SEQ ID NO: 99181 - DNA, 19 bp, Artificial Sequence
  Synthetic
gtgacctgucccctccuct

SEQ ID NO: 99182 - DNA, 20 bp, Artificial Sequence
  Synthetic
tgugccaattcugcgaggag

SEQ ID NO: 99183 - DNA, 21 bp, Artificial Sequence
  Synthetic
cctcgcugccctcaaactuaa

SEQ ID NO: 99184 - DNA, 28 bp, Artificial Sequence
  Synthetic
cagagcagtcaugatatcttcttcctut

SEQ ID NO: 99185 - DNA, 28 bp, Artificial Sequence
  Synthetic
gaaatttcaagccaaugtatttctgcut

SEQ ID NO: 99186 - DNA, 18 bp, Artificial Sequence
  Synthetic
cgggcccutctggucaac

SEQ ID NO: 99187 - DNA, 20 bp, Artificial Sequence
  Synthetic
gacaccuggcaaacaccauc

SEQ ID NO: 99188 - DNA, 28 bp, Artificial Sequence
  Synthetic
gagctcaacutttagtgactuagaacct

SEQ ID NO: 99189 - DNA, 25 bp, Artificial Sequence
  Synthetic
gctccuaaagaccaaactgtgtcuc

SEQ ID NO: 99190 - DNA, 26 bp, Artificial Sequence
  Synthetic
ggttgagaugacaaaaagggtugaga

SEQ ID NO: 99191 - DNA, 18 bp, Artificial Sequence
  Synthetic
ggccaccaugggagagug

SEQ ID NO: 99192 - DNA, 24 bp, Artificial Sequence
  Synthetic
tgccattgatcucttcaaggctua

SEQ ID NO: 99193 - DNA, 28 bp, Artificial Sequence
  Synthetic
ctaccaggauctcaaaggaauggaaaat

SEQ ID NO: 99194 - DNA, 21 bp, Artificial Sequence
  Synthetic
tcctccuctctttcaguggct

SEQ ID NO: 99195 - DNA, 23 bp, Artificial Sequence
  Synthetic
acacacccaguctgttcttcauc

SEQ ID NO: 99196 - DNA, 24 bp, Artificial Sequence
  Synthetic
tgggtgcacacaaauacacaguat

SEQ ID NO: 99197 - DNA, 27 bp, Artificial Sequence
  Synthetic
aagagggaagtutttggtggtattuct

SEQ ID NO: 99198 - DNA, 19 bp, Artificial Sequence
  Synthetic
cctgccccugatggaacut

SEQ ID NO: 99199 - DNA, 21 bp, Artificial Sequence
  Synthetic
accttgtagucttcccuggca

SEQ ID NO: 99200 - DNA, 22 bp, Artificial Sequence
  Synthetic
ggtcctcagugtgcttgtagua

SEQ ID NO: 99201 - DNA, 23 bp, Artificial Sequence
  Synthetic
gctcattcctuacccagtccuca

SEQ ID NO: 99202 - DNA, 27 bp, Artificial Sequence
  Synthetic
gctttgaagtttcuctacgttccttut

SEQ ID NO: 99203 - DNA, 28 bp, Artificial Sequence
  Synthetic
cacatggaccagcuattcaaauagaaga

SEQ ID NO: 99204 - DNA, 17 bp, Artificial Sequence
  Synthetic
cgctgagugcagccgut

SEQ ID NO: 99205 - DNA, 19 bp, Artificial Sequence
  Synthetic
aggagugagggctctggut

SEQ ID NO: 99206 - DNA, 19 bp, Artificial Sequence
  Synthetic
gcagaggacugaccuccct

SEQ ID NO: 99207 - DNA, 20 bp, Artificial Sequence
  Synthetic
acctgcagcgugtagtctuc

SEQ ID NO: 99208 - DNA, 21 bp, Artificial Sequence
  Synthetic
agacccaccugaggacatuca

SEQ ID NO: 99209 - DNA, 18 bp, Artificial Sequence
  Synthetic
ctcaccuccgagcuggac

SEQ ID NO: 99210 - DNA, 26 bp, Artificial Sequence
  Synthetic
aatgaccttttgcuttgcttttccut

SEQ ID NO: 99211 - DNA, 27 bp, Artificial Sequence
  Synthetic
gttcatcgccuaactaattaactgcug

SEQ ID NO: 99212 - DNA, 20 bp, Artificial Sequence
  Synthetic
ggaagaaggccacagugtuc

SEQ ID NO: 99213 - DNA, 18 bp, Artificial Sequence
  Synthetic
agagugcagagggccuca

SEQ ID NO: 99214 - DNA, 27 bp, Artificial Sequence
  Synthetic
gctgtttuccgcaattctttgaauagt

SEQ ID NO: 99215 - DNA, 26 bp, Artificial Sequence
  Synthetic
ggaaattttgacugaacaagacguga

SEQ ID NO: 99216 - DNA, 21 bp, Artificial Sequence
  Synthetic
ccccaacagagcaucctagut

SEQ ID NO: 99217 - DNA, 29 bp, Artificial Sequence
  Synthetic
ctgcttgtcttccuattgatgatgtatug

SEQ ID NO: 99218 - DNA, 21 bp, Artificial Sequence
  Synthetic
gaggctcacauggtggtguaa

SEQ ID NO: 99219 - DNA, 25 bp, Artificial Sequence
  Synthetic
gtcgtatgtgugttctgatgugaca

SEQ ID NO: 99220 - DNA, 24 bp, Artificial Sequence
  Synthetic
cttacggctuactgcaatgcatuc

SEQ ID NO: 99221 - DNA, 17 bp, Artificial Sequence
  Synthetic
gcccgugttgcagaucc

SEQ ID NO: 99222 - DNA, 20 bp, Artificial Sequence
  Synthetic
caacgagaugctgugcaaga

SEQ ID NO: 99223 - DNA, 20 bp, Artificial Sequence
  Synthetic
ttctcgaucacggcguacag

SEQ ID NO: 99224 - DNA, 23 bp, Artificial Sequence
  Synthetic
gcaagcgacagacacutcuaaaa

SEQ ID NO: 99225 - DNA, 21 bp, Artificial Sequence
  Synthetic
gggaaagcucatcgtagcugt

SEQ ID NO: 99226 - DNA, 27 bp, Artificial Sequence
  Synthetic
actgccaatttuaaggagctgaatuct

SEQ ID NO: 99227 - DNA, 28 bp, Artificial Sequence
  Synthetic
agttctctgatgcutatctgactccuaa

SEQ ID NO: 99228 - DNA, 25 bp, Artificial Sequence
  Synthetic
ccuttgttatctacucaagccagga

SEQ ID NO: 99229 - DNA, 25 bp, Artificial Sequence
  Synthetic
ctttcggcttutatggaaacctuca

SEQ ID NO: 99230 - DNA, 26 bp, Artificial Sequence
  Synthetic
ttttaaccactucaagactgcuccat

SEQ ID NO: 99231 - DNA, 26 bp, Artificial Sequence
  Synthetic
catatagguatcagaauggcaaagca

SEQ ID NO: 99232 - DNA, 24 bp, Artificial Sequence
  Synthetic
tttttgcatuccaggttgctgtut

SEQ ID NO: 99233 - DNA, 25 bp, Artificial Sequence
  Synthetic
tcaagttucggacaacgacttuagt

SEQ ID NO: 99234 - DNA, 22 bp, Artificial Sequence
  Synthetic
gaaccctgugtgatcatgguct

SEQ ID NO: 99235 - DNA, 28 bp, Artificial Sequence
  Synthetic
cagaaagtatcugccacttagtagcaut

SEQ ID NO: 99236 - DNA, 18 bp, Artificial Sequence
  Synthetic
tggcccguctctgcttug

SEQ ID NO: 99237 - DNA, 19 bp, Artificial Sequence
  Synthetic
cgggaggagaguggugagt

SEQ ID NO: 99238 - DNA, 28 bp, Artificial Sequence
  Synthetic
aggctcaguagaacagaaaaaguacaag

SEQ ID NO: 99239 - DNA, 25 bp, Artificial Sequence
  Synthetic
acaaaggttcaaaguccttgagcua

SEQ ID NO: 99240 - DNA, 25 bp, Artificial Sequence
  Synthetic
tcctaccuggcagttttcaaaauga

SEQ ID NO: 99241 - DNA, 25 bp, Artificial Sequence
  Synthetic
tggauggactggcuaaaacaaacat

SEQ ID NO: 99242 - DNA, 29 bp, Artificial Sequence
  Synthetic
gttatttcttacccauctgactgtgtuct

SEQ ID NO: 99243 - DNA, 25 bp, Artificial Sequence
  Synthetic
acagttuggaacaacagcagagaua

SEQ ID NO: 99244 - DNA, 28 bp, Artificial Sequence
  Synthetic
caaaatcctgttcutctcgataggcaua

SEQ ID NO: 99245 - DNA, 29 bp, Artificial Sequence
  Synthetic
ctgtatttattgcuttgcctacttugcat

SEQ ID NO: 99246 - DNA, 19 bp, Artificial Sequence
  Synthetic
cagtgcugattcgcucagg

SEQ ID NO: 99247 - DNA, 27 bp, Artificial Sequence
  Synthetic
cctctcttcttcuttctgctccttcua

SEQ ID NO: 99248 - DNA, 22 bp, Artificial Sequence
  Synthetic
gatggttcaugctctgguggat

SEQ ID NO: 99249 - DNA, 28 bp, Artificial Sequence
  Synthetic
gtgtttaggtcugcatgaatttgatucc

SEQ ID NO: 99250 - DNA, 30 bp, Artificial Sequence
  Synthetic
ggaaaatacucacagcaaatgacattuagg

SEQ ID NO: 99251 - DNA, 26 bp, Artificial Sequence
  Synthetic
caccactaugtgccatttugaaacaa

SEQ ID NO: 99252 - DNA, 28 bp, Artificial Sequence
  Synthetic
ttcaggatcctucaaggaatcaaatuca

SEQ ID NO: 99253 - DNA, 25 bp, Artificial Sequence
  Synthetic
ccaagcauccaacatccaagtuagt

SEQ ID NO: 99254 - DNA, 21 bp, Artificial Sequence
  Synthetic
cggaugcggtattgtugagga

SEQ ID NO: 99255 - DNA, 23 bp, Artificial Sequence
  Synthetic
atttggtucaggaggatgcaugt

SEQ ID NO: 99256 - DNA, 25 bp, Artificial Sequence
  Synthetic
gccacttgaauaaaacaggcagcua

SEQ ID NO: 99257 - DNA, 23 bp, Artificial Sequence
  Synthetic
ggcatgggaauctcttcaucact

SEQ ID NO: 99258 - DNA, 20 bp, Artificial Sequence
  Synthetic
ccctcacugggagtcacugt

SEQ ID NO: 99259 - DNA, 20 bp, Artificial Sequence
  Synthetic
tgtuccccagagcagcatug

SEQ ID NO: 99260 - DNA, 27 bp, Artificial Sequence
  Synthetic
attattccggtuccacagctatuagac

SEQ ID NO: 99261 - DNA, 28 bp, Artificial Sequence
  Synthetic
gtttgtggttgtutgcatgtatactgua

SEQ ID NO: 99262 - DNA, 25 bp, Artificial Sequence
  Synthetic
cattggacugtattttugcccaaga

SEQ ID NO: 99263 - DNA, 24 bp, Artificial Sequence
  Synthetic
agtgtuacgacccagauacagaca

SEQ ID NO: 99264 - DNA, 27 bp, Artificial Sequence
  Synthetic
gtgaaatagcacutcatgttggucaat

SEQ ID NO: 99265 - DNA, 28 bp, Artificial Sequence
  Synthetic
gcttctggatucgagatgtaattttguc

SEQ ID NO: 99266 - DNA, 21 bp, Artificial Sequence
  Synthetic
cgccaagaacgagucatgtut

SEQ ID NO: 99267 - DNA, 26 bp, Artificial Sequence
  Synthetic
ccagggauaagagacaaauggaaaga

SEQ ID NO: 99268 - DNA, 21 bp, Artificial Sequence
  Synthetic
cattgcugccaacatcaucca

SEQ ID NO: 99269 - DNA, 21 bp, Artificial Sequence
  Synthetic
cuccaccttcugcaggacaat

SEQ ID NO: 99270 - DNA, 18 bp, Artificial Sequence
  Synthetic
gcaccgcguacaggugaa

SEQ ID NO: 99271 - DNA, 22 bp, Artificial Sequence
  Synthetic
aggaagctcutaatgccgucag

SEQ ID NO: 99272 - DNA, 30 bp, Artificial Sequence
  Synthetic
accatggatgugaagtcattcuaagaaaaa

SEQ ID NO: 99273 - DNA, 25 bp, Artificial Sequence
  Synthetic
ggagaagaacagutgctgagatcug

SEQ ID NO: 99274 - DNA, 19 bp, Artificial Sequence
  Synthetic
gacguggatcagugggaca

SEQ ID NO: 99275 - DNA, 17 bp, Artificial Sequence
  Synthetic
cccucccacccgcuaca

SEQ ID NO: 99276 - DNA, 23 bp, Artificial Sequence
  Synthetic
ttgctccugatggaattugggat

SEQ ID NO: 99277 - DNA, 26 bp, Artificial Sequence
  Synthetic
ttccaacagcuatcaucaacaacaga

SEQ ID NO: 99278 - DNA, 22 bp, Artificial Sequence
  Synthetic
cagucaacaucagcgcaaagag

SEQ ID NO: 99279 - DNA, 24 bp, Artificial Sequence
  Synthetic
tctaacactgugctcatgtggtut

SEQ ID NO: 99280 - DNA, 21 bp, Artificial Sequence
  Synthetic
actcugagagccccaaaccua

SEQ ID NO: 99281 - DNA, 23 bp, Artificial Sequence
  Synthetic
tgtactccuccccttcttuccag

SEQ ID NO: 99282 - DNA, 27 bp, Artificial Sequence
  Synthetic
aggcuaactaaaacatucggaaacaca

SEQ ID NO: 99283 - DNA, 20 bp, Artificial Sequence
  Synthetic
cccaactccautggcaaguc

SEQ ID NO: 99284 - DNA, 27 bp, Artificial Sequence
  Synthetic
gcatgttucaggaagaaaatucaggat

SEQ ID NO: 99285 - DNA, 28 bp, Artificial Sequence
  Synthetic
aagcgctuagaatcaaaattgtugaaaa

SEQ ID NO: 99286 - DNA, 22 bp, Artificial Sequence
  Synthetic
caaacctgtugctttgccugat

SEQ ID NO: 99287 - DNA, 28 bp, Artificial Sequence
  Synthetic
cagccattagtcauaaatgtttctgcut

SEQ ID NO: 99288 - DNA, 22 bp, Artificial Sequence
  Synthetic
gutggtgttuccagggaggaat

SEQ ID NO: 99289 - DNA, 18 bp, Artificial Sequence
  Synthetic
gcccaucaccucgaccac

SEQ ID NO: 99290 - DNA, 20 bp, Artificial Sequence
  Synthetic
cgatgtcautcgggucacct

SEQ ID NO: 99291 - DNA, 23 bp, Artificial Sequence
  Synthetic
tcacagctgcauctctctcttuc

SEQ ID NO: 99292 - DNA, 23 bp, Artificial Sequence
  Synthetic
cgcauaggaaaagccuaggaaag

SEQ ID NO: 99293 - DNA, 21 bp, Artificial Sequence
  Synthetic
tgtttttcccutcccgucaca

SEQ ID NO: 99294 - DNA, 29 bp, Artificial Sequence
  Synthetic
cgaacaatuaacatgaatgtttugcaagg

SEQ ID NO: 99295 - DNA, 28 bp, Artificial Sequence
  Synthetic
agtcaagaatcutcaaagtgcaaucaga

SEQ ID NO: 99296 - DNA, 28 bp, Artificial Sequence
  Synthetic
tctgattgcacuttgaagattctugact

SEQ ID NO: 99297 - DNA, 21 bp, Artificial Sequence
  Synthetic
gtgtgcugaccgttttcctug

SEQ ID NO: 99298 - DNA, 21 bp, Artificial Sequence
  Synthetic
accaggaugccatccacuaca

SEQ ID NO: 99299 - DNA, 19 bp, Artificial Sequence
  Synthetic
tgccacauccgcctcaaut

SEQ ID NO: 99300 - DNA, 20 bp, Artificial Sequence
  Synthetic
gtcatcctuggcatgggcua

SEQ ID NO: 99301 - DNA, 28 bp, Artificial Sequence
  Synthetic
acacatttaacucaacgtacttctgcut

SEQ ID NO: 99302 - DNA, 19 bp, Artificial Sequence
  Synthetic
gcttccucaggctugcagt

SEQ ID NO: 99303 - DNA, 24 bp, Artificial Sequence
  Synthetic
agagtctccaaggutcagttcuca

SEQ ID NO: 99304 - DNA, 25 bp, Artificial Sequence
  Synthetic
cagtuactgaaacacugacacagga

SEQ ID NO: 99305 - DNA, 20 bp, Artificial Sequence
  Synthetic
gcctgugacagcaagtucca

SEQ ID NO: 99306 - DNA, 23 bp, Artificial Sequence
  Synthetic
acatgcccaucataatgcauggt

SEQ ID NO: 99307 - DNA, 21 bp, Artificial Sequence
  Synthetic
gatctcguggacctccugaag

SEQ ID NO: 99308 - DNA, 24 bp, Artificial Sequence
  Synthetic
acaaggtcaaaugcttctgttgug

SEQ ID NO: 99309 - DNA, 25 bp, Artificial Sequence
  Synthetic
ttggagacguattcttagaggugga

SEQ ID NO: 99310 - DNA, 22 bp, Artificial Sequence
  Synthetic
tctggttucagctagtcuggga

SEQ ID NO: 99311 - DNA, 27 bp, Artificial Sequence
  Synthetic
actgctctagaautaagagggttugga

SEQ ID NO: 99312 - DNA, 23 bp, Artificial Sequence
  Synthetic
agtggttctuactccagccttuc

SEQ ID NO: 99313 - DNA, 25 bp, Artificial Sequence
  Synthetic
cttgccaautctgatggugacaaaa

SEQ ID NO: 99314 - DNA, 24 bp, Artificial Sequence
  Synthetic
tgctttgggagacaugatgttuct

SEQ ID NO: 99315 - DNA, 28 bp, Artificial Sequence
  Synthetic
gctcttccttucctgtgttcttcttuaa

SEQ ID NO: 99316 - DNA, 24 bp, Artificial Sequence
  Synthetic
ccaaagccccucaaaagaaggaut

SEQ ID NO: 99317 - DNA, 21 bp, Artificial Sequence
  Synthetic
gcccatugagagcctgaugac

SEQ ID NO: 99318 - DNA, 20 bp, Artificial Sequence
  Synthetic
ggtggtcaugagcagacgua

SEQ ID NO: 99319 - DNA, 18 bp, Artificial Sequence
  Synthetic
cccugcagagccuggaag

SEQ ID NO: 99320 - DNA, 28 bp, Artificial Sequence
  Synthetic
cttacctaccataugtggccattaacut

SEQ ID NO: 99321 - DNA, 24 bp, Artificial Sequence
  Synthetic
acatagcatcaucctttggtuccc

SEQ ID NO: 99322 - DNA, 19 bp, Artificial Sequence
  Synthetic
gcuccacggagccgatcua

SEQ ID NO: 99323 - DNA, 20 bp, Artificial Sequence
  Synthetic
aagucggtgcugaggaagac

SEQ ID NO: 99324 - DNA, 25 bp, Artificial Sequence
  Synthetic
ggaaggaucttuagaccaacaacga

SEQ ID NO: 99325 - DNA, 28 bp, Artificial Sequence
  Synthetic
ggaaatacguacaaagagtttgcaucat

SEQ ID NO: 99326 - DNA, 18 bp, Artificial Sequence
  Synthetic
gctgccacguccacucac

SEQ ID NO: 99327 - DNA, 21 bp, Artificial Sequence
  Synthetic
ggcuggccagagaagactuac

SEQ ID NO: 99328 - DNA, 27 bp, Artificial Sequence
  Synthetic
gccttggcattuagacatctttgaaut

SEQ ID NO: 99329 - DNA, 29 bp, Artificial Sequence
  Synthetic
tgctattaccaacaaguacctatctcuca

SEQ ID NO: 99330 - DNA, 20 bp, Artificial Sequence
  Synthetic
gctgaagugccactgtccuc

SEQ ID NO: 99331 - DNA, 20 bp, Artificial Sequence
  Synthetic
tgucccatguaccccaacct

SEQ ID NO: 99332 - DNA, 20 bp, Artificial Sequence
  Synthetic
ctggccaucagggtuaccat

SEQ ID NO: 99333 - DNA, 18 bp, Artificial Sequence
  Synthetic
cacagugccagaggcuga

SEQ ID NO: 99334 - DNA, 19 bp, Artificial Sequence
  Synthetic
ccagcatgucgctcagcut

SEQ ID NO: 99335 - DNA, 17 bp, Artificial Sequence
  Synthetic
cgggccuacaucacggt

SEQ ID NO: 99336 - DNA, 19 bp, Artificial Sequence
  Synthetic
cttcagccuctggcacugt

SEQ ID NO: 99337 - DNA, 18 bp, Artificial Sequence
  Synthetic
cgacctctuccgggccua

SEQ ID NO: 99338 - DNA, 24 bp, Artificial Sequence
  Synthetic
agactaguccctgtttcugaagga

SEQ ID NO: 99339 - DNA, 20 bp, Artificial Sequence
  Synthetic
aagactaugcccccucaggt

SEQ ID NO: 99340 - DNA, 22 bp, Artificial Sequence
  Synthetic
aaaacuggagggaggaccaauc

SEQ ID NO: 99341 - DNA, 21 bp, Artificial Sequence
  Synthetic
gcctcaactugcagctaggut

SEQ ID NO: 99342 - DNA, 21 bp, Artificial Sequence
  Synthetic
ctgtggugggaagctcaguaa

SEQ ID NO: 99343 - DNA, 28 bp, Artificial Sequence
  Synthetic
tcagatttgaaaugctaaaccucagagt

SEQ ID NO: 99344 - DNA, 22 bp, Artificial Sequence
  Synthetic
tcgcattcttucggttgccaua

SEQ ID NO: 99345 - DNA, 23 bp, Artificial Sequence
  Synthetic
cgacctatgaugcggagatgtug

SEQ ID NO: 99346 - DNA, 24 bp, Artificial Sequence
  Synthetic
tttaggagagaucagagtggccut

SEQ ID NO: 99347 - DNA, 27 bp, Artificial Sequence
  Synthetic
gaactctttgttuattgctgccguaat

SEQ ID NO: 99348 - DNA, 23 bp, Artificial Sequence
  Synthetic
ccagaggtguctttgctgaaguc

SEQ ID NO: 99349 - DNA, 22 bp, Artificial Sequence
  Synthetic
gggtctguggactatgatggua

SEQ ID NO: 99350 - DNA, 28 bp, Artificial Sequence
  Synthetic
tcattctgttattgucaattcccctgut

SEQ ID NO: 99351 - DNA, 28 bp, Artificial Sequence
  Synthetic
gaacaaccaagcuaatatgccatttuct

SEQ ID NO: 99352 - DNA, 22 bp, Artificial Sequence
  Synthetic
agggagauggaaggaaaugggt

SEQ ID NO: 99353 - DNA, 23 bp, Artificial Sequence
  Synthetic
agucaacaaaacggacagucaga

SEQ ID NO: 99354 - DNA, 33 bp, Artificial Sequence
  Synthetic
tgaagtaatttcuaatttttctgtctcucgact

SEQ ID NO: 99355 - DNA, 25 bp, Artificial Sequence
  Synthetic
gctaaagtguccagcagcaatcuaa

SEQ ID NO: 99356 - DNA, 25 bp, Artificial Sequence
  Synthetic
ccattccttacuccaaatgtgguca

SEQ ID NO: 99357 - DNA, 22 bp, Artificial Sequence
  Synthetic
agtcttgcuggcctttcttcut

SEQ ID NO: 99358 - DNA, 27 bp, Artificial Sequence
  Synthetic
agttgagccuagtaattgcatcatuga

SEQ ID NO: 99359 - DNA, 24 bp, Artificial Sequence
  Synthetic
tttctctttggucgaacaatugcc

SEQ ID NO: 99360 - DNA, 28 bp, Artificial Sequence
  Synthetic
aaaattcacaccuaccacaggtuaaaga

SEQ ID NO: 99361 - DNA, 24 bp, Artificial Sequence
  Synthetic
ggaagcattaucttgaccagcuga

SEQ ID NO: 99362 - DNA, 28 bp, Artificial Sequence
  Synthetic
tctaaacaacagtauaatgcctgcctut

SEQ ID NO: 99363 - DNA, 22 bp, Artificial Sequence
  Synthetic
catggaccccugatgatuccac

SEQ ID NO: 99364 - DNA, 22 bp, Artificial Sequence
  Synthetic
ggatccgaugctctagcagtut

SEQ ID NO: 99365 - DNA, 22 bp, Artificial Sequence
  Synthetic
ccgagctuctatctgggauacc

SEQ ID NO: 99366 - DNA, 21 bp, Artificial Sequence
  Synthetic
ggtgugcaagggtatucggaa

SEQ ID NO: 99367 - DNA, 22 bp, Artificial Sequence
  Synthetic
acacuccgaaucaaagccacaa

SEQ ID NO: 99368 - DNA, 25 bp, Artificial Sequence
  Synthetic
gtaugaagaaacagactggucacct

SEQ ID NO: 99369 - DNA, 26 bp, Artificial Sequence
  Synthetic
tgtttctcctgugacttcttcctgua

SEQ ID NO: 99370 - DNA, 22 bp, Artificial Sequence
  Synthetic
acctgtgutcattcacaugagg

SEQ ID NO: 99371 - DNA, 20 bp, Artificial Sequence
  Synthetic
agagcttgtuctggccgtut

SEQ ID NO: 99372 - DNA, 23 bp, Artificial Sequence
  Synthetic
gggaacctuacccaaaatguggt

SEQ ID NO: 99373 - DNA, 28 bp, Artificial Sequence
  Synthetic
ctgtaacaccagauaccattttcaguct

SEQ ID NO: 99374 - DNA, 18 bp, Artificial Sequence
  Synthetic
accccuttcugggaggca

SEQ ID NO: 99375 - DNA, 21 bp, Artificial Sequence
  Synthetic
ggctcccugtctggagacuat

SEQ ID NO: 99376 - DNA, 24 bp, Artificial Sequence
  Synthetic
gagacacaaucacugacaaaacgg

SEQ ID NO: 99377 - DNA, 21 bp, Artificial Sequence
  Synthetic
ccttccccuttcacactcuca

SEQ ID NO: 99378 - DNA, 17 bp, Artificial Sequence
  Synthetic
gcgcccucaccgtgaug

SEQ ID NO: 99379 - DNA, 17 bp, Artificial Sequence
  Synthetic
gcgccguggttgttcug

SEQ ID NO: 99380 - DNA, 19 bp, Artificial Sequence
  Synthetic
ttgccgtuctctgccguat

SEQ ID NO: 99381 - DNA, 21 bp, Artificial Sequence
  Synthetic
atggctguctctgaaaugcca

SEQ ID NO: 99382 - DNA, 26 bp, Artificial Sequence
  Synthetic
aacatgttttugggtatttctggugt

SEQ ID NO: 99383 - DNA, 20 bp, Artificial Sequence
  Synthetic
gaccucaagcctuccaacct

SEQ ID NO: 99384 - DNA, 22 bp, Artificial Sequence
  Synthetic
gtagtucagaggagtuggcagt

SEQ ID NO: 99385 - DNA, 23 bp, Artificial Sequence
  Synthetic
gccctgttuctgattctgtucca

SEQ ID NO: 99386 - DNA, 23 bp, Artificial Sequence
  Synthetic
ttgagaucacaggtggtgtugag

SEQ ID NO: 99387 - DNA, 28 bp, Artificial Sequence
  Synthetic
tcatggaaacagauctttacaagctcut

SEQ ID NO: 99388 - DNA, 19 bp, Artificial Sequence
  Synthetic
tgcaccaccuaccuccaga

SEQ ID NO: 99389 - DNA, 21 bp, Artificial Sequence
  Synthetic
catcaccugccccttgtagut

SEQ ID NO: 99390 - DNA, 28 bp, Artificial Sequence
  Synthetic
tgatttgtgugaaaattcactgcaucat

SEQ ID NO: 99391 - DNA, 28 bp, Artificial Sequence
  Synthetic
cgctgaactgttuatgtctccagtaaua

SEQ ID NO: 99392 - DNA, 29 bp, Artificial Sequence
  Synthetic
ttctgtgtttaauctgctgtcttaaugga

SEQ ID NO: 99393 - DNA, 27 bp, Artificial Sequence
  Synthetic
catcacaacagagacautcaacaacut

SEQ ID NO: 99394 - DNA, 20 bp, Artificial Sequence
  Synthetic
cctgccuggcattucagaga

SEQ ID NO: 99395 - DNA, 18 bp, Artificial Sequence
  Synthetic
caccatcaccugccccut

SEQ ID NO: 99396 - DNA, 21 bp, Artificial Sequence
  Synthetic
cggcatucccaccaacuacaa

SEQ ID NO: 99397 - DNA, 33 bp, Artificial Sequence
  Synthetic
tagaaaacaauacagtactttctugaaggaaac

SEQ ID NO: 99398 - DNA, 23 bp, Artificial Sequence
  Synthetic
cgaaagcagucagagtcttccut

SEQ ID NO: 99399 - DNA, 28 bp, Artificial Sequence
  Synthetic
aggttcagaagtugcaaataaagcaaug

SEQ ID NO: 99400 - DNA, 22 bp, Artificial Sequence
  Synthetic
gcaagcccacagaugagaaucc

SEQ ID NO: 99401 - DNA, 22 bp, Artificial Sequence
  Synthetic
cacccttugccatctgtctuga

SEQ ID NO: 99402 - DNA, 23 bp, Artificial Sequence
  Synthetic
cattgctgaggugttgtgtctuc

SEQ ID NO: 99403 - DNA, 27 bp, Artificial Sequence
  Synthetic
ttttcaatgcuttgctaaatgugacca

SEQ ID NO: 99404 - DNA, 19 bp, Artificial Sequence
  Synthetic
accccttucaggacccugt

SEQ ID NO: 99405 - DNA, 20 bp, Artificial Sequence
  Synthetic
cttcccugcgtcctttcuct

SEQ ID NO: 99406 - DNA, 21 bp, Artificial Sequence
  Synthetic
cctgaagagcuctcaggctua

SEQ ID NO: 99407 - DNA, 25 bp, Artificial Sequence
  Synthetic
tttgcaacccagaaugactttgtuc

SEQ ID NO: 99408 - DNA, 27 bp, Artificial Sequence
  Synthetic
attattatcgctguctctgaggaguct

SEQ ID NO: 99409 - DNA, 28 bp, Artificial Sequence
  Synthetic
gcgtccaguaataatcttuagacccaaa

SEQ ID NO: 99410 - DNA, 23 bp, Artificial Sequence
  Synthetic
ccaguacccagagaccaagauca

SEQ ID NO: 99411 - DNA, 26 bp, Artificial Sequence
  Synthetic
cagtgaaccguaatttcucaaaagca

SEQ ID NO: 99412 - DNA, 26 bp, Artificial Sequence
  Synthetic
cattaacaccautatgttugcagcca

SEQ ID NO: 99413 - DNA, 25 bp, Artificial Sequence
  Synthetic
gctucagaaggatcauaccagacat

SEQ ID NO: 99414 - DNA, 20 bp, Artificial Sequence
  Synthetic
agcctgtugcaatggtccuc

SEQ ID NO: 99415 - DNA, 28 bp, Artificial Sequence
  Synthetic
gctaacatgaatccutgtctccttacuc

SEQ ID NO: 99416 - DNA, 28 bp, Artificial Sequence
  Synthetic
ttgttccttgtauaagaaatggtgcuga

SEQ ID NO: 99417 - DNA, 26 bp, Artificial Sequence
  Synthetic
acaggagguacactcagtgaaattug

SEQ ID NO: 99418 - DNA, 26 bp, Artificial Sequence
  Synthetic
gccagatcucacaggaattacacuat

SEQ ID NO: 99419 - DNA, 30 bp, Artificial Sequence
  Synthetic
cctcacacgttatutaataggactgtacut

SEQ ID NO: 99420 - DNA, 21 bp, Artificial Sequence
  Synthetic
ctcuccaacacccgtacauca

SEQ ID NO: 99421 - DNA, 28 bp, Artificial Sequence
  Synthetic
ctcctccaaaccuaactgtcattcuaac

SEQ ID NO: 99422 - DNA, 27 bp, Artificial Sequence
  Synthetic
gagattggagaautccctgtgttttuc

SEQ ID NO: 99423 - DNA, 28 bp, Artificial Sequence
  Synthetic
gtctcactcuctatctgaatatcuccgt

SEQ ID NO: 99424 - DNA, 20 bp, Artificial Sequence
  Synthetic
tcaccccuactcccaacuga

SEQ ID NO: 99425 - DNA, 21 bp, Artificial Sequence
  Synthetic
gtcactttcuccctccaucca

SEQ ID NO: 99426 - DNA, 28 bp, Artificial Sequence
  Synthetic
cagtgtcgtatugttgatctgatauggt

SEQ ID NO: 99427 - DNA, 27 bp, Artificial Sequence
  Synthetic
tcaatcctaauaggcagagaagagcua

SEQ ID NO: 99428 - DNA, 24 bp, Artificial Sequence
  Synthetic
tggcataguggaacatgtgatuga

SEQ ID NO: 99429 - DNA, 27 bp, Artificial Sequence
  Synthetic
gcttgguaacacatgctgtatuaaacc

SEQ ID NO: 99430 - DNA, 23 bp, Artificial Sequence
  Synthetic
caggtcaugggttataggugcaa

SEQ ID NO: 99431 - DNA, 28 bp, Artificial Sequence
  Synthetic
ccctgtagagaautgaaaatggugaaga

SEQ ID NO: 99432 - DNA, 21 bp, Artificial Sequence
  Synthetic
gcctttcugaggcagggttua

SEQ ID NO: 99433 - DNA, 20 bp, Artificial Sequence
  Synthetic
cagguagaaagugcgaggct

SEQ ID NO: 99434 - DNA, 22 bp, Artificial Sequence
  Synthetic
agcacagtcaucatggcctauc

SEQ ID NO: 99435 - DNA, 28 bp, Artificial Sequence
  Synthetic
gctttgctatcaugaaatgtatgccaut

SEQ ID NO: 99436 - DNA, 24 bp, Artificial Sequence
  Synthetic
agcagagaaccuaccagaaacuca

SEQ ID NO: 99437 - DNA, 19 bp, Artificial Sequence
  Synthetic
acaccaagggacgaugugg

SEQ ID NO: 99438 - DNA, 28 bp, Artificial Sequence
  Synthetic
gcgaatatcttgacucctttaaggtgut

SEQ ID NO: 99439 - DNA, 23 bp, Artificial Sequence
  Synthetic
cctttccaaacutgaggctcugt

SEQ ID NO: 99440 - DNA, 22 bp, Artificial Sequence
  Synthetic
acccctuccaggagttttcuct

SEQ ID NO: 99441 - DNA, 24 bp, Artificial Sequence
  Synthetic
cagtcutttatcagcuggacagga

SEQ ID NO: 99442 - DNA, 23 bp, Artificial Sequence
  Synthetic
ggaaaaagucaggaucccagcaa

SEQ ID NO: 99443 - DNA, 20 bp, Artificial Sequence
  Synthetic
ccucccgaacacacactcuc

SEQ ID NO: 99444 - DNA, 25 bp, Artificial Sequence
  Synthetic
gaagatttaucagcgtgcattuggt

SEQ ID NO: 99445 - DNA, 21 bp, Artificial Sequence
  Synthetic
gcggcctuacccttccataua

SEQ ID NO: 99446 - DNA, 20 bp, Artificial Sequence
  Synthetic
ctgatucggccagagctcut

SEQ ID NO: 99447 - DNA, 24 bp, Artificial Sequence
  Synthetic
tcctcttttcutatcctccugcca

SEQ ID NO: 99448 - DNA, 17 bp, Artificial Sequence
  Synthetic
gaagggcgcaggcugua

SEQ ID NO: 99449 - DNA, 18 bp, Artificial Sequence
  Synthetic
cccacaccuccagccuct

SEQ ID NO: 99450 - DNA, 20 bp, Artificial Sequence
  Synthetic
ggactggccacucgctatug

SEQ ID NO: 99451 - DNA, 20 bp, Artificial Sequence
  Synthetic
ccacgctgcugttctctgut

SEQ ID NO: 99452 - DNA, 24 bp, Artificial Sequence
  Synthetic
gggttcacuagagacctctgucat

SEQ ID NO: 99453 - DNA, 23 bp, Artificial Sequence
  Synthetic
cacaaaagcacuttccuccacag

SEQ ID NO: 99454 - DNA, 26 bp, Artificial Sequence
  Synthetic
gcatgattguacatctctctctugga

SEQ ID NO: 99455 - DNA, 28 bp, Artificial Sequence
  Synthetic
aauattttgctagatucacagggacaca

SEQ ID NO: 99456 - DNA, 24 bp, Artificial Sequence
  Synthetic
agaguccgaagtcaguaaggacaa

SEQ ID NO: 99457 - DNA, 28 bp, Artificial Sequence
  Synthetic
cagtgaaccuaaaatgcctctaauacct

SEQ ID NO: 99458 - DNA, 25 bp, Artificial Sequence
  Synthetic
cagaaagtttgaautcccagccauc

SEQ ID NO: 99459 - DNA, 25 bp, Artificial Sequence
  Synthetic
ggtgtaatgatucacaatggctugt

SEQ ID NO: 99460 - DNA, 22 bp, Artificial Sequence
  Synthetic
gcagtccacaaaagaugggcua

SEQ ID NO: 99461 - DNA, 20 bp, Artificial Sequence
  Synthetic
gagcgcuacgatguggaaac

SEQ ID NO: 99462 - DNA, 21 bp, Artificial Sequence
  Synthetic
gctacgaaaguccacgtcuct

SEQ ID NO: 99463 - DNA, 22 bp, Artificial Sequence
  Synthetic
cttctctgcauggtgcccttua

SEQ ID NO: 99464 - DNA, 21 bp, Artificial Sequence
  Synthetic
cggccaccaugttgcttcaua

SEQ ID NO: 99465 - DNA, 27 bp, Artificial Sequence
  Synthetic
accttctgaauaacaaaggccactuac

SEQ ID NO: 99466 - DNA, 22 bp, Artificial Sequence
  Synthetic
ccctcccaccugatgtgttcua

SEQ ID NO: 99467 - DNA, 25 bp, Artificial Sequence
  Synthetic
gtttgacatugacattcggcuacag

SEQ ID NO: 99468 - DNA, 20 bp, Artificial Sequence
  Synthetic
cagccccuggattcgtacuc

SEQ ID NO: 99469 - DNA, 23 bp, Artificial Sequence
  Synthetic
atgacctcucctgtggttttucc

SEQ ID NO: 99470 - DNA, 28 bp, Artificial Sequence
  Synthetic
atgaatcatgtgccuaggaaaagtagut

SEQ ID NO: 99471 - DNA, 22 bp, Artificial Sequence
  Synthetic
ctgacatgcutgcagcttctuc

SEQ ID NO: 99472 - DNA, 20 bp, Artificial Sequence
  Synthetic
ccccgcauctccttgtccua

SEQ ID NO: 99473 - DNA, 20 bp, Artificial Sequence
  Synthetic
ccttcccuttcaggcuccag

SEQ ID NO: 99474 - DNA, 22 bp, Artificial Sequence
  Synthetic
ggaaaugggcattgtucaagca

SEQ ID NO: 99475 - DNA, 24 bp, Artificial Sequence
  Synthetic
ctcctgaggautctgccatttcuc

SEQ ID NO: 99476 - DNA, 22 bp, Artificial Sequence
  Synthetic
catcctcacuccccagatcuca

SEQ ID NO: 99477 - DNA, 28 bp, Artificial Sequence
  Synthetic
ggactgagtagugtatatgtttgugcag

SEQ ID NO: 99478 - DNA, 21 bp, Artificial Sequence
  Synthetic
cacaacctuctgctccaucag

SEQ ID NO: 99479 - DNA, 22 bp, Artificial Sequence
  Synthetic
cccaggaugctaatggtctugt

SEQ ID NO: 99480 - DNA, 26 bp, Artificial Sequence
  Synthetic
cgcaacttauggctttttcattgugt

SEQ ID NO: 99481 - DNA, 22 bp, Artificial Sequence
  Synthetic
ggatggtgtuacggtcactcug

SEQ ID NO: 99482 - DNA, 22 bp, Artificial Sequence
  Synthetic
gcaauattguagggagcaggca

SEQ ID NO: 99483 - DNA, 24 bp, Artificial Sequence
  Synthetic
ctgtttcccuggtctgttttucag

SEQ ID NO: 99484 - DNA, 21 bp, Artificial Sequence
  Synthetic
gcattgcugcagagtcttugg

SEQ ID NO: 99485 - DNA, 22 bp, Artificial Sequence
  Synthetic
tctgcagagcuacacagttugg

SEQ ID NO: 99486 - DNA, 28 bp, Artificial Sequence
  Synthetic
caaagaaggaacagguatacttucaggt

SEQ ID NO: 99487 - DNA, 24 bp, Artificial Sequence
  Synthetic
ccctggtugataaaacatcgugga

SEQ ID NO: 99488 - DNA, 28 bp, Artificial Sequence
  Synthetic
aaagcgaacacaugtaattttccttugt

SEQ ID NO: 99489 - DNA, 25 bp, Artificial Sequence
  Synthetic
tggacagcgaagcuctataggauag

SEQ ID NO: 99490 - DNA, 19 bp, Artificial Sequence
  Synthetic
gagctcccucctgtccuga

SEQ ID NO: 99491 - DNA, 19 bp, Artificial Sequence
  Synthetic
tcagctcgcaguccaggua

SEQ ID NO: 99492 - DNA, 25 bp, Artificial Sequence
  Synthetic
gaagagugcattcccaugaagagaa

SEQ ID NO: 99493 - DNA, 22 bp, Artificial Sequence
  Synthetic
tggagactguggtcttctucct

SEQ ID NO: 99494 - DNA, 22 bp, Artificial Sequence
  Synthetic
gaacuaucagaagccccaggaa

SEQ ID NO: 99495 - DNA, 22 bp, Artificial Sequence
  Synthetic
tcatggagguaccagtuacggt

SEQ ID NO: 99496 - DNA, 26 bp, Artificial Sequence
  Synthetic
acatcagagutactttcuggcaagac

SEQ ID NO: 99497 - DNA, 28 bp, Artificial Sequence
  Synthetic
agccttcauaccaaacttcaatcaauga

SEQ ID NO: 99498 - DNA, 20 bp, Artificial Sequence
  Synthetic
tuccaaggccaagaagcugt

SEQ ID NO: 99499 - DNA, 21 bp, Artificial Sequence
  Synthetic
tgctgtgugccactctctaug

SEQ ID NO: 99500 - DNA, 21 bp, Artificial Sequence
  Synthetic
gcaggtgcucaagtacgaguc

SEQ ID NO: 99501 - DNA, 20 bp, Artificial Sequence
  Synthetic
ggcugggatucccacagaac

SEQ ID NO: 99502 - DNA, 26 bp, Artificial Sequence
  Synthetic
ctggccttcugttcccaatatuaaga

SEQ ID NO: 99503 - DNA, 25 bp, Artificial Sequence
  Synthetic
gatcaaccaagccaaautccucaac

SEQ ID NO: 99504 - DNA, 24 bp, Artificial Sequence
  Synthetic
ccgagauaaaaccctgaggtcuct

SEQ ID NO: 99505 - DNA, 22 bp, Artificial Sequence
  Synthetic
tgtcgatcuctctgttguccga

SEQ ID NO: 99506 - DNA, 28 bp, Artificial Sequence
  Synthetic
ctgatttgcatcutcacattttgcttut

SEQ ID NO: 99507 - DNA, 26 bp, Artificial Sequence
  Synthetic
cttcactgguatcaatgtaggtugct

SEQ ID NO: 99508 - DNA, 21 bp, Artificial Sequence
  Synthetic
ctgcttatuggcctcugagga

SEQ ID NO: 99509 - DNA, 22 bp, Artificial Sequence
  Synthetic
gtggccccucctaatttgacut

SEQ ID NO: 99510 - DNA, 18 bp, Artificial Sequence
  Synthetic
ccgcatugccgagaucca

SEQ ID NO: 99511 - DNA, 20 bp, Artificial Sequence
  Synthetic
gaagtauggagccgccacut

SEQ ID NO: 99512 - DNA, 23 bp, Artificial Sequence
  Synthetic
tttaccugaagctgttccuggag

SEQ ID NO: 99513 - DNA, 26 bp, Artificial Sequence
  Synthetic
tttccctgagugtgaattttccucaa

SEQ ID NO: 99514 - DNA, 22 bp, Artificial Sequence
  Synthetic
cccagaagaggaguagggtcuc

SEQ ID NO: 99515 - DNA, 28 bp, Artificial Sequence
  Synthetic
gatgttcctcaaautctgaaacttgcua

SEQ ID NO: 99516 - DNA, 22 bp, Artificial Sequence
  Synthetic
cgcagagagcuatcctgugaga

SEQ ID NO: 99517 - DNA, 21 bp, Artificial Sequence
  Synthetic
gcatcuggcagataacaucgg

SEQ ID NO: 99518 - DNA, 24 bp, Artificial Sequence
  Synthetic
cttggtauggctgcttctauggat

SEQ ID NO: 99519 - DNA, 23 bp, Artificial Sequence
  Synthetic
tcttcaggugctttaggtcucca

SEQ ID NO: 99520 - DNA, 24 bp, Artificial Sequence
  Synthetic
tgaccctgcucagatggagaauat

SEQ ID NO: 99521 - DNA, 28 bp, Artificial Sequence
  Synthetic
acatgtaacacagautgatgtugaaggt

SEQ ID NO: 99522 - DNA, 27 bp, Artificial Sequence
  Synthetic
aatcccaccccautctttaactctuac

SEQ ID NO: 99523 - DNA, 25 bp, Artificial Sequence
  Synthetic
actgagtcgtcugctcttctctuaa

SEQ ID NO: 99524 - DNA, 24 bp, Artificial Sequence
  Synthetic
gcttcgtugtacttactuggcaga

SEQ ID NO: 99525 - DNA, 28 bp, Artificial Sequence
  Synthetic
cagcatcatcagugtaaacaaaaaguca

SEQ ID NO: 99526 - DNA, 22 bp, Artificial Sequence
  Synthetic
ctttttgtcauggccacaugct

SEQ ID NO: 99527 - DNA, 22 bp, Artificial Sequence
  Synthetic
tcacagtggagutccgcatuac

SEQ ID NO: 99528 - DNA, 27 bp, Artificial Sequence
  Synthetic
gttagagttgcautccatttggugaaa

SEQ ID NO: 99529 - DNA, 25 bp, Artificial Sequence
  Synthetic
gtcggacucaaacaaatgttcacuc

SEQ ID NO: 99530 - DNA, 28 bp, Artificial Sequence
  Synthetic
gtcctggacuactaaaaggagtauacca

SEQ ID NO: 99531 - DNA, 24 bp, Artificial Sequence
  Synthetic
actcagtcaggguatcagttcugt

SEQ ID NO: 99532 - DNA, 26 bp, Artificial Sequence
  Synthetic
tgtgtgtggcauatacaggtauaggt

SEQ ID NO: 99533 - DNA, 28 bp, Artificial Sequence
  Synthetic
gcatgtaatcacautggaggttatcugt

SEQ ID NO: 99534 - DNA, 27 bp, Artificial Sequence
  Synthetic
agatttattataugccctggacuccct

SEQ ID NO: 99535 - DNA, 22 bp, Artificial Sequence
  Synthetic
gtgcgcuctttgtugaagaaca

SEQ ID NO: 99536 - DNA, 27 bp, Artificial Sequence
  Synthetic
tttgtgcttaactuaccactgactcut

SEQ ID NO: 99537 - DNA, 25 bp, Artificial Sequence
  Synthetic
acaaaagcugattctgtcaucacca

SEQ ID NO: 99538 - DNA, 21 bp, Artificial Sequence
  Synthetic
cctcccaagcugaggctttut

SEQ ID NO: 99539 - DNA, 25 bp, Artificial Sequence
  Synthetic
ctatctgcgacutgaagagaaccut

SEQ ID NO: 99540 - DNA, 21 bp, Artificial Sequence
  Synthetic
tucaggtgctuaaggcgacaa

SEQ ID NO: 99541 - DNA, 28 bp, Artificial Sequence
  Synthetic
ccctcccatacagucaactatgaatgua

SEQ ID NO: 99542 - DNA, 21 bp, Artificial Sequence
  Synthetic
gcttgtgucccagctcugaac

SEQ ID NO: 99543 - DNA, 21 bp, Artificial Sequence
  Synthetic
atgcugaagaccactggucac

SEQ ID NO: 99544 - DNA, 24 bp, Artificial Sequence
  Synthetic
gctcaaggaaagccauttcatugt

SEQ ID NO: 99545 - DNA, 21 bp, Artificial Sequence
  Synthetic
ctgggcucagacgucaaagat

SEQ ID NO: 99546 - DNA, 22 bp, Artificial Sequence
  Synthetic
tcatccgccuccttcatctcua

SEQ ID NO: 99547 - DNA, 20 bp, Artificial Sequence
  Synthetic
ggatgcugccttctccucac

SEQ ID NO: 99548 - DNA, 19 bp, Artificial Sequence
  Synthetic
ccctcaccacacuccccut

SEQ ID NO: 99549 - DNA, 24 bp, Artificial Sequence
  Synthetic
cgggaagaaaugacagcaauacag

SEQ ID NO: 99550 - DNA, 27 bp, Artificial Sequence
  Synthetic
caggatttgtagugtatgatggagcut

SEQ ID NO: 99551 - DNA, 23 bp, Artificial Sequence
  Synthetic
ctatgtcagauttgccuccccat

SEQ ID NO: 99552 - DNA, 23 bp, Artificial Sequence
  Synthetic
cggccaaaaucaatguggaacat

SEQ ID NO: 99553 - DNA, 24 bp, Artificial Sequence
  Synthetic
ctttatgtcctcucctcccatcug

SEQ ID NO: 99554 - DNA, 24 bp, Artificial Sequence
  Synthetic
gtctaccucctggaaagauaccct

SEQ ID NO: 99555 - DNA, 18 bp, Artificial Sequence
  Synthetic
cacuggcgacagcuggaa

SEQ ID NO: 99556 - DNA, 18 bp, Artificial Sequence
  Synthetic
cccggtucttccagcugt

SEQ ID NO: 99557 - DNA, 22 bp, Artificial Sequence
  Synthetic
gcaagaacaugtcggagtucct

SEQ ID NO: 99558 - DNA, 18 bp, Artificial Sequence
  Synthetic
gctgucgccagtgtuggt

SEQ ID NO: 99559 - DNA, 19 bp, Artificial Sequence
  Synthetic
cctgaccacccutcccuga

SEQ ID NO: 99560 - DNA, 22 bp, Artificial Sequence
  Synthetic
ggagaacaaaguggcuggaact

SEQ ID NO: 99561 - DNA, 21 bp, Artificial Sequence
  Synthetic
gggcaaaauccaacagcauca

SEQ ID NO: 99562 - DNA, 28 bp, Artificial Sequence
  Synthetic
agaaggacaaaggaautcagaagatuca

SEQ ID NO: 99563 - DNA, 23 bp, Artificial Sequence
  Synthetic
cgatttcgctucttcagtggtut

SEQ ID NO: 99564 - DNA, 27 bp, Artificial Sequence
  Synthetic
ctgggtacauaagaaggtgaacagtut

SEQ ID NO: 99565 - DNA, 21 bp, Artificial Sequence
  Synthetic
tgccctcutgttcccaucaac

SEQ ID NO: 99566 - DNA, 22 bp, Artificial Sequence
  Synthetic
aacccgaggutttcactucact

SEQ ID NO: 99567 - DNA, 28 bp, Artificial Sequence
  Synthetic
caaactggtatagauccttacccccuaa

SEQ ID NO: 99568 - DNA, 17 bp, Artificial Sequence
  Synthetic
cugccgagggcucacaa

SEQ ID NO: 99569 - DNA, 17 bp, Artificial Sequence
  Synthetic
cggccccucagaccuac

SEQ ID NO: 99570 - DNA, 26 bp, Artificial Sequence
  Synthetic
caattaccatgauacctcccctuacc

SEQ ID NO: 99571 - DNA, 23 bp, Artificial Sequence
  Synthetic
gcagtaucccatgttcctucgat

SEQ ID NO: 99572 - DNA, 28 bp, Artificial Sequence
  Synthetic
atcacatttccatugtccttcaactcua

SEQ ID NO: 99573 - DNA, 23 bp, Artificial Sequence
  Synthetic
ctcgaaugaactgtggttuccag

SEQ ID NO: 99574 - DNA, 28 bp, Artificial Sequence
  Synthetic
cacaaatcugaccctacauacagaagaa

SEQ ID NO: 99575 - DNA, 21 bp, Artificial Sequence
  Synthetic
ggtgtttgcautgctcaguca

SEQ ID NO: 99576 - DNA, 22 bp, Artificial Sequence
  Synthetic
cctcaggcutactucaggcaaa

SEQ ID NO: 99577 - DNA, 20 bp, Artificial Sequence
  Synthetic
tgaatuccccacgguggaaa

SEQ ID NO: 99578 - DNA, 23 bp, Artificial Sequence
  Synthetic
agaggctgugagatggcatatuc

SEQ ID NO: 99579 - DNA, 20 bp, Artificial Sequence
  Synthetic
gaacucacagggccucagat

SEQ ID NO: 99580 - DNA, 25 bp, Artificial Sequence
  Synthetic
aaggtctttgcuggtgataatugga

SEQ ID NO: 99581 - DNA, 28 bp, Artificial Sequence
  Synthetic
ggctaaacaacagagautttcctccuaa

SEQ ID NO: 99582 - DNA, 28 bp, Artificial Sequence
  Synthetic
agcgtgaaatttuaagttgccaagaaut

SEQ ID NO: 99583 - DNA, 22 bp, Artificial Sequence
  Synthetic
ctggactgggcuatctcactuc

SEQ ID NO: 99584 - DNA, 21 bp, Artificial Sequence
  Synthetic
tutgggactcugacggcaaat

SEQ ID NO: 99585 - DNA, 25 bp, Artificial Sequence
  Synthetic
tcttgtgauggaatatgcugaaggg

SEQ ID NO: 99586 - DNA, 28 bp, Artificial Sequence
  Synthetic
gataaagacagguctaatgacacucacc

SEQ ID NO: 99587 - DNA, 22 bp, Artificial Sequence
  Synthetic
gccctaagaugatggagctuct

SEQ ID NO: 99588 - DNA, 28 bp, Artificial Sequence
  Synthetic
attggtcactttutgttttggttctuga

SEQ ID NO: 99589 - DNA, 25 bp, Artificial Sequence
  Synthetic
atctcgattacutggacttgtuggg

SEQ ID NO: 99590 - DNA, 25 bp, Artificial Sequence
  Synthetic
aacaaauacatuaggagcgaaggct

SEQ ID NO: 99591 - DNA, 28 bp, Artificial Sequence
  Synthetic
gaagaagcacucaaacagttuaagcaaa

SEQ ID NO: 99592 - DNA, 23 bp, Artificial Sequence
  Synthetic
ctcaccagauaggagguccagat

SEQ ID NO: 99593 - DNA, 23 bp, Artificial Sequence
  Synthetic
aacaaactcuaggtccuggcaag

SEQ ID NO: 99594 - DNA, 23 bp, Artificial Sequence
  Synthetic
ccaagtcctgutcctgactccua

SEQ ID NO: 99595 - DNA, 22 bp, Artificial Sequence
  Synthetic
gagggaggagcuaaacggtuac

SEQ ID NO: 99596 - DNA, 20 bp, Artificial Sequence
  Synthetic
gcguggatcaagugccagat

SEQ ID NO: 99597 - DNA, 25 bp, Artificial Sequence
  Synthetic
cattttcttuccccatcttcaccuc

SEQ ID NO: 99598 - DNA, 17 bp, Artificial Sequence
  Synthetic
ggcacggccaugaucac

SEQ ID NO: 99599 - DNA, 24 bp, Artificial Sequence
  Synthetic
caucacatgctuacaagacacaca

SEQ ID NO: 99600 - DNA, 20 bp, Artificial Sequence
  Synthetic
agccatgcugcacgacttua

SEQ ID NO: 99601 - DNA, 26 bp, Artificial Sequence
  Synthetic
gagaacacagaaaauauagccaccgt

SEQ ID NO: 99602 - DNA, 21 bp, Artificial Sequence
  Synthetic
ccctgagcgccucatcaaaut

SEQ ID NO: 99603 - DNA, 28 bp, Artificial Sequence
  Synthetic
gcagactttgauatttgcacatctcuac

SEQ ID NO: 99604 - DNA, 21 bp, Artificial Sequence
  Synthetic
ctgaatcugggctgagccaua

SEQ ID NO: 99605 - DNA, 21 bp, Artificial Sequence
  Synthetic
ccugcagtcatugcagaacca

SEQ ID NO: 99606 - DNA, 21 bp, Artificial Sequence
  Synthetic
ccggatcucagtgtctuggga

SEQ ID NO: 99607 - DNA, 17 bp, Artificial Sequence
  Synthetic
tgagcgugccccguaac

SEQ ID NO: 99608 - DNA, 22 bp, Artificial Sequence
  Synthetic
cctgaacaucgagatgccugac

SEQ ID NO: 99609 - DNA, 26 bp, Artificial Sequence
  Synthetic
aagtactguaaagcgaacacatguga

SEQ ID NO: 99610 - DNA, 24 bp, Artificial Sequence
  Synthetic
gugggaataaaaaugcgacacact

SEQ ID NO: 99611 - DNA, 22 bp, Artificial Sequence
  Synthetic
acctgagcagcucttcaatcuc

SEQ ID NO: 99612 - DNA, 33 bp, Artificial Sequence
  Synthetic
tgtgttactagauatgattgctattttuaaggg

SEQ ID NO: 99613 - DNA, 28 bp, Artificial Sequence
  Synthetic
tcccaaatagacuccatgattcguagaa

SEQ ID NO: 99614 - DNA, 19 bp, Artificial Sequence
  Synthetic
ctgugtttcgaugcccaga

SEQ ID NO: 99615 - DNA, 26 bp, Artificial Sequence
  Synthetic
ttttcaaacgagcugagaggtctaut

SEQ ID NO: 99616 - DNA, 22 bp, Artificial Sequence
  Synthetic
gcatagatguggccatcgauga

SEQ ID NO: 99617 - DNA, 17 bp, Artificial Sequence
  Synthetic
gtgggcgggcugttgua

SEQ ID NO: 99618 - DNA, 28 bp, Artificial Sequence
  Synthetic
caattcaaaautcagaguccaaccaaca

SEQ ID NO: 99619 - DNA, 21 bp, Artificial Sequence
  Synthetic
gctttgtgugtgaccugcaga

SEQ ID NO: 99620 - DNA, 18 bp, Artificial Sequence
  Synthetic
gtcgggcgagutgtucct

SEQ ID NO: 99621 - DNA, 19 bp, Artificial Sequence
  Synthetic
gctactuccgacagucgct

SEQ ID NO: 99622 - DNA, 20 bp, Artificial Sequence
  Synthetic
gggttguaagcctccaggua

SEQ ID NO: 99623 - DNA, 17 bp, Artificial Sequence
  Synthetic
acucccgcugcaaggac

SEQ ID NO: 99624 - DNA, 23 bp, Artificial Sequence
  Synthetic
tcctcgaagaucttgaccaggua

SEQ ID NO: 99625 - DNA, 23 bp, Artificial Sequence
  Synthetic
catcaacugggtcaaguacgact

SEQ ID NO: 99626 - DNA, 20 bp, Artificial Sequence
  Synthetic
ccatcactcgucggcatcug

SEQ ID NO: 99627 - DNA, 19 bp, Artificial Sequence
  Synthetic
ccgtggccuacgctacuat

SEQ ID NO: 99628 - DNA, 25 bp, Artificial Sequence
  Synthetic
cutaacaaggcucaaagaagaggga

SEQ ID NO: 99629 - DNA, 21 bp, Artificial Sequence
  Synthetic
tctcuccaagggctggtauct

SEQ ID NO: 99630 - DNA, 27 bp, Artificial Sequence
  Synthetic
tgtcttgtggaugatgtttttgtcgua

SEQ ID NO: 99631 - DNA, 28 bp, Artificial Sequence
  Synthetic
cttgtagattttugcctactcctcctut

SEQ ID NO: 99632 - DNA, 23 bp, Artificial Sequence
  Synthetic
gggacttgatutccaggcttcuc

SEQ ID NO: 99633 - DNA, 21 bp, Artificial Sequence
  Synthetic
agcucccugaacacacacaaa

SEQ ID NO: 99634 - DNA, 21 bp, Artificial Sequence
  Synthetic
cacccagaugcttcaggugag

SEQ ID NO: 99635 - DNA, 24 bp, Artificial Sequence
  Synthetic
ccaagcagaggacaucagcauaat

SEQ ID NO: 99636 - DNA, 27 bp, Artificial Sequence
  Synthetic
catacctggaacugaattagtggauga

SEQ ID NO: 99637 - DNA, 27 bp, Artificial Sequence
  Synthetic
aattggcaauccaaaaacgtttgacua

SEQ ID NO: 99638 - DNA, 25 bp, Artificial Sequence
  Synthetic
ccataggcucatttttcaggcuagt

SEQ ID NO: 99639 - DNA, 28 bp, Artificial Sequence
  Synthetic
gaactattugctttctctuccacacaaa

SEQ ID NO: 99640 - DNA, 25 bp, Artificial Sequence
  Synthetic
gctaacttcaucttccttcccauga

SEQ ID NO: 99641 - DNA, 20 bp, Artificial Sequence
  Synthetic
ccatctcccuccccctucag

SEQ ID NO: 99642 - DNA, 26 bp, Artificial Sequence
  Synthetic
ccauagtgttcuaagaacggaagcat

SEQ ID NO: 99643 - DNA, 19 bp, Artificial Sequence
  Synthetic
cagaacacucgcggtucac

SEQ ID NO: 99644 - DNA, 22 bp, Artificial Sequence
  Synthetic
gcctgttccauggcaccttaut

SEQ ID NO: 99645 - DNA, 28 bp, Artificial Sequence
  Synthetic
tgtgtagtcattuaccttggtcctgaua

SEQ ID NO: 99646 - DNA, 22 bp, Artificial Sequence
  Synthetic
gctcttgaccaucggaaacuct

SEQ ID NO: 99647 - DNA, 21 bp, Artificial Sequence
  Synthetic
aagaggagcutcaaggctgug

SEQ ID NO: 99648 - DNA, 27 bp, Artificial Sequence
  Synthetic
cagaaggagaagugagcaaaggaaaua

SEQ ID NO: 99649 - DNA, 25 bp, Artificial Sequence
  Synthetic
agaggctgccauaaatcgaaatuca

SEQ ID NO: 99650 - DNA, 24 bp, Artificial Sequence
  Synthetic
ttgccttugagttcagauccaact

SEQ ID NO: 99651 - DNA, 24 bp, Artificial Sequence
  Synthetic
gcattttctcuggattggcucaga

SEQ ID NO: 99652 - DNA, 18 bp, Artificial Sequence
  Synthetic
ggctcuccagcctcccua

SEQ ID NO: 99653 - DNA, 17 bp, Artificial Sequence
  Synthetic
gtgccccgcugacugat

SEQ ID NO: 99654 - DNA, 25 bp, Artificial Sequence
  Synthetic
aaaaatttccacuttgcgtctccug

SEQ ID NO: 99655 - DNA, 22 bp, Artificial Sequence
  Synthetic
ttgagcgcuaacgtctttcugt

SEQ ID NO: 99656 - DNA, 22 bp, Artificial Sequence
  Synthetic
gagccaauccagagaaaaugcc

SEQ ID NO: 99657 - DNA, 27 bp, Artificial Sequence
  Synthetic
tgacctactgagugtatacaactucct

SEQ ID NO: 99658 - DNA, 18 bp, Artificial Sequence
  Synthetic
gaagacuccgagcugcga

SEQ ID NO: 99659 - DNA, 23 bp, Artificial Sequence
  Synthetic
cacccgggaaguaagatcttuca

SEQ ID NO: 99660 - DNA, 27 bp, Artificial Sequence
  Synthetic
tggtggtaauggaagaggaagatuaga

SEQ ID NO: 99661 - DNA, 23 bp, Artificial Sequence
  Synthetic
ccttccccttucttgcccctaua

SEQ ID NO: 99662 - DNA, 23 bp, Artificial Sequence
  Synthetic
gggaccttgauggtttcttcuca

SEQ ID NO: 99663 - DNA, 25 bp, Artificial Sequence
  Synthetic
agggcuagataagcctuaacacaga

SEQ ID NO: 99664 - DNA, 23 bp, Artificial Sequence
  Synthetic
ggatcagttugctttgcatggug

SEQ ID NO: 99665 - DNA, 26 bp, Artificial Sequence
  Synthetic
caacaacactuactgtctccaugagt

SEQ ID NO: 99666 - DNA, 24 bp, Artificial Sequence
  Synthetic
gcccagagauactgaagcactuaa

SEQ ID NO: 99667 - DNA, 28 bp, Artificial Sequence
  Synthetic
gcagagaagcuggaacaatttuagaaaa

SEQ ID NO: 99668 - DNA, 21 bp, Artificial Sequence
  Synthetic
cccuttatuccagccgacaag

SEQ ID NO: 99669 - DNA, 25 bp, Artificial Sequence
  Synthetic
tttcagcutaatttcuggagagcca

SEQ ID NO: 99670 - DNA, 28 bp, Artificial Sequence
  Synthetic
agcattttcutcttctttauccaggaca

SEQ ID NO: 99671 - DNA, 28 bp, Artificial Sequence
  Synthetic
cccggatatatucaatgtcttcttugct

SEQ ID NO: 99672 - DNA, 28 bp, Artificial Sequence
  Synthetic
gcatatagcucatctccttuaccagaat

SEQ ID NO: 99673 - DNA, 27 bp, Artificial Sequence
  Synthetic
tcatcaugacagcatcttcugaagaac

SEQ ID NO: 99674 - DNA, 23 bp, Artificial Sequence
  Synthetic
gacatgctctutcctgcagttuc

SEQ ID NO: 99675 - DNA, 28 bp, Artificial Sequence
  Synthetic
aattgaaggactuttctgatcccttuca

SEQ ID NO: 99676 - DNA, 27 bp, Artificial Sequence
  Synthetic
ttcattttggaccuggagaaagttcut

SEQ ID NO: 99677 - DNA, 29 bp, Artificial Sequence
  Synthetic
gttttatagttcuctccagttgucaggat

SEQ ID NO: 99678 - DNA, 28 bp, Artificial Sequence
  Synthetic
tttagtctctgcgauatgataccagcua

SEQ ID NO: 99679 - DNA, 20 bp, Artificial Sequence
  Synthetic
tccuaccctguggcaacaac

SEQ ID NO: 99680 - DNA, 24 bp, Artificial Sequence
  Synthetic
caucgcauaagagcaaagaacact

SEQ ID NO: 99681 - DNA, 21 bp, Artificial Sequence
  Synthetic
caaggccugtgtcuaaaccgt

SEQ ID NO: 99682 - DNA, 23 bp, Artificial Sequence
  Synthetic
acctggugggctcaaaguaaaat

SEQ ID NO: 99683 - DNA, 28 bp, Artificial Sequence
  Synthetic
ggtgcaagtgtuaaaatatgagccttut

SEQ ID NO: 99684 - DNA, 22 bp, Artificial Sequence
  Synthetic
gacaggaaugccccagtuaaca

SEQ ID NO: 99685 - DNA, 26 bp, Artificial Sequence
  Synthetic
caattaaacugcacagtccatcctut

SEQ ID NO: 99686 - DNA, 32 bp, Artificial Sequence
  Synthetic
ttttcctactatacaucaccttcagagatcut

SEQ ID NO: 99687 - DNA, 23 bp, Artificial Sequence
  Synthetic
accaggacaccauttccatctug

SEQ ID NO: 99688 - DNA, 27 bp, Artificial Sequence
  Synthetic
cctggugaaacaaacagttcaaaguaa

SEQ ID NO: 99689 - DNA, 21 bp, Artificial Sequence
  Synthetic
gcaggugactaacauccccaa

SEQ ID NO: 99690 - DNA, 24 bp, Artificial Sequence
  Synthetic
cagattttguagccgatggatgug

SEQ ID NO: 99691 - DNA, 28 bp, Artificial Sequence
  Synthetic
actactctactcucttatggcaggtaug

SEQ ID NO: 99692 - DNA, 24 bp, Artificial Sequence
  Synthetic
acctggccaugatggttttctuaa

SEQ ID NO: 99693 - DNA, 23 bp, Artificial Sequence
  Synthetic
gctgttucagcagccaaagtauc

SEQ ID NO: 99694 - DNA, 23 bp, Artificial Sequence
  Synthetic
caagatggaaauggtgtccuggt

SEQ ID NO: 99695 - DNA, 27 bp, Artificial Sequence
  Synthetic
agtgccaatatucagaggcataagtut

SEQ ID NO: 99696 - DNA, 25 bp, Artificial Sequence
  Synthetic
cccctaacacuacccctaucaaaaa

SEQ ID NO: 99697 - DNA, 23 bp, Artificial Sequence
  Synthetic
tgttccttcucgccttgtttuct

SEQ ID NO: 99698 - DNA, 25 bp, Artificial Sequence
  Synthetic
ggaatcuagagagggcacaaucaag

SEQ ID NO: 99699 - DNA, 23 bp, Artificial Sequence
  Synthetic
ggcacaggutgtttggttacuca

SEQ ID NO: 99700 - DNA, 25 bp, Artificial Sequence
  Synthetic
tgatcagaucgaagttugcagagac

SEQ ID NO: 99701 - DNA, 28 bp, Artificial Sequence
  Synthetic
tccaagttcgaugattgctatgctaaut

SEQ ID NO: 99702 - DNA, 23 bp, Artificial Sequence
  Synthetic
acaaggtuaccaagcaguggaat

SEQ ID NO: 99703 - DNA, 28 bp, Artificial Sequence
  Synthetic
agagaacccugagggagataaaaatcut

SEQ ID NO: 99704 - DNA, 22 bp, Artificial Sequence
  Synthetic
gctgtgtucaccatagcuggaa

SEQ ID NO: 99705 - DNA, 27 bp, Artificial Sequence
  Synthetic
cgttgtgtttuaacaaagctcatcuct

SEQ ID NO: 99706 - DNA, 27 bp, Artificial Sequence
  Synthetic
tcattuttctatcctcauccagggaga

SEQ ID NO: 99707 - DNA, 28 bp, Artificial Sequence
  Synthetic
gctaaaccatcugactttcacttctuga

SEQ ID NO: 99708 - DNA, 20 bp, Artificial Sequence
  Synthetic
gggtcaccacaguggaacua

SEQ ID NO: 99709 - DNA, 27 bp, Artificial Sequence
  Synthetic
ttttacttttucaccccagactuacca

SEQ ID NO: 99710 - DNA, 19 bp, Artificial Sequence
  Synthetic
ctcaccugccctgtcctuc

SEQ ID NO: 99711 - DNA, 20 bp, Artificial Sequence
  Synthetic
atctcugggacccucacact

SEQ ID NO: 99712 - DNA, 21 bp, Artificial Sequence
  Synthetic
acctcccaucccgtatcctut

SEQ ID NO: 99713 - DNA, 26 bp, Artificial Sequence
  Synthetic
gacctttgaggagutccaggaatuac

SEQ ID NO: 99714 - DNA, 21 bp, Artificial Sequence
  Synthetic
tuctcatgtcugaagcgcagt

SEQ ID NO: 99715 - DNA, 27 bp, Artificial Sequence
  Synthetic
gctgtttttaaugccatctctctcuct

SEQ ID NO: 99716 - DNA, 22 bp, Artificial Sequence
  Synthetic
aaactgcccuttccgatcacut

SEQ ID NO: 99717 - DNA, 28 bp, Artificial Sequence
  Synthetic
agatgtcttcctutgaagcaatggtaut

SEQ ID NO: 99718 - DNA, 29 bp, Artificial Sequence
  Synthetic
ttttgctaugggaagacattagacugaaa

SEQ ID NO: 99719 - DNA, 26 bp, Artificial Sequence
  Synthetic
gacaggatatgutgacactccaaaug

SEQ ID NO: 99720 - DNA, 27 bp, Artificial Sequence
  Synthetic
caaaccagcttcuttccagagtaaauc

SEQ ID NO: 99721 - DNA, 26 bp, Artificial Sequence
  Synthetic
agutacagggcauaaaaggaaaagca

SEQ ID NO: 99722 - DNA, 21 bp, Artificial Sequence
  Synthetic
agagcagccgcaacutatugt

SEQ ID NO: 99723 - DNA, 25 bp, Artificial Sequence
  Synthetic
gtacaccctaagauctggaccttug

SEQ ID NO: 99724 - DNA, 22 bp, Artificial Sequence
  Synthetic
ggcaaauagcccatgtccucat

SEQ ID NO: 99725 - DNA, 18 bp, Artificial Sequence
  Synthetic
gacaccagucugccgaca

SEQ ID NO: 99726 - DNA, 33 bp, Artificial Sequence
  Synthetic
attattccgttauataaaacaatccucagaagt

SEQ ID NO: 99727 - DNA, 27 bp, Artificial Sequence
  Synthetic
tgttttgctguttatgcagtttuggat

SEQ ID NO: 99728 - DNA, 28 bp, Artificial Sequence
  Synthetic
tttcctgauggtctgatattuagaggga

SEQ ID NO: 99729 - DNA, 28 bp, Artificial Sequence
  Synthetic
tgatcatattuggaatgaaccacuggaa

SEQ ID NO: 99730 - DNA, 22 bp, Artificial Sequence
  Synthetic
cttgttcccauctccctcacuc

SEQ ID NO: 99731 - DNA, 20 bp, Artificial Sequence
  Synthetic
gtagagtcugcgcagtuggt

SEQ ID NO: 99732 - DNA, 20 bp, Artificial Sequence
  Synthetic
gacgtagaaccgucgctgut

SEQ ID NO: 99733 - DNA, 21 bp, Artificial Sequence
  Synthetic
ggagttcutcaacctguccca

SEQ ID NO: 99734 - DNA, 23 bp, Artificial Sequence
  Synthetic
tgttttgttgcaucttgcagcut

SEQ ID NO: 99735 - DNA, 28 bp, Artificial Sequence
  Synthetic
gactgtgaatguagaatctccaatcuct

SEQ ID NO: 99736 - DNA, 28 bp, Artificial Sequence
  Synthetic
cgagccattctuggtaagtcacaaauat

SEQ ID NO: 99737 - DNA, 28 bp, Artificial Sequence
  Synthetic
tgtttttgttttugtctgcttcgtuaca

SEQ ID NO: 99738 - DNA, 22 bp, Artificial Sequence
  Synthetic
gggaaagtguctgaagcaaugg

SEQ ID NO: 99739 - DNA, 28 bp, Artificial Sequence
  Synthetic
tgctgaaatcaucaggaatcaucaacat

SEQ ID NO: 99740 - DNA, 21 bp, Artificial Sequence
  Synthetic
gctgatgagggucaccagtug

SEQ ID NO: 99741 - DNA, 18 bp, Artificial Sequence
  Synthetic
cggtccugcttggugagg

SEQ ID NO: 99742 - DNA, 28 bp, Artificial Sequence
  Synthetic
gcaagcgugacaacaatttttatagugt

SEQ ID NO: 99743 - DNA, 28 bp, Artificial Sequence
  Synthetic
cgagaggagaaaagguagcagttaauga

SEQ ID NO: 99744 - DNA, 27 bp, Artificial Sequence
  Synthetic
ctcaacctactutttctgacgtcucat

SEQ ID NO: 99745 - DNA, 27 bp, Artificial Sequence
  Synthetic
tcaattgctgcaucaatgtcttcttug

SEQ ID NO: 99746 - DNA, 27 bp, Artificial Sequence
  Synthetic
cugactgtcaauaagaaccaaaggact

SEQ ID NO: 99747 - DNA, 27 bp, Artificial Sequence
  Synthetic
aggaguggagctcaaattuaacacaaa

SEQ ID NO: 99748 - DNA, 23 bp, Artificial Sequence
  Synthetic
gtgtgtgttcuatggcttgtugg

SEQ ID NO: 99749 - DNA, 22 bp, Artificial Sequence
  Synthetic
ccgctggcaaugctgtaacuat

SEQ ID NO: 99750 - DNA, 33 bp, Artificial Sequence
  Synthetic
cttagctacttgauattagatattgatcagugg

SEQ ID NO: 99751 - DNA, 28 bp, Artificial Sequence
  Synthetic
tttaggtctgtttucaacgtaagtccut

SEQ ID NO: 99752 - DNA, 18 bp, Artificial Sequence
  Synthetic
ggcagggaugggagguga

SEQ ID NO: 99753 - DNA, 22 bp, Artificial Sequence
  Synthetic
gctgcccugtatcctgttaucc

SEQ ID NO: 99754 - DNA, 27 bp, Artificial Sequence
  Synthetic
accatgucctgaattcaugaagaaact

SEQ ID NO: 99755 - DNA, 23 bp, Artificial Sequence
  Synthetic
gtgttcugagtcagcugggaaaa

SEQ ID NO: 99756 - DNA, 27 bp, Artificial Sequence
  Synthetic
gcaaaauggcaacaaatgaaaaatuct

SEQ ID NO: 99757 - DNA, 27 bp, Artificial Sequence
  Synthetic
tttgtggcuggtatacaauaacaaggt

SEQ ID NO: 99758 - DNA, 25 bp, Artificial Sequence
  Synthetic
cactccaacugaatccucaccaaat

SEQ ID NO: 99759 - DNA, 27 bp, Artificial Sequence
  Synthetic
actgaagttgacuaattttccccacut

SEQ ID NO: 99760 - DNA, 25 bp, Artificial Sequence
  Synthetic
tgatgagagtauctgttgggaucca

SEQ ID NO: 99761 - DNA, 26 bp, Artificial Sequence
  Synthetic
gcgtatttcccuactcaaaacaccua

SEQ ID NO: 99762 - DNA, 28 bp, Artificial Sequence
  Synthetic
gttgaaaacagaccuaaatatgcuggat

SEQ ID NO: 99763 - DNA, 23 bp, Artificial Sequence
  Synthetic
acacacacuacacaccccaaaug

SEQ ID NO: 99764 - DNA, 20 bp, Artificial Sequence
  Synthetic
ccatttgcccguccctctuc

SEQ ID NO: 99765 - DNA, 22 bp, Artificial Sequence
  Synthetic
gccatgttgcucttgttgagut

SEQ ID NO: 99766 - DNA, 22 bp, Artificial Sequence
  Synthetic
ccactgaauggtaaccauggca

SEQ ID NO: 99767 - DNA, 24 bp, Artificial Sequence
  Synthetic
gctcatggutgttcagguaagaag

SEQ ID NO: 99768 - DNA, 23 bp, Artificial Sequence
  Synthetic
agcuaggaagcaucacaaagaag

SEQ ID NO: 99769 - DNA, 20 bp, Artificial Sequence
  Synthetic
caccagutccaucgggaagg

SEQ ID NO: 99770 - DNA, 21 bp, Artificial Sequence
  Synthetic
tucagacaccaucgccaacat

SEQ ID NO: 99771 - DNA, 22 bp, Artificial Sequence
  Synthetic
ccacuccacacctctuggaaag

SEQ ID NO: 99772 - DNA, 28 bp, Artificial Sequence
  Synthetic
tctcaagtaaaagaagugtgggattgut

SEQ ID NO: 99773 - DNA, 33 bp, Artificial Sequence
  Synthetic
ctctcatgaaacatutttaaggacaaattctuc

SEQ ID NO: 99774 - DNA, 20 bp, Artificial Sequence
  Synthetic
cagggatugagggtcaggug

SEQ ID NO: 99775 - DNA, 22 bp, Artificial Sequence
  Synthetic
cgtggcgguagtgattgaugag

SEQ ID NO: 99776 - DNA, 24 bp, Artificial Sequence
  Synthetic
ggattctctccugtctgacaccut

SEQ ID NO: 99777 - DNA, 23 bp, Artificial Sequence
  Synthetic
gtaggugaggatgaaugggacac

SEQ ID NO: 99778 - DNA, 22 bp, Artificial Sequence
  Synthetic
tctccagucaccccauagagac

SEQ ID NO: 99779 - DNA, 21 bp, Artificial Sequence
  Synthetic
gcctaggttuggcatgcttut

SEQ ID NO: 99780 - DNA, 17 bp, Artificial Sequence
  Synthetic
ggcugaccggtgacugt

SEQ ID NO: 99781 - DNA, 17 bp, Artificial Sequence
  Synthetic
tcttgcugctccgcugt

SEQ ID NO: 99782 - DNA, 20 bp, Artificial Sequence
  Synthetic
tcaccttcugctccgttgug

SEQ ID NO: 99783 - DNA, 17 bp, Artificial Sequence
  Synthetic
cagccaggugcuaccct

SEQ ID NO: 99784 - DNA, 22 bp, Artificial Sequence
  Synthetic
cccaccatcutagtgctgauct

SEQ ID NO: 99785 - DNA, 21 bp, Artificial Sequence
  Synthetic
ccttttgtguatgccgaggug

SEQ ID NO: 99786 - DNA, 21 bp, Artificial Sequence
  Synthetic
tgtgtucacctgcaucaacca

SEQ ID NO: 99787 - DNA, 22 bp, Artificial Sequence
  Synthetic
tgaggaggcugatctgtgagut

SEQ ID NO: 99788 - DNA, 25 bp, Artificial Sequence
  Synthetic
tggtgaugccgaagatgtttacuac

SEQ ID NO: 99789 - DNA, 24 bp, Artificial Sequence
  Synthetic
gtcccauctttgttuggaggaact

SEQ ID NO: 99790 - DNA, 28 bp, Artificial Sequence
  Synthetic
aatttcaagaccaaguttggaaucaacc

SEQ ID NO: 99791 - DNA, 17 bp, Artificial Sequence
  Synthetic
gggcucaggcactcuca

SEQ ID NO: 99792 - DNA, 17 bp, Artificial Sequence
  Synthetic
gtgtccuggcctcgcua

SEQ ID NO: 99793 - DNA, 20 bp, Artificial Sequence
  Synthetic
cagtaggccuccaggaugag

SEQ ID NO: 99794 - DNA, 19 bp, Artificial Sequence
  Synthetic
gggtccugggaatccuggt

SEQ ID NO: 99795 - DNA, 21 bp, Artificial Sequence
  Synthetic
cgaggauggaggaggaaugga

SEQ ID NO: 99796 - DNA, 20 bp, Artificial Sequence
  Synthetic
tcaccutccagcuccgagat

SEQ ID NO: 99797 - DNA, 19 bp, Artificial Sequence
  Synthetic
ggatucccagacgcucagg

SEQ ID NO: 99798 - DNA, 21 bp, Artificial Sequence
  Synthetic
ccaaatgactucatcggcgut

SEQ ID NO: 99799 - DNA, 22 bp, Artificial Sequence
  Synthetic
cccccataucagtagcctgtug

SEQ ID NO: 99800 - DNA, 26 bp, Artificial Sequence
  Synthetic
agaatcacaaaagaauctggcugagt

SEQ ID NO: 99801 - DNA, 25 bp, Artificial Sequence
  Synthetic
cttcttatgtccutgggattgguga

SEQ ID NO: 99802 - DNA, 28 bp, Artificial Sequence
  Synthetic
ctgaaggaacucacttccaactataucc

SEQ ID NO: 99803 - DNA, 21 bp, Artificial Sequence
  Synthetic
gtggtuaaacgaggtggcauc

SEQ ID NO: 99804 - DNA, 19 bp, Artificial Sequence
  Synthetic
tgaccccucaccugaccat

SEQ ID NO: 99805 - DNA, 18 bp, Artificial Sequence
  Synthetic
cggaaggcgccaucucac

SEQ ID NO: 99806 - DNA, 27 bp, Artificial Sequence
  Synthetic
ctgagcccutttctttcttaugagaca

SEQ ID NO: 99807 - DNA, 21 bp, Artificial Sequence
  Synthetic
tccagaccaguacgtucgaga

SEQ ID NO: 99808 - DNA, 22 bp, Artificial Sequence
  Synthetic
gggagaagautgtgugggcaaa

SEQ ID NO: 99809 - DNA, 20 bp, Artificial Sequence
  Synthetic
aacgccutctcucacacagg

SEQ ID NO: 99810 - DNA, 27 bp, Artificial Sequence
  Synthetic
tttttgccttagugtctttgtgtugag

SEQ ID NO: 99811 - DNA, 28 bp, Artificial Sequence
  Synthetic
caatgcacattgcuttagagtgtcauaa

SEQ ID NO: 99812 - DNA, 22 bp, Artificial Sequence
  Synthetic
gcggcagcagugatggattuat

SEQ ID NO: 99813 - DNA, 26 bp, Artificial Sequence
  Synthetic
tgttggttccaauttctgtgtcauct

SEQ ID NO: 99814 - DNA, 21 bp, Artificial Sequence
  Synthetic
gggagguggtagtggaauaca

SEQ ID NO: 99815 - DNA, 23 bp, Artificial Sequence
  Synthetic
agcttgaggcugaaaagtagcut

SEQ ID NO: 99816 - DNA, 24 bp, Artificial Sequence
  Synthetic
ggagctugaaaggtagttaccugt

SEQ ID NO: 99817 - DNA, 21 bp, Artificial Sequence
  Synthetic
gctcgctcucctgtgtttcuc

SEQ ID NO: 99818 - DNA, 20 bp, Artificial Sequence
  Synthetic
agggaagggcuaaagccuca

SEQ ID NO: 99819 - DNA, 23 bp, Artificial Sequence
  Synthetic
ttcccactcuccctccttctuag

SEQ ID NO: 99820 - DNA, 24 bp, Artificial Sequence
  Synthetic
ctgtgaacaagcaaugtaggtgut

SEQ ID NO: 99821 - DNA, 24 bp, Artificial Sequence
  Synthetic
gtactccgguttcttcttccugac

SEQ ID NO: 99822 - DNA, 21 bp, Artificial Sequence
  Synthetic
ccaggcccacautgggtaaua

SEQ ID NO: 99823 - DNA, 24 bp, Artificial Sequence
  Synthetic
ccctccacuactcttaactgcuca

SEQ ID NO: 99824 - DNA, 29 bp, Artificial Sequence
  Synthetic
tgctaatgttggugttcttgtctttaugt

SEQ ID NO: 99825 - DNA, 23 bp, Artificial Sequence
  Synthetic
ggttcaugggaccacactgauaa

SEQ ID NO: 99826 - DNA, 26 bp, Artificial Sequence
  Synthetic
tcgugaaattaagctucagagggaag

SEQ ID NO: 99827 - DNA, 20 bp, Artificial Sequence
  Synthetic
catagccugggtgtgccuaa

SEQ ID NO: 99828 - DNA, 26 bp, Artificial Sequence
  Synthetic
tgaccatgatgutgtcactatgtcug

SEQ ID NO: 99829 - DNA, 21 bp, Artificial Sequence
  Synthetic
cgcttggaggcugaaaaccut

SEQ ID NO: 99830 - DNA, 20 bp, Artificial Sequence
  Synthetic
gcaggcagccuacagcauat

SEQ ID NO: 99831 - DNA, 28 bp, Artificial Sequence
  Synthetic
cccccattatttcugaaccagtttcaut

SEQ ID NO: 99832 - DNA, 21 bp, Artificial Sequence
  Synthetic
gtgagaggugggaacagtguc

SEQ ID NO: 99833 - DNA, 21 bp, Artificial Sequence
  Synthetic
ggaggtccaugctggtccuaa

SEQ ID NO: 99834 - DNA, 28 bp, Artificial Sequence
  Synthetic
tgaggagtatgtguatacatgtgagcut

SEQ ID NO: 99835 - DNA, 18 bp, Artificial Sequence
  Synthetic
agctcctugcccgactug

SEQ ID NO: 99836 - DNA, 24 bp, Artificial Sequence
  Synthetic
gaagatgaugccattgtccuggat

SEQ ID NO: 99837 - DNA, 23 bp, Artificial Sequence
  Synthetic
ccttctgguataatggtguggct

SEQ ID NO: 99838 - DNA, 19 bp, Artificial Sequence
  Synthetic
ggaguaccaccccgucagt

SEQ ID NO: 99839 - DNA, 21 bp, Artificial Sequence
  Synthetic
atgatttcucgggctuccaca

SEQ ID NO: 99840 - DNA, 24 bp, Artificial Sequence
  Synthetic
gaaagaugacagcatugaaggcat

SEQ ID NO: 99841 - DNA, 28 bp, Artificial Sequence
  Synthetic
ttgcttttagactugaatcccccttuaa

SEQ ID NO: 99842 - DNA, 21 bp, Artificial Sequence
  Synthetic
cacttccuctgtccccuacct

SEQ ID NO: 99843 - DNA, 17 bp, Artificial Sequence
  Synthetic
tccugcccggcacauac

SEQ ID NO: 99844 - DNA, 23 bp, Artificial Sequence
  Synthetic
gggaggcuccagacagatatcut

SEQ ID NO: 99845 - DNA, 28 bp, Artificial Sequence
  Synthetic
actcaaggtgtcutttgtatgtgctuag

SEQ ID NO: 99846 - DNA, 24 bp, Artificial Sequence
  Synthetic
gaggatagcguatttcccttucca

SEQ ID NO: 99847 - DNA, 28 bp, Artificial Sequence
  Synthetic
ccttttgtcucatggttgttattuccag

SEQ ID NO: 99848 - DNA, 20 bp, Artificial Sequence
  Synthetic
gcccuaccccaccatttucc

SEQ ID NO: 99849 - DNA, 27 bp, Artificial Sequence
  Synthetic
gacccctatgugaaaatttacctccut

SEQ ID NO: 99850 - DNA, 22 bp, Artificial Sequence
  Synthetic
aguatacuccaccgagaaccac

SEQ ID NO: 99851 - DNA, 22 bp, Artificial Sequence
  Synthetic
tcggcaugctggtauagagaga

SEQ ID NO: 99852 - DNA, 26 bp, Artificial Sequence
  Synthetic
ctcttttcacuatgactggagucagt

SEQ ID NO: 99853 - DNA, 20 bp, Artificial Sequence
  Synthetic
aagtgggcagugcagaugat

SEQ ID NO: 99854 - DNA, 22 bp, Artificial Sequence
  Synthetic
caaaucccagctcucgaagaga

SEQ ID NO: 99855 - DNA, 28 bp, Artificial Sequence
  Synthetic
gcaacacaacagutttaacttagtgcut

SEQ ID NO: 99856 - DNA, 25 bp, Artificial Sequence
  Synthetic
ggaacacaactugttcaatgtgcut

SEQ ID NO: 99857 - DNA, 21 bp, Artificial Sequence
  Synthetic
ggctggcagcugtgattcaua

SEQ ID NO: 99858 - DNA, 25 bp, Artificial Sequence
  Synthetic
caaatccttugaggcatcugcaaaa

SEQ ID NO: 99859 - DNA, 22 bp, Artificial Sequence
  Synthetic
gtagcagggaggcutatuccag

SEQ ID NO: 99860 - DNA, 25 bp, Artificial Sequence
  Synthetic
cctgacagtauccctctcttcctut

SEQ ID NO: 99861 - DNA, 19 bp, Artificial Sequence
  Synthetic
ggtgguccagtccgucaag

SEQ ID NO: 99862 - DNA, 24 bp, Artificial Sequence
  Synthetic
cttagtggtuttctgagggucagg

SEQ ID NO: 99863 - DNA, 28 bp, Artificial Sequence
  Synthetic
aatggtggugaagagacagatgtuaaaa

SEQ ID NO: 99864 - DNA, 22 bp, Artificial Sequence
  Synthetic
ggccacaagaugagguggaaat

SEQ ID NO: 99865 - DNA, 23 bp, Artificial Sequence
  Synthetic
gtcaaccugaaggtgactgtgut

SEQ ID NO: 99866 - DNA, 19 bp, Artificial Sequence
  Synthetic
gctcagugatcgccuccaa

SEQ ID NO: 99867 - DNA, 21 bp, Artificial Sequence
  Synthetic
gatatgtggcucctgggagug

SEQ ID NO: 99868 - DNA, 21 bp, Artificial Sequence
  Synthetic
ctggtugagagcactggugat

SEQ ID NO: 99869 - DNA, 22 bp, Artificial Sequence
  Synthetic
ggtuggagaccaagagcaugag

SEQ ID NO: 99870 - DNA, 28 bp, Artificial Sequence
  Synthetic
atatttcaaaaugtaacggucccagaga

SEQ ID NO: 99871 - DNA, 25 bp, Artificial Sequence
  Synthetic
tcgcctgguacaggaacauaaaaag

SEQ ID NO: 99872 - DNA, 27 bp, Artificial Sequence
  Synthetic
tgggtatacuctggcagaaauacaaga

SEQ ID NO: 99873 - DNA, 21 bp, Artificial Sequence
  Synthetic
tcaaacaugcctgggugaaca

SEQ ID NO: 99874 - DNA, 26 bp, Artificial Sequence
  Synthetic
tgttggattttuacctagcacugcaa

SEQ ID NO: 99875 - DNA, 24 bp, Artificial Sequence
  Synthetic
gagggucaagucacagacaagaag

SEQ ID NO: 99876 - DNA, 24 bp, Artificial Sequence
  Synthetic
ccccaaaggaaacuactctcgaut

SEQ ID NO: 99877 - DNA, 19 bp, Artificial Sequence
  Synthetic
aggguccccagagcttgua

SEQ ID NO: 99878 - DNA, 24 bp, Artificial Sequence
  Synthetic
tggcagttgacuagtatcccaugt

SEQ ID NO: 99879 - DNA, 21 bp, Artificial Sequence
  Synthetic
ccaggaacauccaggugaagg

SEQ ID NO: 99880 - DNA, 22 bp, Artificial Sequence
  Synthetic
tggagguagagcccagttaugg

SEQ ID NO: 99881 - DNA, 29 bp, Artificial Sequence
  Synthetic
cccttcctgtacutaaattgccttgauat

SEQ ID NO: 99882 - DNA, 23 bp, Artificial Sequence
  Synthetic
caactctgcutaggactcuggat

SEQ ID NO: 99883 - DNA, 27 bp, Artificial Sequence
  Synthetic
tgcatgagacacutactgtgtauaagg

SEQ ID NO: 99884 - DNA, 21 bp, Artificial Sequence
  Synthetic
ggaaacacuggtgacugcaca

SEQ ID NO: 99885 - DNA, 23 bp, Artificial Sequence
  Synthetic
ggttcttcucagctgatgtugct

SEQ ID NO: 99886 - DNA, 28 bp, Artificial Sequence
  Synthetic
gctggtagtaaguagaaaggcttttgut

SEQ ID NO: 99887 - DNA, 33 bp, Artificial Sequence
  Synthetic
tgaatttttccatcaugtgtaatattatguggt

SEQ ID NO: 99888 - DNA, 26 bp, Artificial Sequence
  Synthetic
ctgccctgtuacatttcttcttctug

SEQ ID NO: 99889 - DNA, 21 bp, Artificial Sequence
  Synthetic
ctgacacagccacaaugagug

SEQ ID NO: 99890 - DNA, 21 bp, Artificial Sequence
  Synthetic
gcctctugaagcctgucacac

SEQ ID NO: 99891 - DNA, 24 bp, Artificial Sequence
  Synthetic
tctaaaggcacagugagggtttut

SEQ ID NO: 99892 - DNA, 26 bp, Artificial Sequence
  Synthetic
catatgaatucacaaggagugaggga

SEQ ID NO: 99893 - DNA, 24 bp, Artificial Sequence
  Synthetic
tgacatucagacacacaugaccaa

SEQ ID NO: 99894 - DNA, 24 bp, Artificial Sequence
  Synthetic
ggcctaucagattcaagtugcaag

SEQ ID NO: 99895 - DNA, 28 bp, Artificial Sequence
  Synthetic
cgtgttctccaugttgattctttgttut

SEQ ID NO: 99896 - DNA, 29 bp, Artificial Sequence
  Synthetic
cttttcctttcutttgacttcagaugcaa

SEQ ID NO: 99897 - DNA, 26 bp, Artificial Sequence
  Synthetic
acacattcatacugcacttcaaggua

SEQ ID NO: 99898 - DNA, 24 bp, Artificial Sequence
  Synthetic
ttttatctggucggctatgggaug

SEQ ID NO: 99899 - DNA, 24 bp, Artificial Sequence
  Synthetic
acctttgctuccaagaaaguccaa

SEQ ID NO: 99900 - DNA, 23 bp, Artificial Sequence
  Synthetic
acccgtguccaggaacctauaaa

SEQ ID NO: 99901 - DNA, 23 bp, Artificial Sequence
  Synthetic
tgucaatgcaugcaaaacacagt

SEQ ID NO: 99902 - DNA, 18 bp, Artificial Sequence
  Synthetic
caguccgcucagcaggaa

SEQ ID NO: 99903 - DNA, 17 bp, Artificial Sequence
  Synthetic
ccggtcgcuctcgtcug

SEQ ID NO: 99904 - DNA, 21 bp, Artificial Sequence
  Synthetic
caagcagcacuccccttgtua

SEQ ID NO: 99905 - DNA, 28 bp, Artificial Sequence
  Synthetic
tgttggccttguaacttttgatgtttut

SEQ ID NO: 99906 - DNA, 22 bp, Artificial Sequence
  Synthetic
gagaaccccucttuggaaagca

SEQ ID NO: 99907 - DNA, 21 bp, Artificial Sequence
  Synthetic
tggaucaagagcccaatgguc

SEQ ID NO: 99908 - DNA, 18 bp, Artificial Sequence
  Synthetic
ccgcccuccttcctggua

SEQ ID NO: 99909 - DNA, 20 bp, Artificial Sequence
  Synthetic
gtcacaccaucccctgaucc

SEQ ID NO: 99910 - DNA, 28 bp, Artificial Sequence
  Synthetic
ttcaatcatttcaugcatagaggtccut

SEQ ID NO: 99911 - DNA, 28 bp, Artificial Sequence
  Synthetic
aatccaatgggaacugttcaaacaaauc

SEQ ID NO: 99912 - DNA, 28 bp, Artificial Sequence
  Synthetic
tgcaaagctgtugcattttcagtataug

SEQ ID NO: 99913 - DNA, 27 bp, Artificial Sequence
  Synthetic
tctaaggugattttcaugggaggagat

SEQ ID NO: 99914 - DNA, 21 bp, Artificial Sequence
  Synthetic
acacgtgtcuacctcccacut

SEQ ID NO: 99915 - DNA, 29 bp, Artificial Sequence
  Synthetic
gaagcttcatatuctctttctcccttuct

SEQ ID NO: 99916 - DNA, 19 bp, Artificial Sequence
  Synthetic
cccccagaugctctaccug

SEQ ID NO: 99917 - DNA, 19 bp, Artificial Sequence
  Synthetic
agcugccctcuggagaagt

SEQ ID NO: 99918 - DNA, 25 bp, Artificial Sequence
  Synthetic
gaatgttgtctuacctgaccaggut

SEQ ID NO: 99919 - DNA, 28 bp, Artificial Sequence
  Synthetic
cacgctttttguctgtttgactagatut

SEQ ID NO: 99920 - DNA, 22 bp, Artificial Sequence
  Synthetic
gactcugatgcttguccacact

SEQ ID NO: 99921 - DNA, 23 bp, Artificial Sequence
  Synthetic
ttctcctttcaugagctcccauc

SEQ ID NO: 99922 - DNA, 20 bp, Artificial Sequence
  Synthetic
cccuttccugagaccagcaa

SEQ ID NO: 99923 - DNA, 21 bp, Artificial Sequence
  Synthetic
gagagtccaugtcacccucac

SEQ ID NO: 99924 - DNA, 20 bp, Artificial Sequence
  Synthetic
gcatcccucctggagagcua

SEQ ID NO: 99925 - DNA, 28 bp, Artificial Sequence
  Synthetic
ccaguatcaaauaaccaacaaaagcaca

SEQ ID NO: 99926 - DNA, 22 bp, Artificial Sequence
  Synthetic
cttcaacacugaccacugcaat

SEQ ID NO: 99927 - DNA, 25 bp, Artificial Sequence
  Synthetic
cttcagctutttcacccucaagaag

SEQ ID NO: 99928 - DNA, 21 bp, Artificial Sequence
  Synthetic
agaaaucctcugcggcaagac

SEQ ID NO: 99929 - DNA, 23 bp, Artificial Sequence
  Synthetic
gattttgtugacctttgcugcca

SEQ ID NO: 99930 - DNA, 23 bp, Artificial Sequence
  Synthetic
ctcagagccaccautaaggtgut

SEQ ID NO: 99931 - DNA, 22 bp, Artificial Sequence
  Synthetic
ggtaacugaaccagagugcaga

SEQ ID NO: 99932 - DNA, 22 bp, Artificial Sequence
  Synthetic
agtggccgaugactttgtacuc

SEQ ID NO: 99933 - DNA, 26 bp, Artificial Sequence
  Synthetic
cccagtgggcuatcttactaaaacut

SEQ ID NO: 99934 - DNA, 23 bp, Artificial Sequence
  Synthetic
actaccauggccaaaaaggctua

SEQ ID NO: 99935 - DNA, 20 bp, Artificial Sequence
  Synthetic
ggagcagtguggagagctug

SEQ ID NO: 99936 - DNA, 20 bp, Artificial Sequence
  Synthetic
ctcttgcccucagaggtugg

SEQ ID NO: 99937 - DNA, 25 bp, Artificial Sequence
  Synthetic
cccatttgccaucttcctcctttua

SEQ ID NO: 99938 - DNA, 21 bp, Artificial Sequence
  Synthetic
ttgcgaaugaggttguaggct

SEQ ID NO: 99939 - DNA, 27 bp, Artificial Sequence
  Synthetic
ccatgttgaccutctacctgtatgtuc

SEQ ID NO: 99940 - DNA, 27 bp, Artificial Sequence
  Synthetic
tctgaattaaatuccgcaccatacuga

SEQ ID NO: 99941 - DNA, 27 bp, Artificial Sequence
  Synthetic
aggtgctgatauggaagaatttcaugg

SEQ ID NO: 99942 - DNA, 21 bp, Artificial Sequence
  Synthetic
gtgtcctaggguctccacauc

SEQ ID NO: 99943 - DNA, 27 bp, Artificial Sequence
  Synthetic
ccttttcatcauatgttctccccucaa

SEQ ID NO: 99944 - DNA, 21 bp, Artificial Sequence
  Synthetic
catctgaugggatcccugcac

SEQ ID NO: 99945 - DNA, 23 bp, Artificial Sequence
  Synthetic
gcccctctcugaataggtcacut

SEQ ID NO: 99946 - DNA, 20 bp, Artificial Sequence
  Synthetic
cgtcatcgugcaaagtccug

SEQ ID NO: 99947 - DNA, 28 bp, Artificial Sequence
  Synthetic
ttgctctttagtcugttgagcttacaut

SEQ ID NO: 99948 - DNA, 25 bp, Artificial Sequence
  Synthetic
ggtcttctggauacacaggtaguga

SEQ ID NO: 99949 - DNA, 21 bp, Artificial Sequence
  Synthetic
ggguaacccgacacttuggac

SEQ ID NO: 99950 - DNA, 32 bp, Artificial Sequence
  Synthetic
ctaattctaaaaacuacgttttcatugcacct

SEQ ID NO: 99951 - DNA, 27 bp, Artificial Sequence
  Synthetic
ggcagtgttugaacagcattguaaaat

SEQ ID NO: 99952 - DNA, 30 bp, Artificial Sequence
  Synthetic
ctgtttgaactutcatatattcttgugcca

SEQ ID NO: 99953 - DNA, 28 bp, Artificial Sequence
  Synthetic
ctctgtcttgacuctcatcttagcuaga

SEQ ID NO: 99954 - DNA, 21 bp, Artificial Sequence
  Synthetic
tgggucaagccagtacagaua

SEQ ID NO: 99955 - DNA, 22 bp, Artificial Sequence
  Synthetic
cccagacaaucgaggttguagt

SEQ ID NO: 99956 - DNA, 28 bp, Artificial Sequence
  Synthetic
acttacagaatccaugagataggctuct

SEQ ID NO: 99957 - DNA, 28 bp, Artificial Sequence
  Synthetic
ggaatagcagacucatatggtttgauct

SEQ ID NO: 99958 - DNA, 26 bp, Artificial Sequence
  Synthetic
aaatacaacgtuggtgatttggtgug

SEQ ID NO: 99959 - DNA, 27 bp, Artificial Sequence
  Synthetic
aagcctggagaugagaaagattaagug

SEQ ID NO: 99960 - DNA, 20 bp, Artificial Sequence
  Synthetic
cacucccgacuacagggaac

SEQ ID NO: 99961 - DNA, 20 bp, Artificial Sequence
  Synthetic
agcctccuttgcggguaaac

SEQ ID NO: 99962 - DNA, 21 bp, Artificial Sequence
  Synthetic
actactugccgccagaaauga

SEQ ID NO: 99963 - DNA, 21 bp, Artificial Sequence
  Synthetic
tgaaugcccaaaggtgacugt

SEQ ID NO: 99964 - DNA, 24 bp, Artificial Sequence
  Synthetic
augctttttaatctuccccaccca

SEQ ID NO: 99965 - DNA, 20 bp, Artificial Sequence
  Synthetic
tgcccacuctctcggaucat

SEQ ID NO: 99966 - DNA, 22 bp, Artificial Sequence
  Synthetic
tgctcagggcaaucttgcaaua

SEQ ID NO: 99967 - DNA, 23 bp, Artificial Sequence
  Synthetic
gtactaugaccgaaaugccgaga

SEQ ID NO: 99968 - DNA, 19 bp, Artificial Sequence
  Synthetic
gccgcagcucgttcaugat

SEQ ID NO: 99969 - DNA, 19 bp, Artificial Sequence
  Synthetic
gcagtcacagugcccugag

SEQ ID NO: 99970 - DNA, 17 bp, Artificial Sequence
  Synthetic
tgcugggcatuggcgat

SEQ ID NO: 99971 - DNA, 19 bp, Artificial Sequence
  Synthetic
gccacagagcugtgtgcua

SEQ ID NO: 99972 - DNA, 21 bp, Artificial Sequence
  Synthetic
cagggacggagcugactttua

SEQ ID NO: 99973 - DNA, 22 bp, Artificial Sequence
  Synthetic
agugcaaaaugccaacacagag

SEQ ID NO: 99974 - DNA, 21 bp, Artificial Sequence
  Synthetic
gggagacaagcugcacttuga

SEQ ID NO: 99975 - DNA, 21 bp, Artificial Sequence
  Synthetic
ctcucccacctaucccaggag

SEQ ID NO: 99976 - DNA, 21 bp, Artificial Sequence
  Synthetic
cctgguccttctccugacact

SEQ ID NO: 99977 - DNA, 19 bp, Artificial Sequence
  Synthetic
catcggcaucgccaactuc

SEQ ID NO: 99978 - DNA, 21 bp, Artificial Sequence
  Synthetic
ctcaguggaggcgtacaucac

SEQ ID NO: 99979 - DNA, 21 bp, Artificial Sequence
  Synthetic
cagaggtgguggtgttgctua

SEQ ID NO: 99980 - DNA, 20 bp, Artificial Sequence
  Synthetic
gcatccggcucatgcauaca

SEQ ID NO: 99981 - DNA, 21 bp, Artificial Sequence
  Synthetic
gcgucagccaaagaaggacuc

SEQ ID NO: 99982 - DNA, 28 bp, Artificial Sequence
  Synthetic
tcccagaacaacucatgtgttauagaga

SEQ ID NO: 99983 - DNA, 23 bp, Artificial Sequence
  Synthetic
aagacagccugattcaggttuca

SEQ ID NO: 99984 - DNA, 24 bp, Artificial Sequence
  Synthetic
tgaaacctgaaucaggctgtctug

SEQ ID NO: 99985 - DNA, 28 bp, Artificial Sequence
  Synthetic
tttagcaaagacaauacacccatatuct

SEQ ID NO: 99986 - DNA, 21 bp, Artificial Sequence
  Synthetic
gcaacuccacacagccaauct

SEQ ID NO: 99987 - DNA, 20 bp, Artificial Sequence
  Synthetic
ccaugggcgagaagtgtguc

SEQ ID NO: 99988 - DNA, 23 bp, Artificial Sequence
  Synthetic
gtctcguttctgagtugacagca

SEQ ID NO: 99989 - DNA, 28 bp, Artificial Sequence
  Synthetic
cctgaaatgaacucagcgattctctaua

SEQ ID NO: 99990 - DNA, 19 bp, Artificial Sequence
  Synthetic
caccgtucatgacguggag

SEQ ID NO: 99991 - DNA, 21 bp, Artificial Sequence
  Synthetic
ctcauccagccctgtctucaa

SEQ ID NO: 99992 - DNA, 19 bp, Artificial Sequence
  Synthetic
gcagcccgutggugaacat

SEQ ID NO: 99993 - DNA, 21 bp, Artificial Sequence
  Synthetic
tcauaccaagcaggccttugg

SEQ ID NO: 99994 - DNA, 26 bp, Artificial Sequence
  Synthetic
gtttttctttccuttcttggcctugt

SEQ ID NO: 99995 - DNA, 26 bp, Artificial Sequence
  Synthetic
attcagacaucagatgggtttuaggg

SEQ ID NO: 99996 - DNA, 17 bp, Artificial Sequence
  Synthetic
caggccugccucacact

SEQ ID NO: 99997 - DNA, 18 bp, Artificial Sequence
  Synthetic
cgtauccagagggugcca

SEQ ID NO: 99998 - DNA, 23 bp, Artificial Sequence
  Synthetic
tcagctaagaaaugctgguccac

SEQ ID NO: 99999 - DNA, 25 bp, Artificial Sequence
  Synthetic
gagcgagugccttttattctuacct

SEQ ID NO: 100000 - DNA, 26 bp, Artificial Sequence
  Synthetic
acagtgactuaaagtagctgcttucc

SEQ ID NO: 100001 - DNA, 22 bp, Artificial Sequence
  Synthetic
gatctgagcaguggaagctgua

SEQ ID NO: 100002 - DNA, 17 bp, Artificial Sequence
  Synthetic
cgagggugggtgctguc

SEQ ID NO: 100003 - DNA, 22 bp, Artificial Sequence
  Synthetic
ttctttgcccutcctggatcuc

SEQ ID NO: 100004 - DNA, 21 bp, Artificial Sequence
  Synthetic
caaggacauagccaagcuggt

SEQ ID NO: 100005 - DNA, 28 bp, Artificial Sequence
  Synthetic
ctcagtgtagcagutctatatggttgut

SEQ ID NO: 100006 - DNA, 21 bp, Artificial Sequence
  Synthetic
ccuaagacccccagacuccag

SEQ ID NO: 100007 - DNA, 21 bp, Artificial Sequence
  Synthetic
tccccatgcaugtctctccua

SEQ ID NO: 100008 - DNA, 20 bp, Artificial Sequence
  Synthetic
gttgggagutgctuggaggt

SEQ ID NO: 100009 - DNA, 20 bp, Artificial Sequence
  Synthetic
gctcacgacccucgctatug

SEQ ID NO: 100010 - DNA, 22 bp, Artificial Sequence
  Synthetic
ggaagcucagactgtccucaga

SEQ ID NO: 100011 - DNA, 23 bp, Artificial Sequence
  Synthetic
ccugaacaagagcctgtaucact

SEQ ID NO: 100012 - DNA, 28 bp, Artificial Sequence
  Synthetic
ccttgttgaaugacatggatgaaaucat

SEQ ID NO: 100013 - DNA, 28 bp, Artificial Sequence
  Synthetic
gaacccaccagaaaaaugaaggaaatua

SEQ ID NO: 100014 - DNA, 22 bp, Artificial Sequence
  Synthetic
gtttacttatugccccgaugcc

SEQ ID NO: 100015 - DNA, 21 bp, Artificial Sequence
  Synthetic
tctccctguaaggctggtugt

SEQ ID NO: 100016 - DNA, 22 bp, Artificial Sequence
  Synthetic
cagtcttuggccgggttcttua

SEQ ID NO: 100017 - DNA, 24 bp, Artificial Sequence
  Synthetic
gccatccccaaaaguctgttagug

SEQ ID NO: 100018 - DNA, 28 bp, Artificial Sequence
  Synthetic
ctggtttttautatgtggguaagaagca

SEQ ID NO: 100019 - DNA, 24 bp, Artificial Sequence
  Synthetic
gccaccaucacaacaaaagcatut

SEQ ID NO: 100020 - DNA, 23 bp, Artificial Sequence
  Synthetic
ctgaaggucgcaatgatgatguc

SEQ ID NO: 100021 - DNA, 28 bp, Artificial Sequence
  Synthetic
gcctacttctttuaagcacagagtttut

SEQ ID NO: 100022 - DNA, 25 bp, Artificial Sequence
  Synthetic
tgtgttcattugacctgacagtugt

SEQ ID NO: 100023 - DNA, 23 bp, Artificial Sequence
  Synthetic
gagguggcaaaatgaagucgaag

SEQ ID NO: 100024 - DNA, 23 bp, Artificial Sequence
  Synthetic
gagatctcugaagttccuggagt

SEQ ID NO: 100025 - DNA, 25 bp, Artificial Sequence
  Synthetic
tctttttgcccutttcctctgauga

SEQ ID NO: 100026 - DNA, 21 bp, Artificial Sequence
  Synthetic
attgugacgtgtguggcaaac

SEQ ID NO: 100027 - DNA, 21 bp, Artificial Sequence
  Synthetic
gtcttggugcttcugaccgat

SEQ ID NO: 100028 - DNA, 27 bp, Artificial Sequence
  Synthetic
aacatttcctcagaguagactcctgua

SEQ ID NO: 100029 - DNA, 29 bp, Artificial Sequence
  Synthetic
acccacttactucttacactttacucact

SEQ ID NO: 100030 - DNA, 19 bp, Artificial Sequence
  Synthetic
gacggctucccttgtggua

SEQ ID NO: 100031 - DNA, 19 bp, Artificial Sequence
  Synthetic
cutctggccuccgggaaag

SEQ ID NO: 100032 - DNA, 18 bp, Artificial Sequence
  Synthetic
cugcggagcttuccacct

SEQ ID NO: 100033 - DNA, 18 bp, Artificial Sequence
  Synthetic
cagcucagggcaggacut

SEQ ID NO: 100034 - DNA, 23 bp, Artificial Sequence
  Synthetic
cctactgctgugagcatgactua

SEQ ID NO: 100035 - DNA, 17 bp, Artificial Sequence
  Synthetic
cccuggauccggccaag

SEQ ID NO: 100036 - DNA, 26 bp, Artificial Sequence
  Synthetic
gcaaacaugatcgtugaaagaaagca

SEQ ID NO: 100037 - DNA, 21 bp, Artificial Sequence
  Synthetic
ttgtctgtucagccagctcuc

SEQ ID NO: 100038 - DNA, 19 bp, Artificial Sequence
  Synthetic
gcgacgugctggtagugag

SEQ ID NO: 100039 - DNA, 21 bp, Artificial Sequence
  Synthetic
ccccaggaacuccacauaggt

SEQ ID NO: 100040 - DNA, 17 bp, Artificial Sequence
  Synthetic
cggcagcgaggugacut

SEQ ID NO: 100041 - DNA, 17 bp, Artificial Sequence
  Synthetic
ccctgcutgctgcucac

SEQ ID NO: 100042 - DNA, 22 bp, Artificial Sequence
  Synthetic
gaaacagcugccaacattgcua

SEQ ID NO: 100043 - DNA, 20 bp, Artificial Sequence
  Synthetic
aaacuccgggcagcactauc

SEQ ID NO: 100044 - DNA, 21 bp, Artificial Sequence
  Synthetic
ctctagaccucgacgacccut

SEQ ID NO: 100045 - DNA, 20 bp, Artificial Sequence
  Synthetic
gcagaacutgcggucacaca

SEQ ID NO: 100046 - DNA, 20 bp, Artificial Sequence
  Synthetic
cagucagaggacgagtgcut

SEQ ID NO: 100047 - DNA, 18 bp, Artificial Sequence
  Synthetic
aucaggagccugccacac

SEQ ID NO: 100048 - DNA, 22 bp, Artificial Sequence
  Synthetic
gaactugaccccagguggaaaa

SEQ ID NO: 100049 - DNA, 27 bp, Artificial Sequence
  Synthetic
aaggaggaaaatuaagcagtgaaguct

SEQ ID NO: 100050 - DNA, 17 bp, Artificial Sequence
  Synthetic
cgctcccaggucgcaua

SEQ ID NO: 100051 - DNA, 18 bp, Artificial Sequence
  Synthetic
catttgcgcuggctggug

SEQ ID NO: 100052 - DNA, 19 bp, Artificial Sequence
  Synthetic
aggagucccaagcctucca

SEQ ID NO: 100053 - DNA, 19 bp, Artificial Sequence
  Synthetic
ggtgcauggcgtagagcut

SEQ ID NO: 100054 - DNA, 29 bp, Artificial Sequence
  Synthetic
gagatgggtgacuacaaaacatacttuct

SEQ ID NO: 100055 - DNA, 26 bp, Artificial Sequence
  Synthetic
gatatgctccggcuagttacaatuct

SEQ ID NO: 100056 - DNA, 20 bp, Artificial Sequence
  Synthetic
ctcatccccaucgagtucgt

SEQ ID NO: 100057 - DNA, 19 bp, Artificial Sequence
  Synthetic
cagccgguggtagaagucc

SEQ ID NO: 100058 - DNA, 20 bp, Artificial Sequence
  Synthetic
ggcaacguggagcagaugaa

SEQ ID NO: 100059 - DNA, 20 bp, Artificial Sequence
  Synthetic
caguccagagtcugcaccac

SEQ ID NO: 100060 - DNA, 22 bp, Artificial Sequence
  Synthetic
gctttgggauagtctgtgcuca

SEQ ID NO: 100061 - DNA, 27 bp, Artificial Sequence
  Synthetic
gctttatcaccuaacagcacgatguat

SEQ ID NO: 100062 - DNA, 21 bp, Artificial Sequence
  Synthetic
cgacgaugagctggagtucac

SEQ ID NO: 100063 - DNA, 25 bp, Artificial Sequence
  Synthetic
gaatgacgaugaagatgcagttgut

SEQ ID NO: 100064 - DNA, 25 bp, Artificial Sequence
  Synthetic
gtacgagauctacgacaaguaccag

SEQ ID NO: 100065 - DNA, 23 bp, Artificial Sequence
  Synthetic
tcagtgacgucatagccaaucag

SEQ ID NO: 100066 - DNA, 23 bp, Artificial Sequence
  Synthetic
agtacctguggaagaagatugcc

SEQ ID NO: 100067 - DNA, 22 bp, Artificial Sequence
  Synthetic
tcgctttggcuttcgggaauat

SEQ ID NO: 100068 - DNA, 21 bp, Artificial Sequence
  Synthetic
gggacaggaguagtctuccaa

SEQ ID NO: 100069 - DNA, 19 bp, Artificial Sequence
  Synthetic
auaacgcgucggaaaccct

SEQ ID NO: 100070 - DNA, 21 bp, Artificial Sequence
  Synthetic
ctgggccaccaauctcaucaa

SEQ ID NO: 100071 - DNA, 28 bp, Artificial Sequence
  Synthetic
ccattgtttcugtaagtcatguggaaaa

SEQ ID NO: 100072 - DNA, 22 bp, Artificial Sequence
  Synthetic
gccaccutctgattugggaagt

SEQ ID NO: 100073 - DNA, 28 bp, Artificial Sequence
  Synthetic
gagctactgcautttgactgagatttut

SEQ ID NO: 100074 - DNA, 20 bp, Artificial Sequence
  Synthetic
gagugtgagggucccagaga

SEQ ID NO: 100075 - DNA, 18 bp, Artificial Sequence
  Synthetic
cucgggcaggcagaugag

SEQ ID NO: 100076 - DNA, 24 bp, Artificial Sequence
  Synthetic
atgataggccucagggagaaauct

SEQ ID NO: 100077 - DNA, 20 bp, Artificial Sequence
  Synthetic
gctcaccccutggagcauat

SEQ ID NO: 100078 - DNA, 22 bp, Artificial Sequence
  Synthetic
gcaguaaccccaacacggauag

SEQ ID NO: 100079 - DNA, 20 bp, Artificial Sequence
  Synthetic
tcugaagagcuccaggagca

SEQ ID NO: 100080 - DNA, 23 bp, Artificial Sequence
  Synthetic
gagactgacucccatctcagcua

SEQ ID NO: 100081 - DNA, 17 bp, Artificial Sequence
  Synthetic
tggugagccgcaucgac

SEQ ID NO: 100082 - DNA, 24 bp, Artificial Sequence
  Synthetic
tggccaagaagaaauctctgaugg

SEQ ID NO: 100083 - DNA, 20 bp, Artificial Sequence
  Synthetic
cgtgtccaguaccacgugaa

SEQ ID NO: 100084 - DNA, 20 bp, Artificial Sequence
  Synthetic
ctgcttuccaccacctcgua

SEQ ID NO: 100085 - DNA, 21 bp, Artificial Sequence
  Synthetic
gtcatgacccuggaccugaag

SEQ ID NO: 100086 - DNA, 21 bp, Artificial Sequence
  Synthetic
ccgggtguacctgattcugga

SEQ ID NO: 100087 - DNA, 22 bp, Artificial Sequence
  Synthetic
cagcccacaguaaacucagaga

SEQ ID NO: 100088 - DNA, 18 bp, Artificial Sequence
  Synthetic
ggcuggcaggtgagugac

SEQ ID NO: 100089 - DNA, 19 bp, Artificial Sequence
  Synthetic
gcttgccacucagcatcuc

SEQ ID NO: 100090 - DNA, 21 bp, Artificial Sequence
  Synthetic
tggtacgugggcaagaucaac

SEQ ID NO: 100091 - DNA, 22 bp, Artificial Sequence
  Synthetic
gcattcaaugagagctcuggga

SEQ ID NO: 100092 - DNA, 21 bp, Artificial Sequence
  Synthetic
acugccucaagaacggagaag

SEQ ID NO: 100093 - DNA, 20 bp, Artificial Sequence
  Synthetic
cacggugaacacactcucgt

SEQ ID NO: 100094 - DNA, 27 bp, Artificial Sequence
  Synthetic
cagtatttcugagatgccauaagagca

SEQ ID NO: 100095 - DNA, 28 bp, Artificial Sequence
  Synthetic
ctggacagttautcgtgtctctuacaat

SEQ ID NO: 100096 - DNA, 22 bp, Artificial Sequence
  Synthetic
ccctucacaaggaggagtcuca

SEQ ID NO: 100097 - DNA, 18 bp, Artificial Sequence
  Synthetic
gaacauccgccugcgaga

SEQ ID NO: 100098 - DNA, 20 bp, Artificial Sequence
  Synthetic
gtcttctccugagccagguc

SEQ ID NO: 100099 - DNA, 23 bp, Artificial Sequence
  Synthetic
acttcccucacccatctctaugt

SEQ ID NO: 100100 - DNA, 24 bp, Artificial Sequence
  Synthetic
gctcaaaagcuctctgttcttugg

SEQ ID NO: 100101 - DNA, 28 bp, Artificial Sequence
  Synthetic
cttctgcagtacuctattcaaacagcua

SEQ ID NO: 100102 - DNA, 28 bp, Artificial Sequence
  Synthetic
atcaccagagguttttcatatcgaaugt

SEQ ID NO: 100103 - DNA, 28 bp, Artificial Sequence
  Synthetic
gagaacagguaaccagtttaatcaccua

SEQ ID NO: 100104 - DNA, 22 bp, Artificial Sequence
  Synthetic
ttgatgtcuttgcctaugcaca

SEQ ID NO: 100105 - DNA, 25 bp, Artificial Sequence
  Synthetic
gctctgataugccccatcttcaaut

SEQ ID NO: 100106 - DNA, 26 bp, Artificial Sequence
  Synthetic
ttttcgtaatguccttagagctgguc

SEQ ID NO: 100107 - DNA, 24 bp, Artificial Sequence
  Synthetic
ttccacagutctctgaaugccaat

SEQ ID NO: 100108 - DNA, 28 bp, Artificial Sequence
  Synthetic
cttcgaatggtuttaaatgtgatggugt

SEQ ID NO: 100109 - DNA, 27 bp, Artificial Sequence
  Synthetic
tcttgaaaccaacaguaagtcatcugt

SEQ ID NO: 100110 - DNA, 22 bp, Artificial Sequence
  Synthetic
gtattccugacggttcatugcc

SEQ ID NO: 100111 - DNA, 23 bp, Artificial Sequence
  Synthetic
gcacattcuctgggaacuaagga

SEQ ID NO: 100112 - DNA, 25 bp, Artificial Sequence
  Synthetic
gtgagtaggagugtgtgcatatcut

SEQ ID NO: 100113 - DNA, 27 bp, Artificial Sequence
  Synthetic
attcactctttgautgcagagttcuca

SEQ ID NO: 100114 - DNA, 23 bp, Artificial Sequence
  Synthetic
gtcccatcucgcacaaataguga

SEQ ID NO: 100115 - DNA, 29 bp, Artificial Sequence
  Synthetic
tctgacagatutgttattgaaguggacat

SEQ ID NO: 100116 - DNA, 28 bp, Artificial Sequence
  Synthetic
aggtgatagcutttcttcaattctucca

SEQ ID NO: 100117 - DNA, 26 bp, Artificial Sequence
  Synthetic
tgggcacctacuctacaattctgaua

SEQ ID NO: 100118 - DNA, 24 bp, Artificial Sequence
  Synthetic
attggcatucagagaactguggaa

SEQ ID NO: 100119 - DNA, 28 bp, Artificial Sequence
  Synthetic
acaagtatttugaagaccatcaagucca

SEQ ID NO: 100120 - DNA, 28 bp, Artificial Sequence
  Synthetic
tttattcctguaggtgtgaaauccagac

SEQ ID NO: 100121 - DNA, 25 bp, Artificial Sequence
  Synthetic
gccaccagcutctgtaaacttgaua

SEQ ID NO: 100122 - DNA, 24 bp, Artificial Sequence
  Synthetic
tcagcacagcacauctgaattuct

SEQ ID NO: 100123 - DNA, 28 bp, Artificial Sequence
  Synthetic
gcagattcttcuaaaccaacaaguacca

SEQ ID NO: 100124 - DNA, 24 bp, Artificial Sequence
  Synthetic
cccacattcgaugacctctgttut

SEQ ID NO: 100125 - DNA, 27 bp, Artificial Sequence
  Synthetic
gataccaccatutcactatcacagugt

SEQ ID NO: 100126 - DNA, 26 bp, Artificial Sequence
  Synthetic
agttcaaactucttgggctuagaaca

SEQ ID NO: 100127 - DNA, 26 bp, Artificial Sequence
  Synthetic
attgaagatgccautgaaagcaacuc

SEQ ID NO: 100128 - DNA, 23 bp, Artificial Sequence
  Synthetic
ctcgaatgcacutctttgctugt

SEQ ID NO: 100129 - DNA, 23 bp, Artificial Sequence
  Synthetic
tuggagucaaagacaaaccccat

SEQ ID NO: 100130 - DNA, 20 bp, Artificial Sequence
  Synthetic
cctgggagccutttcuggac

SEQ ID NO: 100131 - DNA, 28 bp, Artificial Sequence
  Synthetic
gattgtgagccacautaagttcttucaa

SEQ ID NO: 100132 - DNA, 29 bp, Artificial Sequence
  Synthetic
cagcctggatgaugatacagatgaauaat

SEQ ID NO: 100133 - DNA, 22 bp, Artificial Sequence
  Synthetic
ctatcgagguggcaaagtguca

SEQ ID NO: 100134 - DNA, 27 bp, Artificial Sequence
  Synthetic
aagccttcttguttccaattccuaaga

SEQ ID NO: 100135 - DNA, 25 bp, Artificial Sequence
  Synthetic
cggaatatccugaaagggcagaaua

SEQ ID NO: 100136 - DNA, 23 bp, Artificial Sequence
  Synthetic
gagctttgcutccttggugaaaa

SEQ ID NO: 100137 - DNA, 27 bp, Artificial Sequence
  Synthetic
caaagaacagagagcutttgagctuaa

SEQ ID NO: 100138 - DNA, 27 bp, Artificial Sequence
  Synthetic
caggatatuccggaccacattttcuat

SEQ ID NO: 100139 - DNA, 23 bp, Artificial Sequence
  Synthetic
tgccgtaauacagcaactctcuc

SEQ ID NO: 100140 - DNA, 26 bp, Artificial Sequence
  Synthetic
ccttgacauttctcatacucacacca

SEQ ID NO: 100141 - DNA, 23 bp, Artificial Sequence
  Synthetic
gaggtccaggaaggucaagttuc

SEQ ID NO: 100142 - DNA, 24 bp, Artificial Sequence
  Synthetic
ttccccautggacatcucaaaact

SEQ ID NO: 100143 - DNA, 28 bp, Artificial Sequence
  Synthetic
cgcaagtctgugcaataaatacttugaa

SEQ ID NO: 100144 - DNA, 22 bp, Artificial Sequence
  Synthetic
gcagtcgtgcuggtatcatcut

SEQ ID NO: 100145 - DNA, 21 bp, Artificial Sequence
  Synthetic
catccagcagggcutttcuga

SEQ ID NO: 100146 - DNA, 25 bp, Artificial Sequence
  Synthetic
gtgactttgaugccaacaatttucc

SEQ ID NO: 100147 - DNA, 27 bp, Artificial Sequence
  Synthetic
gaattcaaagccutcacaaauacagca

SEQ ID NO: 100148 - DNA, 22 bp, Artificial Sequence
  Synthetic
tuggaccttuccagcaacaaga

SEQ ID NO: 100149 - DNA, 26 bp, Artificial Sequence
  Synthetic
gcacctggtuggataaagttcauagg

SEQ ID NO: 100150 - DNA, 25 bp, Artificial Sequence
  Synthetic
tctctcttuagacctgtcccugaac

SEQ ID NO: 100151 - DNA, 22 bp, Artificial Sequence
  Synthetic
ccagaaccaaacgauggactuc

SEQ ID NO: 100152 - DNA, 21 bp, Artificial Sequence
  Synthetic
ggcacaucttcuggagacgac

SEQ ID NO: 100153 - DNA, 23 bp, Artificial Sequence
  Synthetic
gcaagaaatgccucaggaggtut

SEQ ID NO: 100154 - DNA, 26 bp, Artificial Sequence
  Synthetic
ccttccagataucttcacagagcuga

SEQ ID NO: 100155 - DNA, 28 bp, Artificial Sequence
  Synthetic
ggagttcagacacutataaggaaacgua

SEQ ID NO: 100156 - DNA, 25 bp, Artificial Sequence
  Synthetic
gccacaacaacutcttttcatugga

SEQ ID NO: 100157 - DNA, 29 bp, Artificial Sequence
  Synthetic
aagtacaagcaaagucattctgaguaaga

SEQ ID NO: 100158 - DNA, 17 bp, Artificial Sequence
  Synthetic
ggcctuggctgcaacuc

SEQ ID NO: 100159 - DNA, 25 bp, Artificial Sequence
  Synthetic
tgaaaccagcuatgtgaaagtccut

SEQ ID NO: 100160 - DNA, 21 bp, Artificial Sequence
  Synthetic
agcaggccaucauaggagaga

SEQ ID NO: 100161 - DNA, 25 bp, Artificial Sequence
  Synthetic
acaagcactgtuttcctgagatcut

SEQ ID NO: 100162 - DNA, 25 bp, Artificial Sequence
  Synthetic
ctcttgcacugaccttgatcacaua
